United States Patent Application Publication US 2023/0416942 A1 - sequence listing, part 3

SEQ ID NO: 24394 - protein, 119 aa, Artificial Sequence
  Chemically Synthesized
QVQLQESGGGLVQAGGSLRLSCAASGNISYRLEMGWYRQAPGKERELVASITKGGTTNYADSVKGRFTISRDNAKNTVYLQMNSLKPEDTAVYYCAADSDASWRAVHYWGQGTQVTVSS

SEQ ID NO: 24395 - protein, 122 aa, Artificial Sequence
  Chemically Synthesized
QVQLQESGGGLVQAGGSLRLSCAASGSISGWDLMGWYRQAPGKERELVAAISLGTTTYYADSVKGRFTISRDNAKNTVYLQMNSLKPEDTAVYYCAVRRYGQPGHLYDHVYWGQGTQVTVSS

SEQ ID NO: 24396 - protein, 117 aa, Artificial Sequence
  Chemically Synthesized
QVQLQESGGGLVQAGGSLRLSCAASGYIFDYPYMGWYRQAPGKERELVASIADGTNTYADSVKGRFTISRDNAKNTVYLQMNSLKPEDTAVYYCAAFDSDDDWHVYWGQGTQVTVSS

SEQ ID NO: 24397 - protein, 117 aa, Artificial Sequence
  Chemically Synthesized
QVQLQESGGGLVQAGGSLRLSCAASGNIFGSYRMGWYRQAPGKEREFVATIGSVLIYADSVKGRFTISRDNAKNTVYLQMNSLKPEDTAVYYCAAETGDRSYRFYYWGQGTQVTVSS

SEQ ID NO: 24398 - protein, 124 aa, Artificial Sequence
  Chemically Synthesized
QVQLQESGGGLVQAGGSLRLSCAASGTISYRDYMGWYRQAPGKERELVAGINKGSITNYADSVKGRFTISRDNAKNTVYLQMNSLKPEDTAVYYCAAVYYGGPYYGADDRHGYWGQGTQVTVSS

SEQ ID NO: 24399 - protein, 120 aa, Artificial Sequence
  Chemically Synthesized
QVQLQESGGGLVQAGGSLRLSCAASGTIFQAGLMGWYRQAPGKERELVAGIDNGTSTYYADSVKGRFTISRDNAKNTVYLQMNSLKPEDTAVYYCAVSYLHSRYVDFPYWGQGTQVTVSS

SEQ ID NO: 24400 - protein, 122 aa, Artificial Sequence
  Chemically Synthesized
QVQLQESGGGLVQAGGSLRLSCAASGTISTDRDMGWYRQAPGKERELVAGISDGASTYYADSVKGRFTISRDNAKNTVYLQMNSLKPEDTAVYYCAAGYRGYAYEVVDYSYWGQGTQVTVSS

SEQ ID NO: 24401 - protein, 121 aa, Artificial Sequence
  Chemically Synthesized
QVQLQESGGGLVQAGGSLRLSCAASGTIFHYTWMGWYRQAPGKERELLPVLVTVLVPYADSVKGRFTISRDNAKNTVYLQMNSLKPEDTAVYYCAAFFLATRYEPAYFTYWGQGTQVTVSS

SEQ ID NO: 24402 - protein, 122 aa, Artificial Sequence
  Chemically Synthesized
QVQLQESGGGLVQAGGSLRLSCAASGTISNNDSMGWYRQAPGKEREFVAAINDGTNTYYADSVKGRFTISRDNAKNTVYLQMNSLKPEDTAVYYCAVLWQSAVYVPYTFGYWGQGTQVTVSS

SEQ ID NO: 24403 - protein, 126 aa, Artificial Sequence
  Chemically Synthesized
QVQLQESGGGLVQAGGSLRLSCAASGTISHSYDMGWYRQAPGKEREFVAAIASGGTTYYADSVKGRFTISRDNAKNTVYLQMNSLKPEDTAVYYCAVEQPYVIWTTDTNLYQFFYWGQGTQVTVSS

SEQ ID NO: 24404 - protein, 117 aa, Artificial Sequence
  Chemically Synthesized
QVQLQESGGGLVQAGGSLRLSCAASGTISPEDAMGWYRQAPGKEREFAGIDFGTTTYYADSVKGRFTISRDNAKNTVYLQMNSLKPEDTAVYYCAAYLPVLLYHDYWGQGTQVTVSS

SEQ ID NO: 24405 - protein, 122 aa, Artificial Sequence
  Chemically Synthesized
QVQLQESGGGLVQAGGSLRLSCAASGNISQPNYMGWYRQAPGKEREFVAAITVGTTTNYADSVKGRFTISRDNAKNTVYLQMNSLKPEDTAVYYCAATPYDRWAEEGDYSYWGQGTQVTVSS

SEQ ID NO: 24406 - protein, 121 aa, Artificial Sequence
  Chemically Synthesized
QVQLQESGGGLVQAGGSLRLSCAASGTISRDVMGWYRQAPGKERELVATIGDGASTYYADSVKGRFTISRDNAKNTVYLQMNSLKPEDTAVYYCAVRRIDQAFYNDGFLYWGQGTQVTVSS

SEQ ID NO: 24407 - protein, 122 aa, Artificial Sequence
  Chemically Synthesized
QVQLQESGGGLVQAGGSLRLSCAASGTISYYYVMGWYRQAPGKEREFVAAIGDGAITYYADSVKGRFTISRDNAKNTVYLQMNSLKPEDTAVYYCAVVVVPSLQTYATYYYWGQGTQVTVSS

SEQ ID NO: 24408 - protein, 124 aa, Artificial Sequence
  Chemically Synthesized
QVQLQESGGGLVQAGGSLRLSCAASGSISVLMGWYRQAPGKERELVASIAHGASTNYADSVKGRFTISRDNAKNTVYLQMNSLKPEDTAVYYCAAGLAADTYFYDDYLPPYTYWGQGTQVTVSS

SEQ ID NO: 24409 - protein, 118 aa, Artificial Sequence
  Chemically Synthesized
QVQLQESGGGLVQAGGSLRLSCAASGNISAKVLMGWYRQAPGKEREFVAAIDRGTTTNYADSVKGRFTISRDNAKNTVYLQMNSLKPEDTAVYYCAAGGFYRWPYPYWGQGTQVTVSS

SEQ ID NO: 24410 - protein, 126 aa, Artificial Sequence
  Chemically Synthesized
QVQLQESGGGLVQAGGSLRLSCAASGSISVTGYMGWYRQAPGKERELVAAIAQGGNTYYADSVKGRFTISRDNAKNTVYLQMNSLKPEDTAVYYCAAYDGDWYGYGAPYPYLFSYWGQGTQVTVSS

SEQ ID NO: 24411 - protein, 118 aa, Artificial Sequence
  Chemically Synthesized
QVQLQESGGGLVQAGGSLRLSCAASGSISPDVVMGWYRQAPGKEREFVAAISDGTSTNYADSVKGRFTISRDNAKNTVYLQMNSLKPEDTAVYYCAVRYDHYADYDYWGQGTQVTVSS

SEQ ID NO: 24412 - protein, 121 aa, Artificial Sequence
  Chemically Synthesized
QVQLQESGGGLVQAGGSLRLSCAASGYIFYGYDMGWYRQAPGKERELVASITQGGSTNYADSVKGRFTISRDNAKNTVYLQMNSLKPEDTAVYYCAALSKAYVQGFADHYWGQGTQVTVSS

SEQ ID NO: 24413 - protein, 118 aa, Artificial Sequence
  Chemically Synthesized
QVQLQESGGGLVQAGGSLRLSCAASGTIFRGTRMGWYRQAPGKEREFVAAITSGAYYQYADSVKGRFTISRDNAKNTVYLQMNSLKPEDTAVYYCAVVKDDSQIFSYWGQGTQVTVSS

SEQ ID NO: 24414 - protein, 126 aa, Artificial Sequence
  Chemically Synthesized
QVQLQESGGGLVQAGGSLRLSCAASGNISEWRAMGWYRQAPGKEREFVAGISLGTSTYYADSVKGRFTISRDNAKNTVYLQMNSLKPEDTAVYYCAVGGYDKRYRAASPPNFLYYWGQGTQVTVSS

SEQ ID NO: 24415 - protein, 116 aa, Artificial Sequence
  Chemically Synthesized
QVQLQESGGGLVQAGGSLRLSCAASGSILVTTMGWYRQAPGKERELLPLLLLVVLPYADSVKGRFTISRDNAKNTVYLQMNSLKPEDTAVYYCAVGDLTPSFHAYWGQGTQVTVSS

SEQ ID NO: 24416 - protein, 118 aa, Artificial Sequence
  Chemically Synthesized
QVQLQESGGGLVQAGGSLRLSCAASGSISRDFFMGWYRQAPGKEREFVATISSGTITNYADSVKGRFTISRDNAKNTVYLQMNSLKPEDTAVYYCAVGTHPQTYHGYWGQGTQVTVSS

SEQ ID NO: 24417 - protein, 126 aa, Artificial Sequence
  Chemically Synthesized
QVQLQESGGGLVQAGGSLRLSCAASGYIFTPYEMGWYRQAPGKEREFVASISDGATTYYADSVKGRFTISRDNAKNTVYLQMNSLKPEDTAVYYCAVYTRWFADRDRGADGLLGYWGQGTQVTVSS

SEQ ID NO: 24418 - protein, 118 aa, Artificial Sequence
  Chemically Synthesized
QVQLQESGGGLVQAGGSLRLSCAASGTIFLPYIMGWYRQAPGKERELVAGISAGGTTYYADSVKGRFTISRDNAKNTVYLQMNSLKPEDTAVYYCAVAFAAAWLHYYWGQGTQVTVSS

SEQ ID NO: 24419 - protein, 122 aa, Artificial Sequence
  Chemically Synthesized
QVQLQESGGGLVQAGGSLRLSCAASGYIFPSRTMGWYRQAPGKEREFVAGIDTGSTTYYADSVKGRFTISRDNAKNTVYLQMNSLKPEDTAVYYCAVEGDSYYQSGARHRYWGQGTQVTVSS

SEQ ID NO: 24420 - protein, 118 aa, Artificial Sequence
  Chemically Synthesized
QVQLQESGGGLVQAGGSLRLSCAASGTISRLDVMGWYRQAPGKERELVATITNGYADSVKGRFTISRDNAKNTVYLQMNSLKPEDTAVYYCAVDDDVTPTHYYEYYYWGQGTQVTVSS

SEQ ID NO: 24421 - protein, 117 aa, Artificial Sequence
  Chemically Synthesized
QVQLQESGGGLVQAGGSLRLSCAASGYIFYDYTMGWYRQAPGKEREFVAAIAFGASTYYADSVKGRFTISRDNAKNTVYLQMNSLKPEDTAVYYCAARGEGFTAIYWGQGTQVTVSS

SEQ ID NO: 24422 - protein, 117 aa, Artificial Sequence
  Chemically Synthesized
QVQLQESGGGLVQAGGSLRLSCAASGYIFSRSMGWYRQAPGKEREFVASIDDGTTTNYADSVKGRFTISRDNAKNTVYLQMNSLKPEDTAVYYCAVNQLALYDHGYWGQGTQVTVSS

SEQ ID NO: 24423 - protein, 118 aa, Artificial Sequence
  Chemically Synthesized
QVQLQESGGGLVQAGGSLRLSCAASGTISQDVPMGWYRQAPGKEREFVAGITTGSSTYYADSVKGRFTISRDNAKNTVYLQMNSLKPEDTAVYYCAVFVVNRRYYTYWGQGTQVTVSS

SEQ ID NO: 24424 - protein, 118 aa, Artificial Sequence
  Chemically Synthesized
QVQLQESGGGLVQAGGSLRLSCAASGYISFFDYMGWYRQAPGKEREFVAAIAGGSTTNYADSVKGRFTISRDNAKNTVYLQMNSLKPEDTAVYYCAVIVKHRKWHSYWGQGTQVTVSS

SEQ ID NO: 24425 - protein, 122 aa, Artificial Sequence
  Chemically Synthesized
QVQLQESGGGLVQAGGSLRLSCAASGNIFYLYLMGWYRQAPGKEREFVATIDRGSTTNYADSVKGRFTISRDNAKNTVYLQMNSLKPEDTAVYYCAARTRRWYGPARPYRYWGQGTQVTVSS

SEQ ID NO: 24426 - protein, 126 aa, Artificial Sequence
  Chemically Synthesized
QVQLQESGGGLVQAGGSLRLSCAASGSIFYFYLMGWYRQAPGKEREFVATITYGSNTNYADSVKGRFTISRDNAKNTVYLQMNSLKPEDTAVYYCAADDTRDWYPAVDYDYTHWYWGQGTQVTVSS

SEQ ID NO: 24427 - protein, 117 aa, Artificial Sequence
  Chemically Synthesized
QVQLQESGGGLVQAGGSLRLSCAASGTISDTSMGWYRQAPGKERELVAAIDYGSNTYYADSVKGRFTISRDNAKNTVYLQMNSLKPEDTAVYYCAATRGKHSGHSYWGQGTQVTVSS

SEQ ID NO: 24428 - protein, 118 aa, Artificial Sequence
  Chemically Synthesized
QVQLQESGGGLVQAGGSLRLSCAASGNIFYSYLMGWYRQAPGKERELVAGISYGGITYYADSVKGRFTISRDNAKNTVYLQMNSLKPEDTAVYYCAAGLATGRYLIYWGQGTQVTVSS

SEQ ID NO: 24429 - protein, 126 aa, Artificial Sequence
  Chemically Synthesized
QVQLQESGGGLVQAGGSLRLSCAASGYISYPDYMGWYRQAPGKERELVAGIAYGTSTNYADSVKGRFTISRDNAKNTVYLQMNSLKPEDTAVYYCAVYSSWGRGPSTYQKWPHRYWGQGTQVTVSS

SEQ ID NO: 24430 - protein, 118 aa, Artificial Sequence
  Chemically Synthesized
QVQLQESGGGLVQAGGSLRLSCAASGTISQYQYMGWYRQAPGKERELVAGISYGATTYYADSVKGRFTISRDNAKNTVYLQMNSLKPEDTAVYYCAVGYDDPYLHYYWGQGTQVTVSS

SEQ ID NO: 24431 - protein, 121 aa, Artificial Sequence
  Chemically Synthesized
QVQLQESGGGLVQAGGSLRLSCAASGSIFDDVDMGWYRQAPGKEREFVAGIGAGGITYYADSVKGRFTISRDNAKNTVYLQMNSLKPEDTAVYYCAADNALVSKNTVRLYWGQGTQVTVSS

SEQ ID NO: 24432 - protein, 118 aa, Artificial Sequence
  Chemically Synthesized
QVQLQESGGGLVQAGGSLRLSCAASGTISSSRYMGWYRQAPGKERELVASIAYGSTTNYADSVKGRFTISRDNAKNTVYLQMNSLKPEDTAVYYCAASDQYHGYFDYWGQGTQVTVSS

SEQ ID NO: 24433 - protein, 118 aa, Artificial Sequence
  Chemically Synthesized
QVQLQESGGGLVQAGGSLRLSCAASGSISALGSMGWYRQAPGKERELVATIDAGGNTNYADSVKGRFTISRDNAKNTVYLQMNSLKPEDTAVYYCAVIAGVQLRYYYWGQGTQVTVSS

SEQ ID NO: 24434 - protein, 118 aa, Artificial Sequence
  Chemically Synthesized
QVQLQESGGGLVQAGGSLRLSCAASGNIFPARHMGWYRQAPGKERELVATIGYGGNTNYADSVKGRFTISRDNAKNTVYLQMNSLKPEDTAVYYCAVPQSWYHRHRYWGQGTQVTVSS

SEQ ID NO: 24435 - protein, 118 aa, Artificial Sequence
  Chemically Synthesized
QVQLQESGGGLVQAGGSLRLSCAASGYIFDYGAMGWYRQAPGKEREFVAAIGRGGSTYYADSVKGRFTISRDNAKNTVYLQMNSLKPEDTAVYYCAVVVAKPPDLRYWGQGTQVTVSS

SEQ ID NO: 24436 - protein, 122 aa, Artificial Sequence
  Chemically Synthesized
QVQLQESGGGLVQAGGSLRLSCAASGTISLLDYMGWYRQAPGKERELVAGIGYGTNTNYADSVKGRFTISRDNAKNTVYLQMNSLKPEDTAVYYCAATYAGRNRDITPHSYWGQGTQVTVSS

SEQ ID NO: 24437 - protein, 114 aa, Artificial Sequence
  Chemically Synthesized
QVQLQESGGGLVQAGGSLRLSCAASGSIFVDQYMGWYRQAPGKERELVASIGWGGNTNYADSVKGRFTISRDNAKNTVYLQMNSLKPEDTAVYYCAAGDDSMYWGQGTQVTVSS

SEQ ID NO: 24438 - protein, 126 aa, Artificial Sequence
  Chemically Synthesized
QVQLQESGGGLVQAGGSLRLSCAASGNIFPSRGMGWYRQAPGKEREFVAAISYGTSTYYADSVKGRFTISRDNAKNTVYLQMNSLKPEDTAVYYCAVTGYLDDTDYGQATDKHYYWGQGTQVTVSS

SEQ ID NO: 24439 - protein, 122 aa, Artificial Sequence
  Chemically Synthesized
QVQLQESGGGLVQAGGSLRLSCAASGTISQHVYMGWYRQAPGKERELVASITVGTSTYYADSVKGRFTISRDNAKNTVYLQMNSLKPEDTAVYYCAAGDFSGSRRPIWHDYWGQGTQVTVSS

SEQ ID NO: 24440 - protein, 118 aa, Artificial Sequence
  Chemically Synthesized
QVQLQESGGGLVQAGGSLRLSCAASGNISALLRMGWYRQAPGKEREFVAGIAYGSITYYADSVKGRFTISRDNAKNTVYLQMNSLKPEDTAVYYCAAYSFWHRYYPYWGQGTQVTVSS

SEQ ID NO: 24441 - protein, 118 aa, Artificial Sequence
  Chemically Synthesized
QVQLQESGGGLVQAGGSLRLSCAASGTISYYSGMGWYRQAPGKERELVASISGGANTYYADSVKGRFTISRDNAKNTVYLQMNSLKPEDTAVYYCAAGLSGTSSHAYWGQGTQVTVSS

SEQ ID NO: 24442 - protein, 125 aa, Artificial Sequence
  Chemically Synthesized
QVQLQESGGGLVQAGGSLRLSCAASGNISYSVSMGWYRQAPGKERELVASIAAGSSTNYADSVKGRFTISRDNAKNTVYLQMNSLKPEDTAVYYCAARGWRSNWWYRTPWTHVYWGQGTQVTVSS

SEQ ID NO: 24443 - protein, 121 aa, Artificial Sequence
  Chemically Synthesized
QVQLQESGGGLVQAGGSLRLSCAASGYIFLYAFMGWYRQAPGKEREFVAAIAWGGTTNYADSVKGRFTISRDNAKNTVYLQMNSLKPEDTAVYYCAAYPNSWPKGNSTLYWGQGTQVTVSS

SEQ ID NO: 24444 - protein, 122 aa, Artificial Sequence
  Chemically Synthesized
QVQLQESGGGLVQAGGSLRLSCAASGYISVRTLMGWYRQAPGKEREFVATIDDGGTTYYADSVKGRFTISRDNAKNTVYLQMNSLKPEDTAVYYCAAYYDVEWDYYYLLVYWGQGTQVTVSS

SEQ ID NO: 24445 - protein, 122 aa, Artificial Sequence
  Chemically Synthesized
QVQLQESGGGLVQAGGSLRLSCAASGSISLYWYMGWYRQAPGKEREFVATINIGATTNYADSVKGRFTISRDNAKNTVYLQMNSLKPEDTAVYYCAVYSEWDTWFCSYLLYWGQGTQVTVSS

SEQ ID NO: 24446 - protein, 118 aa, Artificial Sequence
  Chemically Synthesized
QVQLQESGGGLVQAGGSLRLSCAASGNISWIILMGWYRQAPGKEREFVAAIGSGASTYYADSVKGRFTISRDNAKNTVYLQMNSLKPEDTAVYYCAAAWARWRSHRYWGQGTQVTVSS

SEQ ID NO: 24447 - protein, 118 aa, Artificial Sequence
  Chemically Synthesized
QVQLQESGGGLVQAGGSLRLSCAASGYISELYAMGWYRQAPGKEREFVASINYGATTNYADSVKGRFTISRDNAKNTVYLQMNSLKPEDTAVYYCAANPQPYDYHQYWGQGTQVTVSS

SEQ ID NO: 24448 - protein, 116 aa, Artificial Sequence
  Chemically Synthesized
QVQLQESGGGLVQAGGSLRLSCAASGTIFGDTGMGWYRQAPGKEREFVAGIATGGTTYYADSVKGRFTISRDNAKNTVYLQMNSLKPEDTAVYYCATWGRPTLGYWGQGTQVTVSS

SEQ ID NO: 24449 - protein, 114 aa, Artificial Sequence
  Chemically Synthesized
QVQLQESGGGLVQAGGSLRLSCAASGFVGMGWYRQAPGKERELVAGIGDGATTNYADSVKGRFTISRDNAKNTVYLQMNSLKPEDTAVYYCAVGRTNYHGYPYWGQGTQVTVSS

SEQ ID NO: 24450 - protein, 118 aa, Artificial Sequence
  Chemically Synthesized
QVQLQESGGGLVQAGGSLRLSCAASGYISYPYAMGWYRQAPGKEREFVASINNGSSTNYADSVKGRFTISRDNAKNTVYLQMNSLKPEDTAVYYCAVPYQDKEDLTYWGQGTQVTVSS

SEQ ID NO: 24451 - protein, 118 aa, Artificial Sequence
  Chemically Synthesized
QVQLQESGGGLVQAGGSLRLSCAASGTISLLLDMGWYRQAPGKEREFVAAINAGGNTNYADSVKGRFTISRDNAKNTVYLQMNSLKPEDTAVYYCAAAYDQDSYHEYWGQGTQVTVSS

SEQ ID NO: 24452 - protein, 126 aa, Artificial Sequence
  Chemically Synthesized
QVQLQESGGGLVQAGGSLRLSCAASGTISDLSYMGWYRQAPGKEREFVATISYGANTNYADSVKGRFTISRDNAKNTVYLQMNSLKPEDTAVYYCAVDTLGYHYYERGPYGGYVYWGQGTQVTVSS

SEQ ID NO: 24453 - protein, 118 aa, Artificial Sequence
  Chemically Synthesized
QVQLQESGGGLVQAGGSLRLSCAASGNIFTGGYMGWYRQAPGKERELVASIGQGGSTYYADSVKGRFTISRDNAKNTVYLQMNSLKPEDTAVYYCAVRAQHQDQHDYWGQGTQVTVSS

SEQ ID NO: 24454 - protein, 118 aa, Artificial Sequence
  Chemically Synthesized
QVQLQESGGGLVQAGGSLRLSCAASGTISGAFYMGWYRQAPGKERELVASISYGTITYYADSVKGRFTISRDNAKNTVYLQMNSLKPEDTAVYYCAALVYYSSDLPYWGQGTQVTVSS

SEQ ID NO: 24455 - protein, 121 aa, Artificial Sequence
  Chemically Synthesized
QVQLQESGGGLVQAGGSLRLSCAASGYIFANSAMGWYRQAPGKERELVAAISRGGSTYYADSVKGRFTISRDNAKNTVYLQMNSLKPEDTAVYYCAVSYRGGWYAGRYRYWGQGTQVTVSS

SEQ ID NO: 24456 - protein, 117 aa, Artificial Sequence
  Chemically Synthesized
QVQLQESGGGLVQAGGSLRLSCAASGNISDYTDMGWYRQAPGKERELVASIDPGSSTYYADSVKGRFTISRDNAKNTVYLQMNSLKPEDTAVYYCAVTYDGRSRIYWGQGTQVTVSS

SEQ ID NO: 24457 - protein, 118 aa, Artificial Sequence
  Chemically Synthesized
QVQLQESGGGLVQAGGSLRLSCAASGTISSYYIMGWYRQAPGKEREFVATIDDGGTTNYADSVKGRFTISRDNAKNTVYLQMNSLKPEDTAVYYCAARYIDRYDLVYWGQGTQVTVSS

SEQ ID NO: 24458 - protein, 126 aa, Artificial Sequence
  Chemically Synthesized
QVQLQESGGGLVQAGGSLRLSCAASGSIFGPPYMGWYRQAPGKEREFVASIGIGANTYYADSVKGRFTISRDNAKNTVYLQMNSLKPEDTAVYYCAVADLSINPFVGLQDEYFGYWGQGTQVTVSS

SEQ ID NO: 24459 - protein, 118 aa, Artificial Sequence
  Chemically Synthesized
QVQLQESGGGLVQAGGSLRLSCAASGYISNVGDMGWYRQAPGKERELVAAIANGATTNYADSVKGRFTISRDNAKNTVYLQMNSLKPEDTAVYYCAAQSYGVWTYAYWGQGTQVTVSS

SEQ ID NO: 24460 - protein, 121 aa, Artificial Sequence
  Chemically Synthesized
QVQLQESGGGLVQAGGSLRLSCAASGNISNVPPMGWYRQAPGKERELVAAIDGGATTYYADSVKGRFTISRDNAKNTVYLQMNSLKPEDTAVYYCAVNSFDYQTATTVIYWGQGTQVTVSS

SEQ ID NO: 24461 - protein, 118 aa, Artificial Sequence
  Chemically Synthesized
QVQLQESGGGLVQAGGSLRLSCAASGYIFLANHMGWYRQAPGKEREFVASIGRGTNTYYADSVKGRFTISRDNAKNTVYLQMNSLKPEDTAVYYCAARQLRVVDFGYWGQGTQVTVSS

SEQ ID NO: 24462 - protein, 122 aa, Artificial Sequence
  Chemically Synthesized
QVQLQESGGGLVQAGGSLRLSCAASGNISIGRPMGWYRQAPGKERELVAAIDRGSSTYYADSVKGRFTISRDNAKNTVYLQMNSLKPEDTAVYYCAAYISDYTNKVRGFHYWGQGTQVTVSS

SEQ ID NO: 24463 - protein, 118 aa, Artificial Sequence
  Chemically Synthesized
QVQLQESGGGLVQAGGSLRLSCAASGYIFRGLYMGWYRQAPGKERELVASIAYGATTNYADSVKGRFTISRDNAKNTVYLQMNSLKPEDTAVYYCAAYVPVVYAFVYWGQGTQVTVSS

SEQ ID NO: 24464 - protein, 122 aa, Artificial Sequence
  Chemically Synthesized
QVQLQESGGGLVQAGGSLRLSCAASGSISRRWLMGWYRQAPGKERELVASIATGASTNYADSVKGRFTISRDNAKNTVYLQMNSLKPEDTAVYYCAVQSPQYWQYVDRFHYWGQGTQVTVSS

SEQ ID NO: 24465 - protein, 118 aa, Artificial Sequence
  Chemically Synthesized
QVQLQESGGGLVQAGGSLRLSCAASGNIFLPRSMGWYRQAPGKERELVAAIDRGGITYYADSVKGRFTISRDNAKNTVYLQMNSLKPEDTAVYYCAAPGDYYQGHSYWGQGTQVTVSS

SEQ ID NO: 24466 - protein, 118 aa, Artificial Sequence
  Chemically Synthesized
QVQLQESGGGLVQAGGSLRLSCAASGSISYYPGMGWYRQAPGKERELVASINWGANTYYADSVKGRFTISRDNAKNTVYLQMNSLKPEDTAVYYCAAKHTQYPYHGYWGQGTQVTVSS

SEQ ID NO: 24467 - protein, 122 aa, Artificial Sequence
  Chemically Synthesized
QVQLQESGGGLVQAGGSLRLSCAASGYISNRPAMGWYRQAPGKEREFVAAIDWGGTTNYADSVKGRFTISRDNAKNTVYLQMNSLKPEDTAVYYCAVVGYTSGADPERYDYWGQGTQVTVSS

SEQ ID NO: 24468 - protein, 122 aa, Artificial Sequence
  Chemically Synthesized
QVQLQESGGGLVQAGGSLRLSCAASGYIFRGQSMGWYRQAPGKERELVASINLGSITYYADSVKGRFTISRDNAKNTVYLQMNSLKPEDTAVYYCAVYTTSVRYGRVYYDYWGQGTQVTVSS

SEQ ID NO: 24469 - protein, 118 aa, Artificial Sequence
  Chemically Synthesized
QVQLQESGGGLVQAGGSLRLSCAASGSIFYYRWMGWYRQAPGKERELVAGIGGGTSTNYADSVKGRFTISRDNAKNTVYLQMNSLKPEDTAVYYCAAYYGYILRHGYWGQGTQVTVSS

SEQ ID NO: 24470 - protein, 109 aa, Artificial Sequence
  Chemically Synthesized
QVQLQESGGGLVQAGGSLRLSCAASGTISAWTYMGWYRQAPGKERELVAYADSVKGRFTISRDNAKNTVYLQMNSLKPEDTAVYYCAVHYYVYADFAYWGQGTQVTVSS

SEQ ID NO: 24471 - protein, 122 aa, Artificial Sequence
  Chemically Synthesized
QVQLQESGGGLVQAGGSLRLSCAASGTIFSYWSMGWYRQAPGKEREFVASITLGTTTNYADSVKGRFTISRDNAKNTVYLQMNSLKPEDTAVYYCAAIAVWWLTRTDRHVYWGQGTQVTVSS

SEQ ID NO: 24472 - protein, 121 aa, Artificial Sequence
  Chemically Synthesized
QVQLQESGGGLVQAGGSLRLSCAASGTIFYSRMGWYRQAPGKEREFVATIDVGTTTYYADSVKGRFTISRDNAKNTVYLQMNSLKPEDTAVYYCAALDGTWRYRDGGHEYWGQGTQVTVSS

SEQ ID NO: 24473 - protein, 126 aa, Artificial Sequence
  Chemically Synthesized
QVQLQESGGGLVQAGGSLRLSCAASGYIFPGDNMGWYRQAPGKERELVAGITGGSTTYYADSVKGRFTISRDNAKNTVYLQMNSLKPEDTAVYYCAAIYDTWYNYINTWYANYQYWGQGTQVTVSS

SEQ ID NO: 24474 - protein, 118 aa, Artificial Sequence
  Chemically Synthesized
QVQLQESGGGLVQAGGSLRLSCAASGYIFDLTSMGWYRQAPGKEREFVAGIGRGSNTYYADSVKGRFTISRDNAKNTVYLQMNSLKPEDTAVYYCAAYYRHYLLHRYWGQGTQVTVSS

SEQ ID NO: 24475 - protein, 118 aa, Artificial Sequence
  Chemically Synthesized
QVQLQESGGGLVQAGGSLRLSCAASGNISSAYIMGWYRQAPGKEREFVAGIAYGATTYYADSVKGRFTISRDNAKNTVYLQMNSLKPEDTAVYYCAAYHFIAVGLDYWGQGTQVTVSS

SEQ ID NO: 24476 - protein, 118 aa, Artificial Sequence
  Chemically Synthesized
QVQLQESGGGLVQAGGSLRLSCAASGSIFDRYHMGWYRQAPGKEREFVAGIGYGGSTYYADSVKGRFTISRDNAKNTVYLQMNSLKPEDTAVYYCAAQYPYTRIHDYWGQGTQVTVSS

SEQ ID NO: 24477 - protein, 118 aa, Artificial Sequence
  Chemically Synthesized
QVQLQESGGGLVQAGGSLRLSCAASGNIFSVSCMGWYRQAPGKEREFVAAIAPGSITNYADSVKGRFTISRDNAKNTVYLQMNSLKPEDTAVYYCAVRYPEYSDLDYWGQGTQVTVSS

SEQ ID NO: 24478 - protein, 118 aa, Artificial Sequence
  Chemically Synthesized
QVQLQESGGGLVQAGGSLRLSCAASGSIFPWPPMGWYRQAPGKERELVAAIDRGGNTYYADSVKGRFTISRDNAKNTVYLQMNSLKPEDTAVYYCAVHGYSYDWYDYWGQGTQVTVSS

SEQ ID NO: 24479 - protein, 118 aa, Artificial Sequence
  Chemically Synthesized
QVQLQESGGGLVQAGGSLRLSCAASGTISFAAPMGWYRQAPGKERELVAAIDRGGSTYYADSVKGRFTISRDNAKNTVYLQMNSLKPEDTAVYYCAAYPVNVYPHAYWGQGTQVTVSS

SEQ ID NO: 24480 - protein, 118 aa, Artificial Sequence
  Chemically Synthesized
QVQLQESGGGLVQAGGSLRLSCAASGNISVITGMGWYRQAPGKEREFVAGISRGTTTYYADSVKGRFTISRDNAKNTVYLQMNSLKPEDTAVYYCAAFSPAYIRHAYWGQGTQVTVSS

SEQ ID NO: 24481 - protein, 122 aa, Artificial Sequence
  Chemically Synthesized
QVQLQESGGGLVQAGGSLRLSCAASGTISTRAIMGWYRQAPGKEREFVASIDYGGNTYYADSVKGRFTISRDNAKNTVYLQMNSLKPEDTAVYYCAASQGRKRWRGRDFGYWGQGTQVTVSS

SEQ ID NO: 24482 - protein, 122 aa, Artificial Sequence
  Chemically Synthesized
QVQLQESGGGLVQAGGSLRLSCAASGNISRVRFMGWYRQAPGKERELVAAISYGSTTYYADSVKGRFTISRDNAKNTVYLQMNSLKPEDTAVYYCAVILERRNAGRKRLPYWGQGTQVTVSS

SEQ ID NO: 24483 - protein, 122 aa, Artificial Sequence
  Chemically Synthesized
QVQLQESGGGLVQAGGSLRLSCAASGTIFIYPGMGWYRQAPGKEREFVAGIANGGNTYYADSVKGRFTISRDNAKNTVYLQMNSLKPEDTAVYYCAAYYYGRQGTYQYFRYWGQGTQVTVSS

SEQ ID NO: 24484 - protein, 118 aa, Artificial Sequence
  Chemically Synthesized
QVQLQESGGGLVQAGGSLRLSCAASGYIFDPWLMGWYRQAPGKERELVAGIGPGGTTYYADSVKGRFTISRDNAKNTVYLQMNSLKPEDTAVYYCAAYGYDRFQHDYWGQGTQVTVSS

SEQ ID NO: 24485 - protein, 118 aa, Artificial Sequence
  Chemically Synthesized
QVQLQESGGGLVQAGGSLRLSCAASGYIFSYRIMGWYRQAPGKEREFVAGIADGSSTYYADSVKGRFTISRDNAKNTVYLQMNSLKPEDTAVYYCAAPHWHTPAHDYWGQGTQVTVSS

SEQ ID NO: 24486 - protein, 125 aa, Artificial Sequence
  Chemically Synthesized
QVQLQESGGGLVQAGGSLRLSCAASGNIFSDVSMGWYRQAPGKEREFVAGISTGASTYYADSVKGRFTISRDNAKNTVYLQMNSLKPEDTAVYYCAVLVRGYYGADLRAYVHYYWGQGTQVTVSS

SEQ ID NO: 24487 - protein, 122 aa, Artificial Sequence
  Chemically Synthesized
QVQLQESGGGLVQAGGSLRLSCAASGTIFDRGSMGWYRQAPGKEREFVAGISTGGNTYYADSVKGRFTISRDNAKNTVYLQMNSLKPEDTAVYYCAAIYQYYSERYAGHRYWGQGTQVTVSS

SEQ ID NO: 24488 - protein, 122 aa, Artificial Sequence
  Chemically Synthesized
QVQLQESGGGLVQAGGSLRLSCAASGTIFGRYYMGWYRQAPGKEREFVAAISGGGNTYYADSVKGRFTISRDNAKNTVYLQMNSLKPEDTAVYYCAVGAWFPDRYGTYYPYWGQGTQVTVSS

SEQ ID NO: 24489 - protein, 118 aa, Artificial Sequence
  Chemically Synthesized
QVQLQESGGGLVQAGGSLRLSCAASGNIFTHGLMGWYRQAPGKEREFVAGIGGGSTTYYADSVKGRFTISRDNAKNTVYLQMNSLKPEDTAVYYCAVQYLTGVYLDYWGQGTQVTVSS

SEQ ID NO: 24490 - protein, 118 aa, Artificial Sequence
  Chemically Synthesized
QVQLQESGGGLVQAGGSLRLSCAASGYIFWVTYMGWYRQAPGKEREFVASIGLGGSTNYADSVKGRFTISRDNAKNTVYLQMNSLKPEDTAVYYCAARYFVGPVHGYWGQGTQVTVSS

SEQ ID NO: 24491 - protein, 126 aa, Artificial Sequence
  Chemically Synthesized
QVQLQESGGGLVQAGGSLRLSCAASGYISARWGMGWYRQAPGKEREFVAGINDGTTTYYADSVKGRFTISRDNAKNTVYLQMNSLKPEDTAVYYCAVLLRYFRDSHREQRSYLRYWGQGTQVTVSS

SEQ ID NO: 24492 - protein, 118 aa, Artificial Sequence
  Chemically Synthesized
QVQLQESGGGLVQAGGSLRLSCAASGYISYALLMGWYRQAPGKEREFVAGIAYGSTTYYADSVKGRFTISRDNAKNTVYLQMNSLKPEDTAVYYCAAFDNYDVKFDYWGQGTQVTVSS

SEQ ID NO: 24493 - protein, 126 aa, Artificial Sequence
  Chemically Synthesized
QVQLQESGGGLVQAGGSLRLSCAASGTISPQSGMGWYRQAPGKEREFVAGITYGSSTYYADSVKGRFTISRDNAKNTVYLQMNSLKPEDTAVYYCAALRRGGGTWYQGSGWIHRYWGQGTQVTVSS

SEQ ID NO: 24494 - protein, 120 aa, Artificial Sequence
  Chemically Synthesized
QVQLQESGGGLVQAGGSLRLSCAASGTISSTVMGWYRQAPGKERELVATITVGANTNYADSVKGRFTISRDNAKNTVYLQMNSLKPEDTAVYYCAVTDPYSTSRTVRMYWGQGTQVTVSS

SEQ ID NO: 24495 - protein, 118 aa, Artificial Sequence
  Chemically Synthesized
QVQLQESGGGLVQAGGSLRLSCAASGNISRLAAMGWYRQAPGKERELVASIDYGATTYYADSVKGRFTISRDNAKNTVYLQMNSLKPEDTAVYYCAALVWDDYGHEYWGQGTQVTVSS

SEQ ID NO: 24496 - protein, 118 aa, Artificial Sequence
  Chemically Synthesized
QVQLQESGGGLVQAGGSLRLSCAASGYIFLYSSMGWYRQAPGKEREFVASITRGTNTYYADSVKGRFTISRDNAKNTVYLQMNSLKPEDTAVYYCAAYRGYVIPHLYWGQGTQVTVSS

SEQ ID NO: 24497 - protein, 118 aa, Artificial Sequence
  Chemically Synthesized
QVQLQESGGGLVQAGGSLRLSCAASGSIFEPSIMGWYRQAPGKERELVAAIGVGGSTYYADSVKGRFTISRDNAKNTVYLQMNSLKPEDTAVYYCAAFTYTRKHHSYWGQGTQVTVSS

SEQ ID NO: 24498 - protein, 122 aa, Artificial Sequence
  Chemically Synthesized
QVQLQESGGGLVQAGGSLRLSCAASGNIFYRYNMGWYRQAPGKEREFVAGIAYGTSTYYADSVKGRFTISRDNAKNTVYLQMNSLKPEDTAVYYCAAQVWPGVVSGDTHDYWGQGTQVTVSS

SEQ ID NO: 24499 - protein, 118 aa, Artificial Sequence
  Chemically Synthesized
QVQLQESGGGLVQAGGSLRLSCAASGYIFSGFYMGWYRQAPGKERELVAGIGDGASTYYADSVKGRFTISRDNAKNTVYLQMNSLKPEDTAVYYCAALYYYDILHDYWGQGTQVTVSS

SEQ ID NO: 24500 - protein, 120 aa, Artificial Sequence
  Chemically Synthesized
QVQLQESGGGLVQAGGSLRLSCAASGYIFTGIYMGWYRQAPGKEREFVASIITVLVPYADSVKGRFTISRDNAKNTVYLQMNSLKPEDTAVYYCAAKGDSTVSLLVTMYWGQGTQVTVSS

SEQ ID NO: 24501 - protein, 118 aa, Artificial Sequence
  Chemically Synthesized
QVQLQESGGGLVQAGGSLRLSCAASGNIFPLGFMGWYRQAPGKEREFVASIAYGTITYYADSVKGRFTISRDNAKNTVYLQMNSLKPEDTAVYYCAARPYTRIYHYYWGQGTQVTVSS

SEQ ID NO: 24502 - protein, 117 aa, Artificial Sequence
  Chemically Synthesized
QVQLQESGGGLVQAGGSLRLSCAASGTIFPSTSMGWYRQAPGKEREFVASIGEGSTTNYADSVKGRFTISRDNAKNTVYLQMNSLKPEDTAVYYCAVYVVYLTLGYWGQGTQVTVSS

SEQ ID NO: 24503 - protein, 116 aa, Artificial Sequence
  Chemically Synthesized
QVQLQESGGGLVQAGGSLRLSCAASGTISGSDQMGWYRQAPGKEREFVASITRGSITYYADSVKGRFTISRDNAKNTVYLQMNSLKPEDTAVYYCAVVSYGWLAYWGQGTQVTVSS

SEQ ID NO: 24504 - protein, 118 aa, Artificial Sequence
  Chemically Synthesized
QVQLQESGGGLVQAGGSLRLSCAASGNIFVPRFMGWYRQAPGKEREFVASIGYGTTTNYADSVKGRFTISRDNAKNTVYLQMNSLKPEDTAVYYCAVKPYIVWWLWYWGQGTQVTVSS

SEQ ID NO: 24505 - protein, 118 aa, Artificial Sequence
  Chemically Synthesized
QVQLQESGGGLVQAGGSLRLSCAASGNIFPSHVMGWYRQAPGKEREFVAGIADGGSTYYADSVKGRFTISRDNAKNTVYLQMNSLKPEDTAVYYCAAYAWPTSTLDYWGQGTQVTVSS

SEQ ID NO: 24506 - protein, 118 aa, Artificial Sequence
  Chemically Synthesized
QVQLQESGGGLVQAGGSLRLSCAASGNIFRYYDMGWYRQAPGKERELVAGINRGAITYYADSVKGRFTISRDNAKNTVYLQMNSLKPEDTAVYYCAAQTGRRNYLLYWGQGTQVTVSS

SEQ ID NO: 24507 - protein, 126 aa, Artificial Sequence
  Chemically Synthesized
QVQLQESGGGLVQAGGSLRLSCAASGSISDPGAMGWYRQAPGKEREFVAGIGVGTSTYYADSVKGRFTISRDNAKNTVYLQMNSLKPEDTAVYYCAVYRAVGRDRYHGYHTLYRYWGQGTQVTVSS

SEQ ID NO: 24508 - protein, 118 aa, Artificial Sequence
  Chemically Synthesized
QVQLQESGGGLVQAGGSLRLSCAASGSISDWDLMGWYRQAPGKEREFVAGIAYGSSTYYADSVKGRFTISRDNAKNTVYLQMNSLKPEDTAVYYCAVLSVETVDLDYWGQGTQVTVSS

SEQ ID NO: 24509 - protein, 122 aa, Artificial Sequence
  Chemically Synthesized
QVQLQESGGGLVQAGGSLRLSCAASGNIFDVVSMGWYRQAPGKEREFVAGIARGASTYYADSVKGRFTISRDNAKNTVYLQMNSLKPEDTAVYYCAAYAGYGTPSTAYHRYWGQGTQVTVSS

SEQ ID NO: 24510 - protein, 122 aa, Artificial Sequence
  Chemically Synthesized
QVQLQESGGGLVQAGGSLRLSCAASGTISYRYIMGWYRQAPGKEREFVAGINYGTSTYYADSVKGRFTISRDNAKNTVYLQMNSLKPEDTAVYYCAVPANYVGYYGRRHHYWGQGTQVTVSS

SEQ ID NO: 24511 - protein, 118 aa, Artificial Sequence
  Chemically Synthesized
QVQLQESGGGLVQAGGSLRLSCAASGNISYTVGMGWYRQAPGKEREFVAGISYGGNTYYADSVKGRFTISRDNAKNTVYLQMNSLKPEDTAVYYCAVFTIGKFYHRYWGQGTQVTVSS

SEQ ID NO: 24512 - protein, 122 aa, Artificial Sequence
  Chemically Synthesized
QVQLQESGGGLVQAGGSLRLSCAASGTIFDPPDMGWYRQAPGKEREFVATIDRGTSTYYADSVKGRFTISRDNAKNTVYLQMNSLKPEDTAVYYCAAGYYDDVAYWDYYWYWGQGTQVTVSS

SEQ ID NO: 24513 - protein, 118 aa, Artificial Sequence
  Chemically Synthesized
QVQLQESGGGLVQAGGSLRLSCAASGYISWVDLMGWYRQAPGKERELVAGISYGANTNYADSVKGRFTISRDNAKNTVYLQMNSLKPEDTAVYYCAVVSWPRTGLDYWGQGTQVTVSS

SEQ ID NO: 24514 - protein, 118 aa, Artificial Sequence
  Chemically Synthesized
QVQLQESGGGLVQAGGSLRLSCAASGNIFRRQNMGWYRQAPGKERELVAAINRGSNTYYADSVKGRFTISRDNAKNTVYLQMNSLKPEDTAVYYCAVTAYSYRYHQYWGQGTQVTVSS

SEQ ID NO: 24515 - protein, 118 aa, Artificial Sequence
  Chemically Synthesized
QVQLQESGGGLVQAGGSLRLSCAASGSISYKDSMGWYRQAPGKEREFVAGITQGGNTYYADSVKGRFTISRDNAKNTVYLQMNSLKPEDTAVYYCAVIGFTGYVHRYWGQGTQVTVSS

SEQ ID NO: 24516 - protein, 118 aa, Artificial Sequence
  Chemically Synthesized
QVQLQESGGGLVQAGGSLRLSCAASGSISQFDAMGWYRQAPGKEREFVAGIDYGTSTYYADSVKGRFTISRDNAKNTVYLQMNSLKPEDTAVYYCAVVTLTAVTLPYWGQGTQVTVSS

SEQ ID NO: 24517 - protein, 121 aa, Artificial Sequence
  Chemically Synthesized
QVQLQESGGGLVQAGGSLRLSCAASGNIFLLAFMGWYRQAPGKERELVAAIARGGNTYYADSVKGRFTISRDNAKNTVYLQMNSLKPEDTAVYYCAAYRIRDLYLPKHAYWGQGTQVTVSS

SEQ ID NO: 24518 - protein, 126 aa, Artificial Sequence
  Chemically Synthesized
QVQLQESGGGLVQAGGSLRLSCAASGNISRPYGMGWYRQAPGKEREFVAGITSGGSTNYADSVKGRFTISRDNAKNTVYLQMNSLKPEDTAVYYCAVYEPLVRGGRPYYRSGHWYWGQGTQVTVSS

SEQ ID NO: 24519 - protein, 122 aa, Artificial Sequence
  Chemically Synthesized
QVQLQESGGGLVQAGGSLRLSCAASGYISGNSVMGWYRQAPGKERELVAGIGTGTNTYYADSVKGRFTISRDNAKNTVYLQMNSLKPEDTAVYYCAVIDWLYDRGHRVHRYWGQGTQVTVSS

SEQ ID NO: 24520 - protein, 121 aa, Artificial Sequence
  Chemically Synthesized
QVQLQESGGGLVQAGGSLRLSCAASGSIFYRYMGWYRQAPGKEREFVASIGGGSNTNYADSVKGRFTISRDNAKNTVYLQMNSLKPEDTAVYYCAALDLWWHTYSRGHVYWGQGTQVTVSS

SEQ ID NO: 24521 - protein, 116 aa, Artificial Sequence
  Chemically Synthesized
QVQLQESGGGLVQAGGSLRLSCAASGSIQAYMGWYRQAPGKERELVAAINSGSNTYYADSVKGRFTISRDNAKNTVYLQMNSLKPEDTAVYYCAADWYPYYYFTYWGQGTQVTVSS

SEQ ID NO: 24522 - protein, 118 aa, Artificial Sequence
  Chemically Synthesized
QVQLQESGGGLVQAGGSLRLSCAASGYISARHYMGWYRQAPGKEREFVAGITDGSITYYADSVKGRFTISRDNAKNTVYLQMNSLKPEDTAVYYCAVVGKYNPNHDYWGQGTQVTVSS

SEQ ID NO: 24523 - protein, 122 aa, Artificial Sequence
  Chemically Synthesized
QVQLQESGGGLVQAGGSLRLSCAASGTIFQGYDMGWYRQAPGKEREFVAAITTGGSTNYADSVKGRFTISRDNAKNTVYLQMNSLKPEDTAVYYCAVGEIVTNSSPYGHYYWGQGTQVTVSS

SEQ ID NO: 24524 - protein, 118 aa, Artificial Sequence
  Chemically Synthesized
QVQLQESGGGLVQAGGSLRLSCAASGSISSIYDMGWYRQAPGKEREFVAAIDDGGTTNYADSVKGRFTISRDNAKNTVYLQMNSLKPEDTAVYYCAAYSEVLTQYAYWGQGTQVTVSS

SEQ ID NO: 24525 - protein, 120 aa, Artificial Sequence
  Chemically Synthesized
QVQLQESGGGLVQAGGSLRLSCAASGTISWQSFMGWYRQAPGKERELVAAIGQGGSTNYADSVKGRFTISRDNAKNTVYLQMNSLKPEDTAVYYCAVTIDAAYFVRYDYWGQGTQVTVSS

SEQ ID NO: 24526 - protein, 118 aa, Artificial Sequence
  Chemically Synthesized
QVQLQESGGGLVQAGGSLRLSCAASGTISDDYTMGWYRQAPGKERELVAGIDQGGNTNYADSVKGRFTISRDNAKNTVYLQMNSLKPEDTAVYYCAVEPYHDDKFVYWGQGTQVTVSS

SEQ ID NO: 24527 - protein, 117 aa, Artificial Sequence
  Chemically Synthesized
QVQLQESGGGLVQAGGSLRLSCAASGNISDLLMGWYRQAPGKEREFVAGIGSGGSTNYADSVKGRFTISRDNAKNTVYLQMNSLKPEDTAVYYCAALYDDYVGHRYWGQGTQVTVSS

SEQ ID NO: 24528 - protein, 123 aa, Artificial Sequence
  Chemically Synthesized
QVQLQESGGGLVQAGGSLRLSCAASGNISLADPMGWYRQAPGKERELVAGIAIGGTTNYADSVKGRFTISRDNAKNTVYLQMNSLKPEDTAVYYCAAAAHSAVSPYPEEHYYWGQGTQVTVSS

SEQ ID NO: 24529 - protein, 117 aa, Artificial Sequence
  Chemically Synthesized
QVQLQESGGGLVQAGGSLRLSCAASGYISRQHSMGWYRQAPGKERELVAAITLGSNTNYADSVKGRFTISRDNAKNTVYLQMNSLKPEDTAVYYCAVSSTLTLGFYWGQGTQVTVSS

SEQ ID NO: 24530 - protein, 126 aa, Artificial Sequence
  Chemically Synthesized
QVQLQESGGGLVQAGGSLRLSCAASGTISRDAYMGWYRQAPGKEREFVAAINAGTNTNYADSVKGRFTISRDNAKNTVYLQMNSLKPEDTAVYYCAVTDLQSYRVLHYLYWYLGYWGQGTQVTVSS

SEQ ID NO: 24531 - protein, 122 aa, Artificial Sequence
  Chemically Synthesized
QVQLQESGGGLVQAGGSLRLSCAASGYIFQSYTMGWYRQAPGKEREFVAAITYGTTTNYADSVKGRFTISRDNAKNTVYLQMNSLKPEDTAVYYCAVDRVVYAVYGQVHAYWGQGTQVTVSS

SEQ ID NO: 24532 - protein, 120 aa, Artificial Sequence
  Chemically Synthesized
QVQLQESGGGLVQAGGSLRLSCAASGTILSLVMGWYRQAPGKERELVAGINVGSITNYADSVKGRFTISRDNAKNTVYLQMNSLKPEDTAVYYCAVVLGRQAIAQDYWYWGQGTQVTVSS

SEQ ID NO: 24533 - protein, 122 aa, Artificial Sequence
  Chemically Synthesized
QVQLQESGGGLVQAGGSLRLSCAASGTISATVSMGWYRQAPGKERELVAAINYGGSTYYADSVKGRFTISRDNAKNTVYLQMNSLKPEDTAVYYCAVQHHASDQPSTIYGYWGQGTQVTVSS

SEQ ID NO: 24534 - protein, 107 aa, Artificial Sequence
  Chemically Synthesized
QVQLQESGGGLVQAGGSLRLSCAASGNIFTVTWMGWYRQAPGKEREPYADSVKGRFTISRDNAKNTVYLQMNSLKPEDTAVYYCAAWPWATVLLGYWGQGTQVTVSS

SEQ ID NO: 24535 - protein, 118 aa, Artificial Sequence
  Chemically Synthesized
QVQLQESGGGLVQAGGSLRLSCAASGYIFYYIIMGWYRQAPGKEREFVAGIGRGGITYYADSVKGRFTISRDNAKNTVYLQMNSLKPEDTAVYYCAVHVFPWSRHYYWGQGTQVTVSS

SEQ ID NO: 24536 - protein, 126 aa, Artificial Sequence
  Chemically Synthesized
QVQLQESGGGLVQAGGSLRLSCAASGNIFYGYYMGWYRQAPGKEREFVATIAAGSNTYYADSVKGRFTISRDNAKNTVYLQMNSLKPEDTAVYYCAVSHYDTASRYVYDFYDYTYWGQGTQVTVSS

SEQ ID NO: 24537 - protein, 122 aa, Artificial Sequence
  Chemically Synthesized
QVQLQESGGGLVQAGGSLRLSCAASGTISHDSNMGWYRQAPGKEREFVATIGVGANTYYADSVKGRFTISRDNAKNTVYLQMNSLKPEDTAVYYCAVVRGTVDSWSYYLTYWGQGTQVTVSS

SEQ ID NO: 24538 - protein, 117 aa, Artificial Sequence
  Chemically Synthesized
QVQLQESGGGLVQAGGSLRLSCAASGNISVYVMGWYRQAPGKERELVATIGDGSSTNYADSVKGRFTISRDNAKNTVYLQMNSLKPEDTAVYYCAVDTEDDDTYWYWGQGTQVTVSS

SEQ ID NO: 24539 - protein, 122 aa, Artificial Sequence
  Chemically Synthesized
QVQLQESGGGLVQAGGSLRLSCAASGTISNDRLMGWYRQAPGKEREFVATISAGGNTYYADSVKGRFTISRDNAKNTVYLQMNSLKPEDTAVYYCAAGDVTDSPYYRGHGYWGQGTQVTVSS

SEQ ID NO: 24540 - protein, 125 aa, Artificial Sequence
  Chemically Synthesized
QVQLQESGGGLVQAGGSLRLSCAASGNISADGDMGWYRQAPGKERELVASIGDGTSTYYADSVKGRFTISRDNAKNTVYLQMNSLKPEDTAVYYCAAGPLSRLLLVTCTSTFFYWGQGTQVTVSS

SEQ ID NO: 24541 - protein, 118 aa, Artificial Sequence
  Chemically Synthesized
QVQLQESGGGLVQAGGSLRLSCAASGTIFGRRYMGWYRQAPGKERELVASITYGGNTYYADSVKGRFTISRDNAKNTVYLQMNSLKPEDTAVYYCAVRRYRDVFYYYWGQGTQVTVSS

SEQ ID NO: 24542 - protein, 118 aa, Artificial Sequence
  Chemically Synthesized
QVQLQESGGGLVQAGGSLRLSCAASGSISGTYDMGWYRQAPGKEREFVATIGAGATTYYADSVKGRFTISRDNAKNTVYLQMNSLKPEDTAVYYCAVYYQDDQAHSYWGQGTQVTVSS

SEQ ID NO: 24543 - protein, 118 aa, Artificial Sequence
  Chemically Synthesized
QVQLQESGGGLVQAGGSLRLSCAASGYIFRKRAMGWYRQAPGKEREFVATITNGTSTYYADSVKGRFTISRDNAKNTVYLQMNSLKPEDTAVYYCAVGGYRYGTHTYWGQGTQVTVSS

SEQ ID NO: 24544 - protein, 122 aa, Artificial Sequence
  Chemically Synthesized
QVQLQESGGGLVQAGGSLRLSCAASGNISDPYQMGWYRQAPGKEREFVASISRGGNTNYADSVKGRFTISRDNAKNTVYLQMNSLKPEDTAVYYCAVRSTTYKDSLATFEYWGQGTQVTVSS

SEQ ID NO: 24545 - protein, 118 aa, Artificial Sequence
  Chemically Synthesized
QVQLQESGGGLVQAGGSLRLSCAASGSISSALGMGWYRQAPGKERELVAGINYGTNTNYADSVKGRFTISRDNAKNTVYLQMNSLKPEDTAVYYCAVPGHYKLGLDYWGQGTQVTVSS

SEQ ID NO: 24546 - protein, 126 aa, Artificial Sequence
  Chemically Synthesized
QVQLQESGGGLVQAGGSLRLSCAASGTISRARGMGWYRQAPGKERELVAAIAWGGNTYYADSVKGRFTISRDNAKNTVYLQMNSLKPEDTAVYYCAAIQSPYSGDVGLDDPSHDYWGQGTQVTVSS

SEQ ID NO: 24547 - protein, 118 aa, Artificial Sequence
  Chemically Synthesized
QVQLQESGGGLVQAGGSLRLSCAASGYISRRESMGWYRQAPGKEREFVASIDGGANTYYADSVKGRFTISRDNAKNTVYLQMNSLKPEDTAVYYCAAPTSQDGALEYWGQGTQVTVSS

SEQ ID NO: 24548 - protein, 117 aa, Artificial Sequence
  Chemically Synthesized
QVQLQESGGGLVQAGGSLRLSCAASGNISSYYYMGWYRQAPGKEREFVATIATGGTPYADSVKGRFTISRDNAKNTVYLQMNSLKPEDTAVYYCAAGDWSVRTLYYWGQGTQVTVSS

SEQ ID NO: 24549 - protein, 122 aa, Artificial Sequence
  Chemically Synthesized
QVQLQESGGGLVQAGGSLRLSCAASGNISIYDVMGWYRQAPGKEREFVASIGTGTNTNYADSVKGRFTISRDNAKNTVYLQMNSLKPEDTAVYYCAVQDLTTTQRQDDHAYWGQGTQVTVSS

SEQ ID NO: 24550 - protein, 114 aa, Artificial Sequence
  Chemically Synthesized
QVQLQESGGGLVQAGGSLRLSCAASGTISGHYAMGWYRQAPGKEREFVATVLVPYADSVKGRFTISRDNAKNTVYLQMNSLKPEDTAVYYCAVDIWTQRHHAYWGQGTQVTVSS

SEQ ID NO: 24551 - protein, 117 aa, Artificial Sequence
  Chemically Synthesized
QVQLQESGGGLVQAGGSLRLSCAASGSISYSARMGWYRQAPGKEREFVAALILVVLPYADSVKGRFTISRDNAKNTVYLQMNSLKPEDTAVYYCAVHYPDRSYFTYWGQGTQVTVSS

SEQ ID NO: 24552 - protein, 124 aa, Artificial Sequence
  Chemically Synthesized
QVQLQESGGGLVQAGGSLRLSCAASGSISRDEMGWYRQAPGKERELVASINRVVVPYADSVKGRFTISRDNAKNTVYLQMNSLKPEDTAVYYCAAYYWYYLSVHPTADQSHVYWGQGTQVTVSS

SEQ ID NO: 24553 - protein, 117 aa, Artificial Sequence
  Chemically Synthesized
QVQLQESGGGLVQAGGSLRLSCAASGNIFRYSYMGWYRQAPGKERELVAAIGTGASTYYADSVKGRFTISRDNAKNTVYLQMNSLKPEDTAVYYCAVPRRFKTSIYWGQGTQVTVSS

SEQ ID NO: 24554 - protein, 125 aa, Artificial Sequence
  Chemically Synthesized
QVQLQESGGGLVQAGGSLRLSCAASGSISLPQRMGWYRQAPGKERELVATISYGTITYYADSVKGRFTISRDNAKNTVYLQMNSLKPEDTAVYYCAVDYVPGSAAGHLLVRLLYWGQGTQVTVSS

SEQ ID NO: 24555 - protein, 118 aa, Artificial Sequence
  Chemically Synthesized
QVQLQESGGGLVQAGGSLRLSCAASGTIFAWIYMGWYRQAPGKEREFVAGIGSGGITNYADSVKGRFTISRDNAKNTVYLQMNSLKPEDTAVYYCAASYTFEPLHGYWGQGTQVTVSS

SEQ ID NO: 24556 - protein, 118 aa, Artificial Sequence
  Chemically Synthesized
QVQLQESGGGLVQAGGSLRLSCAASGYIFRDTDMGWYRQAPGKERELVAGITVGGSTYYADSVKGRFTISRDNAKNTVYLQMNSLKPEDTAVYYCAVYYRSRTYYQYWGQGTQVTVSS

SEQ ID NO: 24557 - protein, 122 aa, Artificial Sequence
  Chemically Synthesized
QVQLQESGGGLVQAGGSLRLSCAASGNISPGYKMGWYRQAPGKERELVAAIDYGGSTYYADSVKGRFTISRDNAKNTVYLQMNSLKPEDTAVYYCAVTYANGPTLIADYSYWGQGTQVTVSS

SEQ ID NO: 24558 - protein, 119 aa, Artificial Sequence
  Chemically Synthesized
QVQLQESGGGLVQAGGSLRLSCAASGTIFLGWYMGWYRQAPGKERELVAGIDSGSNTYYADSVKGRFTISRDNAKNTVYLQMNSLKPEDTAVYYCAANLYPFDVVYRYWGQGTQVTVSS

SEQ ID NO: 24559 - protein, 122 aa, Artificial Sequence
  Chemically Synthesized
QVQLQESGGGLVQAGGSLRLSCAASGYISYGSVMGWYRQAPGKEREFVATIAYGGNTNYADSVKGRFTISRDNAKNTVYLQMNSLKPEDTAVYYCAVIVYYGHHDYYRYAYWGQGTQVTVSS

SEQ ID NO: 24560 - protein, 122 aa, Artificial Sequence
  Chemically Synthesized
QVQLQESGGGLVQAGGSLRLSCAASGNIFYSEYMGWYRQAPGKEREFVASIGFGGNTNYADSVKGRFTISRDNAKNTVYLQMNSLKPEDTAVYYCAVIRVDRDGSRKYHSYWGQGTQVTVSS

SEQ ID NO: 24561 - protein, 121 aa, Artificial Sequence
  Chemically Synthesized
QVQLQESGGGLVQAGGSLRLSCAASGYIFSRVAMGWYRQAPGKERELVATIANGATTYYADSVKGRFTISRDNAKNTVYLQMNSLKPEDTAVYYCAAGTNDTSLLVTTMYWGQGTQVTVSS

SEQ ID NO: 24562 - protein, 118 aa, Artificial Sequence
  Chemically Synthesized
QVQLQESGGGLVQAGGSLRLSCAASGNISADAVMGWYRQAPGKEREFVAAITNGAITYYADSVKGRFTISRDNAKNTVYLQMNSLKPEDTAVYYCAAYSSAFWGYDYWGQGTQVTVSS

SEQ ID NO: 24563 - protein, 118 aa, Artificial Sequence
  Chemically Synthesized
QVQLQESGGGLVQAGGSLRLSCAASGTIFRYVWMGWYRQAPGKERELVAAINSGGNTNYADSVKGRFTISRDNAKNTVYLQMNSLKPEDTAVYYCAAEFPRRYRLDYWGQGTQVTVSS

SEQ ID NO: 24564 - protein, 117 aa, Artificial Sequence
  Chemically Synthesized
QVQLQESGGGLVQAGGSLRLSCAASGTIFRTYGMGWYRQAPGKERELVAVLITVLVPYADSVKGRFTISRDNAKNTVYLQMNSLKPEDTAVYYCAVEGDYLSLYYYWGQGTQVTVSS

SEQ ID NO: 24565 - protein, 118 aa, Artificial Sequence
  Chemically Synthesized
QVQLQESGGGLVQAGGSLRLSCAASGNISSGYVMGWYRQAPGKEREFVATIAPGSSTYYADSVKGRFTISRDNAKNTVYLQMNSLKPEDTAVYYCAAYEQLRIQHYYWGQGTQVTVSS

SEQ ID NO: 24566 - protein, 118 aa, Artificial Sequence
  Chemically Synthesized
QVQLQESGGGLVQAGGSLRLSCAASGSIFAVYDMGWYRQAPGKEREFVASIAWGGNTNYADSVKGRFTISRDNAKNTVYLQMNSLKPEDTAVYYCAVIRYPDIDYFYWGQGTQVTVSS

SEQ ID NO: 24567 - protein, 122 aa, Artificial Sequence
  Chemically Synthesized
QVQLQESGGGLVQAGGSLRLSCAASGYISRSYNMGWYRQAPGKEREFVASINDGTNTYYADSVKGRFTISRDNAKNTVYLQMNSLKPEDTAVYYCAATYVYPYYGRAPLYYWGQGTQVTVSS

SEQ ID NO: 24568 - protein, 122 aa, Artificial Sequence
  Chemically Synthesized
QVQLQESGGGLVQAGGSLRLSCAASGNISWQADMGWYRQAPGKEREFVAAISYGTSTQYADSVKGRFTISRDNAKNTVYLQMNSLKPEDTAVYYCAATSASAPVANGRYNYWGQGTQVTVSS

SEQ ID NO: 24569 - protein, 118 aa, Artificial Sequence
  Chemically Synthesized
QVQLQESGGGLVQAGGSLRLSCAASGYIFGERAMGWYRQAPGKEREFVAGIARGTITYYADSVKGRFTISRDNAKNTVYLQMNSLKPEDTAVYYCAAPLQLDEWFFYWGQGTQVTVSS

SEQ ID NO: 24570 - protein, 126 aa, Artificial Sequence
  Chemically Synthesized
QVQLQESGGGLVQAGGSLRLSCAASGNISFPGSMGWYRQAPGKEREFVATISDGTNTNYADSVKGRFTISRDNAKNTVYLQMNSLKPEDTAVYYCAAYHYPYDDSAPYVYGGHDYWGQGTQVTVSS

SEQ ID NO: 24571 - protein, 125 aa, Artificial Sequence
  Chemically Synthesized
QVQLQESGGGLVQAGGSLRLSCAASGSIFSDQDMGWYRQAPGKERELVAALITVVIPYADSVKGRFTISRDNAKNTVYLQMNSLKPEDTAVYYCAVLPEWFPQGHSYTDYNHPYWGQGTQVTVSS

SEQ ID NO: 24572 - protein, 126 aa, Artificial Sequence
  Chemically Synthesized
QVQLQESGGGLVQAGGSLRLSCAASGNIFPPATMGWYRQAPGKEREFVAAIAPGGTTYYADSVKGRFTISRDNAKNTVYLQMNSLKPEDTAVYYCAVVAPDSYSLVNRYDVYLYYWGQGTQVTVSS

SEQ ID NO: 24573 - protein, 118 aa, Artificial Sequence
  Chemically Synthesized
QVQLQESGGGLVQAGGSLRLSCAASGTIFYSHPMGWYRQAPGKEREFVATINWGSSTYYADSVKGRFTISRDNAKNTVYLQMNSLKPEDTAVYYCAARRVGLSYHYYWGQGTQVTVSS

SEQ ID NO: 24574 - protein, 126 aa, Artificial Sequence
  Chemically Synthesized
QVQLQESGGGLVQAGGSLRLSCAASGYISISDVMGWYRQAPGKEREFVATINFGTSTYYADSVKGRFTISRDNAKNTVYLQMNSLKPEDTAVYYCAADYFDRYDGHYVGTYRPYYWGQGTQVTVSS

SEQ ID NO: 24575 - protein, 118 aa, Artificial Sequence
  Chemically Synthesized
QVQLQESGGGLVQAGGSLRLSCAASGTIFTTVYMGWYRQAPGKEREFVASISYGSNTYYADSVKGRFTISRDNAKNTVYLQMNSLKPEDTAVYYCAAYDTYNAGLNYWGQGTQVTVSS

SEQ ID NO: 24576 - protein, 126 aa, Artificial Sequence
  Chemically Synthesized
QVQLQESGGGLVQAGGSLRLSCAASGNISYVDRMGWYRQAPGKEREFVATITYGSSTYYADSVKGRFTISRDNAKNTVYLQMNSLKPEDTAVYYCAVPDRDATPADDGTRFGYYYWGQGTQVTVSS

SEQ ID NO: 24577 - protein, 118 aa, Artificial Sequence
  Chemically Synthesized
QVQLQESGGGLVQAGGSLRLSCAASGYIFYPYLMGWYRQAPGKEREFVASIDLGSNTNYADSVKGRFTISRDNAKNTVYLQMNSLKPEDTAVYYCAAYRDAVYLFGYWGQGTQVTVSS

SEQ ID NO: 24578 - protein, 118 aa, Artificial Sequence
  Chemically Synthesized
QVQLQESGGGLVQAGGSLRLSCAASGTISLYNAMGWYRQAPGKERELVATIDWGTITNYADSVKGRFTISRDNAKNTVYLQMNSLKPEDTAVYYCAASYSVYDPLIYWGQGTQVTVSS

SEQ ID NO: 24579 - protein, 118 aa, Artificial Sequence
  Chemically Synthesized
QVQLQESGGGLVQAGGSLRLSCAASGSISFGYIMGWYRQAPGKEREFVAAIDKGGSTYYADSVKGRFTISRDNAKNTVYLQMNSLKPEDTAVYYCAADDTYRDDLGYWGQGTQVTVSS

SEQ ID NO: 24580 - protein, 120 aa, Artificial Sequence
  Chemically Synthesized
QVQLQESGGGLVQAGGSLRLSCAASGSISPVRDMGWYRQAPGKEREFVASITGGTSTNYADSVKGRFTISRDNAKNTVYLQMNSLKPEDTAVYYCAALYDVVEYGYPYYWGQGTQVTVSS

SEQ ID NO: 24581 - protein, 119 aa, Artificial Sequence
  Chemically Synthesized
QVQLQESGGGLVQAGGSLRLSCAASGYIFGYWDMGWYRQAPGKEREFVAAISPGTNTNYADSVKGRFTISRDNAKNTVYLQMNSLKPEDTAVYYCAAAYGNVDVHFVYWGQGTQVTVSS

SEQ ID NO: 24582 - protein, 112 aa, Artificial Sequence
  Chemically Synthesized
QVQLQESGGGLVQAGGSLRLSCAASGSIFPSDYMGWYRQAPGKEREFVAGIGNGSITNYADSVKGRFTISRDNAKNTVYLQMNSLKPEDTAVYYCAWYHLYWGQGTQVTVSS

SEQ ID NO: 24583 - protein, 118 aa, Artificial Sequence
  Chemically Synthesized
QVQLQESGGGLVQAGGSLRLSCAASGSIFGTRAMGWYRQAPGKERELVAAIGTGASTNYADSVKGRFTISRDNAKNTVYLQMNSLKPEDTAVYYCAAEQYTPGGHRYWGQGTQVTVSS

SEQ ID NO: 24584 - protein, 117 aa, Artificial Sequence
  Chemically Synthesized
QVQLQESGGGLVQAGGSLRLSCAASGYIFTDGKMGWYRQAPGKERELVAAITVGGITNYADSVKGRFTISRDNAKNTVYLQMNSLKPEDTAVYYCAVDWYDIRHGYWGQGTQVTVSS

SEQ ID NO: 24585 - protein, 118 aa, Artificial Sequence
  Chemically Synthesized
QVQLQESGGGLVQAGGSLRLSCAASGNISFYYDMGWYRQAPGKERELVAGIAEGGNTNYADSVKGRFTISRDNAKNTVYLQMNSLKPEDTAVYYCAVYGYWDGGHNYWGQGTQVTVSS

SEQ ID NO: 24586 - protein, 122 aa, Artificial Sequence
  Chemically Synthesized
QVQLQESGGGLVQAGGSLRLSCAASGNIFVDAWMGWYRQAPGKERELVATITDGASTYYADSVKGRFTISRDNAKNTVYLQMNSLKPEDTAVYYCAAYTDAPQGIRYVHAYWGQGTQVTVSS

SEQ ID NO: 24587 - protein, 122 aa, Artificial Sequence
  Chemically Synthesized
QVQLQESGGGLVQAGGSLRLSCAASGNISVNRVMGWYRQAPGKEREFVATINPGSSTNYADSVKGRFTISRDNAKNTVYLQMNSLKPEDTAVYYCAVFSQDSIGRDNDLQYWGQGTQVTVSS

SEQ ID NO: 24588 - protein, 122 aa, Artificial Sequence
  Chemically Synthesized
QVQLQESGGGLVQAGGSLRLSCAASGNIFDYRYMGWYRQAPGKERELVAAIATGASTNYADSVKGRFTISRDNAKNTVYLQMNSLKPEDTAVYYCAVAHYAQLRGAIYHPYWGQGTQVTVSS

SEQ ID NO: 24589 - protein, 122 aa, Artificial Sequence
  Chemically Synthesized
QVQLQESGGGLVQAGGSLRLSCAASGTIFGLAYMGWYRQAPGKEREFVAAIAYGTTTNYADSVKGRFTISRDNAKNTVYLQMNSLKPEDTAVYYCAAYDRNLATTYPGYLYWGQGTQVTVSS

SEQ ID NO: 24590 - protein, 107 aa, Artificial Sequence
  Chemically Synthesized
QVQLQESGGGLVQAGGSLRLSCAASGNIFLLGMGWYRQAPGKERELVATIVSVLLPYADSVKGRFTISRDNAKNTVYLQMNSLKPEDTAVYYCAVYWGQGTQVTVSS

SEQ ID NO: 24591 - protein, 121 aa, Artificial Sequence
  Chemically Synthesized
QVQLQESGGGLVQAGGSLRLSCAASGTISKSTAMGWYRQAPGKERELVASIDYGSITYYADSVKGRFTISRDNAKNTVYLQMNSLKPEDTAVYYCAARTVDNADQQSFMYWGQGTQVTVSS

SEQ ID NO: 24592 - protein, 117 aa, Artificial Sequence
  Chemically Synthesized
QVQLQESGGGLVQAGGSLRLSCAASGYISPYTDMGWYRQAPGKERELVAAIARGGITYYADSVKGRFTISRDNAKNTVYLQMNSLKPEDTAVYYCAVSSPTGSTLYWGQGTQVTVSS

SEQ ID NO: 24593 - protein, 117 aa, Artificial Sequence
  Chemically Synthesized
QVQLQESGGGLVQAGGSLRLSCAASGNISFRGMGWYRQAPGKERELVAGINLGSITYYADSVKGRFTISRDNAKNTVYLQMNSLKPEDTAVYYCAAIDLYYSSHSYWGQGTQVTVSS

SEQ ID NO: 24594 - protein, 118 aa, Artificial Sequence
  Chemically Synthesized
QVQLQESGGGLVQAGGSLRLSCAASGYIFTYFYMGWYRQAPGKERELVAGIGYGSNTYYADSVKGRFTISRDNAKNTVYLQMNSLKPEDTAVYYCAVTKANLNGYDYWGQGTQVTVSS

SEQ ID NO: 24595 - protein, 117 aa, Artificial Sequence
  Chemically Synthesized
QVQLQESGGGLVQAGGSLRLSCAASGNIFVYNGMGWYRQAPGKEREFVATIATGTITYYADSVKGRFTISRDNAKNTVYLQMNSLKPEDTAVYYCAATPTYSTTNYWGQGTQVTVSS

SEQ ID NO: 24596 - protein, 118 aa, Artificial Sequence
  Chemically Synthesized
QVQLQESGGGLVQAGGSLRLSCAASGYIFLYDAMGWYRQAPGKEREFVAGIDDGTSTNYADSVKGRFTISRDNAKNTVYLQMNSLKPEDTAVYYCAVDPIARDYHVYWGQGTQVTVSS

SEQ ID NO: 24597 - protein, 118 aa, Artificial Sequence
  Chemically Synthesized
QVQLQESGGGLVQAGGSLRLSCAASGTISGTNTMGWYRQAPGKERELVASIDAGGNTYYADSVKGRFTISRDNAKNTVYLQMNSLKPEDTAVYYCAVLELYYYYFLYWGQGTQVTVSS

SEQ ID NO: 24598 - protein, 121 aa, Artificial Sequence
  Chemically Synthesized
QVQLQESGGGLVQAGGSLRLSCAASGTFLVTLMGWYRQAPGKERELVAGIDSGTSTNYADSVKGRFTISRDNAKNTVYLQMNSLKPEDTAVYYCAVWYYNPRYVLALHRYWGQGTQVTVSS

SEQ ID NO: 24599 - protein, 122 aa, Artificial Sequence
  Chemically Synthesized
QVQLQESGGGLVQAGGSLRLSCAASGYIFQSDYMGWYRQAPGKERELVATISSGTTTYYADSVKGRFTISRDNAKNTVYLQMNSLKPEDTAVYYCAVTDNSQGAGNSVHYYWGQGTQVTVSS

SEQ ID NO: 24600 - protein, 115 aa, Artificial Sequence
  Chemically Synthesized
QVQLQESGGGLVQAGGSLRLSCAASGYISYGGYMGWYRQAPGKEREFLPVLVVLPYADSVKGRFTISRDNAKNTVYLQMNSLKPEDTAVYYCAVTFGRYFYFGYWGQGTQVTVSS

SEQ ID NO: 24601 - protein, 118 aa, Artificial Sequence
  Chemically Synthesized
QVQLQESGGGLVQAGGSLRLSCAASGNIFQVPYMGWYRQAPGKEREFVATIAGGASTYYADSVKGRFTISRDNAKNTVYLQMNSLKPEDTAVYYCAAPSGQYLRSFYWGQGTQVTVSS

SEQ ID NO: 24602 - protein, 122 aa, Artificial Sequence
  Chemically Synthesized
QVQLQESGGGLVQAGGSLRLSCAASGSIFQTWGMGWYRQAPGKERELVAGINYGSTTNYADSVKGRFTISRDNAKNTVYLQMNSLKPEDTAVYYCAASVNYAPYQRHRHIYWGQGTQVTVSS

SEQ ID NO: 24603 - protein, 118 aa, Artificial Sequence
  Chemically Synthesized
QVQLQESGGGLVQAGGSLRLSCAASGYIFVHSAMGWYRQAPGKEREFVASINLGTITNYADSVKGRFTISRDNAKNTVYLQMNSLKPEDTAVYYCAALTYLRYGFYYWGQGTQVTVSS

SEQ ID NO: 24604 - protein, 118 aa, Artificial Sequence
  Chemically Synthesized
QVQLQESGGGLVQAGGSLRLSCAASGNIFTLYYMGWYRQAPGKEREFVASIGGGTITYYADSVKGRFTISRDNAKNTVYLQMNSLKPEDTAVYYCAVNSFYLYYHRYWGQGTQVTVSS

SEQ ID NO: 24605 - protein, 118 aa, Artificial Sequence
  Chemically Synthesized
QVQLQESGGGLVQAGGSLRLSCAASGYISWSYAMGWYRQAPGKERELVAAINYGASTNYADSVKGRFTISRDNAKNTVYLQMNSLKPEDTAVYYCAVYKLGPTIFDYWGQGTQVTVSS

SEQ ID NO: 24606 - protein, 118 aa, Artificial Sequence
  Chemically Synthesized
QVQLQESGGGLVQAGGSLRLSCAASGTISYADYMGWYRQAPGKEREFVAAINYGATTYYADSVKGRFTISRDNAKNTVYLQMNSLKPEDTAVYYCAAEPRGNADHIYWGQGTQVTVSS

SEQ ID NO: 24607 - protein, 118 aa, Artificial Sequence
  Chemically Synthesized
QVQLQESGGGLVQAGGSLRLSCAASGYISDTRKMGWYRQAPGKERELVAAIGQGTITNYADSVKGRFTISRDNAKNTVYLQMNSLKPEDTAVYYCAATQLDYYVHDYWGQGTQVTVSS

SEQ ID NO: 24608 - protein, 123 aa, Artificial Sequence
  Chemically Synthesized
QVQLQESGGGLVQAGGSLRLSCAASGTISFSQIMGWYRQAPGKERELVATIDLGTTTNYADSVKGRFTISRDNAKNTVYLQMNSLKPEDTAVYYCAVSIDYDYETVYGDYAYWGQGTQVTVSS

SEQ ID NO: 24609 - protein, 118 aa, Artificial Sequence
  Chemically Synthesized
QVQLQESGGGLVQAGGSLRLSCAASGSISAYNAMGWYRQAPGKEREFVASINDGATTYYADSVKGRFTISRDNAKNTVYLQMNSLKPEDTAVYYCAVVGDYASLHTYWGQGTQVTVSS

SEQ ID NO: 24610 - protein, 122 aa, Artificial Sequence
  Chemically Synthesized
QVQLQESGGGLVQAGGSLRLSCAASGSISGLRVMGWYRQAPGKERELVAGIAGGTTTYYADSVKGRFTISRDNAKNTVYLQMNSLKPEDTAVYYCAVSGYQTYGRKHYYSYWGQGTQVTVSS

SEQ ID NO: 24611 - protein, 121 aa, Artificial Sequence
  Chemically Synthesized
QVQLQESGGGLVQAGGSLRLSCAASGTISWPRFMGWYRQAPGKERELVAGIGDGAITNYADSVKGRFTISRDNAKNTVYLQMNSLKPEDTAVYYCAATGVLTRVLTSTFYWGQGTQVTVSS

SEQ ID NO: 24612 - protein, 118 aa, Artificial Sequence
  Chemically Synthesized
QVQLQESGGGLVQAGGSLRLSCAASGYIFYTLRMGWYRQAPGKEREFVAGISIGATTYYADSVKGRFTISRDNAKNTVYLQMNSLKPEDTAVYYCAVPRYGSSPYWYWGQGTQVTVSS

SEQ ID NO: 24613 - protein, 125 aa, Artificial Sequence
  Chemically Synthesized
QVQLQESGGGLVQAGGSLRLSCAASGNIFLYDLMGWYRQAPGKERELVAGIAYGANTYYADSVKGRFTISRDNAKNTVYLQMNSLKPEDTAVYYCAADIYLGYNSSLSTTVVFYWGQGTQVTVSS

SEQ ID NO: 24614 - protein, 118 aa, Artificial Sequence
  Chemically Synthesized
QVQLQESGGGLVQAGGSLRLSCAASGYISGDWDMGWYRQAPGKEREFVATIDRGGSTYYADSVKGRFTISRDNAKNTVYLQMNSLKPEDTAVYYCAVAWRTYGGFHYWGQGTQVTVSS

SEQ ID NO: 24615 - protein, 118 aa, Artificial Sequence
  Chemically Synthesized
QVQLQESGGGLVQAGGSLRLSCAASGNIFGRLYMGWYRQAPGKEREFVAGIGVGGNTYYADSVKGRFTISRDNAKNTVYLQMNSLKPEDTAVYYCAAVSWDQPGYHYWGQGTQVTVSS

SEQ ID NO: 24616 - protein, 125 aa, Artificial Sequence
  Chemically Synthesized
QVQLQESGGGLVQAGGSLRLSCAASGLFLTTTMGWYRQAPGKERELVATIAAGGNTYYADSVKGRFTISRDNAKNTVYLQMNSLKPEDTAVYYCAARDYAKYTGYRIRSYTYGYWGQGTQVTVSS

SEQ ID NO: 24617 - protein, 121 aa, Artificial Sequence
  Chemically Synthesized
QVQLQESGGGLVQAGGSLRLSCAASGSISGYVLMGWYRQAPGKERELVAAITRGASTNYADSVKGRFTISRDNAKNTVYLQMNSLKPEDTAVYYCAVDINNKGTLHLFHYWGQGTQVTVSS

SEQ ID NO: 24618 - protein, 117 aa, Artificial Sequence
  Chemically Synthesized
QVQLQESGGGLVQAGGSLRLSCAASGSISTFRMGWYRQAPGKERELVAGISYGGSTNYADSVKGRFTISRDNAKNTVYLQMNSLKPEDTAVYYCAVITDWDGYLYYWGQGTQVTVSS

SEQ ID NO: 24619 - protein, 122 aa, Artificial Sequence
  Chemically Synthesized
QVQLQESGGGLVQAGGSLRLSCAASGSIFDYAVMGWYRQAPGKERELVATIAYGGTTYYADSVKGRFTISRDNAKNTVYLQMNSLKPEDTAVYYCAVYWDPRVAYFVPHDYWGQGTQVTVSS

SEQ ID NO: 24620 - protein, 117 aa, Artificial Sequence
  Chemically Synthesized
QVQLQESGGGLVQAGGSLRLSCAASGSIFAHFWMGWYRQAPGKERELVATIAYGGNTNYADSVKGRFTISRDNAKNTVYLQMNSLKPEDTAVYYCAAYSNAAGYLYWGQGTQVTVSS

SEQ ID NO: 24621 - protein, 122 aa, Artificial Sequence
  Chemically Synthesized
QVQLQESGGGLVQAGGSLRLSCAASGYIFYPYLMGWYRQAPGKERELVAAITRGGTTYYADSVKGRFTISRDNAKNTVYLQMNSLKPEDTAVYYCAAVYDPFSASDAYYYYWGQGTQVTVSS

SEQ ID NO: 24622 - protein, 122 aa, Artificial Sequence
  Chemically Synthesized
QVQLQESGGGLVQAGGSLRLSCAASGTISYSRYMGWYRQAPGKERELVAGINQGSSTNYADSVKGRFTISRDNAKNTVYLQMNSLKPEDTAVYYCAVTDLQDIIRDDYHTYWGQGTQVTVSS

SEQ ID NO: 24623 - protein, 118 aa, Artificial Sequence
  Chemically Synthesized
QVQLQESGGGLVQAGGSLRLSCAASGYIFFVDNMGWYRQAPGKERELVASINDGGTTNYADSVKGRFTISRDNAKNTVYLQMNSLKPEDTAVYYCAAGLHLSWSLSYWGQGTQVTVSS

SEQ ID NO: 24624 - protein, 126 aa, Artificial Sequence
  Chemically Synthesized
QVQLQESGGGLVQAGGSLRLSCAASGSISDTVRMGWYRQAPGKEREFVAGIASGAITYYADSVKGRFTISRDNAKNTVYLQMNSLKPEDTAVYYCAVQTDANDRAAEFDYSPLVYWGQGTQVTVSS

SEQ ID NO: 24625 - protein, 109 aa, Artificial Sequence
  Chemically Synthesized
QVQLQESGGGLVQAGGSLRLSCAASGSIFGSTMGWYRQAPGKERELVATITPGTTTYYADSVKGRFTISRDNAKNTVYLQMNSLKPEDTAVYYCAVPYWGQGTQVTVSS

SEQ ID NO: 24626 - protein, 126 aa, Artificial Sequence
  Chemically Synthesized
QVQLQESGGGLVQAGGSLRLSCAASGNISPHAFMGWYRQAPGKEREFVAGIDKGGNTNYADSVKGRFTISRDNAKNTVYLQMNSLKPEDTAVYYCAVGAYDYVYTTTYYWYYYTYWGQGTQVTVSS

SEQ ID NO: 24627 - protein, 122 aa, Artificial Sequence
  Chemically Synthesized
QVQLQESGGGLVQAGGSLRLSCAASGSIFGGYGMGWYRQAPGKERELVAAISAGTNTNYADSVKGRFTISRDNAKNTVYLQMNSLKPEDTAVYYCAVTYQRYRNTTADHLYWGQGTQVTVSS

SEQ ID NO: 24628 - protein, 118 aa, Artificial Sequence
  Chemically Synthesized
QVQLQESGGGLVQAGGSLRLSCAASGTIFGHNYMGWYRQAPGKERELVAGISRGTITYYADSVKGRFTISRDNAKNTVYLQMNSLKPEDTAVYYCAVQISSIDVFYYWGQGTQVTVSS

SEQ ID NO: 24629 - protein, 118 aa, Artificial Sequence
  Chemically Synthesized
QVQLQESGGGLVQAGGSLRLSCAASGSISTPSFMGWYRQAPGKERELVATIGQGSTTYYADSVKGRFTISRDNAKNTVYLQMNSLKPEDTAVYYCAAANDTTAVFDYWGQGTQVTVSS

SEQ ID NO: 24630 - protein, 117 aa, Artificial Sequence
  Chemically Synthesized
QVQLQESGGGLVQAGGSLRLSCAASGSIFAAQSMGWYRQAPGKEREFVAAIAGGAITNYADSVKGRFTISRDNAKNTVYLQMNSLKPEDTAVYYCAVIYDSTVSMYWGQGTQVTVSS

SEQ ID NO: 24631 - protein, 126 aa, Artificial Sequence
  Chemically Synthesized
QVQLQESGGGLVQAGGSLRLSCAASGYISGSYYMGWYRQAPGKEREFVASIAYGGSTNYADSVKGRFTISRDNAKNTVYLQMNSLKPEDTAVYYCAVYQYPSYYQAWLRFGLHTYWGQGTQVTVSS

SEQ ID NO: 24632 - protein, 118 aa, Artificial Sequence
  Chemically Synthesized
QVQLQESGGGLVQAGGSLRLSCAASGSIFVYWYMGWYRQAPGKERELVASINIGGNTYYADSVKGRFTISRDNAKNTVYLQMNSLKPEDTAVYYCAVGLKAPADHVYWGQGTQVTVSS

SEQ ID NO: 24633 - protein, 118 aa, Artificial Sequence
  Chemically Synthesized
QVQLQESGGGLVQAGGSLRLSCAASGSIFPYGFMGWYRQAPGKEREFVAGITRGGSTNYADSVKGRFTISRDNAKNTVYLQMNSLKPEDTAVYYCAVVIGGTWFFLYWGQGTQVTVSS

SEQ ID NO: 24634 - protein, 120 aa, Artificial Sequence
  Chemically Synthesized
QVQLQESGGGLVQAGGSLRLSCAASGTILLTLMGWYRQAPGKEREFVAAIGSVLLPYADSVKGRFTISRDNAKNTVYLQMNSLKPEDTAVYYCAADRVDGYWTADVFDYWGQGTQVTVSS

SEQ ID NO: 24635 - protein, 118 aa, Artificial Sequence
  Chemically Synthesized
QVQLQESGGGLVQAGGSLRLSCAASGNIFDDDYMGWYRQAPGKEREFVATIAPGTNTNYADSVKGRFTISRDNAKNTVYLQMNSLKPEDTAVYYCAAGEDGNVGHTYWGQGTQVTVSS

SEQ ID NO: 24636 - protein, 122 aa, Artificial Sequence
  Chemically Synthesized
QVQLQESGGGLVQAGGSLRLSCAASGYIFDAVDMGWYRQAPGKERELVASINGGGTTYYADSVKGRFTISRDNAKNTVYLQMNSLKPEDTAVYYCAVNTPDVAYLRQGHDYWGQGTQVTVSS

SEQ ID NO: 24637 - protein, 121 aa, Artificial Sequence
  Chemically Synthesized
QVQLQESGGGLVQAGGSLRLSCAASGNIFRNFYMGWYRQAPGKERELVAAISPGTSTYYADSVKGRFTISRDNAKNTVYLQMNSLKPEDTAVYYCAAYYDYDVYGDSTIYWGQGTQVTVSS

SEQ ID NO: 24638 - protein, 121 aa, Artificial Sequence
  Chemically Synthesized
QVQLQESGGGLVQAGGSLRLSCAASGYISRAYLMGWYRQAPGKERELVATIAYGTTNYADSVKGRFTISRDNAKNTVYLQMNSLKPEDTAVYYCAVYLVDDGGFAYSYVYWGQGTQVTVSS

SEQ ID NO: 24639 - protein, 117 aa, Artificial Sequence
  Chemically Synthesized
QVQLQESGGGLVQAGGSLRLSCAASGNISDDRGMGWYRQAPGKEREFVAILVTVVIPYADSVKGRFTISRDNAKNTVYLQMNSLKPEDTAVYYCAVSSDETNYFDYWGQGTQVTVSS

SEQ ID NO: 24640 - protein, 120 aa, Artificial Sequence
  Chemically Synthesized
QVQLQESGGGLVQAGGSLRLSCAASGSISDRYYMGWYRQAPGKEREFVAGITNGGTTNYADSVKGRFTISRDNAKNTVYLQMNSLKPEDTAVYYCAARYRPLYWSDHNYWGQGTQVTVSS

SEQ ID NO: 24641 - protein, 118 aa, Artificial Sequence
  Chemically Synthesized
QVQLQESGGGLVQAGGSLRLSCAASGTIFGYTSMGWYRQAPGKEREFVATIAYGSSTYYADSVKGRFTISRDNAKNTVYLQMNSLKPEDTAVYYCAAGYYGYYVLDYWGQGTQVTVSS

SEQ ID NO: 24642 - protein, 118 aa, Artificial Sequence
  Chemically Synthesized
QVQLQESGGGLVQAGGSLRLSCAASGYFLFCLTMGWYRQAPGKEREFVASINWGTTTYYADSVKGRFTISRDNAKNTVYLQMNSLKPEDTAVYYCAVKANGADPLHYWGQGTQVTVSS

SEQ ID NO: 24643 - protein, 118 aa, Artificial Sequence
  Chemically Synthesized
QVQLQESGGGLVQAGGSLRLSCAASGTISPHPYMGWYRQAPGKERELVAGIGGGSNTNYADSVKGRFTISRDNAKNTVYLQMNSLKPEDTAVYYCAAYYLRPFSHTYWGQGTQVTVSS

SEQ ID NO: 24644 - protein, 113 aa, Artificial Sequence
  Chemically Synthesized
QVQLQESGGGLVQAGGSLRLSCAASGNISPRSVMGWYRQAPGKEREFVAGIDGGSSTYYADSVKGRFTISRDNAKNTVYLQMNSLKPEDTAVYYCAVDASSYWGQGTQVTVSS

SEQ ID NO: 24645 - protein, 118 aa, Artificial Sequence
  Chemically Synthesized
QVQLQESGGGLVQAGGSLRLSCAASGTIFEAYYMGWYRQAPGKEREFVAAIGHGSSTYYADSVKGRFTISRDNAKNTVYLQMNSLKPEDTAVYYCAAWGLLYRYYGYWGQGTQVTVSS

SEQ ID NO: 24646 - protein, 121 aa, Artificial Sequence
  Chemically Synthesized
QVQLQESGGGLVQAGGSLRLSCAASGTISAYSVMGWYRQAPGKERELVAGIADGASTYADSVKGRFTISRDNAKNTVYLQMNSLKPEDTAVYYCAVDRDNWPGVIVHHNYWGQGTQVTVSS

SEQ ID NO: 24647 - protein, 111 aa, Artificial Sequence
  Chemically Synthesized
QVQLQESGGGLVQAGGSLRLSCAASGNISDRYVMGWYRQAPGKERELVASITAGASTYYADSVKGRFTISRDNAKNTVYLQMNSLKPEDTAVYYCATFFYWGQGTQVTVSS

SEQ ID NO: 24648 - protein, 118 aa, Artificial Sequence
  Chemically Synthesized
QVQLQESGGGLVQAGGSLRLSCAASGYISDTSYMGWYRQAPGKERELVAGIAHGTNTYYADSVKGRFTISRDNAKNTVYLQMNSLKPEDTAVYYCAVPFDPYDDYNYWGQGTQVTVSS

SEQ ID NO: 24649 - protein, 127 aa, Artificial Sequence
  Chemically Synthesized
QVQLQESGGGLVQAGGSLRLSCAASGNIFYLSYMGWYRQAPGKEREFVAAISYGTITNYADSVKGRFTISRDNAKNTVYLQMNSLKPEDTAVYYCAADWYPYAPTQHRDEPNGYDYWGQGTQVTVSS

SEQ ID NO: 24650 - protein, 111 aa, Artificial Sequence
  Chemically Synthesized
QVQLQESGGGLVQAGGSLRLSCAASGTIFWQGYMGWYRQAPGKERELVAAINYGANTNYADSVKGRFTISRDNAKNTVYLQMNSLKPEDTAVYYCARHYYWGQGTQVTVSS

SEQ ID NO: 24651 - protein, 118 aa, Artificial Sequence
  Chemically Synthesized
QVQLQESGGGLVQAGGSLRLSCAASGTISDADIMGWYRQAPGKERELVAGIGLGSNTYYADSVKGRFTISRDNAKNTVYLQMNSLKPEDTAVYYCAAYSYYDYILAYWGQGTQVTVSS

SEQ ID NO: 24652 - protein, 114 aa, Artificial Sequence
  Chemically Synthesized
QVQLQESGGGLVQAGGSLRLSCAASGNISYAETMGWYRQAPGKERELVAGITYGSNTYYADSVKGRFTISRDNAKNTVYLQMNSLKPEDTAVYYCAASVTVIYWGQGTQVTVSS

SEQ ID NO: 24653 - protein, 126 aa, Artificial Sequence
  Chemically Synthesized
QVQLQESGGGLVQAGGSLRLSCAASGTISGDQFMGWYRQAPGKERELVASIGVGTTTYYADSVKGRFTISRDNAKNTVYLQMNSLKPEDTAVYYCAVDSPDGDGYDSQDGLEYGYWGQGTQVTVSS

SEQ ID NO: 24654 - protein, 121 aa, Artificial Sequence
  Chemically Synthesized
QVQLQESGGGLVQAGGSLRLSCAASGTISDDIAMGWYRQAPGKERELVASIADGGTTNYADSVKGRFTISRDNAKNTVYLQMNSLKPEDTAVYYCAARRWDLLNPGTSIYWGQGTQVTVSS

SEQ ID NO: 24655 - protein, 120 aa, Artificial Sequence
  Chemically Synthesized
QVQLQESGGGLVQAGGSLRLSCAASGTIFDRTRMGWYRQAPGKERELVATITHGTTTNYADSVKGRFTISRDNAKNTVYLQMNSLKPEDTAVYYCAAAFDKYPHGGHGYWGQGTQVTVSS

SEQ ID NO: 24656 - protein, 118 aa, Artificial Sequence
  Chemically Synthesized
QVQLQESGGGLVQAGGSLRLSCAASGSISASYQMGWYRQAPGKEREFVASISVGSNTNYADSVKGRFTISRDNAKNTVYLQMNSLKPEDTAVYYCAVYASRVDLYWYWGQGTQVTVSS

SEQ ID NO: 24657 - protein, 118 aa, Artificial Sequence
  Chemically Synthesized
QVQLQESGGGLVQAGGSLRLSCAASGTIFDSREMGWYRQAPGKERELVAAITRGASTYYADSVKGRFTISRDNAKNTVYLQMNSLKPEDTAVYYCAVIAYLDRDHYYWGQGTQVTVSS

SEQ ID NO: 24658 - protein, 117 aa, Artificial Sequence
  Chemically Synthesized
QVQLQESGGGLVQAGGSLRLSCAASGTISPWPIMGWYRQAPGKERELVAAIGYGGSTYYADSVKGRFTISRDNAKNTVYLQMNSLKPEDTAVYYCAAYPNGGGHYYWGQGTQVTVSS

SEQ ID NO: 24659 - protein, 126 aa, Artificial Sequence
  Chemically Synthesized
QVQLQESGGGLVQAGGSLRLSCAASGSIFYDPIMGWYRQAPGKERELVAGIAYGGSTNYADSVKGRFTISRDNAKNTVYLQMNSLKPEDTAVYYCAVSWWTRHYPSTNGPSPFTYWGQGTQVTVSS

SEQ ID NO: 24660 - protein, 119 aa, Artificial Sequence
  Chemically Synthesized
QVQLQESGGGLVQAGGSLRLSCAASGSISQAYFMGWYRQAPGKEREFVAAIGGGGNTYYADSVKGRFTISRDNAKNTVYLQMNSLKPEDTAVYYCAVAYRGSPPYFTYWGQGTQVTVSS

SEQ ID NO: 24661 - protein, 122 aa, Artificial Sequence
  Chemically Synthesized
QVQLQESGGGLVQAGGSLRLSCAASGSIFPPWGMGWYRQAPGKEREFVAAIAQGTSTNYADSVKGRFTISRDNAKNTVYLQMNSLKPEDTAVYYCAARYAPEIRRDVGHIYWGQGTQVTVSS

SEQ ID NO: 24662 - protein, 118 aa, Artificial Sequence
  Chemically Synthesized
QVQLQESGGGLVQAGGSLRLSCAASGNISRTYQMGWYRQAPGKERELVAAISYGTTTNYADSVKGRFTISRDNAKNTVYLQMNSLKPEDTAVYYCAAYDTVFVAHWYWGQGTQVTVSS

SEQ ID NO: 24663 - protein, 121 aa, Artificial Sequence
  Chemically Synthesized
QVQLQESGGGLVQAGGSLRLSCAASGYISVLYTMGWYRQAPGKERELVASITFGGTNYADSVKGRFTISRDNAKNTVYLQMNSLKPEDTAVYYCAATYPLSSVWYYAHRYWGQGTQVTVSS

SEQ ID NO: 24664 - protein, 126 aa, Artificial Sequence
  Chemically Synthesized
QVQLQESGGGLVQAGGSLRLSCAASGNIFYRALMGWYRQAPGKERELVAAINGGASTNYADSVKGRFTISRDNAKNTVYLQMNSLKPEDTAVYYCAASYADLKLYRQQWFRDFAYWGQGTQVTVSS

SEQ ID NO: 24665 - protein, 122 aa, Artificial Sequence
  Chemically Synthesized
QVQLQESGGGLVQAGGSLRLSCAASGTIFLQYRMGWYRQAPGKEREFVASIDAGTTTNYADSVKGRFTISRDNAKNTVYLQMNSLKPEDTAVYYCAAHVRSLFFRWPSFDYWGQGTQVTVSS

SEQ ID NO: 24666 - protein, 117 aa, Artificial Sequence
  Chemically Synthesized
QVQLQESGGGLVQAGGSLRLSCAASGTIFRPHTMGWYRQAPGKEREFVASIGAGATNYADSVKGRFTISRDNAKNTVYLQMNSLKPEDTAVYYCAARAYYNGDLYYWGQGTQVTVSS

SEQ ID NO: 24667 - protein, 122 aa, Artificial Sequence
  Chemically Synthesized
QVQLQESGGGLVQAGGSLRLSCAASGSIFRTVYMGWYRQAPGKERELVATITKGTTTYYADSVKGRFTISRDNAKNTVYLQMNSLKPEDTAVYYCAAGDDEYGNDYTSHQYWGQGTQVTVSS

SEQ ID NO: 24668 - protein, 118 aa, Artificial Sequence
  Chemically Synthesized
QVQLQESGGGLVQAGGSLRLSCAASGSISFPYVMGWYRQAPGKEREFVASISDGGNTYYADSVKGRFTISRDNAKNTVYLQMNSLKPEDTAVYYCAVFLFSPSDLDYWGQGTQVTVSS

SEQ ID NO: 24669 - protein, 118 aa, Artificial Sequence
  Chemically Synthesized
QVQLQESGGGLVQAGGSLRLSCAASGSISSSDQMGWYRQAPGKERELVAAIAHGTSTNYADSVKGRFTISRDNAKNTVYLQMNSLKPEDTAVYYCAAYARQGTPYWYWGQGTQVTVSS

SEQ ID NO: 24670 - protein, 126 aa, Artificial Sequence
  Chemically Synthesized
QVQLQESGGGLVQAGGSLRLSCAASGTISQNSYMGWYRQAPGKERELVAAISTGANTNYADSVKGRFTISRDNAKNTVYLQMNSLKPEDTAVYYCAVLLLFEIGGPYKATRGHAYWGQGTQVTVSS

SEQ ID NO: 24671 - protein, 125 aa, Artificial Sequence
  Chemically Synthesized
QVQLQESGGGLVQAGGSLRLSCAASGSISSDTSMGWYRQAPGKERELVATISYGASTYYADSVKGRFTISRDNAKNTVYLQMNSLKPEDTAVYYCAVYYSTNRYGQYWYPLFGYWGQGTQVTVSS

SEQ ID NO: 24672 - protein, 126 aa, Artificial Sequence
  Chemically Synthesized
QVQLQESGGGLVQAGGSLRLSCAASGTIFWDPSMGWYRQAPGKERELVASIDVGGNTYYADSVKGRFTISRDNAKNTVYLQMNSLKPEDTAVYYCAADQYQDYWATAISARYFWYWGQGTQVTVSS

SEQ ID NO: 24673 - protein, 122 aa, Artificial Sequence
  Chemically Synthesized
QVQLQESGGGLVQAGGSLRLSCAASGSISRWRIMGWYRQAPGKEREFVAAITQGANTNYADSVKGRFTISRDNAKNTVYLQMNSLKPEDTAVYYCAVLDIYDGYAYRAHRYWGQGTQVTVSS

SEQ ID NO: 24674 - protein, 110 aa, Artificial Sequence
  Chemically Synthesized
QVQLQESGGGLVQAGGSLRLSCAASGYISTSYGMGWYRQAPGKERELVAAIDYGSNTNYADSVKGRFTISRDNAKNTVYLQMNSLKPEDTAVYYCALTYWGQGTQVTVSS

SEQ ID NO: 24675 - protein, 118 aa, Artificial Sequence
  Chemically Synthesized
QVQLQESGGGLVQAGGSLRLSCAASGNIFGYVYMGWYRQAPGKEREFVASIAYGAITYYADSVKGRFTISRDNAKNTVYLQMNSLKPEDTAVYYCAVRRLYYARHTYWGQGTQVTVSS

SEQ ID NO: 24676 - protein, 118 aa, Artificial Sequence
  Chemically Synthesized
QVQLQESGGGLVQAGGSLRLSCAASGYISGTDTMGWYRQAPGKEREFVATISVGTITNYADSVKGRFTISRDNAKNTVYLQMNSLKPEDTAVYYCAVDYHYASDFDYWGQGTQVTVSS

SEQ ID NO: 24677 - protein, 112 aa, Artificial Sequence
  Chemically Synthesized
QVQLQESGGGLVQAGGSLRLSCAASGSIFIWDYMGWYRQAPGKERELVATITAGGNTYYADSVKGRFTISRDNAKNTVYLQMNSLKPEDTAVYYCANRVIYWGQGTQVTVSS

SEQ ID NO: 24678 - protein, 118 aa, Artificial Sequence
  Chemically Synthesized
QVQLQESGGGLVQAGGSLRLSCAASGTIFPGRYMGWYRQAPGKERELVAAIGPGGSTYYADSVKGRFTISRDNAKNTVYLQMNSLKPEDTAVYYCAADDLRSGGLDYWGQGTQVTVSS

SEQ ID NO: 24679 - protein, 115 aa, Artificial Sequence
  Chemically Synthesized
QVQLQESGGGLVQAGGSLRLSCAASGYISHAEYMGWYRQAPGKEREFVAAISPGTTYYADSVKGRFTISRDNAKNTVYLQMNSLKPEDTAVYYCAVSRGRYNYYWGQGTQVTVSS

SEQ ID NO: 24680 - protein, 118 aa, Artificial Sequence
  Chemically Synthesized
QVQLQESGGGLVQAGGSLRLSCAASGSIFGTYQMGWYRQAPGKERELVASISFGANTNYADSVKGRFTISRDNAKNTVYLQMNSLKPEDTAVYYCAVVGYAGSYYWYWGQGTQVTVSS

SEQ ID NO: 24681 - protein, 126 aa, Artificial Sequence
  Chemically Synthesized
QVQLQESGGGLVQAGGSLRLSCAASGYIFRPRGMGWYRQAPGKERELVATIDNGGITYYADSVKGRFTISRDNAKNTVYLQMNSLKPEDTAVYYCAAYLYHPTYQYDWRRKTLVYWGQGTQVTVSS

SEQ ID NO: 24682 - protein, 114 aa, Artificial Sequence
  Chemically Synthesized
QVQLQESGGGLVQAGGSLRLSCAASGTISTIRVMGWYRQAPGKEREFVAAINGGTTYYADSVKGRFTISRDNAKNTVYLQMNSLKPEDTAVYYCAADWLVHDYWGQGTQVTVSS

SEQ ID NO: 24683 - protein, 118 aa, Artificial Sequence
  Chemically Synthesized
QVQLQESGGGLVQAGGSLRLSCAASGSIFPTDVMGWYRQAPGKERELVASINEGASTNYADSVKGRFTISRDNAKNTVYLQMNSLKPEDTAVYYCAARGHVQETLDYWGQGTQVTVSS

SEQ ID NO: 24684 - protein, 118 aa, Artificial Sequence
  Chemically Synthesized
QVQLQESGGGLVQAGGSLRLSCAASGNISDYGDMGWYRQAPGKEREFVAGISYGTSTYYADSVKGRFTISRDNAKNTVYLQMNSLKPEDTAVYYCAAGDVYQDWLWYWGQGTQVTVSS

SEQ ID NO: 24685 - protein, 117 aa, Artificial Sequence
  Chemically Synthesized
QVQLQESGGGLVQAGGSLRLSCAASGYISYGTFMGWYRQAPGKERELVATISAGGTTNYADSVKGRFTISRDNAKNTVYLQMNSLKPEDTAVYYCAARAYLEPSLYWGQGTQVTVSS

SEQ ID NO: 24686 - protein, 120 aa, Artificial Sequence
  Chemically Synthesized
QVQLQESGGGLVQAGGSLRLSCAASGYMGWYRQAPGKEREFVAAIAAGSSTNYADSVKGRFTISRDNAKNTVYLQMNSLKPEDTAVYYCAVQNNYRYYETDDSASYHLYWGQGTQVTVSS

SEQ ID NO: 24687 - protein, 118 aa, Artificial Sequence
  Chemically Synthesized
QVQLQESGGGLVQAGGSLRLSCAASGYISRYGVMGWYRQAPGKEREFVATIAVGATTYYADSVKGRFTISRDNAKNTVYLQMNSLKPEDTAVYYCAVWSYVRFRHTYWGQGTQVTVSS

SEQ ID NO: 24688 - protein, 117 aa, Artificial Sequence
  Chemically Synthesized
QVQLQESGGGLVQAGGSLRLSCAASGYIFKDYYMGWYRQAPGKEREFVATISWGANTYYADSVKGRFTISRDNAKNTVYLQMNSLKPEDTAVYYCAAYDHNGHHYYWGQGTQVTVSS

SEQ ID NO: 24689 - protein, 118 aa, Artificial Sequence
  Chemically Synthesized
QVQLQESGGGLVQAGGSLRLSCAASGTISALYYMGWYRQAPGKERELVASIGFGTNTNYADSVKGRFTISRDNAKNTVYLQMNSLKPEDTAVYYCAAIWDPYFALAYWGQGTQVTVSS

SEQ ID NO: 24690 - protein, 118 aa, Artificial Sequence
  Chemically Synthesized
QVQLQESGGGLVQAGGSLRLSCAASGYISWAYTMGWYRQAPGKERELVASISYGGITNYADSVKGRFTISRDNAKNTVYLQMNSLKPEDTAVYYCAVYVYVLEAHRYWGQGTQVTVSS

SEQ ID NO: 24691 - protein, 118 aa, Artificial Sequence
  Chemically Synthesized
QVQLQESGGGLVQAGGSLRLSCAASGTIFQYLRMGWYRQAPGKERELVAGIGTGGITYYADSVKGRFTISRDNAKNTVYLQMNSLKPEDTAVYYCAAYIFIRHLFTYWGQGTQVTVSS

SEQ ID NO: 24692 - protein, 118 aa, Artificial Sequence
  Chemically Synthesized
QVQLQESGGGLVQAGGSLRLSCAASGNIFTHVYMGWYRQAPGKEREFVAGITWGGITNYADSVKGRFTISRDNAKNTVYLQMNSLKPEDTAVYYCAVVYAGDYYHDYWGQGTQVTVSS

SEQ ID NO: 24693 - protein, 122 aa, Artificial Sequence
  Chemically Synthesized
QVQLQESGGGLVQAGGSLRLSCAASGTIFAAPYMGWYRQAPGKERELVATITEGATTNYADSVKGRFTISRDNAKNTVYLQMNSLKPEDTAVYYCAVTDYRDGVPPTPHRYWGQGTQVTVSS

SEQ ID NO: 24694 - protein, 118 aa, Artificial Sequence
  Chemically Synthesized
QVQLQESGGGLVQAGGSLRLSCAASGSISDPKNMGWYRQAPGKERELVAAISYGTITNYADSVKGRFTISRDNAKNTVYLQMNSLKPEDTAVYYCAVARPYGPPHWYWGQGTQVTVSS

SEQ ID NO: 24695 - protein, 118 aa, Artificial Sequence
  Chemically Synthesized
QVQLQESGGGLVQAGGSLRLSCAASGNIFSPYQMGWYRQAPGKERELVATINQGTNTNYADSVKGRFTISRDNAKNTVYLQMNSLKPEDTAVYYCAARYVQAQSFDYWGQGTQVTVSS

SEQ ID NO: 24696 - protein, 125 aa, Artificial Sequence
  Chemically Synthesized
QVQLQESGGGLVQAGGSLRLSCAASGNISTTDDMGWYRQAPGKERELVATIARGATTYYADSVKGRFTISRDNAKNTVYLQMNSLKPEDTAVYYCAASLHDSGTVRVYYDGHGYWGQGTQVTVSS

SEQ ID NO: 24697 - protein, 118 aa, Artificial Sequence
  Chemically Synthesized
QVQLQESGGGLVQAGGSLRLSCAASGNISYSRMGWYRQAPGKEREFVAAISFGASTYYADSVKGRFTISRDNAKNTVYLQMNSLKPEDTAVYYCAVYTRYVVYYFGYWGQGTQVTVSS

SEQ ID NO: 24698 - protein, 118 aa, Artificial Sequence
  Chemically Synthesized
QVQLQESGGGLVQAGGSLRLSCAASGNISVWFYMGWYRQAPGKERELVAAITHGGSTYYADSVKGRFTISRDNAKNTVYLQMNSLKPEDTAVYYCAVGYVGRYLSIYWGQGTQVTVSS

SEQ ID NO: 24699 - protein, 118 aa, Artificial Sequence
  Chemically Synthesized
QVQLQESGGGLVQAGGSLRLSCAASGTIFPARRMGWYRQAPGKEREFVAAIGRGGTTYYADSVKGRFTISRDNAKNTVYLQMNSLKPEDTAVYYCAAGWPQYRIYRYWGQGTQVTVSS

SEQ ID NO: 24700 - protein, 126 aa, Artificial Sequence
  Chemically Synthesized
QVQLQESGGGLVQAGGSLRLSCAASGSISSAGFMGWYRQAPGKERELVAAIDPGAITNYADSVKGRFTISRDNAKNTVYLQMNSLKPEDTAVYYCAAALPDIYYRYRVRPSSYDYWGQGTQVTVSS

SEQ ID NO: 24701 - protein, 125 aa, Artificial Sequence
  Chemically Synthesized
QVQLQESGGGLVQAGGSLRLSCAASGYIFDPSEMGWYRQAPGKERELVATITTVLIPYADSVKGRFTISRDNAKNTVYLQMNSLKPEDTAVYYCAVSDDLYDSKNVYYADRHDYWGQGTQVTVSS

SEQ ID NO: 24702 - protein, 120 aa, Artificial Sequence
  Chemically Synthesized
QVQLQESGGGLVQAGGSLRLSCAASGILTRTMGWYRQAPGKERELVASITYGGNTNYADSVKGRFTISRDNAKNTVYLQMNSLKPEDTAVYYCAADLQGPKRNGRVHYYWGQGTQVTVSS

SEQ ID NO: 24703 - protein, 122 aa, Artificial Sequence
  Chemically Synthesized
QVQLQESGGGLVQAGGSLRLSCAASGTIFYIDGMGWYRQAPGKERELVATIDYGGSTNYADSVKGRFTISRDNAKNTVYLQMNSLKPEDTAVYYCAARYFLAYNVYTSHAYWGQGTQVTVSS

SEQ ID NO: 24704 - protein, 122 aa, Artificial Sequence
  Chemically Synthesized
QVQLQESGGGLVQAGGSLRLSCAASGNISERQAMGWYRQAPGKERELVATINGGGITYYADSVKGRFTISRDNAKNTVYLQMNSLKPEDTAVYYCAVGTTWYRHWPRYHTYWGQGTQVTVSS

SEQ ID NO: 24705 - protein, 116 aa, Artificial Sequence
  Chemically Synthesized
QVQLQESGGGLVQAGGSLRLSCAASGYIFPVRSMGWYRQAPGKEREFVATINLGASTYYADSVKGRFTISRDNAKNTVYLQMNSLKPEDTAVYYCAVGKVYSYFYWGQGTQVTVSS

SEQ ID NO: 24706 - protein, 120 aa, Artificial Sequence
  Chemically Synthesized
QVQLQESGGGLVQAGGSLRLSCAASGTIFGPYTMGWYRQAPGKERELVASIALGTNTNYADSVKGRFTISRDNAKNTVYLQMNSLKPEDTAVYYCAVYRVYVDRRWYAYWGQGTQVTVSS

SEQ ID NO: 24707 - protein, 118 aa, Artificial Sequence
  Chemically Synthesized
QVQLQESGGGLVQAGGSLRLSCAASGSISRPWRMGWYRQAPGKEREFVAGIGYGASTYYADSVKGRFTISRDNAKNTVYLQMNSLKPEDTAVYYCAASYYRSRSHTYWGQGTQVTVSS

SEQ ID NO: 24708 - protein, 122 aa, Artificial Sequence
  Chemically Synthesized
QVQLQESGGGLVQAGGSLRLSCAASGTISDSWDMGWYRQAPGKEREFVAGITGGGTTNYADSVKGRFTISRDNAKNTVYLQMNSLKPEDTAVYYCAVGNGRSLGRRQYFIYWGQGTQVTVSS

SEQ ID NO: 24709 - protein, 122 aa, Artificial Sequence
  Chemically Synthesized
QVQLQESGGGLVQAGGSLRLSCAASGYIFWPTYMGWYRQAPGKEREFVAAIADGTTTNYADSVKGRFTISRDNAKNTVYLQMNSLKPEDTAVYYCAAYRPFLYAANPGHRYWGQGTQVTVSS

SEQ ID NO: 24710 - protein, 118 aa, Artificial Sequence
  Chemically Synthesized
QVQLQESGGGLVQAGGSLRLSCAASGTIFGRDQMGWYRQAPGKEREFVAAISGGTTTNYADSVKGRFTISRDNAKNTVYLQMNSLKPEDTAVYYCAVYGTIVGPHWYWGQGTQVTVSS

SEQ ID NO: 24711 - protein, 126 aa, Artificial Sequence
  Chemically Synthesized
QVQLQESGGGLVQAGGSLRLSCAASGNIFDEPRMGWYRQAPGKEREFVASIDRGGSTNYADSVKGRFTISRDNAKNTVYLQMNSLKPEDTAVYYCAARTYNDYYSTIYTYAPLGYWGQGTQVTVSS

SEQ ID NO: 24712 - protein, 122 aa, Artificial Sequence
  Chemically Synthesized
QVQLQESGGGLVQAGGSLRLSCAASGYISYSGDMGWYRQAPGKERELVATIGTGGTTYYADSVKGRFTISRDNAKNTVYLQMNSLKPEDTAVYYCAAAPIADDNDADQYEYWGQGTQVTVSS

SEQ ID NO: 24713 - protein, 122 aa, Artificial Sequence
  Chemically Synthesized
QVQLQESGGGLVQAGGSLRLSCAASGTIFRKNHMGWYRQAPGKEREFVAAITYGTSTYYADSVKGRFTISRDNAKNTVYLQMNSLKPEDTAVYYCAVHSRHAWWEVYTHYYWGQGTQVTVSS

SEQ ID NO: 24714 - protein, 122 aa, Artificial Sequence
  Chemically Synthesized
QVQLQESGGGLVQAGGSLRLSCAASGTISLYDNMGWYRQAPGKERELVPLLLLVVLPYADSVKGRFTISRDNAKNTVYLQMNSLKPEDTAVYYCAAEVPHYGALTQDFHYYWGQGTQVTVSS

SEQ ID NO: 24715 - protein, 110 aa, Artificial Sequence
  Chemically Synthesized
QVQLQESGGGLVQAGGSLRLSCAASGSIFRVYWMGWYRQAPGKEREFVAGIDDGTTTNYADSVKGRFTISRDNAKNTVYLQMNSLKPEDTAVYYCAYDYWGQGTQVTVSS

SEQ ID NO: 24716 - protein, 125 aa, Artificial Sequence
  Chemically Synthesized
QVQLQESGGGLVQAGGSLRLSCAASGTIFRTDTMGWYRQAPGKEREFVATINGGTTYYADSVKGRFTISRDNAKNTVYLQMNSLKPEDTAVYYCAADWYPDPQYLTYGYFILVYWGQGTQVTVSS

SEQ ID NO: 24717 - protein, 116 aa, Artificial Sequence
  Chemically Synthesized
QVQLQESGGGLVQAGGSLRLSCAASGSISSLVMGWYRQAPGKERELVATIARGTSTNYADSVKGRFTISRDNAKNTVYLQMNSLKPEDTAVYYCAVRVTYVVHYYWGQGTQVTVSS

SEQ ID NO: 24718 - protein, 125 aa, Artificial Sequence
  Chemically Synthesized
QVQLQESGGGLVQAGGSLRLSCAASGSIFYPNWMGWYRQAPGKEREFVAGIDGGITYYADSVKGRFTISRDNAKNTVYLQMNSLKPEDTAVYYCAAWRRRYHYPVWTYVPRHAYWGQGTQVTVSS

SEQ ID NO: 24719 - protein, 118 aa, Artificial Sequence
  Chemically Synthesized
QVQLQESGGGLVQAGGSLRLSCAASGNIFAYTWMGWYRQAPGKERELVATIDHGSTTYYADSVKGRFTISRDNAKNTVYLQMNSLKPEDTAVYYCAVRLLEIKYHRYWGQGTQVTVSS

SEQ ID NO: 24720 - protein, 115 aa, Artificial Sequence
  Chemically Synthesized
QVQLQESGGGLVQAGGSLRLSCAASGTIFVYGYMGWYRQAPGKERELVATINYGGNTYYADSVKGRFTISRDNAKNTVYLQMNSLKPEDTAVYYCAVVDDRYVYWGQGTQVTVSS

SEQ ID NO: 24721 - protein, 125 aa, Artificial Sequence
  Chemically Synthesized
QVQLQESGGGLVQAGGSLRLSCAASGSISAYVYMGWYRQAPGKERELVAGITYGGTTNYADSVKGRFTISRDNAKNTVYLQMNSLKPEDTAVYYCAVIYHDRISTYPKVVGHLYWGQGTQVTVSS

SEQ ID NO: 24722 - protein, 118 aa, Artificial Sequence
  Chemically Synthesized
QVQLQESGGGLVQAGGSLRLSCAASGSISSAYTMGWYRQAPGKERELVAAIDPGATTYYADSVKGRFTISRDNAKNTVYLQMNSLKPEDTAVYYCAAWSQARWYFDYWGQGTQVTVSS

SEQ ID NO: 24723 - protein, 116 aa, Artificial Sequence
  Chemically Synthesized
QVQLQESGGGLVQAGGSLRLSCAASGTIFSIRYMGWYRQAPGKEREFVATIARGSTTNYADSVKGRFTISRDNAKNTVYLQMNSLKPEDTAVYYCAVWGAQHLDYWGQGTQVTVSS

SEQ ID NO: 24724 - protein, 126 aa, Artificial Sequence
  Chemically Synthesized
QVQLQESGGGLVQAGGSLRLSCAASGYISSYQSMGWYRQAPGKERELVATIATGDNTYYADSVKGRFTISRDNAKNTVYLQMNSLKPEDTAVYYCAVGLWGLIYYWEPVYGRHYYWGQGTQVTVSS

SEQ ID NO: 24725 - protein, 119 aa, Artificial Sequence
  Chemically Synthesized
QVQLQESGGGLVQAGGSLRLSCAASGNIFYGPIMGWYRQAPGKEREFVVTYYADSVKGRFTISRDNAKNTVYLQMNSLKPEDTAVYYCAVPYRYPDFGDIGYEWVLWYWGQGTQVTVSS

SEQ ID NO: 24726 - protein, 122 aa, Artificial Sequence
  Chemically Synthesized
QVQLQESGGGLVQAGGSLRLSCAASGNIFGVDPMGWYRQAPGKERELVATINYGTSTYYADSVKGRFTISRDNAKNTVYLQMNSLKPEDTAVYYCAAYDRASQDDHDWHDYWGQGTQVTVSS

SEQ ID NO: 24727 - protein, 123 aa, Artificial Sequence
  Chemically Synthesized
QVQLQESGGGLVQAGGSLRLSCAASGSIFYTRPMGWYRQAPGKERELVATITQGSTTNYADSVKGRFTISRDNAKNTVYLQMNSLKPEDTAVYYCAARRYVPWGVKGDYFGYWGQGTQVTVSS

SEQ ID NO: 24728 - protein, 122 aa, Artificial Sequence
  Chemically Synthesized
QVQLQESGGGLVQAGGSLRLSCAASGTISRRINMGWYRQAPGKERELVASITSGTNTNYADSVKGRFTISRDNAKNTVYLQMNSLKPEDTAVYYCAARYQWAYTGGGRFAYWGQGTQVTVSS

SEQ ID NO: 24729 - protein, 118 aa, Artificial Sequence
  Chemically Synthesized
QVQLQESGGGLVQAGGSLRLSCAASGYISYDRQMGWYRQAPGKERELVASIGRGTITNYADSVKGRFTISRDNAKNTVYLQMNSLKPEDTAVYYCAVYVVRARLYWYWGQGTQVTVSS

SEQ ID NO: 24730 - protein, 117 aa, Artificial Sequence
  Chemically Synthesized
QVQLQESGGGLVQAGGSLRLSCAASGTIFGIYVMGWYRQAPGKEREFVAAIAYGSNTNYADSVKGRFTISRDNAKNTVYLQMNSLKPEDTAVYYCAVRLWSRDNLYWGQGTQVTVSS

SEQ ID NO: 24731 - protein, 117 aa, Artificial Sequence
  Chemically Synthesized
QVQLQESGGGLVQAGGSLRLSCAASGYISPRDTMGWYRQAPGKERELVATIAQGGNTYYADSVKGRFTISRDNAKNTVYLQMNSLKPEDTAVYYCAAAVSLVVSMYWGQGTQVTVSS

SEQ ID NO: 24732 - protein, 124 aa, Artificial Sequence
  Chemically Synthesized
QVQLQESGGGLVQAGGSLRLSCAASGNISDYDRMGWYRQAPGKEREFVAGIGKGGNTYYADSVKGRFTISRDNAKNTVYLQMNSLKPEDTAVYYCAASYKGGEPDYTGDYLLYWGQGTQVTVSS

SEQ ID NO: 24733 - protein, 122 aa, Artificial Sequence
  Chemically Synthesized
QVQLQESGGGLVQAGGSLRLSCAASGSIFQARAMGWYRQAPGKERELVATIADGATTNYADSVKGRFTISRDNAKNTVYLQMNSLKPEDTAVYYCAAYATDPVYGYTTYDYWGQGTQVTVSS

SEQ ID NO: 24734 - protein, 118 aa, Artificial Sequence
  Chemically Synthesized
QVQLQESGGGLVQAGGSLRLSCAASGTIFPSNYMGWYRQAPGKERELVATISTGSTTYYADSVKGRFTISRDNAKNTVYLQMNSLKPEDTAVYYCAVLYYGDYDHAYWGQGTQVTVSS

SEQ ID NO: 24735 - protein, 122 aa, Artificial Sequence
  Chemically Synthesized
QVQLQESGGGLVQAGGSLRLSCAASGYIFRVTYMGWYRQAPGKERELVAGIATGSITNYADSVKGRFTISRDNAKNTVYLQMNSLKPEDTAVYYCAAGTFGYAWRGRGLTYWGQGTQVTVSS

SEQ ID NO: 24736 - protein, 123 aa, Artificial Sequence
  Chemically Synthesized
QVQLQESGGGLVQAGGSLRLSCAASGNISYWGPMGWYRQAPGKERELVATIAADGTITYYADSVKGRFTISRDNAKNTVYLQMNSLKPEDTAVYYCAVFYHWQYQIFYGHAYWGQGTQVTVSS

SEQ ID NO: 24737 - protein, 118 aa, Artificial Sequence
  Chemically Synthesized
QVQLQESGGGLVQAGGSLRLSCAASGTIFYDYLMGWYRQAPGKEREFVATINRGGSTYYADSVKGRFTISRDNAKNTVYLQMNSLKPEDTAVYYCAVIYVQTIAYRYWGQGTQVTVSS

SEQ ID NO: 24738 - protein, 122 aa, Artificial Sequence
  Chemically Synthesized
QVQLQESGGGLVQAGGSLRLSCAASGTIFYQIVMGWYRQAPGKERELVAAIAHGTSTYYADSVKGRFTISRDNAKNTVYLQMNSLKPEDTAVYYCAVYTRPYRYYHNAYYYWGQGTQVTVSS

SEQ ID NO: 24739 - protein, 126 aa, Artificial Sequence
  Chemically Synthesized
QVQLQESGGGLVQAGGSLRLSCAASGNISTFGNMGWYRQAPGKERELVASIADGGTTYYADSVKGRFTISRDNAKNTVYLQMNSLKPEDTAVYYCAVLVGWFTSTIAEWAWYYYYWGQGTQVTVSS

SEQ ID NO: 24740 - protein, 122 aa, Artificial Sequence
  Chemically Synthesized
QVQLQESGGGLVQAGGSLRLSCAASGYISYAYDMGWYRQAPGKEREFVAAIDSGGSTNYADSVKGRFTISRDNAKNTVYLQMNSLKPEDTAVYYCAVDRDVDARRVVAHEYWGQGTQVTVSS

SEQ ID NO: 24741 - protein, 126 aa, Artificial Sequence
  Chemically Synthesized
QVQLQESGGGLVQAGGSLRLSCAASGNISWVDRMGWYRQAPGKEREFVASISVGSNTYYADSVKGRFTISRDNAKNTVYLQMNSLKPEDTAVYYCAAGIRARQRFPPQYKSRHYYWGQGTQVTVSS

SEQ ID NO: 24742 - protein, 118 aa, Artificial Sequence
  Chemically Synthesized
QVQLQESGGGLVQAGGSLRLSCAASGNIFGHYSMGWYRQAPGKEREFVASIGVGAITNYADSVKGRFTISRDNAKNTVYLQMNSLKPEDTAVYYCAVRVARRYWYSYWGQGTQVTVSS

SEQ ID NO: 24743 - protein, 118 aa, Artificial Sequence
  Chemically Synthesized
QVQLQESGGGLVQAGGSLRLSCAASGSISYRYGMGWYRQAPGKERELVAAISGGGTTYYADSVKGRFTISRDNAKNTVYLQMNSLKPEDTAVYYCAVVGQRRYYLWYWGQGTQVTVSS

SEQ ID NO: 24744 - protein, 118 aa, Artificial Sequence
  Chemically Synthesized
QVQLQESGGGLVQAGGSLRLSCAASGNIFPFRTMGWYRQAPGKEREFVAAINLGGSTYYADSVKGRFTISRDNAKNTVYLQMNSLKPEDTAVYYCAAQQGFIRTHNYWGQGTQVTVSS

SEQ ID NO: 24745 - protein, 122 aa, Artificial Sequence
  Chemically Synthesized
QVQLQESGGGLVQAGGSLRLSCAASGYISGRSYMGWYRQAPGKEREFVATINPGSTTNYADSVKGRFTISRDNAKNTVYLQMNSLKPEDTAVYYCAAYAYRWPYGYRPLRYWGQGTQVTVSS

SEQ ID NO: 24746 - protein, 115 aa, Artificial Sequence
  Chemically Synthesized
QVQLQESGGGLVQAGGSLRLSCAASGTISRSFRMGWYRQAPGKEREFVASIAFGGITYYADSVKGRFTISRDNAKNTVYLQMNSLKPEDTAVYYCAYQYYFHYYWGQGTQVTVSS

SEQ ID NO: 24747 - protein, 118 aa, Artificial Sequence
  Chemically Synthesized
QVQLQESGGGLVQAGGSLRLSCAASGYIFERRVMGWYRQAPGKEREFVAAINHGAITYYADSVKGRFTISRDNAKNTVYLQMNSLKPEDTAVYYCAVGYFPTWPHRYWGQGTQVTVSS

SEQ ID NO: 24748 - protein, 111 aa, Artificial Sequence
  Chemically Synthesized
QVQLQESGGGLVQAGGSLRLSCAASGYIFGNRDMGWYRQAPGKEREFVATIGRGANTNYADSVKGRFTISRDNAKNTVYLQMNSLKPEDTAVYYCAFHVYWGQGTQVTVSS

SEQ ID NO: 24749 - protein, 118 aa, Artificial Sequence
  Chemically Synthesized
QVQLQESGGGLVQAGGSLRLSCAASGTIFSYIDMGWYRQAPGKEREFVAGIAFGATTNYADSVKGRFTISRDNAKNTVYLQMNSLKPEDTAVYYCAVYDWYERRFTYWGQGTQVTVSS

SEQ ID NO: 24750 - protein, 118 aa, Artificial Sequence
  Chemically Synthesized
QVQLQESGGGLVQAGGSLRLSCAASGTISYHFQMGWYRQAPGKEREFVASISRGGNTNYADSVKGRFTISRDNAKNTVYLQMNSLKPEDTAVYYCAVTSWLGPPLWYWGQGTQVTVSS

SEQ ID NO: 24751 - protein, 117 aa, Artificial Sequence
  Chemically Synthesized
QVQLQESGGGLVQAGGSLRLSCAASGYIFRSYYMGWYRQAPGKEREFVPVLLTVVLPYADSVKGRFTISRDNAKNTVYLQMNSLKPEDTAVYYCAADPGTAPYLLYWGQGTQVTVSS

SEQ ID NO: 24752 - protein, 118 aa, Artificial Sequence
  Chemically Synthesized
QVQLQESGGGLVQAGGSLRLSCAASGYIFYRDYMGWYRQAPGKERELVAAIAYGASTYYADSVKGRFTISRDNAKNTVYLQMNSLKPEDTAVYYCAVTAPDSIAHRYWGQGTQVTVSS

SEQ ID NO: 24753 - protein, 122 aa, Artificial Sequence
  Chemically Synthesized
QVQLQESGGGLVQAGGSLRLSCAASGYISYFPDMGWYRQAPGKERELVAAIAFGTITYYADSVKGRFTISRDNAKNTVYLQMNSLKPEDTAVYYCAASLWYLFRYDLAHLYWGQGTQVTVSS

SEQ ID NO: 24754 - protein, 116 aa, Artificial Sequence
  Chemically Synthesized
QVQLQESGGGLVQAGGSLRLSCAASGYISSRYMGWYRQAPGKERELVAAITYGGITYYADSVKGRFTISRDNAKNTVYLQMNSLKPEDTAVYYCAVRLRYRQYNYWGQGTQVTVSS

SEQ ID NO: 24755 - protein, 117 aa, Artificial Sequence
  Chemically Synthesized
QVQLQESGGGLVQAGGSLRLSCAASGYISYWSYMGWYRQAPGKERELVATIDQGAITYYADSVKGRFTISRDNAKNTVYLQMNSLKPEDTAVYYCAADDYYRISLYWGQGTQVTVSS

SEQ ID NO: 24756 - protein, 118 aa, Artificial Sequence
  Chemically Synthesized
QVQLQESGGGLVQAGGSLRLSCAASGSIFRSRLMGWYRQAPGKERELVAGISAGGNTYYADSVKGRFTISRDNAKNTVYLQMNSLKPEDTAVYYCAVLSRYVRHHGYWGQGTQVTVSS

SEQ ID NO: 24757 - protein, 118 aa, Artificial Sequence
  Chemically Synthesized
QVQLQESGGGLVQAGGSLRLSCAASGNISFLNRMGWYRQAPGKEREFVASINTGASTYYADSVKGRFTISRDNAKNTVYLQMNSLKPEDTAVYYCAVVRTLSPDYEYWGQGTQVTVSS

SEQ ID NO: 24758 - protein, 118 aa, Artificial Sequence
  Chemically Synthesized
QVQLQESGGGLVQAGGSLRLSCAASGSISFDLYMGWYRQAPGKEREFVAAISYGANTYYADSVKGRFTISRDNAKNTVYLQMNSLKPEDTAVYYCAVAVYDSAFHRYWGQGTQVTVSS

SEQ ID NO: 24759 - protein, 118 aa, Artificial Sequence
  Chemically Synthesized
QVQLQESGGGLVQAGGSLRLSCAASGTIFRPYWMGWYRQAPGKEREFVASISRGSTTNYADSVKGRFTISRDNAKNTVYLQMNSLKPEDTAVYYCAVRVYYYRGHYYWGQGTQVTVSS

SEQ ID NO: 24760 - protein, 117 aa, Artificial Sequence
  Chemically Synthesized
QVQLQESGGGLVQAGGSLRLSCAASGYIFPSTMGWYRQAPGKERELVAGITRGATTYYADSVKGRFTISRDNAKNTVYLQMNSLKPEDTAVYYCAARVLVYGDFPYWGQGTQVTVSS

SEQ ID NO: 24761 - protein, 122 aa, Artificial Sequence
  Chemically Synthesized
QVQLQESGGGLVQAGGSLRLSCAASGNISVTYAMGWYRQAPGKERELVASIDVGGTTNYADSVKGRFTISRDNAKNTVYLQMNSLKPEDTAVYYCAVRVKARWYLIYDFTYWGQGTQVTVSS

SEQ ID NO: 24762 - protein, 115 aa, Artificial Sequence
  Chemically Synthesized
QVQLQESGGGLVQAGGSLRLSCAASGYISLTYLMGWYRQAPGKERELVATIGHGTSTYYADSVKGRFTISRDNAKNTVYLQMNSLKPEDTAVYYCADPYGTLYYWGQGTQVTVSS

SEQ ID NO: 24763 - protein, 118 aa, Artificial Sequence
  Chemically Synthesized
QVQLQESGGGLVQAGGSLRLSCAASGNISVGIYMGWYRQAPGKERELVAGIDRGGITYYADSVKGRFTISRDNAKNTVYLQMNSLKPEDTAVYYCAVSYRQDDLYAYWGQGTQVTVSS

SEQ ID NO: 24764 - protein, 109 aa, Artificial Sequence
  Chemically Synthesized
QVQLQESGGGLVQAGGSLRLSCAASGTIFTDDSMGWYRQAPGKEREFVASIDRGGTTNYADSVKGRFTISRDNAKNTVYLQMNSLKPEDTAVYYCAVYWGQGTQVTVSS

SEQ ID NO: 24765 - protein, 126 aa, Artificial Sequence
  Chemically Synthesized
QVQLQESGGGLVQAGGSLRLSCAASGYISATRRMGWYRQAPGKEREFVAAIASGATTYYADSVKGRFTISRDNAKNTVYLQMNSLKPEDTAVYYCAVRVYWRHRWRPGIYTSHDYWGQGTQVTVSS

SEQ ID NO: 24766 - protein, 126 aa, Artificial Sequence
  Chemically Synthesized
QVQLQESGGGLVQAGGSLRLSCAASGTISYAIYMGWYRQAPGKERELVAGITAGTITYYADSVKGRFTISRDNAKNTVYLQMNSLKPEDTAVYYCAAGGNTPPYGRTLDAGVLAYWGQGTQVTVSS

SEQ ID NO: 24767 - protein, 122 aa, Artificial Sequence
  Chemically Synthesized
QVQLQESGGGLVQAGGSLRLSCAASGTIFYPYVMGWYRQAPGKERELVAAIAWGTTTYYADSVKGRFTISRDNAKNTVYLQMNSLKPEDTAVYYCAASDTSPRLRYVRFRYWGQGTQVTVSS

SEQ ID NO: 24768 - protein, 118 aa, Artificial Sequence
  Chemically Synthesized
QVQLQESGGGLVQAGGSLRLSCAASGNIFAPYFMGWYRQAPGKEREFVAAISWGTSTYYADSVKGRFTISRDNAKNTVYLQMNSLKPEDTAVYYCAAIPRRHRGHTYWGQGTQVTVSS

SEQ ID NO: 24769 - protein, 118 aa, Artificial Sequence
  Chemically Synthesized
QVQLQESGGGLVQAGGSLRLSCAASGTISTNLAMGWYRQAPGKERELVASIGLGGNTYYADSVKGRFTISRDNAKNTVYLQMNSLKPEDTAVYYCAVYLYVSDSFPYWGQGTQVTVSS

SEQ ID NO: 24770 - protein, 118 aa, Artificial Sequence
  Chemically Synthesized
QVQLQESGGGLVQAGGSLRLSCAASGTISWPSAMGWYRQAPGKEREFVASISLGGSTNYADSVKGRFTISRDNAKNTVYLQMNSLKPEDTAVYYCAVRRRYGYYHGYWGQGTQVTVSS

SEQ ID NO: 24771 - protein, 122 aa, Artificial Sequence
  Chemically Synthesized
QVQLQESGGGLVQAGGSLRLSCAASGNIFDDLKMGWYRQAPGKERELVAGIAYGAITYYADSVKGRFTISRDNAKNTVYLQMNSLKPEDTAVYYCAAWYDIGYRYHYQFVYWGQGTQVTVSS

SEQ ID NO: 24772 - protein, 118 aa, Artificial Sequence
  Chemically Synthesized
QVQLQESGGGLVQAGGSLRLSCAASGTIFYTHFMGWYRQAPGKEREFVAGIGRGSSTNYADSVKGRFTISRDNAKNTVYLQMNSLKPEDTAVYYCAVRGYYYKRHWYWGQGTQVTVSS

SEQ ID NO: 24773 - protein, 111 aa, Artificial Sequence
  Chemically Synthesized
QVQLQESGGGLVQAGGSLRLSCAASGYISYPDFMGWYRQAPGKERELVATIDPGAITNYADSVKGRFTISRDNAKNTVYLQMNSLKPEDTAVYYCAVHGYWGQGTQVTVSS

SEQ ID NO: 24774 - protein, 126 aa, Artificial Sequence
  Chemically Synthesized
QVQLQESGGGLVQAGGSLRLSCAASGTISAWQLMGWYRQAPGKEREFVASISSGTSTYYADSVKGRFTISRDNAKNTVYLQMNSLKPEDTAVYYCAVNGGYRRAYYSLTVPHFIYWGQGTQVTVSS

SEQ ID NO: 24775 - protein, 121 aa, Artificial Sequence
  Chemically Synthesized
QVQLQESGGGLVQAGGSLRLSCAASGSISDSVMGWYRQAPGKEREFVAAIGYGAITNYADSVKGRFTISRDNAKNTVYLQMNSLKPEDTAVYYCAVANVVEIATGEYHHYWGQGTQVTVSS

SEQ ID NO: 24776 - protein, 118 aa, Artificial Sequence
  Chemically Synthesized
QVQLQESGGGLVQAGGSLRLSCAASGTIFWLDYMGWYRQAPGKEREFVATIGLGTSTNYADSVKGRFTISRDNAKNTVYLQMNSLKPEDTAVYYCAAANVTDVLFPYWGQGTQVTVSS

SEQ ID NO: 24777 - protein, 118 aa, Artificial Sequence
  Chemically Synthesized
QVQLQESGGGLVQAGGSLRLSCAASGNISLLGYMGWYRQAPGKERELVAGISDGSITYYADSVKGRFTISRDNAKNTVYLQMNSLKPEDTAVYYCAVPSDYGYYHYYWGQGTQVTVSS

SEQ ID NO: 24778 - protein, 118 aa, Artificial Sequence
  Chemically Synthesized
QVQLQESGGGLVQAGGSLRLSCAASGTIFYWFAMGWYRQAPGKERELVAAISLGAITYYADSVKGRFTISRDNAKNTVYLQMNSLKPEDTAVYYCAAGYRYRYFHDYWGQGTQVTVSS

SEQ ID NO: 24779 - protein, 118 aa, Artificial Sequence
  Chemically Synthesized
QVQLQESGGGLVQAGGSLRLSCAASGSISRDKIMGWYRQAPGKEREFVATITYGATTYYADSVKGRFTISRDNAKNTVYLQMNSLKPEDTAVYYCAARYYQDSTVMYWGQGTQVTVSS

SEQ ID NO: 24780 - protein, 122 aa, Artificial Sequence
  Chemically Synthesized
QVQLQESGGGLVQAGGSLRLSCAASGTISSDIGMGWYRQAPGKEREFVATINGGSSTYYADSVKGRFTISRDNAKNTVYLQMNSLKPEDTAVYYCAADYTNGTLRGNALYYWGQGTQVTVSS

SEQ ID NO: 24781 - protein, 118 aa, Artificial Sequence
  Chemically Synthesized
QVQLQESGGGLVQAGGSLRLSCAASGYISLAQGMGWYRQAPGKERELVAAIGRGSTTNYADSVKGRFTISRDNAKNTVYLQMNSLKPEDTAVYYCAAYGWYYHYLTYWGQGTQVTVSS

SEQ ID NO: 24782 - protein, 118 aa, Artificial Sequence
  Chemically Synthesized
QVQLQESGGGLVQAGGSLRLSCAASGSIFFGLLMGWYRQAPGKERELVATIDGGSNTYYADSVKGRFTISRDNAKNTVYLQMNSLKPEDTAVYYCAVKLDWARLHDYWGQGTQVTVSS

SEQ ID NO: 24783 - protein, 126 aa, Artificial Sequence
  Chemically Synthesized
QVQLQESGGGLVQAGGSLRLSCAASGYIFHPAFMGWYRQAPGKEREFVAGITYGSSTNYADSVKGRFTISRDNAKNTVYLQMNSLKPEDTAVYYCAALYRLDRGRYRGSDLGHGYWGQGTQVTVSS

SEQ ID NO: 24784 - protein, 118 aa, Artificial Sequence
  Chemically Synthesized
QVQLQESGGGLVQAGGSLRLSCAASGTISHVLPMGWYRQAPGKEREFVASINFGASTYYADSVKGRFTISRDNAKNTVYLQMNSLKPEDTAVYYCAAYRFVYTTLRYWGQGTQVTVSS

SEQ ID NO: 24785 - protein, 118 aa, Artificial Sequence
  Chemically Synthesized
QVQLQESGGGLVQAGGSLRLSCAASGYIFRPSYMGWYRQAPGKERELVASINRGATTYYADSVKGRFTISRDNAKNTVYLQMNSLKPEDTAVYYCAAGWLSYRQHRYWGQGTQVTVSS

SEQ ID NO: 24786 - protein, 118 aa, Artificial Sequence
  Chemically Synthesized
QVQLQESGGGLVQAGGSLRLSCAASGNISDAYNMGWYRQAPGKERELVAGIGPGGNTYYADSVKGRFTISRDNAKNTVYLQMNSLKPEDTAVYYCAVPVAKDIYLYYWGQGTQVTVSS

SEQ ID NO: 24787 - protein, 122 aa, Artificial Sequence
  Chemically Synthesized
QVQLQESGGGLVQAGGSLRLSCAASGTISYLDFMGWYRQAPGKEREFVAAIARGANTYYADSVKGRFTISRDNAKNTVYLQMNSLKPEDTAVYYCAADDYAQDYRTYPLDYWGQGTQVTVSS

SEQ ID NO: 24788 - protein, 118 aa, Artificial Sequence
  Chemically Synthesized
QVQLQESGGGLVQAGGSLRLSCAASGTIFEVTKMGWYRQAPGKEREFVAGITLGGTTNYADSVKGRFTISRDNAKNTVYLQMNSLKPEDTAVYYCAAPRYYTARHVYWGQGTQVTVSS

SEQ ID NO: 24789 - protein, 118 aa, Artificial Sequence
  Chemically Synthesized
QVQLQESGGGLVQAGGSLRLSCAASGNISRFLTMGWYRQAPGKEREFVAAIGWGATTYYADSVKGRFTISRDNAKNTVYLQMNSLKPEDTAVYYCAATKYSLYPLVYWGQGTQVTVSS

SEQ ID NO: 24790 - protein, 118 aa, Artificial Sequence
  Chemically Synthesized
QVQLQESGGGLVQAGGSLRLSCAASGYISDNTTMGWYRQAPGKERELVASIGYGATTYYADSVKGRFTISRDNAKNTVYLQMNSLKPEDTAVYYCAVYYDRDSPHVYWGQGTQVTVSS

SEQ ID NO: 24791 - protein, 116 aa, Artificial Sequence
  Chemically Synthesized
QVQLQESGGGLVQAGGSLRLSCAASGTIFWYDVMGWYRQAPGKERELVAAINYGASTYYADSVKGRFTISRDNAKNTVYLQMNSLKPEDTAVYYCADLERSASSYWGQGTQVTVSS

SEQ ID NO: 24792 - protein, 118 aa, Artificial Sequence
  Chemically Synthesized
QVQLQESGGGLVQAGGSLRLSCAASGNIFSRKDMGWYRQAPGKERELVASINLGTNTNYADSVKGRFTISRDNAKNTVYLQMNSLKPEDTAVYYCAAYSRYDYGHVYWGQGTQVTVSS

SEQ ID NO: 24793 - protein, 122 aa, Artificial Sequence
  Chemically Synthesized
QVQLQESGGGLVQAGGSLRLSCAASGNIFPVDYMGWYRQAPGKEREFVAAINYGSNTYYADSVKGRFTISRDNAKNTVYLQMNSLKPEDTAVYYCAVYGRDYVAAGYILTYWGQGTQVTVSS

SEQ ID NO: 24794 - protein, 118 aa, Artificial Sequence
  Chemically Synthesized
QVQLQESGGGLVQAGGSLRLSCAASGNISFYRAMGWYRQAPGKEREFVAGINWGGITNYADSVKGRFTISRDNAKNTVYLQMNSLKPEDTAVYYCAAWSRYRRPFGYWGQGTQVTVSS

SEQ ID NO: 24795 - protein, 116 aa, Artificial Sequence
  Chemically Synthesized
QVQLQESGGGLVQAGGSLRLSCAASGSIFTTVDMGWYRQAPGKEREFVAAIGVVLPYADSVKGRFTISRDNAKNTVYLQMNSLKPEDTAVYYCAVWLFTDRDHTYWGQGTQVTVSS

SEQ ID NO: 24796 - protein, 119 aa, Artificial Sequence
  Chemically Synthesized
QVQLQESGGGLVQAGGSLRLSCAASGTIFAPSYMGWYRQAPGKERELVAAIGVGGTTYYADSVKGRFTISRDNAKNTVYLQMNSLKPEDTAVYYCAAYVGSNYRDLVYWGQGTQVTVSS

SEQ ID NO: 24797 - protein, 115 aa, Artificial Sequence
  Chemically Synthesized
QVQLQESGGGLVQAGGSLRLSCAASGTISAPDAMGWYRQAPGKERELVATISAGGTTNYADSVKGRFTISRDNAKNTVYLQMNSLKPEDTAVYYCAAFRRQHYYWGQGTQVTVSS

SEQ ID NO: 24798 - protein, 117 aa, Artificial Sequence
  Chemically Synthesized
QVQLQESGGGLVQAGGSLRLSCAASGTIFAPSMGWYRQAPGKEREFVASITPGAITNYADSVKGRFTISRDNAKNTVYLQMNSLKPEDTAVYYCAVQDLYLGYYPYWGQGTQVTVSS

SEQ ID NO: 24799 - protein, 122 aa, Artificial Sequence
  Chemically Synthesized
QVQLQESGGGLVQAGGSLRLSCAASGNISFLFYMGWYRQAPGKERELVATIADGGITYYADSVKGRFTISRDNAKNTVYLQMNSLKPEDTAVYYCAVYDKDDFPPTLVYYYWGQGTQVTVSS

SEQ ID NO: 24800 - protein, 118 aa, Artificial Sequence
  Chemically Synthesized
QVQLQESGGGLVQAGGSLRLSCAASGTISLDFFMGWYRQAPGKEREFVAGITSGATTYYADSVKGRFTISRDNAKNTVYLQMNSLKPEDTAVYYCAAAYIGPYSLQYWGQGTQVTVSS

SEQ ID NO: 24801 - protein, 118 aa, Artificial Sequence
  Chemically Synthesized
QVQLQESGGGLVQAGGSLRLSCAASGSIFYPSAMGWYRQAPGKERELVASIGQGGSTYYADSVKGRFTISRDNAKNTVYLQMNSLKPEDTAVYYCAVQPYSANLHRYWGQGTQVTVSS

SEQ ID NO: 24802 - protein, 118 aa, Artificial Sequence
  Chemically Synthesized
QVQLQESGGGLVQAGGSLRLSCAASGTISYYYIMGWYRQAPGKERELVATIAAGTSTNYADSVKGRFTISRDNAKNTVYLQMNSLKPEDTAVYYCAARRWFWHGLTYWGQGTQVTVSS

SEQ ID NO: 24803 - protein, 118 aa, Artificial Sequence
  Chemically Synthesized
QVQLQESGGGLVQAGGSLRLSCAASGNISAYIYMGWYRQAPGKEREFVATIAWGTSTNYADSVKGRFTISRDNAKNTVYLQMNSLKPEDTAVYYCAVIVYGYAIHYYWGQGTQVTVSS

SEQ ID NO: 24804 - protein, 122 aa, Artificial Sequence
  Chemically Synthesized
QVQLQESGGGLVQAGGSLRLSCAASGTIFPSEAMGWYRQAPGKEREFVAGITNGTTTNYADSVKGRFTISRDNAKNTVYLQMNSLKPEDTAVYYCAAPTRYDYDPTRHHDYWGQGTQVTVSS

SEQ ID NO: 24805 - protein, 118 aa, Artificial Sequence
  Chemically Synthesized
QVQLQESGGGLVQAGGSLRLSCAASGNIFRSYIMGWYRQAPGKEREFVAAITGGSITYYADSVKGRFTISRDNAKNTVYLQMNSLKPEDTAVYYCAVYAWWRGRHVYWGQGTQVTVSS

SEQ ID NO: 24806 - protein, 117 aa, Artificial Sequence
  Chemically Synthesized
QVQLQESGGGLVQAGGSLRLSCAASGSISIHPGMGWYRQAPGKERELLPVLISVVVPYADSVKGRFTISRDNAKNTVYLQMNSLKPEDTAVYYCAADEQHGLTYEYWGQGTQVTVSS

SEQ ID NO: 24807 - protein, 118 aa, Artificial Sequence
  Chemically Synthesized
QVQLQESGGGLVQAGGSLRLSCAASGTIFNGLYMGWYRQAPGKERELVASIAKGASTYYADSVKGRFTISRDNAKNTVYLQMNSLKPEDTAVYYCAAFYWYSQRHQYWGQGTQVTVSS

SEQ ID NO: 24808 - protein, 125 aa, Artificial Sequence
  Chemically Synthesized
QVQLQESGGGLVQAGGSLRLSCAASGNISYVYNMGWYRQAPGKERELVAGIAFGASTNYADSVKGRFTISRDNAKNTVYLQMNSLKPEDTAVYYCAAIPSYRYDGYSRNTYHYYWGQGTQVTVSS

SEQ ID NO: 24809 - protein, 121 aa, Artificial Sequence
  Chemically Synthesized
QVQLQESGGGLVQAGGSLRLSCAASGTIFVGYMGWYRQAPGKEREFVASIGPGSSTYYADSVKGRFTISRDNAKNTVYLQMNSLKPEDTAVYYCAVAYTDVDYVAVYHRYWGQGTQVTVSS

SEQ ID NO: 24810 - protein, 116 aa, Artificial Sequence
  Chemically Synthesized
QVQLQESGGGLVQAGGSLRLSCAASGYISYYRTMGWYRQAPGKEREFVAAISRGTNTYYADSVKGRFTISRDNAKNTVYLQMNSLKPEDTAVYYCAAYYYLYFSYWGQGTQVTVSS

SEQ ID NO: 24811 - protein, 122 aa, Artificial Sequence
  Chemically Synthesized
QVQLQESGGGLVQAGGSLRLSCAASGNIFGYGVMGWYRQAPGKEREFVASINYGTITYYADSVKGRFTISRDNAKNTVYLQMNSLKPEDTAVYYCAVDRRYRPWRHYPFYYWGQGTQVTVSS

SEQ ID NO: 24812 - protein, 125 aa, Artificial Sequence
  Chemically Synthesized
QVQLQESGGGLVQAGGSLRLSCAASGSIFPGGMGWYRQAPGKERELVAGIASGGTTYYADSVKGRFTISRDNAKNTVYLQMNSLKPEDTAVYYCAVNDGAYIDYLLDNRPRHTYWGQGTQVTVSS

SEQ ID NO: 24813 - protein, 117 aa, Artificial Sequence
  Chemically Synthesized
QVQLQESGGGLVQAGGSLRLSCAASGYIFFDRYMGWYRQAPGKEREFVASIASVVIPYADSVKGRFTISRDNAKNTVYLQMNSLKPEDTAVYYCAAFDYQQGYLLYWGQGTQVTVSS

SEQ ID NO: 24814 - protein, 122 aa, Artificial Sequence
  Chemically Synthesized
QVQLQESGGGLVQAGGSLRLSCAASGTIFPRFIMGWYRQAPGKEREFVAAINRGGITYYADSVKGRFTISRDNAKNTVYLQMNSLKPEDTAVYYCAARDARTRILGWILFYWGQGTQVTVSS

SEQ ID NO: 24815 - protein, 118 aa, Artificial Sequence
  Chemically Synthesized
QVQLQESGGGLVQAGGSLRLSCAASGSIFSWTMGWYRQAPGKERELVAAITDGTNTYYADSVKGRFTISRDNAKNTVYLQMNSLKPEDTAVYYCAANGYFDNIVHTYWGQGTQVTVSS

SEQ ID NO: 24816 - protein, 126 aa, Artificial Sequence
  Chemically Synthesized
QVQLQESGGGLVQAGGSLRLSCAASGSIFVGYYMGWYRQAPGKEREFVAAIGPGGITYYADSVKGRFTISRDNAKNTVYLQMNSLKPEDTAVYYCAVDYGYHHDSDEYRFNRHAYWGQGTQVTVSS

SEQ ID NO: 24817 - protein, 126 aa, Artificial Sequence
  Chemically Synthesized
QVQLQESGGGLVQAGGSLRLSCAASGTIFLSTFMGWYRQAPGKEREFVATISYGGITNYADSVKGRFTISRDNAKNTVYLQMNSLKPEDTAVYYCAVEADYYDAPPVYPIQYHDYWGQGTQVTVSS

SEQ ID NO: 24818 - protein, 126 aa, Artificial Sequence
  Chemically Synthesized
QVQLQESGGGLVQAGGSLRLSCAASGSISSDAIMGWYRQAPGKERELVAGIASGSNTYYADSVKGRFTISRDNAKNTVYLQMNSLKPEDTAVYYCAAYITGGRYDYGLRYYYYRYWGQGTQVTVSS

SEQ ID NO: 24819 - protein, 121 aa, Artificial Sequence
  Chemically Synthesized
QVQLQESGGGLVQAGGSLRLSCAASGSISDAATMGWYRQAPGKERELVAAIGDGGNTYYADSVKGRFTISRDNAKNTVYLQMNSLKPEDTAVYYCAVPGETFLTDTSCIYWGQGTQVTVSS

SEQ ID NO: 24820 - protein, 122 aa, Artificial Sequence
  Chemically Synthesized
QVQLQESGGGLVQAGGSLRLSCAASGYISVWYFMGWYRQAPGKERELVASINVGASTYYADSVKGRFTISRDNAKNTVYLQMNSLKPEDTAVYYCAVQPTPEDQGYDHLPYWGQGTQVTVSS

SEQ ID NO: 24821 - protein, 116 aa, Artificial Sequence
  Chemically Synthesized
QVQLQESGGGLVQAGGSLRLSCAASGTIFRDGAMGWYRQAPGKEREFVATLLMVLLPYADSVKGRFTISRDNAKNTVYLQMNSLKPEDTAVYYCAVSTVTVKTIYWGQGTQVTVSS

SEQ ID NO: 24822 - protein, 122 aa, Artificial Sequence
  Chemically Synthesized
QVQLQESGGGLVQAGGSLRLSCAASGTISQDAHMGWYRQAPGKERELVAAITRGGTTNYADSVKGRFTISRDNAKNTVYLQMNSLKPEDTAVYYCAVVVRTYTGYPYGYIYWGQGTQVTVSS

SEQ ID NO: 24823 - protein, 118 aa, Artificial Sequence
  Chemically Synthesized
QVQLQESGGGLVQAGGSLRLSCAASGYISYLYFMGWYRQAPGKERELVAAITLGGNTYYADSVKGRFTISRDNAKNTVYLQMNSLKPEDTAVYYCAAEYYGQARHGYWGQGTQVTVSS

SEQ ID NO: 24824 - protein, 118 aa, Artificial Sequence
  Chemically Synthesized
QVQLQESGGGLVQAGGSLRLSCAASGSIFDYSYMGWYRQAPGKEREFVAGIGYGGNTYYADSVKGRFTISRDNAKNTVYLQMNSLKPEDTAVYYCAVYAYQYPNLAYWGQGTQVTVSS

SEQ ID NO: 24825 - protein, 110 aa, Artificial Sequence
  Chemically Synthesized
QVQLQESGGGLVQAGGSLRLSCAASGYISRRGYMGWYRQAPGKERELVAGISGGGNTYYADSVKGRFTISRDNAKNTVYLQMNSLKPEDTAVYYCAFYYWGQGTQVTVSS

SEQ ID NO: 24826 - protein, 117 aa, Artificial Sequence
  Chemically Synthesized
QVQLQESGGGLVQAGGSLRLSCAASGYISALYTMGWYRQAPGKERELVASINVGTSTYADSVKGRFTISRDNAKNTVYLQMNSLKPEDTAVYYCAALVYLADYLGYWGQGTQVTVSS

SEQ ID NO: 24827 - protein, 125 aa, Artificial Sequence
  Chemically Synthesized
QVQLQESGGGLVQAGGSLRLSCAASGTIFQSLSMGWYRQAPGKERELVATINVGTYLYADSVKGRFTISRDNAKNTVYLQMNSLKPEDTAVYYCAAYAQYLLGPDDDVGVIYYYWGQGTQVTVSS

SEQ ID NO: 24828 - protein, 118 aa, Artificial Sequence
  Chemically Synthesized
QVQLQESGGGLVQAGGSLRLSCAASGTISAGDDMGWYRQAPGKEREFVATINYGSSTYYADSVKGRFTISRDNAKNTVYLQMNSLKPEDTAVYYCAAHLKWADYYLYWGQGTQVTVSS

SEQ ID NO: 24829 - protein, 122 aa, Artificial Sequence
  Chemically Synthesized
QVQLQESGGGLVQAGGSLRLSCAASGTIFYRGAMGWYRQAPGKERELVAGITYGTTTNYADSVKGRFTISRDNAKNTVYLQMNSLKPEDTAVYYCAVVRWYKGYDNVGHVYWGQGTQVTVSS

SEQ ID NO: 24830 - protein, 118 aa, Artificial Sequence
  Chemically Synthesized
QVQLQESGGGLVQAGGSLRLSCAASGYISANTGMGWYRQAPGKEREFVAAIAYGGSTYYADSVKGRFTISRDNAKNTVYLQMNSLKPEDTAVYYCAVTGREHLDYAYWGQGTQVTVSS

SEQ ID NO: 24831 - protein, 118 aa, Artificial Sequence
  Chemically Synthesized
QVQLQESGGGLVQAGGSLRLSCAASGYISRYYIMGWYRQAPGKEREFVAGISYGASTYYADSVKGRFTISRDNAKNTVYLQMNSLKPEDTAVYYCAVVRVVKTRYYYWGQGTQVTVSS

SEQ ID NO: 24832 - protein, 119 aa, Artificial Sequence
  Chemically Synthesized
QVQLQESGGGLVQAGGSLRLSCAASGTIFGTHSDMGWYRQAPGKERELVATIDYGTSTYYADSVKGRFTISRDNAKNTVYLQMNSLKPEDTAVYYCAAWLRENDDLVYWGQGTQVTVSS

SEQ ID NO: 24833 - protein, 126 aa, Artificial Sequence
  Chemically Synthesized
QVQLQESGGGLVQAGGSLRLSCAASGTISSPYRMGWYRQAPGKERELVAGIGYGGTTNYADSVKGRFTISRDNAKNTVYLQMNSLKPEDTAVYYCAVPDKLYLRSTHEGPIYLTYWGQGTQVTVSS

SEQ ID NO: 24834 - protein, 122 aa, Artificial Sequence
  Chemically Synthesized
QVQLQESGGGLVQAGGSLRLSCAASGTISAESMGWYRQAPGKEREFVASINDGTNTYYADSVKGRFTISRDNAKNTVYLQMNSLKPEDTAVYYCAVFKHHRADRAGLVTIYWGQGTQVTVSS

SEQ ID NO: 24835 - protein, 117 aa, Artificial Sequence
  Chemically Synthesized
QVQLQESGGGLVQAGGSLRLSCAASGSISDGIFMGWYRQAPGKERELVAGIAYGTSTNYADSVKGRFTISRDNAKNTVYLQMNSLKPEDTAVYYCAVYGGDPALWYWGQGTQVTVSS

SEQ ID NO: 24836 - protein, 126 aa, Artificial Sequence
  Chemically Synthesized
QVQLQESGGGLVQAGGSLRLSCAASGTIFKQYSMGWYRQAPGKERELVAAIGDGATTNYADSVKGRFTISRDNAKNTVYLQMNSLKPEDTAVYYCAVDRDAGYYPDRRKDASHSYWGQGTQVTVSS

SEQ ID NO: 24837 - protein, 118 aa, Artificial Sequence
  Chemically Synthesized
QVQLQESGGGLVQAGGSLRLSCAASGTIFPPRFMGWYRQAPGKERELVAAIGRGAITNYADSVKGRFTISRDNAKNTVYLQMNSLKPEDTAVYYCAAKSYWYYYHAYWGQGTQVTVSS

SEQ ID NO: 24838 - protein, 126 aa, Artificial Sequence
  Chemically Synthesized
QVQLQESGGGLVQAGGSLRLSCAASGTIFYPDDMGWYRQAPGKERELVATIATGGITYYADSVKGRFTISRDNAKNTVYLQMNSLKPEDTAVYYCAVADYHDYYTYRRDYVQHGYWGQGTQVTVSS

SEQ ID NO: 24839 - protein, 121 aa, Artificial Sequence
  Chemically Synthesized
QVQLQESGGGLVQAGGSLRLSCAASGYISVADVMGWYRQAPGKEREFVATITPGTNTYYADSVKGRFTISRDNAKNTVYLQMNSLKPEDTAVYYCAARPLGEQRRDWLYYWGQGTQVTVSS

SEQ ID NO: 24840 - protein, 118 aa, Artificial Sequence
  Chemically Synthesized
QVQLQESGGGLVQAGGSLRLSCAASGYIFTYVPMGWYRQAPGKEREFVASINVGTSTYYADSVKGRFTISRDNAKNTVYLQMNSLKPEDTAVYYCAVANYAYRVLDYWGQGTQVTVSS

SEQ ID NO: 24841 - protein, 118 aa, Artificial Sequence
  Chemically Synthesized
QVQLQESGGGLVQAGGSLRLSCAASGTIFSLYDMGWYRQAPGKEREFVAAISTGGTTYYADSVKGRFTISRDNAKNTVYLQMNSLKPEDTAVYYCAALVGVTYTFYYWGQGTQVTVSS

SEQ ID NO: 24842 - protein, 122 aa, Artificial Sequence
  Chemically Synthesized
QVQLQESGGGLVQAGGSLRLSCAASGTISDGSTMGWYRQAPGKERELVAGIDDGTTTYYADSVKGRFTISRDNAKNTVYLQMNSLKPEDTAVYYCAVYVYVRWRSYLPHRYWGQGTQVTVSS

SEQ ID NO: 24843 - protein, 126 aa, Artificial Sequence
  Chemically Synthesized
QVQLQESGGGLVQAGGSLRLSCAASGSISRYRFMGWYRQAPGKERELVAAIDSGATTNYADSVKGRFTISRDNAKNTVYLQMNSLKPEDTAVYYCAAVYWYRYSDRYPVRTGHIYWGQGTQVTVSS

SEQ ID NO: 24844 - protein, 118 aa, Artificial Sequence
  Chemically Synthesized
QVQLQESGGGLVQAGGSLRLSCAASGYIFYPGDMGWYRQAPGKERELVAAIAVGGSTYYADSVKGRFTISRDNAKNTVYLQMNSLKPEDTAVYYCAAGYLIVALFVYWGQGTQVTVSS

SEQ ID NO: 24845 - protein, 122 aa, Artificial Sequence
  Chemically Synthesized
QVQLQESGGGLVQAGGSLRLSCAASGYIFSDEPMGWYRQAPGKERELVAAIAVGGTTYYADSVKGRFTISRDNAKNTVYLQMNSLKPEDTAVYYCAVEYDRSYQNYVDYPYWGQGTQVTVSS

SEQ ID NO: 24846 - protein, 118 aa, Artificial Sequence
  Chemically Synthesized
QVQLQESGGGLVQAGGSLRLSCAASGYISRPIVMGWYRQAPGKERELVAGIARGGTTYYADSVKGRFTISRDNAKNTVYLQMNSLKPEDTAVYYCAVIRGRRGNLIYWGQGTQVTVSS

SEQ ID NO: 24847 - protein, 118 aa, Artificial Sequence
  Chemically Synthesized
QVQLQESGGGLVQAGGSLRLSCAASGTISDLGYMGWYRQAPGKEREFVASISSGGSTNYADSVKGRFTISRDNAKNTVYLQMNSLKPEDTAVYYCAAGHQYSYYHDYWGQGTQVTVSS

SEQ ID NO: 24848 - protein, 118 aa, Artificial Sequence
  Chemically Synthesized
QVQLQESGGGLVQAGGSLRLSCAASGSIFFYGHMGWYRQAPGKEREFVATIGWGASTYYADSVKGRFTISRDNAKNTVYLQMNSLKPEDTAVYYCAVYDHYGAYFIYWGQGTQVTVSS

SEQ ID NO: 24849 - protein, 118 aa, Artificial Sequence
  Chemically Synthesized
QVQLQESGGGLVQAGGSLRLSCAASGSIFILQKMGWYRQAPGKEREFVAAINLGGSTYYADSVKGRFTISRDNAKNTVYLQMNSLKPEDTAVYYCAVYTPYYARLTYWGQGTQVTVSS

SEQ ID NO: 24850 - protein, 122 aa, Artificial Sequence
  Chemically Synthesized
QVQLQESGGGLVQAGGSLRLSCAASGNISDFQSMGWYRQAPGKERELVAAIGAGASTYYADSVKGRFTISRDNAKNTVYLQMNSLKPEDTAVYYCAARNGWQRYGGLGYWYWGQGTQVTVSS

SEQ ID NO: 24851 - protein, 122 aa, Artificial Sequence
  Chemically Synthesized
QVQLQESGGGLVQAGGSLRLSCAASGSISEGRWMGWYRQAPGKEREFVAAIDIGTTTYYADSVKGRFTISRDNAKNTVYLQMNSLKPEDTAVYYCAAIIHPDYLDSVTHDYWGQGTQVTVSS

SEQ ID NO: 24852 - protein, 121 aa, Artificial Sequence
  Chemically Synthesized
QVQLQESGGGLVQAGGSLRLSCAASGNISYVSTMGWYRQAPGKERELVATINAGSSPYADSVKGRFTISRDNAKNTVYLQMNSLKPEDTAVYYCAAGLDYDRQPYGYHKYWGQGTQVTVSS

SEQ ID NO: 24853 - protein, 122 aa, Artificial Sequence
  Chemically Synthesized
QVQLQESGGGLVQAGGSLRLSCAASGYIFYYYYMGWYRQAPGKEREFVAGIGHGGTTYYADSVKGRFTISRDNAKNTVYLQMNSLKPEDTAVYYCAVSLRSRYGYQRGYRYWGQGTQVTVSS

SEQ ID NO: 24854 - protein, 118 aa, Artificial Sequence
  Chemically Synthesized
QVQLQESGGGLVQAGGSLRLSCAASGYISTRVNMGWYRQAPGKERELVAGINSGGNTNYADSVKGRFTISRDNAKNTVYLQMNSLKPEDTAVYYCAARVRWSRWLAYWGQGTQVTVSS

SEQ ID NO: 24855 - protein, 118 aa, Artificial Sequence
  Chemically Synthesized
QVQLQESGGGLVQAGGSLRLSCAASGNIFWRGYMGWYRQAPGKEREFVATINFGSSTNYADSVKGRFTISRDNAKNTVYLQMNSLKPEDTAVYYCAASFRHNRLYPYWGQGTQVTVSS

SEQ ID NO: 24856 - protein, 122 aa, Artificial Sequence
  Chemically Synthesized
QVQLQESGGGLVQAGGSLRLSCAASGTISAHRRMGWYRQAPGKEREFVASIGKGSSTYYADSVKGRFTISRDNAKNTVYLQMNSLKPEDTAVYYCAVDAAYSWRYRTWYWYWGQGTQVTVSS

SEQ ID NO: 24857 - protein, 122 aa, Artificial Sequence
  Chemically Synthesized
QVQLQESGGGLVQAGGSLRLSCAASGTIFRSYYMGWYRQAPGKERELVASISFGGNTNYADSVKGRFTISRDNAKNTVYLQMNSLKPEDTAVYYCAARARSSPYAVWYHRYWGQGTQVTVSS

SEQ ID NO: 24858 - protein, 118 aa, Artificial Sequence
  Chemically Synthesized
QVQLQESGGGLVQAGGSLRLSCAASGNISFPSYMGWYRQAPGKEREFVAAISPGGNTYYADSVKGRFTISRDNAKNTVYLQMNSLKPEDTAVYYCAADRSGRAVFYYWGQGTQVTVSS

SEQ ID NO: 24859 - protein, 108 aa, Artificial Sequence
  Chemically Synthesized
QVQLQESGGGLVQAGGSLRLSCAASGSISPTYMGWYRQAPGKERELVATIAYGTTTNYADSVKGRFTISRDNAKNTVYLQMNSLKPEDTAVYYCAHYWGQGTQVTVSS

SEQ ID NO: 24860 - protein, 118 aa, Artificial Sequence
  Chemically Synthesized
QVQLQESGGGLVQAGGSLRLSCAASGNISTGDKMGWYRQAPGKEREFVAGITRGSSTYYADSVKGRFTISRDNAKNTVYLQMNSLKPEDTAVYYCAVQRKHRWHLYYWGQGTQVTVSS

SEQ ID NO: 24861 - protein, 126 aa, Artificial Sequence
  Chemically Synthesized
QVQLQESGGGLVQAGGSLRLSCAASGNISQAWYMGWYRQAPGKEREFVASIDQGSSTNYADSVKGRFTISRDNAKNTVYLQMNSLKPEDTAVYYCAVVKYYERPDFAYYAADHRYWGQGTQVTVSS

SEQ ID NO: 24862 - protein, 121 aa, Artificial Sequence
  Chemically Synthesized
QVQLQESGGGLVQAGGSLRLSCAASGNIFRGAYMGWYRQAPGKEREFVAAIDAGGITNYADSVKGRFTISRDNAKNTVYLQMNSLKPEDTAVYYCAADQLEGWTDARSIYWGQGTQVTVSS

SEQ ID NO: 24863 - protein, 118 aa, Artificial Sequence
  Chemically Synthesized
QVQLQESGGGLVQAGGSLRLSCAASGYISAPDDMGWYRQAPGKEREFVATIARGTTTNYADSVKGRFTISRDNAKNTVYLQMNSLKPEDTAVYYCAARWLEGGGFAYWGQGTQVTVSS

SEQ ID NO: 24864 - protein, 118 aa, Artificial Sequence
  Chemically Synthesized
QVQLQESGGGLVQAGGSLRLSCAASGYIFNPTKMGWYRQAPGKEREFVAGISYGGNYQYADSVKGRFTISRDNAKNTVYLQMNSLKPEDTAVYYCAAKAYTAWAFSYWGQGTQVTVSS

SEQ ID NO: 24865 - protein, 118 aa, Artificial Sequence
  Chemically Synthesized
QVQLQESGGGLVQAGGSLRLSCAASGTIFSNDVMGWYRQAPGKEREFVASISDGTITNYADSVKGRFTISRDNAKNTVYLQMNSLKPEDTAVYYCAVYDDPYDDFYYWGQGTQVTVSS

SEQ ID NO: 24866 - protein, 126 aa, Artificial Sequence
  Chemically Synthesized
QVQLQESGGGLVQAGGSLRLSCAASGNISRTSYMGWYRQAPGKEREFVATITWGTITNYADSVKGRFTISRDNAKNTVYLQMNSLKPEDTAVYYCAVYAPVYYGLYTLLFRLHRYWGQGTQVTVSS

SEQ ID NO: 24867 - protein, 122 aa, Artificial Sequence
  Chemically Synthesized
QVQLQESGGGLVQAGGSLRLSCAASGSIFRSRKMGWYRQAPGKERELVATIDYGATTYYADSVKGRFTISRDNAKNTVYLQMNSLKPEDTAVYYCAARGRAYSRPRYYYVYWGQGTQVTVSS

SEQ ID NO: 24868 - protein, 121 aa, Artificial Sequence
  Chemically Synthesized
QVQLQESGGGLVQAGGSLRLSCAASGTISEVAFMGWYRQAPGKEREFVAGIAGGASTYADSVKGRFTISRDNAKNTVYLQMNSLKPEDTAVYYCAVAQRDYTDNIQDLGYWGQGTQVTVSS

SEQ ID NO: 24869 - protein, 123 aa, Artificial Sequence
  Chemically Synthesized
QVQLQESGGGLVQAGGSLRLSCAASGLGNTMGWYRQAPGKEREFVAGIDHGASTNYADSVKGRFTISRDNAKNTVYLQMNSLKPEDTAVYYCAAYGGEGDGDHGDGKNYFPYWGQGTQVTVSS

SEQ ID NO: 24870 - protein, 122 aa, Artificial Sequence
  Chemically Synthesized
QVQLQESGGGLVQAGGSLRLSCAASGTISNYIGMGWYRQAPGKERELVASINIGGSTYYADSVKGRFTISRDNAKNTVYLQMNSLKPEDTAVYYCAAYGTHDKALAQIYDYWGQGTQVTVSS

SEQ ID NO: 24871 - protein, 116 aa, Artificial Sequence
  Chemically Synthesized
QVQLQESGGGLVQAGGSLRLSCAASGNISGEGYMGWYRQAPGKEREFVAGIGLGSNTNYADSVKGRFTISRDNAKNTVYLQMNSLKPEDTAVYYCAARLLLTTIYWGQGTQVTVSS

SEQ ID NO: 24872 - protein, 118 aa, Artificial Sequence
  Chemically Synthesized
QVQLQESGGGLVQAGGSLRLSCAASGSIFPRQTMGWYRQAPGKEREFVASISYGGTTNYADSVKGRFTISRDNAKNTVYLQMNSLKPEDTAVYYCAVFSSWYSYHRYWGQGTQVTVSS

SEQ ID NO: 24873 - protein, 110 aa, Artificial Sequence
  Chemically Synthesized
QVQLQESGGGLVQAGGSLRLSCAASGTISPGRDMGWYRQAPGKERELVATIADGSNTNYADSVKGRFTISRDNAKNTVYLQMNSLKPEDTAVYYCAHVYWGQGTQVTVSS

SEQ ID NO: 24874 - protein, 126 aa, Artificial Sequence
  Chemically Synthesized
QVQLQESGGGLVQAGGSLRLSCAASGSIFYGPAMGWYRQAPGKERELVASISWGGITYYADSVKGRFTISRDNAKNTVYLQMNSLKPEDTAVYYCAVYSAQIRPYYQPLHWIHSYWGQGTQVTVSS

SEQ ID NO: 24875 - protein, 122 aa, Artificial Sequence
  Chemically Synthesized
QVQLQESGGGLVQAGGSLRLSCAASGTIFYPYEMGWYRQAPGKEREFVAGIASGSTTYYADSVKGRFTISRDNAKNTVYLQMNSLKPEDTAVYYCAVYVVSPYYAGVHHQYWGQGTQVTVSS

SEQ ID NO: 24876 - protein, 122 aa, Artificial Sequence
  Chemically Synthesized
QVQLQESGGGLVQAGGSLRLSCAASGSISVKRVMGWYRQAPGKERELVATIDRGTNTNYADSVKGRFTISRDNAKNTVYLQMNSLKPEDTAVYYCAAYPYRRVDRYGKHSYWGQGTQVTVSS

SEQ ID NO: 24877 - protein, 117 aa, Artificial Sequence
  Chemically Synthesized
QVQLQESGGGLVQAGGSLRLSCAASGLFLRRVMGWYRQAPGKERELVATIDYGATTYYADSVKGRFTISRDNAKNTVYLQMNSLKPEDTAVYYCAAARFDGPRLRYWGQGTQVTVSS

SEQ ID NO: 24878 - protein, 125 aa, Artificial Sequence
  Chemically Synthesized
QVQLQESGGGLVQAGGSLRLSCAASGNIFSTIMGWYRQAPGKEREFVASITEGTNTNYADSVKGRFTISRDNAKNTVYLQMNSLKPEDTAVYYCAVDDGGSPRPAFLDVYPHAYWGQGTQVTVSS

SEQ ID NO: 24879 - protein, 122 aa, Artificial Sequence
  Chemically Synthesized
QVQLQESGGGLVQAGGSLRLSCAASGYISRWVIMGWYRQAPGKEREFVAAITDGTNTYYADSVKGRFTISRDNAKNTVYLQMNSLKPEDTAVYYCAVRAGKFTEEADSHDYWGQGTQVTVSS

SEQ ID NO: 24880 - protein, 118 aa, Artificial Sequence
  Chemically Synthesized
QVQLQESGGGLVQAGGSLRLSCAASGNIFRPDTMGWYRQAPGKEREFVATISDGAITNYADSVKGRFTISRDNAKNTVYLQMNSLKPEDTAVYYCAVLGFYIYGYSYWGQGTQVTVSS

SEQ ID NO: 24881 - protein, 126 aa, Artificial Sequence
  Chemically Synthesized
QVQLQESGGGLVQAGGSLRLSCAASGNISRATVMGWYRQAPGKERELVAAIDAGANTNYADSVKGRFTISRDNAKNTVYLQMNSLKPEDTAVYYCAVYQRRSGYYGPPFGTTYLYWGQGTQVTVSS

SEQ ID NO: 24882 - protein, 124 aa, Artificial Sequence
  Chemically Synthesized
QVQLQESGGGLVQAGGSLRLSCAASGTISGCMGWYRQAPGKERELVATIATGASTYYADSVKGRFTISRDNAKNTVYLQMNSLKPEDTAVYYCAVNRAIPIHGTGVNTDYHPYWGQGTQVTVSS

SEQ ID NO: 24883 - protein, 118 aa, Artificial Sequence
  Chemically Synthesized
QVQLQESGGGLVQAGGSLRLSCAASGSIFLFNDMGWYRQAPGKERELVASISGGSNTYYADSVKGRFTISRDNAKNTVYLQMNSLKPEDTAVYYCAAYPSYPVRHPYWGQGTQVTVSS

SEQ ID NO: 24884 - protein, 125 aa, Artificial Sequence
  Chemically Synthesized
QVQLQESGGGLVQAGGSLRLSCAASGNIFSLKSMGWYRQAPGKEREFVAGLLRCYYLYADSVKGRFTISRDNAKNTVYLQMNSLKPEDTAVYYCAARLYQGIRVQDYDDSWYIYWGQGTQVTVSS

SEQ ID NO: 24885 - protein, 122 aa, Artificial Sequence
  Chemically Synthesized
QVQLQESGGGLVQAGGSLRLSCAASGSISWLGDMGWYRQAPGKERELVAAIGTGAITYYADSVKGRFTISRDNAKNTVYLQMNSLKPEDTAVYYCAAWNTYAYFGVNGYQYWGQGTQVTVSS

SEQ ID NO: 24886 - protein, 118 aa, Artificial Sequence
  Chemically Synthesized
QVQLQESGGGLVQAGGSLRLSCAASGTISSYFFMGWYRQAPGKERELVATINYGANTYYADSVKGRFTISRDNAKNTVYLQMNSLKPEDTAVYYCAVDPGGGGGLDYWGQGTQVTVSS

SEQ ID NO: 24887 - protein, 121 aa, Artificial Sequence
  Chemically Synthesized
QVQLQESGGGLVQAGGSLRLSCAASGYISSRPYMGWYRQAPGKERELVATIAQGAITYYADSVKGRFTISRDNAKNTVYLQMNSLKPEDTAVYYCASWTGRGDDDWYHEYWGQGTQVTVSS

SEQ ID NO: 24888 - protein, 125 aa, Artificial Sequence
  Chemically Synthesized
QVQLQESGGGLVQAGGSLRLSCAASGNISKAGGMGWYRQAPGKEREFVAAINHGGSTYADSVKGRFTISRDNAKNTVYLQMNSLKPEDTAVYYCAAWWVDDLTASPWVGSYLPYWGQGTQVTVSS

SEQ ID NO: 24889 - protein, 122 aa, Artificial Sequence
  Chemically Synthesized
QVQLQESGGGLVQAGGSLRLSCAASGTIFHVYWMGWYRQAPGKEREFVAGISVGATTNYADSVKGRFTISRDNAKNTVYLQMNSLKPEDTAVYYCAVWWLGPVRLYPDYQYWGQGTQVTVSS

SEQ ID NO: 24890 - protein, 118 aa, Artificial Sequence
  Chemically Synthesized
QVQLQESGGGLVQAGGSLRLSCAASGTIFYTFDMGWYRQAPGKEREFVATIGTGTSTYYADSVKGRFTISRDNAKNTVYLQMNSLKPEDTAVYYCAAVQSDSTHLEYWGQGTQVTVSS

SEQ ID NO: 24891 - protein, 118 aa, Artificial Sequence
  Chemically Synthesized
QVQLQESGGGLVQAGGSLRLSCAASGNIFEWKDMGWYRQAPGKERELVAAIAGGTTTNYADSVKGRFTISRDNAKNTVYLQMNSLKPEDTAVYYCAASNQWWGLLFYWGQGTQVTVSS

SEQ ID NO: 24892 - protein, 118 aa, Artificial Sequence
  Chemically Synthesized
QVQLQESGGGLVQAGGSLRLSCAASGNISRTWDMGWYRQAPGKERELVASITQGYYYLYADSVKGRFTISRDNAKNTVYLQMNSLKPEDTAVYYCAAEYYWYDLFGYWGQGTQVTVSS

SEQ ID NO: 24893 - protein, 118 aa, Artificial Sequence
  Chemically Synthesized
QVQLQESGGGLVQAGGSLRLSCAASGYIFDPSTMGWYRQAPGKERELVAGITHGATTNYADSVKGRFTISRDNAKNTVYLQMNSLKPEDTAVYYCAAWEPYDWFYRYWGQGTQVTVSS

SEQ ID NO: 24894 - protein, 120 aa, Artificial Sequence
  Chemically Synthesized
QVQLQESGGGLVQAGGSLRLSCAASGYISGYLRMGWYRQAPGKEREFVATIDHGGTTYYADSVKGRFTISRDNAKNTVYLQMNSLKPEDTAVYYCAAYYYSYVRWGHRYWGQGTQVTVSS

SEQ ID NO: 24895 - protein, 122 aa, Artificial Sequence
  Chemically Synthesized
QVQLQESGGGLVQAGGSLRLSCAASGTISLQNDMGWYRQAPGKERELVATISSGTITNYADSVKGRFTISRDNAKNTVYLQMNSLKPEDTAVYYCAVYTSPYLDPDPGLSYWGQGTQVTVSS

SEQ ID NO: 24896 - protein, 118 aa, Artificial Sequence
  Chemically Synthesized
QVQLQESGGGLVQAGGSLRLSCAASGTIFGDDYMGWYRQAPGKEREFVAAITYGTITNYADSVKGRFTISRDNAKNTVYLQMNSLKPEDTAVYYCAVEDLVDRAHPYWGQGTQVTVSS

SEQ ID NO: 24897 - protein, 120 aa, Artificial Sequence
  Chemically Synthesized
QVQLQESGGGLVQAGGSLRLSCAASGSISYRDLMGWYRQAPGKEREFVAGIDGGSSTYYADSVKGRFTISRDNAKNTVYLQMNSLKPEDTAVYYCAVAVRDADATDHGYWGQGTQVTVSS

SEQ ID NO: 24898 - protein, 118 aa, Artificial Sequence
  Chemically Synthesized
QVQLQESGGGLVQAGGSLRLSCAASGTISGDTDMGWYRQAPGKERELVAAINNGSSTNYADSVKGRFTISRDNAKNTVYLQMNSLKPEDTAVYYCAARAYPYYYLVYWGQGTQVTVSS

SEQ ID NO: 24899 - protein, 118 aa, Artificial Sequence
  Chemically Synthesized
QVQLQESGGGLVQAGGSLRLSCAASGSISGVVRMGWYRQAPGKEREFVATIDPGSTTYYADSVKGRFTISRDNAKNTVYLQMNSLKPEDTAVYYCAVYYIIDGTLGYWGQGTQVTVSS

SEQ ID NO: 24900 - protein, 126 aa, Artificial Sequence
  Chemically Synthesized
QVQLQESGGGLVQAGGSLRLSCAASGTISSDVIMGWYRQAPGKERELVASIDGGGITNYADSVKGRFTISRDNAKNTVYLQMNSLKPEDTAVYYCAPANLSYYYELSTDFTRYFYWGQGTQVTVSS

SEQ ID NO: 24901 - protein, 121 aa, Artificial Sequence
  Chemically Synthesized
QVQLQESGGGLVQAGGSLRLSCAASGYIFTVTMGWYRQAPGKEREFVATIDDGASTNYADSVKGRFTISRDNAKNTVYLQMNSLKPEDTAVYYCAAEWYNDYSYRTRYDYWGQGTQVTVSS

SEQ ID NO: 24902 - protein, 118 aa, Artificial Sequence
  Chemically Synthesized
QVQLQESGGGLVQAGGSLRLSCAASGNIFRPYTMGWYRQAPGKEREFVASINLGGNTNYADSVKGRFTISRDNAKNTVYLQMNSLKPEDTAVYYCAANGYNYYSFYYWGQGTQVTVSS

SEQ ID NO: 24903 - protein, 122 aa, Artificial Sequence
  Chemically Synthesized
QVQLQESGGGLVQAGGSLRLSCAASGTISYFPRMGWYRQAPGKEREFVASIGWGASTNYADSVKGRFTISRDNAKNTVYLQMNSLKPEDTAVYYCAASRYYYYGWLRDFGYWGQGTQVTVSS

SEQ ID NO: 24904 - protein, 115 aa, Artificial Sequence
  Chemically Synthesized
QVQLQESGGGLVQAGGSLRLSCAASGYISAMGWYRQAPGKEREFVAGIGQGASTYYADSVKGRFTISRDNAKNTVYLQMNSLKPEDTAVYYCAVTRYLTSGYPYWGQGTQVTVSS

SEQ ID NO: 24905 - protein, 118 aa, Artificial Sequence
  Chemically Synthesized
QVQLQESGGGLVQAGGSLRLSCAASGNIFGRYVMGWYRQAPGKEREFVATITTGSNTYYADSVKGRFTISRDNAKNTVYLQMNSLKPEDTAVYYCAAYDDYAYVYGYWGQGTQVTVSS

SEQ ID NO: 24906 - protein, 125 aa, Artificial Sequence
  Chemically Synthesized
QVQLQESGGGLVQAGGSLRLSCAASGIFLCRTMGWYRQAPGKERELVAAIDIGTITNYADSVKGRFTISRDNAKNTVYLQMNSLKPEDTAVYYCAAYYNAYYPGYYDALSSYDYWGQGTQVTVSS

SEQ ID NO: 24907 - protein, 122 aa, Artificial Sequence
  Chemically Synthesized
QVQLQESGGGLVQAGGSLRLSCAASGNIFAEPRMGWYRQAPGKERELVAGIGPGSITNYADSVKGRFTISRDNAKNTVYLQMNSLKPEDTAVYYCAALGVQPYPYYYEFGYWGQGTQVTVSS

SEQ ID NO: 24908 - protein, 117 aa, Artificial Sequence
  Chemically Synthesized
QVQLQESGGGLVQAGGSLRLSCAASGSISSTYYMGWYRQAPGKERELVASINSGSNTNYADSVKGRFTISRDNAKNTVYLQMNSLKPEDTAVYYCAVPVWDVTTIYWGQGTQVTVSS

SEQ ID NO: 24909 - protein, 126 aa, Artificial Sequence
  Chemically Synthesized
QVQLQESGGGLVQAGGSLRLSCAASGNISQVVFMGWYRQAPGKERELVAAIATGTTTYYADSVKGRFTISRDNAKNTVYLQMNSLKPEDTAVYYCAAYAGYRGFSPFRYHDFLRYWGQGTQVTVSS

SEQ ID NO: 24910 - protein, 108 aa, Artificial Sequence
  Chemically Synthesized
QVQLQESGGGLVQAGGSLRLSCAASGYIFGDAIMGWYRQAPGKEREFNYADSVKGRFTISRDNAKNTVYLQMNSLKPEDTAVYYCAVNANPYGGLAYWGQGTQVTVSS

SEQ ID NO: 24911 - protein, 118 aa, Artificial Sequence
  Chemically Synthesized
QVQLQESGGGLVQAGGSLRLSCAASGTISVWQSMGWYRQAPGKERELVAAITYGTNTYYADSVKGRFTISRDNAKNTVYLQMNSLKPEDTAVYYCAVRNPDPLYHQYWGQGTQVTVSS

SEQ ID NO: 24912 - protein, 121 aa, Artificial Sequence
  Chemically Synthesized
QVQLQESGGGLVQAGGSLRLSCAASGNISYRWYMGWYRQAPGKERELVAAITFGASTYYADSVKGRFTISRDNAKNTVYLQMNSLKPEDTAVYYCAANGGYYAYGFRYWYWGQGTQVTVSS

SEQ ID NO: 24913 - protein, 118 aa, Artificial Sequence
  Chemically Synthesized
QVQLQESGGGLVQAGGSLRLSCAASGNIFELEYMGWYRQAPGKERELVAGIGYGTSTYYADSVKGRFTISRDNAKNTVYLQMNSLKPEDTAVYYCAVGDDDDFILWYWGQGTQVTVSS

SEQ ID NO: 24914 - protein, 118 aa, Artificial Sequence
  Chemically Synthesized
QVQLQESGGGLVQAGGSLRLSCAASGTISAYYSMGWYRQAPGKEREFVAGIGYGASTYYADSVKGRFTISRDNAKNTVYLQMNSLKPEDTAVYYCAAYTYQYVHHKYWGQGTQVTVSS

SEQ ID NO: 24915 - protein, 118 aa, Artificial Sequence
  Chemically Synthesized
QVQLQESGGGLVQAGGSLRLSCAASGNISAARRMGWYRQAPGKEREFVASIGYGSSTNYADSVKGRFTISRDNAKNTVYLQMNSLKPEDTAVYYCAVRWLRLWSHTYWGQGTQVTVSS

SEQ ID NO: 24916 - protein, 121 aa, Artificial Sequence
  Chemically Synthesized
QVQLQESGGGLVQAGGSLRLSCAASGNISDTWRMGWYRQAPGKERELVASIGPGVLPYADSVKGRFTISRDNAKNTVYLQMNSLKPEDTAVYYCAVHVYYSQDYLSTFYYWGQGTQVTVSS

SEQ ID NO: 24917 - protein, 118 aa, Artificial Sequence
  Chemically Synthesized
QVQLQESGGGLVQAGGSLRLSCAASGTISRGNYMGWYRQAPGKEREFVATITAGSITYYADSVKGRFTISRDNAKNTVYLQMNSLKPEDTAVYYCAARNHSESDYRYWGQGTQVTVSS

SEQ ID NO: 24918 - protein, 126 aa, Artificial Sequence
  Chemically Synthesized
QVQLQESGGGLVQAGGSLRLSCAASGTISTHYYMGWYRQAPGKEREFVAAINEVVLLPYADSVKGRFTISRDNAKNTVYLQMNSLKPEDTAVYYCAVIYNAKSSGGYHEWTRLLYWGQGTQVTVSS

SEQ ID NO: 24919 - protein, 117 aa, Artificial Sequence
  Chemically Synthesized
QVQLQESGGGLVQAGGSLRLSCAASGNISSVFMGWYRQAPGKERELVAAINYGANTNYADSVKGRFTISRDNAKNTVYLQMNSLKPEDTAVYYCAAQYYDAGSYYYWGQGTQVTVSS

SEQ ID NO: 24920 - protein, 125 aa, Artificial Sequence
  Chemically Synthesized
QVQLQESGGGLVQAGGSLRLSCAASGTIFDDYVMGWYRQAPGKEREFVAGITTGGITYYADSVKGRFTISRDNAKNTVYLQMNSLKPEDTAVYYCAVTGDEGYVYASDTGGLLYWGQGTQVTVSS

SEQ ID NO: 24921 - protein, 118 aa, Artificial Sequence
  Chemically Synthesized
QVQLQESGGGLVQAGGSLRLSCAASGTISARKDMGWYRQAPGKEREFVATINYGANTNYADSVKGRFTISRDNAKNTVYLQMNSLKPEDTAVYYCAVIRGGSYYHQYWGQGTQVTVSS

SEQ ID NO: 24922 - protein, 117 aa, Artificial Sequence
  Chemically Synthesized
QVQLQESGGGLVQAGGSLRLSCAASGYISPYSMGWYRQAPGKEREFVAAITRGGNTNYADSVKGRFTISRDNAKNTVYLQMNSLKPEDTAVYYCAVYYPADRYYYYWGQGTQVTVSS

SEQ ID NO: 24923 - protein, 119 aa, Artificial Sequence
  Chemically Synthesized
QVQLQESGGGLVQAGGSLRLSCAASGNISYADMGWYRQAPGKEREFVATITAGANTYYADSVKGRFTISRDNAKNTVYLQMNSLKPEDTAVYYCAAYYLAWWHSCIIYWGQGTQVTVSS

SEQ ID NO: 24924 - protein, 118 aa, Artificial Sequence
  Chemically Synthesized
QVQLQESGGGLVQAGGSLRLSCAASGYISAGHYMGWYRQAPGKERELVASIGRGGSTQYADSVKGRFTISRDNAKNTVYLQMNSLKPEDTAVYYCAAIVHAPHTYAYWGQGTQVTVSS

SEQ ID NO: 24925 - protein, 116 aa, Artificial Sequence
  Chemically Synthesized
QVQLQESGGGLVQAGGSLRLSCAASGNISYYGGMGWYRQAPGKERELVAYCWCYYQYADSVKGRFTISRDNAKNTVYLQMNSLKPEDTAVYYCAVFTGRPGTLWYWGQGTQVTVSS

SEQ ID NO: 24926 - protein, 118 aa, Artificial Sequence
  Chemically Synthesized
QVQLQESGGGLVQAGGSLRLSCAASGNIFYYIIMGWYRQAPGKEREFVASITSGGITNYADSVKGRFTISRDNAKNTVYLQMNSLKPEDTAVYYCAVDVRRWVSHHYWGQGTQVTVSS

SEQ ID NO: 24927 - protein, 122 aa, Artificial Sequence
  Chemically Synthesized
QVQLQESGGGLVQAGGSLRLSCAASGTISPSYIMGWYRQAPGKEREFVAAISDGANTYYADSVKGRFTISRDNAKNTVYLQMNSLKPEDTAVYYCAVGRGQNGTDYLTYAYWGQGTQVTVSS

SEQ ID NO: 24928 - protein, 127 aa, Artificial Sequence
  Chemically Synthesized
QVQLQESGGGLVQAGGSLRLSCAASGYISDNGLMGWYRQAPGKERELVAAIALGSITYYADSVKGRFTISRDNAKNTVYLQMNSLKPEDTAVYYCAAWQSSDDWTYAVDDVDSLGYWGQGTQVTVSS

SEQ ID NO: 24929 - protein, 118 aa, Artificial Sequence
  Chemically Synthesized
QVQLQESGGGLVQAGGSLRLSCAASGYIFRTSYMGWYRQAPGKERELVAAIDPGSSTNYADSVKGRFTISRDNAKNTVYLQMNSLKPEDTAVYYCAVFYGQNYLFGYWGQGTQVTVSS

SEQ ID NO: 24930 - protein, 118 aa, Artificial Sequence
  Chemically Synthesized
QVQLQESGGGLVQAGGSLRLSCAASGTIFPFIGMGWYRQAPGKERELVAAISIGGNTNYADSVKGRFTISRDNAKNTVYLQMNSLKPEDTAVYYCAAYRYVQDQHYYWGQGTQVTVSS

SEQ ID NO: 24931 - protein, 118 aa, Artificial Sequence
  Chemically Synthesized
QVQLQESGGGLVQAGGSLRLSCAASGTISYRDFMGWYRQAPGKERELVATIDSGGITNYADSVKGRFTISRDNAKNTVYLQMNSLKPEDTAVYYCAANAGNSQQFPYWGQGTQVTVSS

SEQ ID NO: 24932 - protein, 118 aa, Artificial Sequence
  Chemically Synthesized
QVQLQESGGGLVQAGGSLRLSCAASGSIFWTGYMGWYRQAPGKERELVATINYGATTYYADSVKGRFTISRDNAKNTVYLQMNSLKPEDTAVYYCAVYLYRYTPFPYWGQGTQVTVSS

SEQ ID NO: 24933 - protein, 117 aa, Artificial Sequence
  Chemically Synthesized
QVQLQESGGGLVQAGGSLRLSCAASGYIFAYFMGWYRQAPGKEREFVASIDDGTTTYYADSVKGRFTISRDNAKNTVYLQMNSLKPEDTAVYYCAAGYAGPYKFAYWGQGTQVTVSS

SEQ ID NO: 24934 - protein, 118 aa, Artificial Sequence
  Chemically Synthesized
QVQLQESGGGLVQAGGSLRLSCAASGSISRDTYMGWYRQAPGKEREFVASIDFGGNTYYADSVKGRFTISRDNAKNTVYLQMNSLKPEDTAVYYCAATYGYYPLFYYWGQGTQVTVSS

SEQ ID NO: 24935 - protein, 120 aa, Artificial Sequence
  Chemically Synthesized
QVQLQESGGGLVQAGGSLRLSCAASGSISWKDRMGWYRQAPGKEREFVAAIGYGSNTYYADSVKGRFTISRDNAKNTVYLQMNSLKPEDTAVYYCAAGIDYEGIARHIYWGQGTQVTVSS

SEQ ID NO: 24936 - protein, 118 aa, Artificial Sequence
  Chemically Synthesized
QVQLQESGGGLVQAGGSLRLSCAASGNISDYTYMGWYRQAPGKERELVAGISYGSTTYYADSVKGRFTISRDNAKNTVYLQMNSLKPEDTAVYYCAAWYVDDYALYYWGQGTQVTVSS

SEQ ID NO: 24937 - protein, 126 aa, Artificial Sequence
  Chemically Synthesized
QVQLQESGGGLVQAGGSLRLSCAASGSIFSTGAMGWYRQAPGKEREFVAAISGGASTNYADSVKGRFTISRDNAKNTVYLQMNSLKPEDTAVYYCAALTYRIIQQGYQLGVPLDYWGQGTQVTVSS

SEQ ID NO: 24938 - protein, 122 aa, Artificial Sequence
  Chemically Synthesized
QVQLQESGGGLVQAGGSLRLSCAASGYIFEATVMGWYRQAPGKEREFVAAISVGGNTNYADSVKGRFTISRDNAKNTVYLQMNSLKPEDTAVYYCAAVDEAPYVYDADHAYWGQGTQVTVSS

SEQ ID NO: 24939 - protein, 123 aa, Artificial Sequence
  Chemically Synthesized
QVQLQESGGGLVQAGGSLRLSCAASGNISNAAYMGWYRQAPGKEREFVATITQVGGITNYADSVKGRFTISRDNAKNTVYLQMNSLKPEDTAVYYCAAAYYGIGTYGAGHAYWGQGTQVTVSS

SEQ ID NO: 24940 - protein, 118 aa, Artificial Sequence
  Chemically Synthesized
QVQLQESGGGLVQAGGSLRLSCAASGYIFWYTSMGWYRQAPGKERELVATITGGATTNYADSVKGRFTISRDNAKNTVYLQMNSLKPEDTAVYYCAVYYYFGDIHGYWGQGTQVTVSS

SEQ ID NO: 24941 - protein, 126 aa, Artificial Sequence
  Chemically Synthesized
QVQLQESGGGLVQAGGSLRLSCAASGNIFWSFSMGWYRQAPGKERELVAGINYGTSTYYADSVKGRFTISRDNAKNTVYLQMNSLKPEDTAVYYCAAVYVAYRVTQSDVEKYYFYWGQGTQVTVSS

SEQ ID NO: 24942 - protein, 114 aa, Artificial Sequence
  Chemically Synthesized
QVQLQESGGGLVQAGGSLRLSCAASGYISWTLAMGWYRQAPGKERELVAAINVGASTYYADSVKGRFTISRDNAKNTVYLQMNSLKPEDTAVYYCAVLVPACYWGQGTQVTVSS

SEQ ID NO: 24943 - protein, 118 aa, Artificial Sequence
  Chemically Synthesized
QVQLQESGGGLVQAGGSLRLSCAASGSIFKVEYMGWYRQAPGKERELVAAIAIGGSTYYADSVKGRFTISRDNAKNTVYLQMNSLKPEDTAVYYCAVPGFDPKPFRYWGQGTQVTVSS

SEQ ID NO: 24944 - protein, 124 aa, Artificial Sequence
  Chemically Synthesized
QVQLQESGGGLVQAGGSLRLSCAASGTIFEVDSMGWYRQAPGKERELVAAIADGSTTNYADSVKGRFTISRDNAKNTVYLQMNSLKPEDTAVYYCAVGDRWTRYDYRYWRLNYWGQGTQVTVSS

SEQ ID NO: 24945 - protein, 118 aa, Artificial Sequence
  Chemically Synthesized
QVQLQESGGGLVQAGGSLRLSCAASGTISDPANMGWYRQAPGKERELVASISYGSNTNYADSVKGRFTISRDNAKNTVYLQMNSLKPEDTAVYYCAAVPYVHLSHAYWGQGTQVTVSS

SEQ ID NO: 24946 - protein, 108 aa, Artificial Sequence
  Chemically Synthesized
QVQLQESGGGLVQAGGSLRLSCAASGTIFSVRSMGWYRQAPGKEREPYYADSVKGRFTISRDNAKNTVYLQMNSLKPEDTAVYYCAAAAQVGNRYDYWGQGTQVTVSS

SEQ ID NO: 24947 - protein, 115 aa, Artificial Sequence
  Chemically Synthesized
QVQLQESGGGLVQAGGSLRLSCAASGYIFRRQWMGWYRQAPGKERELVATIADGASTNYADSVKGRFTISRDNAKNTVYLQMNSLKPEDTAVYYCAVDDSEWDYWGQGTQVTVSS

SEQ ID NO: 24948 - protein, 117 aa, Artificial Sequence
  Chemically Synthesized
QVQLQESGGGLVQAGGSLRLSCAASGTISPSPFMGWYRQAPGKERELVAAISGDYYQYADSVKGRFTISRDNAKNTVYLQMNSLKPEDTAVYYCAAYAYEASAYAYWGQGTQVTVSS

SEQ ID NO: 24949 - protein, 114 aa, Artificial Sequence
  Chemically Synthesized
QVQLQESGGGLVQAGGSLRLSCAASGTISVGDDMGWYRQAPGKERELVADWYYLYADSVKGRFTISRDNAKNTVYLQMNSLKPEDTAVYYCAANRYSENSHTYWGQGTQVTVSS

SEQ ID NO: 24950 - protein, 119 aa, Artificial Sequence
  Chemically Synthesized
QVQLQESGGGLVQAGGSLRLSCAASGNIFSLDGMGWYRQAPGKEREFVAGIDSGSSTNYADSVKGRFTISRDNAKNTVYLQMNSLKPEDTAVYYCAADPAEAYAGSIYWGQGTQVTVSS

SEQ ID NO: 24951 - protein, 126 aa, Artificial Sequence
  Chemically Synthesized
QVQLQESGGGLVQAGGSLRLSCAASGTIFPYPTMGWYRQAPGKEREFVAAIGHGTSTNYADSVKGRFTISRDNAKNTVYLQMNSLKPEDTAVYYCAVIDDPYDYDPTRDDRRHYYWGQGTQVTVSS

SEQ ID NO: 24952 - protein, 125 aa, Artificial Sequence
  Chemically Synthesized
QVQLQESGGGLVQAGGSLRLSCAASGTISAPRIMGWYRQAPGKERELVAAISDGSTTNYADSVKGRFTISRDNAKNTVYLQMNSLKPEDTAVYYCAAQYDDSTWTSVSGTFRFYWGQGTQVTVSS

SEQ ID NO: 24953 - protein, 115 aa, Artificial Sequence
  Chemically Synthesized
QVQLQESGGGLVQAGGSLRLSCAASGYIFDDYIMGWYRQAPGKEREFVASSSTTYYADSVKGRFTISRDNAKNTVYLQMNSLKPEDTAVYYCAVDARVFDHHYYWGQGTQVTVSS

SEQ ID NO: 24954 - protein, 118 aa, Artificial Sequence
  Chemically Synthesized
QVQLQESGGGLVQAGGSLRLSCAASGYISGPYIMGWYRQAPGKEREFVAGIADGAITYYADSVKGRFTISRDNAKNTVYLQMNSLKPEDTAVYYCAVYGGRITYYPYWGQGTQVTVSS

SEQ ID NO: 24955 - protein, 114 aa, Artificial Sequence
  Chemically Synthesized
QVQLQESGGGLVQAGGSLRLSCAASGAALMGWYRQAPGKEREFVAAIGHGANTYYADSVKGRFTISRDNAKNTVYLQMNSLKPEDTAVYYCAARYREYDDFRYWGQGTQVTVSS

SEQ ID NO: 24956 - protein, 125 aa, Artificial Sequence
  Chemically Synthesized
QVQLQESGGGLVQAGGSLRLSCAASGNIFRDGYMGWYRQAPGKEREFVASINGGASTNYADSVKGRFTISRDNAKNTVYLQMNSLKPEDTAVYYCAVRYADGGYEQYYIGSAFYWGQGTQVTVSS

SEQ ID NO: 24957 - protein, 122 aa, Artificial Sequence
  Chemically Synthesized
QVQLQESGGGLVQAGGSLRLSCAASGTISSVDGMGWYRQAPGKERELVAAIASGATTYYADSVKGRFTISRDNAKNTVYLQMNSLKPEDTAVYYCAVVFYGASVGAVYHDYWGQGTQVTVSS

SEQ ID NO: 24958 - protein, 118 aa, Artificial Sequence
  Chemically Synthesized
QVQLQESGGGLVQAGGSLRLSCAASGTIFWGDYMGWYRQAPGKERELVAAISFGTTTYYADSVKGRFTISRDNAKNTVYLQMNSLKPEDTAVYYCAAFRPFSWRHQYWGQGTQVTVSS

SEQ ID NO: 24959 - protein, 113 aa, Artificial Sequence
  Chemically Synthesized
QVQLQESGGGLVQAGGSLRLSCAASGYISPFLEMGWYRQAPGKERELVGWYYQYADSVKGRFTISRDNAKNTVYLQMNSLKPEDTAVYYCAAAYGSYYDHVYWGQGTQVTVSS

SEQ ID NO: 24960 - protein, 118 aa, Artificial Sequence
  Chemically Synthesized
QVQLQESGGGLVQAGGSLRLSCAASGYIFSVYYMGWYRQAPGKEREFVAAIDNGASTYYADSVKGRFTISRDNAKNTVYLQMNSLKPEDTAVYYCAAWRYSGGGFRYWGQGTQVTVSS

SEQ ID NO: 24961 - protein, 118 aa, Artificial Sequence
  Chemically Synthesized
QVQLQESGGGLVQAGGSLRLSCAASGYISPKAGMGWYRQAPGKEREFVATIDYGTNTNYADSVKGRFTISRDNAKNTVYLQMNSLKPEDTAVYYCAVTTVLGTTLMYWGQGTQVTVSS

SEQ ID NO: 24962 - protein, 118 aa, Artificial Sequence
  Chemically Synthesized
QVQLQESGGGLVQAGGSLRLSCAASGNISDVWYMGWYRQAPGKEREFVAAIGFGGNTYYADSVKGRFTISRDNAKNTVYLQMNSLKPEDTAVYYCAAWRAAYYPLLYWGQGTQVTVSS

SEQ ID NO: 24963 - protein, 118 aa, Artificial Sequence
  Chemically Synthesized
QVQLQESGGGLVQAGGSLRLSCAASGSISRRKGMGWYRQAPGKEREFVAGIAVGASTYYADSVKGRFTISRDNAKNTVYLQMNSLKPEDTAVYYCAAGLGYVRNLRYWGQGTQVTVSS

SEQ ID NO: 24964 - protein, 121 aa, Artificial Sequence
  Chemically Synthesized
QVQLQESGGGLVQAGGSLRLSCAASGSIFGYSIMGWYRQAPGKERELVAGITRVVLPYADSVKGRFTISRDNAKNTVYLQMNSLKPEDTAVYYCAADRYQYYEPTHWLGYWGQGTQVTVSS

SEQ ID NO: 24965 - protein, 118 aa, Artificial Sequence
  Chemically Synthesized
QVQLQESGGGLVQAGGSLRLSCAASGNIFRDYVMGWYRQAPGKERELVATISGGSITNYADSVKGRFTISRDNAKNTVYLQMNSLKPEDTAVYYCAVTFGEDWVHPYWGQGTQVTVSS

SEQ ID NO: 24966 - protein, 117 aa, Artificial Sequence
  Chemically Synthesized
QVQLQESGGGLVQAGGSLRLSCAASGTIFLADQMGWYRQAPGKEREFVAAIGYGGSTNYADSVKGRFTISRDNAKNTVYLQMNSLKPEDTAVYYCAAYRDGYHDHYWGQGTQVTVSS

SEQ ID NO: 24967 - protein, 124 aa, Artificial Sequence
  Chemically Synthesized
QVQLQESGGGLVQAGGSLRLSCAASGTIFVYDAMGWYRQAPGKERELVAAIATGSITNYADSVKGRFTISRDNAKNTVYLQMNSLKPEDTAVYYCAAQRYYPWYDDFSLLSYYWGQGTQVTVSS

SEQ ID NO: 24968 - protein, 121 aa, Artificial Sequence
  Chemically Synthesized
QVQLQESGGGLVQAGGSLRLSCAASGYIFVFPTMGWYRQAPGKEREFVAAIAFGGSTNYADSVKGRFTISRDNAKNTVYLQMNSLKPEDTAVYYCALLTTVTVTTTLLIYWGQGTQVTVSS

SEQ ID NO: 24969 - protein, 120 aa, Artificial Sequence
  Chemically Synthesized
QVQLQESGGGLVQAGGSLRLSCAASGCMGWYRQAPGKERELVAGIAAGANTYYADSVKGRFTISRDNAKNTVYLQMNSLKPEDTAVYYCAVANQTIGRPYWSNRPGHDYWGQGTQVTVSS

SEQ ID NO: 24970 - protein, 113 aa, Artificial Sequence
  Chemically Synthesized
QVQLQESGGGLVQAGGSLRLSCAASGNISTAWDMGWYRQAPGKERELVAAINVGASTNYADSVKGRFTISRDNAKNTVYLQMNSLKPEDTAVYYCAAYVPNYWGQGTQVTVSS

SEQ ID NO: 24971 - protein, 118 aa, Artificial Sequence
  Chemically Synthesized
QVQLQESGGGLVQAGGSLRLSCAASGNISAPYIMGWYRQAPGKEREFVASINNGTNTYYADSVKGRFTISRDNAKNTVYLQMNSLKPEDTAVYYCAVKYSYARTLVYWGQGTQVTVSS

SEQ ID NO: 24972 - protein, 121 aa, Artificial Sequence
  Chemically Synthesized
QVQLQESGGGLVQAGGSLRLSCAASGSIFIRSRMGWYRQAPGKEREFVATISIGGNTNYADSVKGRFTISRDNAKNTVYLQMNSLKPEDTAVYYCAVSTTTLLLTVTLFYWGQGTQVTVSS

SEQ ID NO: 24973 - protein, 122 aa, Artificial Sequence
  Chemically Synthesized
QVQLQESGGGLVQAGGSLRLSCAASGNISAFGWMGWYRQAPGKEREFVATISQGGNTNYADSVKGRFTISRDNAKNTVYLQMNSLKPEDTAVYYCAVWTVVVPNNRYLHSYWGQGTQVTVSS

SEQ ID NO: 24974 - protein, 126 aa, Artificial Sequence
  Chemically Synthesized
QVQLQESGGGLVQAGGSLRLSCAASGTIFDSLSMGWYRQAPGKERELVATIAYGASTNYADSVKGRFTISRDNAKNTVYLQMNSLKPEDTAVYYCAVRDEYWSVVTDTAKSTHDYWGQGTQVTVSS

SEQ ID NO: 24975 - protein, 117 aa, Artificial Sequence
  Chemically Synthesized
QVQLQESGGGLVQAGGSLRLSCAASGLFFISTMGWYRQAPGKEREFVATIGFGAITYYADSVKGRFTISRDNAKNTVYLQMNSLKPEDTAVYYCAVTLFRASAFQYWGQGTQVTVSS

SEQ ID NO: 24976 - protein, 118 aa, Artificial Sequence
  Chemically Synthesized
QVQLQESGGGLVQAGGSLRLSCAASGTIFDAAYMGWYRQAPGKEREFVASITDGASTNYADSVKGRFTISRDNAKNTVYLQMNSLKPEDTAVYYCAVPYVYKYLHSYWGQGTQVTVSS

SEQ ID NO: 24977 - protein, 122 aa, Artificial Sequence
  Chemically Synthesized
QVQLQESGGGLVQAGGSLRLSCAASGYISADPIMGWYRQAPGKEREFVAGISNGGTTYYADSVKGRFTISRDNAKNTVYLQMNSLKPEDTAVYYCAVQPYDATGTFYGYYYWGQGTQVTVSS

SEQ ID NO: 24978 - protein, 118 aa, Artificial Sequence
  Chemically Synthesized
QVQLQESGGGLVQAGGSLRLSCAASGSIFIDDVMGWYRQAPGKERELVAAIDLGSTTYYADSVKGRFTISRDNAKNTVYLQMNSLKPEDTAVYYCAVARYTYRTLVYWGQGTQVTVSS

SEQ ID NO: 24979 - protein, 122 aa, Artificial Sequence
  Chemically Synthesized
QVQLQESGGGLVQAGGSLRLSCAASGYISADDGMGWYRQAPGKERELVAAIALGTNTYYADSVKGRFTISRDNAKNTVYLQMNSLKPEDTAVYYCAAERWRRDALHGYLYYWGQGTQVTVSS

SEQ ID NO: 24980 - protein, 118 aa, Artificial Sequence
  Chemically Synthesized
QVQLQESGGGLVQAGGSLRLSCAASGTIFFPDVMGWYRQAPGKEREFVAGIALGTSTYYADSVKGRFTISRDNAKNTVYLQMNSLKPEDTAVYYCAVIVRRDDDYYYWGQGTQVTVSS

SEQ ID NO: 24981 - protein, 122 aa, Artificial Sequence
  Chemically Synthesized
QVQLQESGGGLVQAGGSLRLSCAASGNISGPTYMGWYRQAPGKEREFVASINAGTSTNYADSVKGRFTISRDNAKNTVYLQMNSLKPEDTAVYYCAVVVILGRSIRDWHDYWGQGTQVTVSS

SEQ ID NO: 24982 - protein, 114 aa, Artificial Sequence
  Chemically Synthesized
QVQLQESGGGLVQAGGSLRLSCAASGNIFQRHYMGWYRQAPGKERELVAGASTYYADSVKGRFTISRDNAKNTVYLQMNSLKPEDTAVYYCAVTDSRGWDHPYWGQGTQVTVSS

SEQ ID NO: 24983 - protein, 122 aa, Artificial Sequence
  Chemically Synthesized
QVQLQESGGGLVQAGGSLRLSCAASGTISSYDIMGWYRQAPGKERELVATITSGATTNYADSVKGRFTISRDNAKNTVYLQMNSLKPEDTAVYYCAALLTRAGDQGRTLYYWGQGTQVTVSS

SEQ ID NO: 24984 - protein, 118 aa, Artificial Sequence
  Chemically Synthesized
QVQLQESGGGLVQAGGSLRLSCAASGSIFRDNYMGWYRQAPGKEREFVASINYGANTYYADSVKGRFTISRDNAKNTVYLQMNSLKPEDTAVYYCAAVWYDRRLYAYWGQGTQVTVSS

SEQ ID NO: 24985 - protein, 126 aa, Artificial Sequence
  Chemically Synthesized
QVQLQESGGGLVQAGGSLRLSCAASGSISRYRYMGWYRQAPGKEREFVASIAHGGSTNYADSVKGRFTISRDNAKNTVYLQMNSLKPEDTAVYYCAVIGYYNYGWVAVQGAVHDYWGQGTQVTVSS

SEQ ID NO: 24986 - protein, 117 aa, Artificial Sequence
  Chemically Synthesized
QVQLQESGGGLVQAGGSLRLSCAASGTISGTYGMGWYRQAPGKERELVATIADGSTTYYADSVKGRFTISRDNAKNTVYLQMNSLKPEDTAVYYCAVIYHPSSTMYWGQGTQVTVSS

SEQ ID NO: 24987 - protein, 121 aa, Artificial Sequence
  Chemically Synthesized
QVQLQESGGGLVQAGGSLRLSCAASGTSTTYGMGWYRQAPGKERELVVAIGYGSITYYADSVKGRFTISRDNAKNTVYLQMNSLKPEDTAVYYCAVSTYRSVTQVYWHQYWGQGTQVTVSS

SEQ ID NO: 24988 - protein, 126 aa, Artificial Sequence
  Chemically Synthesized
QVQLQESGGGLVQAGGSLRLSCAASGSISRGLYMGWYRQAPGKEREFVASISPGATTYYADSVKGRFTISRDNAKNTVYLQMNSLKPEDTAVYYCAAVYLGHIPSTVESTYLHTYWGQGTQVTVSS

SEQ ID NO: 24989 - protein, 125 aa, Artificial Sequence
  Chemically Synthesized
QVQLQESGGGLVQAGGSLRLSCAASGTISSQDHMGWYRQAPGKERELVATIGRGTTNYADSVKGRFTISRDNAKNTVYLQMNSLKPEDTAVYYCAAYVDPSWSQYAVDAWGHHYWGQGTQVTVSS

SEQ ID NO: 24990 - protein, 117 aa, Artificial Sequence
  Chemically Synthesized
QVQLQESGGGLVQAGGSLRLSCAASGSISDDNNMGWYRQAPGKEREFVASITRGTNTNYADSVKGRFTISRDNAKNTVYLQMNSLKPEDTAVYYCAAWYGNAYSMYWGQGTQVTVSS

SEQ ID NO: 24991 - protein, 126 aa, Artificial Sequence
  Chemically Synthesized
QVQLQESGGGLVQAGGSLRLSCAASGYISVQYGMGWYRQAPGKEREFVATITLGTNTNYADSVKGRFTISRDNAKNTVYLQMNSLKPEDTAVYYCAVGDTSRTVIYDLYGPEHPYWGQGTQVTVSS

SEQ ID NO: 24992 - protein, 126 aa, Artificial Sequence
  Chemically Synthesized
QVQLQESGGGLVQAGGSLRLSCAASGTISDESIMGWYRQAPGKERELVAAIDQGTTTYYADSVKGRFTISRDNAKNTVYLQMNSLKPEDTAVYYCAAYDAIQYNSEAGKYSYHTYWGQGTQVTVSS

SEQ ID NO: 24993 - protein, 122 aa, Artificial Sequence
  Chemically Synthesized
QVQLQESGGGLVQAGGSLRLSCAASGTISGSANMGWYRQAPGKEREFVAAIGFGAITNYADSVKGRFTISRDNAKNTVYLQMNSLKPEDTAVYYCAVGGRGPRPTDALYDYWGQGTQVTVSS

SEQ ID NO: 24994 - protein, 118 aa, Artificial Sequence
  Chemically Synthesized
QVQLQESGGGLVQAGGSLRLSCAASGSIFIPNIMGWYRQAPGKERELVATITNGGSTYYADSVKGRFTISRDNAKNTVYLQMNSLKPEDTAVYYCAAYNDTDDEHNYWGQGTQVTVSS

SEQ ID NO: 24995 - protein, 119 aa, Artificial Sequence
  Chemically Synthesized
QVQLQESGGGLVQAGGSLRLSCAASGTISGVRAMGWYRQAPGKERELVAGITTGGITYYADSVKGRFTISRDNAKNTVYLQMNSLKPEDTAVYYCAVWQDYIDYVHNYWGQGTQVTVSS

SEQ ID NO: 24996 - protein, 122 aa, Artificial Sequence
  Chemically Synthesized
QVQLQESGGGLVQAGGSLRLSCAASGSISPYELMGWYRQAPGKERELVAAIAYGTNTYYADSVKGRFTISRDNAKNTVYLQMNSLKPEDTAVYYCAAYTEYNYEYPDGLVYWGQGTQVTVSS

SEQ ID NO: 24997 - protein, 118 aa, Artificial Sequence
  Chemically Synthesized
QVQLQESGGGLVQAGGSLRLSCAASGNISGWYVMGWYRQAPGKEREFVASIGYGGSTYYADSVKGRFTISRDNAKNTVYLQMNSLKPEDTAVYYCAAGGQATGYLIYWGQGTQVTVSS

SEQ ID NO: 24998 - protein, 121 aa, Artificial Sequence
  Chemically Synthesized
QVQLQESGGGLVQAGGSLRLSCAASGSISENYMGWYRQAPGKERELVAAIAVGTNTYYADSVKGRFTISRDNAKNTVYLQMNSLKPEDTAVYYCAVSGTGFSPQDVDHYYWGQGTQVTVSS

SEQ ID NO: 24999 - protein, 126 aa, Artificial Sequence
  Chemically Synthesized
QVQLQESGGGLVQAGGSLRLSCAASGTISILSYMGWYRQAPGKERELVAAITPGSSTNYADSVKGRFTISRDNAKNTVYLQMNSLKPEDTAVYYCAVDARVPHGTYTDYGIYHYYWGQGTQVTVSS

SEQ ID NO: 25000 - protein, 122 aa, Artificial Sequence
  Chemically Synthesized
QVQLQESGGGLVQAGGSLRLSCAASGSISELDAMGWYRQAPGKERELVAAITVGAITYYADSVKGRFTISRDNAKNTVYLQMNSLKPEDTAVYYCAVAYYTADPSYDVYAYWGQGTQVTVSS

SEQ ID NO: 25001 - protein, 118 aa, Artificial Sequence
  Chemically Synthesized
QVQLQESGGGLVQAGGSLRLSCAASGTISRNQEMGWYRQAPGKEREFVAAINVGATTYYADSVKGRFTISRDNAKNTVYLQMNSLKPEDTAVYYCAAYKSYTAGLRYWGQGTQVTVSS

SEQ ID NO: 25002 - protein, 113 aa, Artificial Sequence
  Chemically Synthesized
QVQLQESGGGLVQAGGSLRLSCAASGYSVLMGWYRQAPGKERELVASIGLGTTTNYADSVKGRFTISRDNAKNTVYLQMNSLKPEDTAVYYCAVYYYDDLDYWGQGTQVTVSS

SEQ ID NO: 25003 - protein, 118 aa, Artificial Sequence
  Chemically Synthesized
QVQLQESGGGLVQAGGSLRLSCAASGTIFGGDFMGWYRQAPGKERELVAAIDDGGTTNYADSVKGRFTISRDNAKNTVYLQMNSLKPEDTAVYYCAVPRSNFQLHQYWGQGTQVTVSS

SEQ ID NO: 25004 - protein, 118 aa, Artificial Sequence
  Chemically Synthesized
QVQLQESGGGLVQAGGSLRLSCAASGTISDSYSMGWYRQAPGKERELVAGISGGTNTNYADSVKGRFTISRDNAKNTVYLQMNSLKPEDTAVYYCAVSVLTFSGLNYWGQGTQVTVSS

SEQ ID NO: 25005 - protein, 118 aa, Artificial Sequence
  Chemically Synthesized
QVQLQESGGGLVQAGGSLRLSCAASGIRLLMGWYRQAPGKERELVHYCSGYYYQYADSVKGRFTISRDNAKNTVYLQMNSLKPEDTAVYYCAAYDSYYWYDRAQLVYWGQGTQVTVSS

SEQ ID NO: 25006 - protein, 118 aa, Artificial Sequence
  Chemically Synthesized
QVQLQESGGGLVQAGGSLRLSCAASGSIFLHNDMGWYRQAPGKEREFVAAIAYGGTTYYADSVKGRFTISRDNAKNTVYLQMNSLKPEDTAVYYCAVDTTCCFFSLYWGQGTQVTVSS

SEQ ID NO: 25007 - protein, 118 aa, Artificial Sequence
  Chemically Synthesized
QVQLQESGGGLVQAGGSLRLSCAASGNIFRPAGMGWYRQAPGKERELVAAIAVGSSTYYADSVKGRFTISRDNAKNTVYLQMNSLKPEDTAVYYCAVLLYVTDDHGYWGQGTQVTVSS

SEQ ID NO: 25008 - protein, 122 aa, Artificial Sequence
  Chemically Synthesized
QVQLQESGGGLVQAGGSLRLSCAASGNIFPLSYMGWYRQAPGKERELVAAIATGSITNYADSVKGRFTISRDNAKNTVYLQMNSLKPEDTAVYYCAAADVYPKYETILLIYWGQGTQVTVSS

SEQ ID NO: 25009 - protein, 125 aa, Artificial Sequence
  Chemically Synthesized
QVQLQESGGGLVQAGGSLRLSCAASGTISPSRLMGWYRQAPGKEREFVATIMTVLLPYADSVKGRFTISRDNAKNTVYLQMNSLKPEDTAVYYCAVRQYYTTPFGVRAIGRYGYWGQGTQVTVSS

SEQ ID NO: 25010 - protein, 118 aa, Artificial Sequence
  Chemically Synthesized
QVQLQESGGGLVQAGGSLRLSCAASGYIFVTAYMGWYRQAPGKEREFVASINPGASTYYADSVKGRFTISRDNAKNTVYLQMNSLKPEDTAVYYCAAVFYPYAYHAYWGQGTQVTVSS

SEQ ID NO: 25011 - protein, 122 aa, Artificial Sequence
  Chemically Synthesized
QVQLQESGGGLVQAGGSLRLSCAASGNISDSYGMGWYRQAPGKEREFVATIDYGSNTNYADSVKGRFTISRDNAKNTVYLQMNSLKPEDTAVYYCAVPLGDTWAYAHLHSYWGQGTQVTVSS

SEQ ID NO: 25012 - protein, 126 aa, Artificial Sequence
  Chemically Synthesized
QVQLQESGGGLVQAGGSLRLSCAASGSIFIIWGMGWYRQAPGKERELVAGITDGSTTYYADSVKGRFTISRDNAKNTVYLQMNSLKPEDTAVYYCAVAGPDDPSDWVYRIANHVYWGQGTQVTVSS

SEQ ID NO: 25013 - protein, 117 aa, Artificial Sequence
  Chemically Synthesized
QVQLQESGGGLVQAGGSLRLSCAASGNIFPWEYMGWYRQAPGKERELVAAIGEVVLPYADSVKGRFTISRDNAKNTVYLQMNSLKPEDTAVYYCAAGTLVGGYYQYWGQGTQVTVSS

SEQ ID NO: 25014 - protein, 118 aa, Artificial Sequence
  Chemically Synthesized
QVQLQESGGGLVQAGGSLRLSCAASGNISSREVMGWYRQAPGKERELVAAIANGGSTYYADSVKGRFTISRDNAKNTVYLQMNSLKPEDTAVYYCAAYAYQYDPYFYWGQGTQVTVSS

SEQ ID NO: 25015 - protein, 109 aa, Artificial Sequence
  Chemically Synthesized
QVQLQESGGGLVQAGGSLRLSCAASGNIFGWDYMGWYRQAPGKERELVASIAYGGNTYYADSVKGRFTISRDNAKNTVYLQMNSLKPEDTAVYYCAVYWGQGTQVTVSS

SEQ ID NO: 25016 - protein, 118 aa, Artificial Sequence
  Chemically Synthesized
QVQLQESGGGLVQAGGSLRLSCAASGSIFAVPFMGWYRQAPGKEREFVAAISNGATTKYADSVKGRFTISRDNAKNTVYLQMNSLKPEDTAVYYCAVYNYLENAHWYWGQGTQVTVSS

SEQ ID NO: 25017 - protein, 121 aa, Artificial Sequence
  Chemically Synthesized
QVQLQESGGGLVQAGGSLRLSCAASGNISYTTLMGWYRQAPGKERELVASINIGTTTYYADSVKGRFTISRDNAKNTVYLQMNSLKPEDTAVYYCAALPYPGYMTFGTIYWGQGTQVTVSS

SEQ ID NO: 25018 - protein, 116 aa, Artificial Sequence
  Chemically Synthesized
QVQLQESGGGLVQAGGSLRLSCAASGYISGFGDMGWYRQAPGKERELVAGIAYGGNTNYADSVKGRFTISRDNAKNTVYLQMNSLKPEDTAVYYCAAYLTSYFYYWGQGTQVTVSS

SEQ ID NO: 25019 - protein, 125 aa, Artificial Sequence
  Chemically Synthesized
QVQLQESGGGLVQAGGSLRLSCAASGTISLPSLMGWYRQAPGKERELVAAIAYGGSTNYADSVKGRFTISRDNAKNTVYLQMNSLKPEDTAVYYCAAYYIGYVQWYFPDVTHGYWGQGTQVTVSS

SEQ ID NO: 25020 - protein, 122 aa, Artificial Sequence
  Chemically Synthesized
QVQLQESGGGLVQAGGSLRLSCAASGSISYADVMGWYRQAPGKEREFVATIGRGSSTYYADSVKGRFTISRDNAKNTVYLQMNSLKPEDTAVYYCAALNHRDLLDYDPFYYWGQGTQVTVSS

SEQ ID NO: 25021 - protein, 117 aa, Artificial Sequence
  Chemically Synthesized
QVQLQESGGGLVQAGGSLRLSCAASGSIFLTTMGWYRQAPGKERELVATITTGTNTNYADSVKGRFTISRDNAKNTVYLQMNSLKPEDTAVYYCAAEPKADRVHSYWGQGTQVTVSS

SEQ ID NO: 25022 - protein, 117 aa, Artificial Sequence
  Chemically Synthesized
QVQLQESGGGLVQAGGSLRLSCAASGYISYDDRMGWYRQAPGKEREFVAAISGGGITYYADSVKGRFTISRDNAKNTVYLQMNSLKPEDTAVYYCAAVRQRYLPIYWGQGTQVTVSS

SEQ ID NO: 25023 - protein, 112 aa, Artificial Sequence
  Chemically Synthesized
QVQLQESGGGLVQAGGSLRLSCAASGNISQHYYMGWYRQAPGKERELVATTYYADSVKGRFTISRDNAKNTVYLQMNSLKPEDTAVYYCAVGYYAEDSHAYWGQGTQVTVSS

SEQ ID NO: 25024 - protein, 122 aa, Artificial Sequence
  Chemically Synthesized
QVQLQESGGGLVQAGGSLRLSCAASGNISYYYYMGWYRQAPGKEREFVAGIGFGATTYYADSVKGRFTISRDNAKNTVYLQMNSLKPEDTAVYYCAVTVDLREYRGDYYSYWGQGTQVTVSS

SEQ ID NO: 25025 - protein, 118 aa, Artificial Sequence
  Chemically Synthesized
QVQLQESGGGLVQAGGSLRLSCAASGNISGASSMGWYRQAPGKERELVAGIAHGGTTYYADSVKGRFTISRDNAKNTVYLQMNSLKPEDTAVYYCAVGGYGGYRFEYWGQGTQVTVSS

SEQ ID NO: 25026 - protein, 118 aa, Artificial Sequence
  Chemically Synthesized
QVQLQESGGGLVQAGGSLRLSCAASGTISVAATMGWYRQAPGKEREFVAAITDGGTTNYADSVKGRFTISRDNAKNTVYLQMNSLKPEDTAVYYCAAWYLRWFDHYYWGQGTQVTVSS

SEQ ID NO: 25027 - protein, 118 aa, Artificial Sequence
  Chemically Synthesized
QVQLQESGGGLVQAGGSLRLSCAASGYIFRYWYMGWYRQAPGKERELVATIGYGAITYYADSVKGRFTISRDNAKNTVYLQMNSLKPEDTAVYYCAVQILPGTLHPYWGQGTQVTVSS

SEQ ID NO: 25028 - protein, 122 aa, Artificial Sequence
  Chemically Synthesized
QVQLQESGGGLVQAGGSLRLSCAASGSISDTPYMGWYRQAPGKERELVAGIDDGSITNYADSVKGRFTISRDNAKNTVYLQMNSLKPEDTAVYYCAALQWQRGIDQHVHAYWGQGTQVTVSS

SEQ ID NO: 25029 - protein, 115 aa, Artificial Sequence
  Chemically Synthesized
QVQLQESGGGLVQAGGSLRLSCAASGIFLTLVMGWYRQAPGKERELVATIAYGSTTNYADSVKGRFTISRDNAKNTVYLQMNSLKPEDTAVYYCAAHPYDGDWYWGQGTQVTVSS

SEQ ID NO: 25030 - protein, 122 aa, Artificial Sequence
  Chemically Synthesized
QVQLQESGGGLVQAGGSLRLSCAASGTIFGSVAMGWYRQAPGKEREFVASISAGASTYYADSVKGRFTISRDNAKNTVYLQMNSLKPEDTAVYYCAVAAYSDHRAHSIYGYWGQGTQVTVSS

SEQ ID NO: 25031 - protein, 117 aa, Artificial Sequence
  Chemically Synthesized
QVQLQESGGGLVQAGGSLRLSCAASGTIFIGYAMGWYRQAPGKERELVASIAAGGVPYADSVKGRFTISRDNAKNTVYLQMNSLKPEDTAVYYCAARTRIYSHHSYWGQGTQVTVSS

SEQ ID NO: 25032 - protein, 122 aa, Artificial Sequence
  Chemically Synthesized
QVQLQESGGGLVQAGGSLRLSCAASGSISNSRLMGWYRQAPGKEREFVAGISDGGTTYYADSVKGRFTISRDNAKNTVYLQMNSLKPEDTAVYYCAALIAHTPERDRPHVYWGQGTQVTVSS

SEQ ID NO: 25033 - protein, 118 aa, Artificial Sequence
  Chemically Synthesized
QVQLQESGGGLVQAGGSLRLSCAASGSIFYTDKMGWYRQAPGKERELVAGITYGGITYYADSVKGRFTISRDNAKNTVYLQMNSLKPEDTAVYYCAVDYYYPGPLGYWGQGTQVTVSS

SEQ ID NO: 25034 - protein, 119 aa, Artificial Sequence
  Chemically Synthesized
QVQLQESGGGLVQAGGSLRLSCAASGYISDTLWMGWYRQAPGKEREFVAGITPGAYADSVKGRFTISRDNAKNTVYLQMNSLKPEDTAVYYCAALSALFRDQGGVYAYWGQGTQVTVSS

SEQ ID NO: 25035 - protein, 118 aa, Artificial Sequence
  Chemically Synthesized
QVQLQESGGGLVQAGGSLRLSCAASGTIFITYIMGWYRQAPGKERELVASINGGASTYYADSVKGRFTISRDNAKNTVYLQMNSLKPEDTAVYYCAADRDYFAPYYYWGQGTQVTVSS

SEQ ID NO: 25036 - protein, 126 aa, Artificial Sequence
  Chemically Synthesized
QVQLQESGGGLVQAGGSLRLSCAASGSISYWANMGWYRQAPGKEREFVAAITRGGSTYYADSVKGRFTISRDNAKNTVYLQMNSLKPEDTAVYYCAAAHSPYPPPYNVWSYYYGYWGQGTQVTVSS

SEQ ID NO: 25037 - protein, 118 aa, Artificial Sequence
  Chemically Synthesized
QVQLQESGGGLVQAGGSLRLSCAASGYIFEAGVMGWYRQAPGKERELVAAIGDGSTTNYADSVKGRFTISRDNAKNTVYLQMNSLKPEDTAVYYCAAGGDDTIIYDYWGQGTQVTVSS

SEQ ID NO: 25038 - protein, 126 aa, Artificial Sequence
  Chemically Synthesized
QVQLQESGGGLVQAGGSLRLSCAASGTIFYYRYMGWYRQAPGKEREFVAAIGPGSITNYADSVKGRFTISRDNAKNTVYLQMNSLKPEDTAVYYCAVSALLRYGPEYYRGTYFGYWGQGTQVTVSS

SEQ ID NO: 25039 - protein, 116 aa, Artificial Sequence
  Chemically Synthesized
QVQLQESGGGLVQAGGSLRLSCAASGNISYSSSMGWYRQAPGKEREFVATIGTGGSTYYADSVKGRFTISRDNAKNTVYLQMNSLKPEDTAVYYCAVGDFDPYYYWGQGTQVTVSS

SEQ ID NO: 25040 - protein, 118 aa, Artificial Sequence
  Chemically Synthesized
QVQLQESGGGLVQAGGSLRLSCAASGSISLDDDMGWYRQAPGKERELVASITLGTNTNYADSVKGRFTISRDNAKNTVYLQMNSLKPEDTAVYYCAVDGGGGSGYYYWGQGTQVTVSS

SEQ ID NO: 25041 - protein, 122 aa, Artificial Sequence
  Chemically Synthesized
QVQLQESGGGLVQAGGSLRLSCAASGNISYATYMGWYRQAPGKERELVAAINFGSTTNYADSVKGRFTISRDNAKNTVYLQMNSLKPEDTAVYYCAGKYAYRVIVYGYHDYWGQGTQVTVSS

SEQ ID NO: 25042 - protein, 121 aa, Artificial Sequence
  Chemically Synthesized
QVQLQESGGGLVQAGGSLRLSCAASGNIFDADDMGWYRQAPGKERELVATIGWGGNTNYADSVKGRFTISRDNAKNTVYLQMNSLKPEDTAVYYCAVQESKTVRTLTTIYWGQGTQVTVSS

SEQ ID NO: 25043 - protein, 118 aa, Artificial Sequence
  Chemically Synthesized
QVQLQESGGGLVQAGGSLRLSCAASGYIFGYAGMGWYRQAPGKEREFVASITDGAITNYADSVKGRFTISRDNAKNTVYLQMNSLKPEDTAVYYCAVGSGVDASHWYWGQGTQVTVSS

SEQ ID NO: 25044 - protein, 122 aa, Artificial Sequence
  Chemically Synthesized
QVQLQESGGGLVQAGGSLRLSCAASGNISQRDYMGWYRQAPGKERELVASIDTGGTTYYADSVKGRFTISRDNAKNTVYLQMNSLKPEDTAVYYCAVDPWYWLARGKYHYYWGQGTQVTVSS

SEQ ID NO: 25045 - protein, 122 aa, Artificial Sequence
  Chemically Synthesized
QVQLQESGGGLVQAGGSLRLSCAASGNIFAFEYMGWYRQAPGKEREFVAAINKGASTNYADSVKGRFTISRDNAKNTVYLQMNSLKPEDTAVYYCAVYPDYAEDDLYYHWYWGQGTQVTVSS

SEQ ID NO: 25046 - protein, 118 aa, Artificial Sequence
  Chemically Synthesized
QVQLQESGGGLVQAGGSLRLSCAASGNISGYPVMGWYRQAPGKEREFVAGIGYGTNTYYADSVKGRFTISRDNAKNTVYLQMNSLKPEDTAVYYCAVLPRDEADHWYWGQGTQVTVSS

SEQ ID NO: 25047 - protein, 118 aa, Artificial Sequence
  Chemically Synthesized
QVQLQESGGGLVQAGGSLRLSCAASGNIFRVYRMGWYRQAPGKEREFVASIADGASTYYADSVKGRFTISRDNAKNTVYLQMNSLKPEDTAVYYCAVWLAYAYQHDYWGQGTQVTVSS

SEQ ID NO: 25048 - protein, 118 aa, Artificial Sequence
  Chemically Synthesized
QVQLQESGGGLVQAGGSLRLSCAASGYISIYVTMGWYRQAPGKERELVASINDGTSTLYADSVKGRFTISRDNAKNTVYLQMNSLKPEDTAVYYCAVGYIYRHWLRYWGQGTQVTVSS

SEQ ID NO: 25049 - protein, 116 aa, Artificial Sequence
  Chemically Synthesized
QVQLQESGGGLVQAGGSLRLSCAASGTISAPFGMGWYRQAPGKERELVAGIGYGGTTYYADSVKGRFTISRDNAKNTVYLQMNSLKPEDTAVYYCAVGDPRYHGYWGQGTQVTVSS

SEQ ID NO: 25050 - protein, 118 aa, Artificial Sequence
  Chemically Synthesized
QVQLQESGGGLVQAGGSLRLSCAASGNISTAVYMGWYRQAPGKEREFVASINVGTNTYYADSVKGRFTISRDNAKNTVYLQMNSLKPEDTAVYYCAARYYRKPWFGYWGQGTQVTVSS

SEQ ID NO: 25051 - protein, 118 aa, Artificial Sequence
  Chemically Synthesized
QVQLQESGGGLVQAGGSLRLSCAASGNISGYFYMGWYRQAPGKERELVASIGTGATTYYADSVKGRFTISRDNAKNTVYLQMNSLKPEDTAVYYCAVWRTDAEGLQYWGQGTQVTVSS

SEQ ID NO: 25052 - protein, 118 aa, Artificial Sequence
  Chemically Synthesized
QVQLQESGGGLVQAGGSLRLSCAASGTIFSWLYMGWYRQAPGKEREFVAAISPGTSTNYADSVKGRFTISRDNAKNTVYLQMNSLKPEDTAVYYCAAYSVASPPYIYWGQGTQVTVSS

SEQ ID NO: 25053 - protein, 118 aa, Artificial Sequence
  Chemically Synthesized
QVQLQESGGGLVQAGGSLRLSCAASGYISRSYGMGWYRQAPGKERELVATIDTGSNTYYADSVKGRFTISRDNAKNTVYLQMNSLKPEDTAVYYCAVNYLTSLDLSYWGQGTQVTVSS

SEQ ID NO: 25054 - protein, 118 aa, Artificial Sequence
  Chemically Synthesized
QVQLQESGGGLVQAGGSLRLSCAASGSISKYIAMGWYRQAPGKERELVASIGIGTITYYADSVKGRFTISRDNAKNTVYLQMNSLKPEDTAVYYCAAYVNYHSQFEYWGQGTQVTVSS

SEQ ID NO: 25055 - protein, 117 aa, Artificial Sequence
  Chemically Synthesized
QVQLQESGGGLVQAGGSLRLSCAASGSIFWYDMGWYRQAPGKERELVAGIGYGGNTYYADSVKGRFTISRDNAKNTVYLQMNSLKPEDTAVYYCAAYTIFYSNYTYWGQGTQVTVSS

SEQ ID NO: 25056 - protein, 118 aa, Artificial Sequence
  Chemically Synthesized
QVQLQESGGGLVQAGGSLRLSCAASGSIFGPYYMGWYRQAPGKERELVATISYGSSTNYADSVKGRFTISRDNAKNTVYLQMNSLKPEDTAVYYCAVDDDYTGPFYYWGQGTQVTVSS

SEQ ID NO: 25057 - protein, 118 aa, Artificial Sequence
  Chemically Synthesized
QVQLQESGGGLVQAGGSLRLSCAASGSIFPPSDMGWYRQAPGKERELVAGINFGSSTNYADSVKGRFTISRDNAKNTVYLQMNSLKPEDTAVYYCAAEGLDPPIYLYWGQGTQVTVSS

SEQ ID NO: 25058 - protein, 117 aa, Artificial Sequence
  Chemically Synthesized
QVQLQESGGGLVQAGGSLRLSCAASGTIFLNPHMGWYRQAPGKERELVASIGYGSITYYADSVKGRFTISRDNAKNTVYLQMNSLKPEDTAVYYCAAYWDNLSCMYWGQGTQVTVSS

SEQ ID NO: 25059 - protein, 118 aa, Artificial Sequence
  Chemically Synthesized
QVQLQESGGGLVQAGGSLRLSCAASGNIFRYGTMGWYRQAPGKEREFVASIGRGATTYYADSVKGRFTISRDNAKNTVYLQMNSLKPEDTAVYYCAVWSYHVYDLPYWGQGTQVTVSS

SEQ ID NO: 25060 - protein, 118 aa, Artificial Sequence
  Chemically Synthesized
QVQLQESGGGLVQAGGSLRLSCAASGNISYVGSMGWYRQAPGKERELVASIAYGGTTYYADSVKGRFTISRDNAKNTVYLQMNSLKPEDTAVYYCAVGDYYRYYYNYWGQGTQVTVSS

SEQ ID NO: 25061 - protein, 122 aa, Artificial Sequence
  Chemically Synthesized
QVQLQESGGGLVQAGGSLRLSCAASGNISNGYSMGWYRQAPGKERELVAAISYGGSTNYADSVKGRFTISRDNAKNTVYLQMNSLKPEDTAVYYCAASTYYGGDAYEIHGYWGQGTQVTVSS

SEQ ID NO: 25062 - protein, 122 aa, Artificial Sequence
  Chemically Synthesized
QVQLQESGGGLVQAGGSLRLSCAASGSISTVDSMGWYRQAPGKERELVAGIDDGGSTYYADSVKGRFTISRDNAKNTVYLQMNSLKPEDTAVYYCAAGELLYPNQPLDLRYWGQGTQVTVSS

SEQ ID NO: 25063 - protein, 122 aa, Artificial Sequence
  Chemically Synthesized
QVQLQESGGGLVQAGGSLRLSCAASGSISQRTKMGWYRQAPGKERELVAAIGYGTTTNYADSVKGRFTISRDNAKNTVYLQMNSLKPEDTAVYYCAVVYGDHRGGFYYHPYWGQGTQVTVSS

SEQ ID NO: 25064 - protein, 126 aa, Artificial Sequence
  Chemically Synthesized
QVQLQESGGGLVQAGGSLRLSCAASGYIFGDDSMGWYRQAPGKERELVATIDYGSSTYYADSVKGRFTISRDNAKNTVYLQMNSLKPEDTAVYYCAVDSAGLYRDVGWWRYSLNYWGQGTQVTVSS

SEQ ID NO: 25065 - protein, 122 aa, Artificial Sequence
  Chemically Synthesized
QVQLQESGGGLVQAGGSLRLSCAASGYISSYRRMGWYRQAPGKERELVATIAGGSITYYADSVKGRFTISRDNAKNTVYLQMNSLKPEDTAVYYCAVFLQYSFEGPYVYDYWGQGTQVTVSS

SEQ ID NO: 25066 - protein, 120 aa, Artificial Sequence
  Chemically Synthesized
QVQLQESGGGLVQAGGSLRLSCAASGSIFRRQYMGWYRQAPGKEREFVATIGAGATTYYADSVKGRFTISRDNAKNTVYLQMNSLKPEDTAVYYCAAAYVYRYAFEHIYWGQGTQVTVSS

SEQ ID NO: 25067 - protein, 117 aa, Artificial Sequence
  Chemically Synthesized
QVQLQESGGGLVQAGGSLRLSCAASGSIFLRTMGWYRQAPGKERELVAGITYGTSTYYADSVKGRFTISRDNAKNTVYLQMNSLKPEDTAVYYCAVYGDAGYYHYYWGQGTQVTVSS

SEQ ID NO: 25068 - protein, 117 aa, Artificial Sequence
  Chemically Synthesized
QVQLQESGGGLVQAGGSLRLSCAASGTIFIWPMGWYRQAPGKEREFVAGISYGTNTYYADSVKGRFTISRDNAKNTVYLQMNSLKPEDTAVYYCAADSDPISFFHYWGQGTQVTVSS

SEQ ID NO: 25069 - protein, 117 aa, Artificial Sequence
  Chemically Synthesized
QVQLQESGGGLVQAGGSLRLSCAASGTISDVAKMGWYRQAPGKERELVAGIDLVVLPYADSVKGRFTISRDNAKNTVYLQMNSLKPEDTAVYYCAVDSRSSDTLTYWGQGTQVTVSS

SEQ ID NO: 25070 - protein, 122 aa, Artificial Sequence
  Chemically Synthesized
QVQLQESGGGLVQAGGSLRLSCAASGYIFLRALMGWYRQAPGKERELVAGISYGSTTYYADSVKGRFTISRDNAKNTVYLQMNSLKPEDTAVYYCAAYYVTIIDQQPRHAYWGQGTQVTVSS

SEQ ID NO: 25071 - protein, 125 aa, Artificial Sequence
  Chemically Synthesized
QVQLQESGGGLVQAGGSLRLSCAASGSIFFYTWMGWYRQAPGKERELVATITPGTITNYADSVKGRFTISRDNAKNTVYLQMNSLKPEDTAVYYCAASTSTVCSLSMLCRNSMYWGQGTQVTVSS

SEQ ID NO: 25072 - protein, 121 aa, Artificial Sequence
  Chemically Synthesized
QVQLQESGGGLVQAGGSLRLSCAASGYIFATDDMGWYRQAPGKERELVATISAGSTTNYADSVKGRFTISRDNAKNTVYLQMNSLKPEDTAVYYCAVWPAAYSYVWAALYWGQGTQVTVSS

SEQ ID NO: 25073 - protein, 117 aa, Artificial Sequence
  Chemically Synthesized
QVQLQESGGGLVQAGGSLRLSCAASGYISRRPFMGWYRQAPGKEREFVASISRGTTNYADSVKGRFTISRDNAKNTVYLQMNSLKPEDTAVYYCAVGYYYRYIHWYWGQGTQVTVSS

SEQ ID NO: 25074 - protein, 118 aa, Artificial Sequence
  Chemically Synthesized
QVQLQESGGGLVQAGGSLRLSCAASGNISGGYVMGWYRQAPGKEREFVATINAGGNTNYADSVKGRFTISRDNAKNTVYLQMNSLKPEDTAVYYCAVNVYGDRRLVYWGQGTQVTVSS

SEQ ID NO: 25075 - protein, 115 aa, Artificial Sequence
  Chemically Synthesized
QVQLQESGGGLVQAGGSLRLSCAASGSISTDNTMGWYRQAPGKERELVASIDSGSSTYYADSVKGRFTISRDNAKNTVYLQMNSLKPEDTAVYYCAVHEGTSPYWGQGTQVTVSS

SEQ ID NO: 25076 - protein, 117 aa, Artificial Sequence
  Chemically Synthesized
QVQLQESGGGLVQAGGSLRLSCAASGNISYVQYMGWYRQAPGKERELVAAIGFGTTTNYADSVKGRFTISRDNAKNTVYLQMNSLKPEDTAVYYCAVTNRTLTRIYWGQGTQVTVSS

SEQ ID NO: 25077 - protein, 122 aa, Artificial Sequence
  Chemically Synthesized
QVQLQESGGGLVQAGGSLRLSCAASGSVAAYMGWYRQAPGKERELVASIGSVVVPYADSVKGRFTISRDNAKNTVYLQMNSLKPEDTAVYYCAAEEHGRVTTTVGLGTLFYWGQGTQVTVSS

SEQ ID NO: 25078 - protein, 122 aa, Artificial Sequence
  Chemically Synthesized
QVQLQESGGGLVQAGGSLRLSCAASGNIFYFEDMGWYRQAPGKERELVATIDQGASTYYADSVKGRFTISRDNAKNTVYLQMNSLKPEDTAVYYCAVDDAYHPTDKIPFGYWGQGTQVTVSS

SEQ ID NO: 25079 - protein, 126 aa, Artificial Sequence
  Chemically Synthesized
QVQLQESGGGLVQAGGSLRLSCAASGTIFSQAYMGWYRQAPGKERELVAGITSGTSTNYADSVKGRFTISRDNAKNTVYLQMNSLKPEDTAVYYCAVSPLRANDTDTKDPDKFRYWGQGTQVTVSS

SEQ ID NO: 25080 - protein, 123 aa, Artificial Sequence
  Chemically Synthesized
QVQLQESGGGLVQAGGSLRLSCAASGTISRIAFMGWYRQAPGKERELVASIGGGGSTNYADSVKGRFTISRDNAKNTVYLQMNSLKPEDTAVYYCAVQGGDHSGRDAGDLSYWGQGTQVTVSS

SEQ ID NO: 25081 - protein, 119 aa, Artificial Sequence
  Chemically Synthesized
QVQLQESGGGLVQAGGSLRLSCAASGTISASRDMGWYRQAPGKERELVATIGGGSTTNYADSVKGRFTISRDNAKNTVYLQMNSLKPEDTAVYYCAVGLPYALYLFAYWGQGTQVTVSS

SEQ ID NO: 25082 - protein, 118 aa, Artificial Sequence
  Chemically Synthesized
QVQLQESGGGLVQAGGSLRLSCAASGTIFGYRYMGWYRQAPGKEREFVAAIDPGGTTNYADSVKGRFTISRDNAKNTVYLQMNSLKPEDTAVYYCAVYPNVANYFSYWGQGTQVTVSS

SEQ ID NO: 25083 - protein, 122 aa, Artificial Sequence
  Chemically Synthesized
QVQLQESGGGLVQAGGSLRLSCAASGNISPDIYMGWYRQAPGKERELVAGISVGSTTNYADSVKGRFTISRDNAKNTVYLQMNSLKPEDTAVYYCAADLLVSDGYVDYLWYWGQGTQVTVSS

SEQ ID NO: 25084 - protein, 118 aa, Artificial Sequence
  Chemically Synthesized
QVQLQESGGGLVQAGGSLRLSCAASGYIFDYYLMGWYRQAPGKERELVAGINYGSITNYADSVKGRFTISRDNAKNTVYLQMNSLKPEDTAVYYCAVDRPTDVIHDYWGQGTQVTVSS

SEQ ID NO: 25085 - protein, 118 aa, Artificial Sequence
  Chemically Synthesized
QVQLQESGGGLVQAGGSLRLSCAASGYISISDLMGWYRQAPGKERELVATIGDGGNTNYADSVKGRFTISRDNAKNTVYLQMNSLKPEDTAVYYCAVITTVDTSLFYWGQGTQVTVSS

SEQ ID NO: 25086 - protein, 122 aa, Artificial Sequence
  Chemically Synthesized
QVQLQESGGGLVQAGGSLRLSCAASGSISWAQAMGWYRQAPGKERELVATITTGTITYYADSVKGRFTISRDNAKNTVYLQMNSLKPEDTAVYYCAVYYDDDDNYQWAHLYWGQGTQVTVSS

SEQ ID NO: 25087 - protein, 119 aa, Artificial Sequence
  Chemically Synthesized
QVQLQESGGGLVQAGGSLRLSCAASGTISHATAMGWYRQAPGKEREFVAAIDDVGATTYYADSVKGRFTISRDNAKNTVYLQMNSLKPEDTAVYYCAALTAPDVEHDYWGQGTQVTVSS

SEQ ID NO: 25088 - protein, 122 aa, Artificial Sequence
  Chemically Synthesized
QVQLQESGGGLVQAGGSLRLSCAASGTISWRRYMGWYRQAPGKERELVAGIARGSSTYYADSVKGRFTISRDNAKNTVYLQMNSLKPEDTAVYYCAAGTYIPYGFGRPFDYWGQGTQVTVSS

SEQ ID NO: 25089 - protein, 121 aa, Artificial Sequence
  Chemically Synthesized
QVQLQESGGGLVQAGGSLRLSCAASGSISYTSGMGWYRQAPGKERELVAAIASGTSTYADSVKGRFTISRDNAKNTVYLQMNSLKPEDTAVYYCAVPDVASYPEPGDLQYWGQGTQVTVSS

SEQ ID NO: 25090 - protein, 122 aa, Artificial Sequence
  Chemically Synthesized
QVQLQESGGGLVQAGGSLRLSCAASGTIFPYADMGWYRQAPGKERELVATITSGSSTYYADSVKGRFTISRDNAKNTVYLQMNSLKPEDTAVYYCAAYDYRPPEGYHDYAYWGQGTQVTVSS

SEQ ID NO: 25091 - protein, 117 aa, Artificial Sequence
  Chemically Synthesized
QVQLQESGGGLVQAGGSLRLSCAASGTISSVVMGWYRQAPGKEREFVAAISGGASTNYADSVKGRFTISRDNAKNTVYLQMNSLKPEDTAVYYCAVDDSRQVAFTYWGQGTQVTVSS

SEQ ID NO: 25092 - protein, 117 aa, Artificial Sequence
  Chemically Synthesized
QVQLQESGGGLVQAGGSLRLSCAASGSISYDAHMGWYRQAPGKERELVASIGAGTTTNYADSVKGRFTISRDNAKNTVYLQMNSLKPEDTAVYYCAVSSLTTRFLYWGQGTQVTVSS

SEQ ID NO: 25093 - protein, 122 aa, Artificial Sequence
  Chemically Synthesized
QVQLQESGGGLVQAGGSLRLSCAASGSIFAGPTMGWYRQAPGKEREFVAAINTGTSTYYADSVKGRFTISRDNAKNTVYLQMNSLKPEDTAVYYCAVPRYAYAPYVFDFTYWGQGTQVTVSS

SEQ ID NO: 25094 - protein, 115 aa, Artificial Sequence
  Chemically Synthesized
QVQLQESGGGLVQAGGSLRLSCAASGSISYYSEMGWYRQAPGKEREFVAGINLVLVPYADSVKGRFTISRDNAKNTVYLQMNSLKPEDTAVYYCAADYDRDHYYWGQGTQVTVSS

SEQ ID NO: 25095 - protein, 121 aa, Artificial Sequence
  Chemically Synthesized
QVQLQESGGGLVQAGGSLRLSCAASGTIFSRLMGWYRQAPGKERELVATINIGSNTNYADSVKGRFTISRDNAKNTVYLQMNSLKPEDTAVYYCAAKNLWYDTYDKTHYYWGQGTQVTVSS

SEQ ID NO: 25096 - protein, 118 aa, Artificial Sequence
  Chemically Synthesized
QVQLQESGGGLVQAGGSLRLSCAASGNISSDTTMGWYRQAPGKEREFVAGIGYGGSTYYADSVKGRFTISRDNAKNTVYLQMNSLKPEDTAVYYCAAHHQSASHYAYWGQGTQVTVSS

SEQ ID NO: 25097 - protein, 118 aa, Artificial Sequence
  Chemically Synthesized
QVQLQESGGGLVQAGGSLRLSCAASGNISTYLFMGWYRQAPGKERELVASIGSGSNTNYADSVKGRFTISRDNAKNTVYLQMNSLKPEDTAVYYCAVDDYRSPEFEYWGQGTQVTVSS

SEQ ID NO: 25098 - protein, 121 aa, Artificial Sequence
  Chemically Synthesized
QVQLQESGGGLVQAGGSLRLSCAASGYILLLTMGWYRQAPGKEREFVASIASGSNTYYADSVKGRFTISRDNAKNTVYLQMNSLKPEDTAVYYCAVQQYGYVWRKDYHGYWGQGTQVTVSS

SEQ ID NO: 25099 - protein, 121 aa, Artificial Sequence
  Chemically Synthesized
QVQLQESGGGLVQAGGSLRLSCAASGNIFLPDDMGWYRQAPGKERELVASIGVGATTNYADSVKGRFTISRDNAKNTVYLQMNSLKPEDTAVYYCAADLQTYGLSPYYPYWGQGTQVTVSS

SEQ ID NO: 25100 - protein, 122 aa, Artificial Sequence
  Chemically Synthesized
QVQLQESGGGLVQAGGSLRLSCAASGNIFQAIDMGWYRQAPGKEREFVATIGYGGSTNYADSVKGRFTISRDNAKNTVYLQMNSLKPEDTAVYYCAVHADSNEYPTSNLIYWGQGTQVTVSS

SEQ ID NO: 25101 - protein, 109 aa, Artificial Sequence
  Chemically Synthesized
QVQLQESGGGLVQAGGSLRLSCAASGYISYGPGMGWYRQAPGKERELVAGINYGGTTNYADSVKGRFTISRDNAKNTVYLQMNSLKPEDTAVYYCAAYWGQGTQVTVSS

SEQ ID NO: 25102 - protein, 118 aa, Artificial Sequence
  Chemically Synthesized
QVQLQESGGGLVQAGGSLRLSCAASGNISGVYWMGWYRQAPGKERELVATIGPGTTTYYADSVKGRFTISRDNAKNTVYLQMNSLKPEDTAVYYCAVVTNGDYDHTYWGQGTQVTVSS

SEQ ID NO: 25103 - protein, 122 aa, Artificial Sequence
  Chemically Synthesized
QVQLQESGGGLVQAGGSLRLSCAASGSISLLGFMGWYRQAPGKERELVAAITIGSTTYYADSVKGRFTISRDNAKNTVYLQMNSLKPEDTAVYYCAVYPYYVHYVGYYLRYWGQGTQVTVSS

SEQ ID NO: 25104 - protein, 122 aa, Artificial Sequence
  Chemically Synthesized
QVQLQESGGGLVQAGGSLRLSCAASGNIFWTDPMGWYRQAPGKERELVATITGGGTTNYADSVKGRFTISRDNAKNTVYLQMNSLKPEDTAVYYCAVYAFRSKTTNTAHWYWGQGTQVTVSS

SEQ ID NO: 25105 - protein, 122 aa, Artificial Sequence
  Chemically Synthesized
QVQLQESGGGLVQAGGSLRLSCAASGYIFRVWGMGWYRQAPGKERELVAAISDGGSTYYADSVKGRFTISRDNAKNTVYLQMNSLKPEDTAVYYCAVITREDHDRDYGLVYWGQGTQVTVSS

SEQ ID NO: 25106 - protein, 113 aa, Artificial Sequence
  Chemically Synthesized
QVQLQESGGGLVQAGGSLRLSCAASGSISDLGYMGWYRQAPGKEREFVAAISGGTITNYADSVKGRFTISRDNAKNTVYLQMNSLKPEDTAVYYCAAVTVFYWGQGTQVTVSS

SEQ ID NO: 25107 - protein, 115 aa, Artificial Sequence
  Chemically Synthesized
QVQLQESGGGLVQAGGSLRLSCAASGTISFDSQMGWYRQAPGKEREFVASINDGATTNYADSVKGRFTISRDNAKNTVYLQMNSLKPEDTAVYYCAVGITDHSYWGQGTQVTVSS

SEQ ID NO: 25108 - protein, 118 aa, Artificial Sequence
  Chemically Synthesized
QVQLQESGGGLVQAGGSLRLSCAASGTISSVYPMGWYRQAPGKEREFVAGIDDGATTNYADSVKGRFTISRDNAKNTVYLQMNSLKPEDTAVYYCAAVQYAYPYLEYWGQGTQVTVSS

SEQ ID NO: 25109 - protein, 121 aa, Artificial Sequence
  Chemically Synthesized
QVQLQESGGGLVQAGGSLRLSCAASGNISPPGYMGWYRQAPGKERELVAAIGWGGTTYYADSVKGRFTISRDNAKNTVYLQMNSLKPEDTAVYYCAVWLDPYEPGDSTIYWGQGTQVTVSS

SEQ ID NO: 25110 - protein, 125 aa, Artificial Sequence
  Chemically Synthesized
QVQLQESGGGLVQAGGSLRLSCAASGTISRRSYMGWYRQAPGKEREFLPVLLRVVLPYADSVKGRFTISRDNAKNTVYLQMNSLKPEDTAVYYCAADDDRSQRDPQDRVTWLAYWGQGTQVTVSS

SEQ ID NO: 25111 - protein, 117 aa, Artificial Sequence
  Chemically Synthesized
QVQLQESGGGLVQAGGSLRLSCAASGTISLSRMGWYRQAPGKEREFVAAIDPGSTTNYADSVKGRFTISRDNAKNTVYLQMNSLKPEDTAVYYCAATVTWYNAHHYWGQGTQVTVSS

SEQ ID NO: 25112 - protein, 122 aa, Artificial Sequence
  Chemically Synthesized
QVQLQESGGGLVQAGGSLRLSCAASGTISYRDDMGWYRQAPGKEREFVATITHGTTTYYADSVKGRFTISRDNAKNTVYLQMNSLKPEDTAVYYCAVYDQWLVVLPNTHFYWGQGTQVTVSS

SEQ ID NO: 25113 - protein, 120 aa, Artificial Sequence
  Chemically Synthesized
QVQLQESGGGLVQAGGSLRLSCAASGNISQPMGWYRQAPGKERELVATINRGSNTNYADSVKGRFTISRDNAKNTVYLQMNSLKPEDTAVYYCAVYYKKYPFVTGRFVYWGQGTQVTVSS

SEQ ID NO: 25114 - protein, 121 aa, Artificial Sequence
  Chemically Synthesized
QVQLQESGGGLVQAGGSLRLSCAASGYISTDYRMGWYRQAPGKEREFVAGITEGANTYYADSVKGRFTISRDNAKNTVYLQMNSLKPEDTAVYYCAVTFYYGGYRLDFPYWGQGTQVTVSS

SEQ ID NO: 25115 - protein, 117 aa, Artificial Sequence
  Chemically Synthesized
QVQLQESGGGLVQAGGSLRLSCAASGSIFANYNMGWYRQAPGKEREFVATIGSVLIPYADSVKGRFTISRDNAKNTVYLQMNSLKPEDTAVYYCAASEWSRPIHGYWGQGTQVTVSS

SEQ ID NO: 25116 - protein, 118 aa, Artificial Sequence
  Chemically Synthesized
QVQLQESGGGLVQAGGSLRLSCAASGTISDFITMGWYRQAPGKERELVAAISYGGITNYADSVKGRFTISRDNAKNTVYLQMNSLKPEDTAVYYCAVPIRDVVDHYYWGQGTQVTVSS

SEQ ID NO: 25117 - protein, 122 aa, Artificial Sequence
  Chemically Synthesized
QVQLQESGGGLVQAGGSLRLSCAASGSISASDYMGWYRQAPGKERELVATITYGTITNYADSVKGRFTISRDNAKNTVYLQMNSLKPEDTAVYYCAANNTRRHPTGGSLIYWGQGTQVTVSS

SEQ ID NO: 25118 - protein, 118 aa, Artificial Sequence
  Chemically Synthesized
QVQLQESGGGLVQAGGSLRLSCAASGSIFQPGIMGWYRQAPGKEREFVATINGGGITNYADSVKGRFTISRDNAKNTVYLQMNSLKPEDTAVYYCAAGTLTKRPFYYWGQGTQVTVSS

SEQ ID NO: 25119 - protein, 123 aa, Artificial Sequence
  Chemically Synthesized
QVQLQESGGGLVQAGGSLRLSCAASGNIFVRYFMGWYRQAPGKERELVAAIDAGSSTYYADSVKGRFTISRDNAKNTVYLQMNSLKPEDTAVYYCATWTGNRTLTMTLTSFYWGQGTQVTVSS

SEQ ID NO: 25120 - protein, 117 aa, Artificial Sequence
  Chemically Synthesized
QVQLQESGGGLVQAGGSLRLSCAASGTIFALEDMGWYRQAPGKEREFVAAIASVVIPYADSVKGRFTISRDNAKNTVYLQMNSLKPEDTAVYYCAAYYELYTSYLYWGQGTQVTVSS

SEQ ID NO: 25121 - protein, 118 aa, Artificial Sequence
  Chemically Synthesized
QVQLQESGGGLVQAGGSLRLSCAASGNISFLSVMGWYRQAPGKEREFVASINAGASTYYADSVKGRFTISRDNAKNTVYLQMNSLKPEDTAVYYCAVGRANAIVHSYWGQGTQVTVSS

SEQ ID NO: 25122 - protein, 117 aa, Artificial Sequence
  Chemically Synthesized
QVQLQESGGGLVQAGGSLRLSCAASGNIFPWRYMGWYRQAPGKERELVARLMVVVLPYADSVKGRFTISRDNAKNTVYLQMNSLKPEDTAVYYCAADGYYGDNHTYWGQGTQVTVSS

SEQ ID NO: 25123 - protein, 126 aa, Artificial Sequence
  Chemically Synthesized
QVQLQESGGGLVQAGGSLRLSCAASGTIFDGPYMGWYRQAPGKERELVAGIGRGTITYYADSVKGRFTISRDNAKNTVYLQMNSLKPEDTAVYYCAVPAAIYDDSQLPYTYSFDYWGQGTQVTVSS

SEQ ID NO: 25124 - protein, 118 aa, Artificial Sequence
  Chemically Synthesized
QVQLQESGGGLVQAGGSLRLSCAASGTISPSTYMGWYRQAPGKEREFVASIGDGATTYYADSVKGRFTISRDNAKNTVYLQMNSLKPEDTAVYYCAVWGVDDGALSYWGQGTQVTVSS

SEQ ID NO: 25125 - protein, 118 aa, Artificial Sequence
  Chemically Synthesized
QVQLQESGGGLVQAGGSLRLSCAASGNIFSYADMGWYRQAPGKERELVAAIDLGGNTNYADSVKGRFTISRDNAKNTVYLQMNSLKPEDTAVYYCAVVYRDGLDYLYWGQGTQVTVSS

SEQ ID NO: 25126 - protein, 121 aa, Artificial Sequence
  Chemically Synthesized
QVQLQESGGGLVQAGGSLRLSCAASGYISTRFDMGWYRQAPGKEREFVAGIGYGSNPYADSVKGRFTISRDNAKNTVYLQMNSLKPEDTAVYYCAVSDADYRGPTPGFRYWGQGTQVTVSS

SEQ ID NO: 25127 - protein, 118 aa, Artificial Sequence
  Chemically Synthesized
QVQLQESGGGLVQAGGSLRLSCAASGSIFVTTDMGWYRQAPGKERELVATISLGAITNYADSVKGRFTISRDNAKNTVYLQMNSLKPEDTAVYYCAVINDARYDHGYWGQGTQVTVSS

SEQ ID NO: 25128 - protein, 116 aa, Artificial Sequence
  Chemically Synthesized
QVQLQESGGGLVQAGGSLRLSCAASGNISAHGYMGWYRQAPGKERELVATIDRGSLPYADSVKGRFTISRDNAKNTVYLQMNSLKPEDTAVYYCAADKGFSRHAYWGQGTQVTVSS

SEQ ID NO: 25129 - protein, 117 aa, Artificial Sequence
  Chemically Synthesized
QVQLQESGGGLVQAGGSLRLSCAASGTISGRGVMGWYRQAPGKERELVATIGTGGNTYYADSVKGRFTISRDNAKNTVYLQMNSLKPEDTAVYYCAVWDGGGISLYWGQGTQVTVSS

SEQ ID NO: 25130 - protein, 126 aa, Artificial Sequence
  Chemically Synthesized
QVQLQESGGGLVQAGGSLRLSCAASGNISAPYYMGWYRQAPGKERELVAAIANGSNTNYADSVKGRFTISRDNAKNTVYLQMNSLKPEDTAVYYCAARQSYRDGASGDGKPDYDYWGQGTQVTVSS

SEQ ID NO: 25131 - protein, 122 aa, Artificial Sequence
  Chemically Synthesized
QVQLQESGGGLVQAGGSLRLSCAASGNISDRDYMGWYRQAPGKERELVAAISYGSSTNYADSVKGRFTISRDNAKNTVYLQMNSLKPEDTAVYYCAVRAQYTEDDVYDHSYWGQGTQVTVSS

SEQ ID NO: 25132 - protein, 122 aa, Artificial Sequence
  Chemically Synthesized
QVQLQESGGGLVQAGGSLRLSCAASGNISWADDMGWYRQAPGKEREFVAVLVVVLIPYADSVKGRFTISRDNAKNTVYLQMNSLKPEDTAVYYCAADASYNWGYIDSHGIYWGQGTQVTVSS

SEQ ID NO: 25133 - protein, 122 aa, Artificial Sequence
  Chemically Synthesized
QVQLQESGGGLVQAGGSLRLSCAASGYISDRRYMGWYRQAPGKERELVAGIAYGSSTNYADSVKGRFTISRDNAKNTVYLQMNSLKPEDTAVYYCAVGYYYGVVAYDRLRYWGQGTQVTVSS

SEQ ID NO: 25134 - protein, 125 aa, Artificial Sequence
  Chemically Synthesized
QVQLQESGGGLVQAGGSLRLSCAASGYIFLDGMGWYRQAPGKERELVATISDGSTTYYADSVKGRFTISRDNAKNTVYLQMNSLKPEDTAVYYCAAYFTYPTADYPYPYNYLAYWGQGTQVTVSS

SEQ ID NO: 25135 - protein, 122 aa, Artificial Sequence
  Chemically Synthesized
QVQLQESGGGLVQAGGSLRLSCAASGTISRGTYMGWYRQAPGKEREFVAAIAHGGTTYYADSVKGRFTISRDNAKNTVYLQMNSLKPEDTAVYYCAVTWAGPTTYPADHVYWGQGTQVTVSS

SEQ ID NO: 25136 - protein, 122 aa, Artificial Sequence
  Chemically Synthesized
QVQLQESGGGLVQAGGSLRLSCAASGSISGRRRMGWYRQAPGKERELVATITVGASTNYADSVKGRFTISRDNAKNTVYLQMNSLKPEDTAVYYCAVRALASNEWGPHLNYWGQGTQVTVSS

SEQ ID NO: 25137 - protein, 118 aa, Artificial Sequence
  Chemically Synthesized
QVQLQESGGGLVQAGGSLRLSCAASGTISSRTWMGWYRQAPGKERELVAAIGRGANTYYADSVKGRFTISRDNAKNTVYLQMNSLKPEDTAVYYCAAYDDTTQAYSYWGQGTQVTVSS

SEQ ID NO: 25138 - protein, 122 aa, Artificial Sequence
  Chemically Synthesized
QVQLQESGGGLVQAGGSLRLSCAASGSIFYPAGMGWYRQAPGKEREFVASIGDGSSTYYADSVKGRFTISRDNAKNTVYLQMNSLKPEDTAVYYCAAIGGPRIAYVARYYYWGQGTQVTVSS

SEQ ID NO: 25139 - protein, 114 aa, Artificial Sequence
  Chemically Synthesized
QVQLQESGGGLVQAGGSLRLSCAASGNIFSPRYMGWYRQAPGKEREFVAGIGFGTNTNYADSVKGRFTISRDNAKNTVYLQMNSLKPEDTAVYYCAAGTFVMYWGQGTQVTVSS

SEQ ID NO: 25140 - protein, 122 aa, Artificial Sequence
  Chemically Synthesized
QVQLQESGGGLVQAGGSLRLSCAASGNIFYGRTMGWYRQAPGKEREFVATITYGGNTNYADSVKGRFTISRDNAKNTVYLQMNSLKPEDTAVYYCAANDDGTPHLLLFLEYWGQGTQVTVSS

SEQ ID NO: 25141 - protein, 118 aa, Artificial Sequence
  Chemically Synthesized
QVQLQESGGGLVQAGGSLRLSCAASGSISAGQHMGWYRQAPGKERELVAGISFGATTYYADSVKGRFTISRDNAKNTVYLQMNSLKPEDTAVYYCAALGYDYPKHYYWGQGTQVTVSS

SEQ ID NO: 25142 - protein, 118 aa, Artificial Sequence
  Chemically Synthesized
QVQLQESGGGLVQAGGSLRLSCAASGTIFAVSYMGWYRQAPGKERELVAGITYGGTTYYADSVKGRFTISRDNAKNTVYLQMNSLKPEDTAVYYCAVTYWYPYYLVYWGQGTQVTVSS

SEQ ID NO: 25143 - protein, 117 aa, Artificial Sequence
  Chemically Synthesized
QVQLQESGGGLVQAGGSLRLSCAASGNIFDGDDMGWYRQAPGKEREFVAGIATGARPYADSVKGRFTISRDNAKNTVYLQMNSLKPEDTAVYYCAASDDGYRRFDYWGQGTQVTVSS

SEQ ID NO: 25144 - protein, 118 aa, Artificial Sequence
  Chemically Synthesized
QVQLQESGGGLVQAGGSLRLSCAASGTIFLYTYMGWYRQAPGKEREFVAAINPGSITYYADSVKGRFTISRDNAKNTVYLQMNSLKPEDTAVYYCAVYSDDADHLGYWGQGTQVTVSS

SEQ ID NO: 25145 - protein, 118 aa, Artificial Sequence
  Chemically Synthesized
QVQLQESGGGLVQAGGSLRLSCAASGSISAYGVMGWYRQAPGKERELVAAITYGTTTYYADSVKGRFTISRDNAKNTVYLQMNSLKPEDTAVYYCAATYDWYDDHPYWGQGTQVTVSS

SEQ ID NO: 25146 - protein, 118 aa, Artificial Sequence
  Chemically Synthesized
QVQLQESGGGLVQAGGSLRLSCAASGTISPDYAMGWYRQAPGKEREFVAGIDDGSSTYYADSVKGRFTISRDNAKNTVYLQMNSLKPEDTAVYYCAVIHYRSYRLDYWGQGTQVTVSS

SEQ ID NO: 25147 - protein, 126 aa, Artificial Sequence
  Chemically Synthesized
QVQLQESGGGLVQAGGSLRLSCAASGNISFIYVMGWYRQAPGKERELVAAIAAGATTYYADSVKGRFTISRDNAKNTVYLQMNSLKPEDTAVYYCAVDSWEGFYDVEGGADGLGYWGQGTQVTVSS

SEQ ID NO: 25148 - protein, 117 aa, Artificial Sequence
  Chemically Synthesized
QVQLQESGGGLVQAGGSLRLSCAASGYIFTYHQMGWYRQAPGKERELVATIGPGGITYYADSVKGRFTISRDNAKNTVYLQMNSLKPEDTAVYYCAVATLLTLTHYWGQGTQVTVSS

SEQ ID NO: 25149 - protein, 118 aa, Artificial Sequence
  Chemically Synthesized
QVQLQESGGGLVQAGGSLRLSCAASGSISPRDYMGWYRQAPGKEREFVAAIGAGATTYYADSVKGRFTISRDNAKNTVYLQMNSLKPEDTAVYYCAVWIGAQTILPYWGQGTQVTVSS

SEQ ID NO: 25150 - protein, 122 aa, Artificial Sequence
  Chemically Synthesized
QVQLQESGGGLVQAGGSLRLSCAASGYISRWYAMGWYRQAPGKERELVATIDLGTNTYYADSVKGRFTISRDNAKNTVYLQMNSLKPEDTAVYYCAALYHDSYGISRYFLYWGQGTQVTVSS

SEQ ID NO: 25151 - protein, 122 aa, Artificial Sequence
  Chemically Synthesized
QVQLQESGGGLVQAGGSLRLSCAASGTISDDDTMGWYRQAPGKEREFVATIADGTSTNYADSVKGRFTISRDNAKNTVYLQMNSLKPEDTAVYYCAVDNPYVRYDKSDLSYWGQGTQVTVSS

SEQ ID NO: 25152 - protein, 118 aa, Artificial Sequence
  Chemically Synthesized
QVQLQESGGGLVQAGGSLRLSCAASGTISSRYVMGWYRQAPGKERELVAAIGYGGITNYADSVKGRFTISRDNAKNTVYLQMNSLKPEDTAVYYCAVGPPRDDQHTYWGQGTQVTVSS

SEQ ID NO: 25153 - protein, 117 aa, Artificial Sequence
  Chemically Synthesized
QVQLQESGGGLVQAGGSLRLSCAASGNISWAGEMGWYRQAPGKEREFVATIGIGAITYYADSVKGRFTISRDNAKNTVYLQMNSLKPEDTAVYYCAVGVSSRKVRYWGQGTQVTVSS

SEQ ID NO: 25154 - protein, 118 aa, Artificial Sequence
  Chemically Synthesized
QVQLQESGGGLVQAGGSLRLSCAASGYISRYSLMGWYRQAPGKERELVASISVGGNTYYADSVKGRFTISRDNAKNTVYLQMNSLKPEDTAVYYCAVGVRKYVSHQYWGQGTQVTVSS

SEQ ID NO: 25155 - protein, 116 aa, Artificial Sequence
  Chemically Synthesized
QVQLQESGGGLVQAGGSLRLSCAASGNIFVPAFMGWYRQAPGKERELVATITYGSNTNYADSVKGRFTISRDNAKNTVYLQMNSLKPEDTAVYYCAAGYAYTFVYWGQGTQVTVSS

SEQ ID NO: 25156 - protein, 117 aa, Artificial Sequence
  Chemically Synthesized
QVQLQESGGGLVQAGGSLRLSCAASGYIFEKSQMGWYRQAPGKEREFVATIGAGATTYYADSVKGRFTISRDNAKNTVYLQMNSLKPEDTAVYYCALLTTILVCIYWGQGTQVTVSS

SEQ ID NO: 25157 - protein, 115 aa, Artificial Sequence
  Chemically Synthesized
QVQLQESGGGLVQAGGSLRLSCAASGSMGCMGWYRQAPGKERELVAAITRGSSTYYADSVKGRFTISRDNAKNTVYLQMNSLKPEDTAVYYCAVRRPIGLDHGYWGQGTQVTVSS

SEQ ID NO: 25158 - protein, 113 aa, Artificial Sequence
  Chemically Synthesized
QVQLQESGGGLVQAGGSLRLSCAASGTISRQHMGWYRQAPGKEREFVATYADSVKGRFTISRDNAKNTVYLQMNSLKPEDTAVYYCAVGTGYVPSDSKFLLYWGQGTQVTVSS

SEQ ID NO: 25159 - protein, 114 aa, Artificial Sequence
  Chemically Synthesized
QVQLQESGGGLVQAGGSLRLSCAASGNISRLWYMGWYRQAPGKERELVAAITPGTSTNYADSVKGRFTISRDNAKNTVYLQMNSLKPEDTAVYYCAVVDDHYYWGQGTQVTVSS

SEQ ID NO: 25160 - protein, 122 aa, Artificial Sequence
  Chemically Synthesized
QVQLQESGGGLVQAGGSLRLSCAASGTIFGYQVMGWYRQAPGKERELVASINGGASTNYADSVKGRFTISRDNAKNTVYLQMNSLKPEDTAVYYCAADNAYEAQDWYDFWYWGQGTQVTVSS

SEQ ID NO: 25161 - protein, 122 aa, Artificial Sequence
  Chemically Synthesized
QVQLQESGGGLVQAGGSLRLSCAASGSISLYANMGWYRQAPGKERELVATIDYGTNTNYADSVKGRFTISRDNAKNTVYLQMNSLKPEDTAVYYCAVVGIGDIYTNSRHPYWGQGTQVTVSS

SEQ ID NO: 25162 - protein, 121 aa, Artificial Sequence
  Chemically Synthesized
QVQLQESGGGLVQAGGSLRLSCAASGYIFGEYYMGWYRQAPGKERELVASISAGANTNYADSVKGRFTISRDNAKNTVYLQMNSLKPEDTAVYYCAVDRGYSLTSTVTFYWGQGTQVTVSS

SEQ ID NO: 25163 - protein, 114 aa, Artificial Sequence
  Chemically Synthesized
QVQLQESGGGLVQAGGSLRLSCAASGTISRDQYMGWYRQAPGKERELLPLLMKVVIPYADSVKGRFTISRDNAKNTVYLQMNSLKPEDTAVYYCAAEDYVHHYWGQGTQVTVSS

SEQ ID NO: 25164 - protein, 119 aa, Artificial Sequence
  Chemically Synthesized
QVQLQESGGGLVQAGGSLRLSCAASGNISDTMGWYRQAPGKEREFVAGITFGGSTYYADSVKGRFTISRDNAKNTVYLQMNSLKPEDTAVYYCAVTDSDYQDDATYAYWGQGTQVTVSS

SEQ ID NO: 25165 - protein, 126 aa, Artificial Sequence
  Chemically Synthesized
QVQLQESGGGLVQAGGSLRLSCAASGTIFRLFTMGWYRQAPGKERELVAGIAWGGNTNYADSVKGRFTISRDNAKNTVYLQMNSLKPEDTAVYYCAADSGKRGHDFSDAYYTFYYWGQGTQVTVSS

SEQ ID NO: 25166 - protein, 118 aa, Artificial Sequence
  Chemically Synthesized
QVQLQESGGGLVQAGGSLRLSCAASGTIFDYWYMGWYRQAPGKEREFVATITVGTITYYADSVKGRFTISRDNAKNTVYLQMNSLKPEDTAVYYCAAYDPRYEVYQYWGQGTQVTVSS

SEQ ID NO: 25167 - protein, 118 aa, Artificial Sequence
  Chemically Synthesized
QVQLQESGGGLVQAGGSLRLSCAASGSIFLPHQMGWYRQAPGKERELVATIGVGSTTNYADSVKGRFTISRDNAKNTVYLQMNSLKPEDTAVYYCAAVYTDNLVHVYWGQGTQVTVSS

SEQ ID NO: 25168 - protein, 122 aa, Artificial Sequence
  Chemically Synthesized
QVQLQESGGGLVQAGGSLRLSCAASGTIFDTFSMGWYRQAPGKEREFVAAITDGSTTYYADSVKGRFTISRDNAKNTVYLQMNSLKPEDTAVYYCAVYATYAQQTLSILTYWGQGTQVTVSS

SEQ ID NO: 25169 - protein, 122 aa, Artificial Sequence
  Chemically Synthesized
QVQLQESGGGLVQAGGSLRLSCAASGTISAQYYMGWYRQAPGKERELVAAIGYGAITYYADSVKGRFTISRDNAKNTVYLQMNSLKPEDTAVYYCAVLYVRTGEGPYNLYYWGQGTQVTVSS

SEQ ID NO: 25170 - protein, 126 aa, Artificial Sequence
  Chemically Synthesized
QVQLQESGGGLVQAGGSLRLSCAASGSIFAGGDMGWYRQAPGKERELVASISLGGSTYYADSVKGRFTISRDNAKNTVYLQMNSLKPEDTAVYYCAARSYQYDYDEQLVPYPHPYWGQGTQVTVSS

SEQ ID NO: 25171 - protein, 118 aa, Artificial Sequence
  Chemically Synthesized
QVQLQESGGGLVQAGGSLRLSCAASGSISETDFMGWYRQAPGKERELVAGISIGASTYYADSVKGRFTISRDNAKNTVYLQMNSLKPEDTAVYYCAVYHRSEVHFAYWGQGTQVTVSS

SEQ ID NO: 25172 - protein, 118 aa, Artificial Sequence
  Chemically Synthesized
QVQLQESGGGLVQAGGSLRLSCAASGSISRRPIMGWYRQAPGKEREFVAAINWGASTYYADSVKGRFTISRDNAKNTVYLQMNSLKPEDTAVYYCAVVDPDRLYLRYWGQGTQVTVSS

SEQ ID NO: 25173 - protein, 117 aa, Artificial Sequence
  Chemically Synthesized
QVQLQESGGGLVQAGGSLRLSCAASGTISYSTMGWYRQAPGKEREFVASITSGASTYYADSVKGRFTISRDNAKNTVYLQMNSLKPEDTAVYYCAVYPLSHARHAYWGQGTQVTVSS

SEQ ID NO: 25174 - protein, 118 aa, Artificial Sequence
  Chemically Synthesized
QVQLQESGGGLVQAGGSLRLSCAASGTISRTFYMGWYRQAPGKERELVAAITDGGNTYYADSVKGRFTISRDNAKNTVYLQMNSLKPEDTAVYYCAAQYTGGDTFQYWGQGTQVTVSS

SEQ ID NO: 25175 - protein, 121 aa, Artificial Sequence
  Chemically Synthesized
QVQLQESGGGLVQAGGSLRLSCAASGYISWADAMGWYRQAPGKERELVALVLLPYADSVKGRFTISRDNAKNTVYLQMNSLKPEDTAVYYCAAWIYDYNAGLYLQSLPYYWGQGTQVTVSS

SEQ ID NO: 25176 - protein, 119 aa, Artificial Sequence
  Chemically Synthesized
QVQLQESGGGLVQAGGSLRLSCAASGTIFGYRAMGWYRQAPGKERELVLMKVLIPYADSVKGRFTISRDNAKNTVYLQMNSLKPEDTAVYYCAVYGKPLHYTHAELVYWGQGTQVTVSS

SEQ ID NO: 25177 - protein, 122 aa, Artificial Sequence
  Chemically Synthesized
QVQLQESGGGLVQAGGSLRLSCAASGYISRESDMGWYRQAPGKERELVAGISGGANTNYADSVKGRFTISRDNAKNTVYLQMNSLKPEDTAVYYCAAQNETPDGYFANYYYWGQGTQVTVSS

SEQ ID NO: 25178 - protein, 122 aa, Artificial Sequence
  Chemically Synthesized
QVQLQESGGGLVQAGGSLRLSCAASGTISNSDDMGWYRQAPGKERELVAAISHGANTNYADSVKGRFTISRDNAKNTVYLQMNSLKPEDTAVYYCAAVYQVITNLTGSYGYWGQGTQVTVSS

SEQ ID NO: 25179 - protein, 118 aa, Artificial Sequence
  Chemically Synthesized
QVQLQESGGGLVQAGGSLRLSCAASGTISGGYYMGWYRQAPGKERELVAAIAYGGNTYYADSVKGRFTISRDNAKNTVYLQMNSLKPEDTAVYYCAAQPEYLTRFQYWGQGTQVTVSS

SEQ ID NO: 25180 - protein, 122 aa, Artificial Sequence
  Chemically Synthesized
QVQLQESGGGLVQAGGSLRLSCAASGSISPRRTMGWYRQAPGKEREFVAGIDDGGITYYADSVKGRFTISRDNAKNTVYLQMNSLKPEDTAVYYCAVLLDVDAGGTSEHYYWGQGTQVTVSS

SEQ ID NO: 25181 - protein, 125 aa, Artificial Sequence
  Chemically Synthesized
QVQLQESGGGLVQAGGSLRLSCAASGNISSDWAMGWYRQAPGKERELVAGITGGTTTYYADSVKGRFTISRDNAKNTVYLQMNSLKPEDTAVYYCAVSGGSLTTFTLWTFRSFYWGQGTQVTVSS

SEQ ID NO: 25182 - protein, 122 aa, Artificial Sequence
  Chemically Synthesized
QVQLQESGGGLVQAGGSLRLSCAASGNIFLGTTMGWYRQAPGKERELVAAINDGSTTNYADSVKGRFTISRDNAKNTVYLQMNSLKPEDTAVYYCAVVWPNAYYGAIGHTYWGQGTQVTVSS

SEQ ID NO: 25183 - protein, 118 aa, Artificial Sequence
  Chemically Synthesized
QVQLQESGGGLVQAGGSLRLSCAASGTISSSPYMGWYRQAPGKEREFVAAIARGGSTNYADSVKGRFTISRDNAKNTVYLQMNSLKPEDTAVYYCAVVYGGYLNYIYWGQGTQVTVSS

SEQ ID NO: 25184 - protein, 126 aa, Artificial Sequence
  Chemically Synthesized
QVQLQESGGGLVQAGGSLRLSCAASGSIFLSHSMGWYRQAPGKERELVAGINYGGNTNYADSVKGRFTISRDNAKNTVYLQMNSLKPEDTAVYYCAVYDAIYLNADIYDGRRHSYWGQGTQVTVSS

SEQ ID NO: 25185 - protein, 117 aa, Artificial Sequence
  Chemically Synthesized
QVQLQESGGGLVQAGGSLRLSCAASGTISVITFMGWYRQAPGKEREFVAAITGGSSTNYADSVKGRFTISRDNAKNTVYLQMNSLKPEDTAVYYCAVPHWYGEAMYWGQGTQVTVSS

SEQ ID NO: 25186 - protein, 122 aa, Artificial Sequence
  Chemically Synthesized
QVQLQESGGGLVQAGGSLRLSCAASGNISTAWVMGWYRQAPGKERELVAGITGGSSTNYADSVKGRFTISRDNAKNTVYLQMNSLKPEDTAVYYCAAQGGVRTGGEAGHSYWGQGTQVTVSS

SEQ ID NO: 25187 - protein, 122 aa, Artificial Sequence
  Chemically Synthesized
QVQLQESGGGLVQAGGSLRLSCAASGNISRDVGMGWYRQAPGKEREFVAAIGTGSSTNYADSVKGRFTISRDNAKNTVYLQMNSLKPEDTAVYYCAVHLRVDTRYSGSHGYWGQGTQVTVSS

SEQ ID NO: 25188 - protein, 117 aa, Artificial Sequence
  Chemically Synthesized
QVQLQESGGGLVQAGGSLRLSCAASGTISRSRVMGWYRQAPGKERELVASIATGSTTYYADSVKGRFTISRDNAKNTVYLQMNSLKPEDTAVYYCAVDTVVVRTMYWGQGTQVTVSS

SEQ ID NO: 25189 - protein, 115 aa, Artificial Sequence
  Chemically Synthesized
QVQLQESGGGLVQAGGSLRLSCAASGSISSTSMGWYRQAPGKEREFVAANGSTTYYADSVKGRFTISRDNAKNTVYLQMNSLKPEDTAVYYCAVPNWYDTPHDYWGQGTQVTVSS

SEQ ID NO: 25190 - protein, 118 aa, Artificial Sequence
  Chemically Synthesized
QVQLQESGGGLVQAGGSLRLSCAASGTIFRYVYMGWYRQAPGKEREFVASINAGTTTYYADSVKGRFTISRDNAKNTVYLQMNSLKPEDTAVYYCAAGPAYYWDYYYWGQGTQVTVSS

SEQ ID NO: 25191 - protein, 125 aa, Artificial Sequence
  Chemically Synthesized
QVQLQESGGGLVQAGGSLRLSCAASGTISKTSYMGWYRQAPGKEREFVAAISVGSTTYYADSVKGRFTISRDNAKNTVYLQMNSLKPEDTAVYYCAADLWGEGYDGLTGDPLSYWGQGTQVTVSS

SEQ ID NO: 25192 - protein, 113 aa, Artificial Sequence
  Chemically Synthesized
QVQLQESGGGLVQAGGSLRLSCAASGYFLTLLMGWYRQAPGKERELVASIDPGGTTYYADSVKGRFTISRDNAKNTVYLQMNSLKPEDTAVYYCAAGVRHFYWGQGTQVTVSS

SEQ ID NO: 25193 - protein, 111 aa, Artificial Sequence
  Chemically Synthesized
QVQLQESGGGLVQAGGSLRLSCAASGTISGPGVMGWYRQAPGKEREFVASITFGTNTNYADSVKGRFTISRDNAKNTVYLQMNSLKPEDTAVYYCAVAPYWGQGTQVTVSS

SEQ ID NO: 25194 - protein, 116 aa, Artificial Sequence
  Chemically Synthesized
QVQLQESGGGLVQAGGSLRLSCAASGNISSADTMGWYRQAPGKERELVASIDGGAITNYADSVKGRFTISRDNAKNTVYLQMNSLKPEDTAVYYCAAQYSASTHYWGQGTQVTVSS

SEQ ID NO: 25195 - protein, 121 aa, Artificial Sequence
  Chemically Synthesized
QVQLQESGGGLVQAGGSLRLSCAASGNISYYDLMGWYRQAPGKERELVAAIVLVVLPYADSVKGRFTISRDNAKNTVYLQMNSLKPEDTAVYYCAADDFTPQILYGPHDYWGQGTQVTVSS

SEQ ID NO: 25196 - protein, 118 aa, Artificial Sequence
  Chemically Synthesized
QVQLQESGGGLVQAGGSLRLSCAASGTIFDVEYMGWYRQAPGKEREFVAAISFGAITYYADSVKGRFTISRDNAKNTVYLQMNSLKPEDTAVYYCAAQESATYTYQYWGQGTQVTVSS

SEQ ID NO: 25197 - protein, 116 aa, Artificial Sequence
  Chemically Synthesized
QVQLQESGGGLVQAGGSLRLSCAASGTIFRIVYMGWYRQAPGKERELVAAINQGTNTYYADSVKGRFTISRDNAKNTVYLQMNSLKPEDTAVYYCAVVDPQYHIYWGQGTQVTVSS

SEQ ID NO: 25198 - protein, 122 aa, Artificial Sequence
  Chemically Synthesized
QVQLQESGGGLVQAGGSLRLSCAASGTIFGLDSMGWYRQAPGKEREFVASIGPGGTTNYADSVKGRFTISRDNAKNTVYLQMNSLKPEDTAVYYCAAISTRPQYRHDWLDYWGQGTQVTVSS

SEQ ID NO: 25199 - protein, 117 aa, Artificial Sequence
  Chemically Synthesized
QVQLQESGGGLVQAGGSLRLSCAASGNFLSKFMGWYRQAPGKERELVAGIADGSTTNYADSVKGRFTISRDNAKNTVYLQMNSLKPEDTAVYYCAVDSHQARYLSYWGQGTQVTVSS

SEQ ID NO: 25200 - protein, 119 aa, Artificial Sequence
  Chemically Synthesized
QVQLQESGGGLVQAGGSLRLSCAASGSISRTDSMGWYRQAPGKERELVAVLMLVLLPYADSVKGRFTISRDNAKNTVYLQMNSLKPEDTAVYYCAVSYYANGRVWYDYWGQGTQVTVSS

SEQ ID NO: 25201 - protein, 122 aa, Artificial Sequence
  Chemically Synthesized
QVQLQESGGGLVQAGGSLRLSCAASGYISYYGYMGWYRQAPGKEREFVAGIAYGATTYYADSVKGRFTISRDNAKNTVYLQMNSLKPEDTAVYYCAADGPFVQDWPYWLKYWGQGTQVTVSS

SEQ ID NO: 25202 - protein, 126 aa, Artificial Sequence
  Chemically Synthesized
QVQLQESGGGLVQAGGSLRLSCAASGTISYTTSMGWYRQAPGKERELVAGIGRGGNTNYADSVKGRFTISRDNAKNTVYLQMNSLKPEDTAVYYCAAPPYGYLDWLDVESGGHFYWGQGTQVTVSS

SEQ ID NO: 25203 - protein, 118 aa, Artificial Sequence
  Chemically Synthesized
QVQLQESGGGLVQAGGSLRLSCAASGTISASQWMGWYRQAPGKERELVAAISDGGITNYADSVKGRFTISRDNAKNTVYLQMNSLKPEDTAVYYCAVYSNTDPYLEYWGQGTQVTVSS

SEQ ID NO: 25204 - protein, 122 aa, Artificial Sequence
  Chemically Synthesized
QVQLQESGGGLVQAGGSLRLSCAASGTIFRYAYMGWYRQAPGKERELVAGISNGTITYYADSVKGRFTISRDNAKNTVYLQMNSLKPEDTAVYYCAARGVDDSWWIDGHLYWGQGTQVTVSS

SEQ ID NO: 25205 - protein, 118 aa, Artificial Sequence
  Chemically Synthesized
QVQLQESGGGLVQAGGSLRLSCAASGTISRTRYMGWYRQAPGKEREFVAAISDGAITYYADSVKGRFTISRDNAKNTVYLQMNSLKPEDTAVYYCAVVRRGARTHPYWGQGTQVTVSS

SEQ ID NO: 25206 - protein, 122 aa, Artificial Sequence
  Chemically Synthesized
QVQLQESGGGLVQAGGSLRLSCAASGSISHSPVMGWYRQAPGKEREFVAGISYGGTTNYADSVKGRFTISRDNAKNTVYLQMNSLKPEDTAVYYCAVGPGGDSDLHGDYDYWGQGTQVTVSS

SEQ ID NO: 25207 - protein, 120 aa, Artificial Sequence
  Chemically Synthesized
QVQLQESGGGLVQAGGSLRLSCAASGNISTYAYMGWYRQAPGKERELPLLMLVVVPYADSVKGRFTISRDNAKNTVYLQMNSLKPEDTAVYYCAAPLIVTATKLVELYYWGQGTQVTVSS

SEQ ID NO: 25208 - protein, 118 aa, Artificial Sequence
  Chemically Synthesized
QVQLQESGGGLVQAGGSLRLSCAASGYISYDATMGWYRQAPGKERELVATIDYGANTYYADSVKGRFTISRDNAKNTVYLQMNSLKPEDTAVYYCAATTADVPLYDYWGQGTQVTVSS

SEQ ID NO: 25209 - protein, 124 aa, Artificial Sequence
  Chemically Synthesized
QVQLQESGGGLVQAGGSLRLSCAASGTIFLDASMGWYRQAPGKERELVATITSGAITNYADSVKGRFTISRDNAKNTVYLQMNSLKPEDTAVYYCAVALDYDLDDRVPLPHHYWGQGTQVTVSS

SEQ ID NO: 25210 - protein, 118 aa, Artificial Sequence
  Chemically Synthesized
QVQLQESGGGLVQAGGSLRLSCAASGNIFDYDLMGWYRQAPGKERELVASIDNGTITNYADSVKGRFTISRDNAKNTVYLQMNSLKPEDTAVYYCAAPFIAEPKYPYWGQGTQVTVSS

SEQ ID NO: 25211 - protein, 116 aa, Artificial Sequence
  Chemically Synthesized
QVQLQESGGGLVQAGGSLRLSCAASGYIFSKTLMGWYRQAPGKERELVATISWGGSTYYADSVKGRFTISRDNAKNTVYLQMNSLKPEDTAVYYCAVYTPWGLTYWGQGTQVTVSS

SEQ ID NO: 25212 - protein, 126 aa, Artificial Sequence
  Chemically Synthesized
QVQLQESGGGLVQAGGSLRLSCAASGTISYRDTMGWYRQAPGKEREFVAAIGGGGITNYADSVKGRFTISRDNAKNTVYLQMNSLKPEDTAVYYCAVPHTRTNGFYYPYDRGFRYWGQGTQVTVSS

SEQ ID NO: 25213 - protein, 117 aa, Artificial Sequence
  Chemically Synthesized
QVQLQESGGGLVQAGGSLRLSCAASGTILSSVMGWYRQAPGKERELVASIGDGGNTNYADSVKGRFTISRDNAKNTVYLQMNSLKPEDTAVYYCAAFSNYSDLLAYWGQGTQVTVSS

SEQ ID NO: 25214 - protein, 126 aa, Artificial Sequence
  Chemically Synthesized
QVQLQESGGGLVQAGGSLRLSCAASGTIFLSWRMGWYRQAPGKERELVASIDYGSNTYYADSVKGRFTISRDNAKNTVYLQMNSLKPEDTAVYYCAVLYGQPSDIIYDFGQFPWYWGQGTQVTVSS

SEQ ID NO: 25215 - protein, 117 aa, Artificial Sequence
  Chemically Synthesized
QVQLQESGGGLVQAGGSLRLSCAASGTIFRRAEMGWYRQAPGKERELVAGITDGTNTNYADSVKGRFTISRDNAKNTVYLQMNSLKPEDTAVYYCAATPYRNGYSYWGQGTQVTVSS

SEQ ID NO: 25216 - protein, 117 aa, Artificial Sequence
  Chemically Synthesized
QVQLQESGGGLVQAGGSLRLSCAASGYISTYVFMGWYRQAPGKEREFVASIDFGGSTYYADSVKGRFTISRDNAKNTVYLQMNSLKPEDTAVYYCAFVSLMTRFIYWGQGTQVTVSS

SEQ ID NO: 25217 - protein, 118 aa, Artificial Sequence
  Chemically Synthesized
QVQLQESGGGLVQAGGSLRLSCAASGYIFDNTRMGWYRQAPGKERELVATINPGSTTNYADSVKGRFTISRDNAKNTVYLQMNSLKPEDTAVYYCAVQYGRGLNHNYWGQGTQVTVSS

SEQ ID NO: 25218 - protein, 126 aa, Artificial Sequence
  Chemically Synthesized
QVQLQESGGGLVQAGGSLRLSCAASGSIFLAANMGWYRQAPGKEREFVASISYGGSTNYADSVKGRFTISRDNAKNTVYLQMNSLKPEDTAVYYCAVEYIDYDPAGTDIAVLHRYWGQGTQVTVSS

SEQ ID NO: 25219 - protein, 120 aa, Artificial Sequence
  Chemically Synthesized
QVQLQESGGGLVQAGGSLRLSCAASGSISSADAMGWYRQAPGKEREFVAGIDNGGSTYYADSVKGRFTISRDNAKNTVYLQMNSLKPEDTAVYYCAAHVYRGRANVYDYWGQGTQVTVSS

SEQ ID NO: 25220 - protein, 117 aa, Artificial Sequence
  Chemically Synthesized
QVQLQESGGGLVQAGGSLRLSCAASGTISDVPVMGWYRQAPGKERELVATIDNGASTNYADSVKGRFTISRDNAKNTVYLQMNSLKPEDTAVYYCAVLKRNSTSMYWGQGTQVTVSS

SEQ ID NO: 25221 - protein, 121 aa, Artificial Sequence
  Chemically Synthesized
QVQLQESGGGLVQAGGSLRLSCAASGTIFLQHYMGWYRQAPGKEREFVAAIGRGITNYADSVKGRFTISRDNAKNTVYLQMNSLKPEDTAVYYCAVGPSSGIYYSGAHSYWGQGTQVTVSS

SEQ ID NO: 25222 - protein, 118 aa, Artificial Sequence
  Chemically Synthesized
QVQLQESGGGLVQAGGSLRLSCAASGNISDLYEMGWYRQAPGKERELVASISTGGTTYYADSVKGRFTISRDNAKNTVYLQMNSLKPEDTAVYYCAVYAERTDFFAYWGQGTQVTVSS

SEQ ID NO: 25223 - protein, 113 aa, Artificial Sequence
  Chemically Synthesized
QVQLQESGGGLVQAGGSLRLSCAASGTISSYLLMGWYRQAPGKEREFVAGIGQGTITNYADSVKGRFTISRDNAKNTVYLQMNSLKPEDTAVYYCAATSCIYWGQGTQVTVSS

SEQ ID NO: 25224 - protein, 122 aa, Artificial Sequence
  Chemically Synthesized
QVQLQESGGGLVQAGGSLRLSCAASGTISEERAMGWYRQAPGKERELVATINSGTTTYYADSVKGRFTISRDNAKNTVYLQMNSLKPEDTAVYYCAARNADAYRTLVYHHYWGQGTQVTVSS

SEQ ID NO: 25225 - protein, 118 aa, Artificial Sequence
  Chemically Synthesized
QVQLQESGGGLVQAGGSLRLSCAASGTISILSAMGWYRQAPGKERELVASISDGAITNYADSVKGRFTISRDNAKNTVYLQMNSLKPEDTAVYYCAAPHDSYPDLDYWGQGTQVTVSS

SEQ ID NO: 25226 - protein, 118 aa, Artificial Sequence
  Chemically Synthesized
QVQLQESGGGLVQAGGSLRLSCAASGTIFDYDDMGWYRQAPGKEREFVAGIGEGGNTNYADSVKGRFTISRDNAKNTVYLQMNSLKPEDTAVYYCAAVHSYDNIHYYWGQGTQVTVSS

SEQ ID NO: 25227 - protein, 123 aa, Artificial Sequence
  Chemically Synthesized
QVQLQESGGGLVQAGGSLRLSCAASGSISDAEEMGWYRQAPGKEREFVAAIAPGTSTNYADSVKGRFTISRDNAKNTVYLQMNSLKPEDTAVYYCAANDYTGNRTNSYYHYYWGQGTQVTVSS

SEQ ID NO: 25228 - protein, 119 aa, Artificial Sequence
  Chemically Synthesized
QVQLQESGGGLVQAGGSLRLSCAASGNISTFLCMGWYRQAPGKERELVAGITYGTITYYADSVKGRFTISRDNAKNTVYLQMNSLKPEDTAVYYCAATYEGWDNRLGYWGQGTQVTVSS

SEQ ID NO: 25229 - protein, 121 aa, Artificial Sequence
  Chemically Synthesized
QVQLQESGGGLVQAGGSLRLSCAASGTISDYVDMGWYRQAPGKERELVATIGSGGTTYYADSVKGRFTISRDNAKNTVYLQMNSLKPEDTAVYYCAASTRTTGLLTLNMYWGQGTQVTVSS

SEQ ID NO: 25230 - protein, 115 aa, Artificial Sequence
  Chemically Synthesized
QVQLQESGGGLVQAGGSLRLSCAASGTISINASMGWYRQAPGKEREPINYGAITNYADSVKGRFTISRDNAKNTVYLQMNSLKPEDTAVYYCAVYNYTDWEHYYWGQGTQVTVSS

SEQ ID NO: 25231 - protein, 118 aa, Artificial Sequence
  Chemically Synthesized
QVQLQESGGGLVQAGGSLRLSCAASGYISYARYMGWYRQAPGKERELVATIAWGGITYYADSVKGRFTISRDNAKNTVYLQMNSLKPEDTAVYYCAALWPSWGKHWYWGQGTQVTVSS

SEQ ID NO: 25232 - protein, 118 aa, Artificial Sequence
  Chemically Synthesized
QVQLQESGGGLVQAGGSLRLSCAASGYIFLPTNMGWYRQAPGKEREFVASITYGTNTNYADSVKGRFTISRDNAKNTVYLQMNSLKPEDTAVYYCAVRVSDDNQHPYWGQGTQVTVSS

SEQ ID NO: 25233 - protein, 118 aa, Artificial Sequence
  Chemically Synthesized
QVQLQESGGGLVQAGGSLRLSCAASGSISRYYTMGWYRQAPGKERELVATITYGSSTNYADSVKGRFTISRDNAKNTVYLQMNSLKPEDTAVYYCAAGSGNNYDYLYWGQGTQVTVSS

SEQ ID NO: 25234 - protein, 122 aa, Artificial Sequence
  Chemically Synthesized
QVQLQESGGGLVQAGGSLRLSCAASGSISATYVMGWYRQAPGKERELVATISTGGTTNYADSVKGRFTISRDNAKNTVYLQMNSLKPEDTAVYYCAAQYTLSFVSSGYYDYWGQGTQVTVSS

SEQ ID NO: 25235 - protein, 117 aa, Artificial Sequence
  Chemically Synthesized
QVQLQESGGGLVQAGGSLRLSCAASGNIFTYDGMGWYRQAPGKERELVASISDGAITYYADSVKGRFTISRDNAKNTVYLQMNSLKPEDTAVYYCAVGSVRKTLFYWGQGTQVTVSS

SEQ ID NO: 25236 - protein, 111 aa, Artificial Sequence
  Chemically Synthesized
QVQLQESGGGLVQAGGSLRLSCAASGSIESTYMGWYRQAPGKERELVAGIGIGASTNYADSVKGRFTISRDNAKNTVYLQMNSLKPEDTAVYYCAFTCMYWGQGTQVTVSS

SEQ ID NO: 25237 - protein, 118 aa, Artificial Sequence
  Chemically Synthesized
QVQLQESGGGLVQAGGSLRLSCAASGNISYSDYMGWYRQAPGKEREFVAAISGGGNTNYADSVKGRFTISRDNAKNTVYLQMNSLKPEDTAVYYCAVWGGQHLYHKYWGQGTQVTVSS

SEQ ID NO: 25238 - protein, 116 aa, Artificial Sequence
  Chemically Synthesized
QVQLQESGGGLVQAGGSLRLSCAASGTISFATDMGWYRQAPGKERELVATIGFGAIPYADSVKGRFTISRDNAKNTVYLQMNSLKPEDTAVYYCAAVRRNTGFYYWGQGTQVTVSS

SEQ ID NO: 25239 - protein, 122 aa, Artificial Sequence
  Chemically Synthesized
QVQLQESGGGLVQAGGSLRLSCAASGTIFNAEAMGWYRQAPGKERELVAAIGRGGITNYADSVKGRFTISRDNAKNTVYLQMNSLKPEDTAVYYCAARFDWSDAQQDIYHYWGQGTQVTVSS

SEQ ID NO: 25240 - protein, 126 aa, Artificial Sequence
  Chemically Synthesized
QVQLQESGGGLVQAGGSLRLSCAASGTISVGYGMGWYRQAPGKERELVAAINRGGTTNYADSVKGRFTISRDNAKNTVYLQMNSLKPEDTAVYYCAVHPFTDDNSDQQYAYELDYWGQGTQVTVSS

SEQ ID NO: 25241 - protein, 117 aa, Artificial Sequence
  Chemically Synthesized
QVQLQESGGGLVQAGGSLRLSCAASGSISSGVDMGWYRQAPGKERELVAGIDYGTSTYYADSVKGRFTISRDNAKNTVYLQMNSLKPEDTAVYYCAVSSTVTTTMYWGQGTQVTVSS

SEQ ID NO: 25242 - protein, 118 aa, Artificial Sequence
  Chemically Synthesized
QVQLQESGGGLVQAGGSLRLSCAASGTISVDPLMGWYRQAPGKEREFVAGIADGSTTYYADSVKGRFTISRDNAKNTVYLQMNSLKPEDTAVYYCAVYAYETDSLHYWGQGTQVTVSS

SEQ ID NO: 25243 - protein, 118 aa, Artificial Sequence
  Chemically Synthesized
QVQLQESGGGLVQAGGSLRLSCAASGSISYQYTMGWYRQAPGKERELVATISRGANTYYADSVKGRFTISRDNAKNTVYLQMNSLKPEDTAVYYCAVAENTRNCSWYWGQGTQVTVSS

SEQ ID NO: 25244 - protein, 122 aa, Artificial Sequence
  Chemically Synthesized
QVQLQESGGGLVQAGGSLRLSCAASGNISGTPVMGWYRQAPGKERELVATISGGSITNYADSVKGRFTISRDNAKNTVYLQMNSLKPEDTAVYYCAAYAGLVTSSSGDHYYWGQGTQVTVSS

SEQ ID NO: 25245 - protein, 122 aa, Artificial Sequence
  Chemically Synthesized
QVQLQESGGGLVQAGGSLRLSCAASGSISKRYDMGWYRQAPGKERELVATIGDGGNTYYADSVKGRFTISRDNAKNTVYLQMNSLKPEDTAVYYCAVPTERAPPYDAYHGYWGQGTQVTVSS

SEQ ID NO: 25246 - protein, 126 aa, Artificial Sequence
  Chemically Synthesized
QVQLQESGGGLVQAGGSLRLSCAASGTISWHPYMGWYRQAPGKEREFVAAIGAGTITYYADSVKGRFTISRDNAKNTVYLQMNSLKPEDTAVYYCAVQSYAGISDLTPREGWHPYWGQGTQVTVSS

SEQ ID NO: 25247 - protein, 118 aa, Artificial Sequence
  Chemically Synthesized
QVQLQESGGGLVQAGGSLRLSCAASGSISDFSWMGWYRQAPGKERELVAAISTGTTTNYADSVKGRFTISRDNAKNTVYLQMNSLKPEDTAVYYCAVFIADEYIHIYWGQGTQVTVSS

SEQ ID NO: 25248 - protein, 118 aa, Artificial Sequence
  Chemically Synthesized
QVQLQESGGGLVQAGGSLRLSCAASGYISPRYDMGWYRQAPGKERELVASIGDGTTTNYADSVKGRFTISRDNAKNTVYLQMNSLKPEDTAVYYCAVYVDYLQLYDYWGQGTQVTVSS

SEQ ID NO: 25249 - protein, 121 aa, Artificial Sequence
  Chemically Synthesized
QVQLQESGGGLVQAGGSLRLSCAASGTISYSGSMGWYRQAPGKEREFVALLLTVVVPYADSVKGRFTISRDNAKNTVYLQMNSLKPEDTAVYYCAAGYGVDVTYYYGHPYWGQGTQVTVSS

SEQ ID NO: 25250 - protein, 121 aa, Artificial Sequence
  Chemically Synthesized
QVQLQESGGGLVQAGGSLRLSCAASGNIFISQYMGWYRQAPGKERELVASIANGTTTNYADSVKGRFTISRDNAKNTVYLQMNSLKPEDTAVYYCAVDGSSLSLTRRFMYWGQGTQVTVSS

SEQ ID NO: 25251 - protein, 118 aa, Artificial Sequence
  Chemically Synthesized
QVQLQESGGGLVQAGGSLRLSCAASGNIFIYKSMGWYRQAPGKERELVAGIAGGSTTNYADSVKGRFTISRDNAKNTVYLQMNSLKPEDTAVYYCAVAYAVISYHDYWGQGTQVTVSS

SEQ ID NO: 25252 - protein, 121 aa, Artificial Sequence
  Chemically Synthesized
QVQLQESGGGLVQAGGSLRLSCAASGTISTQGIMGWYRQAPGKEREFVATIDYGSSTYYADSVKGRFTISRDNAKNTVYLQMNSLKPEDTAVYYCAASTLLTTRTRTSLYWGQGTQVTVSS

SEQ ID NO: 25253 - protein, 116 aa, Artificial Sequence
  Chemically Synthesized
QVQLQESGGGLVQAGGSLRLSCAASGNISSVTMGWYRQAPGKERELVAGINAGGTTNYADSVKGRFTISRDNAKNTVYLQMNSLKPEDTAVYYCAAYPYWSNYAYWGQGTQVTVSS

SEQ ID NO: 25254 - protein, 118 aa, Artificial Sequence
  Chemically Synthesized
QVQLQESGGGLVQAGGSLRLSCAASGNIFSWPYMGWYRQAPGKERELVAAIGYGSTTNYADSVKGRFTISRDNAKNTVYLQMNSLKPEDTAVYYCAVYYDYKHVLGYWGQGTQVTVSS

SEQ ID NO: 25255 - protein, 118 aa, Artificial Sequence
  Chemically Synthesized
QVQLQESGGGLVQAGGSLRLSCAASGTISWDPTMGWYRQAPGKEREFVATINYGSITYYADSVKGRFTISRDNAKNTVYLQMNSLKPEDTAVYYCAAYIFLPTYHTYWGQGTQVTVSS

SEQ ID NO: 25256 - protein, 113 aa, Artificial Sequence
  Chemically Synthesized
QVQLQESGGGLVQAGGSLRLSCAASGYIFIDVDMGWYRQAPGKERELVLYADSVKGRFTISRDNAKNTVYLQMNSLKPEDTAVYYCAAHTQYYQYYGYAHGYWGQGTQVTVSS

SEQ ID NO: 25257 - protein, 118 aa, Artificial Sequence
  Chemically Synthesized
QVQLQESGGGLVQAGGSLRLSCAASGYIFSPVGMGWYRQAPGKERELVASITQGANTNYADSVKGRFTISRDNAKNTVYLQMNSLKPEDTAVYYCAVRRRGRRDHLYWGQGTQVTVSS

SEQ ID NO: 25258 - protein, 117 aa, Artificial Sequence
  Chemically Synthesized
QVQLQESGGGLVQAGGSLRLSCAASGTISPDQPMGWYRQAPGKEREFVASIAGGANTNYADSVKGRFTISRDNAKNTVYLQMNSLKPEDTAVYYCAARVFTLAYEYWGQGTQVTVSS

SEQ ID NO: 25259 - protein, 116 aa, Artificial Sequence
  Chemically Synthesized
QVQLQESGGGLVQAGGSLRLSCAASGNISGDSMGWYRQAPGKERELVASIAYGGSTNYADSVKGRFTISRDNAKNTVYLQMNSLKPEDTAVYYCAVYYIESGFRYWGQGTQVTVSS

SEQ ID NO: 25260 - protein, 122 aa, Artificial Sequence
  Chemically Synthesized
QVQLQESGGGLVQAGGSLRLSCAASGTIFGDLDMGWYRQAPGKERELVAGIDPGTSTNYADSVKGRFTISRDNAKNTVYLQMNSLKPEDTAVYYCAAVQYGDRQAGYRYDYWGQGTQVTVSS

SEQ ID NO: 25261 - protein, 126 aa, Artificial Sequence
  Chemically Synthesized
QVQLQESGGGLVQAGGSLRLSCAASGSISSRYRMGWYRQAPGKEREFVATIAEGASTYYADSVKGRFTISRDNAKNTVYLQMNSLKPEDTAVYYCAAYEATLYYGSIYQWYLYDYWGQGTQVTVSS

SEQ ID NO: 25262 - protein, 122 aa, Artificial Sequence
  Chemically Synthesized
QVQLQESGGGLVQAGGSLRLSCAASGTISFLTYMGWYRQAPGKERELVAAINGGGSTNYADSVKGRFTISRDNAKNTVYLQMNSLKPEDTAVYYCAVSLRYYAEIRDSYFYWGQGTQVTVSS

SEQ ID NO: 25263 - protein, 118 aa, Artificial Sequence
  Chemically Synthesized
QVQLQESGGGLVQAGGSLRLSCAASGTISYDRYMGWYRQAPGKERELVATIGYGGITYYADSVKGRFTISRDNAKNTVYLQMNSLKPEDTAVYYCAADRRYAVDLDYWGQGTQVTVSS

SEQ ID NO: 25264 - protein, 127 aa, Artificial Sequence
  Chemically Synthesized
QVQLQESGGGLVQAGGSLRLSCAASGNIFWDGGMGWYRQAPGKERELVAGIAYGSTTNYADSVKGRFTISRDNAKNTVYLQMNSLKPEDTAVYYCAVPVYGWPYDNYGAASYGHEYWGQGTQVTVSS

SEQ ID NO: 25265 - protein, 122 aa, Artificial Sequence
  Chemically Synthesized
QVQLQESGGGLVQAGGSLRLSCAASGNISFQSSMGWYRQAPGKERELVAAISTGSTTNYADSVKGRFTISRDNAKNTVYLQMNSLKPEDTAVYYCAAQTGGSTTSGSTLIYWGQGTQVTVSS

SEQ ID NO: 25266 - protein, 115 aa, Artificial Sequence
  Chemically Synthesized
QVQLQESGGGLVQAGGSLRLSCAASGTISGYFFMGWYRQAPGKERELVLVTVLIPYADSVKGRFTISRDNAKNTVYLQMNSLKPEDTAVYYCAVQGIVYSYHQYWGQGTQVTVSS

SEQ ID NO: 25267 - protein, 118 aa, Artificial Sequence
  Chemically Synthesized
QVQLQESGGGLVQAGGSLRLSCAASGSISYRQQMGWYRQAPGKERELVAAISYGGTTYYADSVKGRFTISRDNAKNTVYLQMNSLKPEDTAVYYCAADFEGGTYHGYWGQGTQVTVSS

SEQ ID NO: 25268 - protein, 126 aa, Artificial Sequence
  Chemically Synthesized
QVQLQESGGGLVQAGGSLRLSCAASGNISTSHWMGWYRQAPGKERELVAGIASGTSTNYADSVKGRFTISRDNAKNTVYLQMNSLKPEDTAVYYCAVYTLYYWWGIAGYYGAHYYWGQGTQVTVSS

SEQ ID NO: 25269 - protein, 115 aa, Artificial Sequence
  Chemically Synthesized
QVQLQESGGGLVQAGGSLRLSCAASGTIFDFNYMGWYRQAPGKERELVAVPYADSVKGRFTISRDNAKNTVYLQMNSLKPEDTAVYYCAALSGGDVNYSYTHTYWGQGTQVTVSS

SEQ ID NO: 25270 - protein, 118 aa, Artificial Sequence
  Chemically Synthesized
QVQLQESGGGLVQAGGSLRLSCAASGSISYSDVMGWYRQAPGKEREFVAAIASGANTNYADSVKGRFTISRDNAKNTVYLQMNSLKPEDTAVYYCAVRVSTYTRLPYWGQGTQVTVSS

SEQ ID NO: 25271 - protein, 117 aa, Artificial Sequence
  Chemically Synthesized
QVQLQESGGGLVQAGGSLRLSCAASGSIFLIDQMGWYRQAPGKERELCQYCFWYYYQYADSVKGRFTISRDNAKNTVYLQMNSLKPEDTAVYYCAAYATPVYDLEYWGQGTQVTVSS

SEQ ID NO: 25272 - protein, 117 aa, Artificial Sequence
  Chemically Synthesized
QVQLQESGGGLVQAGGSLRLSCAASGTIFRYNVMGWYRQAPGKERELVAAITRGANTYYADSVKGRFTISRDNAKNTVYLQMNSLKPEDTAVYYCAVDRWRTSHVYWGQGTQVTVSS

SEQ ID NO: 25273 - protein, 121 aa, Artificial Sequence
  Chemically Synthesized
QVQLQESGGGLVQAGGSLRLSCAASGYISQRLTMGWYRQAPGKERELVASITFGGSSTNYADSVKGRFTISRDNAKNTVYLQMNSLKPEDTAVYYCAYRRRLSGYARHSYWGQGTQVTVSS

SEQ ID NO: 25274 - protein, 112 aa, Artificial Sequence
  Chemically Synthesized
QVQLQESGGGLVQAGGSLRLSCAASGNISRSGMGWYRQAPGKERELVAAIGWGSTTNYADSVKGRFTISRDNAKNTVYLQMNSLKPEDTAVYYCAATLLFYWGQGTQVTVSS

SEQ ID NO: 25275 - protein, 117 aa, Artificial Sequence
  Chemically Synthesized
QVQLQESGGGLVQAGGSLRLSCAASGSILLRSMGWYRQAPGKERELVASINLGTSTNYADSVKGRFTISRDNAKNTVYLQMNSLKPEDTAVYYCAALIDVVFDYHYWGQGTQVTVSS

SEQ ID NO: 25276 - protein, 123 aa, Artificial Sequence
  Chemically Synthesized
QVQLQESGGGLVQAGGSLRLSCAASGTISPNYMGWYRQAPGKERELVAAITPGSNTYYADSVKGRFTISRDNAKNTVYLQMNSLKPEDTAVYYCAVVWSAGRYGGDGGVHRYWGQGTQVTVSS

SEQ ID NO: 25277 - protein, 122 aa, Artificial Sequence
  Chemically Synthesized
QVQLQESGGGLVQAGGSLRLSCAASGYIFGVVFMGWYRQAPGKERELVAAINLGTSTYYADSVKGRFTISRDNAKNTVYLQMNSLKPEDTAVYYCAAYHLPVALVYPYHNYWGQGTQVTVSS

SEQ ID NO: 25278 - protein, 125 aa, Artificial Sequence
  Chemically Synthesized
QVQLQESGGGLVQAGGSLRLSCAASGSIFDRYAMGWYRQAPGKEREFVATITDGASTYYADSVKGRFTISRDNAKNTVYLQMNSLKPEDTAVYYCAADEPLLETTRLVSVTRMYWGQGTQVTVSS

SEQ ID NO: 25279 - protein, 117 aa, Artificial Sequence
  Chemically Synthesized
QVQLQESGGGLVQAGGSLRLSCAASGTIFGLNDMGWYRQAPGKERELVASIAIGANTNYADSVKGRFTISRDNAKNTVYLQMNSLKPEDTAVYYCAAWDKKGYLGYWGQGTQVTVSS

SEQ ID NO: 25280 - protein, 126 aa, Artificial Sequence
  Chemically Synthesized
QVQLQESGGGLVQAGGSLRLSCAASGTISGGYEMGWYRQAPGKERELVATIDYGASTYYADSVKGRFTISRDNAKNTVYLQMNSLKPEDTAVYYCAAQTDEGPHRRKRYGPDHYYWGQGTQVTVSS

SEQ ID NO: 25281 - protein, 121 aa, Artificial Sequence
  Chemically Synthesized
QVQLQESGGGLVQAGGSLRLSCAASGTIFAQADMGWYRQAPGKERELVATISYGGSLYADSVKGRFTISRDNAKNTVYLQMNSLKPEDTAVYYCAVDPVYVRGATTYHYYWGQGTQVTVSS

SEQ ID NO: 25282 - protein, 117 aa, Artificial Sequence
  Chemically Synthesized
QVQLQESGGGLVQAGGSLRLSCAASGYISPTWYMGWYRQAPGKERELVASINSGGSTYYADSVKGRFTISRDNAKNTVYLQMNSLKPEDTAVYYCAVRAIRYPPFYWGQGTQVTVSS

SEQ ID NO: 25283 - protein, 117 aa, Artificial Sequence
  Chemically Synthesized
QVQLQESGGGLVQAGGSLRLSCAASGTISPYTYMGWYRQAPGKEREFVATIAYGGNTYYADSVKGRFTISRDNAKNTVYLQMNSLKPEDTAVYYCAVVTDSLRGIYWGQGTQVTVSS

SEQ ID NO: 25284 - protein, 118 aa, Artificial Sequence
  Chemically Synthesized
QVQLQESGGGLVQAGGSLRLSCAASGSIFGPDFMGWYRQAPGKERELVASIGYGTITNYADSVKGRFTISRDNAKNTVYLQMNSLKPEDTAVYYCAATRYSYGYLQYWGQGTQVTVSS

SEQ ID NO: 25285 - protein, 125 aa, Artificial Sequence
  Chemically Synthesized
QVQLQESGGGLVQAGGSLRLSCAASGTISDRLDMGWYRQAPGKERELLPLLIWVLLPYADSVKGRFTISRDNAKNTVYLQMNSLKPEDTAVYYCAAYYYLYSDNPTYLVVDLDYWGQGTQVTVSS

SEQ ID NO: 25286 - protein, 121 aa, Artificial Sequence
  Chemically Synthesized
QVQLQESGGGLVQAGGSLRLSCAASGNISTVTMGWYRQAPGKEREFVAGIGTGSSTYYADSVKGRFTISRDNAKNTVYLQMNSLKPEDTAVYYCAVVSYYLLDRGDTLAYWGQGTQVTVSS

SEQ ID NO: 25287 - protein, 109 aa, Artificial Sequence
  Chemically Synthesized
QVQLQESGGGLVQAGGSLRLSCAASGTISALDDMGWYRQAPGKEREFVAAINKGGTTNYADSVKGRFTISRDNAKNTVYLQMNSLKPEDTAVYYCAVYWGQGTQVTVSS

SEQ ID NO: 25288 - protein, 118 aa, Artificial Sequence
  Chemically Synthesized
QVQLQESGGGLVQAGGSLRLSCAASGTIFTRVTMGWYRQAPGKERELVAGIAYGGNTNYADSVKGRFTISRDNAKNTVYLQMNSLKPEDTAVYYCAVYRDSTYYLDYWGQGTQVTVSS

SEQ ID NO: 25289 - protein, 118 aa, Artificial Sequence
  Chemically Synthesized
QVQLQESGGGLVQAGGSLRLSCAASGSISPGRYMGWYRQAPGKERELVASIDTGATTNYADSVKGRFTISRDNAKNTVYLQMNSLKPEDTAVYYCAAKPSRNNGYDYWGQGTQVTVSS

SEQ ID NO: 25290 - protein, 123 aa, Artificial Sequence
  Chemically Synthesized
QVQLQESGGGLVQAGGSLRLSCAASGTISGWYYMGWYRQAPGKERELVASIGDGGTTNYADSVKGRFTISRDNAKNTVYLQMNSLKPEDTAVYYCAVHPGVRTRGKTLTTLYWGQGTQVTVSS

SEQ ID NO: 25291 - protein, 121 aa, Artificial Sequence
  Chemically Synthesized
QVQLQESGGGLVQAGGSLRLSCAASGNISADYHMGWYRQAPGKEREFVATITYGGTTNYADSVKGRFTISRDNAKNTVYLQMNSLKPEDTAVYYCAAYARYYADAIDHDYWGQGTQVTVSS

SEQ ID NO: 25292 - protein, 126 aa, Artificial Sequence
  Chemically Synthesized
QVQLQESGGGLVQAGGSLRLSCAASGSIFTTFDMGWYRQAPGKERELVATITLGANTYYADSVKGRFTISRDNAKNTVYLQMNSLKPEDTAVYYCAAKTQFPWWLYHLQQYNYDYWGQGTQVTVSS

SEQ ID NO: 25293 - protein, 121 aa, Artificial Sequence
  Chemically Synthesized
QVQLQESGGGLVQAGGSLRLSCAASGTIFGRSPMGWYRQAPGKERELVALLITVVLPYADSVKGRFTISRDNAKNTVYLQMNSLKPEDTAVYYCAVSHPSYSGYGYVYRYWGQGTQVTVSS

SEQ ID NO: 25294 - protein, 121 aa, Artificial Sequence
  Chemically Synthesized
QVQLQESGGGLVQAGGSLRLSCAASGNIFDQNYMGWYRQAPGKEREFVASISYGIYLYADSVKGRFTISRDNAKNTVYLQMNSLKPEDTAVYYCAVHKGDVTLNYSIHPYWGQGTQVTVSS

SEQ ID NO: 25295 - protein, 118 aa, Artificial Sequence
  Chemically Synthesized
QVQLQESGGGLVQAGGSLRLSCAASGTIFPYYIMGWYRQAPGKEREFVASIAYGGTTNYADSVKGRFTISRDNAKNTVYLQMNSLKPEDTAVYYCAVRSHDLYGYGYWGQGTQVTVSS

SEQ ID NO: 25296 - protein, 119 aa, Artificial Sequence
  Chemically Synthesized
QVQLQESGGGLVQAGGSLRLSCAASGYISKDGMGWYRQAPGKEREFVAAITQGTSTYYADSVKGRFTISRDNAKNTVYLQMNSLKPEDTAVYYCAAYRYWKTSDRHGYWGQGTQVTVSS

SEQ ID NO: 25297 - protein, 122 aa, Artificial Sequence
  Chemically Synthesized
QVQLQESGGGLVQAGGSLRLSCAASGSIFDRPAMGWYRQAPGKERELVAGISWGANTNYADSVKGRFTISRDNAKNTVYLQMNSLKPEDTAVYYCAADRAGDYDDVWWLYYWGQGTQVTVSS

SEQ ID NO: 25298 - protein, 122 aa, Artificial Sequence
  Chemically Synthesized
QVQLQESGGGLVQAGGSLRLSCAASGYIFPLDNMGWYRQAPGKERELVATITPGTTTNYADSVKGRFTISRDNAKNTVYLQMNSLKPEDTAVYYCAVAVSTPHSEDGHLNYWGQGTQVTVSS

SEQ ID NO: 25299 - protein, 117 aa, Artificial Sequence
  Chemically Synthesized
QVQLQESGGGLVQAGGSLRLSCAASGTISPYLWMGWYRQAPGKEREFVATINDGGSTNYADSVKGRFTISRDNAKNTVYLQMNSLKPEDTAVYYCAADLVTVVTFYWGQGTQVTVSS

SEQ ID NO: 25300 - protein, 125 aa, Artificial Sequence
  Chemically Synthesized
QVQLQESGGGLVQAGGSLRLSCAASGTIFYAYMGWYRQAPGKERELVATIADGASTYYADSVKGRFTISRDNAKNTVYLQMNSLKPEDTAVYYCAVDYPVPYSRTGSSIPLYYYWGQGTQVTVSS

SEQ ID NO: 25301 - protein, 118 aa, Artificial Sequence
  Chemically Synthesized
QVQLQESGGGLVQAGGSLRLSCAASGNISYLHGMGWYRQAPGKERELVATISEGGTTNYADSVKGRFTISRDNAKNTVYLQMNSLKPEDTAVYYCAAYLYYGPVLGYWGQGTQVTVSS

SEQ ID NO: 25302 - protein, 117 aa, Artificial Sequence
  Chemically Synthesized
QVQLQESGGGLVQAGGSLRLSCAASGTIFSNYYMGWYRQAPGKERELVAGITTGSTTNYADSVKGRFTISRDNAKNTVYLQMNSLKPEDTAVYYCAAEYQGDDTFYWGQGTQVTVSS

SEQ ID NO: 25303 - protein, 122 aa, Artificial Sequence
  Chemically Synthesized
QVQLQESGGGLVQAGGSLRLSCAASGNISTRTYMGWYRQAPGKEREFVASIDYGGNTYYADSVKGRFTISRDNAKNTVYLQMNSLKPEDTAVYYCAVTPYFGPYWDRDHAYWGQGTQVTVSS

SEQ ID NO: 25304 - protein, 122 aa, Artificial Sequence
  Chemically Synthesized
QVQLQESGGGLVQAGGSLRLSCAASGYISYIPDMGWYRQAPGKERELVATIGYGSTTYYADSVKGRFTISRDNAKNTVYLQMNSLKPEDTAVYYCAVRVTYAVYRPADLYYWGQGTQVTVSS

SEQ ID NO: 25305 - protein, 122 aa, Artificial Sequence
  Chemically Synthesized
QVQLQESGGGLVQAGGSLRLSCAASGSISQHADMGWYRQAPGKERELVASITDGTSTNYADSVKGRFTISRDNAKNTVYLQMNSLKPEDTAVYYCAAQWPWKAPPYPYHFYWGQGTQVTVSS

SEQ ID NO: 25306 - protein, 117 aa, Artificial Sequence
  Chemically Synthesized
QVQLQESGGGLVQAGGSLRLSCAASGYISWYANMGWYRQAPGKEREFVATIAYGANTYYADSVKGRFTISRDNAKNTVYLQMNSLKPEDTAVYYCAAWGLDRTTIYWGQGTQVTVSS

SEQ ID NO: 25307 - protein, 121 aa, Artificial Sequence
  Chemically Synthesized
QVQLQESGGGLVQAGGSLRLSCAASGYISFPDLMGWYRQAPGKERELVASINYGSSTYYADSVKGRFTISRDNAKNTVYLQMNSLKPEDTAVYYCAASRYVIPHDSCRMYWGQGTQVTVSS

SEQ ID NO: 25308 - protein, 117 aa, Artificial Sequence
  Chemically Synthesized
QVQLQESGGGLVQAGGSLRLSCAASGNISTRVWMGWYRQAPGKERELVAGIAQGGTTYYADSVKGRFTISRDNAKNTVYLQMNSLKPEDTAVYYCAAYYQASTVIYWGQGTQVTVSS

SEQ ID NO: 25309 - protein, 118 aa, Artificial Sequence
  Chemically Synthesized
QVQLQESGGGLVQAGGSLRLSCAASGSIFRTLHMGWYRQAPGKERELVATIAYGAITNYADSVKGRFTISRDNAKNTVYLQMNSLKPEDTAVYYCAVAYDITVALNYWGQGTQVTVSS

SEQ ID NO: 25310 - protein, 122 aa, Artificial Sequence
  Chemically Synthesized
QVQLQESGGGLVQAGGSLRLSCAASGTIFFFYTMGWYRQAPGKEREFVAGIGQGTTTYYADSVKGRFTISRDNAKNTVYLQMNSLKPEDTAVYYCAVFTEDDDADHGYLGYWGQGTQVTVSS

SEQ ID NO: 25311 - protein, 126 aa, Artificial Sequence
  Chemically Synthesized
QVQLQESGGGLVQAGGSLRLSCAASGNISDWDVMGWYRQAPGKEREFVASINVGTNTNYADSVKGRFTISRDNAKNTVYLQMNSLKPEDTAVYYCAVTGADKTTDHNEDEYPLLYWGQGTQVTVSS

SEQ ID NO: 25312 - protein, 118 aa, Artificial Sequence
  Chemically Synthesized
QVQLQESGGGLVQAGGSLRLSCAASGYISLGDAMGWYRQAPGKERELVATIDGGTTTYYADSVKGRFTISRDNAKNTVYLQMNSLKPEDTAVYYCAVLARYRTYYVYWGQGTQVTVSS

SEQ ID NO: 25313 - protein, 118 aa, Artificial Sequence
  Chemically Synthesized
QVQLQESGGGLVQAGGSLRLSCAASGTISLDDRMGWYRQAPGKERELVAAIGRGANNQYADSVKGRFTISRDNAKNTVYLQMNSLKPEDTAVYYCAADSDTVGYLSYWGQGTQVTVSS

SEQ ID NO: 25314 - protein, 117 aa, Artificial Sequence
  Chemically Synthesized
QVQLQESGGGLVQAGGSLRLSCAASGTIFYVQLMGWYRQAPGKERELVPVLMTVVVPYADSVKGRFTISRDNAKNTVYLQMNSLKPEDTAVYYCAVYYYYGYFFPYWGQGTQVTVSS

SEQ ID NO: 25315 - protein, 117 aa, Artificial Sequence
  Chemically Synthesized
QVQLQESGGGLVQAGGSLRLSCAASGSIFYDIQMGWYRQAPGKEREFVASISSGTTTYADSVKGRFTISRDNAKNTVYLQMNSLKPEDTAVYYCAARVPYGTDLDYWGQGTQVTVSS

SEQ ID NO: 25316 - protein, 112 aa, Artificial Sequence
  Chemically Synthesized
QVQLQESGGGLVQAGGSLRLSCAASGTIFALPIMGWYRQAPGKERELVASQYADSVKGRFTISRDNAKNTVYLQMNSLKPEDTAVYYCAAYDNDPDQLLGYWGQGTQVTVSS

SEQ ID NO: 25317 - protein, 122 aa, Artificial Sequence
  Chemically Synthesized
QVQLQESGGGLVQAGGSLRLSCAASGSISPGTNMGWYRQAPGKERELVASIAYGGTTYYADSVKGRFTISRDNAKNTVYLQMNSLKPEDTAVYYCAVTGPHYELSPGRLVYWGQGTQVTVSS

SEQ ID NO: 25318 - protein, 117 aa, Artificial Sequence
  Chemically Synthesized
QVQLQESGGGLVQAGGSLRLSCAASGSISPAVYMGWYRQAPGKERELVASIGDGTNTNYADSVKGRFTISRDNAKNTVYLQMNSLKPEDTAVYYCAAASEGYDFYYWGQGTQVTVSS

SEQ ID NO: 25319 - protein, 118 aa, Artificial Sequence
  Chemically Synthesized
QVQLQESGGGLVQAGGSLRLSCAASGSIFLDSAMGWYRQAPGKERELVASIDSGANTYYADSVKGRFTISRDNAKNTVYLQMNSLKPEDTAVYYCAVRGTYLYAYRYWGQGTQVTVSS

SEQ ID NO: 25320 - protein, 126 aa, Artificial Sequence
  Chemically Synthesized
QVQLQESGGGLVQAGGSLRLSCAASGNIFWYDLMGWYRQAPGKEREFVAAIGRGASTNYADSVKGRFTISRDNAKNTVYLQMNSLKPEDTAVYYCAVQWYDWDYVTLGFDGEYWYWGQGTQVTVSS

SEQ ID NO: 25321 - protein, 119 aa, Artificial Sequence
  Chemically Synthesized
QVQLQESGGGLVQAGGSLRLSCAASGNISRWTMGWYRQAPGKERELVASIDHGATTNYADSVKGRFTISRDNAKNTVYLQMNSLKPEDTAVYYCAADEAYYVAPYHVYWGQGTQVTVSS

SEQ ID NO: 25322 - protein, 122 aa, Artificial Sequence
  Chemically Synthesized
QVQLQESGGGLVQAGGSLRLSCAASGTIFDIYYMGWYRQAPGKEREFVATITGGTNTNYADSVKGRFTISRDNAKNTVYLQMNSLKPEDTAVYYCAADIIKPELFHEPFTYWGQGTQVTVSS

SEQ ID NO: 25323 - protein, 115 aa, Artificial Sequence
  Chemically Synthesized
QVQLQESGGGLVQAGGSLRLSCAASGNISPTHHMGWYRQAPGKEREFVATIDYGTSTYYADSVKGRFTISRDNAKNTVYLQMNSLKPEDTAVYYCAYDVLYYYYWGQGTQVTVSS

SEQ ID NO: 25324 - protein, 117 aa, Artificial Sequence
  Chemically Synthesized
QVQLQESGGGLVQAGGSLRLSCAASGSIFWGSSMGWYRQAPGKERELVASIAHGASTYYADSVKGRFTISRDNAKNTVYLQMNSLKPEDTAVYYCAVGYSVVCGMYWGQGTQVTVSS

SEQ ID NO: 25325 - protein, 121 aa, Artificial Sequence
  Chemically Synthesized
QVQLQESGGGLVQAGGSLRLSCAASGSIFRILYMGWYRQAPGKERELVASIDPGSITYYADSVKGRFTISRDNAKNTVYLQMNSLKPEDTAVYYCAVGGYRYTPKRGHPYWGQGTQVTVSS

SEQ ID NO: 25326 - protein, 118 aa, Artificial Sequence
  Chemically Synthesized
QVQLQESGGGLVQAGGSLRLSCAASGTISPAYGMGWYRQAPGKEREFVASINLGANTNYADSVKGRFTISRDNAKNTVYLQMNSLKPEDTAVYYCAVSPAESGAYPYWGQGTQVTVSS

SEQ ID NO: 25327 - protein, 118 aa, Artificial Sequence
  Chemically Synthesized
QVQLQESGGGLVQAGGSLRLSCAASGYISPYRGMGWYRQAPGKEREFVATIGYGTNTYYADSVKGRFTISRDNAKNTVYLQMNSLKPEDTAVYYCAAATRQRYRHPYWGQGTQVTVSS

SEQ ID NO: 25328 - protein, 121 aa, Artificial Sequence
  Chemically Synthesized
QVQLQESGGGLVQAGGSLRLSCAASGYISSTTMGWYRQAPGKEREFVAAISDGANTNYADSVKGRFTISRDNAKNTVYLQMNSLKPEDTAVYYCAVDYGDTTTTGSRLRYWGQGTQVTVSS

SEQ ID NO: 25329 - protein, 118 aa, Artificial Sequence
  Chemically Synthesized
QVQLQESGGGLVQAGGSLRLSCAASGNIFYTRYMGWYRQAPGKERELVAAIGTGGTTYYADSVKGRFTISRDNAKNTVYLQMNSLKPEDTAVYYCAARYQSTYRFDYWGQGTQVTVSS

SEQ ID NO: 25330 - protein, 122 aa, Artificial Sequence
  Chemically Synthesized
QVQLQESGGGLVQAGGSLRLSCAASGTISSRDPMGWYRQAPGKERELVAGIGYGGNYLYADSVKGRFTISRDNAKNTVYLQMNSLKPEDTAVYYCAAIGRDSVASIVGHAYWGQGTQVTVSS

SEQ ID NO: 25331 - protein, 121 aa, Artificial Sequence
  Chemically Synthesized
QVQLQESGGGLVQAGGSLRLSCAASGNISIWDYMGWYRQAPGKEREFVAAILTVVLPYADSVKGRFTISRDNAKNTVYLQMNSLKPEDTAVYYCAALGDAPYSDWGWHDYWGQGTQVTVSS

SEQ ID NO: 25332 - protein, 122 aa, Artificial Sequence
  Chemically Synthesized
QVQLQESGGGLVQAGGSLRLSCAASGSISYRHAMGWYRQAPGKEREFVAAIATGGSTYYADSVKGRFTISRDNAKNTVYLQMNSLKPEDTAVYYCAAGYVSYRYTAWQLYYWGQGTQVTVSS

SEQ ID NO: 25333 - protein, 122 aa, Artificial Sequence
  Chemically Synthesized
QVQLQESGGGLVQAGGSLRLSCAASGNISLLQYMGWYRQAPGKEREFVASIAYGGITYYADSVKGRFTISRDNAKNTVYLQMNSLKPEDTAVYYCAVGLQYHADYAHLLAYWGQGTQVTVSS

SEQ ID NO: 25334 - protein, 122 aa, Artificial Sequence
  Chemically Synthesized
QVQLQESGGGLVQAGGSLRLSCAASGTIFNYNVMGWYRQAPGKERELVAGIDYGGITNYADSVKGRFTISRDNAKNTVYLQMNSLKPEDTAVYYCAAPRGAGTQYDDNHLYWGQGTQVTVSS

SEQ ID NO: 25335 - protein, 118 aa, Artificial Sequence
  Chemically Synthesized
QVQLQESGGGLVQAGGSLRLSCAASGYIFRYETMGWYRQAPGKEREFVASIDYGSTTNYADSVKGRFTISRDNAKNTVYLQMNSLKPEDTAVYYCAVFISTYAVHSYWGQGTQVTVSS

SEQ ID NO: 25336 - protein, 124 aa, Artificial Sequence
  Chemically Synthesized
QVQLQESGGGLVQAGGSLRLSCAASGYISATYYMGWYRQAPGKERELVATIAGGSTNYADSVKGRFTISRDNAKNTVYLQMNSLKPEDTAVYYCAAFSNTTTTCTRGVRRSWYWGQGTQVTVSS

SEQ ID NO: 25337 - protein, 118 aa, Artificial Sequence
  Chemically Synthesized
QVQLQESGGGLVQAGGSLRLSCAASGSIFVLAAMGWYRQAPGKERELVASIAYGASTYYADSVKGRFTISRDNAKNTVYLQMNSLKPEDTAVYYCAAWVEGSEDHWYWGQGTQVTVSS

SEQ ID NO: 25338 - protein, 126 aa, Artificial Sequence
  Chemically Synthesized
QVQLQESGGGLVQAGGSLRLSCAASGSISYFYNMGWYRQAPGKERELVAAISQGTSTNYADSVKGRFTISRDNAKNTVYLQMNSLKPEDTAVYYCAADAVTYYELTPSPVPDFLYWGQGTQVTVSS

SEQ ID NO: 25339 - protein, 118 aa, Artificial Sequence
  Chemically Synthesized
QVQLQESGGGLVQAGGSLRLSCAASGTIFSYTVMGWYRQAPGKERELVASIDIGGNTYYADSVKGRFTISRDNAKNTVYLQMNSLKPEDTAVYYCAADVVSGSYHAYWGQGTQVTVSS

SEQ ID NO: 25340 - protein, 120 aa, Artificial Sequence
  Chemically Synthesized
QVQLQESGGGLVQAGGSLRLSCAASGYLTVLMGWYRQAPGKERELVAGISRGSNTNYADSVKGRFTISRDNAKNTVYLQMNSLKPEDTAVYYCAVWLGRDTPDNDYYYYWGQGTQVTVSS

SEQ ID NO: 25341 - protein, 118 aa, Artificial Sequence
  Chemically Synthesized
QVQLQESGGGLVQAGGSLRLSCAASGSISYSYNMGWYRQAPGKERELVATIDFGGYYLYADSVKGRFTISRDNAKNTVYLQMNSLKPEDTAVYYCAVAGLATRLHDYWGQGTQVTVSS

SEQ ID NO: 25342 - protein, 118 aa, Artificial Sequence
  Chemically Synthesized
QVQLQESGGGLVQAGGSLRLSCAASGNISQGYVMGWYRQAPGKERELVAGIANGGSTNYADSVKGRFTISRDNAKNTVYLQMNSLKPEDTAVYYCAAWGWDRDWYDYWGQGTQVTVSS

SEQ ID NO: 25343 - protein, 118 aa, Artificial Sequence
  Chemically Synthesized
QVQLQESGGGLVQAGGSLRLSCAASGSISDSTYMGWYRQAPGKERELVATIAGGTSTNYADSVKGRFTISRDNAKNTVYLQMNSLKPEDTAVYYCAATLGVLEDHHYWGQGTQVTVSS

SEQ ID NO: 25344 - protein, 121 aa, Artificial Sequence
  Chemically Synthesized
QVQLQESGGGLVQAGGSLRLSCAASGTIFRWPYMGWYRQAPGKEREFVAGITDGSITNYADSVKGRFTISRDNAKNTVYLQMNSLKPEDTAVYYCAADYDTTTSVTVVMYWGQGTQVTVSS

SEQ ID NO: 25345 - protein, 125 aa, Artificial Sequence
  Chemically Synthesized
QVQLQESGGGLVQAGGSLRLSCAASGTIFADFVMGWYRQAPGKERELVASISSVLLPYADSVKGRFTISRDNAKNTVYLQMNSLKPEDTAVYYCAANGHQKYNLDGDPKYRFSYWGQGTQVTVSS

SEQ ID NO: 25346 - protein, 118 aa, Artificial Sequence
  Chemically Synthesized
QVQLQESGGGLVQAGGSLRLSCAASGSIFGVPYMGWYRQAPGKERELVAAISGGAITYYADSVKGRFTISRDNAKNTVYLQMNSLKPEDTAVYYCAVDDEDNTYHYYWGQGTQVTVSS

SEQ ID NO: 25347 - protein, 118 aa, Artificial Sequence
  Chemically Synthesized
QVQLQESGGGLVQAGGSLRLSCAASGSIFRGSAMGWYRQAPGKERELVATISRGAITNYADSVKGRFTISRDNAKNTVYLQMNSLKPEDTAVYYCAVKYGDYYALAYWGQGTQVTVSS

SEQ ID NO: 25348 - protein, 122 aa, Artificial Sequence
  Chemically Synthesized
QVQLQESGGGLVQAGGSLRLSCAASGSIFDSYVMGWYRQAPGKERELVASIGVGTSTNYADSVKGRFTISRDNAKNTVYLQMNSLKPEDTAVYYCAVNYIDSYTAPGIYGYWGQGTQVTVSS

SEQ ID NO: 25349 - protein, 118 aa, Artificial Sequence
  Chemically Synthesized
QVQLQESGGGLVQAGGSLRLSCAASGTISYRPDMGWYRQAPGKERELVAGINLGAITNYADSVKGRFTISRDNAKNTVYLQMNSLKPEDTAVYYCAAYYYDRTAFPYWGQGTQVTVSS

SEQ ID NO: 25350 - protein, 125 aa, Artificial Sequence
  Chemically Synthesized
QVQLQESGGGLVQAGGSLRLSCAASGTIFLLFMGWYRQAPGKERELVASIADGTTTYYADSVKGRFTISRDNAKNTVYLQMNSLKPEDTAVYYCAVPGRASTGVYYDGDSWHDYWGQGTQVTVSS

SEQ ID NO: 25351 - protein, 122 aa, Artificial Sequence
  Chemically Synthesized
QVQLQESGGGLVQAGGSLRLSCAASGYISYVLDMGWYRQAPGKEREFVAAIGDGTITYYADSVKGRFTISRDNAKNTVYLQMNSLKPEDTAVYYCAVAYYGSADLYAGLSYWGQGTQVTVSS

SEQ ID NO: 25352 - protein, 118 aa, Artificial Sequence
  Chemically Synthesized
QVQLQESGGGLVQAGGSLRLSCAASGSISRGYQMGWYRQAPGKERELVAAIDSGSSTYYADSVKGRFTISRDNAKNTVYLQMNSLKPEDTAVYYCAALNSTWAPFTYWGQGTQVTVSS

SEQ ID NO: 25353 - protein, 117 aa, Artificial Sequence
  Chemically Synthesized
QVQLQESGGGLVQAGGSLRLSCAASGYISYFSMGWYRQAPGKERELVAAIGTGTTTNYADSVKGRFTISRDNAKNTVYLQMNSLKPEDTAVYYCAVDKADDGYLPYWGQGTQVTVSS

SEQ ID NO: 25354 - protein, 121 aa, Artificial Sequence
  Chemically Synthesized
QVQLQESGGGLVQAGGSLRLSCAASGSISRDWVMGWYRQAPGKERELVATINEVVLPYADSVKGRFTISRDNAKNTVYLQMNSLKPEDTAVYYCAAGIANYGAGYRDYAYWGQGTQVTVSS

SEQ ID NO: 25355 - protein, 121 aa, Artificial Sequence
  Chemically Synthesized
QVQLQESGGGLVQAGGSLRLSCAASGSISATEYMGWYRQAPGKERELVATISDGTSTYYADSVKGRFTISRDNAKNTVYLQMNSLKPEDTAVYYCAAGGRWYYYVADDYYWGQGTQVTVSS

SEQ ID NO: 25356 - protein, 126 aa, Artificial Sequence
  Chemically Synthesized
QVQLQESGGGLVQAGGSLRLSCAASGNISWWRRMGWYRQAPGKEREFVASITAGSTTYYADSVKGRFTISRDNAKNTVYLQMNSLKPEDTAVYYCAVVSEDRYGPADGSGPILDYWGQGTQVTVSS

SEQ ID NO: 25357 - protein, 126 aa, Artificial Sequence
  Chemically Synthesized
QVQLQESGGGLVQAGGSLRLSCAASGYISRDYAMGWYRQAPGKEREFVATIGPGSITYYADSVKGRFTISRDNAKNTVYLQMNSLKPEDTAVYYCAVLPRITKDWSNYPSWYFGYWGQGTQVTVSS

SEQ ID NO: 25358 - protein, 126 aa, Artificial Sequence
  Chemically Synthesized
QVQLQESGGGLVQAGGSLRLSCAASGSIFGHSSMGWYRQAPGKEREFVAGIAFGANTNYADSVKGRFTISRDNAKNTVYLQMNSLKPEDTAVYYCAVSDDYAYSYLYAGYVRHGYWGQGTQVTVSS

SEQ ID NO: 25359 - protein, 121 aa, Artificial Sequence
  Chemically Synthesized
QVQLQESGGGLVQAGGSLRLSCAASGSIFPDTSMGWYRQAPGKERELVASIAVGGNTNYADSVKGRFTISRDNAKNTVYLQMNSLKPEDTAVYYCAAYELRTWTIASVFYWGQGTQVTVSS

SEQ ID NO: 25360 - protein, 116 aa, Artificial Sequence
  Chemically Synthesized
QVQLQESGGGLVQAGGSLRLSCAASGNIFSRDTMGWYRQAPGKEREFVAGINSGANTYYADSVKGRFTISRDNAKNTVYLQMNSLKPEDTAVYYCAVSTTTTTIYWGQGTQVTVSS

SEQ ID NO: 25361 - protein, 122 aa, Artificial Sequence
  Chemically Synthesized
QVQLQESGGGLVQAGGSLRLSCAASGTISADNLMGWYRQAPGKERELVAGIGVGSTTYYADSVKGRFTISRDNAKNTVYLQMNSLKPEDTAVYYCAVPLTHHDDIPDGHVYWGQGTQVTVSS

SEQ ID NO: 25362 - protein, 122 aa, Artificial Sequence
  Chemically Synthesized
QVQLQESGGGLVQAGGSLRLSCAASGTISQSDRMGWYRQAPGKEREFVATIDYGATTNYADSVKGRFTISRDNAKNTVYLQMNSLKPEDTAVYYCAASDVGTDKSINTHFYWGQGTQVTVSS

SEQ ID NO: 25363 - protein, 118 aa, Artificial Sequence
  Chemically Synthesized
QVQLQESGGGLVQAGGSLRLSCAASGSIFSYYDMGWYRQAPGKERELVATINSGTSTNYADSVKGRFTISRDNAKNTVYLQMNSLKPEDTAVYYCAAHFTISDLHTYWGQGTQVTVSS

SEQ ID NO: 25364 - protein, 118 aa, Artificial Sequence
  Chemically Synthesized
QVQLQESGGGLVQAGGSLRLSCAASGNIFKRRRMGWYRQAPGKERELVAGIGWGGTTYYADSVKGRFTISRDNAKNTVYLQMNSLKPEDTAVYYCAAWRYDDRHHWYWGQGTQVTVSS

SEQ ID NO: 25365 - protein, 118 aa, Artificial Sequence
  Chemically Synthesized
QVQLQESGGGLVQAGGSLRLSCAASGTISLVHAMGWYRQAPGKERELVATIDPGSITNYADSVKGRFTISRDNAKNTVYLQMNSLKPEDTAVYYCAAAIGRPNRLLYWGQGTQVTVSS

SEQ ID NO: 25366 - protein, 111 aa, Artificial Sequence
  Chemically Synthesized
QVQLQESGGGLVQAGGSLRLSCAASGSISIPPYMGWYRQAPGKEREFVAAIAQGGITYYADSVKGRFTISRDNAKNTVYLQMNSLKPEDTAVYYCANLYYWGQGTQVTVSS

SEQ ID NO: 25367 - protein, 112 aa, Artificial Sequence
  Chemically Synthesized
QVQLQESGGGLVQAGGSLRLSCAASGSISQITAMGWYRQAPGKEREFVASIDGGASTNYADSVKGRFTISRDNAKNTVYLQMNSLKPEDTAVYYCAANLPYWGQGTQVTVSS

SEQ ID NO: 25368 - protein, 118 aa, Artificial Sequence
  Chemically Synthesized
QVQLQESGGGLVQAGGSLRLSCAASGTISHHSAMGWYRQAPGKERELVAAIAGGASTNYADSVKGRFTISRDNAKNTVYLQMNSLKPEDTAVYYCAVIDRQYLGLDYWGQGTQVTVSS

SEQ ID NO: 25369 - protein, 118 aa, Artificial Sequence
  Chemically Synthesized
QVQLQESGGGLVQAGGSLRLSCAASGYIFYTDEMGWYRQAPGKEREFVATIDSGGITYYADSVKGRFTISRDNAKNTVYLQMNSLKPEDTAVYYCAVDANYGPQYQYWGQGTQVTVSS

SEQ ID NO: 25370 - protein, 118 aa, Artificial Sequence
  Chemically Synthesized
QVQLQESGGGLVQAGGSLRLSCAASGSIFPRYAMGWYRQAPGKEREFVAGINYGGTTNYADSVKGRFTISRDNAKNTVYLQMNSLKPEDTAVYYCAAAYIGDYLYYYWGQGTQVTVSS

SEQ ID NO: 25371 - protein, 122 aa, Artificial Sequence
  Chemically Synthesized
QVQLQESGGGLVQAGGSLRLSCAASGNISGQDAMGWYRQAPGKERELVATIGIGASTYYADSVKGRFTISRDNAKNTVYLQMNSLKPEDTAVYYCAVSVYRAADTYSDLHYWGQGTQVTVSS

SEQ ID NO: 25372 - protein, 119 aa, Artificial Sequence
  Chemically Synthesized
QVQLQESGGGLVQAGGSLRLSCAASGSISAITAMGWYRQAPGKEREFVASIGGGSTTYYADSVKGRFTISRDNAKNTVYLQMNSLKPEDTAVYYCAADTALVLRDDRYWGQGTQVTVSS

SEQ ID NO: 25373 - protein, 118 aa, Artificial Sequence
  Chemically Synthesized
QVQLQESGGGLVQAGGSLRLSCAASGTISGSGSMGWYRQAPGKEREFVAGIATGAITNYADSVKGRFTISRDNAKNTVYLQMNSLKPEDTAVYYCAADPYAYWTHRYWGQGTQVTVSS

SEQ ID NO: 25374 - protein, 125 aa, Artificial Sequence
  Chemically Synthesized
QVQLQESGGGLVQAGGSLRLSCAASGTIFYLVQMGWYRQAPGKERELVAGITVGSSTYYADSVKGRFTISRDNAKNTVYLQMNSLKPEDTAVYYCAATWTDAYLYAVDDYGHYYWGQGTQVTVSS

SEQ ID NO: 25375 - protein, 122 aa, Artificial Sequence
  Chemically Synthesized
QVQLQESGGGLVQAGGSLRLSCAASGTIFYGLYMGWYRQAPGKERELVAAITSGGITYYADSVKGRFTISRDNAKNTVYLQMNSLKPEDTAVYYCAVTWDTTWPVYYGHDYWGQGTQVTVSS

SEQ ID NO: 25376 - protein, 118 aa, Artificial Sequence
  Chemically Synthesized
QVQLQESGGGLVQAGGSLRLSCAASGTIFPFYTMGWYRQAPGKERELVAGISDGSSTYYADSVKGRFTISRDNAKNTVYLQMNSLKPEDTAVYYCAVSTPLYTSHSYWGQGTQVTVSS

SEQ ID NO: 25377 - protein, 117 aa, Artificial Sequence
  Chemically Synthesized
QVQLQESGGGLVQAGGSLRLSCAASGSISNNYSMGWYRQAPGKERELVASINRGATTNYADSVKGRFTISRDNAKNTVYLQMNSLKPEDTAVYYCAVPYISLVLMYWGQGTQVTVSS

SEQ ID NO: 25378 - protein, 121 aa, Artificial Sequence
  Chemically Synthesized
QVQLQESGGGLVQAGGSLRLSCAASGYISINDNMGWYRQAPGKERELVASISSVLVPYADSVKGRFTISRDNAKNTVYLQMNSLKPEDTAVYYCAATDRYDDPDDEIHEYWGQGTQVTVSS

SEQ ID NO: 25379 - protein, 118 aa, Artificial Sequence
  Chemically Synthesized
QVQLQESGGGLVQAGGSLRLSCAASGSISPYYRMGWYRQAPGKERELVAAIDYGASTYYADSVKGRFTISRDNAKNTVYLQMNSLKPEDTAVYYCAASTQVATPHYYWGQGTQVTVSS

SEQ ID NO: 25380 - protein, 122 aa, Artificial Sequence
  Chemically Synthesized
QVQLQESGGGLVQAGGSLRLSCAASGNISAVRYMGWYRQAPGKERELVAAINLGANTYYADSVKGRFTISRDNAKNTVYLQMNSLKPEDTAVYYCAVYTAPVYLGSHPHQYWGQGTQVTVSS

SEQ ID NO: 25381 - protein, 118 aa, Artificial Sequence
  Chemically Synthesized
QVQLQESGGGLVQAGGSLRLSCAASGYIFSPRAMGWYRQAPGKERELVAAINGGSNTNYADSVKGRFTISRDNAKNTVYLQMNSLKPEDTAVYYCAAAIDRNHVFDYWGQGTQVTVSS

SEQ ID NO: 25382 - protein, 118 aa, Artificial Sequence
  Chemically Synthesized
QVQLQESGGGLVQAGGSLRLSCAASGSIFRDSAMGWYRQAPGKERELVAAISVGGTTYYADSVKGRFTISRDNAKNTVYLQMNSLKPEDTAVYYCAVSNIYTHRYPYWGQGTQVTVSS

SEQ ID NO: 25383 - protein, 117 aa, Artificial Sequence
  Chemically Synthesized
QVQLQESGGGLVQAGGSLRLSCAASGYISDDVYMGWYRQAPGKERELLPLLLLVVLPYADSVKGRFTISRDNAKNTVYLQMNSLKPEDTAVYYCAANYTHNYGFAYWGQGTQVTVSS

SEQ ID NO: 25384 - protein, 118 aa, Artificial Sequence
  Chemically Synthesized
QVQLQESGGGLVQAGGSLRLSCAASGNISYVGSMGWYRQAPGKERELVASINQGASTYYADSVKGRFTISRDNAKNTVYLQMNSLKPEDTAVYYCAAQPYPYYVHDYWGQGTQVTVSS

SEQ ID NO: 25385 - protein, 117 aa, Artificial Sequence
  Chemically Synthesized
QVQLQESGGGLVQAGGSLRLSCAASGTIFRGYTMGWYRQAPGKERELVASIAAGASTNYADSVKGRFTISRDNAKNTVYLQMNSLKPEDTAVYYCAVPEVKQRSFYWGQGTQVTVSS

SEQ ID NO: 25386 - protein, 118 aa, Artificial Sequence
  Chemically Synthesized
QVQLQESGGGLVQAGGSLRLSCAASGNISRYTAMGWYRQAPGKEREFVAAIGRGGSTYYADSVKGRFTISRDNAKNTVYLQMNSLKPEDTAVYYCAADYAHNSPHHYWGQGTQVTVSS

SEQ ID NO: 25387 - protein, 118 aa, Artificial Sequence
  Chemically Synthesized
QVQLQESGGGLVQAGGSLRLSCAASGSIFLPYYMGWYRQAPGKEREFVATIGQGGSTNYADSVKGRFTISRDNAKNTVYLQMNSLKPEDTAVYYCAVVPYAYGLLEYWGQGTQVTVSS

SEQ ID NO: 25388 - protein, 126 aa, Artificial Sequence
  Chemically Synthesized
QVQLQESGGGLVQAGGSLRLSCAASGSISAQTVMGWYRQAPGKERELVASISDGASTNYADSVKGRFTISRDNAKNTVYLQMNSLKPEDTAVYYCAVSGDYNGIYDSLAALGFVYWGQGTQVTVSS

SEQ ID NO: 25389 - protein, 118 aa, Artificial Sequence
  Chemically Synthesized
QVQLQESGGGLVQAGGSLRLSCAASGTIFNYSGMGWYRQAPGKERELVAGINGGTNTNYADSVKGRFTISRDNAKNTVYLQMNSLKPEDTAVYYCAVSGERVYPHVYWGQGTQVTVSS

SEQ ID NO: 25390 - protein, 111 aa, Artificial Sequence
  Chemically Synthesized
QVQLQESGGGLVQAGGSLRLSCAASGYISYVIYMGWYRQAPGKERELVLVPYADSVKGRFTISRDNAKNTVYLQMNSLKPEDTAVYYCAARADDRPVHGYWGQGTQVTVSS

SEQ ID NO: 25391 - protein, 121 aa, Artificial Sequence
  Chemically Synthesized
QVQLQESGGGLVQAGGSLRLSCAASGYIYPVLMGWYRQAPGKERELVAGISAGANTYYADSVKGRFTISRDNAKNTVYLQMNSLKPEDTAVYYCAAAIVTGNVLYPRFDYWGQGTQVTVSS

SEQ ID NO: 25392 - protein, 118 aa, Artificial Sequence
  Chemically Synthesized
QVQLQESGGGLVQAGGSLRLSCAASGSIFPTRYMGWYRQAPGKEREFVAAIGRGTSTNYADSVKGRFTISRDNAKNTVYLQMNSLKPEDTAVYYCAAAQRNYAGHAYWGQGTQVTVSS

SEQ ID NO: 25393 - protein, 117 aa, Artificial Sequence
  Chemically Synthesized
QVQLQESGGGLVQAGGSLRLSCAASGSISKAYPMGWYRQAPGKEREFVASIGYGASTNYADSVKGRFTISRDNAKNTVYLQMNSLKPEDTAVYYCAAGANGVLLIYWGQGTQVTVSS

SEQ ID NO: 25394 - protein, 117 aa, Artificial Sequence
  Chemically Synthesized
QVQLQESGGGLVQAGGSLRLSCAASGYISGWYRMGWYRQAPGKERELVAAINWVLLPYADSVKGRFTISRDNAKNTVYLQMNSLKPEDTAVYYCAAWQRTAVYYVYWGQGTQVTVSS

SEQ ID NO: 25395 - protein, 110 aa, Artificial Sequence
  Chemically Synthesized
QVQLQESGGGLVQAGGSLRLSCAASGNIFYWPTMGWYRQAPGKERELVAGIAVGTITNYADSVKGRFTISRDNAKNTVYLQMNSLKPEDTAVYYCAAPYWGQGTQVTVSS

SEQ ID NO: 25396 - protein, 126 aa, Artificial Sequence
  Chemically Synthesized
QVQLQESGGGLVQAGGSLRLSCAASGSISGHPDMGWYRQAPGKERELVAAISDGGSTYYADSVKGRFTISRDNAKNTVYLQMNSLKPEDTAVYYCAVRRIYVLDYDDLTAGTLLYWGQGTQVTVSS

SEQ ID NO: 25397 - protein, 117 aa, Artificial Sequence
  Chemically Synthesized
QVQLQESGGGLVQAGGSLRLSCAASGNIFCTTMGWYRQAPGKERELVAAIGRGSNTNYADSVKGRFTISRDNAKNTVYLQMNSLKPEDTAVYYCAADGQDYGIYYYWGQGTQVTVSS

SEQ ID NO: 25398 - protein, 118 aa, Artificial Sequence
  Chemically Synthesized
QVQLQESGGGLVQAGGSLRLSCAASGYISTTYYMGWYRQAPGKEREFVASIDWGTITNYADSVKGRFTISRDNAKNTVYLQMNSLKPEDTAVYYCAVYYYGNTYHRYWGQGTQVTVSS

SEQ ID NO: 25399 - protein, 118 aa, Artificial Sequence
  Chemically Synthesized
QVQLQESGGGLVQAGGSLRLSCAASGTISLLTTMGWYRQAPGKERELVAGIGGGANTYYADSVKGRFTISRDNAKNTVYLQMNSLKPEDTAVYYCAAGDLIYNTFDYWGQGTQVTVSS

SEQ ID NO: 25400 - protein, 122 aa, Artificial Sequence
  Chemically Synthesized
QVQLQESGGGLVQAGGSLRLSCAASGTIFGDVYMGWYRQAPGKEREFVAAITNGGSTYYADSVKGRFTISRDNAKNTVYLQMNSLKPEDTAVYYCAVTAYTGQDSNLDHGYWGQGTQVTVSS

SEQ ID NO: 25401 - protein, 118 aa, Artificial Sequence
  Chemically Synthesized
QVQLQESGGGLVQAGGSLRLSCAASGTISAPATMGWYRQAPGKEREFVAGITDGAITYYADSVKGRFTISRDNAKNTVYLQMNSLKPEDTAVYYCAAVDIVRDSHAYWGQGTQVTVSS

SEQ ID NO: 25402 - protein, 118 aa, Artificial Sequence
  Chemically Synthesized
QVQLQESGGGLVQAGGSLRLSCAASGNISVVVTMGWYRQAPGKERELVASIATGGSTYYADSVKGRFTISRDNAKNTVYLQMNSLKPEDTAVYYCAARDRYSLELRYWGQGTQVTVSS

SEQ ID NO: 25403 - protein, 118 aa, Artificial Sequence
  Chemically Synthesized
QVQLQESGGGLVQAGGSLRLSCAASGTISYGRYMGWYRQAPGKERELVATIGGGTTTNYADSVKGRFTISRDNAKNTVYLQMNSLKPEDTAVYYCAAGAPTDPLYGYWGQGTQVTVSS

SEQ ID NO: 25404 - protein, 118 aa, Artificial Sequence
  Chemically Synthesized
QVQLQESGGGLVQAGGSLRLSCAASGNISGVELMGWYRQAPGKERELVAAIAQGASTNYADSVKGRFTISRDNAKNTVYLQMNSLKPEDTAVYYCAARDYWYDQFAYWGQGTQVTVSS

SEQ ID NO: 25405 - protein, 122 aa, Artificial Sequence
  Chemically Synthesized
QVQLQESGGGLVQAGGSLRLSCAASGNISPYYTMGWYRQAPGKERELVASIAWGGNTYYADSVKGRFTISRDNAKNTVYLQMNSLKPEDTAVYYCAAEDYGGVDNARYYRYWGQGTQVTVSS

SEQ ID NO: 25406 - protein, 118 aa, Artificial Sequence
  Chemically Synthesized
QVQLQESGGGLVQAGGSLRLSCAASGNIFIPGEMGWYRQAPGKERELVASIGTGANTNYADSVKGRFTISRDNAKNTVYLQMNSLKPEDTAVYYCAAEYNDRYRYGYWGQGTQVTVSS

SEQ ID NO: 25407 - protein, 118 aa, Artificial Sequence
  Chemically Synthesized
QVQLQESGGGLVQAGGSLRLSCAASGYIFRHLYMGWYRQAPGKERELVAAISYGSITYYADSVKGRFTISRDNAKNTVYLQMNSLKPEDTAVYYCAVWEYYSSAFGYWGQGTQVTVSS

SEQ ID NO: 25408 - protein, 118 aa, Artificial Sequence
  Chemically Synthesized
QVQLQESGGGLVQAGGSLRLSCAASGSISYNYAMGWYRQAPGKERELVAAITYGSTTYYADSVKGRFTISRDNAKNTVYLQMNSLKPEDTAVYYCAVEIYYDPYFLYWGQGTQVTVSS

SEQ ID NO: 25409 - protein, 118 aa, Artificial Sequence
  Chemically Synthesized
QVQLQESGGGLVQAGGSLRLSCAASGSIFVDVDMGWYRQAPGKEREFVATISVGTSTYYADSVKGRFTISRDNAKNTVYLQMNSLKPEDTAVYYCAANEGYKSYFAYWGQGTQVTVSS

SEQ ID NO: 25410 - protein, 118 aa, Artificial Sequence
  Chemically Synthesized
QVQLQESGGGLVQAGGSLRLSCAASGSIFDSENMGWYRQAPGKEREFVATIDLGTITNYADSVKGRFTISRDNAKNTVYLQMNSLKPEDTAVYYCAVYVRRDPPLYYWGQGTQVTVSS

SEQ ID NO: 25411 - protein, 118 aa, Artificial Sequence
  Chemically Synthesized
QVQLQESGGGLVQAGGSLRLSCAASGNIFPFRYMGWYRQAPGKERELVATISFGGITYYADSVKGRFTISRDNAKNTVYLQMNSLKPEDTAVYYCAAWFPAYRSHDYWGQGTQVTVSS

SEQ ID NO: 25412 - protein, 122 aa, Artificial Sequence
  Chemically Synthesized
QVQLQESGGGLVQAGGSLRLSCAASGNIFQGVYMGWYRQAPGKEREFVAAISVGTSTNYADSVKGRFTISRDNAKNTVYLQMNSLKPEDTAVYYCAADLRGRRALQPKHYYWGQGTQVTVSS

SEQ ID NO: 25413 - protein, 118 aa, Artificial Sequence
  Chemically Synthesized
QVQLQESGGGLVQAGGSLRLSCAASGYISTPDEMGWYRQAPGKEREFVASIADGANTYYADSVKGRFTISRDNAKNTVYLQMNSLKPEDTAVYYCAAAYDSSSDLGYWGQGTQVTVSS

SEQ ID NO: 25414 - protein, 112 aa, Artificial Sequence
  Chemically Synthesized
QVQLQESGGGLVQAGGSLRLSCAASGSIFYADWMGWYRQAPGKERELVVVLPYADSVKGRFTISRDNAKNTVYLQMNSLKPEDTAVYYCAAQLVIPTLHYYWGQGTQVTVSS

SEQ ID NO: 25415 - protein, 118 aa, Artificial Sequence
  Chemically Synthesized
QVQLQESGGGLVQAGGSLRLSCAASGTISAAGYMGWYRQAPGKEREFVAGIGDGSTTNYADSVKGRFTISRDNAKNTVYLQMNSLKPEDTAVYYCAVRSSARVYFPYWGQGTQVTVSS

SEQ ID NO: 25416 - protein, 126 aa, Artificial Sequence
  Chemically Synthesized
QVQLQESGGGLVQAGGSLRLSCAASGSISTAIDMGWYRQAPGKEREFVATISYGTSTNYADSVKGRFTISRDNAKNTVYLQMNSLKPEDTAVYYCAVVVDDRYSARYGIPTSYEYWGQGTQVTVSS

SEQ ID NO: 25417 - protein, 121 aa, Artificial Sequence
  Chemically Synthesized
QVQLQESGGGLVQAGGSLRLSCAASGTIFRRPGMGWYRQAPGKERELVASISFGAITNYADSVKGRFTISRDNAKNTVYLQMNSLKPEDTAVYYCAAPLASTTTLTTVIYWGQGTQVTVSS

SEQ ID NO: 25418 - protein, 118 aa, Artificial Sequence
  Chemically Synthesized
QVQLQESGGGLVQAGGSLRLSCAASGTIFPTSYMGWYRQAPGKERELVATIDSGGITYYADSVKGRFTISRDNAKNTVYLQMNSLKPEDTAVYYCAVGTYYGSPHGYWGQGTQVTVSS

SEQ ID NO: 25419 - protein, 126 aa, Artificial Sequence
  Chemically Synthesized
QVQLQESGGGLVQAGGSLRLSCAASGNISYAYVMGWYRQAPGKERELVATITGGAITYYADSVKGRFTISRDNAKNTVYLQMNSLKPEDTAVYYCAAGIANAGLQGRGTQRGLYYWGQGTQVTVSS

SEQ ID NO: 25420 - protein, 118 aa, Artificial Sequence
  Chemically Synthesized
QVQLQESGGGLVQAGGSLRLSCAASGNIFYVQTMGWYRQAPGKEREFVAAIAEGASTYYADSVKGRFTISRDNAKNTVYLQMNSLKPEDTAVYYCAVRPYAGYWHTYWGQGTQVTVSS

SEQ ID NO: 25421 - protein, 126 aa, Artificial Sequence
  Chemically Synthesized
QVQLQESGGGLVQAGGSLRLSCAASGYISAHYYMGWYRQAPGKEREFVAAITYGGSTNYADSVKGRFTISRDNAKNTVYLQMNSLKPEDTAVYYCAAGIVYVYYGDVDEDPWLGYWGQGTQVTVSS

SEQ ID NO: 25422 - protein, 117 aa, Artificial Sequence
  Chemically Synthesized
QVQLQESGGGLVQAGGSLRLSCAASGNIFAYTYMGWYRQAPGKERELVPLLLLVLIPYADSVKGRFTISRDNAKNTVYLQMNSLKPEDTAVYYCAAGSSRITDYRYWGQGTQVTVSS

SEQ ID NO: 25423 - protein, 126 aa, Artificial Sequence
  Chemically Synthesized
QVQLQESGGGLVQAGGSLRLSCAASGYISDRYQMGWYRQAPGKEREFVATIAFGGNTNYADSVKGRFTISRDNAKNTVYLQMNSLKPEDTAVYYCAALLWYDDDQGDAHAGVHGYWGQGTQVTVSS

SEQ ID NO: 25424 - protein, 122 aa, Artificial Sequence
  Chemically Synthesized
QVQLQESGGGLVQAGGSLRLSCAASGNISDYLYMGWYRQAPGKEREFVATIDYGTNTNYADSVKGRFTISRDNAKNTVYLQMNSLKPEDTAVYYCAAIGSDISDYDGDLDYWGQGTQVTVSS

SEQ ID NO: 25425 - protein, 121 aa, Artificial Sequence
  Chemically Synthesized
QVQLQESGGGLVQAGGSLRLSCAASGTIFQSTRMGWYRQAPGKEREFVASIGDGSTTYYADSVKGRFTISRDNAKNTVYLQMNSLKPEDTAVYYCAGLVPPRSYYSVTMYWGQGTQVTVSS

SEQ ID NO: 25426 - protein, 122 aa, Artificial Sequence
  Chemically Synthesized
QVQLQESGGGLVQAGGSLRLSCAASGTIFGDQAMGWYRQAPGKERELVAGINYGSITNYADSVKGRFTISRDNAKNTVYLQMNSLKPEDTAVYYCAARTTGGTPLLINHYYWGQGTQVTVSS

SEQ ID NO: 25427 - protein, 118 aa, Artificial Sequence
  Chemically Synthesized
QVQLQESGGGLVQAGGSLRLSCAASGSIFDNIYMGWYRQAPGKEREFVAGITAGTSTYYADSVKGRFTISRDNAKNTVYLQMNSLKPEDTAVYYCAAISWWRYRHHYWGQGTQVTVSS

SEQ ID NO: 25428 - protein, 122 aa, Artificial Sequence
  Chemically Synthesized
QVQLQESGGGLVQAGGSLRLSCAASGNIFGNSEMGWYRQAPGKEREFVAGIDYGGSTNYADSVKGRFTISRDNAKNTVYLQMNSLKPEDTAVYYCAANHGRGDNHVRVHRYWGQGTQVTVSS

SEQ ID NO: 25429 - protein, 122 aa, Artificial Sequence
  Chemically Synthesized
QVQLQESGGGLVQAGGSLRLSCAASGTIFWGTVMGWYRQAPGKERELVAGITPGTNTYYADSVKGRFTISRDNAKNTVYLQMNSLKPEDTAVYYCAVGTDGGTSHVYSLRYWGQGTQVTVSS

SEQ ID NO: 25430 - protein, 118 aa, Artificial Sequence
  Chemically Synthesized
QVQLQESGGGLVQAGGSLRLSCAASGSIFPYVDMGWYRQAPGKERELVATIDDGTTTYYADSVKGRFTISRDNAKNTVYLQMNSLKPEDTAVYYCAVTTVYRAPYRYWGQGTQVTVSS

SEQ ID NO: 25431 - protein, 126 aa, Artificial Sequence
  Chemically Synthesized
QVQLQESGGGLVQAGGSLRLSCAASGTISDALSMGWYRQAPGKERELVATIGSVVLPYADSVKGRFTISRDNAKNTVYLQMNSLKPEDTAVYYCAVYHGVVYWSPDKLRYLRLRYWGQGTQVTVSS

SEQ ID NO: 25432 - protein, 127 aa, Artificial Sequence
  Chemically Synthesized
QVQLQESGGGLVQAGGSLRLSCAASGNIFAFDFMGWYRQAPGKEREFVAAIDDGGTITNYADSVKGRFTISRDNAKNTVYLQMNSLKPEDTAVYYCAVVARVKDYIVSAGDTDHNYWGQGTQVTVSS

SEQ ID NO: 25433 - protein, 126 aa, Artificial Sequence
  Chemically Synthesized
QVQLQESGGGLVQAGGSLRLSCAASGYISSTYAMGWYRQAPGKERELVATIAVGGTTNYADSVKGRFTISRDNAKNTVYLQMNSLKPEDTAVYYCAAYVLDYENLRTAEAWPHLYWGQGTQVTVSS

SEQ ID NO: 25434 - protein, 118 aa, Artificial Sequence
  Chemically Synthesized
QVQLQESGGGLVQAGGSLRLSCAASGSIFAPPAMGWYRQAPGKERELVASISDGSSTNYADSVKGRFTISRDNAKNTVYLQMNSLKPEDTAVYYCAAAYFGVYYLDYWGQGTQVTVSS

SEQ ID NO: 25435 - protein, 122 aa, Artificial Sequence
  Chemically Synthesized
QVQLQESGGGLVQAGGSLRLSCAASGSIFSAYDMGWYRQAPGKERELVATIGHGGTTNYADSVKGRFTISRDNAKNTVYLQMNSLKPEDTAVYYCAVGDASQPRYVLVHGYWGQGTQVTVSS

SEQ ID NO: 25436 - protein, 121 aa, Artificial Sequence
  Chemically Synthesized
QVQLQESGGGLVQAGGSLRLSCAASGYIFADTNMGWYRQAPGKEREFVASIDVGTRPYADSVKGRFTISRDNAKNTVYLQMNSLKPEDTAVYYCAVPQNLGAWTDRSLGYWGQGTQVTVSS

SEQ ID NO: 25437 - protein, 118 aa, Artificial Sequence
  Chemically Synthesized
QVQLQESGGGLVQAGGSLRLSCAASGSIFAWHIMGWYRQAPGKERELVAGIGLGAITNYADSVKGRFTISRDNAKNTVYLQMNSLKPEDTAVYYCAADQYLAYRHWYWGQGTQVTVSS

SEQ ID NO: 25438 - protein, 118 aa, Artificial Sequence
  Chemically Synthesized
QVQLQESGGGLVQAGGSLRLSCAASGSIFVIQVMGWYRQAPGKERELVAGIADGTTTYYADSVKGRFTISRDNAKNTVYLQMNSLKPEDTAVYYCAAPPVNTDTLSYWGQGTQVTVSS

SEQ ID NO: 25439 - protein, 121 aa, Artificial Sequence
  Chemically Synthesized
QVQLQESGGGLVQAGGSLRLSCAASGSISRRDLMGWYRQAPGKERELVATITYGTSTYADSVKGRFTISRDNAKNTVYLQMNSLKPEDTAVYYCAVDDEDGAYASADHYYWGQGTQVTVSS

SEQ ID NO: 25440 - protein, 118 aa, Artificial Sequence
  Chemically Synthesized
QVQLQESGGGLVQAGGSLRLSCAASGSIFSNVYMGWYRQAPGKERELVAAITGGTITYYADSVKGRFTISRDNAKNTVYLQMNSLKPEDTAVYYCAVVRRPPYDFTYWGQGTQVTVSS

SEQ ID NO: 25441 - protein, 118 aa, Artificial Sequence
  Chemically Synthesized
QVQLQESGGGLVQAGGSLRLSCAASGNIFAGNYMGWYRQAPGKERELVAAIDPGTSTNYADSVKGRFTISRDNAKNTVYLQMNSLKPEDTAVYYCAAYGVVSEPFAYWGQGTQVTVSS

SEQ ID NO: 25442 - protein, 118 aa, Artificial Sequence
  Chemically Synthesized
QVQLQESGGGLVQAGGSLRLSCAASGNISYVDGMGWYRQAPGKEREFVASINTGASTYYADSVKGRFTISRDNAKNTVYLQMNSLKPEDTAVYYCAAYWSYDAGHYYWGQGTQVTVSS

SEQ ID NO: 25443 - protein, 122 aa, Artificial Sequence
  Chemically Synthesized
QVQLQESGGGLVQAGGSLRLSCAASGYIFSPALMGWYRQAPGKEREFVAGIGDGGITNYADSVKGRFTISRDNAKNTVYLQMNSLKPEDTAVYYCAARYRYLDGDDYYYTYWGQGTQVTVSS

SEQ ID NO: 25444 - protein, 126 aa, Artificial Sequence
  Chemically Synthesized
QVQLQESGGGLVQAGGSLRLSCAASGNIFVQYYMGWYRQAPGKERELVASIDYGGTTNYADSVKGRFTISRDNAKNTVYLQMNSLKPEDTAVYYCAAELRPYNPLKPDATGRHPYWGQGTQVTVSS

SEQ ID NO: 25445 - protein, 118 aa, Artificial Sequence
  Chemically Synthesized
QVQLQESGGGLVQAGGSLRLSCAASGYISAGYYMGWYRQAPGKEREFVASIADGSNTNYADSVKGRFTISRDNAKNTVYLQMNSLKPEDTAVYYCAAYFYALRAYRYWGQGTQVTVSS

SEQ ID NO: 25446 - protein, 126 aa, Artificial Sequence
  Chemically Synthesized
QVQLQESGGGLVQAGGSLRLSCAASGYISSSIYMGWYRQAPGKERELVAGIADGGSTYYADSVKGRFTISRDNAKNTVYLQMNSLKPEDTAVYYCAVPFTPGNGDYFIVNYTHPYWGQGTQVTVSS

SEQ ID NO: 25447 - protein, 124 aa, Artificial Sequence
  Chemically Synthesized
QVQLQESGGGLVQAGGSLRLSCAASGYISDGAVMGWYRQAPGKEREFVAAISYGTTTYADSVKGRFTISRDNAKNTVYLQMNSLKPEDTAVYYCAAQTYYTARLGSTVVKFMYWGQGTQVTVSS

SEQ ID NO: 25448 - protein, 122 aa, Artificial Sequence
  Chemically Synthesized
QVQLQESGGGLVQAGGSLRLSCAASGNIFAGFGMGWYRQAPGKERELVASISRGGITNYADSVKGRFTISRDNAKNTVYLQMNSLKPEDTAVYYCAVLTKLAADRYYGHYYWGQGTQVTVSS

SEQ ID NO: 25449 - protein, 126 aa, Artificial Sequence
  Chemically Synthesized
QVQLQESGGGLVQAGGSLRLSCAASGTISTLPFMGWYRQAPGKERELVAGIAQGANTYYADSVKGRFTISRDNAKNTVYLQMNSLKPEDTAVYYCAVTYVTYDDLYLDGIQRFTYWGQGTQVTVSS

SEQ ID NO: 25450 - protein, 126 aa, Artificial Sequence
  Chemically Synthesized
QVQLQESGGGLVQAGGSLRLSCAASGNIFTLTRMGWYRQAPGKERELVATISPGSSTNYADSVKGRFTISRDNAKNTVYLQMNSLKPEDTAVYYCAAKRQIYIDAYYGAPEYYGYWGQGTQVTVSS

SEQ ID NO: 25451 - protein, 117 aa, Artificial Sequence
  Chemically Synthesized
QVQLQESGGGLVQAGGSLRLSCAASGTISTTEPMGWYRQAPGKERELVAVLLVVVVPYADSVKGRFTISRDNAKNTVYLQMNSLKPEDTAVYYCAAYLSDYEEFPYWGQGTQVTVSS

SEQ ID NO: 25452 - protein, 118 aa, Artificial Sequence
  Chemically Synthesized
QVQLQESGGGLVQAGGSLRLSCAASGTIFGPRAMGWYRQAPGKERELVAGITFGSNTYYADSVKGRFTISRDNAKNTVYLQMNSLKPEDTAVYYCAVYVYRQRTHYYWGQGTQVTVSS

SEQ ID NO: 25453 - protein, 118 aa, Artificial Sequence
  Chemically Synthesized
QVQLQESGGGLVQAGGSLRLSCAASGYISSGPYMGWYRQAPGKERELVAGIGTGTTTNYADSVKGRFTISRDNAKNTVYLQMNSLKPEDTAVYYCAAQQDSDNLHDYWGQGTQVTVSS

SEQ ID NO: 25454 - protein, 116 aa, Artificial Sequence
  Chemically Synthesized
QVQLQESGGGLVQAGGSLRLSCAASGTISTDYGMGWYRQAPGKERELVAAYQYADSVKGRFTISRDNAKNTVYLQMNSLKPEDTAVYYCAVSSLSLSESARLLVYWGQGTQVTVSS

SEQ ID NO: 25455 - protein, 118 aa, Artificial Sequence
  Chemically Synthesized
QVQLQESGGGLVQAGGSLRLSCAASGYISDLQTMGWYRQAPGKERELVAAIDYGGTTYYADSVKGRFTISRDNAKNTVYLQMNSLKPEDTAVYYCAVTIYVNYYHNYWGQGTQVTVSS

SEQ ID NO: 25456 - protein, 122 aa, Artificial Sequence
  Chemically Synthesized
QVQLQESGGGLVQAGGSLRLSCAASGNIFGYYNMGWYRQAPGKEREFVATIDLGTSTNYADSVKGRFTISRDNAKNTVYLQMNSLKPEDTAVYYCAVDGWEEFVTDGWHDYWGQGTQVTVSS

SEQ ID NO: 25457 - protein, 118 aa, Artificial Sequence
  Chemically Synthesized
QVQLQESGGGLVQAGGSLRLSCAASGYISWQTFMGWYRQAPGKERELVASIYADSVKGRFTISRDNAKNTVYLQMNSLKPEDTAVYYCAVQAWSDNGTSLTSTTNIYWGQGTQVTVSS

SEQ ID NO: 25458 - protein, 117 aa, Artificial Sequence
  Chemically Synthesized
QVQLQESGGGLVQAGGSLRLSCAASGYIFSSSWMGWYRQAPGKERELVAAIDRGANTNYADSVKGRFTISRDNAKNTVYLQMNSLKPEDTAVYYCAVRGGGGDILYWGQGTQVTVSS

SEQ ID NO: 25459 - protein, 109 aa, Artificial Sequence
  Chemically Synthesized
QVQLQESGGGLVQAGGSLRLSCAASGTIFAYWFMGWYRQAPGKEREFVATIASVLLPYADSVKGRFTISRDNAKNTVYLQMNSLKPEDTAVYYCALTYWGQGTQVTVSS

SEQ ID NO: 25460 - protein, 118 aa, Artificial Sequence
  Chemically Synthesized
QVQLQESGGGLVQAGGSLRLSCAASGNISIGYAMGWYRQAPGKEREFVAAIAYGSSTNYADSVKGRFTISRDNAKNTVYLQMNSLKPEDTAVYYCAVPNKGYGIHDYWGQGTQVTVSS

SEQ ID NO: 25461 - protein, 120 aa, Artificial Sequence
  Chemically Synthesized
QVQLQESGGGLVQAGGSLRLSCAASGTISDHADMGWYRQAPGKERELVAAIDGGTTYYADSVKGRFTISRDNAKNTVYLQMNSLKPEDTAVYYCAVDGAYSDYDYGVIYWGQGTQVTVSS

SEQ ID NO: 25462 - protein, 118 aa, Artificial Sequence
  Chemically Synthesized
QVQLQESGGGLVQAGGSLRLSCAASGTIFGVVFMGWYRQAPGKERELVAGIDYGSTTNYADSVKGRFTISRDNAKNTVYLQMNSLKPEDTAVYYCAATYTYSSTLGYWGQGTQVTVSS

SEQ ID NO: 25463 - protein, 118 aa, Artificial Sequence
  Chemically Synthesized
QVQLQESGGGLVQAGGSLRLSCAASGYISAWYVMGWYRQAPGKEREFVAGIGVGGNTNYADSVKGRFTISRDNAKNTVYLQMNSLKPEDTAVYYCAVDPFWSDRSLYWGQGTQVTVSS

SEQ ID NO: 25464 - protein, 118 aa, Artificial Sequence
  Chemically Synthesized
QVQLQESGGGLVQAGGSLRLSCAASGNIFERNVMGWYRQAPGKEREFVAAIDYGGITYYADSVKGRFTISRDNAKNTVYLQMNSLKPEDTAVYYCAVAVDSRQTYDYWGQGTQVTVSS

SEQ ID NO: 25465 - protein, 126 aa, Artificial Sequence
  Chemically Synthesized
QVQLQESGGGLVQAGGSLRLSCAASGSIFRDRDMGWYRQAPGKEREFVAAIDDGTNTYYADSVKGRFTISRDNAKNTVYLQMNSLKPEDTAVYYCAVQTYHYDATRTIYGYRHKYWGQGTQVTVSS

SEQ ID NO: 25466 - protein, 120 aa, Artificial Sequence
  Chemically Synthesized
QVQLQESGGGLVQAGGSLRLSCAASGSISRVYSMGWYRQAPGKEREFVATIADVVPYADSVKGRFTISRDNAKNTVYLQMNSLKPEDTAVYYCAVNWYWGYISKQYYIYWGQGTQVTVSS

SEQ ID NO: 25467 - protein, 122 aa, Artificial Sequence
  Chemically Synthesized
QVQLQESGGGLVQAGGSLRLSCAASGYISQSYFMGWYRQAPGKEREFVAAIGYGGNTNYADSVKGRFTISRDNAKNTVYLQMNSLKPEDTAVYYCAVWRDDDTGLGYDHYYWGQGTQVTVSS

SEQ ID NO: 25468 - protein, 126 aa, Artificial Sequence
  Chemically Synthesized
QVQLQESGGGLVQAGGSLRLSCAASGYIFANSDMGWYRQAPGKEREFVAGISDGSSTNYADSVKGRFTISRDNAKNTVYLQMNSLKPEDTAVYYCAVPIPIGANDTTLQTVWLTYWGQGTQVTVSS

SEQ ID NO: 25469 - protein, 126 aa, Artificial Sequence
  Chemically Synthesized
QVQLQESGGGLVQAGGSLRLSCAASGYISDNYYMGWYRQAPGKERELVAGISVGASTYYADSVKGRFTISRDNAKNTVYLQMNSLKPEDTAVYYCAVPYAEVTGNIVKRTGNFVYWGQGTQVTVSS

SEQ ID NO: 25470 - protein, 118 aa, Artificial Sequence
  Chemically Synthesized
QVQLQESGGGLVQAGGSLRLSCAASGTISRANYMGWYRQAPGKEREFVASINFGSSTNYADSVKGRFTISRDNAKNTVYLQMNSLKPEDTAVYYCAAGYGPYDAHSYWGQGTQVTVSS

SEQ ID NO: 25471 - protein, 121 aa, Artificial Sequence
  Chemically Synthesized
QVQLQESGGGLVQAGGSLRLSCAASGTIFIRQEMGWYRQAPGKERELLPVLLMVVVPYADSVKGRFTISRDNAKNTVYLQMNSLKPEDTAVYYCAAPYTGNDDYHTRYYYWGQGTQVTVSS

SEQ ID NO: 25472 - protein, 118 aa, Artificial Sequence
  Chemically Synthesized
QVQLQESGGGLVQAGGSLRLSCAASGYISSKLYMGWYRQAPGKEREFVASIASGAITNYADSVKGRFTISRDNAKNTVYLQMNSLKPEDTAVYYCAVDGYFGTTYRYWGQGTQVTVSS

SEQ ID NO: 25473 - protein, 117 aa, Artificial Sequence
  Chemically Synthesized
QVQLQESGGGLVQAGGSLRLSCAASGNIFYVLMGWYRQAPGKERELVASIDEGSITNYADSVKGRFTISRDNAKNTVYLQMNSLKPEDTAVYYCAAVSVDVVWLVYWGQGTQVTVSS

SEQ ID NO: 25474 - protein, 118 aa, Artificial Sequence
  Chemically Synthesized
QVQLQESGGGLVQAGGSLRLSCAASGNISRKASMGWYRQAPGKEREFVATIGDGGNTNYADSVKGRFTISRDNAKNTVYLQMNSLKPEDTAVYYCAADTGDRWQHYYWGQGTQVTVSS

SEQ ID NO: 25475 - protein, 126 aa, Artificial Sequence
  Chemically Synthesized
QVQLQESGGGLVQAGGSLRLSCAASGNISTYRVMGWYRQAPGKERELVAAINYGASTNYADSVKGRFTISRDNAKNTVYLQMNSLKPEDTAVYYCAVYYIPLPTRQLLAGQDLVYWGQGTQVTVSS

SEQ ID NO: 25476 - protein, 122 aa, Artificial Sequence
  Chemically Synthesized
QVQLQESGGGLVQAGGSLRLSCAASGNIFPIYVMGWYRQAPGKEREFVAAISPGGNTYYADSVKGRFTISRDNAKNTVYLQMNSLKPEDTAVYYCAVERAGATATSAFFAYWGQGTQVTVSS

SEQ ID NO: 25477 - protein, 118 aa, Artificial Sequence
  Chemically Synthesized
QVQLQESGGGLVQAGGSLRLSCAASGNIFYLYYMGWYRQAPGKEREFVAAIARGTSTNYADSVKGRFTISRDNAKNTVYLQMNSLKPEDTAVYYCAVYYGYGPGYLYWGQGTQVTVSS

SEQ ID NO: 25478 - protein, 121 aa, Artificial Sequence
  Chemically Synthesized
QVQLQESGGGLVQAGGSLRLSCAASGNIFSGQYMGWYRQAPGKEREFVASIGEGGSTYYADSVKGRFTISRDNAKNTVYLQMNSLKPEDTAVYYCAAYSGYQVIRYGFGYWGQGTQVTVSS

SEQ ID NO: 25479 - protein, 118 aa, Artificial Sequence
  Chemically Synthesized
QVQLQESGGGLVQAGGSLRLSCAASGTIFRTLYMGWYRQAPGKERELVASIAEGGITYYADSVKGRFTISRDNAKNTVYLQMNSLKPEDTAVYYCAAQYSSSYYYDYWGQGTQVTVSS

SEQ ID NO: 25480 - protein, 120 aa, Artificial Sequence
  Chemically Synthesized
QVQLQESGGGLVQAGGSLRLSCAASGNIFRTEDMGWYRQAPGKERELLPVLLTVVLPYADSVKGRFTISRDNAKNTVYLQMNSLKPEDTAVYYCAAYIKWWAFFHMTIYWGQGTQVTVSS

SEQ ID NO: 25481 - protein, 117 aa, Artificial Sequence
  Chemically Synthesized
QVQLQESGGGLVQAGGSLRLSCAASGNISDNYRMGWYRQAPGKEREFVASIGAGGSTNYADSVKGRFTISRDNAKNTVYLQMNSLKPEDTAVYYCAATVTTTTTLYWGQGTQVTVSS

SEQ ID NO: 25482 - protein, 117 aa, Artificial Sequence
  Chemically Synthesized
QVQLQESGGGLVQAGGSLRLSCAASGSISHDFYMGWYRQAPGKERELVATITFGATTYYADSVKGRFTISRDNAKNTVYLQMNSLKPEDTAVYYCAALDSDSTTLYWGQGTQVTVSS

SEQ ID NO: 25483 - protein, 117 aa, Artificial Sequence
  Chemically Synthesized
QVQLQESGGGLVQAGGSLRLSCAASGTISDSPVMGWYRQAPGKEREFVAGIGFGGNTNYADSVKGRFTISRDNAKNTVYLQMNSLKPEDTAVYYCAVKYQSLTSMYWGQGTQVTVSS

SEQ ID NO: 25484 - protein, 118 aa, Artificial Sequence
  Chemically Synthesized
QVQLQESGGGLVQAGGSLRLSCAASGTIFTSYGMGWYRQAPGKEREFVASIARGGITYYADSVKGRFTISRDNAKNTVYLQMNSLKPEDTAVYYCAAVLLGDHNHAYWGQGTQVTVSS

SEQ ID NO: 25485 - protein, 118 aa, Artificial Sequence
  Chemically Synthesized
QVQLQESGGGLVQAGGSLRLSCAASGSISELYAMGWYRQAPGKERELVAAIALGSNTNYADSVKGRFTISRDNAKNTVYLQMNSLKPEDTAVYYCAVDDQDYYYHRYWGQGTQVTVSS

SEQ ID NO: 25486 - protein, 118 aa, Artificial Sequence
  Chemically Synthesized
QVQLQESGGGLVQAGGSLRLSCAASGYIFVSTTMGWYRQAPGKEREFVAGIGVGANTNYADSVKGRFTISRDNAKNTVYLQMNSLKPEDTAVYYCAASTDEFRSLTYWGQGTQVTVSS

SEQ ID NO: 25487 - protein, 118 aa, Artificial Sequence
  Chemically Synthesized
QVQLQESGGGLVQAGGSLRLSCAASGTISRRRPMGWYRQAPGKEREFVAAIDAGSSTNYADSVKGRFTISRDNAKNTVYLQMNSLKPEDTAVYYCAAGYIDIRRHGYWGQGTQVTVSS

SEQ ID NO: 25488 - protein, 126 aa, Artificial Sequence
  Chemically Synthesized
QVQLQESGGGLVQAGGSLRLSCAASGTISFLYDMGWYRQAPGKERELVASITRGTTTNYADSVKGRFTISRDNAKNTVYLQMNSLKPEDTAVYYCAAYYARYEATGTRGTGGHTYWGQGTQVTVSS

SEQ ID NO: 25489 - protein, 118 aa, Artificial Sequence
  Chemically Synthesized
QVQLQESGGGLVQAGGSLRLSCAASGTIFWVYQMGWYRQAPGKEREFVATIGSGTNTNYADSVKGRFTISRDNAKNTVYLQMNSLKPEDTAVYYCAAYRYGYAGYYYWGQGTQVTVSS

SEQ ID NO: 25490 - protein, 118 aa, Artificial Sequence
  Chemically Synthesized
QVQLQESGGGLVQAGGSLRLSCAASGYIFLWVGMGWYRQAPGKEREFVAGITYGSNTYYADSVKGRFTISRDNAKNTVYLQMNSLKPEDTAVYYCAVTVGHDVNYYYWGQGTQVTVSS

SEQ ID NO: 25491 - protein, 118 aa, Artificial Sequence
  Chemically Synthesized
QVQLQESGGGLVQAGGSLRLSCAASGNISGYADMGWYRQAPGKEREFVATITRGTSTYYADSVKGRFTISRDNAKNTVYLQMNSLKPEDTAVYYCAVHYGYPYNHTYWGQGTQVTVSS

SEQ ID NO: 25492 - protein, 119 aa, Artificial Sequence
  Chemically Synthesized
QVQLQESGGGLVQAGGSLRLSCAASGNISLSYVMGWYRQAPGKEREFVAGIGDGTSTNYADSVKGRFTISRDNAKNTVYLQMNSLKPEDTAVYYCAVDATYVSTDHSYWGQGTQVTVSS

SEQ ID NO: 25493 - protein, 118 aa, Artificial Sequence
  Chemically Synthesized
QVQLQESGGGLVQAGGSLRLSCAASGNISGTPSMGWYRQAPGKERELVAAITGGTITNYADSVKGRFTISRDNAKNTVYLQMNSLKPEDTAVYYCAVAGYAPYEHSYWGQGTQVTVSS

SEQ ID NO: 25494 - protein, 122 aa, Artificial Sequence
  Chemically Synthesized
QVQLQESGGGLVQAGGSLRLSCAASGNIFDSLVMGWYRQAPGKERELVAGIAYGGITYYADSVKGRFTISRDNAKNTVYLQMNSLKPEDTAVYYCAVHDPDEYYSYDEHVYWGQGTQVTVSS

SEQ ID NO: 25495 - protein, 125 aa, Artificial Sequence
  Chemically Synthesized
QVQLQESGGGLVQAGGSLRLSCAASGYILPCCMGWYRQAPGKERELVAAIDTGGNTYYADSVKGRFTISRDNAKNTVYLQMNSLKPEDTAVYYCAAADQYYYDYYAVAHYWHAYWGQGTQVTVSS

SEQ ID NO: 25496 - protein, 117 aa, Artificial Sequence
  Chemically Synthesized
QVQLQESGGGLVQAGGSLRLSCAASGYISRGSSMGWYRQAPGKERECCHYWCWCYYLYADSVKGRFTISRDNAKNTVYLQMNSLKPEDTAVYYCAADIRSGRDHWYWGQGTQVTVSS

SEQ ID NO: 25497 - protein, 119 aa, Artificial Sequence
  Chemically Synthesized
QVQLQESGGGLVQAGGSLRLSCAASGTISYGYAMGWYRQAPGKERELVASIDYGTTTNYADSVKGRFTISRDNAKNTVYLQMNSLKPEDTAVYYCAAPFREDRAGYPYWGQGTQVTVSS

SEQ ID NO: 25498 - protein, 113 aa, Artificial Sequence
  Chemically Synthesized
QVQLQESGGGLVQAGGSLRLSCAASGSISVPPYMGWYRQAPGKEREFVAAIGYGGNTYYADSVKGRFTISRDNAKNTVYLQMNSLKPEDTAVYYCAAEYDDYWGQGTQVTVSS

SEQ ID NO: 25499 - protein, 117 aa, Artificial Sequence
  Chemically Synthesized
QVQLQESGGGLVQAGGSLRLSCAASGNIFTDIVMGWYRQAPGKERELVAAITDGLVPYADSVKGRFTISRDNAKNTVYLQMNSLKPEDTAVYYCAADQDVGYRFTYWGQGTQVTVSS

SEQ ID NO: 25500 - protein, 118 aa, Artificial Sequence
  Chemically Synthesized
QVQLQESGGGLVQAGGSLRLSCAASGTISGWLVMGWYRQAPGKERELVAGIDQGSTTYYADSVKGRFTISRDNAKNTVYLQMNSLKPEDTAVYYCAAYLYAGWRLAYWGQGTQVTVSS

SEQ ID NO: 25501 - protein, 122 aa, Artificial Sequence
  Chemically Synthesized
QVQLQESGGGLVQAGGSLRLSCAASGTIFRADSMGWYRQAPGKERELVAAIGSGGNTNYADSVKGRFTISRDNAKNTVYLQMNSLKPEDTAVYYCAAYYAPIQYEDLYHDYWGQGTQVTVSS

SEQ ID NO: 25502 - protein, 117 aa, Artificial Sequence
  Chemically Synthesized
QVQLQESGGGLVQAGGSLRLSCAASGNISHTRYMGWYRQAPGKERELVASINQYADSVKGRFTISRDNAKNTVYLQMNSLKPEDTAVYYCAVSLNSDWTGRVHHTYWGQGTQVTVSS

SEQ ID NO: 25503 - protein, 122 aa, Artificial Sequence
  Chemically Synthesized
QVQLQESGGGLVQAGGSLRLSCAASGTIFDRAPMGWYRQAPGKERELVAAINDGGNTYYADSVKGRFTISRDNAKNTVYLQMNSLKPEDTAVYYCAADDIPYGYGDKWFDYWGQGTQVTVSS

SEQ ID NO: 25504 - protein, 118 aa, Artificial Sequence
  Chemically Synthesized
QVQLQESGGGLVQAGGSLRLSCAASGNISDIDWMGWYRQAPGKERELVASIAVGATTNYADSVKGRFTISRDNAKNTVYLQMNSLKPEDTAVYYCAVNAWNTATYPYWGQGTQVTVSS

SEQ ID NO: 25505 - protein, 120 aa, Artificial Sequence
  Chemically Synthesized
QVQLQESGGGLVQAGGSLRLSCAASGSISYITWMGWYRQAPGKEREFVAAIASVVLPYADSVKGRFTISRDNAKNTVYLQMNSLKPEDTAVYYCAADPRRGDNEYYYYYWGQGTQVTVSS

SEQ ID NO: 25506 - protein, 122 aa, Artificial Sequence
  Chemically Synthesized
QVQLQESGGGLVQAGGSLRLSCAASGTIFADAGMGWYRQAPGKEREFVATIDAGTITNYADSVKGRFTISRDNAKNTVYLQMNSLKPEDTAVYYCAAGYNDNGTPTKDHAYWGQGTQVTVSS

SEQ ID NO: 25507 - protein, 117 aa, Artificial Sequence
  Chemically Synthesized
QVQLQESGGGLVQAGGSLRLSCAASGTISDDDDMGWYRQAPGKEREFVATIGGGTTYYADSVKGRFTISRDNAKNTVYLQMNSLKPEDTAVYYCAVGYNDRRDHGYWGQGTQVTVSS

SEQ ID NO: 25508 - protein, 110 aa, Artificial Sequence
  Chemically Synthesized
QVQLQESGGGLVQAGGSLRLSCAASGTIFDLDGMGWYRQAPGKERELVAGIDYGAITYYADSVKGRFTISRDNAKNTVYLQMNSLKPEDTAVYYCAVLYWGQGTQVTVSS

SEQ ID NO: 25509 - protein, 117 aa, Artificial Sequence
  Chemically Synthesized
QVQLQESGGGLVQAGGSLRLSCAASGNISSATMGWYRQAPGKEREFVASISYGASTNYADSVKGRFTISRDNAKNTVYLQMNSLKPEDTAVYYCAVATSAIVFLHYWGQGTQVTVSS

SEQ ID NO: 25510 - protein, 109 aa, Artificial Sequence
  Chemically Synthesized
QVQLQESGGGLVQAGGSLRLSCAASGNISLTVMGWYRQAPGKEREFVAAIAGGASTNYADSVKGRFTISRDNAKNTVYLQMNSLKPEDTAVYYCAHFYWGQGTQVTVSS

SEQ ID NO: 25511 - protein, 125 aa, Artificial Sequence
  Chemically Synthesized
QVQLQESGGGLVQAGGSLRLSCAASGNIFWITNMGWYRQAPGKEREFVAGIDRGSTYYADSVKGRFTISRDNAKNTVYLQMNSLKPEDTAVYYCAAALDYVLDAAFAPHWRLPYWGQGTQVTVSS

SEQ ID NO: 25512 - protein, 118 aa, Artificial Sequence
  Chemically Synthesized
QVQLQESGGGLVQAGGSLRLSCAASGTIFGLYYMGWYRQAPGKEREFVAAIATGATTYYADSVKGRFTISRDNAKNTVYLQMNSLKPEDTAVYYCAVGQDQGNRLSYWGQGTQVTVSS

SEQ ID NO: 25513 - protein, 126 aa, Artificial Sequence
  Chemically Synthesized
QVQLQESGGGLVQAGGSLRLSCAASGNISHDYQMGWYRQAPGKERELVASIDYGGTTNYADSVKGRFTISRDNAKNTVYLQMNSLKPEDTAVYYCAVLDFGPLVAYATVNVGHAYWGQGTQVTVSS

SEQ ID NO: 25514 - protein, 118 aa, Artificial Sequence
  Chemically Synthesized
QVQLQESGGGLVQAGGSLRLSCAASGNIFHVWYMGWYRQAPGKEREFVAGINTGGITNYADSVKGRFTISRDNAKNTVYLQMNSLKPEDTAVYYCAAWRDSNYSHVYWGQGTQVTVSS

SEQ ID NO: 25515 - protein, 118 aa, Artificial Sequence
  Chemically Synthesized
QVQLQESGGGLVQAGGSLRLSCAASGNIFETRNMGWYRQAPGKEREFVAAISDGTITNYADSVKGRFTISRDNAKNTVYLQMNSLKPEDTAVYYCAVVDGLTLAFSYWGQGTQVTVSS

SEQ ID NO: 25516 - protein, 122 aa, Artificial Sequence
  Chemically Synthesized
QVQLQESGGGLVQAGGSLRLSCAASGTISTYSRMGWYRQAPGKERELVAAISTGAITYYADSVKGRFTISRDNAKNTVYLQMNSLKPEDTAVYYCAAGRAGQSNDVTVLYYWGQGTQVTVSS

SEQ ID NO: 25517 - protein, 112 aa, Artificial Sequence
  Chemically Synthesized
QVQLQESGGGLVQAGGSLRLSCAASGYMGWYRQAPGKERELVAAITSGGITYYADSVKGRFTISRDNAKNTVYLQMNSLKPEDTAVYYCAVYEYPRRWHWYWGQGTQVTVSS

SEQ ID NO: 25518 - protein, 122 aa, Artificial Sequence
  Chemically Synthesized
QVQLQESGGGLVQAGGSLRLSCAASGSISGYTYMGWYRQAPGKEREFVAGISKGANTYYADSVKGRFTISRDNAKNTVYLQMNSLKPEDTAVYYCAVHGFARWYDDYDHPYWGQGTQVTVSS

SEQ ID NO: 25519 - protein, 119 aa, Artificial Sequence
  Chemically Synthesized
QVQLQESGGGLVQAGGSLRLSCAASGTPADAMGWYRQAPGKERELVAAIDYGSTTNYADSVKGRFTISRDNAKNTVYLQMNSLKPEDTAVYYCAVRSTTVTTLTTTIYWGQGTQVTVSS

SEQ ID NO: 25520 - protein, 122 aa, Artificial Sequence
  Chemically Synthesized
QVQLQESGGGLVQAGGSLRLSCAASGTISLTQYMGWYRQAPGKERELVAAISDGTNTYYADSVKGRFTISRDNAKNTVYLQMNSLKPEDTAVYYCAAAVSVDAYYGQDFGYWGQGTQVTVSS

SEQ ID NO: 25521 - protein, 122 aa, Artificial Sequence
  Chemically Synthesized
QVQLQESGGGLVQAGGSLRLSCAASGNISRRWGMGWYRQAPGKERELVASIGPGTSTNYADSVKGRFTISRDNAKNTVYLQMNSLKPEDTAVYYCAAIQLYEIGQNVQHYYWGQGTQVTVSS

SEQ ID NO: 25522 - protein, 118 aa, Artificial Sequence
  Chemically Synthesized
QVQLQESGGGLVQAGGSLRLSCAASGNISSYYSMGWYRQAPGKEREFVASIAYGTTTYYADSVKGRFTISRDNAKNTVYLQMNSLKPEDTAVYYCAASPQASQYHTYWGQGTQVTVSS

SEQ ID NO: 25523 - protein, 122 aa, Artificial Sequence
  Chemically Synthesized
QVQLQESGGGLVQAGGSLRLSCAASGNIFSAYAMGWYRQAPGKERELVAGIARGTTTNYADSVKGRFTISRDNAKNTVYLQMNSLKPEDTAVYYCAVYYLPRTDGDSQFKYWGQGTQVTVSS

SEQ ID NO: 25524 - protein, 118 aa, Artificial Sequence
  Chemically Synthesized
QVQLQESGGGLVQAGGSLRLSCAASGTIFRRYDMGWYRQAPGKERELVASISTGSSTNYADSVKGRFTISRDNAKNTVYLQMNSLKPEDTAVYYCAAGVFGDSGHDYWGQGTQVTVSS

SEQ ID NO: 25525 - protein, 118 aa, Artificial Sequence
  Chemically Synthesized
QVQLQESGGGLVQAGGSLRLSCAASGSISNQWVMGWYRQAPGKEREFVAGIATGATYQYADSVKGRFTISRDNAKNTVYLQMNSLKPEDTAVYYCAVYVYAADRLSYWGQGTQVTVSS

SEQ ID NO: 25526 - protein, 122 aa, Artificial Sequence
  Chemically Synthesized
QVQLQESGGGLVQAGGSLRLSCAASGTIFGAAYMGWYRQAPGKEREFVATISSGGTTNYADSVKGRFTISRDNAKNTVYLQMNSLKPEDTAVYYCAVYDGDTPYVTVYLGYWGQGTQVTVSS

SEQ ID NO: 25527 - protein, 118 aa, Artificial Sequence
  Chemically Synthesized
QVQLQESGGGLVQAGGSLRLSCAASGSIFVRYGMGWYRQAPGKERELVAAIDGGTTTNYADSVKGRFTISRDNAKNTVYLQMNSLKPEDTAVYYCAVYYKSDHAHPYWGQGTQVTVSS

SEQ ID NO: 25528 - protein, 122 aa, Artificial Sequence
  Chemically Synthesized
QVQLQESGGGLVQAGGSLRLSCAASGNIFFNNFMGWYRQAPGKEREFVATITYGSSTNYADSVKGRFTISRDNAKNTVYLQMNSLKPEDTAVYYCAVPYWSDFRYQYYYPYWGQGTQVTVSS

SEQ ID NO: 25529 - protein, 118 aa, Artificial Sequence
  Chemically Synthesized
QVQLQESGGGLVQAGGSLRLSCAASGNISSEYSMGWYRQAPGKEREFVASIGKGANTNYADSVKGRFTISRDNAKNTVYLQMNSLKPEDTAVYYCAADQVADIDHGYWGQGTQVTVSS

SEQ ID NO: 25530 - protein, 122 aa, Artificial Sequence
  Chemically Synthesized
QVQLQESGGGLVQAGGSLRLSCAASGNISLGATMGWYRQAPGKEREFVAAIAIGSNTYYADSVKGRFTISRDNAKNTVYLQMNSLKPEDTAVYYCAVYTADHPDSFVRYVYWGQGTQVTVSS

SEQ ID NO: 25531 - protein, 118 aa, Artificial Sequence
  Chemically Synthesized
QVQLQESGGGLVQAGGSLRLSCAASGTISAQYYMGWYRQAPGKERELVASIDAGSSTNYADSVKGRFTISRDNAKNTVYLQMNSLKPEDTAVYYCAVGLPKGDYFHYWGQGTQVTVSS

SEQ ID NO: 25532 - protein, 117 aa, Artificial Sequence
  Chemically Synthesized
QVQLQESGGGLVQAGGSLRLSCAASGNISYLRYMGWYRQAPGKEREFVASITDGANTYYADSVKGRFTISRDNAKNTVYLQMNSLKPEDTAVYYCALTLLLLRRIYWGQGTQVTVSS

SEQ ID NO: 25533 - protein, 122 aa, Artificial Sequence
  Chemically Synthesized
QVQLQESGGGLVQAGGSLRLSCAASGSIFRDTTMGWYRQAPGKERELVAAIGYGAITYYADSVKGRFTISRDNAKNTVYLQMNSLKPEDTAVYYCAVDLRDGRSSYVRYYYWGQGTQVTVSS

SEQ ID NO: 25534 - protein, 122 aa, Artificial Sequence
  Chemically Synthesized
QVQLQESGGGLVQAGGSLRLSCAASGTISWTRVMGWYRQAPGKERELVAAITGGGTTNYADSVKGRFTISRDNAKNTVYLQMNSLKPEDTAVYYCAVTPSGYVDYYPFHDYWGQGTQVTVSS

SEQ ID NO: 25535 - protein, 121 aa, Artificial Sequence
  Chemically Synthesized
QVQLQESGGGLVQAGGSLRLSCAASGSISSVDGMGWYRQAPGKEREFVASIGVGSSTYYADSVKGRFTISRDNAKNTVYLQMNSLKPEDTAVYYCAVVYPTYRSTLLNLYWGQGTQVTVSS

SEQ ID NO: 25536 - protein, 122 aa, Artificial Sequence
  Chemically Synthesized
QVQLQESGGGLVQAGGSLRLSCAASGTISHRNDMGWYRQAPGKEREFVAAIDIGGNTYYADSVKGRFTISRDNAKNTVYLQMNSLKPEDTAVYYCAANNYDYYERGISHFYWGQGTQVTVSS

SEQ ID NO: 25537 - protein, 125 aa, Artificial Sequence
  Chemically Synthesized
QVQLQESGGGLVQAGGSLRLSCAASGNIFYYSMGWYRQAPGKEREFVASISRGANTNYADSVKGRFTISRDNAKNTVYLQMNSLKPEDTAVYYCAVGHAREVWDQYWGRAVLKYWGQGTQVTVSS

SEQ ID NO: 25538 - protein, 123 aa, Artificial Sequence
  Chemically Synthesized
QVQLQESGGGLVQAGGSLRLSCAASGTIFYLFGMGWYRQAPGKERELVAGISEGSTTNYADSVKGRFTISRDNAKNTVYLQMNSLKPEDTAVYYCAAPSALQPGDRDEGFTYWGQGTQVTVSS

SEQ ID NO: 25539 - protein, 121 aa, Artificial Sequence
  Chemically Synthesized
QVQLQESGGGLVQAGGSLRLSCAASGTISRYTIMGWYRQAPGKERELVASITYVVVPYADSVKGRFTISRDNAKNTVYLQMNSLKPEDTAVYYCAAHVDDYLAYDYDYRYWGQGTQVTVSS

SEQ ID NO: 25540 - protein, 116 aa, Artificial Sequence
  Chemically Synthesized
QVQLQESGGGLVQAGGSLRLSCAASGTISEAWVMGWYRQAPGKERELVAGIDYGTNTNYADSVKGRFTISRDNAKNTVYLQMNSLKPEDTAVYYCAAALNRDHGYWGQGTQVTVSS

SEQ ID NO: 25541 - protein, 122 aa, Artificial Sequence
  Chemically Synthesized
QVQLQESGGGLVQAGGSLRLSCAASGYISTSDDMGWYRQAPGKERELVAAISYGTSTNYADSVKGRFTISRDNAKNTVYLQMNSLKPEDTAVYYCAAVYDDYWGWFDEFRYWGQGTQVTVSS

SEQ ID NO: 25542 - protein, 122 aa, Artificial Sequence
  Chemically Synthesized
QVQLQESGGGLVQAGGSLRLSCAASGTISSPYLMGWYRQAPGKERELVAAISYGTSTYYADSVKGRFTISRDNAKNTVYLQMNSLKPEDTAVYYCAAADYTVSIKLPDHTYWGQGTQVTVSS

SEQ ID NO: 25543 - protein, 118 aa, Artificial Sequence
  Chemically Synthesized
QVQLQESGGGLVQAGGSLRLSCAASGYISYNLYMGWYRQAPGKEREFVAAIDAGTTTYYADSVKGRFTISRDNAKNTVYLQMNSLKPEDTAVYYCAVPPYSVYTHWYWGQGTQVTVSS

SEQ ID NO: 25544 - protein, 117 aa, Artificial Sequence
  Chemically Synthesized
QVQLQESGGGLVQAGGSLRLSCAASGTISDSSDMGWYRQAPGKERELVAVLLKVLLPYADSVKGRFTISRDNAKNTVYLQMNSLKPEDTAVYYCAVEYAYPVEHGYWGQGTQVTVSS

SEQ ID NO: 25545 - protein, 119 aa, Artificial Sequence
  Chemically Synthesized
QVQLQESGGGLVQAGGSLRLSCAASGFTTTMGWYRQAPGKEREFVAGINYGATTNYADSVKGRFTISRDNAKNTVYLQMNSLKPEDTAVYYCAAAYQSRGTTPPRHDYWGQGTQVTVSS

SEQ ID NO: 25546 - protein, 118 aa, Artificial Sequence
  Chemically Synthesized
QVQLQESGGGLVQAGGSLRLSCAASGTISDGYGMGWYRQAPGKERELVATIDDGSSTNYADSVKGRFTISRDNAKNTVYLQMNSLKPEDTAVYYCAVGGVRYVTHDYWGQGTQVTVSS

SEQ ID NO: 25547 - protein, 118 aa, Artificial Sequence
  Chemically Synthesized
QVQLQESGGGLVQAGGSLRLSCAASGTISRPDDMGWYRQAPGKEREFVASINRGGSTNYADSVKGRFTISRDNAKNTVYLQMNSLKPEDTAVYYCAATTGDLDGFRYWGQGTQVTVSS

SEQ ID NO: 25548 - protein, 126 aa, Artificial Sequence
  Chemically Synthesized
QVQLQESGGGLVQAGGSLRLSCAASGNISSYVYMGWYRQAPGKERELVAAIAAGTITYYADSVKGRFTISRDNAKNTVYLQMNSLKPEDTAVYYCAAADDSTNWQDLSYAADHYYWGQGTQVTVSS

SEQ ID NO: 25549 - protein, 116 aa, Artificial Sequence
  Chemically Synthesized
QVQLQESGGGLVQAGGSLRLSCAASGTISGDDDMGWYRQAPGKERERHYCWWYYYLYADSVKGRFTISRDNAKNTVYLQMNSLKPEDTAVYYCAAAWYGKLAHVYWGQGTQVTVSS

SEQ ID NO: 25550 - protein, 121 aa, Artificial Sequence
  Chemically Synthesized
QVQLQESGGGLVQAGGSLRLSCAASGYISYAYIMGWYRQAPGKEREFVAGISEGSSTYYADSVKGRFTISRDNAKNTVYLQMNSLKPEDTAVYYCAVYLFLFTTLTTCIYWGQGTQVTVSS

SEQ ID NO: 25551 - protein, 117 aa, Artificial Sequence
  Chemically Synthesized
QVQLQESGGGLVQAGGSLRLSCAASGSISSEDTMGWYRQAPGKEREFVAAMVTVLIPYADSVKGRFTISRDNAKNTVYLQMNSLKPEDTAVYYCAVQERTPYGYLYWGQGTQVTVSS

SEQ ID NO: 25552 - protein, 118 aa, Artificial Sequence
  Chemically Synthesized
QVQLQESGGGLVQAGGSLRLSCAASGTIFPHNQMGWYRQAPGKEREFVASIATGAITNYADSVKGRFTISRDNAKNTVYLQMNSLKPEDTAVYYCAVGRLYVRDYFYWGQGTQVTVSS

SEQ ID NO: 25553 - protein, 125 aa, Artificial Sequence
  Chemically Synthesized
QVQLQESGGGLVQAGGSLRLSCAASGYISTNSMGWYRQAPGKEREFVAGIGTGATTNYADSVKGRFTISRDNAKNTVYLQMNSLKPEDTAVYYCAAPYYTWDVPYYGYIVYLLYWGQGTQVTVSS

SEQ ID NO: 25554 - protein, 110 aa, Artificial Sequence
  Chemically Synthesized
QVQLQESGGGLVQAGGSLRLSCAASGYISPDWDMGWYRQAPGKEREFVAAIGQGASTYYADSVKGRFTISRDNAKNTVYLQMNSLKPEDTAVYYCAVLYWGQGTQVTVSS

SEQ ID NO: 25555 - protein, 118 aa, Artificial Sequence
  Chemically Synthesized
QVQLQESGGGLVQAGGSLRLSCAASGSIFALYYMGWYRQAPGKEREFVAGIDVGGSTNYADSVKGRFTISRDNAKNTVYLQMNSLKPEDTAVYYCAADGPIIYYHAYWGQGTQVTVSS

SEQ ID NO: 25556 - protein, 122 aa, Artificial Sequence
  Chemically Synthesized
QVQLQESGGGLVQAGGSLRLSCAASGTISDAQDMGWYRQAPGKEREFVASINSWWYYQYADSVKGRFTISRDNAKNTVYLQMNSLKPEDTAVYYCAAFKVGAGYINLSHWYWGQGTQVTVSS

SEQ ID NO: 25557 - protein, 122 aa, Artificial Sequence
  Chemically Synthesized
QVQLQESGGGLVQAGGSLRLSCAASGYISILYAMGWYRQAPGKEREFVAAIGEGASTLYADSVKGRFTISRDNAKNTVYLQMNSLKPEDTAVYYCAAKGAGHYSAGAYHGYWGQGTQVTVSS

SEQ ID NO: 25558 - protein, 117 aa, Artificial Sequence
  Chemically Synthesized
QVQLQESGGGLVQAGGSLRLSCAASGSIFRYITMGWYRQAPGKEREFVAAYYQYADSVKGRFTISRDNAKNTVYLQMNSLKPEDTAVYYCAADDNGYPSENGLLGYWGQGTQVTVSS

SEQ ID NO: 25559 - protein, 122 aa, Artificial Sequence
  Chemically Synthesized
QVQLQESGGGLVQAGGSLRLSCAASGNISPAIYMGWYRQAPGKERELVAAIAGGANTNYADSVKGRFTISRDNAKNTVYLQMNSLKPEDTAVYYCAVYGIVDYAVRRYLPYWGQGTQVTVSS

SEQ ID NO: 25560 - protein, 121 aa, Artificial Sequence
  Chemically Synthesized
QVQLQESGGGLVQAGGSLRLSCAASGSISVTLMGWYRQAPGKERELVATINLGGNTYYADSVKGRFTISRDNAKNTVYLQMNSLKPEDTAVYYCAAKLPPRYSLDDDYYYWGQGTQVTVSS

SEQ ID NO: 25561 - protein, 121 aa, Artificial Sequence
  Chemically Synthesized
QVQLQESGGGLVQAGGSLRLSCAASGNISVTWYMGWYRQAPGKEREFVAGINEGANTNYADSVKGRFTISRDNAKNTVYLQMNSLKPEDTAVYYCAAGSPSTRTVLVLMYWGQGTQVTVSS

SEQ ID NO: 25562 - protein, 117 aa, Artificial Sequence
  Chemically Synthesized
QVQLQESGGGLVQAGGSLRLSCAASGYISNSTMGWYRQAPGKEREFVAAITAGATTNYADSVKGRFTISRDNAKNTVYLQMNSLKPEDTAVYYCAVNEDYVSYLYYWGQGTQVTVSS

SEQ ID NO: 25563 - protein, 122 aa, Artificial Sequence
  Chemically Synthesized
QVQLQESGGGLVQAGGSLRLSCAASGNISDLYGMGWYRQAPGKERELVASISYGGTTNYADSVKGRFTISRDNAKNTVYLQMNSLKPEDTAVYYCAAYGDTKWLDYASYAYWGQGTQVTVSS

SEQ ID NO: 25564 - protein, 122 aa, Artificial Sequence
  Chemically Synthesized
QVQLQESGGGLVQAGGSLRLSCAASGYISRQRYMGWYRQAPGKERELVAAISAGTNTYYADSVKGRFTISRDNAKNTVYLQMNSLKPEDTAVYYCAADRGHQGWKNNAHSYWGQGTQVTVSS

SEQ ID NO: 25565 - protein, 116 aa, Artificial Sequence
  Chemically Synthesized
QVQLQESGGGLVQAGGSLRLSCAASGYISQYWDMGWYRQAPGKERELVATISDGSKYADSVKGRFTISRDNAKNTVYLQMNSLKPEDTAVYYCAVKGQVTDYYGYWGQGTQVTVSS

SEQ ID NO: 25566 - protein, 115 aa, Artificial Sequence
  Chemically Synthesized
QVQLQESGGGLVQAGGSLRLSCAASGNIFLNFRMGWYRQAPGKEREFVAAISLGSSTNYADSVKGRFTISRDNAKNTVYLQMNSLKPEDTAVYYCAADDQRTDYWGQGTQVTVSS

SEQ ID NO: 25567 - protein, 121 aa, Artificial Sequence
  Chemically Synthesized
QVQLQESGGGLVQAGGSLRLSCAASGTIFQVDAMGWYRQAPGKEREFVAAIATGATTYYADSVKGRFTISRDNAKNTVYLQMNSLKPEDTAVYYCAVPNRYAEDLTSTIYWGQGTQVTVSS

SEQ ID NO: 25568 - protein, 121 aa, Artificial Sequence
  Chemically Synthesized
QVQLQESGGGLVQAGGSLRLSCAASGNISDNVIMGWYRQAPGKEREFVPLLLSVLLPYADSVKGRFTISRDNAKNTVYLQMNSLKPEDTAVYYCAAAFYFQRWYGDDFTYWGQGTQVTVSS

SEQ ID NO: 25569 - protein, 118 aa, Artificial Sequence
  Chemically Synthesized
QVQLQESGGGLVQAGGSLRLSCAASGTIFKSLNMGWYRQAPGKERELVAAIADGTSTYYADSVKGRFTISRDNAKNTVYLQMNSLKPEDTAVYYCAAGQDDGDRLGYWGQGTQVTVSS

SEQ ID NO: 25570 - protein, 122 aa, Artificial Sequence
  Chemically Synthesized
QVQLQESGGGLVQAGGSLRLSCAASGSISHSPFMGWYRQAPGKEREFVAAIGTGSNTNYADSVKGRFTISRDNAKNTVYLQMNSLKPEDTAVYYCAADQDGDGVRSFLPLYWGQGTQVTVSS

SEQ ID NO: 25571 - protein, 120 aa, Artificial Sequence
  Chemically Synthesized
QVQLQESGGGLVQAGGSLRLSCAASGYIFADGYMGWYRQAPGKEREFVASISYGTITYYADSVKGRFTISRDNAKNTVYLQMNSLKPEDTAVYYCAAYSTCTTTGTTMYWGQGTQVTVSS

SEQ ID NO: 25572 - protein, 117 aa, Artificial Sequence
  Chemically Synthesized
QVQLQESGGGLVQAGGSLRLSCAASGYIFYSSRMGWYRQAPGKERELVAAIATGATTNYADSVKGRFTISRDNAKNTVYLQMNSLKPEDTAVYYCALLSLGVLGMYWGQGTQVTVSS

SEQ ID NO: 25573 - protein, 118 aa, Artificial Sequence
  Chemically Synthesized
QVQLQESGGGLVQAGGSLRLSCAASGNIFNAYVMGWYRQAPGKERELVASIASGASTYYADSVKGRFTISRDNAKNTVYLQMNSLKPEDTAVYYCAVYHPVYVLHIYWGQGTQVTVSS

SEQ ID NO: 25574 - protein, 125 aa, Artificial Sequence
  Chemically Synthesized
QVQLQESGGGLVQAGGSLRLSCAASGSIFQTFPMGWYRQAPGKERELVATITWGSSTNYADSVKGRFTISRDNAKNTVYLQMNSLKPEDTAVYYCAVRPSQWWGYRYLDGYLSYWGQGTQVTVSS

SEQ ID NO: 25575 - protein, 118 aa, Artificial Sequence
  Chemically Synthesized
QVQLQESGGGLVQAGGSLRLSCAASGTISVFIYMGWYRQAPGKEREFVASINLGGTTNYADSVKGRFTISRDNAKNTVYLQMNSLKPEDTAVYYCAVWIYPPGAHIYWGQGTQVTVSS

SEQ ID NO: 25576 - protein, 124 aa, Artificial Sequence
  Chemically Synthesized
QVQLQESGGGLVQAGGSLRLSCAASGNISTYQMGWYRQAPGKEREFVATIGVGSNTYYADSVKGRFTISRDNAKNTVYLQMNSLKPEDTAVYYCAAVSVAGSLLLVVTFLVMYWGQGTQVTVSS

SEQ ID NO: 25577 - protein, 118 aa, Artificial Sequence
  Chemically Synthesized
QVQLQESGGGLVQAGGSLRLSCAASGSISPRDRMGWYRQAPGKEREFVAGIAQGASTYYADSVKGRFTISRDNAKNTVYLQMNSLKPEDTAVYYCAAWIGLDYYFDYWGQGTQVTVSS

SEQ ID NO: 25578 - protein, 121 aa, Artificial Sequence
  Chemically Synthesized
QVQLQESGGGLVQAGGSLRLSCAASGYIFLTYLMGWYRQAPGKERELVAGISTGSSTYYADSVKGRFTISRDNAKNTVYLQMNSLKPEDTAVYYCAATVLVTVSTTVTLYWGQGTQVTVSS

SEQ ID NO: 25579 - protein, 118 aa, Artificial Sequence
  Chemically Synthesized
QVQLQESGGGLVQAGGSLRLSCAASGTIFRYNGMGWYRQAPGKERELVASIAEGATTYYADSVKGRFTISRDNAKNTVYLQMNSLKPEDTAVYYCAAPKYGLLYFVYWGQGTQVTVSS

SEQ ID NO: 25580 - protein, 118 aa, Artificial Sequence
  Chemically Synthesized
QVQLQESGGGLVQAGGSLRLSCAASGTIFWIGRMGWYRQAPGKERELVASIGPGGTTNYADSVKGRFTISRDNAKNTVYLQMNSLKPEDTAVYYCAVSVPYFNYLGYWGQGTQVTVSS

SEQ ID NO: 25581 - protein, 122 aa, Artificial Sequence
  Chemically Synthesized
QVQLQESGGGLVQAGGSLRLSCAASGSISVSTIMGWYRQAPGKEREFVATIDQGGSTNYADSVKGRFTISRDNAKNTVYLQMNSLKPEDTAVYYCAAPYDRDQDEYGDLLYWGQGTQVTVSS

SEQ ID NO: 25582 - protein, 118 aa, Artificial Sequence
  Chemically Synthesized
QVQLQESGGGLVQAGGSLRLSCAASGNISWRRYMGWYRQAPGKERELVATINPGSNTYYADSVKGRFTISRDNAKNTVYLQMNSLKPEDTAVYYCAANAPLGIAHWYWGQGTQVTVSS

SEQ ID NO: 25583 - protein, 118 aa, Artificial Sequence
  Chemically Synthesized
QVQLQESGGGLVQAGGSLRLSCAASGNISYSLYMGWYRQAPGKERELVAGINDGSTTNYADSVKGRFTISRDNAKNTVYLQMNSLKPEDTAVYYCAVYITAGRYLVYWGQGTQVTVSS

SEQ ID NO: 25584 - protein, 120 aa, Artificial Sequence
  Chemically Synthesized
QVQLQESGGGLVQAGGSLRLSCAASGTIFEYYGMGWYRQAPGKEREFAGISDGSITYYADSVKGRFTISRDNAKNTVYLQMNSLKPEDTAVYYCAADVPDALYVERHVYWGQGTQVTVSS

SEQ ID NO: 25585 - protein, 117 aa, Artificial Sequence
  Chemically Synthesized
QVQLQESGGGLVQAGGSLRLSCAASGSIFDGRYMGWYRQAPGKERELVAGITPGSTTYYADSVKGRFTISRDNAKNTVYLQMNSLKPEDTAVYYCAVFTTGTVSIYWGQGTQVTVSS

SEQ ID NO: 25586 - protein, 121 aa, Artificial Sequence
  Chemically Synthesized
QVQLQESGGGLVQAGGSLRLSCAASGTIFGTSMGWYRQAPGKEREFVAAIDQGTITYYADSVKGRFTISRDNAKNTVYLQMNSLKPEDTAVYYCAVNIVTADATYFTYTYWGQGTQVTVSS

SEQ ID NO: 25587 - protein, 118 aa, Artificial Sequence
  Chemically Synthesized
QVQLQESGGGLVQAGGSLRLSCAASGTIFGYDWMGWYRQAPGKEREFVASITYGTTTYYADSVKGRFTISRDNAKNTVYLQMNSLKPEDTAVYYCAVDQITYEVLIYWGQGTQVTVSS

SEQ ID NO: 25588 - protein, 117 aa, Artificial Sequence
  Chemically Synthesized
QVQLQESGGGLVQAGGSLRLSCAASGNISYGSTMGWYRQAPGKEREFVAAINYGSITYYADSVKGRFTISRDNAKNTVYLQMNSLKPEDTAVYYCAADRPELNYHYWGQGTQVTVSS

SEQ ID NO: 25589 - protein, 118 aa, Artificial Sequence
  Chemically Synthesized
QVQLQESGGGLVQAGGSLRLSCAASGNIFSARYMGWYRQAPGKEREFVAAINLGTITNYADSVKGRFTISRDNAKNTVYLQMNSLKPEDTAVYYCAARYRLGKYFWYWGQGTQVTVSS

SEQ ID NO: 25590 - protein, 126 aa, Artificial Sequence
  Chemically Synthesized
QVQLQESGGGLVQAGGSLRLSCAASGNISYEIDMGWYRQAPGKEREFVAAIDGGSSTNYADSVKGRFTISRDNAKNTVYLQMNSLKPEDTAVYYCAAVVPQVDGWSHWSYVYFDYWGQGTQVTVSS

SEQ ID NO: 25591 - protein, 122 aa, Artificial Sequence
  Chemically Synthesized
QVQLQESGGGLVQAGGSLRLSCAASGTISFDSLMGWYRQAPGKERELVAAITNGSSTYYADSVKGRFTISRDNAKNTVYLQMNSLKPEDTAVYYCAVTYVAGYSWSVGPCYWGQGTQVTVSS

SEQ ID NO: 25592 - protein, 120 aa, Artificial Sequence
  Chemically Synthesized
QVQLQESGGGLVQAGGSLRLSCAASGTISLQLYMGWYRQAPGKERELLPLLMTVVIPYADSVKGRFTISRDNAKNTVYLQMNSLKPEDTAVYYCAVTTDRGYGADAHPYWGQGTQVTVSS

SEQ ID NO: 25593 - protein, 125 aa, Artificial Sequence
  Chemically Synthesized
QVQLQESGGGLVQAGGSLRLSCAASGTISGYVEMGWYRQAPGKERELLPVLLLVVLPYADSVKGRFTISRDNAKNTVYLQMNSLKPEDTAVYYCAVGSSDPQTARGDSRYTFQYWGQGTQVTVSS

SEQ ID NO: 25594 - protein, 118 aa, Artificial Sequence
  Chemically Synthesized
QVQLQESGGGLVQAGGSLRLSCAASGNIFLRYDMGWYRQAPGKEREFVASIDAGSTTYYADSVKGRFTISRDNAKNTVYLQMNSLKPEDTAVYYCAVADLDTFTHDYWGQGTQVTVSS

SEQ ID NO: 25595 - protein, 117 aa, Artificial Sequence
  Chemically Synthesized
QVQLQESGGGLVQAGGSLRLSCAASGNISHTRDMGWYRQAPGKEREFVAAMYLYADSVKGRFTISRDNAKNTVYLQMNSLKPEDTAVYYCAATDRYNDYYANSHDYWGQGTQVTVSS

SEQ ID NO: 25596 - protein, 113 aa, Artificial Sequence
  Chemically Synthesized
QVQLQESGGGLVQAGGSLRLSCAASGYISHVSAMGWYRQAPGKERELVAAITVGSITYYADSVKGRFTISRDNAKNTVYLQMNSLKPEDTAVYYCAAIGGRYWGQGTQVTVSS

SEQ ID NO: 25597 - protein, 111 aa, Artificial Sequence
  Chemically Synthesized
QVQLQESGGGLVQAGGSLRLSCAASGNIFYIWGMGWYRQAPGKEREFVATIAGGTNTYADSVKGRFTISRDNAKNTVYLQMNSLKPEDTAVYYCAVSLLYWGQGTQVTVSS

SEQ ID NO: 25598 - protein, 118 aa, Artificial Sequence
  Chemically Synthesized
QVQLQESGGGLVQAGGSLRLSCAASGSISPGDLMGWYRQAPGKERELVAGITTGANTNYADSVKGRFTISRDNAKNTVYLQMNSLKPEDTAVYYCAVYRWCLLSLWYWGQGTQVTVSS

SEQ ID NO: 25599 - protein, 123 aa, Artificial Sequence
  Chemically Synthesized
QVQLQESGGGLVQAGGSLRLSCAASGYISDAHVMGWYRQAPGKEREFVATIDQGSITNYADSVKGRFTISRDNAKNTVYLQMNSLKPEDTAVYYCAASDHVGYYWLADHYRYWGQGTQVTVSS

SEQ ID NO: 25600 - protein, 122 aa, Artificial Sequence
  Chemically Synthesized
QVQLQESGGGLVQAGGSLRLSCAASGYIFGYNAMGWYRQAPGKEREFVASIDSGGITNYADSVKGRFTISRDNAKNTVYLQMNSLKPEDTAVYYCAVVYPKPYPWATLLAYWGQGTQVTVSS

SEQ ID NO: 25601 - protein, 115 aa, Artificial Sequence
  Chemically Synthesized
QVQLQESGGGLVQAGGSLRLSCAASGSIFASPMGWYRQAPGKEREFVAGIAQGGITNYADSVKGRFTISRDNAKNTVYLQMNSLKPEDTAVYYCAANYVYTHQYWGQGTQVTVSS

SEQ ID NO: 25602 - protein, 122 aa, Artificial Sequence
  Chemically Synthesized
QVQLQESGGGLVQAGGSLRLSCAASGTISLSNYMGWYRQAPGKERELVAGITAGANTNYADSVKGRFTISRDNAKNTVYLQMNSLKPEDTAVYYCAVDIDLGWYRTYDHDYWGQGTQVTVSS

SEQ ID NO: 25603 - protein, 125 aa, Artificial Sequence
  Chemically Synthesized
QVQLQESGGGLVQAGGSLRLSCAASGYISDSSPMGWYRQAPGKEREFVPLLVLVLIPYADSVKGRFTISRDNAKNTVYLQMNSLKPEDTAVYYCAAYNIAIYVYRVGSDNDLVYWGQGTQVTVSS

SEQ ID NO: 25604 - protein, 122 aa, Artificial Sequence
  Chemically Synthesized
QVQLQESGGGLVQAGGSLRLSCAASGNIFDDLYMGWYRQAPGKEREFVASIDFGGTTNYADSVKGRFTISRDNAKNTVYLQMNSLKPEDTAVYYCAVWGRNDVYFPDALYYWGQGTQVTVSS

SEQ ID NO: 25605 - protein, 119 aa, Artificial Sequence
  Chemically Synthesized
QVQLQESGGGLVQAGGSLRLSCAASGNISYRKVMGWYRQAPGKEREFVAAIDGGTNTNYADSVKGRFTISRDNAKNTVYLQMNSLKPEDTAVYYCAAESNRDWYDLSYWGQGTQVTVSS

SEQ ID NO: 25606 - protein, 121 aa, Artificial Sequence
  Chemically Synthesized
QVQLQESGGGLVQAGGSLRLSCAASGSISFLYYMGWYRQAPGKEREFVAAIGRGTSTNYADSVKGRFTISRDNAKNTVYLQMNSLKPEDTAVYYCAAQYRSTIVGTTTFYWGQGTQVTVSS

SEQ ID NO: 25607 - protein, 117 aa, Artificial Sequence
  Chemically Synthesized
QVQLQESGGGLVQAGGSLRLSCAASGSISHVNVMGWYRQAPGKEREFVAAISDGGTTYYADSVKGRFTISRDNAKNTVYLQMNSLKPEDTAVYYCAVNGGSPQHAYWGQGTQVTVSS

SEQ ID NO: 25608 - protein, 120 aa, Artificial Sequence
  Chemically Synthesized
QVQLQESGGGLVQAGGSLRLSCAASGNIFTVTMGWYRQAPGKEREFVAGIAYGTTTYYADSVKGRFTISRDNAKNTVYLQMNSLKPEDTAVYYCAVANYSATGGSTLIYWGQGTQVTVSS

SEQ ID NO: 25609 - protein, 122 aa, Artificial Sequence
  Chemically Synthesized
QVQLQESGGGLVQAGGSLRLSCAASGTIFYAVLMGWYRQAPGKERELVAGIDDGANTYYADSVKGRFTISRDNAKNTVYLQMNSLKPEDTAVYYCAAVYQGTGYERYDHVYWGQGTQVTVSS

SEQ ID NO: 25610 - protein, 125 aa, Artificial Sequence
  Chemically Synthesized
QVQLQESGGGLVQAGGSLRLSCAASGYISTRIMGWYRQAPGKERELVATIAGGGITNYADSVKGRFTISRDNAKNTVYLQMNSLKPEDTAVYYCAVNYLAATVRAGDEGAYHRYWGQGTQVTVSS

SEQ ID NO: 25611 - protein, 121 aa, Artificial Sequence
  Chemically Synthesized
QVQLQESGGGLVQAGGSLRLSCAASGTILLFNMGWYRQAPGKEREFVATINAGTNTNYADSVKGRFTISRDNAKNTVYLQMNSLKPEDTAVYYCAADYYSYTPDLYQLDYWGQGTQVTVSS

SEQ ID NO: 25612 - protein, 122 aa, Artificial Sequence
  Chemically Synthesized
QVQLQESGGGLVQAGGSLRLSCAASGTISRDSQMGWYRQAPGKERELVASIDEGGTTNYADSVKGRFTISRDNAKNTVYLQMNSLKPEDTAVYYCAVDPGDGATIHWAHRYWGQGTQVTVSS

SEQ ID NO: 25613 - protein, 121 aa, Artificial Sequence
  Chemically Synthesized
QVQLQESGGGLVQAGGSLRLSCAASGTIFPTGSMGWYRQAPGKERELVAILLLVVLPYADSVKGRFTISRDNAKNTVYLQMNSLKPEDTAVYYCAATYASYEIAYLWHDYWGQGTQVTVSS

SEQ ID NO: 25614 - protein, 118 aa, Artificial Sequence
  Chemically Synthesized
QVQLQESGGGLVQAGGSLRLSCAASGTIFKDAYMGWYRQAPGKEREFVAAITPGGSTYYADSVKGRFTISRDNAKNTVYLQMNSLKPEDTAVYYCAVWDANESQHAYWGQGTQVTVSS

SEQ ID NO: 25615 - protein, 122 aa, Artificial Sequence
  Chemically Synthesized
QVQLQESGGGLVQAGGSLRLSCAASGNIFYYIYMGWYRQAPGKEREFVATITRGANTNYADSVKGRFTISRDNAKNTVYLQMNSLKPEDTAVYYCAADRYWSKDLSTDHEYWGQGTQVTVSS

SEQ ID NO: 25616 - protein, 122 aa, Artificial Sequence
  Chemically Synthesized
QVQLQESGGGLVQAGGSLRLSCAASGNIFVTYAMGWYRQAPGKERELVAGIDGGAITNYADSVKGRFTISRDNAKNTVYLQMNSLKPEDTAVYYCAVGTTVSYQIRRYHYYWGQGTQVTVSS

SEQ ID NO: 25617 - protein, 122 aa, Artificial Sequence
  Chemically Synthesized
QVQLQESGGGLVQAGGSLRLSCAASGSIFDSYYMGWYRQAPGKERELVASIDPGTSTYYADSVKGRFTISRDNAKNTVYLQMNSLKPEDTAVYYCAALVKSYRVVYYYLQYWGQGTQVTVSS

SEQ ID NO: 25618 - protein, 118 aa, Artificial Sequence
  Chemically Synthesized
QVQLQESGGGLVQAGGSLRLSCAASGTIFADDYMGWYRQAPGKERELVASITSGTTTYYADSVKGRFTISRDNAKNTVYLQMNSLKPEDTAVYYCAVPTDVRVWLGYWGQGTQVTVSS

SEQ ID NO: 25619 - protein, 118 aa, Artificial Sequence
  Chemically Synthesized
QVQLQESGGGLVQAGGSLRLSCAASGYISYNLYMGWYRQAPGKERELVATISIGSITNYADSVKGRFTISRDNAKNTVYLQMNSLKPEDTAVYYCAAYVPYYDVLPYWGQGTQVTVSS

SEQ ID NO: 25620 - protein, 117 aa, Artificial Sequence
  Chemically Synthesized
QVQLQESGGGLVQAGGSLRLSCAASGNIFWYGMGWYRQAPGKERELVATIDLGTSTNYADSVKGRFTISRDNAKNTVYLQMNSLKPEDTAVYYCAAQIGYSYNLDYWGQGTQVTVSS

SEQ ID NO: 25621 - protein, 117 aa, Artificial Sequence
  Chemically Synthesized
QVQLQESGGGLVQAGGSLRLSCAASGNIFRYAMGWYRQAPGKERELVAAISTGSTTNYADSVKGRFTISRDNAKNTVYLQMNSLKPEDTAVYYCAVSKTLGPQYWYWGQGTQVTVSS

SEQ ID NO: 25622 - protein, 124 aa, Artificial Sequence
  Chemically Synthesized
QVQLQESGGGLVQAGGSLRLSCAASGNIFSHLSMGWYRQAPGKEREFVAAIDSGAITYYADSVKGRFTISRDNAKNTVYLQMNSLKPEDTAVYYCAVLALGQYAYYGGYDTIYWGQGTQVTVSS

SEQ ID NO: 25623 - protein, 127 aa, Artificial Sequence
  Chemically Synthesized
QVQLQESGGGLVQAGGSLRLSCAASGTIFLLAGMGWYRQAPGKERELVAGINAGANTNYADSVKGRFTISRDNAKNTVYLQMNSLKPEDTAVYYCAVDYPAPSYEQVITPTSWHYYWGQGTQVTVSS

SEQ ID NO: 25624 - protein, 126 aa, Artificial Sequence
  Chemically Synthesized
QVQLQESGGGLVQAGGSLRLSCAASGTISGGYAMGWYRQAPGKEREFVASIGYGATTNYADSVKGRFTISRDNAKNTVYLQMNSLKPEDTAVYYCAAYPDLYLEIDDDVSSFLDYWGQGTQVTVSS

SEQ ID NO: 25625 - protein, 123 aa, Artificial Sequence
  Chemically Synthesized
QVQLQESGGGLVQAGGSLRLSCAASGSIFDALRMGWYRQAPGKERELVAGIANGGNTYYADSVKGRFTISRDNAKNTVYLQMNSLKPEDTAVYYCAAWYATSPWSGDWGHIYWGQGTQVTVSS

SEQ ID NO: 25626 - protein, 118 aa, Artificial Sequence
  Chemically Synthesized
QVQLQESGGGLVQAGGSLRLSCAASGYISDSDYMGWYRQAPGKERELVAGIDDGGSNLYADSVKGRFTISRDNAKNTVYLQMNSLKPEDTAVYYCAAEEVYVFPHEYWGQGTQVTVSS

SEQ ID NO: 25627 - protein, 117 aa, Artificial Sequence
  Chemically Synthesized
QVQLQESGGGLVQAGGSLRLSCAASGNISYRPLMGWYRQAPGKERELVATMLTVVIPYADSVKGRFTISRDNAKNTVYLQMNSLKPEDTAVYYCAVRGRWDYGLRYWGQGTQVTVSS

SEQ ID NO: 25628 - protein, 122 aa, Artificial Sequence
  Chemically Synthesized
QVQLQESGGGLVQAGGSLRLSCAASGNIFYLVGMGWYRQAPGKERELVASIGSGTTTYYADSVKGRFTISRDNAKNTVYLQMNSLKPEDTAVYYCAVYTWHNDAPYYAHGYWGQGTQVTVSS

SEQ ID NO: 25629 - protein, 118 aa, Artificial Sequence
  Chemically Synthesized
QVQLQESGGGLVQAGGSLRLSCAASGNIFYWYEMGWYRQAPGKEREFVASISQGTSTNYADSVKGRFTISRDNAKNTVYLQMNSLKPEDTAVYYCAADYIGQDPFYYWGQGTQVTVSS

SEQ ID NO: 25630 - protein, 122 aa, Artificial Sequence
  Chemically Synthesized
QVQLQESGGGLVQAGGSLRLSCAASGSISIDPYMGWYRQAPGKEREFVATIAIGTNTYYADSVKGRFTISRDNAKNTVYLQMNSLKPEDTAVYYCAVVYIIYPQDPDYFQYWGQGTQVTVSS

SEQ ID NO: 25631 - protein, 123 aa, Artificial Sequence
  Chemically Synthesized
QVQLQESGGGLVQAGGSLRLSCAASGSISLNPLIMGWYRQAPGKEREFVAGITSGSTTYYADSVKGRFTISRDNAKNTVYLQMNSLKPEDTAVYYCAVDGGSDVRGIRTFYYWGQGTQVTVSS

SEQ ID NO: 25632 - protein, 118 aa, Artificial Sequence
  Chemically Synthesized
QVQLQESGGGLVQAGGSLRLSCAASGSISADNIMGWYRQAPGKEREFVATINAGGTTNYADSVKGRFTISRDNAKNTVYLQMNSLKPEDTAVYYCAVPWHDPYIHSYWGQGTQVTVSS

SEQ ID NO: 25633 - protein, 118 aa, Artificial Sequence
  Chemically Synthesized
QVQLQESGGGLVQAGGSLRLSCAASGTIFTYHHMGWYRQAPGKERELVASISDGTNTNYADSVKGRFTISRDNAKNTVYLQMNSLKPEDTAVYYCAVWYWVYSLHLYWGQGTQVTVSS

SEQ ID NO: 25634 - protein, 119 aa, Artificial Sequence
  Chemically Synthesized
QVQLQESGGGLVQAGGSLRLSCAASGSISVHPVMGWYRQAPGKEREFVATIDRGSSTYYADSVKGRFTISRDNAKNTVYLQMNSLKPEDTAVYYCAVWRRIHFPRLSYWGQGTQVTVSS

SEQ ID NO: 25635 - protein, 121 aa, Artificial Sequence
  Chemically Synthesized
QVQLQESGGGLVQAGGSLRLSCAASGNIFVRYVMGWYRQAPGKEREFVATISGVVVPYADSVKGRFTISRDNAKNTVYLQMNSLKPEDTAVYYCAADPYDYLELDYGHDYWGQGTQVTVSS

SEQ ID NO: 25636 - protein, 117 aa, Artificial Sequence
  Chemically Synthesized
QVQLQESGGGLVQAGGSLRLSCAASGTIFWSERMGWYRQAPGKERELVATITEVVLPYADSVKGRFTISRDNAKNTVYLQMNSLKPEDTAVYYCAASLPVAGPYVYWGQGTQVTVSS

SEQ ID NO: 25637 - protein, 122 aa, Artificial Sequence
  Chemically Synthesized
QVQLQESGGGLVQAGGSLRLSCAASGNISVVNQMGWYRQAPGKERELVAAITYGATTYYADSVKGRFTISRDNAKNTVYLQMNSLKPEDTAVYYCAVVWRGYDPGRKSHFYWGQGTQVTVSS

SEQ ID NO: 25638 - protein, 121 aa, Artificial Sequence
  Chemically Synthesized
QVQLQESGGGLVQAGGSLRLSCAASGNIFFPAMGWYRQAPGKERELVASIADGTITNYADSVKGRFTISRDNAKNTVYLQMNSLKPEDTAVYYCAAGDSERFYNDAGHTYWGQGTQVTVSS

SEQ ID NO: 25639 - protein, 118 aa, Artificial Sequence
  Chemically Synthesized
QVQLQESGGGLVQAGGSLRLSCAASGTIFHLYWMGWYRQAPGKERELVAGIAYGSTTYYADSVKGRFTISRDNAKNTVYLQMNSLKPEDTAVYYCAVNEARNRVHEYWGQGTQVTVSS

SEQ ID NO: 25640 - protein, 118 aa, Artificial Sequence
  Chemically Synthesized
QVQLQESGGGLVQAGGSLRLSCAASGTIFLSDIMGWYRQAPGKEREFVAGISYGGTTNYADSVKGRFTISRDNAKNTVYLQMNSLKPEDTAVYYCAASGEGGAGLGYWGQGTQVTVSS

SEQ ID NO: 25641 - protein, 121 aa, Artificial Sequence
  Chemically Synthesized
QVQLQESGGGLVQAGGSLRLSCAASGYISGDTGMGWYRQAPGKERELVATIDGGTITNYADSVKGRFTISRDNAKNTVYLQMNSLKPEDTAVYYCAVVTVTLVLRFRTLYWGQGTQVTVSS

SEQ ID NO: 25642 - protein, 117 aa, Artificial Sequence
  Chemically Synthesized
QVQLQESGGGLVQAGGSLRLSCAASGTYMGWYRQAPGKEREFVATINRGTNTYYADSVKGRFTISRDNAKNTVYLQMNSLKPEDTAVYYCAAPYYTDTALIWYHDYWGQGTQVTVSS

SEQ ID NO: 25643 - protein, 126 aa, Artificial Sequence
  Chemically Synthesized
QVQLQESGGGLVQAGGSLRLSCAASGNIFLSYFMGWYRQAPGKERELVATIAAGTNTNYADSVKGRFTISRDNAKNTVYLQMNSLKPEDTAVYYCAAGSYNVPYQYLLADVGHAYWGQGTQVTVSS

SEQ ID NO: 25644 - protein, 118 aa, Artificial Sequence
  Chemically Synthesized
QVQLQESGGGLVQAGGSLRLSCAASGTISSVAAMGWYRQAPGKERELVAAIDPGSTTYYADSVKGRFTISRDNAKNTVYLQMNSLKPEDTAVYYCAADSPFFYDHVYWGQGTQVTVSS

SEQ ID NO: 25645 - protein, 117 aa, Artificial Sequence
  Chemically Synthesized
QVQLQESGGGLVQAGGSLRLSCAASGTIFDGRDMGWYRQAPGKEREFVAVLITVVLPYADSVKGRFTISRDNAKNTVYLQMNSLKPEDTAVYYCAAYIFSGYAFLYWGQGTQVTVSS

SEQ ID NO: 25646 - protein, 112 aa, Artificial Sequence
  Chemically Synthesized
QVQLQESGGGLVQAGGSLRLSCAASGSIFDQHGMGWYRQAPGKERELVASITYGTTTNYADSVKGRFTISRDNAKNTVYLQMNSLKPEDTAVYYCAATVMYWGQGTQVTVSS

SEQ ID NO: 25647 - protein, 117 aa, Artificial Sequence
  Chemically Synthesized
QVQLQESGGGLVQAGGSLRLSCAASGTIFGLVDMGWYRQAPGKEREFVATISTGGTTNYADSVKGRFTISRDNAKNTVYLQMNSLKPEDTAVYYCAVGSTRWTLIYWGQGTQVTVSS

SEQ ID NO: 25648 - protein, 125 aa, Artificial Sequence
  Chemically Synthesized
QVQLQESGGGLVQAGGSLRLSCAASGNIFGGYYMGWYRQAPGKERELVAAITYGGTTYYADSVKGRFTISRDNAKNTVYLQMNSLKPEDTAVYYCAVPRYDGGESTLTTGTFIYWGQGTQVTVSS

SEQ ID NO: 25649 - protein, 122 aa, Artificial Sequence
  Chemically Synthesized
QVQLQESGGGLVQAGGSLRLSCAASGSISPYTGMGWYRQAPGKERELVATIAGGSSTYYADSVKGRFTISRDNAKNTVYLQMNSLKPEDTAVYYCAAYDTYTYSTAPLYEYWGQGTQVTVSS

SEQ ID NO: 25650 - protein, 122 aa, Artificial Sequence
  Chemically Synthesized
QVQLQESGGGLVQAGGSLRLSCAASGYIFREYSMGWYRQAPGKERELVAAITTGTNTYYADSVKGRFTISRDNAKNTVYLQMNSLKPEDTAVYYCAVDASPLSYNPGHFTYWGQGTQVTVSS

SEQ ID NO: 25651 - protein, 122 aa, Artificial Sequence
  Chemically Synthesized
QVQLQESGGGLVQAGGSLRLSCAASGTIFSSRRMGWYRQAPGKEREFVASISRGGSTNYADSVKGRFTISRDNAKNTVYLQMNSLKPEDTAVYYCAVSLSGGTWHKYFFTYWGQGTQVTVSS

SEQ ID NO: 25652 - protein, 115 aa, Artificial Sequence
  Chemically Synthesized
QVQLQESGGGLVQAGGSLRLSCAASGTIFTRYGMGWYRQAPGKERELVASINDVLLPYADSVKGRFTISRDNAKNTVYLQMNSLKPEDTAVYYCAAKSSLTSLYWGQGTQVTVSS

SEQ ID NO: 25653 - protein, 117 aa, Artificial Sequence
  Chemically Synthesized
QVQLQESGGGLVQAGGSLRLSCAASGYIFVDSSMGWYRQAPGKEREFVAGITYGAITNYADSVKGRFTISRDNAKNTVYLQMNSLKPEDTAVYYCAAHAGAQLEHYWGQGTQVTVSS

SEQ ID NO: 25654 - protein, 118 aa, Artificial Sequence
  Chemically Synthesized
QVQLQESGGGLVQAGGSLRLSCAASGTIFRDWAMGWYRQAPGKERELVAGIDYGANTYYADSVKGRFTISRDNAKNTVYLQMNSLKPEDTAVYYCAAYQYSANYYDYWGQGTQVTVSS

SEQ ID NO: 25655 - protein, 118 aa, Artificial Sequence
  Chemically Synthesized
QVQLQESGGGLVQAGGSLRLSCAASGNISRGQHMGWYRQAPGKERELVATIDRGSSTYYADSVKGRFTISRDNAKNTVYLQMNSLKPEDTAVYYCAVYDYVPYDHWYWGQGTQVTVSS

SEQ ID NO: 25656 - protein, 126 aa, Artificial Sequence
  Chemically Synthesized
QVQLQESGGGLVQAGGSLRLSCAASGNISAYGFMGWYRQAPGKEREFVAAIGNGTNTYYADSVKGRFTISRDNAKNTVYLQMNSLKPEDTAVYYCAAANDQGTYALYLLDGGHDYWGQGTQVTVSS

SEQ ID NO: 25657 - protein, 126 aa, Artificial Sequence
  Chemically Synthesized
QVQLQESGGGLVQAGGSLRLSCAASGNIFRHEQMGWYRQAPGKEREFVASIASGASTNYADSVKGRFTISRDNAKNTVYLQMNSLKPEDTAVYYCAVTNTRWSVGFTTTWITLAYWGQGTQVTVSS

SEQ ID NO: 25658 - protein, 118 aa, Artificial Sequence
  Chemically Synthesized
QVQLQESGGGLVQAGGSLRLSCAASGTIFLVTAMGWYRQAPGKERELVATITRGSSTNYADSVKGRFTISRDNAKNTVYLQMNSLKPEDTAVYYCAVYYSLLYPHAYWGQGTQVTVSS

SEQ ID NO: 25659 - protein, 117 aa, Artificial Sequence
  Chemically Synthesized
QVQLQESGGGLVQAGGSLRLSCAASGYISDLFMGWYRQAPGKERELVAAINAGSTTYYADSVKGRFTISRDNAKNTVYLQMNSLKPEDTAVYYCAVYEVRSPGYWYWGQGTQVTVSS

SEQ ID NO: 25660 - protein, 125 aa, Artificial Sequence
  Chemically Synthesized
QVQLQESGGGLVQAGGSLRLSCAASGNISNYYRMGWYRQAPGKERELVASISDGAITNYADSVKGRFTISRDNAKNTVYLQMNSLKPEDTAVYYCAVALTLTLLTCTTVGVSIYWGQGTQVTVSS

SEQ ID NO: 25661 - protein, 118 aa, Artificial Sequence
  Chemically Synthesized
QVQLQESGGGLVQAGGSLRLSCAASGSISNVPDMGWYRQAPGKERELVAAIGRGTNTYYADSVKGRFTISRDNAKNTVYLQMNSLKPEDTAVYYCAVGDSSLLIHTYWGQGTQVTVSS

SEQ ID NO: 25662 - protein, 126 aa, Artificial Sequence
  Chemically Synthesized
QVQLQESGGGLVQAGGSLRLSCAASGTIFYGYGMGWYRQAPGKERELVASIASGGITYYADSVKGRFTISRDNAKNTVYLQMNSLKPEDTAVYYCAAGDYSYLSDYDVGVVAYGYWGQGTQVTVSS

SEQ ID NO: 25663 - protein, 114 aa, Artificial Sequence
  Chemically Synthesized
QVQLQESGGGLVQAGGSLRLSCAASGTISFQSRMGWYRQAPGKEREFVAAIGVGSITYYADSVKGRFTISRDNAKNTVYLQMNSLKPEDTAVYYCAAGDGLGYWGQGTQVTVSS

SEQ ID NO: 25664 - protein, 116 aa, Artificial Sequence
  Chemically Synthesized
QVQLQESGGGLVQAGGSLRLSCAASGSISGRMGWYRQAPGKERELVATISRGTITNYADSVKGRFTISRDNAKNTVYLQMNSLKPEDTAVYYCAAYEYGPDRDLYWGQGTQVTVSS

SEQ ID NO: 25665 - protein, 122 aa, Artificial Sequence
  Chemically Synthesized
QVQLQESGGGLVQAGGSLRLSCAASGSISPDGDMGWYRQAPGKERELVATIDTGTTTNYADSVKGRFTISRDNAKNTVYLQMNSLKPEDTAVYYCAADLSVGGGGLLNHTYWGQGTQVTVSS

SEQ ID NO: 25666 - protein, 118 aa, Artificial Sequence
  Chemically Synthesized
QVQLQESGGGLVQAGGSLRLSCAASGNISDTEYMGWYRQAPGKERELVASIGVGTITYYADSVKGRFTISRDNAKNTVYLQMNSLKPEDTAVYYCAVGGRRTGQYVYWGQGTQVTVSS

SEQ ID NO: 25667 - protein, 117 aa, Artificial Sequence
  Chemically Synthesized
QVQLQESGGGLVQAGGSLRLSCAASGTIFGVHYMGWYRQAPGKEREFVAGIDQGGITYYADSVKGRFTISRDNAKNTVYLQMNSLKPEDTAVYYCAVEIIRDGHWYWGQGTQVTVSS

SEQ ID NO: 25668 - protein, 118 aa, Artificial Sequence
  Chemically Synthesized
QVQLQESGGGLVQAGGSLRLSCAASGNIFTDDNMGWYRQAPGKEREFVAAISVGSSTNYADSVKGRFTISRDNAKNTVYLQMNSLKPEDTAVYYCAADDAPYYLLDYWGQGTQVTVSS

SEQ ID NO: 25669 - protein, 118 aa, Artificial Sequence
  Chemically Synthesized
QVQLQESGGGLVQAGGSLRLSCAASGYISRYGDMGWYRQAPGKERELVASIARGSSTNYADSVKGRFTISRDNAKNTVYLQMNSLKPEDTAVYYCAATRSSTGYHWYWGQGTQVTVSS

SEQ ID NO: 25670 - protein, 118 aa, Artificial Sequence
  Chemically Synthesized
QVQLQESGGGLVQAGGSLRLSCAASGYIFDGPYMGWYRQAPGKEREFVAAISGGATTYYADSVKGRFTISRDNAKNTVYLQMNSLKPEDTAVYYCAARYGSDPALLYWGQGTQVTVSS

SEQ ID NO: 25671 - protein, 121 aa, Artificial Sequence
  Chemically Synthesized
QVQLQESGGGLVQAGGSLRLSCAASGTIFNTGHMGWYRQAPGKERELVATIGRGSTYYADSVKGRFTISRDNAKNTVYLQMNSLKPEDTAVYYCAALIGNGSYDNTVYGYWGQGTQVTVSS

SEQ ID NO: 25672 - protein, 126 aa, Artificial Sequence
  Chemically Synthesized
QVQLQESGGGLVQAGGSLRLSCAASGNISAGDIMGWYRQAPGKEREFVAGINIGASTYYADSVKGRFTISRDNAKNTVYLQMNSLKPEDTAVYYCAVTSDTWYIGYNYEGYVHYYWGQGTQVTVSS

SEQ ID NO: 25673 - protein, 118 aa, Artificial Sequence
  Chemically Synthesized
QVQLQESGGGLVQAGGSLRLSCAASGYISFLHYMGWYRQAPGKERELVATINQGTSTNYADSVKGRFTISRDNAKNTVYLQMNSLKPEDTAVYYCAVGSYDLRELVYWGQGTQVTVSS

SEQ ID NO: 25674 - protein, 126 aa, Artificial Sequence
  Chemically Synthesized
QVQLQESGGGLVQAGGSLRLSCAASGNISYISWMGWYRQAPGKERELVATINAGATTYYADSVKGRFTISRDNAKNTVYLQMNSLKPEDTAVYYCAVEYISDQDWNYWSDTFHLYWGQGTQVTVSS

SEQ ID NO: 25675 - protein, 117 aa, Artificial Sequence
  Chemically Synthesized
QVQLQESGGGLVQAGGSLRLSCAASGTIFRFQTMGWYRQAPGKERELVATIDDGSITYYADSVKGRFTISRDNAKNTVYLQMNSLKPEDTAVYYCAVRTSRSVTFYWGQGTQVTVSS

SEQ ID NO: 25676 - protein, 116 aa, Artificial Sequence
  Chemically Synthesized
QVQLQESGGGLVQAGGSLRLSCAASGNIFDSVMGWYRQAPGKERELVATITVGGNTNYADSVKGRFTISRDNAKNTVYLQMNSLKPEDTAVYYCAVYYPDNEHYYWGQGTQVTVSS

SEQ ID NO: 25677 - protein, 126 aa, Artificial Sequence
  Chemically Synthesized
QVQLQESGGGLVQAGGSLRLSCAASGTISGASGMGWYRQAPGKERELVATIAYGTITNYADSVKGRFTISRDNAKNTVYLQMNSLKPEDTAVYYCAVDIDGPFVDALYPYIPFGYWGQGTQVTVSS

SEQ ID NO: 25678 - protein, 118 aa, Artificial Sequence
  Chemically Synthesized
QVQLQESGGGLVQAGGSLRLSCAASGSISYDYAMGWYRQAPGKEREFVATIAGGGTTNYADSVKGRFTISRDNAKNTVYLQMNSLKPEDTAVYYCAAVYTRHPLYPYWGQGTQVTVSS

SEQ ID NO: 25679 - protein, 121 aa, Artificial Sequence
  Chemically Synthesized
QVQLQESGGGLVQAGGSLRLSCAASGTISLDGYMGWYRQAPGKEREFVAGIGYGGITNYADSVKGRFTISRDNAKNTVYLQMNSLKPEDTAVYYCAPYYSWYTPTLEHGYWGQGTQVTVSS

SEQ ID NO: 25680 - protein, 118 aa, Artificial Sequence
  Chemically Synthesized
QVQLQESGGGLVQAGGSLRLSCAASGTIFGLEAMGWYRQAPGKERELVATISNGGSTNYADSVKGRFTISRDNAKNTVYLQMNSLKPEDTAVYYCAAGWVEYTVFGYWGQGTQVTVSS

SEQ ID NO: 25681 - protein, 118 aa, Artificial Sequence
  Chemically Synthesized
QVQLQESGGGLVQAGGSLRLSCAASGTISFYGSMGWYRQAPGKEREFVASIGYGTNTYYADSVKGRFTISRDNAKNTVYLQMNSLKPEDTAVYYCAVGYYGWRKHAYWGQGTQVTVSS

SEQ ID NO: 25682 - protein, 118 aa, Artificial Sequence
  Chemically Synthesized
QVQLQESGGGLVQAGGSLRLSCAASGTISPPYPMGWYRQAPGKEREFVAAIAYGASTNYADSVKGRFTISRDNAKNTVYLQMNSLKPEDTAVYYCAAVSGYHSAALYWGQGTQVTVSS

SEQ ID NO: 25683 - protein, 117 aa, Artificial Sequence
  Chemically Synthesized
QVQLQESGGGLVQAGGSLRLSCAASGNIFFSLMGWYRQAPGKERELVATITVGATTYYADSVKGRFTISRDNAKNTVYLQMNSLKPEDTAVYYCAAPIRGGQVHYYWGQGTQVTVSS

SEQ ID NO: 25684 - protein, 118 aa, Artificial Sequence
  Chemically Synthesized
QVQLQESGGGLVQAGGSLRLSCAASGNISGWNYMGWYRQAPGKERELVAGITYGATTNYADSVKGRFTISRDNAKNTVYLQMNSLKPEDTAVYYCAVRYESSDLLYYWGQGTQVTVSS

SEQ ID NO: 25685 - protein, 119 aa, Artificial Sequence
  Chemically Synthesized
QVQLQESGGGLVQAGGSLRLSCAASGNIFDRGYMGWYRQAPGKEREFVAGIGKGGITNYADSVKGRFTISRDNAKNTVYLQMNSLKPEDTAVYYCAVVTLPQQQGALYWGQGTQVTVSS

SEQ ID NO: 25686 - protein, 118 aa, Artificial Sequence
  Chemically Synthesized
QVQLQESGGGLVQAGGSLRLSCAASGTISAGLLMGWYRQAPGKERELVATIAGGSNTYYADSVKGRFTISRDNAKNTVYLQMNSLKPEDTAVYYCAVLPYPAVDFGYWGQGTQVTVSS

SEQ ID NO: 25687 - protein, 126 aa, Artificial Sequence
  Chemically Synthesized
QVQLQESGGGLVQAGGSLRLSCAASGTIFIPYPMGWYRQAPGKEREFVAGIGYGGSTNYADSVKGRFTISRDNAKNTVYLQMNSLKPEDTAVYYCAAIAYTDPDDYADDSRAHHYWGQGTQVTVSS

SEQ ID NO: 25688 - protein, 118 aa, Artificial Sequence
  Chemically Synthesized
QVQLQESGGGLVQAGGSLRLSCAASGYISRDVIMGWYRQAPGKEREFVATINNGGITYYADSVKGRFTISRDNAKNTVYLQMNSLKPEDTAVYYCAVVGEAAVWLYYWGQGTQVTVSS

SEQ ID NO: 25689 - protein, 118 aa, Artificial Sequence
  Chemically Synthesized
QVQLQESGGGLVQAGGSLRLSCAASGTIFDPTIMGWYRQAPGKERELVAGINTGASTNYADSVKGRFTISRDNAKNTVYLQMNSLKPEDTAVYYCAAPYYDDKVHGYWGQGTQVTVSS

SEQ ID NO: 25690 - protein, 122 aa, Artificial Sequence
  Chemically Synthesized
QVQLQESGGGLVQAGGSLRLSCAASGTISHTYYMGWYRQAPGKEREFVAGITGGATTNYADSVKGRFTISRDNAKNTVYLQMNSLKPEDTAVYYCAVHIHYGPDYATGLNYWGQGTQVTVSS

SEQ ID NO: 25691 - protein, 118 aa, Artificial Sequence
  Chemically Synthesized
QVQLQESGGGLVQAGGSLRLSCAASGTISPDADMGWYRQAPGKERELVATIGQGGNTNYADSVKGRFTISRDNAKNTVYLQMNSLKPEDTAVYYCAAAPSDYFALVYWGQGTQVTVSS

SEQ ID NO: 25692 - protein, 121 aa, Artificial Sequence
  Chemically Synthesized
QVQLQESGGGLVQAGGSLRLSCAASGLFLLTTMGWYRQAPGKEREFVAAINVGTTTNYADSVKGRFTISRDNAKNTVYLQMNSLKPEDTAVYYCAAVYRTSPVARRYYYYWGQGTQVTVSS

SEQ ID NO: 25693 - protein, 122 aa, Artificial Sequence
  Chemically Synthesized
QVQLQESGGGLVQAGGSLRLSCAASGNIFNRRYMGWYRQAPGKERELVATINGGANTYYADSVKGRFTISRDNAKNTVYLQMNSLKPEDTAVYYCAVVFVYDADEPLGYRYWGQGTQVTVSS

SEQ ID NO: 25694 - protein, 126 aa, Artificial Sequence
  Chemically Synthesized
QVQLQESGGGLVQAGGSLRLSCAASGTIFNYDDMGWYRQAPGKERELVAGIAKGTSTYYADSVKGRFTISRDNAKNTVYLQMNSLKPEDTAVYYCAVGFDFVQEWSNGVWDWYPYWGQGTQVTVSS

SEQ ID NO: 25695 - protein, 122 aa, Artificial Sequence
  Chemically Synthesized
QVQLQESGGGLVQAGGSLRLSCAASGNIFDQFYMGWYRQAPGKERELVASIASGANTYYADSVKGRFTISRDNAKNTVYLQMNSLKPEDTAVYYCAVGPEYKYPLDKGFAYWGQGTQVTVSS

SEQ ID NO: 25696 - protein, 121 aa, Artificial Sequence
  Chemically Synthesized
QVQLQESGGGLVQAGGSLRLSCAASGNISTQSGMGWYRQAPGKERELVASIGEVVLPYADSVKGRFTISRDNAKNTVYLQMNSLKPEDTAVYYCAVLWQLDIEVSQYLQYWGQGTQVTVSS

SEQ ID NO: 25697 - protein, 118 aa, Artificial Sequence
  Chemically Synthesized
QVQLQESGGGLVQAGGSLRLSCAASGNIFPYTNMGWYRQAPGKEREFVASIGLGTTTYYADSVKGRFTISRDNAKNTVYLQMNSLKPEDTAVYYCAVAGSALRFHGYWGQGTQVTVSS

SEQ ID NO: 25698 - protein, 120 aa, Artificial Sequence
  Chemically Synthesized
QVQLQESGGGLVQAGGSLRLSCAASGYISYDTMGWYRQAPGKERELVATIAIGTNTYYADSVKGRFTISRDNAKNTVYLQMNSLKPEDTAVYYCAVQTFRSYRDIDFSYWGQGTQVTVSS

SEQ ID NO: 25699 - protein, 117 aa, Artificial Sequence
  Chemically Synthesized
QVQLQESGGGLVQAGGSLRLSCAASGNIFRTVMGWYRQAPGKEREFVAAIDRGTITNYADSVKGRFTISRDNAKNTVYLQMNSLKPEDTAVYYCAAGDYYVDSLRYWGQGTQVTVSS

SEQ ID NO: 25700 - protein, 122 aa, Artificial Sequence
  Chemically Synthesized
QVQLQESGGGLVQAGGSLRLSCAASGTISGDNTMGWYRQAPGKEREFVAGIDIGGTTYYADSVKGRFTISRDNAKNTVYLQMNSLKPEDTAVYYCAVPLAIYLVDIDDYPYWGQGTQVTVSS

SEQ ID NO: 25701 - protein, 118 aa, Artificial Sequence
  Chemically Synthesized
QVQLQESGGGLVQAGGSLRLSCAASGSIFDVDGMGWYRQAPGKERELVASIASGSSTNYADSVKGRFTISRDNAKNTVYLQMNSLKPEDTAVYYCAASVDTNHYLYYWGQGTQVTVSS

SEQ ID NO: 25702 - protein, 118 aa, Artificial Sequence
  Chemically Synthesized
QVQLQESGGGLVQAGGSLRLSCAASGYISGDILMGWYRQAPGKERELVAAISWGGITYYADSVKGRFTISRDNAKNTVYLQMNSLKPEDTAVYYCAVGLRSKDPLNYWGQGTQVTVSS

SEQ ID NO: 25703 - protein, 122 aa, Artificial Sequence
  Chemically Synthesized
QVQLQESGGGLVQAGGSLRLSCAASGTISSQRLMGWYRQAPGKEREFVAAIDDGSNTNYADSVKGRFTISRDNAKNTVYLQMNSLKPEDTAVYYCAPYEDYPDYGDVLFRYWGQGTQVTVSS

SEQ ID NO: 25704 - protein, 120 aa, Artificial Sequence
  Chemically Synthesized
QVQLQESGGGLVQAGGSLRLSCAASGYIFNDPIMGWYRQAPGKEREPGIDYGSITYYADSVKGRFTISRDNAKNTVYLQMNSLKPEDTAVYYCAASYNAHGGPYYILQYWGQGTQVTVSS

SEQ ID NO: 25705 - protein, 118 aa, Artificial Sequence
  Chemically Synthesized
QVQLQESGGGLVQAGGSLRLSCAASGSIFKSGSMGWYRQAPGKERELVASISAGAITYYADSVKGRFTISRDNAKNTVYLQMNSLKPEDTAVYYCAVSSSREPGYDYWGQGTQVTVSS

SEQ ID NO: 25706 - protein, 120 aa, Artificial Sequence
  Chemically Synthesized
QVQLQESGGGLVQAGGSLRLSCAASGSISRPKYMGWYRQAPGKERELVASIGIGTITNYADSVKGRFTISRDNAKNTVYLQMNSLKPEDTAVYYCAVIYDVYGSLTNIYWGQGTQVTVSS

SEQ ID NO: 25707 - protein, 121 aa, Artificial Sequence
  Chemically Synthesized
QVQLQESGGGLVQAGGSLRLSCAASGYFLLCVMGWYRQAPGKEREFVASITYGTITNYADSVKGRFTISRDNAKNTVYLQMNSLKPEDTAVYYCAVDGFNAIIAYWDLHYWGQGTQVTVSS

SEQ ID NO: 25708 - protein, 111 aa, Artificial Sequence
  Chemically Synthesized
QVQLQESGGGLVQAGGSLRLSCAASGSIFYPREMGWYRQAPGKERELVAGISEGATTNYADSVKGRFTISRDNAKNTVYLQMNSLKPEDTAVYYCAVHTYWGQGTQVTVSS

SEQ ID NO: 25709 - protein, 126 aa, Artificial Sequence
  Chemically Synthesized
QVQLQESGGGLVQAGGSLRLSCAASGTISDSTDMGWYRQAPGKEREFVASINSGASTNYADSVKGRFTISRDNAKNTVYLQMNSLKPEDTAVYYCAAYLSDEPWGYSDYLRDHNYWGQGTQVTVSS

SEQ ID NO: 25710 - protein, 127 aa, Artificial Sequence
  Chemically Synthesized
QVQLQESGGGLVQAGGSLRLSCAASGNISDSGSMGWYRQAPGKERELVAGIDRFGYYYLYADSVKGRFTISRDNAKNTVYLQMNSLKPEDTAVYYCAVNTTYYGLKDVHDVYGLYYWGQGTQVTVSS

SEQ ID NO: 25711 - protein, 118 aa, Artificial Sequence
  Chemically Synthesized
QVQLQESGGGLVQAGGSLRLSCAASGYISFYRYMGWYRQAPGKEREFVAAINVGTSTYYADSVKGRFTISRDNAKNTVYLQMNSLKPEDTAVYYCAVWSSNAQQLYYWGQGTQVTVSS

SEQ ID NO: 25712 - protein, 117 aa, Artificial Sequence
  Chemically Synthesized
QVQLQESGGGLVQAGGSLRLSCAASGSISGESVMGWYRQAPGKERELVAGILRVVLPYADSVKGRFTISRDNAKNTVYLQMNSLKPEDTAVYYCAATVITSDQFYYWGQGTQVTVSS

SEQ ID NO: 25713 - protein, 117 aa, Artificial Sequence
  Chemically Synthesized
QVQLQESGGGLVQAGGSLRLSCAASGSISDPTYMGWYRQAPGKEREFVAAIGRGSNTYYADSVKGRFTISRDNAKNTVYLQMNSLKPEDTAVYYCAAVYNYSSSIYWGQGTQVTVSS

SEQ ID NO: 25714 - protein, 125 aa, Artificial Sequence
  Chemically Synthesized
QVQLQESGGGLVQAGGSLRLSCAASGTIFLLYLMGWYRQAPGKERELVATIDFGGSTNYADSVKGRFTISRDNAKNTVYLQMNSLKPEDTAVYYCAVAWQDLNYGGTRYDYHWYWGQGTQVTVSS

SEQ ID NO: 25715 - protein, 121 aa, Artificial Sequence
  Chemically Synthesized
QVQLQESGGGLVQAGGSLRLSCAASGHTMGWYRQAPGKEREFVASISPGTTTYYADSVKGRFTISRDNAKNTVYLQMNSLKPEDTAVYYCAVYLYHGRYGLPNSDYYFAYWGQGTQVTVSS

SEQ ID NO: 25716 - protein, 126 aa, Artificial Sequence
  Chemically Synthesized
QVQLQESGGGLVQAGGSLRLSCAASGNIFSIDTMGWYRQAPGKEREFVAGIDQGGITNYADSVKGRFTISRDNAKNTVYLQMNSLKPEDTAVYYCAVAPRVTSDAGYTLVVAHAYWGQGTQVTVSS

SEQ ID NO: 25717 - protein, 122 aa, Artificial Sequence
  Chemically Synthesized
QVQLQESGGGLVQAGGSLRLSCAASGTIFGTEIMGWYRQAPGKERELVAGIDRGAITNYADSVKGRFTISRDNAKNTVYLQMNSLKPEDTAVYYCAVPYLYAAGEADYFDYWGQGTQVTVSS

SEQ ID NO: 25718 - protein, 118 aa, Artificial Sequence
  Chemically Synthesized
QVQLQESGGGLVQAGGSLRLSCAASGNISSHITMGWYRQAPGKERELVATISRGANTNYADSVKGRFTISRDNAKNTVYLQMNSLKPEDTAVYYCAARGNYETWLYYWGQGTQVTVSS

SEQ ID NO: 25719 - protein, 118 aa, Artificial Sequence
  Chemically Synthesized
QVQLQESGGGLVQAGGSLRLSCAASGSISPSDAMGWYRQAPGKEREFVAAINRGGNTYYADSVKGRFTISRDNAKNTVYLQMNSLKPEDTAVYYCAAYGGSDLNHRYWGQGTQVTVSS

SEQ ID NO: 25720 - protein, 117 aa, Artificial Sequence
  Chemically Synthesized
QVQLQESGGGLVQAGGSLRLSCAASGTISYDGYMGWYRQAPGKERELVASIGRGTNTNYADSVKGRFTISRDNAKNTVYLQMNSLKPEDTAVYYCAANYGDYSVFYWGQGTQVTVSS

SEQ ID NO: 25721 - protein, 118 aa, Artificial Sequence
  Chemically Synthesized
QVQLQESGGGLVQAGGSLRLSCAASGSISYHWGMGWYRQAPGKEREFVASIGVGTSTNYADSVKGRFTISRDNAKNTVYLQMNSLKPEDTAVYYCAADSYEYRRFGYWGQGTQVTVSS

SEQ ID NO: 25722 - protein, 126 aa, Artificial Sequence
  Chemically Synthesized
QVQLQESGGGLVQAGGSLRLSCAASGNISPYSTMGWYRQAPGKERELVAAISYGTTTYYADSVKGRFTISRDNAKNTVYLQMNSLKPEDTAVYYCAVIVWHISDHGKYPFSLYDYWGQGTQVTVSS

SEQ ID NO: 25723 - protein, 117 aa, Artificial Sequence
  Chemically Synthesized
QVQLQESGGGLVQAGGSLRLSCAASGLFLSLSMGWYRQAPGKEREFVAAITYGSSTNYADSVKGRFTISRDNAKNTVYLQMNSLKPEDTAVYYCAVTILTDEGHYYWGQGTQVTVSS

SEQ ID NO: 25724 - protein, 124 aa, Artificial Sequence
  Chemically Synthesized
QVQLQESGGGLVQAGGSLRLSCAASGNISSKSMGWYRQAPGKERELVAGISYGGSTNYADSVKGRFTISRDNAKNTVYLQMNSLKPEDTAVYYCAAWGPYSRYGEYYFDIHWYWGQGTQVTVSS

SEQ ID NO: 25725 - protein, 110 aa, Artificial Sequence
  Chemically Synthesized
QVQLQESGGGLVQAGGSLRLSCAASGTISYSRAMGWYRQAPGKERELVAGIADGSTTYYADSVKGRFTISRDNAKNTVYLQMNSLKPEDTAVYYCAAEYWGQGTQVTVSS

SEQ ID NO: 25726 - protein, 118 aa, Artificial Sequence
  Chemically Synthesized
QVQLQESGGGLVQAGGSLRLSCAASGNIFYYIAMGWYRQAPGKERELVASISSGGTTNYADSVKGRFTISRDNAKNTVYLQMNSLKPEDTAVYYCAADVNSGFYYGYWGQGTQVTVSS

SEQ ID NO: 25727 - protein, 116 aa, Artificial Sequence
  Chemically Synthesized
QVQLQESGGGLVQAGGSLRLSCAASGSISGLYLMGWYRQAPGKEREFVASIDIGGITNYADSVKGRFTISRDNAKNTVYLQMNSLKPEDTAVYYCAVRVVKYHPYWGQGTQVTVSS

SEQ ID NO: 25728 - protein, 118 aa, Artificial Sequence
  Chemically Synthesized
QVQLQESGGGLVQAGGSLRLSCAASGYISRYQYMGWYRQAPGKERELVASIAHGAITYYADSVKGRFTISRDNAKNTVYLQMNSLKPEDTAVYYCAVETYAGTDYLYWGQGTQVTVSS

SEQ ID NO: 25729 - protein, 126 aa, Artificial Sequence
  Chemically Synthesized
QVQLQESGGGLVQAGGSLRLSCAASGTISGWRVMGWYRQAPGKEREFVAAISNGGNTNYADSVKGRFTISRDNAKNTVYLQMNSLKPEDTAVYYCAATDTDILSQNTTSAASLGYWGQGTQVTVSS

SEQ ID NO: 25730 - protein, 117 aa, Artificial Sequence
  Chemically Synthesized
QVQLQESGGGLVQAGGSLRLSCAASGSIFWARTMGWYRQAPGKERELVASITQGSNTNYADSVKGRFTISRDNAKNTVYLQMNSLKPEDTAVYYCAVSVTTSTGMYWGQGTQVTVSS

SEQ ID NO: 25731 - protein, 121 aa, Artificial Sequence
  Chemically Synthesized
QVQLQESGGGLVQAGGSLRLSCAASGNILVVTMGWYRQAPGKEREFVAGITWGGTTNYADSVKGRFTISRDNAKNTVYLQMNSLKPEDTAVYYCAVDADYNQDGYGSLVYWGQGTQVTVSS

SEQ ID NO: 25732 - protein, 125 aa, Artificial Sequence
  Chemically Synthesized
QVQLQESGGGLVQAGGSLRLSCAASGTIFYLALMGWYRQAPGKERELVASITPGTLPYADSVKGRFTISRDNAKNTVYLQMNSLKPEDTAVYYCAATLVQIVVADRSDDNPHDYWGQGTQVTVSS

SEQ ID NO: 25733 - protein, 118 aa, Artificial Sequence
  Chemically Synthesized
QVQLQESGGGLVQAGGSLRLSCAASGSISGVHYMGWYRQAPGKERELVASIDLGGTTYYADSVKGRFTISRDNAKNTVYLQMNSLKPEDTAVYYCAAINRGGYFLWYWGQGTQVTVSS

SEQ ID NO: 25734 - protein, 117 aa, Artificial Sequence
  Chemically Synthesized
QVQLQESGGGLVQAGGSLRLSCAASGNIFDRDFMGWYRQAPGKEREFVAVLVLVVLPYADSVKGRFTISRDNAKNTVYLQMNSLKPEDTAVYYCAAGQVNDFSHRYWGQGTQVTVSS

SEQ ID NO: 25735 - protein, 121 aa, Artificial Sequence
  Chemically Synthesized
QVQLQESGGGLVQAGGSLRLSCAASGSISYPEGMGWYRQAPGKEREFVATIDSVLLPYADSVKGRFTISRDNAKNTVYLQMNSLKPEDTAVYYCAVQLLSTVYSDIPFPYWGQGTQVTVSS

SEQ ID NO: 25736 - protein, 118 aa, Artificial Sequence
  Chemically Synthesized
QVQLQESGGGLVQAGGSLRLSCAASGYIFIGTYMGWYRQAPGKERELVASITDGGSTNYADSVKGRFTISRDNAKNTVYLQMNSLKPEDTAVYYCAAHRNEPNPHTYWGQGTQVTVSS

SEQ ID NO: 25737 - protein, 112 aa, Artificial Sequence
  Chemically Synthesized
QVQLQESGGGLVQAGGSLRLSCAASGNISVYLFMGWYRQAPGKERELVATIDSVLVPYADSVKGRFTISRDNAKNTVYLQMNSLKPEDTAVYYCAGDDFGYWGQGTQVTVSS

SEQ ID NO: 25738 - protein, 117 aa, Artificial Sequence
  Chemically Synthesized
QVQLQESGGGLVQAGGSLRLSCAASGTISADTKMGWYRQAPGKERELVAGINTVLLPYADSVKGRFTISRDNAKNTVYLQMNSLKPEDTAVYYCAADVLIVADLYYWGQGTQVTVSS

SEQ ID NO: 25739 - protein, 122 aa, Artificial Sequence
  Chemically Synthesized
QVQLQESGGGLVQAGGSLRLSCAASGYISYSVYMGWYRQAPGKEREFVAGINSGSNTNYADSVKGRFTISRDNAKNTVYLQMNSLKPEDTAVYYCAVRASRPPITTARYYYWGQGTQVTVSS

SEQ ID NO: 25740 - protein, 118 aa, Artificial Sequence
  Chemically Synthesized
QVQLQESGGGLVQAGGSLRLSCAASGTISFPIGMGWYRQAPGKEREFVAGINFGAITYYADSVKGRFTISRDNAKNTVYLQMNSLKPEDTAVYYCAVLSVYQKPYGYWGQGTQVTVSS

SEQ ID NO: 25741 - protein, 125 aa, Artificial Sequence
  Chemically Synthesized
QVQLQESGGGLVQAGGSLRLSCAASGTISYYSFMGWYRQAPGKERELLPVLLTVVLPYADSVKGRFTISRDNAKNTVYLQMNSLKPEDTAVYYCAAWQRYPRSDYKDWVTAHVYWGQGTQVTVSS

SEQ ID NO: 25742 - protein, 122 aa, Artificial Sequence
  Chemically Synthesized
QVQLQESGGGLVQAGGSLRLSCAASGYIFYGEIMGWYRQAPGKERELVATITTGTITYYADSVKGRFTISRDNAKNTVYLQMNSLKPEDTAVYYCAADRGNLYASNPPHRYWGQGTQVTVSS

SEQ ID NO: 25743 - protein, 126 aa, Artificial Sequence
  Chemically Synthesized
QVQLQESGGGLVQAGGSLRLSCAASGYISYAYSMGWYRQAPGKEREFVATIGDGANTNYADSVKGRFTISRDNAKNTVYLQMNSLKPEDTAVYYCAVPHQSFDVITYTRTPSLYYWGQGTQVTVSS

SEQ ID NO: 25744 - protein, 122 aa, Artificial Sequence
  Chemically Synthesized
QVQLQESGGGLVQAGGSLRLSCAASGNISYYNGMGWYRQAPGKERELVAGISLGANTNYADSVKGRFTISRDNAKNTVYLQMNSLKPEDTAVYYCAVLAGPNAAYELSHTYWGQGTQVTVSS

SEQ ID NO: 25745 - protein, 118 aa, Artificial Sequence
  Chemically Synthesized
QVQLQESGGGLVQAGGSLRLSCAASGTISAIRYMGWYRQAPGKERELVASIDHGGNTNYADSVKGRFTISRDNAKNTVYLQMNSLKPEDTAVYYCAADRYIAHWYLYWGQGTQVTVSS

SEQ ID NO: 25746 - protein, 118 aa, Artificial Sequence
  Chemically Synthesized
QVQLQESGGGLVQAGGSLRLSCAASGTISYYSIMGWYRQAPGKERELVATITIGTTTNYADSVKGRFTISRDNAKNTVYLQMNSLKPEDTAVYYCAVGQGASTGHKYWGQGTQVTVSS

SEQ ID NO: 25747 - protein, 117 aa, Artificial Sequence
  Chemically Synthesized
QVQLQESGGGLVQAGGSLRLSCAASGNIFGDSGMGWYRQAPGKERELVAAIASVVIPYADSVKGRFTISRDNAKNTVYLQMNSLKPEDTAVYYCAVTYYYTDDYSYWGQGTQVTVSS

SEQ ID NO: 25748 - protein, 122 aa, Artificial Sequence
  Chemically Synthesized
QVQLQESGGGLVQAGGSLRLSCAASGTIFGPYEMGWYRQAPGKERELVATIDPGANTNYADSVKGRFTISRDNAKNTVYLQMNSLKPEDTAVYYCAAPAAYTQAGYYYHDYWGQGTQVTVSS

SEQ ID NO: 25749 - protein, 118 aa, Artificial Sequence
  Chemically Synthesized
QVQLQESGGGLVQAGGSLRLSCAASGYIFTYGYMGWYRQAPGKERELVASINDGSITNYADSVKGRFTISRDNAKNTVYLQMNSLKPEDTAVYYCAATYRDDLALPYWGQGTQVTVSS

SEQ ID NO: 25750 - protein, 118 aa, Artificial Sequence
  Chemically Synthesized
QVQLQESGGGLVQAGGSLRLSCAASGYISYRYFMGWYRQAPGKERELVAAISDGATTYYADSVKGRFTISRDNAKNTVYLQMNSLKPEDTAVYYCAVYYDVPEYLSYWGQGTQVTVSS

SEQ ID NO: 25751 - protein, 123 aa, Artificial Sequence
  Chemically Synthesized
QVQLQESGGGLVQAGGSLRLSCAASGTIFFILAMGWYRQAPGKEREFVAAINEGSSTYYADSVKGRFTISRDNAKNTVYLQMNSLKPEDTAVYYCAVNYQLDGELRYINFYYWGQGTQVTVSS

SEQ ID NO: 25752 - protein, 126 aa, Artificial Sequence
  Chemically Synthesized
QVQLQESGGGLVQAGGSLRLSCAASGSISSAYIMGWYRQAPGKEREFVAAIAYGGTTYYADSVKGRFTISRDNAKNTVYLQMNSLKPEDTAVYYCAAYDGDHLDQFDWDYADYGYWGQGTQVTVSS

SEQ ID NO: 25753 - protein, 118 aa, Artificial Sequence
  Chemically Synthesized
QVQLQESGGGLVQAGGSLRLSCAASGSISDFVVMGWYRQAPGKERELVASIAAGSTTYYADSVKGRFTISRDNAKNTVYLQMNSLKPEDTAVYYCAVVPYSHRHFPYWGQGTQVTVSS

SEQ ID NO: 25754 - protein, 117 aa, Artificial Sequence
  Chemically Synthesized
QVQLQESGGGLVQAGGSLRLSCAASGSIFFVDDMGWYRQAPGKERELVASIGTGTTTYYADSVKGRFTISRDNAKNTVYLQMNSLKPEDTAVYYCAAFTLFCRTLYWGQGTQVTVSS

SEQ ID NO: 25755 - protein, 118 aa, Artificial Sequence
  Chemically Synthesized
QVQLQESGGGLVQAGGSLRLSCAASGTISVQGQMGWYRQAPGKERELVAAITPGTITYYADSVKGRFTISRDNAKNTVYLQMNSLKPEDTAVYYCAVYTDRKLPFLYWGQGTQVTVSS

SEQ ID NO: 25756 - protein, 122 aa, Artificial Sequence
  Chemically Synthesized
QVQLQESGGGLVQAGGSLRLSCAASGSIFLRGYMGWYRQAPGKEREFVAGIAFGSSTNYADSVKGRFTISRDNAKNTVYLQMNSLKPEDTAVYYCAAYIDYTDEPPFDYYYWGQGTQVTVSS

SEQ ID NO: 25757 - protein, 122 aa, Artificial Sequence
  Chemically Synthesized
QVQLQESGGGLVQAGGSLRLSCAASGNISSRRTMGWYRQAPGKERELVASIDQGANTYYADSVKGRFTISRDNAKNTVYLQMNSLKPEDTAVYYCAVTGLGGDGQITYYAYWGQGTQVTVSS

SEQ ID NO: 25758 - protein, 125 aa, Artificial Sequence
  Chemically Synthesized
QVQLQESGGGLVQAGGSLRLSCAASGSIFDFISMGWYRQAPGKEREFVAAIDTVVIPYADSVKGRFTISRDNAKNTVYLQMNSLKPEDTAVYYCAATRYTDHYDTVYTGASHEYWGQGTQVTVSS

SEQ ID NO: 25759 - protein, 121 aa, Artificial Sequence
  Chemically Synthesized
QVQLQESGGGLVQAGGSLRLSCAASGSISYNREMGWYRQAPGKERELVAGITYGGITYYADSVKGRFTISRDNAKNTVYLQMNSLKPEDTAVYYCAAAAIDSDTVSSNMYWGQGTQVTVSS

SEQ ID NO: 25760 - protein, 126 aa, Artificial Sequence
  Chemically Synthesized
QVQLQESGGGLVQAGGSLRLSCAASGNIFVYASMGWYRQAPGKEREFVASIDVGTSTYYADSVKGRFTISRDNAKNTVYLQMNSLKPEDTAVYYCAAHGYQDTLVVDDHTGNHVYWGQGTQVTVSS

SEQ ID NO: 25761 - protein, 115 aa, Artificial Sequence
  Chemically Synthesized
QVQLQESGGGLVQAGGSLRLSCAASGSISAMGWYRQAPGKEREFVATIGDGASTYYADSVKGRFTISRDNAKNTVYLQMNSLKPEDTAVYYCAVALYASYQHSYWGQGTQVTVSS

SEQ ID NO: 25762 - protein, 122 aa, Artificial Sequence
  Chemically Synthesized
QVQLQESGGGLVQAGGSLRLSCAASGSISDDYYMGWYRQAPGKEREFVAGITVGSITNYADSVKGRFTISRDNAKNTVYLQMNSLKPEDTAVYYCAAVELDRPGVDPYLPYWGQGTQVTVSS

SEQ ID NO: 25763 - protein, 111 aa, Artificial Sequence
  Chemically Synthesized
QVQLQESGGGLVQAGGSLRLSCAASGNISLVRVMGWYRQAPGKERELVAAIGLGGITYYADSVKGRFTISRDNAKNTVYLQMNSLKPEDTAVYYCAYHTYWGQGTQVTVSS

SEQ ID NO: 25764 - protein, 122 aa, Artificial Sequence
  Chemically Synthesized
QVQLQESGGGLVQAGGSLRLSCAASGSISWDYIMGWYRQAPGKEREFVATITGGTTTYYADSVKGRFTISRDNAKNTVYLQMNSLKPEDTAVYYCAAPYPKPYYRGDDHKYWGQGTQVTVSS

SEQ ID NO: 25765 - protein, 118 aa, Artificial Sequence
  Chemically Synthesized
QVQLQESGGGLVQAGGSLRLSCAASGYIFHDYVMGWYRQAPGKEREFVATIDTGATTNYADSVKGRFTISRDNAKNTVYLQMNSLKPEDTAVYYCAATDDFDHAHTYWGQGTQVTVSS

SEQ ID NO: 25766 - protein, 118 aa, Artificial Sequence
  Chemically Synthesized
QVQLQESGGGLVQAGGSLRLSCAASGSIFGGSYMGWYRQAPGKEREFVAGIAPGTITNYADSVKGRFTISRDNAKNTVYLQMNSLKPEDTAVYYCAVGDLYSTLYSYWGQGTQVTVSS

SEQ ID NO: 25767 - protein, 118 aa, Artificial Sequence
  Chemically Synthesized
QVQLQESGGGLVQAGGSLRLSCAASGSIFDLYDMGWYRQAPGKERELVAAIDYGAITYYADSVKGRFTISRDNAKNTVYLQMNSLKPEDTAVYYCAAGQDRGDNHVYWGQGTQVTVSS

SEQ ID NO: 25768 - protein, 118 aa, Artificial Sequence
  Chemically Synthesized
QVQLQESGGGLVQAGGSLRLSCAASGYISRTIYMGWYRQAPGKEREFVAGIAYGTTTYYADSVKGRFTISRDNAKNTVYLQMNSLKPEDTAVYYCAAYRQNGYRLNYWGQGTQVTVSS

SEQ ID NO: 25769 - protein, 118 aa, Artificial Sequence
  Chemically Synthesized
QVQLQESGGGLVQAGGSLRLSCAASGSIFRAYGMGWYRQAPGKERELVAAISGGGTTNYADSVKGRFTISRDNAKNTVYLQMNSLKPEDTAVYYCAAYWNRDYGFVYWGQGTQVTVSS

SEQ ID NO: 25770 - protein, 117 aa, Artificial Sequence
  Chemically Synthesized
QVQLQESGGGLVQAGGSLRLSCAASGNISRGESMGWYRQAPGKERELVATISDGATTYYADSVKGRFTISRDNAKNTVYLQMNSLKPEDTAVYYCAAVLSVPKHVYWGQGTQVTVSS

SEQ ID NO: 25771 - protein, 124 aa, Artificial Sequence
  Chemically Synthesized
QVQLQESGGGLVQAGGSLRLSCAASGTIFSLYWMGWYRQAPGKERELLPLLMKVVVPYADSVKGRFTISRDNAKNTVYLQMNSLKPEDTAVYYCAFWLTSSTTTCVLVLVSFYWGQGTQVTVSS

SEQ ID NO: 25772 - protein, 122 aa, Artificial Sequence
  Chemically Synthesized
QVQLQESGGGLVQAGGSLRLSCAASGNIFDLVYMGWYRQAPGKEREFVATISYGATTNYADSVKGRFTISRDNAKNTVYLQMNSLKPEDTAVYYCAAYGEGATRDDDGFWYWGQGTQVTVSS

SEQ ID NO: 25773 - protein, 122 aa, Artificial Sequence
  Chemically Synthesized
QVQLQESGGGLVQAGGSLRLSCAASGSISNFLLMGWYRQAPGKEREFVAGIDPGTSTYYADSVKGRFTISRDNAKNTVYLQMNSLKPEDTAVYYCAVGYTTIYYDPDYYYYWGQGTQVTVSS

SEQ ID NO: 25774 - protein, 117 aa, Artificial Sequence
  Chemically Synthesized
QVQLQESGGGLVQAGGSLRLSCAASGNIFGAPYMGWYRQAPGKERELVAGIGSGATTYYADSVKGRFTISRDNAKNTVYLQMNSLKPEDTAVYYCARLDPYYRHYYWGQGTQVTVSS

SEQ ID NO: 25775 - protein, 125 aa, Artificial Sequence
  Chemically Synthesized
QVQLQESGGGLVQAGGSLRLSCAASGTISDYGAMGWYRQAPGKEREFVATIDQGGTTYYADSVKGRFTISRDNAKNTVYLQMNSLKPEDTAVYYCAVVYGIPAGPYYITDDHQYWGQGTQVTVSS

SEQ ID NO: 25776 - protein, 118 aa, Artificial Sequence
  Chemically Synthesized
QVQLQESGGGLVQAGGSLRLSCAASGNIFGGAIMGWYRQAPGKEREFVAGINPGTITNYADSVKGRFTISRDNAKNTVYLQMNSLKPEDTAVYYCAADTEYNDSHGYWGQGTQVTVSS

SEQ ID NO: 25777 - protein, 120 aa, Artificial Sequence
  Chemically Synthesized
QVQLQESGGGLVQAGGSLRLSCAASGNISYVYVMGWYRQAPGKERELVASINGGASTNYADSVKGRFTISRDNAKNTVYLQMNSLKPEDTAVYYCAAWYGLSLWWRHAYWGQGTQVTVSS

SEQ ID NO: 25778 - protein, 118 aa, Artificial Sequence
  Chemically Synthesized
QVQLQESGGGLVQAGGSLRLSCAASGTISDLDYMGWYRQAPGKERELVASIGFGASTYYADSVKGRFTISRDNAKNTVYLQMNSLKPEDTAVYYCAVYNSYVPTLGYWGQGTQVTVSS

SEQ ID NO: 25779 - protein, 111 aa, Artificial Sequence
  Chemically Synthesized
QVQLQESGGGLVQAGGSLRLSCAASGYISYDPVMGWYRQAPGKERELVATLLVVVLPYADSVKGRFTISRDNAKNTVYLQMNSLKPEDTAVYYCAFYHAYWGQGTQVTVSS

SEQ ID NO: 25780 - protein, 122 aa, Artificial Sequence
  Chemically Synthesized
QVQLQESGGGLVQAGGSLRLSCAASGTIFTGPQMGWYRQAPGKERELVATIAPGATTYYADSVKGRFTISRDNAKNTVYLQMNSLKPEDTAVYYCAVRIFVLTDAYVVLSYWGQGTQVTVSS

SEQ ID NO: 25781 - protein, 119 aa, Artificial Sequence
  Chemically Synthesized
QVQLQESGGGLVQAGGSLRLSCAASGNISRPYMGWYRQAPGKERELVAAIDDGATTYYADSVKGRFTISRDNAKNTVYLQMNSLKPEDTAVYYCAVIDAWVATNVHGYWGQGTQVTVSS

SEQ ID NO: 25782 - protein, 126 aa, Artificial Sequence
  Chemically Synthesized
QVQLQESGGGLVQAGGSLRLSCAASGYISVAGWMGWYRQAPGKERELVATITIGATTNYADSVKGRFTISRDNAKNTVYLQMNSLKPEDTAVYYCAAGGDPDEYYHVGVTGSHYYWGQGTQVTVSS

SEQ ID NO: 25783 - protein, 116 aa, Artificial Sequence
  Chemically Synthesized
QVQLQESGGGLVQAGGSLRLSCAASGTISPRDTMGWYRQAPGKEREFVASIGTGTITYYADSVKGRFTISRDNAKNTVYLQMNSLKPEDTAVYYCAVRVQERLDYWGQGTQVTVSS

SEQ ID NO: 25784 - protein, 122 aa, Artificial Sequence
  Chemically Synthesized
QVQLQESGGGLVQAGGSLRLSCAASGSISYDGIMGWYRQAPGKEREFVATINTGAITYYADSVKGRFTISRDNAKNTVYLQMNSLKPEDTAVYYCAVPGYSYSRRWGRYRYWGQGTQVTVSS

SEQ ID NO: 25785 - protein, 118 aa, Artificial Sequence
  Chemically Synthesized
QVQLQESGGGLVQAGGSLRLSCAASGNISYLYQMGWYRQAPGKERELVASINTGGSTYYADSVKGRFTISRDNAKNTVYLQMNSLKPEDTAVYYCAVLDTRGGWLPYWGQGTQVTVSS

SEQ ID NO: 25786 - protein, 121 aa, Artificial Sequence
  Chemically Synthesized
QVQLQESGGGLVQAGGSLRLSCAASGYIFYANMGWYRQAPGKERELVAAIDYGATTYYADSVKGRFTISRDNAKNTVYLQMNSLKPEDTAVYYCAVITQGWTGYHGYHNYWGQGTQVTVSS

SEQ ID NO: 25787 - protein, 127 aa, Artificial Sequence
  Chemically Synthesized
QVQLQESGGGLVQAGGSLRLSCAASGYISVVDAMGWYRQAPGKERELVAAISDGGTNTNYADSVKGRFTISRDNAKNTVYLQMNSLKPEDTAVYYCAAEATYYIGHYVARDSYHYYWGQGTQVTVSS

SEQ ID NO: 25788 - protein, 121 aa, Artificial Sequence
  Chemically Synthesized
QVQLQESGGGLVQAGGSLRLSCAASGYIFLGDYMGWYRQAPGKERELVAAIGEVLIPYADSVKGRFTISRDNAKNTVYLQMNSLKPEDTAVYYCAVGSYGTHYRYGYHIYWGQGTQVTVSS

SEQ ID NO: 25789 - protein, 117 aa, Artificial Sequence
  Chemically Synthesized
QVQLQESGGGLVQAGGSLRLSCAASGNFLVLLMGWYRQAPGKEREFVAGIAYGGITYYADSVKGRFTISRDNAKNTVYLQMNSLKPEDTAVYYCAVYSGQTRLFDYWGQGTQVTVSS

SEQ ID NO: 25790 - protein, 118 aa, Artificial Sequence
  Chemically Synthesized
QVQLQESGGGLVQAGGSLRLSCAASGSIFLRYGMGWYRQAPGKEREFVATITHGGNTYYADSVKGRFTISRDNAKNTVYLQMNSLKPEDTAVYYCAVAVRYSREHWYWGQGTQVTVSS

SEQ ID NO: 25791 - protein, 126 aa, Artificial Sequence
  Chemically Synthesized
QVQLQESGGGLVQAGGSLRLSCAASGSIFTVVSMGWYRQAPGKEREFVASIAKGTSTNYADSVKGRFTISRDNAKNTVYLQMNSLKPEDTAVYYCAVLNPGATQGFYDYRPRLEYWGQGTQVTVSS

SEQ ID NO: 25792 - protein, 116 aa, Artificial Sequence
  Chemically Synthesized
QVQLQESGGGLVQAGGSLRLSCAASGSILKSMGWYRQAPGKEREFVAGIATGSNTYYADSVKGRFTISRDNAKNTVYLQMNSLKPEDTAVYYCAANEWIPSTFGYWGQGTQVTVSS

SEQ ID NO: 25793 - protein, 110 aa, Artificial Sequence
  Chemically Synthesized
QVQLQESGGGLVQAGGSLRLSCAASGTIFFYTMGWYRQAPGKEREFVAGISGGATTNYADSVKGRFTISRDNAKNTVYLQMNSLKPEDTAVYYCAVYSYWGQGTQVTVSS

SEQ ID NO: 25794 - protein, 118 aa, Artificial Sequence
  Chemically Synthesized
QVQLQESGGGLVQAGGSLRLSCAASGSISRYGYMGWYRQAPGKEREFVAAINFGSTTYYADSVKGRFTISRDNAKNTVYLQMNSLKPEDTAVYYCAVAARSDRVLYYWGQGTQVTVSS

SEQ ID NO: 25795 - protein, 117 aa, Artificial Sequence
  Chemically Synthesized
QVQLQESGGGLVQAGGSLRLSCAASGYISYFTGMGWYRQAPGKERELVALLLMVLIPYADSVKGRFTISRDNAKNTVYLQMNSLKPEDTAVYYCAVSSLALGWHAYWGQGTQVTVSS

SEQ ID NO: 25796 - protein, 118 aa, Artificial Sequence
  Chemically Synthesized
QVQLQESGGGLVQAGGSLRLSCAASGSIFVLGYMGWYRQAPGKERELVAAIDYGANTNYADSVKGRFTISRDNAKNTVYLQMNSLKPEDTAVYYCAVALLDAWSLPYWGQGTQVTVSS

SEQ ID NO: 25797 - protein, 118 aa, Artificial Sequence
  Chemically Synthesized
QVQLQESGGGLVQAGGSLRLSCAASGSISGVDNMGWYRQAPGKERELVAGISTGTNTYYADSVKGRFTISRDNAKNTVYLQMNSLKPEDTAVYYCAVFARGGDILLYWGQGTQVTVSS

SEQ ID NO: 25798 - protein, 118 aa, Artificial Sequence
  Chemically Synthesized
QVQLQESGGGLVQAGGSLRLSCAASGNIFLYAFMGWYRQAPGKEREFVATIDGGSTTNYADSVKGRFTISRDNAKNTVYLQMNSLKPEDTAVYYCAVYAYGGSAHSYWGQGTQVTVSS

SEQ ID NO: 25799 - protein, 118 aa, Artificial Sequence
  Chemically Synthesized
QVQLQESGGGLVQAGGSLRLSCAASGSIFDAQYMGWYRQAPGKEREFVASIAYGGNTYYADSVKGRFTISRDNAKNTVYLQMNSLKPEDTAVYYCAADVDISGRHDYWGQGTQVTVSS

SEQ ID NO: 25800 - protein, 121 aa, Artificial Sequence
  Chemically Synthesized
QVQLQESGGGLVQAGGSLRLSCAASGSISGRVIMGWYRQAPGKEREFVAGISDGTITNYADSVKGRFTISRDNAKNTVYLQMNSLKPEDTAVYYCAVFVWVYYNSRLTMYWGQGTQVTVSS

SEQ ID NO: 25801 - protein, 117 aa, Artificial Sequence
  Chemically Synthesized
QVQLQESGGGLVQAGGSLRLSCAASGSISPFYFMGWYRQAPGKEREFVASISAGGTTNYADSVKGRFTISRDNAKNTVYLQMNSLKPEDTAVYYCAAPYESWYDLYWGQGTQVTVSS

SEQ ID NO: 25802 - protein, 126 aa, Artificial Sequence
  Chemically Synthesized
QVQLQESGGGLVQAGGSLRLSCAASGNISDIYAMGWYRQAPGKERELVAAITHGTNTNYADSVKGRFTISRDNAKNTVYLQMNSLKPEDTAVYYCAAYYEYSDLYAPFYTGWHAYWGQGTQVTVSS

SEQ ID NO: 25803 - protein, 118 aa, Artificial Sequence
  Chemically Synthesized
QVQLQESGGGLVQAGGSLRLSCAASGSISYGDYMGWYRQAPGKEREFVAGIAYGASTYYADSVKGRFTISRDNAKNTVYLQMNSLKPEDTAVYYCAVYYVFSPPHDYWGQGTQVTVSS

SEQ ID NO: 25804 - protein, 121 aa, Artificial Sequence
  Chemically Synthesized
QVQLQESGGGLVQAGGSLRLSCAASGYIFTTAYMGWYRQAPGKEREFVATISTGTTTNYADSVKGRFTISRDNAKNTVYLQMNSLKPEDTAVYYCAANVDYIRYEDTYCYWGQGTQVTVSS

SEQ ID NO: 25805 - protein, 119 aa, Artificial Sequence
  Chemically Synthesized
QVQLQESGGGLVQAGGSLRLSCAASGNISGVGNMGWYRQAPGKERELVAGINYGASTYYADSVKGRFTISRDNAKNTVYLQMNSLKPEDTAVYYCAAQPLQYNYYHPYWGQGTQVTVSS

SEQ ID NO: 25806 - protein, 119 aa, Artificial Sequence
  Chemically Synthesized
QVQLQESGGGLVQAGGSLRLSCAASGTIFYSHSMGWYRQAPGKERELVAGIGPGASTYYADSVKGRFTISRDNAKNTVYLQMNSLKPEDTAVYYCAVLLLSVVRSAWYWGQGTQVTVSS

SEQ ID NO: 25807 - protein, 118 aa, Artificial Sequence
  Chemically Synthesized
QVQLQESGGGLVQAGGSLRLSCAASGSIFVQRIMGWYRQAPGKEREFVASIAYGTSTNYADSVKGRFTISRDNAKNTVYLQMNSLKPEDTAVYYCAVYRYRLIYFVYWGQGTQVTVSS

SEQ ID NO: 25808 - protein, 118 aa, Artificial Sequence
  Chemically Synthesized
QVQLQESGGGLVQAGGSLRLSCAASGSISGYRAMGWYRQAPGKERELVAGIAQGATTYYADSVKGRFTISRDNAKNTVYLQMNSLKPEDTAVYYCAANFKFYFVLEYWGQGTQVTVSS

SEQ ID NO: 25809 - protein, 119 aa, Artificial Sequence
  Chemically Synthesized
QVQLQESGGGLVQAGGSLRLSCAASGNIFRQYDMGWYRQAPGKEREFVAGIADGSTTYYADSVKGRFTISRDNAKNTVYLQMNSLKPEDTAVYYCAVERGYFGVSYYYWGQGTQVTVSS

SEQ ID NO: 25810 - protein, 125 aa, Artificial Sequence
  Chemically Synthesized
QVQLQESGGGLVQAGGSLRLSCAASGSISYSITMGWYRQAPGKEREFVATISSGGSTNYADSVKGRFTISRDNAKNTVYLQMNSLKPEDTAVYYCAVFDHQDFFYQSQTSSLIYWGQGTQVTVSS

SEQ ID NO: 25811 - protein, 122 aa, Artificial Sequence
  Chemically Synthesized
QVQLQESGGGLVQAGGSLRLSCAASGTIFLSFTMGWYRQAPGKERELVAGISSGGITNYADSVKGRFTISRDNAKNTVYLQMNSLKPEDTAVYYCAVRDWFVGYVVWEFEYWGQGTQVTVSS

SEQ ID NO: 25812 - protein, 122 aa, Artificial Sequence
  Chemically Synthesized
QVQLQESGGGLVQAGGSLRLSCAASGSISRDAAMGWYRQAPGKERELVAGIGRGASTNYADSVKGRFTISRDNAKNTVYLQMNSLKPEDTAVYYCAAYLRYASYQYGAFAYWGQGTQVTVSS

SEQ ID NO: 25813 - protein, 126 aa, Artificial Sequence
  Chemically Synthesized
QVQLQESGGGLVQAGGSLRLSCAASGNIFGGGKMGWYRQAPGKEREFVAAITYGGITYYADSVKGRFTISRDNAKNTVYLQMNSLKPEDTAVYYCAVTTYLPYDSFNLAWYRYAYWGQGTQVTVSS

SEQ ID NO: 25814 - protein, 119 aa, Artificial Sequence
  Chemically Synthesized
QVQLQESGGGLVQAGGSLRLSCAASGNIFVSLWMGWYRQAPGKEREFVAAIDFGSNTNYADSVKGRFTISRDNAKNTVYLQMNSLKPEDTAVYYCAANYGQDGYSHEYWGQGTQVTVSS

SEQ ID NO: 25815 - protein, 118 aa, Artificial Sequence
  Chemically Synthesized
QVQLQESGGGLVQAGGSLRLSCAASGTISTGSYMGWYRQAPGKERELVAGITAGGTTYYADSVKGRFTISRDNAKNTVYLQMNSLKPEDTAVYYCAAGASGVYSHLYWGQGTQVTVSS

SEQ ID NO: 25816 - protein, 115 aa, Artificial Sequence
  Chemically Synthesized
QVQLQESGGGLVQAGGSLRLSCAASGYISYPHYMGWYRQAPGKERELVATISRGTITYYADSVKGRFTISRDNAKNTVYLQMNSLKPEDTAVYYCAAYGWNHAYWGQGTQVTVSS

SEQ ID NO: 25817 - protein, 126 aa, Artificial Sequence
  Chemically Synthesized
QVQLQESGGGLVQAGGSLRLSCAASGTISDLVPMGWYRQAPGKERELVAAIASGSTTNYADSVKGRFTISRDNAKNTVYLQMNSLKPEDTAVYYCAVYGEWLDTRYSDDLTYYFYWGQGTQVTVSS

SEQ ID NO: 25818 - protein, 123 aa, Artificial Sequence
  Chemically Synthesized
QVQLQESGGGLVQAGGSLRLSCAASGYISPYPDMGWYRQAPGKEREFVASIGRGSITYYADSVKGRFTISRDNAKNTVYLQMNSLKPEDTAVYYCAAYVNWYGSYYVYNHVYWGQGTQVTVSS

SEQ ID NO: 25819 - protein, 122 aa, Artificial Sequence
  Chemically Synthesized
QVQLQESGGGLVQAGGSLRLSCAASGSIFGRWRMGWYRQAPGKERELVATIDTGSSTNYADSVKGRFTISRDNAKNTVYLQMNSLKPEDTAVYYCAVPIARPWILGVRHVYWGQGTQVTVSS

SEQ ID NO: 25820 - protein, 126 aa, Artificial Sequence
  Chemically Synthesized
QVQLQESGGGLVQAGGSLRLSCAASGTISTDGNMGWYRQAPGKERELVATISTGGNTNYADSVKGRFTISRDNAKNTVYLQMNSLKPEDTAVYYCAVVPYDYIWANDQFGRLLVYWGQGTQVTVSS

SEQ ID NO: 25821 - protein, 117 aa, Artificial Sequence
  Chemically Synthesized
QVQLQESGGGLVQAGGSLRLSCAASGTIFDWWDMGWYRQAPGKERELVATIGIGTNTNYADSVKGRFTISRDNAKNTVYLQMNSLKPEDTAVYYCAVGPGHYYVYYWGQGTQVTVSS

SEQ ID NO: 25822 - protein, 126 aa, Artificial Sequence
  Chemically Synthesized
QVQLQESGGGLVQAGGSLRLSCAASGSISYDGAMGWYRQAPGKEREFVATITYGSNTNYADSVKGRFTISRDNAKNTVYLQMNSLKPEDTAVYYCAALGDRAFDLYLTDADALNYWGQGTQVTVSS

SEQ ID NO: 25823 - protein, 121 aa, Artificial Sequence
  Chemically Synthesized
QVQLQESGGGLVQAGGSLRLSCAASGTIFWFPMGWYRQAPGKERELVATIALGSTTNYADSVKGRFTISRDNAKNTVYLQMNSLKPEDTAVYYCAAAHYDYYYPYYLFEYWGQGTQVTVSS

SEQ ID NO: 25824 - protein, 117 aa, Artificial Sequence
  Chemically Synthesized
QVQLQESGGGLVQAGGSLRLSCAASGTIFGAEYMGWYRQAPGKERELVASIGQGSNTNYADSVKGRFTISRDNAKNTVYLQMNSLKPEDTAVYYCAARYLQDPQYYWGQGTQVTVSS

SEQ ID NO: 25825 - protein, 117 aa, Artificial Sequence
  Chemically Synthesized
QVQLQESGGGLVQAGGSLRLSCAASGYISKDTVMGWYRQAPGKEREFVAAIGTVLIPYADSVKGRFTISRDNAKNTVYLQMNSLKPEDTAVYYCAANDHFYGVHYYWGQGTQVTVSS

SEQ ID NO: 25826 - protein, 116 aa, Artificial Sequence
  Chemically Synthesized
QVQLQESGGGLVQAGGSLRLSCAASGTISYSMGWYRQAPGKEREFVAGISYGGITYYADSVKGRFTISRDNAKNTVYLQMNSLKPEDTAVYYCAAWYQDRYRHAYWGQGTQVTVSS

SEQ ID NO: 25827 - protein, 120 aa, Artificial Sequence
  Chemically Synthesized
QVQLQESGGGLVQAGGSLRLSCAASGYISRVDSMGWYRQAPGKERELVALLIVVLVPYADSVKGRFTISRDNAKNTVYLQMNSLKPEDTAVYYCAADVYPPSTSTLTIYWGQGTQVTVSS

SEQ ID NO: 25828 - protein, 125 aa, Artificial Sequence
  Chemically Synthesized
QVQLQESGGGLVQAGGSLRLSCAASGYIFAETMGWYRQAPGKEREFVASIASGTSTNYADSVKGRFTISRDNAKNTVYLQMNSLKPEDTAVYYCAVEPQQPGDLGWYDFYYYDYWGQGTQVTVSS

SEQ ID NO: 25829 - protein, 127 aa, Artificial Sequence
  Chemically Synthesized
QVQLQESGGGLVQAGGSLRLSCAASGTISWHGPMGWYRQAPGKEREFVATINGGSITNYADSVKGRFTISRDNAKNTVYLQMNSLKPEDTAVYYCAVERDLYHSYIWRGTGYYFTYWGQGTQVTVSS

SEQ ID NO: 25830 - protein, 113 aa, Artificial Sequence
  Chemically Synthesized
QVQLQESGGGLVQAGGSLRLSCAASGNIFYSVGMGWYRQAPGKERELVAAILVPYADSVKGRFTISRDNAKNTVYLQMNSLKPEDTAVYYCAADYHQIRLSYWGQGTQVTVSS

SEQ ID NO: 25831 - protein, 113 aa, Artificial Sequence
  Chemically Synthesized
QVQLQESGGGLVQAGGSLRLSCAASGYIFVLVRMGWYRQAPGKEREFAGTNTYYADSVKGRFTISRDNAKNTVYLQMNSLKPEDTAVYYCAVEPDDTTDLNYWGQGTQVTVSS

SEQ ID NO: 25832 - protein, 118 aa, Artificial Sequence
  Chemically Synthesized
QVQLQESGGGLVQAGGSLRLSCAASGYIFPLLYMGWYRQAPGKERELVASIAAGSTTNYADSVKGRFTISRDNAKNTVYLQMNSLKPEDTAVYYCAAPLGYYATHAYWGQGTQVTVSS

SEQ ID NO: 25833 - protein, 121 aa, Artificial Sequence
  Chemically Synthesized
QVQLQESGGGLVQAGGSLRLSCAASGTIFSSWMGWYRQAPGKEREFVASISIGGNTNYADSVKGRFTISRDNAKNTVYLQMNSLKPEDTAVYYCAAFSLHDYGFYLYHAYWGQGTQVTVSS

SEQ ID NO: 25834 - protein, 118 aa, Artificial Sequence
  Chemically Synthesized
QVQLQESGGGLVQAGGSLRLSCAASGNISRDYPMGWYRQAPGKERELVASIDYGTTTNYADSVKGRFTISRDNAKNTVYLQMNSLKPEDTAVYYCAADAELYGIYYYWGQGTQVTVSS

SEQ ID NO: 25835 - protein, 118 aa, Artificial Sequence
  Chemically Synthesized
QVQLQESGGGLVQAGGSLRLSCAASGSISTDVAMGWYRQAPGKERELVAAIDLGGITNYADSVKGRFTISRDNAKNTVYLQMNSLKPEDTAVYYCAVGDDDTVKYKYWGQGTQVTVSS

SEQ ID NO: 25836 - protein, 118 aa, Artificial Sequence
  Chemically Synthesized
QVQLQESGGGLVQAGGSLRLSCAASGSISDYFGMGWYRQAPGKERELVASIAIGAITNYADSVKGRFTISRDNAKNTVYLQMNSLKPEDTAVYYCAASYYVRDRFWYWGQGTQVTVSS

SEQ ID NO: 25837 - protein, 122 aa, Artificial Sequence
  Chemically Synthesized
QVQLQESGGGLVQAGGSLRLSCAASGNIFALGYMGWYRQAPGKERELVAGITGGSSTNYADSVKGRFTISRDNAKNTVYLQMNSLKPEDTAVYYCAVGYDWAYDESYVFGYWGQGTQVTVSS

SEQ ID NO: 25838 - protein, 122 aa, Artificial Sequence
  Chemically Synthesized
QVQLQESGGGLVQAGGSLRLSCAASGNIFDHTYMGWYRQAPGKERELVASIAYGANTNYADSVKGRFTISRDNAKNTVYLQMNSLKPEDTAVYYCAAGVLPGQRKTDAHLYWGQGTQVTVSS

SEQ ID NO: 25839 - protein, 122 aa, Artificial Sequence
  Chemically Synthesized
QVQLQESGGGLVQAGGSLRLSCAASGNIFDYSGMGWYRQAPGKERELVATITNGATNQYADSVKGRFTISRDNAKNTVYLQMNSLKPEDTAVYYCAAYRSNQERWDGYYTYWGQGTQVTVSS

SEQ ID NO: 25840 - protein, 118 aa, Artificial Sequence
  Chemically Synthesized
QVQLQESGGGLVQAGGSLRLSCAASGSISADGIMGWYRQAPGKERELVAAITVGTTTNYADSVKGRFTISRDNAKNTVYLQMNSLKPEDTAVYYCAARDSPVTAFLYWGQGTQVTVSS

SEQ ID NO: 25841 - protein, 117 aa, Artificial Sequence
  Chemically Synthesized
QVQLQESGGGLVQAGGSLRLSCAASGTISYVDMGWYRQAPGKERELVASIAYGGTTNYADSVKGRFTISRDNAKNTVYLQMNSLKPEDTAVYYCAVTYVDIPGLAYWGQGTQVTVSS

SEQ ID NO: 25842 - protein, 118 aa, Artificial Sequence
  Chemically Synthesized
QVQLQESGGGLVQAGGSLRLSCAASGSISQYLDMGWYRQAPGKERELVATINNGTTTYYADSVKGRFTISRDNAKNTVYLQMNSLKPEDTAVYYCATYYSTFVPYGYWGQGTQVTVSS

SEQ ID NO: 25843 - protein, 118 aa, Artificial Sequence
  Chemically Synthesized
QVQLQESGGGLVQAGGSLRLSCAASGSISNFYEMGWYRQAPGKERELVATIDDGASTNYADSVKGRFTISRDNAKNTVYLQMNSLKPEDTAVYYCAVQYVAGSRFDYWGQGTQVTVSS

SEQ ID NO: 25844 - protein, 122 aa, Artificial Sequence
  Chemically Synthesized
QVQLQESGGGLVQAGGSLRLSCAASGTISDQLAMGWYRQAPGKERELVAGIAKGSNTNYADSVKGRFTISRDNAKNTVYLQMNSLKPEDTAVYYCAVQTNSTIHRIVGFGYWGQGTQVTVSS

SEQ ID NO: 25845 - protein, 118 aa, Artificial Sequence
  Chemically Synthesized
QVQLQESGGGLVQAGGSLRLSCAASGNIFGYTTMGWYRQAPGKERELVAGISTGAITYYADSVKGRFTISRDNAKNTVYLQMNSLKPEDTAVYYCAAVTHVHLAYWYWGQGTQVTVSS

SEQ ID NO: 25846 - protein, 117 aa, Artificial Sequence
  Chemically Synthesized
QVQLQESGGGLVQAGGSLRLSCAASGTISWSLMGWYRQAPGKERELVAAIDQGTSTNYADSVKGRFTISRDNAKNTVYLQMNSLKPEDTAVYYCAAVYLRGPRHSYWGQGTQVTVSS

SEQ ID NO: 25847 - protein, 122 aa, Artificial Sequence
  Chemically Synthesized
QVQLQESGGGLVQAGGSLRLSCAASGYISFDYTMGWYRQAPGKERELVAGITAGGTTYYADSVKGRFTISRDNAKNTVYLQMNSLKPEDTAVYYCAVEVDTAYIDRYLYWYWGQGTQVTVSS

SEQ ID NO: 25848 - protein, 117 aa, Artificial Sequence
  Chemically Synthesized
QVQLQESGGGLVQAGGSLRLSCAASGNISWHSMGWYRQAPGKEREFVAGISRGANTNYADSVKGRFTISRDNAKNTVYLQMNSLKPEDTAVYYCAAYHNNLLTLDYWGQGTQVTVSS

SEQ ID NO: 25849 - protein, 118 aa, Artificial Sequence
  Chemically Synthesized
QVQLQESGGGLVQAGGSLRLSCAASGNIFGDRLMGWYRQAPGKEREFVAGITDGTNTYYADSVKGRFTISRDNAKNTVYLQMNSLKPEDTAVYYCAASRYVDGAFDYWGQGTQVTVSS

SEQ ID NO: 25850 - protein, 122 aa, Artificial Sequence
  Chemically Synthesized
QVQLQESGGGLVQAGGSLRLSCAASGNIFPYTYMGWYRQAPGKEREFVASIAQGATTYYADSVKGRFTISRDNAKNTVYLQMNSLKPEDTAVYYCAANRSVGYFTPIKHDYWGQGTQVTVSS

SEQ ID NO: 25851 - protein, 122 aa, Artificial Sequence
  Chemically Synthesized
QVQLQESGGGLVQAGGSLRLSCAASGTIFPDHGMGWYRQAPGKEREFVATIGRGGITYYADSVKGRFTISRDNAKNTVYLQMNSLKPEDTAVYYCAVYFAVLNQIDGPFRYWGQGTQVTVSS

SEQ ID NO: 25852 - protein, 118 aa, Artificial Sequence
  Chemically Synthesized
QVQLQESGGGLVQAGGSLRLSCAASGSISTYPYMGWYRQAPGKERELLPVLITVLLPYADSVKGRFTISRDNAKNTVYLQMNSLKPEDTAVYYCAAWDLTYADYYGYWGQGTQVTVSS

SEQ ID NO: 25853 - protein, 126 aa, Artificial Sequence
  Chemically Synthesized
QVQLQESGGGLVQAGGSLRLSCAASGTISDDLDMGWYRQAPGKERELVATIDDGTSTYYADSVKGRFTISRDNAKNTVYLQMNSLKPEDTAVYYCAVYDGPRYYGGQWYDHFSCYWGQGTQVTVSS

SEQ ID NO: 25854 - protein, 118 aa, Artificial Sequence
  Chemically Synthesized
QVQLQESGGGLVQAGGSLRLSCAASGNISYPFYMGWYRQAPGKEREFVATISVGGSTNYADSVKGRFTISRDNAKNTVYLQMNSLKPEDTAVYYCAVYRQAVGEHTYWGQGTQVTVSS

SEQ ID NO: 25855 - protein, 125 aa, Artificial Sequence
  Chemically Synthesized
QVQLQESGGGLVQAGGSLRLSCAASGSISVGVAMGWYRQAPGKERELVATIDWGATTYYADSVKGRFTISRDNAKNTVYLQMNSLKPEDTAVYYCAAIYSLSGRTTVTVVTTMYWGQGTQVTVSS

SEQ ID NO: 25856 - protein, 118 aa, Artificial Sequence
  Chemically Synthesized
QVQLQESGGGLVQAGGSLRLSCAASGTIFPRLRMGWYRQAPGKERELVATIDLGTSTNYADSVKGRFTISRDNAKNTVYLQMNSLKPEDTAVYYCAAFDADYESHAYWGQGTQVTVSS

SEQ ID NO: 25857 - protein, 116 aa, Artificial Sequence
  Chemically Synthesized
QVQLQESGGGLVQAGGSLRLSCAASGYIFGPFNMGWYRQAPGKEREFVATIGRGSTTNYADSVKGRFTISRDNAKNTVYLQMNSLKPEDTAVYYCAGHQRQDFYYWGQGTQVTVSS

SEQ ID NO: 25858 - protein, 126 aa, Artificial Sequence
  Chemically Synthesized
QVQLQESGGGLVQAGGSLRLSCAASGSISYLDYMGWYRQAPGKERELVAAIAIGSTTYYADSVKGRFTISRDNAKNTVYLQMNSLKPEDTAVYYCAVGFWVPYNSEDSSIVPHQYWGQGTQVTVSS

SEQ ID NO: 25859 - protein, 118 aa, Artificial Sequence
  Chemically Synthesized
QVQLQESGGGLVQAGGSLRLSCAASGTISLDKGMGWYRQAPGKERELVAGIGGGTITYYADSVKGRFTISRDNAKNTVYLQMNSLKPEDTAVYYCAAEPYSYFAFAYWGQGTQVTVSS

SEQ ID NO: 25860 - protein, 116 aa, Artificial Sequence
  Chemically Synthesized
QVQLQESGGGLVQAGGSLRLSCAASGTIFTDHIMGWYRQAPGKEREFVAAITIGAIPYADSVKGRFTISRDNAKNTVYLQMNSLKPEDTAVYYCAVIATYDLHFYWGQGTQVTVSS

SEQ ID NO: 25861 - protein, 122 aa, Artificial Sequence
  Chemically Synthesized
QVQLQESGGGLVQAGGSLRLSCAASGTIFSRHSMGWYRQAPGKEREFVAGISGGGNTYYADSVKGRFTISRDNAKNTVYLQMNSLKPEDTAVYYCAVYHSSPGDVELDFLYWGQGTQVTVSS

SEQ ID NO: 25862 - protein, 118 aa, Artificial Sequence
  Chemically Synthesized
QVQLQESGGGLVQAGGSLRLSCAASGNIFPDLYMGWYRQAPGKEREFVATITYGGITNYADSVKGRFTISRDNAKNTVYLQMNSLKPEDTAVYYCAVTTYRVVPHSYWGQGTQVTVSS

SEQ ID NO: 25863 - protein, 122 aa, Artificial Sequence
  Chemically Synthesized
QVQLQESGGGLVQAGGSLRLSCAASGNISRRYSMGWYRQAPGKEREFVAAIAYGTITNYADSVKGRFTISRDNAKNTVYLQMNSLKPEDTAVYYCAASQRRRSYDGGRFTYWGQGTQVTVSS

SEQ ID NO: 25864 - protein, 118 aa, Artificial Sequence
  Chemically Synthesized
QVQLQESGGGLVQAGGSLRLSCAASGTISRDYEMGWYRQAPGKERELVAGIGRGAITYYADSVKGRFTISRDNAKNTVYLQMNSLKPEDTAVYYCAVLKGNSGEYIYWGQGTQVTVSS

SEQ ID NO: 25865 - protein, 121 aa, Artificial Sequence
  Chemically Synthesized
QVQLQESGGGLVQAGGSLRLSCAASGYISAQLVMGWYRQAPGKERELVAGISGGANTNYADSVKGRFTISRDNAKNTVYLQMNSLKPEDTAVYYCAAIQDWEGRSCRVFYWGQGTQVTVSS

SEQ ID NO: 25866 - protein, 119 aa, Artificial Sequence
  Chemically Synthesized
QVQLQESGGGLVQAGGSLRLSCAASGTIFDDIGMGWYRQAPGKEREFVAGIADGANTNYADSVKGRFTISRDNAKNTVYLQMNSLKPEDTAVYYCADAYDDAFYYFAYWGQGTQVTVSS

SEQ ID NO: 25867 - protein, 122 aa, Artificial Sequence
  Chemically Synthesized
QVQLQESGGGLVQAGGSLRLSCAASGTIFYTYTMGWYRQAPGKERELVASITDGSTTNYADSVKGRFTISRDNAKNTVYLQMNSLKPEDTAVYYCAVYQTYHFILDYTHRYWGQGTQVTVSS

SEQ ID NO: 25868 - protein, 121 aa, Artificial Sequence
  Chemically Synthesized
QVQLQESGGGLVQAGGSLRLSCAASGYISQGPVMGWYRQAPGKEREFVAGISIGTSTNYADSVKGRFTISRDNAKNTVYLQMNSLKPEDTAVYYCAVSYDVQGGTYGPYYWGQGTQVTVSS

SEQ ID NO: 25869 - protein, 126 aa, Artificial Sequence
  Chemically Synthesized
QVQLQESGGGLVQAGGSLRLSCAASGYISTPRTMGWYRQAPGKERELVATISYGSITNYADSVKGRFTISRDNAKNTVYLQMNSLKPEDTAVYYCAAIVEYRKGAHDYGSLLLAYWGQGTQVTVSS

SEQ ID NO: 25870 - protein, 116 aa, Artificial Sequence
  Chemically Synthesized
QVQLQESGGGLVQAGGSLRLSCAASGTISDFTMGWYRQAPGKEREFVATITVGASTYYADSVKGRFTISRDNAKNTVYLQMNSLKPEDTAVYYCAVFTPDVVLGYWGQGTQVTVSS

SEQ ID NO: 25871 - protein, 122 aa, Artificial Sequence
  Chemically Synthesized
QVQLQESGGGLVQAGGSLRLSCAASGYIFYDIYMGWYRQAPGKERELVAGISPGGNTNYADSVKGRFTISRDNAKNTVYLQMNSLKPEDTAVYYCAVYSGYTYSKYGSHGYWGQGTQVTVSS

SEQ ID NO: 25872 - protein, 122 aa, Artificial Sequence
  Chemically Synthesized
QVQLQESGGGLVQAGGSLRLSCAASGTIFYTRDMGWYRQAPGKEREFVAAIAYGGNTNYADSVKGRFTISRDNAKNTVYLQMNSLKPEDTAVYYCAANIQSDAYVPNQYTYWGQGTQVTVSS

SEQ ID NO: 25873 - protein, 117 aa, Artificial Sequence
  Chemically Synthesized
QVQLQESGGGLVQAGGSLRLSCAASGTIYDLEMGWYRQAPGKERELVAGIGAGSNTYYADSVKGRFTISRDNAKNTVYLQMNSLKPEDTAVYYCAVRWYDDVAHSYWGQGTQVTVSS

SEQ ID NO: 25874 - protein, 118 aa, Artificial Sequence
  Chemically Synthesized
QVQLQESGGGLVQAGGSLRLSCAASGTISYDKYMGWYRQAPGKERELVAAIAYGTITNYADSVKGRFTISRDNAKNTVYLQMNSLKPEDTAVYYCAVKDYFYSRLQYWGQGTQVTVSS

SEQ ID NO: 25875 - protein, 120 aa, Artificial Sequence
  Chemically Synthesized
QVQLQESGGGLVQAGGSLRLSCAASGNIFGTAYMGWYRQAPGKERELVAAIGWGSNTYYADSVKGRFTISRDNAKNTVYLQMNSLKPEDTAVYYCAARGRTFRSRAHAYWGQGTQVTVSS

SEQ ID NO: 25876 - protein, 121 aa, Artificial Sequence
  Chemically Synthesized
QVQLQESGGGLVQAGGSLRLSCAASGTISEAVYMGWYRQAPGKERELVAAINGGGTTNYADSVKGRFTISRDNAKNTVYLQMNSLKPEDTAVYYCAATVSRTVLLVKTLYWGQGTQVTVSS

SEQ ID NO: 25877 - protein, 121 aa, Artificial Sequence
  Chemically Synthesized
QVQLQESGGGLVQAGGSLRLSCAASGSISPFYAMGWYRQAPGKEREFVASIDVGTTTNYADSVKGRFTISRDNAKNTVYLQMNSLKPEDTAVYYCAAVDVTRKFLTTTMYWGQGTQVTVSS

SEQ ID NO: 25878 - protein, 119 aa, Artificial Sequence
  Chemically Synthesized
QVQLQESGGGLVQAGGSLRLSCAASGTISLSINMGWYRQAPGKERERYWLRCYYQYADSVKGRFTISRDNAKNTVYLQMNSLKPEDTAVYYCAAVQSYGNGWNVYHDYWGQGTQVTVSS

SEQ ID NO: 25879 - protein, 117 aa, Artificial Sequence
  Chemically Synthesized
QVQLQESGGGLVQAGGSLRLSCAASGNISVPYQMGWYRQAPGKEREFVATLVTVVLPYADSVKGRFTISRDNAKNTVYLQMNSLKPEDTAVYYCAVYRANQRELRYWGQGTQVTVSS

SEQ ID NO: 25880 - protein, 121 aa, Artificial Sequence
  Chemically Synthesized
QVQLQESGGGLVQAGGSLRLSCAASGNISPSWTMGWYRQAPGKEREFVAAIADGTTTYYADSVKGRFTISRDNAKNTVYLQMNSLKPEDTAVYYCAVYQSSGSTTTRTMYWGQGTQVTVSS

SEQ ID NO: 25881 - protein, 125 aa, Artificial Sequence
  Chemically Synthesized
QVQLQESGGGLVQAGGSLRLSCAASGSIFNADDMGWYRQAPGKERELVASIDQGGITNYADSVKGRFTISRDNAKNTVYLQMNSLKPEDTAVYYCAAYNFLVSYDYGYSRRVIYWGQGTQVTVSS

SEQ ID NO: 25882 - protein, 118 aa, Artificial Sequence
  Chemically Synthesized
QVQLQESGGGLVQAGGSLRLSCAASGYIFDKYPMGWYRQAPGKERELVATITIGSITNYADSVKGRFTISRDNAKNTVYLQMNSLKPEDTAVYYCAVEIGPAWILTYWGQGTQVTVSS

SEQ ID NO: 25883 - protein, 122 aa, Artificial Sequence
  Chemically Synthesized
QVQLQESGGGLVQAGGSLRLSCAASGSISDSRLMGWYRQAPGKERELVATITDGAITNYADSVKGRFTISRDNAKNTVYLQMNSLKPEDTAVYYCAALAEYGGGPFNYHNYWGQGTQVTVSS

SEQ ID NO: 25884 - protein, 121 aa, Artificial Sequence
  Chemically Synthesized
QVQLQESGGGLVQAGGSLRLSCAASGSISDGPDMGWYRQAPGKEREFVAGIADGVIPYADSVKGRFTISRDNAKNTVYLQMNSLKPEDTAVYYCAADSGLDVAVGPRHEYWGQGTQVTVSS

SEQ ID NO: 25885 - protein, 126 aa, Artificial Sequence
  Chemically Synthesized
QVQLQESGGGLVQAGGSLRLSCAASGSISLPYYMGWYRQAPGKERELVASIDGGGITYYADSVKGRFTISRDNAKNTVYLQMNSLKPEDTAVYYCAAYSYYTRAYSVFPDPSHDYWGQGTQVTVSS

SEQ ID NO: 25886 - protein, 121 aa, Artificial Sequence
  Chemically Synthesized
QVQLQESGGGLVQAGGSLRLSCAASGTIFSTTMGWYRQAPGKERELVAGIGDGASTYYADSVKGRFTISRDNAKNTVYLQMNSLKPEDTAVYYCAADWAYYPDYSVGHSYWGQGTQVTVSS

SEQ ID NO: 25887 - protein, 121 aa, Artificial Sequence
  Chemically Synthesized
QVQLQESGGGLVQAGGSLRLSCAASGNIFYYVGMGWYRQAPGKEREFVATIDDGTITYYADSVKGRFTISRDNAKNTVYLQMNSLKPEDTAVYYCAAFNLPHSDESSLIYWGQGTQVTVSS

SEQ ID NO: 25888 - protein, 118 aa, Artificial Sequence
  Chemically Synthesized
QVQLQESGGGLVQAGGSLRLSCAASGYIFLEYPMGWYRQAPGKERELVATIALGSSTNYADSVKGRFTISRDNAKNTVYLQMNSLKPEDTAVYYCAVISFVYPFLQYWGQGTQVTVSS

SEQ ID NO: 25889 - protein, 126 aa, Artificial Sequence
  Chemically Synthesized
QVQLQESGGGLVQAGGSLRLSCAASGSISDKYEMGWYRQAPGKEREFVAGITDGASTNYADSVKGRFTISRDNAKNTVYLQMNSLKPEDTAVYYCAAHYRTTGAEHTYYLVIHYYWGQGTQVTVSS

SEQ ID NO: 25890 - protein, 118 aa, Artificial Sequence
  Chemically Synthesized
QVQLQESGGGLVQAGGSLRLSCAASGSISYWLYMGWYRQAPGKEREFVAAITDGSNTYYADSVKGRFTISRDNAKNTVYLQMNSLKPEDTAVYYCAVLNGYDGDHDYWGQGTQVTVSS

SEQ ID NO: 25891 - protein, 126 aa, Artificial Sequence
  Chemically Synthesized
QVQLQESGGGLVQAGGSLRLSCAASGSISEHQNMGWYRQAPGKERELVASINDGANTYYADSVKGRFTISRDNAKNTVYLQMNSLKPEDTAVYYCAVSPRVSDGRFTLPDDLFLYWGQGTQVTVSS

SEQ ID NO: 25892 - protein, 122 aa, Artificial Sequence
  Chemically Synthesized
QVQLQESGGGLVQAGGSLRLSCAASGTISNYGYMGWYRQAPGKERELVATIAGGGNTNYADSVKGRFTISRDNAKNTVYLQMNSLKPEDTAVYYCAVRRLDEYESTDSHYYWGQGTQVTVSS

SEQ ID NO: 25893 - protein, 117 aa, Artificial Sequence
  Chemically Synthesized
QVQLQESGGGLVQAGGSLRLSCAASGTISNYDVMGWYRQAPGKERELVASIGWGTSTNYADSVKGRFTISRDNAKNTVYLQMNSLKPEDTAVYYCAVDSSLRTLLYWGQGTQVTVSS

SEQ ID NO: 25894 - protein, 126 aa, Artificial Sequence
  Chemically Synthesized
QVQLQESGGGLVQAGGSLRLSCAASGTIFYYVSMGWYRQAPGKEREFVATIAYGTITNYADSVKGRFTISRDNAKNTVYLQMNSLKPEDTAVYYCAVSTIHTDDQSLTDSGTYAYWGQGTQVTVSS

SEQ ID NO: 25895 - protein, 116 aa, Artificial Sequence
  Chemically Synthesized
QVQLQESGGGLVQAGGSLRLSCAASGTISDRVRMGWYRQAPGKEREFVAGINDGAITNYADSVKGRFTISRDNAKNTVYLQMNSLKPEDTAVYYCAVADEQWHYYWGQGTQVTVSS

SEQ ID NO: 25896 - protein, 118 aa, Artificial Sequence
  Chemically Synthesized
QVQLQESGGGLVQAGGSLRLSCAASGYIFAAYAMGWYRQAPGKERELVAAIDDGTITYYADSVKGRFTISRDNAKNTVYLQMNSLKPEDTAVYYCAAVAYWYAPYQYWGQGTQVTVSS

SEQ ID NO: 25897 - protein, 113 aa, Artificial Sequence
  Chemically Synthesized
QVQLQESGGGLVQAGGSLRLSCAASGTIFDDDFMGWYRQAPGKERELVAAIGTGTNTYYADSVKGRFTISRDNAKNTVYLQMNSLKPEDTAVYYCAARWHVYWGQGTQVTVSS

SEQ ID NO: 25898 - protein, 126 aa, Artificial Sequence
  Chemically Synthesized
QVQLQESGGGLVQAGGSLRLSCAASGTIFDPYNMGWYRQAPGKERELVASIDVGGSTYYADSVKGRFTISRDNAKNTVYLQMNSLKPEDTAVYYCAVGPPTPYQWWRDYYRGLYYWGQGTQVTVSS

SEQ ID NO: 25899 - protein, 118 aa, Artificial Sequence
  Chemically Synthesized
QVQLQESGGGLVQAGGSLRLSCAASGYIFDTNVMGWYRQAPGKERELVATIDDGGTTYYADSVKGRFTISRDNAKNTVYLQMNSLKPEDTAVYYCAAYYYGFYGHPYWGQGTQVTVSS

SEQ ID NO: 25900 - protein, 122 aa, Artificial Sequence
  Chemically Synthesized
QVQLQESGGGLVQAGGSLRLSCAASGNIFWGYTMGWYRQAPGKERELVAAITIGGITYYADSVKGRFTISRDNAKNTVYLQMNSLKPEDTAVYYCAVDWPYSDYLGGGFTYWGQGTQVTVSS

SEQ ID NO: 25901 - protein, 126 aa, Artificial Sequence
  Chemically Synthesized
QVQLQESGGGLVQAGGSLRLSCAASGYISRWTYMGWYRQAPGKEREFVAGIADGGSTYYADSVKGRFTISRDNAKNTVYLQMNSLKPEDTAVYYCAVDWEPVTDIGKRSNRSHNYWGQGTQVTVSS

SEQ ID NO: 25902 - protein, 118 aa, Artificial Sequence
  Chemically Synthesized
QVQLQESGGGLVQAGGSLRLSCAASGTISYDGIMGWYRQAPGKERELVATITDGSSTYYADSVKGRFTISRDNAKNTVYLQMNSLKPEDTAVYYCAADLYLYWYYPYWGQGTQVTVSS

SEQ ID NO: 25903 - protein, 118 aa, Artificial Sequence
  Chemically Synthesized
QVQLQESGGGLVQAGGSLRLSCAASGTISDSADMGWYRQAPGKEREFVASIGRGTNTYYADSVKGRFTISRDNAKNTVYLQMNSLKPEDTAVYYCAATYQAYYRLPYWGQGTQVTVSS

SEQ ID NO: 25904 - protein, 121 aa, Artificial Sequence
  Chemically Synthesized
QVQLQESGGGLVQAGGSLRLSCAASGYISVSTYMGWYRQAPGKERELVAGIADGSSTYYADSVKGRFTISRDNAKNTVYLQMNSLKPEDTAVYYCAVDSVTTSVTGVRLYWGQGTQVTVSS

SEQ ID NO: 25905 - protein, 118 aa, Artificial Sequence
  Chemically Synthesized
QVQLQESGGGLVQAGGSLRLSCAASGTISDQAAMGWYRQAPGKERELVAGIDHGAITYYADSVKGRFTISRDNAKNTVYLQMNSLKPEDTAVYYCAVYLGTAYSHVYWGQGTQVTVSS

SEQ ID NO: 25906 - protein, 116 aa, Artificial Sequence
  Chemically Synthesized
QVQLQESGGGLVQAGGSLRLSCAASGTISGSAWMGWYRQAPGKERELVPLLLTVIVPYADSVKGRFTISRDNAKNTVYLQMNSLKPEDTAVYYCAAYYDTGLYGYWGQGTQVTVSS

SEQ ID NO: 25907 - protein, 118 aa, Artificial Sequence
  Chemically Synthesized
QVQLQESGGGLVQAGGSLRLSCAASGTIFHYFDMGWYRQAPGKEREFVASISGGGTTNYADSVKGRFTISRDNAKNTVYLQMNSLKPEDTAVYYCAADSWDSGWYTYWGQGTQVTVSS

SEQ ID NO: 25908 - protein, 117 aa, Artificial Sequence
  Chemically Synthesized
QVQLQESGGGLVQAGGSLRLSCAASGNIFVVRMGWYRQAPGKERELVASITKGSITYYADSVKGRFTISRDNAKNTVYLQMNSLKPEDTAVYYCAASGYYSYLYYYWGQGTQVTVSS

SEQ ID NO: 25909 - protein, 118 aa, Artificial Sequence
  Chemically Synthesized
QVQLQESGGGLVQAGGSLRLSCAASGTIFISTRMGWYRQAPGKEREFVATISYGSTTNYADSVKGRFTISRDNAKNTVYLQMNSLKPEDTAVYYCAVGSHDTDSFAYWGQGTQVTVSS

SEQ ID NO: 25910 - protein, 125 aa, Artificial Sequence
  Chemically Synthesized
QVQLQESGGGLVQAGGSLRLSCAASGNIFSGVYMGWYRQAPGKERELVASIDYGTTTYYADSVKGRFTISRDNAKNTVYLQMNSLKPEDTAVYYCAVETGTPVDADHTTYASYYWGQGTQVTVSS

SEQ ID NO: 25911 - protein, 126 aa, Artificial Sequence
  Chemically Synthesized
QVQLQESGGGLVQAGGSLRLSCAASGNIFPSDRMGWYRQAPGKERELVASISGGSSTNYADSVKGRFTISRDNAKNTVYLQMNSLKPEDTAVYYCAVGDTTSVRYPYWGRHVHDYWGQGTQVTVSS

SEQ ID NO: 25912 - protein, 121 aa, Artificial Sequence
  Chemically Synthesized
QVQLQESGGGLVQAGGSLRLSCAASGNISWDTDMGWYRQAPGKERELVATIAGGTITNYADSVKGRFTISRDNAKNTVYLQMNSLKPEDTAVYYCAAYGSCTLSTWVVLYWGQGTQVTVSS

SEQ ID NO: 25913 - protein, 112 aa, Artificial Sequence
  Chemically Synthesized
QVQLQESGGGLVQAGGSLRLSCAASGSISQWYYMGWYRQAPGKERELVATIGSGTNTNYADSVKGRFTISRDNAKNTVYLQMNSLKPEDTAVYYCAVCTIYWGQGTQVTVSS

SEQ ID NO: 25914 - protein, 118 aa, Artificial Sequence
  Chemically Synthesized
QVQLQESGGGLVQAGGSLRLSCAASGNIFNAVYMGWYRQAPGKEREFVAGISVGGITYYADSVKGRFTISRDNAKNTVYLQMNSLKPEDTAVYYCAAPLLSDGAHDYWGQGTQVTVSS

SEQ ID NO: 25915 - protein, 126 aa, Artificial Sequence
  Chemically Synthesized
QVQLQESGGGLVQAGGSLRLSCAASGTISAEPQMGWYRQAPGKEREFVAAIAYGGSTYYADSVKGRFTISRDNAKNTVYLQMNSLKPEDTAVYYCAAYPNWYGDDVVRAQPSYTYWGQGTQVTVSS

SEQ ID NO: 25916 - protein, 121 aa, Artificial Sequence
  Chemically Synthesized
QVQLQESGGGLVQAGGSLRLSCAASGSIFAAYQMGWYRQAPGKERELVATIGWGTTTNYADSVKGRFTISRDNAKNTVYLQMNSLKPEDTAVYYCAVWALVVLTTVTTIYWGQGTQVTVSS

SEQ ID NO: 25917 - protein, 122 aa, Artificial Sequence
  Chemically Synthesized
QVQLQESGGGLVQAGGSLRLSCAASGNISYFRWMGWYRQAPGKERELVAGINWGGNTYYADSVKGRFTISRDNAKNTVYLQMNSLKPEDTAVYYCAVGSTYHQRDVIPFPYWGQGTQVTVSS

SEQ ID NO: 25918 - protein, 112 aa, Artificial Sequence
  Chemically Synthesized
QVQLQESGGGLVQAGGSLRLSCAASGTISDIEYMGWYRQAPGKEREFVASIAGGSTTNYADSVKGRFTISRDNAKNTVYLQMNSLKPEDTAVYYCAVTCTYWGQGTQVTVSS

SEQ ID NO: 25919 - protein, 118 aa, Artificial Sequence
  Chemically Synthesized
QVQLQESGGGLVQAGGSLRLSCAASGTIFRPYDMGWYRQAPGKEREFVASINDGTTTYYADSVKGRFTISRDNAKNTVYLQMNSLKPEDTAVYYCAVEPYVTDLHGYWGQGTQVTVSS

SEQ ID NO: 25920 - protein, 119 aa, Artificial Sequence
  Chemically Synthesized
QVQLQESGGGLVQAGGSLRLSCAASGNIFGDITQMGWYRQAPGKERELVATIAVGGTTNYADSVKGRFTISRDNAKNTVYLQMNSLKPEDTAVYYCAVTYTSSTWHKYWGQGTQVTVSS

SEQ ID NO: 25921 - protein, 126 aa, Artificial Sequence
  Chemically Synthesized
QVQLQESGGGLVQAGGSLRLSCAASGYISLSYSMGWYRQAPGKEREFVATIASGATTYYADSVKGRFTISRDNAKNTVYLQMNSLKPEDTAVYYCAAILKDTYGRYNILLDPLYYWGQGTQVTVSS

SEQ ID NO: 25922 - protein, 117 aa, Artificial Sequence
  Chemically Synthesized
QVQLQESGGGLVQAGGSLRLSCAASGTIFLVDGMGWYRQAPGKERELVAAIDEGGSTYYADSVKGRFTISRDNAKNTVYLQMNSLKPEDTAVYYCAALDYSNSTIYWGQGTQVTVSS

SEQ ID NO: 25923 - protein, 127 aa, Artificial Sequence
  Chemically Synthesized
QVQLQESGGGLVQAGGSLRLSCAASGYISTRWAMGWYRQAPGKEREFVASIGYGSSTYYADSVKGRFTISRDNAKNTVYLQMNSLKPEDTAVYYCAVWQYPTDYWRDNLTVYYDGYWGQGTQVTVSS

SEQ ID NO: 25924 - protein, 115 aa, Artificial Sequence
  Chemically Synthesized
QVQLQESGGGLVQAGGSLRLSCAASGSISGLVMGWYRQAPGKEREFVAGISEGTITNYADSVKGRFTISRDNAKNTVYLQMNSLKPEDTAVYYCAATLWLTVTYWGQGTQVTVSS

SEQ ID NO: 25925 - protein, 119 aa, Artificial Sequence
  Chemically Synthesized
QVQLQESGGGLVQAGGSLRLSCAASGTIFGGSSMGWYRQAPGKEREFVAAISTGGSTYYADSVKGRFTISRDNAKNTVYLQMNSLKPEDTAVYYCAATGGLVHDTHLYWGQGTQVTVSS

SEQ ID NO: 25926 - protein, 117 aa, Artificial Sequence
  Chemically Synthesized
QVQLQESGGGLVQAGGSLRLSCAASGYISARLAMGWYRQAPGKERELVATIAVVLLPYADSVKGRFTISRDNAKNTVYLQMNSLKPEDTAVYYCAADVWDIRGLLYWGQGTQVTVSS

SEQ ID NO: 25927 - protein, 118 aa, Artificial Sequence
  Chemically Synthesized
QVQLQESGGGLVQAGGSLRLSCAASGTIFSPYYMGWYRQAPGKERELVAGITRGSSTYYADSVKGRFTISRDNAKNTVYLQMNSLKPEDTAVYYCAARKQDTGPHHYWGQGTQVTVSS

SEQ ID NO: 25928 - protein, 126 aa, Artificial Sequence
  Chemically Synthesized
QVQLQESGGGLVQAGGSLRLSCAASGTISATATMGWYRQAPGKEREFVAGIATGSITYYADSVKGRFTISRDNAKNTVYLQMNSLKPEDTAVYYCAVYWGPYVTDTHTYSALHDYWGQGTQVTVSS

SEQ ID NO: 25929 - protein, 116 aa, Artificial Sequence
  Chemically Synthesized
QVQLQESGGGLVQAGGSLRLSCAASGTISLTNSMGWYRQAPGKERELPLLLRVVVPYADSVKGRFTISRDNAKNTVYLQMNSLKPEDTAVYYCAVIDYDTYRFFYWGQGTQVTVSS

SEQ ID NO: 25930 - protein, 121 aa, Artificial Sequence
  Chemically Synthesized
QVQLQESGGGLVQAGGSLRLSCAASGNIFYATYMGWYRQAPGKEREFVATIDYGTTTNYADSVKGRFTISRDNAKNTVYLQMNSLKPEDTAVYYCAARRYYLRQPIYFDYWGQGTQVTVSS

SEQ ID NO: 25931 - protein, 118 aa, Artificial Sequence
  Chemically Synthesized
QVQLQESGGGLVQAGGSLRLSCAASGSISVLDRMGWYRQAPGKEREFVAAIALGTNTNYADSVKGRFTISRDNAKNTVYLQMNSLKPEDTAVYYCAVRGPYDVYLDYWGQGTQVTVSS

SEQ ID NO: 25932 - protein, 117 aa, Artificial Sequence
  Chemically Synthesized
QVQLQESGGGLVQAGGSLRLSCAASGTILVTLMGWYRQAPGKEREFVAGITYGTSTNYADSVKGRFTISRDNAKNTVYLQMNSLKPEDTAVYYCAVVPYTWSNYYYWGQGTQVTVSS

SEQ ID NO: 25933 - protein, 124 aa, Artificial Sequence
  Chemically Synthesized
QVQLQESGGGLVQAGGSLRLSCAASGYIFSDGVMGWYRQAPGKERELVAGINDGASTYYADSVKGRFTISRDNAKNTVYLQMNSLKPEDTAVYYCAVPANESTRDLYTYPFQYWGQGTQVTVSS

SEQ ID NO: 25934 - protein, 121 aa, Artificial Sequence
  Chemically Synthesized
QVQLQESGGGLVQAGGSLRLSCAASGNIFADYPMGWYRQAPGKEREFVATIDRGANTNYADSVKGRFTISRDNAKNTVYLQMNSLKPEDTAVYYCAASYDYIYEYGDHLYWGQGTQVTVSS

SEQ ID NO: 25935 - protein, 116 aa, Artificial Sequence
  Chemically Synthesized
QVQLQESGGGLVQAGGSLRLSCAASGNIFTHYDMGWYRQAPGKERELVASIGLGDLYADSVKGRFTISRDNAKNTVYLQMNSLKPEDTAVYYCAVYYRTRGVYAYWGQGTQVTVSS

SEQ ID NO: 25936 - protein, 126 aa, Artificial Sequence
  Chemically Synthesized
QVQLQESGGGLVQAGGSLRLSCAASGNISYYWGMGWYRQAPGKERELVAAITRGSNTYYADSVKGRFTISRDNAKNTVYLQMNSLKPEDTAVYYCAVDWYSYGERRDYVDQLLDYWGQGTQVTVSS

SEQ ID NO: 25937 - protein, 126 aa, Artificial Sequence
  Chemically Synthesized
QVQLQESGGGLVQAGGSLRLSCAASGTIFQYLYMGWYRQAPGKERELVATINYGTNTYYADSVKGRFTISRDNAKNTVYLQMNSLKPEDTAVYYCAAYWLTHPTSYPGNDDIYPYWGQGTQVTVSS

SEQ ID NO: 25938 - protein, 121 aa, Artificial Sequence
  Chemically Synthesized
QVQLQESGGGLVQAGGSLRLSCAASGTIFAGDDMGWYRQAPGKEREFVATITGGATTNYADSVKGRFTISRDNAKNTVYLQMNSLKPEDTAVYYCAALFTSSVKLRVTMYWGQGTQVTVSS

SEQ ID NO: 25939 - protein, 122 aa, Artificial Sequence
  Chemically Synthesized
QVQLQESGGGLVQAGGSLRLSCAASGYIFPQSTMGWYRQAPGKEREFVASINDGGSTNYADSVKGRFTISRDNAKNTVYLQMNSLKPEDTAVYYCAVYYPFSRGAASYYWYWGQGTQVTVSS

SEQ ID NO: 25940 - protein, 125 aa, Artificial Sequence
  Chemically Synthesized
QVQLQESGGGLVQAGGSLRLSCAASGTIFGQDFMGWYRQAPGKERELVAAIVVVVVPYADSVKGRFTISRDNAKNTVYLQMNSLKPEDTAVYYCAAVAYDPDGYYYYIRGNHWYWGQGTQVTVSS

SEQ ID NO: 25941 - protein, 121 aa, Artificial Sequence
  Chemically Synthesized
QVQLQESGGGLVQAGGSLRLSCAASGYIFRAGAMGWYRQAPGKERELVAGIDTGANTNYADSVKGRFTISRDNAKNTVYLQMNSLKPEDTAVYYCAAYYLGYPYDSPHNYWGQGTQVTVSS

SEQ ID NO: 25942 - protein, 118 aa, Artificial Sequence
  Chemically Synthesized
QVQLQESGGGLVQAGGSLRLSCAASGYISWWYPMGWYRQAPGKEREFVASIDTGGTTYYADSVKGRFTISRDNAKNTVYLQMNSLKPEDTAVYYCAAATYYYNWHFYWGQGTQVTVSS

SEQ ID NO: 25943 - protein, 118 aa, Artificial Sequence
  Chemically Synthesized
QVQLQESGGGLVQAGGSLRLSCAASGTISGDDYMGWYRQAPGKERELVASIGDGATTYYADSVKGRFTISRDNAKNTVYLQMNSLKPEDTAVYYCAVYTDGVYYFRYWGQGTQVTVSS

SEQ ID NO: 25944 - protein, 117 aa, Artificial Sequence
  Chemically Synthesized
QVQLQESGGGLVQAGGSLRLSCAASGSIFLYTHMGWYRQAPGKERELVATIDNGAYLYADSVKGRFTISRDNAKNTVYLQMNSLKPEDTAVYYCAAYAIDVTELRYWGQGTQVTVSS

SEQ ID NO: 25945 - protein, 117 aa, Artificial Sequence
  Chemically Synthesized
QVQLQESGGGLVQAGGSLRLSCAASGSIFRTFRMGWYRQAPGKERELVASIDTGGSTNYADSVKGRFTISRDNAKNTVYLQMNSLKPEDTAVYYCAVVGPSWKVLYWGQGTQVTVSS

SEQ ID NO: 25946 - protein, 122 aa, Artificial Sequence
  Chemically Synthesized
QVQLQESGGGLVQAGGSLRLSCAASGYISYHPYMGWYRQAPGKERELVASIAHGASTNYADSVKGRFTISRDNAKNTVYLQMNSLKPEDTAVYYCAVYWVHVIAQRDPYDYWGQGTQVTVSS

SEQ ID NO: 25947 - protein, 117 aa, Artificial Sequence
  Chemically Synthesized
QVQLQESGGGLVQAGGSLRLSCAASGSIFAFDMGWYRQAPGKEREFVAGISRGGTTNYADSVKGRFTISRDNAKNTVYLQMNSLKPEDTAVYYCAVQYPTTVGLYYWGQGTQVTVSS

SEQ ID NO: 25948 - protein, 118 aa, Artificial Sequence
  Chemically Synthesized
QVQLQESGGGLVQAGGSLRLSCAASGYISNSYAMGWYRQAPGKERELVAGIASGGNTNYADSVKGRFTISRDNAKNTVYLQMNSLKPEDTAVYYCAAVPTFWQWHIYWGQGTQVTVSS

SEQ ID NO: 25949 - protein, 108 aa, Artificial Sequence
  Chemically Synthesized
QVQLQESGGGLVQAGGSLRLSCAASGYIFDTDIMGWYRQAPGKEREFVAGIAYATTYYADSVKGRFTISRDNAKNTVYLQMNSLKPEDTAVYYCAAYWGQGTQVTVSS

SEQ ID NO: 25950 - protein, 118 aa, Artificial Sequence
  Chemically Synthesized
QVQLQESGGGLVQAGGSLRLSCAASGSISYGRAMGWYRQAPGKERELVAGIGRGTSTNYADSVKGRFTISRDNAKNTVYLQMNSLKPEDTAVYYCAVQRYWPWRYFYWGQGTQVTVSS

SEQ ID NO: 25951 - protein, 118 aa, Artificial Sequence
  Chemically Synthesized
QVQLQESGGGLVQAGGSLRLSCAASGNIFPYYHMGWYRQAPGKERELVAAIDVGGSTQYADSVKGRFTISRDNAKNTVYLQMNSLKPEDTAVYYCAVPPSGRDPYQYWGQGTQVTVSS

SEQ ID NO: 25952 - protein, 111 aa, Artificial Sequence
  Chemically Synthesized
QVQLQESGGGLVQAGGSLRLSCAASGSISYPREMGWYRQAPGKERELVASIDGGSSTNYADSVKGRFTISRDNAKNTVYLQMNSLKPEDTAVYYCAVCLYWGQGTQVTVSS

SEQ ID NO: 25953 - protein, 126 aa, Artificial Sequence
  Chemically Synthesized
QVQLQESGGGLVQAGGSLRLSCAASGYIFYGYDMGWYRQAPGKERELVASIGQGASTYYADSVKGRFTISRDNAKNTVYLQMNSLKPEDTAVYYCAAGELGSDEPLYYIDGGHDYWGQGTQVTVSS

SEQ ID NO: 25954 - protein, 117 aa, Artificial Sequence
  Chemically Synthesized
QVQLQESGGGLVQAGGSLRLSCAASGSISYDGRMGWYRQAPGKERELVASIAEGGSTYYADSVKGRFTISRDNAKNTVYLQMNSLKPEDTAVYYCAVYASCRGTIYWGQGTQVTVSS

SEQ ID NO: 25955 - protein, 117 aa, Artificial Sequence
  Chemically Synthesized
QVQLQESGGGLVQAGGSLRLSCAASGTISYGSMGWYRQAPGKERELVAGIGWGTSTNYADSVKGRFTISRDNAKNTVYLQMNSLKPEDTAVYYCAVWLLVFYEYDYWGQGTQVTVSS

SEQ ID NO: 25956 - protein, 121 aa, Artificial Sequence
  Chemically Synthesized
QVQLQESGGGLVQAGGSLRLSCAASGNISQDRDMGWYRQAPGKERELVATINAGTITNYADSVKGRFTISRDNAKNTVYLQMNSLKPEDTAVYYCAAFSLTVGVTSLSIYWGQGTQVTVSS

SEQ ID NO: 25957 - protein, 118 aa, Artificial Sequence
  Chemically Synthesized
QVQLQESGGGLVQAGGSLRLSCAASGTISDSNSMGWYRQAPGKEREFVAAIDDGGSTYYADSVKGRFTISRDNAKNTVYLQMNSLKPEDTAVYYCAVLAPEIPYHYYWGQGTQVTVSS

SEQ ID NO: 25958 - protein, 125 aa, Artificial Sequence
  Chemically Synthesized
QVQLQESGGGLVQAGGSLRLSCAASGNISAYKYMGWYRQAPGKEREFVATITKGGNTYYADSVKGRFTISRDNAKNTVYLQMNSLKPEDTAVYYCAANWVAYPYYDSYDIGYVYWGQGTQVTVSS

SEQ ID NO: 25959 - protein, 122 aa, Artificial Sequence
  Chemically Synthesized
QVQLQESGGGLVQAGGSLRLSCAASGSISEPGIMGWYRQAPGKEREFVAAIDPGSNTYYADSVKGRFTISRDNAKNTVYLQMNSLKPEDTAVYYCAAVAYGREDYAGYHIYWGQGTQVTVSS

SEQ ID NO: 25960 - protein, 122 aa, Artificial Sequence
  Chemically Synthesized
QVQLQESGGGLVQAGGSLRLSCAASGYISYAYFMGWYRQAPGKEREFVAAINDGASTYYADSVKGRFTISRDNAKNTVYLQMNSLKPEDTAVYYCAVDDDIDDFGGVTLPYWGQGTQVTVSS

SEQ ID NO: 25961 - protein, 122 aa, Artificial Sequence
  Chemically Synthesized
QVQLQESGGGLVQAGGSLRLSCAASGSISHWDDMGWYRQAPGKERELVAAIAGGSNTYYADSVKGRFTISRDNAKNTVYLQMNSLKPEDTAVYYCAVGTAYLYGDALYFGYWGQGTQVTVSS

SEQ ID NO: 25962 - protein, 118 aa, Artificial Sequence
  Chemically Synthesized
QVQLQESGGGLVQAGGSLRLSCAASGYISAYSIMGWYRQAPGKEREFVAAISEGGSTYYADSVKGRFTISRDNAKNTVYLQMNSLKPEDTAVYYCAAYVKSAYYQHYWGQGTQVTVSS

SEQ ID NO: 25963 - protein, 122 aa, Artificial Sequence
  Chemically Synthesized
QVQLQESGGGLVQAGGSLRLSCAASGSIFDAYYMGWYRQAPGKEREFVAGISDGGTTNYADSVKGRFTISRDNAKNTVYLQMNSLKPEDTAVYYCAAVDPYGPFGRREYRYWGQGTQVTVSS

SEQ ID NO: 25964 - protein, 117 aa, Artificial Sequence
  Chemically Synthesized
QVQLQESGGGLVQAGGSLRLSCAASGTISPRVGMGWYRQAPGKERELVAAIASGAITNYADSVKGRFTISRDNAKNTVYLQMNSLKPEDTAVYYCAASSCTTSTIYWGQGTQVTVSS

SEQ ID NO: 25965 - protein, 118 aa, Artificial Sequence
  Chemically Synthesized
QVQLQESGGGLVQAGGSLRLSCAASGYISAQARMGWYRQAPGKEREFVAGIAYGGTTYYADSVKGRFTISRDNAKNTVYLQMNSLKPEDTAVYYCAVGYWDTGTHGYWGQGTQVTVSS

SEQ ID NO: 25966 - protein, 123 aa, Artificial Sequence
  Chemically Synthesized
QVQLQESGGGLVQAGGSLRLSCAASGYISGYPAMGWYRQAPGKEREFVAGINYGSTTNYADSVKGRFTISRDNAKNTVYLQMNSLKPEDTAVYYCAVDYEFTGDYYRSLGMYWGQGTQVTVSS

SEQ ID NO: 25967 - protein, 122 aa, Artificial Sequence
  Chemically Synthesized
QVQLQESGGGLVQAGGSLRLSCAASGYIFSRPTMGWYRQAPGKERELVAGITSGGTTYYADSVKGRFTISRDNAKNTVYLQMNSLKPEDTAVYYCAAVTDYTDNYYRDHFYWGQGTQVTVSS

SEQ ID NO: 25968 - protein, 121 aa, Artificial Sequence
  Chemically Synthesized
QVQLQESGGGLVQAGGSLRLSCAASGTISPTDTMGWYRQAPGKERELVATIGVGTTTYADSVKGRFTISRDNAKNTVYLQMNSLKPEDTAVYYCAVTHDYTDDRVWGLDYWGQGTQVTVSS

SEQ ID NO: 25969 - protein, 122 aa, Artificial Sequence
  Chemically Synthesized
QVQLQESGGGLVQAGGSLRLSCAASGYISYLSRMGWYRQAPGKERELVATISDGATTNYADSVKGRFTISRDNAKNTVYLQMNSLKPEDTAVYYCAVADDWRVAGSETFDYWGQGTQVTVSS

SEQ ID NO: 25970 - protein, 125 aa, Artificial Sequence
  Chemically Synthesized
QVQLQESGGGLVQAGGSLRLSCAASGSIFSDPHMGWYRQAPGKERELVASIDGGGNTNYADSVKGRFTISRDNAKNTVYLQMNSLKPEDTAVYYCAADSAGYRGRSYGASHRLYWGQGTQVTVSS

SEQ ID NO: 25971 - protein, 122 aa, Artificial Sequence
  Chemically Synthesized
QVQLQESGGGLVQAGGSLRLSCAASGYISYTDYMGWYRQAPGKERELVATIGGGTITYYADSVKGRFTISRDNAKNTVYLQMNSLKPEDTAVYYCAVAYSDRYDDDKGHFYWGQGTQVTVSS

SEQ ID NO: 25972 - protein, 122 aa, Artificial Sequence
  Chemically Synthesized
QVQLQESGGGLVQAGGSLRLSCAASGNISVWRYMGWYRQAPGKEREFVATINDGSSTKYADSVKGRFTISRDNAKNTVYLQMNSLKPEDTAVYYCAADDLRYYVVDTYFEYWGQGTQVTVSS

SEQ ID NO: 25973 - protein, 118 aa, Artificial Sequence
  Chemically Synthesized
QVQLQESGGGLVQAGGSLRLSCAASGSIFAVRYMGWYRQAPGKERELVAGIDSGASTYYADSVKGRFTISRDNAKNTVYLQMNSLKPEDTAVYYCAVYYYDGAYYAYWGQGTQVTVSS

SEQ ID NO: 25974 - protein, 117 aa, Artificial Sequence
  Chemically Synthesized
QVQLQESGGGLVQAGGSLRLSCAASGTISYGTYMGWYRQAPGKEREFVPLLLTVLIPYADSVKGRFTISRDNAKNTVYLQMNSLKPEDTAVYYCAADSFDDIGHRYWGQGTQVTVSS

SEQ ID NO: 25975 - protein, 126 aa, Artificial Sequence
  Chemically Synthesized
QVQLQESGGGLVQAGGSLRLSCAASGSIFPVNIMGWYRQAPGKERELVASIGSGGITNYADSVKGRFTISRDNAKNTVYLQMNSLKPEDTAVYYCAAALTKPSATNLDDTGYYYYWGQGTQVTVSS

SEQ ID NO: 25976 - protein, 122 aa, Artificial Sequence
  Chemically Synthesized
QVQLQESGGGLVQAGGSLRLSCAASGTIFYGFPMGWYRQAPGKERELVAAITRGGTTNYADSVKGRFTISRDNAKNTVYLQMNSLKPEDTAVYYCAVHGLTEADSTDDLDYWGQGTQVTVSS

SEQ ID NO: 25977 - protein, 126 aa, Artificial Sequence
  Chemically Synthesized
QVQLQESGGGLVQAGGSLRLSCAASGYIFALHDMGWYRQAPGKERELVASIGQGASTYYADSVKGRFTISRDNAKNTVYLQMNSLKPEDTAVYYCAAYLYYDPSVKVEQRVRLGYWGQGTQVTVSS

SEQ ID NO: 25978 - protein, 118 aa, Artificial Sequence
  Chemically Synthesized
QVQLQESGGGLVQAGGSLRLSCAASGNIFDSYDMGWYRQAPGKERELVAAIAGGGSTYYADSVKGRFTISRDNAKNTVYLQMNSLKPEDTAVYYCAVDPGNYVPYIYWGQGTQVTVSS

SEQ ID NO: 25979 - protein, 116 aa, Artificial Sequence
  Chemically Synthesized
QVQLQESGGGLVQAGGSLRLSCAASGNMGWYRQAPGKERELVASISGGANTNYADSVKGRFTISRDNAKNTVYLQMNSLKPEDTAVYYCAAVPYSIYYYRGTHRYWGQGTQVTVSS

SEQ ID NO: 25980 - protein, 116 aa, Artificial Sequence
  Chemically Synthesized
QVQLQESGGGLVQAGGSLRLSCAASGNIFYWHTMGWYRQAPGKERELVATIGEGGTTYYADSVKGRFTISRDNAKNTVYLQMNSLKPEDTAVYYCAAGSRSKTFYWGQGTQVTVSS

SEQ ID NO: 25981 - protein, 117 aa, Artificial Sequence
  Chemically Synthesized
QVQLQESGGGLVQAGGSLRLSCAASGYISLFYDMGWYRQAPGKERELVAAIANGAITNYADSVKGRFTISRDNAKNTVYLQMNSLKPEDTAVYYCADPDDYYPYDYWGQGTQVTVSS

SEQ ID NO: 25982 - protein, 112 aa, Artificial Sequence
  Chemically Synthesized
QVQLQESGGGLVQAGGSLRLSCAASGTISGSTMGWYRQAPGKERELVASITNGSNTYYADSVKGRFTISRDNAKNTVYLQMNSLKPEDTAVYYCAVQDHDYWGQGTQVTVSS

SEQ ID NO: 25983 - protein, 117 aa, Artificial Sequence
  Chemically Synthesized
QVQLQESGGGLVQAGGSLRLSCAASGYIFTYDVMGWYRQAPGKEREFVATIDSVLVPYADSVKGRFTISRDNAKNTVYLQMNSLKPEDTAVYYCAVRYGKRIWLEYWGQGTQVTVSS

SEQ ID NO: 25984 - protein, 117 aa, Artificial Sequence
  Chemically Synthesized
QVQLQESGGGLVQAGGSLRLSCAASGSIFDWYVMGWYRQAPGKEREFVAAIDYGTNTYYADSVKGRFTISRDNAKNTVYLQMNSLKPEDTAVYYCAVYTDDTSVMYWGQGTQVTVSS

SEQ ID NO: 25985 - protein, 122 aa, Artificial Sequence
  Chemically Synthesized
QVQLQESGGGLVQAGGSLRLSCAASGSIFRYYYMGWYRQAPGKERELVAGIGYGANTYYADSVKGRFTISRDNAKNTVYLQMNSLKPEDTAVYYCAVRPYITGYNTAYFDYWGQGTQVTVSS

SEQ ID NO: 25986 - protein, 122 aa, Artificial Sequence
  Chemically Synthesized
QVQLQESGGGLVQAGGSLRLSCAASGTIFYYYVMGWYRQAPGKERELVAAITNGTITYYADSVKGRFTISRDNAKNTVYLQMNSLKPEDTAVYYCAVPYRYRGHGLRYYRYWGQGTQVTVSS

SEQ ID NO: 25987 - protein, 117 aa, Artificial Sequence
  Chemically Synthesized
QVQLQESGGGLVQAGGSLRLSCAASGYILTVLMGWYRQAPGKEREFVASINEGSITNYADSVKGRFTISRDNAKNTVYLQMNSLKPEDTAVYYCAVLGGISAFFRYWGQGTQVTVSS

SEQ ID NO: 25988 - protein, 126 aa, Artificial Sequence
  Chemically Synthesized
QVQLQESGGGLVQAGGSLRLSCAASGYISYWYPMGWYRQAPGKERELVAGIGYGGNTNYADSVKGRFTISRDNAKNTVYLQMNSLKPEDTAVYYCAVAWRAWYYPPFDQTDPHRYWGQGTQVTVSS

SEQ ID NO: 25989 - protein, 126 aa, Artificial Sequence
  Chemically Synthesized
QVQLQESGGGLVQAGGSLRLSCAASGSISTTGYMGWYRQAPGKERELVASIAHGGITYYADSVKGRFTISRDNAKNTVYLQMNSLKPEDTAVYYCAVQIDGLTDYPWRVRDAHVYWGQGTQVTVSS

SEQ ID NO: 25990 - protein, 122 aa, Artificial Sequence
  Chemically Synthesized
QVQLQESGGGLVQAGGSLRLSCAASGYISDYGGMGWYRQAPGKERELVAAIGNGASTYYADSVKGRFTISRDNAKNTVYLQMNSLKPEDTAVYYCAAGYGHADVTYHRLWYWGQGTQVTVSS

SEQ ID NO: 25991 - protein, 114 aa, Artificial Sequence
  Chemically Synthesized
QVQLQESGGGLVQAGGSLRLSCAASGYISAYEDMGWYRQAPGKEREFVAGIIVPYADSVKGRFTISRDNAKNTVYLQMNSLKPEDTAVYYCAVVATYGGQLGYWGQGTQVTVSS

SEQ ID NO: 25992 - protein, 113 aa, Artificial Sequence
  Chemically Synthesized
QVQLQESGGGLVQAGGSLRLSCAASGSISETCSMGWYRQAPGKERELVAGIDVGAITNYADSVKGRFTISRDNAKNTVYLQMNSLKPEDTAVYYCAVYAHSYWGQGTQVTVSS

SEQ ID NO: 25993 - protein, 118 aa, Artificial Sequence
  Chemically Synthesized
QVQLQESGGGLVQAGGSLRLSCAASGTIFDTYSMGWYRQAPGKERELVASISHGYYYQYADSVKGRFTISRDNAKNTVYLQMNSLKPEDTAVYYCAADADGSPLLQYWGQGTQVTVSS

SEQ ID NO: 25994 - protein, 126 aa, Artificial Sequence
  Chemically Synthesized
QVQLQESGGGLVQAGGSLRLSCAASGNISADNSMGWYRQAPGKERELVAAITPGTNTNYADSVKGRFTISRDNAKNTVYLQMNSLKPEDTAVYYCAAPDRVADGPVDGDSPGFVYWGQGTQVTVSS

SEQ ID NO: 25995 - protein, 118 aa, Artificial Sequence
  Chemically Synthesized
QVQLQESGGGLVQAGGSLRLSCAASGNISYQLTMGWYRQAPGKERELVATIDGGANTYYADSVKGRFTISRDNAKNTVYLQMNSLKPEDTAVYYCAANYSDTYPFFYWGQGTQVTVSS

SEQ ID NO: 25996 - protein, 120 aa, Artificial Sequence
  Chemically Synthesized
QVQLQESGGGLVQAGGSLRLSCAASGYISPSYYMGWYRQAPGKEREFVATIAVGASTYYADSVKGRFTISRDNAKNTVYLQMNSLKPEDTAVYYCAVPSSRFYSTFVIYWGQGTQVTVSS

SEQ ID NO: 25997 - protein, 118 aa, Artificial Sequence
  Chemically Synthesized
QVQLQESGGGLVQAGGSLRLSCAASGYISLTYDMGWYRQAPGKERELVAAITSVVLPYADSVKGRFTISRDNAKNTVYLQMNSLKPEDTAVYYCAVSDRYYVVPLYYWGQGTQVTVSS

SEQ ID NO: 25998 - protein, 122 aa, Artificial Sequence
  Chemically Synthesized
QVQLQESGGGLVQAGGSLRLSCAASGNISGPYYMGWYRQAPGKERELVAAIAPGGITNYADSVKGRFTISRDNAKNTVYLQMNSLKPEDTAVYYCAAGLDPDIPWYYYLGYWGQGTQVTVSS

SEQ ID NO: 25999 - protein, 122 aa, Artificial Sequence
  Chemically Synthesized
QVQLQESGGGLVQAGGSLRLSCAASGYIFGHNYMGWYRQAPGKERELVASINYGGSTNYADSVKGRFTISRDNAKNTVYLQMNSLKPEDTAVYYCAAEVPDDAWVYAQHDYWGQGTQVTVSS

SEQ ID NO: 26000 - protein, 121 aa, Artificial Sequence
  Chemically Synthesized
QVQLQESGGGLVQAGGSLRLSCAASGYISANYDMGWYRQAPGKEREFVASIDTGTSTNYADSVKGRFTISRDNAKNTVYLQMNSLKPEDTAVYYCAAYVAYGYFHDSTMYWGQGTQVTVSS

SEQ ID NO: 26001 - protein, 122 aa, Artificial Sequence
  Chemically Synthesized
QVQLQESGGGLVQAGGSLRLSCAASGNISRREPMGWYRQAPGKERELVATISGGSSTYYADSVKGRFTISRDNAKNTVYLQMNSLKPEDTAVYYCAAGDSTRGLRSSVHFYWGQGTQVTVSS

SEQ ID NO: 26002 - protein, 118 aa, Artificial Sequence
  Chemically Synthesized
QVQLQESGGGLVQAGGSLRLSCAASGSIFYQSQMGWYRQAPGKERELVAGIAPGATTYYADSVKGRFTISRDNAKNTVYLQMNSLKPEDTAVYYCAAYGRAPQIHRYWGQGTQVTVSS

SEQ ID NO: 26003 - protein, 118 aa, Artificial Sequence
  Chemically Synthesized
QVQLQESGGGLVQAGGSLRLSCAASGTISAYGAMGWYRQAPGKERELVASIGDGGITNYADSVKGRFTISRDNAKNTVYLQMNSLKPEDTAVYYCAVGDTIYTQLLYWGQGTQVTVSS

SEQ ID NO: 26004 - protein, 126 aa, Artificial Sequence
  Chemically Synthesized
QVQLQESGGGLVQAGGSLRLSCAASGTISVVSPMGWYRQAPGKEREFVASINAGTITYYADSVKGRFTISRDNAKNTVYLQMNSLKPEDTAVYYCAVATEKYSYTGYSTRTRLKYWGQGTQVTVSS

SEQ ID NO: 26005 - protein, 118 aa, Artificial Sequence
  Chemically Synthesized
QVQLQESGGGLVQAGGSLRLSCAASGNISQLDAMGWYRQAPGKEREFVATIDLGSNTYYADSVKGRFTISRDNAKNTVYLQMNSLKPEDTAVYYCAVLPHDVILFRYWGQGTQVTVSS

SEQ ID NO: 26006 - protein, 122 aa, Artificial Sequence
  Chemically Synthesized
QVQLQESGGGLVQAGGSLRLSCAASGNISGQYLMGWYRQAPGKEREFVASIDAGATTNYADSVKGRFTISRDNAKNTVYLQMNSLKPEDTAVYYCAATAGSAWYSLRYYYYWGQGTQVTVSS

SEQ ID NO: 26007 - protein, 118 aa, Artificial Sequence
  Chemically Synthesized
QVQLQESGGGLVQAGGSLRLSCAASGSIFYRGSMGWYRQAPGKERELVASIATGGNTNYADSVKGRFTISRDNAKNTVYLQMNSLKPEDTAVYYCAAYYYWEDDHTYWGQGTQVTVSS

SEQ ID NO: 26008 - protein, 117 aa, Artificial Sequence
  Chemically Synthesized
QVQLQESGGGLVQAGGSLRLSCAASGYISAYRYMGWYRQAPGKERELVAGIVGVVLPYADSVKGRFTISRDNAKNTVYLQMNSLKPEDTAVYYCAAAIYYDYYYLYWGQGTQVTVSS

SEQ ID NO: 26009 - protein, 110 aa, Artificial Sequence
  Chemically Synthesized
QVQLQESGGGLVQAGGSLRLSCAASGSIFPWGYMGWYRQAPGKERELVAGINLVLLPYADSVKGRFTISRDNAKNTVYLQMNSLKPEDTAVYYCASLDYWGQGTQVTVSS

SEQ ID NO: 26010 - protein, 117 aa, Artificial Sequence
  Chemically Synthesized
QVQLQESGGGLVQAGGSLRLSCAASGYIFNYEEMGWYRQAPGKERELVASINLGTTTNYADSVKGRFTISRDNAKNTVYLQMNSLKPEDTAVYYCAVSSPAGGELYWGQGTQVTVSS

SEQ ID NO: 26011 - protein, 116 aa, Artificial Sequence
  Chemically Synthesized
QVQLQESGGGLVQAGGSLRLSCAASGTIFAADMGWYRQAPGKEREFVASIDSGSSTYYADSVKGRFTISRDNAKNTVYLQMNSLKPEDTAVYYCAASTLVTTNLYWGQGTQVTVSS

SEQ ID NO: 26012 - protein, 118 aa, Artificial Sequence
  Chemically Synthesized
QVQLQESGGGLVQAGGSLRLSCAASGTIFRVSDMGWYRQAPGKERELVASISDGTSTYYADSVKGRFTISRDNAKNTVYLQMNSLKPEDTAVYYCAAILSVSQTLKYWGQGTQVTVSS

SEQ ID NO: 26013 - protein, 117 aa, Artificial Sequence
  Chemically Synthesized
QVQLQESGGGLVQAGGSLRLSCAASGTISSPLMGWYRQAPGKERELVAAITYGTNTNYADSVKGRFTISRDNAKNTVYLQMNSLKPEDTAVYYCAVDYVYRQTLPYWGQGTQVTVSS

SEQ ID NO: 26014 - protein, 122 aa, Artificial Sequence
  Chemically Synthesized
QVQLQESGGGLVQAGGSLRLSCAASGTISDTGGMGWYRQAPGKEREFVATIGEGTSTNYADSVKGRFTISRDNAKNTVYLQMNSLKPEDTAVYYCAAVYPFADEDHGWHGYWGQGTQVTVSS

SEQ ID NO: 26015 - protein, 111 aa, Artificial Sequence
  Chemically Synthesized
QVQLQESGGGLVQAGGSLRLSCAASGYIFIYGSMGWYRQAPGKERELVASIAYGATTYYADSVKGRFTISRDNAKNTVYLQMNSLKPEDTAVYYCAAWYYWGQGTQVTVSS

SEQ ID NO: 26016 - protein, 126 aa, Artificial Sequence
  Chemically Synthesized
QVQLQESGGGLVQAGGSLRLSCAASGNISPDDAMGWYRQAPGKEREFVAGINDGASTNYADSVKGRFTISRDNAKNTVYLQMNSLKPEDTAVYYCAAGSATLLLYADWIYRPHLYWGQGTQVTVSS

SEQ ID NO: 26017 - protein, 122 aa, Artificial Sequence
  Chemically Synthesized
QVQLQESGGGLVQAGGSLRLSCAASGNISDDNVMGWYRQAPGKEREFVAGIDSVVLPYADSVKGRFTISRDNAKNTVYLQMNSLKPEDTAVYYCAYYRQYYAPDTWHHYSYWGQGTQVTVSS

SEQ ID NO: 26018 - protein, 126 aa, Artificial Sequence
  Chemically Synthesized
QVQLQESGGGLVQAGGSLRLSCAASGSIFEPLLMGWYRQAPGKEREFVAGITVGASTNYADSVKGRFTISRDNAKNTVYLQMNSLKPEDTAVYYCAAYQTFEYSWYSYSWHGLLYWGQGTQVTVSS

SEQ ID NO: 26019 - protein, 110 aa, Artificial Sequence
  Chemically Synthesized
QVQLQESGGGLVQAGGSLRLSCAASGSISRPGYMGWYRQAPGKEREFVATISRGTTTYYADSVKGRFTISRDNAKNTVYLQMNSLKPEDTAVYYCAVRYWGQGTQVTVSS

SEQ ID NO: 26020 - protein, 122 aa, Artificial Sequence
  Chemically Synthesized
QVQLQESGGGLVQAGGSLRLSCAASGSIFRPYKMGWYRQAPGKERELVATIGSGSSTYYADSVKGRFTISRDNAKNTVYLQMNSLKPEDTAVYYCAAIYGDSYYAIDFHLYWGQGTQVTVSS

SEQ ID NO: 26021 - protein, 122 aa, Artificial Sequence
  Chemically Synthesized
QVQLQESGGGLVQAGGSLRLSCAASGTISYVAIMGWYRQAPGKEREFVAGIGPGSITYYADSVKGRFTISRDNAKNTVYLQMNSLKPEDTAVYYCAVYDSQYHYYDDHLYYWGQGTQVTVSS

SEQ ID NO: 26022 - protein, 122 aa, Artificial Sequence
  Chemically Synthesized
QVQLQESGGGLVQAGGSLRLSCAASGNIFSHTYMGWYRQAPGKEREFVASIADGTITYYADSVKGRFTISRDNAKNTVYLQMNSLKPEDTAVYYCAVDPIIRDIDVQPLGYWGQGTQVTVSS

SEQ ID NO: 26023 - protein, 121 aa, Artificial Sequence
  Chemically Synthesized
QVQLQESGGGLVQAGGSLRLSCAASGNISLDDSMGWYRQAPGKERELVATINLGSITYADSVKGRFTISRDNAKNTVYLQMNSLKPEDTAVYYCAVDAQSYVDDYPTHHYWGQGTQVTVSS

SEQ ID NO: 26024 - protein, 122 aa, Artificial Sequence
  Chemically Synthesized
QVQLQESGGGLVQAGGSLRLSCAASGSIFPHSAMGWYRQAPGKERELVAAIDAGGITNYADSVKGRFTISRDNAKNTVYLQMNSLKPEDTAVYYCAVTDYVDTTYGARLTYWGQGTQVTVSS

SEQ ID NO: 26025 - protein, 122 aa, Artificial Sequence
  Chemically Synthesized
QVQLQESGGGLVQAGGSLRLSCAASGYISRTNDMGWYRQAPGKERELVAAISYGTTTYYADSVKGRFTISRDNAKNTVYLQMNSLKPEDTAVYYCAAEVDYYAKVAPYHGYWGQGTQVTVSS

SEQ ID NO: 26026 - protein, 117 aa, Artificial Sequence
  Chemically Synthesized
QVQLQESGGGLVQAGGSLRLSCAASGSISPYETMGWYRQAPGKERELLPLLILVLVPYADSVKGRFTISRDNAKNTVYLQMNSLKPEDTAVYYCAVYLGRNGKHSYWGQGTQVTVSS

SEQ ID NO: 26027 - protein, 122 aa, Artificial Sequence
  Chemically Synthesized
QVQLQESGGGLVQAGGSLRLSCAASGSISIYAYMGWYRQAPGKEREFVATITSGATTNYADSVKGRFTISRDNAKNTVYLQMNSLKPEDTAVYYCAVLYGEYVGDDFRLFYWGQGTQVTVSS

SEQ ID NO: 26028 - protein, 122 aa, Artificial Sequence
  Chemically Synthesized
QVQLQESGGGLVQAGGSLRLSCAASGTIFWILDMGWYRQAPGKERELVATIADGSITNYADSVKGRFTISRDNAKNTVYLQMNSLKPEDTAVYYCAVDDYYGLDYEYRHQYWGQGTQVTVSS

SEQ ID NO: 26029 - protein, 111 aa, Artificial Sequence
  Chemically Synthesized
QVQLQESGGGLVQAGGSLRLSCAASGSISSLSWMGWYRQAPGKERELVAGIGYGTTTNYADSVKGRFTISRDNAKNTVYLQMNSLKPEDTAVYYCAVGMYWGQGTQVTVSS

SEQ ID NO: 26030 - protein, 122 aa, Artificial Sequence
  Chemically Synthesized
QVQLQESGGGLVQAGGSLRLSCAASGTISAPRGMGWYRQAPGKERELVAGINGGGTTNYADSVKGRFTISRDNAKNTVYLQMNSLKPEDTAVYYCAAQYTDGTSTYTPYYYWGQGTQVTVSS

SEQ ID NO: 26031 - protein, 118 aa, Artificial Sequence
  Chemically Synthesized
QVQLQESGGGLVQAGGSLRLSCAASGTISARDRMGWYRQAPGKEREFVAGIGPGGNTYYADSVKGRFTISRDNAKNTVYLQMNSLKPEDTAVYYCAVGTYRWYTYGYWGQGTQVTVSS

SEQ ID NO: 26032 - protein, 118 aa, Artificial Sequence
  Chemically Synthesized
QVQLQESGGGLVQAGGSLRLSCAASGNISDSYYMGWYRQAPGKEREFVASITPGGNTYYADSVKGRFTISRDNAKNTVYLQMNSLKPEDTAVYYCAAVARVRYDYHYWGQGTQVTVSS

SEQ ID NO: 26033 - protein, 122 aa, Artificial Sequence
  Chemically Synthesized
QVQLQESGGGLVQAGGSLRLSCAASGNISHGWYMGWYRQAPGKEREFVASISRGGSTYYADSVKGRFTISRDNAKNTVYLQMNSLKPEDTAVYYCAAYGRFYYYGHLIHWYWGQGTQVTVSS

SEQ ID NO: 26034 - protein, 118 aa, Artificial Sequence
  Chemically Synthesized
QVQLQESGGGLVQAGGSLRLSCAASGTIFARITMGWYRQAPGKERELVATISRGGTTYYADSVKGRFTISRDNAKNTVYLQMNSLKPEDTAVYYCAVALGGLGVYEYWGQGTQVTVSS

SEQ ID NO: 26035 - protein, 122 aa, Artificial Sequence
  Chemically Synthesized
QVQLQESGGGLVQAGGSLRLSCAASGNIFVHYYMGWYRQAPGKERELVATISYGSSTNYADSVKGRFTISRDNAKNTVYLQMNSLKPEDTAVYYCAVNYGDSPRGYHILRYWGQGTQVTVSS

SEQ ID NO: 26036 - protein, 121 aa, Artificial Sequence
  Chemically Synthesized
QVQLQESGGGLVQAGGSLRLSCAASGNISDYTWMGWYRQAPGKEREFVASIADGTNTNYADSVKGRFTISRDNAKNTVYLQMNSLKPEDTAVYYCALFVTSFVTITGTMYWGQGTQVTVSS

SEQ ID NO: 26037 - protein, 118 aa, Artificial Sequence
  Chemically Synthesized
QVQLQESGGGLVQAGGSLRLSCAASGSISDGTKMGWYRQAPGKERELVATIANGASTYYADSVKGRFTISRDNAKNTVYLQMNSLKPEDTAVYYCAAVQYVNYHLYYWGQGTQVTVSS

SEQ ID NO: 26038 - protein, 122 aa, Artificial Sequence
  Chemically Synthesized
QVQLQESGGGLVQAGGSLRLSCAASGNIFGIYYMGWYRQAPGKEREFVAAITTGAITNYADSVKGRFTISRDNAKNTVYLQMNSLKPEDTAVYYCAVYLYPVYRYVYLLPYWGQGTQVTVSS

SEQ ID NO: 26039 - protein, 126 aa, Artificial Sequence
  Chemically Synthesized
QVQLQESGGGLVQAGGSLRLSCAASGYIFGRTYMGWYRQAPGKEREFVAAISVGSSTNYADSVKGRFTISRDNAKNTVYLQMNSLKPEDTAVYYCAVRPQEYYRPGWPVRGRHAYWGQGTQVTVSS

SEQ ID NO: 26040 - protein, 122 aa, Artificial Sequence
  Chemically Synthesized
QVQLQESGGGLVQAGGSLRLSCAASGTISDYSYMGWYRQAPGKEREFVATINDGGSTNYADSVKGRFTISRDNAKNTVYLQMNSLKPEDTAVYYCAAFGYDTDKGYFRLDYWGQGTQVTVSS

SEQ ID NO: 26041 - protein, 120 aa, Artificial Sequence
  Chemically Synthesized
QVQLQESGGGLVQAGGSLRLSCAASGTISGPTTMGWYRQAPGKERELVASIGGNTNYADSVKGRFTISRDNAKNTVYLQMNSLKPEDTAVYYCAVVISVKSVGSWEHSYWGQGTQVTVSS

SEQ ID NO: 26042 - protein, 122 aa, Artificial Sequence
  Chemically Synthesized
QVQLQESGGGLVQAGGSLRLSCAASGSISDYDDMGWYRQAPGKEREFVAAIARGANTNYADSVKGRFTISRDNAKNTVYLQMNSLKPEDTAVYYCAVNYHSIATSPFRLGYWGQGTQVTVSS

SEQ ID NO: 26043 - protein, 122 aa, Artificial Sequence
  Chemically Synthesized
QVQLQESGGGLVQAGGSLRLSCAASGNIFKYVIMGWYRQAPGKERELVAAIGPGGITYYADSVKGRFTISRDNAKNTVYLQMNSLKPEDTAVYYCAVRRYRVGHNWTRHGYWGQGTQVTVSS

SEQ ID NO: 26044 - protein, 126 aa, Artificial Sequence
  Chemically Synthesized
QVQLQESGGGLVQAGGSLRLSCAASGYISSASAMGWYRQAPGKERELVASIGGGASTNYADSVKGRFTISRDNAKNTVYLQMNSLKPEDTAVYYCAVAERYLSTFDYYAGYFHDYWGQGTQVTVSS

SEQ ID NO: 26045 - protein, 114 aa, Artificial Sequence
  Chemically Synthesized
QVQLQESGGGLVQAGGSLRLSCAASGSISPYPIMGWYRQAPGKERELVATISTGSITYYADSVKGRFTISRDNAKNTVYLQMNSLKPEDTAVYYCAAQTAFDYWGQGTQVTVSS

SEQ ID NO: 26046 - protein, 122 aa, Artificial Sequence
  Chemically Synthesized
QVQLQESGGGLVQAGGSLRLSCAASGNIFASEDMGWYRQAPGKERELVATITVGTTTNYADSVKGRFTISRDNAKNTVYLQMNSLKPEDTAVYYCAADDVRDYELGEIHSYWGQGTQVTVSS

SEQ ID NO: 26047 - protein, 121 aa, Artificial Sequence
  Chemically Synthesized
QVQLQESGGGLVQAGGSLRLSCAASGTIFHFDFMGWYRQAPGKEREFVAGIAGGTTYYADSVKGRFTISRDNAKNTVYLQMNSLKPEDTAVYYCAVDASQDLEESPGHTYWGQGTQVTVSS

SEQ ID NO: 26048 - protein, 122 aa, Artificial Sequence
  Chemically Synthesized
QVQLQESGGGLVQAGGSLRLSCAASGSISYSDIMGWYRQAPGKEREFVAAISDGTTTNYADSVKGRFTISRDNAKNTVYLQMNSLKPEDTAVYYCAVGTQLKLTYGELHTYWGQGTQVTVSS

SEQ ID NO: 26049 - protein, 122 aa, Artificial Sequence
  Chemically Synthesized
QVQLQESGGGLVQAGGSLRLSCAASGTIFTGTFMGWYRQAPGKEREFVAAISYGTTTNYADSVKGRFTISRDNAKNTVYLQMNSLKPEDTAVYYCAVGLNGYVDWESDHNYWGQGTQVTVSS

SEQ ID NO: 26050 - protein, 121 aa, Artificial Sequence
  Chemically Synthesized
QVQLQESGGGLVQAGGSLRLSCAASGTISGYLGMGWYRQAPGKERELVATIDSGGSTYYADSVKGRFTISRDNAKNTVYLQMNSLKPEDTAVYYCAVSADSLNRLTTTLYWGQGTQVTVSS

SEQ ID NO: 26051 - protein, 126 aa, Artificial Sequence
  Chemically Synthesized
QVQLQESGGGLVQAGGSLRLSCAASGSIFSRYYMGWYRQAPGKEREFVAGIGYGANTNYADSVKGRFTISRDNAKNTVYLQMNSLKPEDTAVYYCAATYSSITNVLYLYTVEYYYWGQGTQVTVSS

SEQ ID NO: 26052 - protein, 116 aa, Artificial Sequence
  Chemically Synthesized
QVQLQESGGGLVQAGGSLRLSCAASGTISAWQRMGWYRQAPGKERELVATIGVGSNTYYADSVKGRFTISRDNAKNTVYLQMNSLKPEDTAVYYCAVYYYDGLYYWGQGTQVTVSS

SEQ ID NO: 26053 - protein, 116 aa, Artificial Sequence
  Chemically Synthesized
QVQLQESGGGLVQAGGSLRLSCAASGNIFSIAVMGWYRQAPGKERELGCYYQYADSVKGRFTISRDNAKNTVYLQMNSLKPEDTAVYYCAVYYAWRTWTTLSLGYWGQGTQVTVSS

SEQ ID NO: 26054 - protein, 118 aa, Artificial Sequence
  Chemically Synthesized
QVQLQESGGGLVQAGGSLRLSCAASGTIFLTSYMGWYRQAPGKEREFVASIARGGSTNYADSVKGRFTISRDNAKNTVYLQMNSLKPEDTAVYYCAANTYWVPLLYYWGQGTQVTVSS

SEQ ID NO: 26055 - protein, 117 aa, Artificial Sequence
  Chemically Synthesized
QVQLQESGGGLVQAGGSLRLSCAASGTIFSRSMGWYRQAPGKERELVAAINTGSTTNYADSVKGRFTISRDNAKNTVYLQMNSLKPEDTAVYYCAAYDSRYFPYRYWGQGTQVTVSS

SEQ ID NO: 26056 - protein, 126 aa, Artificial Sequence
  Chemically Synthesized
QVQLQESGGGLVQAGGSLRLSCAASGNIFGWDVMGWYRQAPGKERELVAGISSGASTNYADSVKGRFTISRDNAKNTVYLQMNSLKPEDTAVYYCAVPGNTAVPYPSESGLLFDYWGQGTQVTVSS

SEQ ID NO: 26057 - protein, 121 aa, Artificial Sequence
  Chemically Synthesized
QVQLQESGGGLVQAGGSLRLSCAASGSISGDQMGWYRQAPGKERELVATINYGTNTNYADSVKGRFTISRDNAKNTVYLQMNSLKPEDTAVYYCAVNYYSGNVYHRLHGYWGQGTQVTVSS

SEQ ID NO: 26058 - protein, 118 aa, Artificial Sequence
  Chemically Synthesized
QVQLQESGGGLVQAGGSLRLSCAASGSIFRWGYMGWYRQAPGKERELVAAISSGGITYYADSVKGRFTISRDNAKNTVYLQMNSLKPEDTAVYYCAAWTRSYSYHGYWGQGTQVTVSS

SEQ ID NO: 26059 - protein, 118 aa, Artificial Sequence
  Chemically Synthesized
QVQLQESGGGLVQAGGSLRLSCAASGTISDISTMGWYRQAPGKEREFVATINLGGTTNYADSVKGRFTISRDNAKNTVYLQMNSLKPEDTAVYYCAVYGSLLLWFRYWGQGTQVTVSS

SEQ ID NO: 26060 - protein, 122 aa, Artificial Sequence
  Chemically Synthesized
QVQLQESGGGLVQAGGSLRLSCAASGNISATLAMGWYRQAPGKERELVAAIDRGSSTYYADSVKGRFTISRDNAKNTVYLQMNSLKPEDTAVYYCAVIKWGGIYDHNAHSYWGQGTQVTVSS

SEQ ID NO: 26061 - protein, 121 aa, Artificial Sequence
  Chemically Synthesized
QVQLQESGGGLVQAGGSLRLSCAASGTIFYTSPMGWYRQAPGKERELVAVLVTVLIPYADSVKGRFTISRDNAKNTVYLQMNSLKPEDTAVYYCAAFYYGDSRTVYRFNYWGQGTQVTVSS

SEQ ID NO: 26062 - protein, 122 aa, Artificial Sequence
  Chemically Synthesized
QVQLQESGGGLVQAGGSLRLSCAASGTIFGRDIMGWYRQAPGKERELVATIDYGGSTNYADSVKGRFTISRDNAKNTVYLQMNSLKPEDTAVYYCAADDNYIAYGYDSHYYWGQGTQVTVSS

SEQ ID NO: 26063 - protein, 121 aa, Artificial Sequence
  Chemically Synthesized
QVQLQESGGGLVQAGGSLRLSCAASGNIFISSMGWYRQAPGKEREFVAGITDGTNTYYADSVKGRFTISRDNAKNTVYLQMNSLKPEDTAVYYCAAIAGIPSYYDGDFIYWGQGTQVTVSS

SEQ ID NO: 26064 - protein, 122 aa, Artificial Sequence
  Chemically Synthesized
QVQLQESGGGLVQAGGSLRLSCAASGYIFYYRYMGWYRQAPGKERELVASIAWGGSTNYADSVKGRFTISRDNAKNTVYLQMNSLKPEDTAVYYCAVWTAWSWIWSGNFGYWGQGTQVTVSS

SEQ ID NO: 26065 - protein, 125 aa, Artificial Sequence
  Chemically Synthesized
QVQLQESGGGLVQAGGSLRLSCAASGTIFSTFMGWYRQAPGKERELVATIGPGGITNYADSVKGRFTISRDNAKNTVYLQMNSLKPEDTAVYYCAVDYYDDSHYDDTTRNVFLYWGQGTQVTVSS

SEQ ID NO: 26066 - protein, 115 aa, Artificial Sequence
  Chemically Synthesized
QVQLQESGGGLVQAGGSLRLSCAASGNIFDTLMGWYRQAPGKERELVAGIDYDYQYADSVKGRFTISRDNAKNTVYLQMNSLKPEDTAVYYCAVWLIVDYIHDYWGQGTQVTVSS

SEQ ID NO: 26067 - protein, 117 aa, Artificial Sequence
  Chemically Synthesized
QVQLQESGGGLVQAGGSLRLSCAASGSISRQLRMGWYRQAPGKEREFVATIALGSTTNYADSVKGRFTISRDNAKNTVYLQMNSLKPEDTAVYYCAVPNPYSVVIYWGQGTQVTVSS

SEQ ID NO: 26068 - protein, 117 aa, Artificial Sequence
  Chemically Synthesized
QVQLQESGGGLVQAGGSLRLSCAASGYISYRYLMGWYRQAPGKERELVAAIDDGTITYYADSVKGRFTISRDNAKNTVYLQMNSLKPEDTAVYYCAADPQLGPSIYWGQGTQVTVSS

SEQ ID NO: 26069 - protein, 121 aa, Artificial Sequence
  Chemically Synthesized
QVQLQESGGGLVQAGGSLRLSCAASGNISATSTMGWYRQAPGKERELVASITSGAITYYADSVKGRFTISRDNAKNTVYLQMNSLKPEDTAVYYCAVYSTVTILRWFRIYWGQGTQVTVSS

SEQ ID NO: 26070 - protein, 118 aa, Artificial Sequence
  Chemically Synthesized
QVQLQESGGGLVQAGGSLRLSCAASGYISPYGYMGWYRQAPGKEREFVASIDYGAITNYADSVKGRFTISRDNAKNTVYLQMNSLKPEDTAVYYCAVLNYGEWQFIYWGQGTQVTVSS

SEQ ID NO: 26071 - protein, 117 aa, Artificial Sequence
  Chemically Synthesized
QVQLQESGGGLVQAGGSLRLSCAASGTISDSCMGWYRQAPGKERELVASITYGGNTYYADSVKGRFTISRDNAKNTVYLQMNSLKPEDTAVYYCAAARTITFGYFYWGQGTQVTVSS

SEQ ID NO: 26072 - protein, 122 aa, Artificial Sequence
  Chemically Synthesized
QVQLQESGGGLVQAGGSLRLSCAASGYISFDQGMGWYRQAPGKEREFVATIDGGTNTNYADSVKGRFTISRDNAKNTVYLQMNSLKPEDTAVYYCAAQSAAGLYNVYIHQYWGQGTQVTVSS

SEQ ID NO: 26073 - protein, 122 aa, Artificial Sequence
  Chemically Synthesized
QVQLQESGGGLVQAGGSLRLSCAASGSISYIGRMGWYRQAPGKERELVATIGYGSTTNYADSVKGRFTISRDNAKNTVYLQMNSLKPEDTAVYYCAVVSYWYGDGGYDLWYWGQGTQVTVSS

SEQ ID NO: 26074 - protein, 121 aa, Artificial Sequence
  Chemically Synthesized
QVQLQESGGGLVQAGGSLRLSCAASGSIFHISMGWYRQAPGKEREFVASIGFGSTTNYADSVKGRFTISRDNAKNTVYLQMNSLKPEDTAVYYCAAYIYGDDYDAYDLRYWGQGTQVTVSS

SEQ ID NO: 26075 - protein, 118 aa, Artificial Sequence
  Chemically Synthesized
QVQLQESGGGLVQAGGSLRLSCAASGTIFTIDSMGWYRQAPGKEREFVAAIGYGATTYYADSVKGRFTISRDNAKNTVYLQMNSLKPEDTAVYYCAVDPYSGYIHSYWGQGTQVTVSS

SEQ ID NO: 26076 - protein, 126 aa, Artificial Sequence
  Chemically Synthesized
QVQLQESGGGLVQAGGSLRLSCAASGNIFVHLTMGWYRQAPGKERELVATIDRGATTYYADSVKGRFTISRDNAKNTVYLQMNSLKPEDTAVYYCAADTYSWARTWVDGGPPLYYWGQGTQVTVSS

SEQ ID NO: 26077 - protein, 112 aa, Artificial Sequence
  Chemically Synthesized
QVQLQESGGGLVQAGGSLRLSCAASGYIFGVGYMGWYRQAPGKEREFVAAIDYGSNTYYADSVKGRFTISRDNAKNTVYLQMNSLKPEDTAVYYCAAVVLYWGQGTQVTVSS

SEQ ID NO: 26078 - protein, 119 aa, Artificial Sequence
  Chemically Synthesized
QVQLQESGGGLVQAGGSLRLSCAASGSIFLVTLMGWYRQAPGKEREFVAGIYADSVKGRFTISRDNAKNTVYLQMNSLKPEDTAVYYCAALYPAGALFRDLYVPLFIYWGQGTQVTVSS

SEQ ID NO: 26079 - protein, 122 aa, Artificial Sequence
  Chemically Synthesized
QVQLQESGGGLVQAGGSLRLSCAASGTISWYSFMGWYRQAPGKEREFVAGIGPGGTTYYADSVKGRFTISRDNAKNTVYLQMNSLKPEDTAVYYCAVVTAIASTYYGPFGYWGQGTQVTVSS

SEQ ID NO: 26080 - protein, 122 aa, Artificial Sequence
  Chemically Synthesized
QVQLQESGGGLVQAGGSLRLSCAASGSISTDRAMGWYRQAPGKERELVASIDPGTSTNYADSVKGRFTISRDNAKNTVYLQMNSLKPEDTAVYYCAAGWDTPGTVQGAHYYWGQGTQVTVSS

SEQ ID NO: 26081 - protein, 126 aa, Artificial Sequence
  Chemically Synthesized
QVQLQESGGGLVQAGGSLRLSCAASGTIFIAYYMGWYRQAPGKERELVASINDGTSTNYADSVKGRFTISRDNAKNTVYLQMNSLKPEDTAVYYCAVGTPGQRSQLYGSARSHPYWGQGTQVTVSS

SEQ ID NO: 26082 - protein, 114 aa, Artificial Sequence
  Chemically Synthesized
QVQLQESGGGLVQAGGSLRLSCAASGNIFYPGSMGWYRQAPGKEREFVAYQYADSVKGRFTISRDNAKNTVYLQMNSLKPEDTAVYYCALRNTGTNTVCTGIYWGQGTQVTVSS

SEQ ID NO: 26083 - protein, 126 aa, Artificial Sequence
  Chemically Synthesized
QVQLQESGGGLVQAGGSLRLSCAASGTIFALYYMGWYRQAPGKEREFVAGIGPGGSTNYADSVKGRFTISRDNAKNTVYLQMNSLKPEDTAVYYCAADSNAREQKGSDGPLYHYYWGQGTQVTVSS

SEQ ID NO: 26084 - protein, 117 aa, Artificial Sequence
  Chemically Synthesized
QVQLQESGGGLVQAGGSLRLSCAASGYISDYYWMGWYRQAPGKERELVATINAGTSTNYADSVKGRFTISRDNAKNTVYLQMNSLKPEDTAVYYCAVPYPYTPSIYWGQGTQVTVSS

SEQ ID NO: 26085 - protein, 122 aa, Artificial Sequence
  Chemically Synthesized
QVQLQESGGGLVQAGGSLRLSCAASGYISAAYYMGWYRQAPGKEREFVASITVGASTYYADSVKGRFTISRDNAKNTVYLQMNSLKPEDTAVYYCAVWGGYYLTDTYPHPYWGQGTQVTVSS

SEQ ID NO: 26086 - protein, 120 aa, Artificial Sequence
  Chemically Synthesized
QVQLQESGGGLVQAGGSLRLSCAASGNIFWESMGWYRQAPGKERELVAGIITVVIPYADSVKGRFTISRDNAKNTVYLQMNSLKPEDTAVYYCAADQDNLRDKTCYSSYWGQGTQVTVSS

SEQ ID NO: 26087 - protein, 125 aa, Artificial Sequence
  Chemically Synthesized
QVQLQESGGGLVQAGGSLRLSCAASGSISYWDLMGWYRQAPGKERELVAGIADGSTTNYADSVKGRFTISRDNAKNTVYLQMNSLKPEDTAVYYCAANFNGLDLVRTLTLFVFYWGQGTQVTVSS

SEQ ID NO: 26088 - protein, 122 aa, Artificial Sequence
  Chemically Synthesized
QVQLQESGGGLVQAGGSLRLSCAASGNISDEWQMGWYRQAPGKEREFVAGITPGTSTYYADSVKGRFTISRDNAKNTVYLQMNSLKPEDTAVYYCAADESPRRDDDGVYKYWGQGTQVTVSS

SEQ ID NO: 26089 - protein, 124 aa, Artificial Sequence
  Chemically Synthesized
QVQLQESGGGLVQAGGSLRLSCAASGYIFDRDVMGWYRQAPGKEREFVASIDSGAITYYADSVKGRFTISRDNAKNTVYLQMNSLKPEDTAVYYCAVRVTGRYDAYDWYLYHYWGQGTQVTVSS

SEQ ID NO: 26090 - protein, 121 aa, Artificial Sequence
  Chemically Synthesized
QVQLQESGGGLVQAGGSLRLSCAASGYIFYDYLMGWYRQAPGKEREFVAAITPGATTYADSVKGRFTISRDNAKNTVYLQMNSLKPEDTAVYYCAVNAYYVLRQVVGLYYWGQGTQVTVSS

SEQ ID NO: 26091 - protein, 118 aa, Artificial Sequence
  Chemically Synthesized
QVQLQESGGGLVQAGGSLRLSCAASGTISEPPWMGWYRQAPGKEREFVAGIGTGANTNYADSVKGRFTISRDNAKNTVYLQMNSLKPEDTAVYYCAVYVYADPGHDYWGQGTQVTVSS

SEQ ID NO: 26092 - protein, 121 aa, Artificial Sequence
  Chemically Synthesized
QVQLQESGGGLVQAGGSLRLSCAASGNIFRVGSMGWYRQAPGKEREFVAGISYGASTYYADSVKGRFTISRDNAKNTVYLQMNSLKPEDTAVYYCAAGYYGIDAGGLLVYWGQGTQVTVSS

SEQ ID NO: 26093 - protein, 118 aa, Artificial Sequence
  Chemically Synthesized
QVQLQESGGGLVQAGGSLRLSCAASGNISYDTDMGWYRQAPGKERELVATIANGSSTNYADSVKGRFTISRDNAKNTVYLQMNSLKPEDTAVYYCAVTYAGSITFAYWGQGTQVTVSS

SEQ ID NO: 26094 - protein, 126 aa, Artificial Sequence
  Chemically Synthesized
QVQLQESGGGLVQAGGSLRLSCAASGNISWWGYMGWYRQAPGKEREFVASISVGANTYYADSVKGRFTISRDNAKNTVYLQMNSLKPEDTAVYYCAVTTRWGLGYYGQGIPRHYYWGQGTQVTVSS

SEQ ID NO: 26095 - protein, 118 aa, Artificial Sequence
  Chemically Synthesized
QVQLQESGGGLVQAGGSLRLSCAASGNIFWSSAMGWYRQAPGKEREFVATIAAGANTNYADSVKGRFTISRDNAKNTVYLQMNSLKPEDTAVYYCAAGPGDSPTHTYWGQGTQVTVSS

SEQ ID NO: 26096 - protein, 117 aa, Artificial Sequence
  Chemically Synthesized
QVQLQESGGGLVQAGGSLRLSCAASGTIFAYAGMGWYRQAPGKERELVPVLLLVVIPYADSVKGRFTISRDNAKNTVYLQMNSLKPEDTAVYYCAVYNTTGEWLTYWGQGTQVTVSS

SEQ ID NO: 26097 - protein, 120 aa, Artificial Sequence
  Chemically Synthesized
QVQLQESGGGLVQAGGSLRLSCAASGNIFPPYSMGWYRQAPGKEREFVASITAGAITNYADSVKGRFTISRDNAKNTVYLQMNSLKPEDTAVYYCAVAYYWGNYVDHDYWGQGTQVTVSS

SEQ ID NO: 26098 - protein, 114 aa, Artificial Sequence
  Chemically Synthesized
QVQLQESGGGLVQAGGSLRLSCAASGSISKWDYMGWYRQAPGKEREFVATIGLGASTNYADSVKGRFTISRDNAKNTVYLQMNSLKPEDTAVYYCARLIGLGYWGQGTQVTVSS

SEQ ID NO: 26099 - protein, 118 aa, Artificial Sequence
  Chemically Synthesized
QVQLQESGGGLVQAGGSLRLSCAASGYISVEYEMGWYRQAPGKEREFVAAITYGTNTNYADSVKGRFTISRDNAKNTVYLQMNSLKPEDTAVYYCAADYDDESPLFYWGQGTQVTVSS

SEQ ID NO: 26100 - protein, 122 aa, Artificial Sequence
  Chemically Synthesized
QVQLQESGGGLVQAGGSLRLSCAASGNISGYEDMGWYRQAPGKERELVATIDYGATTNYADSVKGRFTISRDNAKNTVYLQMNSLKPEDTAVYYCAAWWKADYSSDVDHAYWGQGTQVTVSS

SEQ ID NO: 26101 - protein, 117 aa, Artificial Sequence
  Chemically Synthesized
QVQLQESGGGLVQAGGSLRLSCAASGNISYESMGWYRQAPGKEREFVATIALGTTTYYADSVKGRFTISRDNAKNTVYLQMNSLKPEDTAVYYCAVIISDYTGHSYWGQGTQVTVSS

SEQ ID NO: 26102 - protein, 125 aa, Artificial Sequence
  Chemically Synthesized
QVQLQESGGGLVQAGGSLRLSCAASGNISSFGRMGWYRQAPGKERELVASIGQGVYLYADSVKGRFTISRDNAKNTVYLQMNSLKPEDTAVYYCAAGYPKDITHERWLPFYLDYWGQGTQVTVSS

SEQ ID NO: 26103 - protein, 118 aa, Artificial Sequence
  Chemically Synthesized
QVQLQESGGGLVQAGGSLRLSCAASGSISYYSSMGWYRQAPGKEREFVAGIGIGGNTNYADSVKGRFTISRDNAKNTVYLQMNSLKPEDTAVYYCAAPDWYEHPLYYWGQGTQVTVSS

SEQ ID NO: 26104 - protein, 122 aa, Artificial Sequence
  Chemically Synthesized
QVQLQESGGGLVQAGGSLRLSCAASGTISPYEGMGWYRQAPGKEREFVATIDGASTNYADSVKGRFTISRDNAKNTVYLQMNSLKPEDTAVYYCAVGGEVPHRSDQNAFAYWGQGTQVTVSS

SEQ ID NO: 26105 - protein, 118 aa, Artificial Sequence
  Chemically Synthesized
QVQLQESGGGLVQAGGSLRLSCAASGSISGRTAMGWYRQAPGKERELVATINDGATTYYADSVKGRFTISRDNAKNTVYLQMNSLKPEDTAVYYCAVLNPGDRLYIYWGQGTQVTVSS

SEQ ID NO: 26106 - protein, 121 aa, Artificial Sequence
  Chemically Synthesized
QVQLQESGGGLVQAGGSLRLSCAASGYIFVRSSMGWYRQAPGKEREFVATITYGGITYADSVKGRFTISRDNAKNTVYLQMNSLKPEDTAVYYCAVEYIYDSGGDEQHNYWGQGTQVTVSS

SEQ ID NO: 26107 - protein, 122 aa, Artificial Sequence
  Chemically Synthesized
QVQLQESGGGLVQAGGSLRLSCAASGSISGQSYMGWYRQAPGKEREFVATIGPGTSTNYADSVKGRFTISRDNAKNTVYLQMNSLKPEDTAVYYCAAVHRAYTVWTDILAYWGQGTQVTVSS

SEQ ID NO: 26108 - protein, 126 aa, Artificial Sequence
  Chemically Synthesized
QVQLQESGGGLVQAGGSLRLSCAASGYIFNGPYMGWYRQAPGKEREFVAAITNGATTYYADSVKGRFTISRDNAKNTVYLQMNSLKPEDTAVYYCAVDHDTNILQFDFRPYWYDYWGQGTQVTVSS

SEQ ID NO: 26109 - protein, 113 aa, Artificial Sequence
  Chemically Synthesized
QVQLQESGGGLVQAGGSLRLSCAASGSISRYGGMGWYRQAPGKEREFVAGIGYGGNTNYADSVKGRFTISRDNAKNTVYLQMNSLKPEDTAVYYCAATRTMYWGQGTQVTVSS

SEQ ID NO: 26110 - protein, 117 aa, Artificial Sequence
  Chemically Synthesized
QVQLQESGGGLVQAGGSLRLSCAASGTIFRDAYMGWYRQAPGKEREFVAGITGAITNYADSVKGRFTISRDNAKNTVYLQMNSLKPEDTAVYYCAVYDGGWWGLTYWGQGTQVTVSS

SEQ ID NO: 26111 - protein, 126 aa, Artificial Sequence
  Chemically Synthesized
QVQLQESGGGLVQAGGSLRLSCAASGSISWTGRMGWYRQAPGKERELVAAINDGTNTYYADSVKGRFTISRDNAKNTVYLQMNSLKPEDTAVYYCAVYELYTIYRYIAPTRVYVYWGQGTQVTVSS

SEQ ID NO: 26112 - protein, 126 aa, Artificial Sequence
  Chemically Synthesized
QVQLQESGGGLVQAGGSLRLSCAASGYISPYKTMGWYRQAPGKEREFVASIDLGSNTYYADSVKGRFTISRDNAKNTVYLQMNSLKPEDTAVYYCAASTYADDTPDLRPSIAYWYWGQGTQVTVSS

SEQ ID NO: 26113 - protein, 119 aa, Artificial Sequence
  Chemically Synthesized
QVQLQESGGGLVQAGGSLRLSCAASGNIFWTSYMGWYRQAPGKERELVAAIGSGGNTYYADSVKGRFTISRDNAKNTVYLQMNSLKPEDTAVYYCAAQAWYQTLNRYYWGQGTQVTVSS

SEQ ID NO: 26114 - protein, 112 aa, Artificial Sequence
  Chemically Synthesized
QVQLQESGGGLVQAGGSLRLSCAASGYFLRLLMGWYRQAPGKEREFVATINYADSVKGRFTISRDNAKNTVYLQMNSLKPEDTAVYYCAVGPYDPTWWHYYWGQGTQVTVSS

SEQ ID NO: 26115 - protein, 116 aa, Artificial Sequence
  Chemically Synthesized
QVQLQESGGGLVQAGGSLRLSCAASGTISTLGMGWYRQAPGKERELVASYYQYADSVKGRFTISRDNAKNTVYLQMNSLKPEDTAVYYCAALRGNSPDDITGLYYWGQGTQVTVSS

SEQ ID NO: 26116 - protein, 118 aa, Artificial Sequence
  Chemically Synthesized
QVQLQESGGGLVQAGGSLRLSCAASGTISLVSTMGWYRQAPGKERELVASIAAGGITYYADSVKGRFTISRDNAKNTVYLQMNSLKPEDTAVYYCAVAEASAPALPYWGQGTQVTVSS

SEQ ID NO: 26117 - protein, 126 aa, Artificial Sequence
  Chemically Synthesized
QVQLQESGGGLVQAGGSLRLSCAASGNIFRYRYMGWYRQAPGKERELVASITDGGTTYYADSVKGRFTISRDNAKNTVYLQMNSLKPEDTAVYYCAADEYPNLDAPLYALATLRYWGQGTQVTVSS

SEQ ID NO: 26118 - protein, 126 aa, Artificial Sequence
  Chemically Synthesized
QVQLQESGGGLVQAGGSLRLSCAASGNIFDYYDMGWYRQAPGKERELVATIAVGSTTYYADSVKGRFTISRDNAKNTVYLQMNSLKPEDTAVYYCAAYHSIDHPDTQRDEGQLAYWGQGTQVTVSS

SEQ ID NO: 26119 - protein, 122 aa, Artificial Sequence
  Chemically Synthesized
QVQLQESGGGLVQAGGSLRLSCAASGYISHGGYMGWYRQAPGKERELVASISGGGNTYYADSVKGRFTISRDNAKNTVYLQMNSLKPEDTAVYYCAVQDTSVIDYVGLFLYWGQGTQVTVSS

SEQ ID NO: 26120 - protein, 122 aa, Artificial Sequence
  Chemically Synthesized
QVQLQESGGGLVQAGGSLRLSCAASGTIFWSYYMGWYRQAPGKEREFVAAISSGGTTYYADSVKGRFTISRDNAKNTVYLQMNSLKPEDTAVYYCAAQGYGWRGGGDDFRYWGQGTQVTVSS

SEQ ID NO: 26121 - protein, 118 aa, Artificial Sequence
  Chemically Synthesized
QVQLQESGGGLVQAGGSLRLSCAASGTIFQWDWMGWYRQAPGKEREFVATITGGSSTYYADSVKGRFTISRDNAKNTVYLQMNSLKPEDTAVYYCAVWVPYYPLFQYWGQGTQVTVSS

SEQ ID NO: 26122 - protein, 122 aa, Artificial Sequence
  Chemically Synthesized
QVQLQESGGGLVQAGGSLRLSCAASGSIFAQVYMGWYRQAPGKERELVASISYGGTTNYADSVKGRFTISRDNAKNTVYLQMNSLKPEDTAVYYCAAGYAGKQYDDRDFAYWGQGTQVTVSS

SEQ ID NO: 26123 - protein, 118 aa, Artificial Sequence
  Chemically Synthesized
QVQLQESGGGLVQAGGSLRLSCAASGTISSAYAMGWYRQAPGKEREFVAGIAGGTNTYYADSVKGRFTISRDNAKNTVYLQMNSLKPEDTAVYYCAVGASYWISHIYWGQGTQVTVSS

SEQ ID NO: 26124 - protein, 117 aa, Artificial Sequence
  Chemically Synthesized
QVQLQESGGGLVQAGGSLRLSCAASGNIFLRDIMGWYRQAPGKERELVAAIAVGSNTYYADSVKGRFTISRDNAKNTVYLQMNSLKPEDTAVYYCAAVYDAYYLDYWGQGTQVTVSS

SEQ ID NO: 26125 - protein, 126 aa, Artificial Sequence
  Chemically Synthesized
QVQLQESGGGLVQAGGSLRLSCAASGNISDYYAMGWYRQAPGKERELVASISYGGNTYYADSVKGRFTISRDNAKNTVYLQMNSLKPEDTAVYYCAVDPRPSYREWPSGDKHLTYWGQGTQVTVSS

SEQ ID NO: 26126 - protein, 122 aa, Artificial Sequence
  Chemically Synthesized
QVQLQESGGGLVQAGGSLRLSCAASGSIFAGRNMGWYRQAPGKEREFVAGITYGGSTYYADSVKGRFTISRDNAKNTVYLQMNSLKPEDTAVYYCAVEDYNGYHYVIVHYYWGQGTQVTVSS

SEQ ID NO: 26127 - protein, 122 aa, Artificial Sequence
  Chemically Synthesized
QVQLQESGGGLVQAGGSLRLSCAASGTISTRPFMGWYRQAPGKEREFVAAINSGATTYYADSVKGRFTISRDNAKNTVYLQMNSLKPEDTAVYYCAADTSQWSDHYVDFEYWGQGTQVTVSS

SEQ ID NO: 26128 - protein, 117 aa, Artificial Sequence
  Chemically Synthesized
QVQLQESGGGLVQAGGSLRLSCAASGTISYSTMGWYRQAPGKEREFVAAIGRGASTNYADSVKGRFTISRDNAKNTVYLQMNSLKPEDTAVYYCAAGWIILDTHVYWGQGTQVTVSS

SEQ ID NO: 26129 - protein, 117 aa, Artificial Sequence
  Chemically Synthesized
QVQLQESGGGLVQAGGSLRLSCAASGTIFSTRSMGWYRQAPGKEREFVASITPGGNTNYADSVKGRFTISRDNAKNTVYLQMNSLKPEDTAVYYCAAYVYATNSFYWGQGTQVTVSS

SEQ ID NO: 26130 - protein, 121 aa, Artificial Sequence
  Chemically Synthesized
QVQLQESGGGLVQAGGSLRLSCAASGTIFYYDYMGWYRQAPGKERELVASIDTGGTTNYADSVKGRFTISRDNAKNTVYLQMNSLKPEDTAVYYCAAGPTYQDAEYPYPYWGQGTQVTVSS

SEQ ID NO: 26131 - protein, 118 aa, Artificial Sequence
  Chemically Synthesized
QVQLQESGGGLVQAGGSLRLSCAASGTISLVFVMGWYRQAPGKERELVAGISYGGNTNYADSVKGRFTISRDNAKNTVYLQMNSLKPEDTAVYYCAAYTAEGTYHYYWGQGTQVTVSS

SEQ ID NO: 26132 - protein, 117 aa, Artificial Sequence
  Chemically Synthesized
QVQLQESGGGLVQAGGSLRLSCAASGNISYSDGMGWYRQAPGKERELVATIKLVLVPYADSVKGRFTISRDNAKNTVYLQMNSLKPEDTAVYYCAARGVPRIFFLYWGQGTQVTVSS

SEQ ID NO: 26133 - protein, 118 aa, Artificial Sequence
  Chemically Synthesized
QVQLQESGGGLVQAGGSLRLSCAASGTISGRDRMGWYRQAPGKERELVASIGNGSTTYYADSVKGRFTISRDNAKNTVYLQMNSLKPEDTAVYYCAVRGGYQYPSWYWGQGTQVTVSS

SEQ ID NO: 26134 - protein, 126 aa, Artificial Sequence
  Chemically Synthesized
QVQLQESGGGLVQAGGSLRLSCAASGYISQIPFMGWYRQAPGKEREFVAAIGDGTSTYYADSVKGRFTISRDNAKNTVYLQMNSLKPEDTAVYYCAVSTGYDDQDFSYVTADLYYWGQGTQVTVSS

SEQ ID NO: 26135 - protein, 126 aa, Artificial Sequence
  Chemically Synthesized
QVQLQESGGGLVQAGGSLRLSCAASGNIFTYRGMGWYRQAPGKERELVASITIGASTNYADSVKGRFTISRDNAKNTVYLQMNSLKPEDTAVYYCAANYTYYTTYIVADVYLHKYWGQGTQVTVSS

SEQ ID NO: 26136 - protein, 117 aa, Artificial Sequence
  Chemically Synthesized
QVQLQESGGGLVQAGGSLRLSCAASGTIFSYTNMGWYRQAPGKEREFVAAIAHGLIPYADSVKGRFTISRDNAKNTVYLQMNSLKPEDTAVYYCAARYDYLFWYSYWGQGTQVTVSS

SEQ ID NO: 26137 - protein, 126 aa, Artificial Sequence
  Chemically Synthesized
QVQLQESGGGLVQAGGSLRLSCAASGTISIGTYMGWYRQAPGKERELVASITDGTNTNYADSVKGRFTISRDNAKNTVYLQMNSLKPEDTAVYYCAVPVALDTYWRIDYDYYLAYWGQGTQVTVSS

SEQ ID NO: 26138 - protein, 111 aa, Artificial Sequence
  Chemically Synthesized
QVQLQESGGGLVQAGGSLRLSCAASGTISVRYYMGWYRQAPGKERELVAGITSGANTNYADSVKGRFTISRDNAKNTVYLQMNSLKPEDTAVYYCAVLRYWGQGTQVTVSS

SEQ ID NO: 26139 - protein, 118 aa, Artificial Sequence
  Chemically Synthesized
QVQLQESGGGLVQAGGSLRLSCAASGNISYPLYMGWYRQAPGKEREFVAGIAEGGTTYYADSVKGRFTISRDNAKNTVYLQMNSLKPEDTAVYYCAAWSPDVPTHYYWGQGTQVTVSS

SEQ ID NO: 26140 - protein, 118 aa, Artificial Sequence
  Chemically Synthesized
QVQLQESGGGLVQAGGSLRLSCAASGYISTYYTMGWYRQAPGKERELVATIGFGSNTNYADSVKGRFTISRDNAKNTVYLQMNSLKPEDTAVYYCAADPAYIDRFFYWGQGTQVTVSS

SEQ ID NO: 26141 - protein, 118 aa, Artificial Sequence
  Chemically Synthesized
QVQLQESGGGLVQAGGSLRLSCAASGNIFHGYYMGWYRQAPGKERELVAGIGSGAITNYADSVKGRFTISRDNAKNTVYLQMNSLKPEDTAVYYCAATHQYDYHHRYWGQGTQVTVSS

SEQ ID NO: 26142 - protein, 122 aa, Artificial Sequence
  Chemically Synthesized
QVQLQESGGGLVQAGGSLRLSCAASGNIFKYRSMGWYRQAPGKERELVATIDYGTNTNYADSVKGRFTISRDNAKNTVYLQMNSLKPEDTAVYYCAVRDVWDYTGEDRYRYWGQGTQVTVSS

SEQ ID NO: 26143 - protein, 116 aa, Artificial Sequence
  Chemically Synthesized
QVQLQESGGGLVQAGGSLRLSCAASGYIFSSGVMGWYRQAPGKERELLPVLVLVVIPYADSVKGRFTISRDNAKNTVYLQMNSLKPEDTAVYYCAAGPGGNDDQYWGQGTQVTVSS

SEQ ID NO: 26144 - protein, 117 aa, Artificial Sequence
  Chemically Synthesized
QVQLQESGGGLVQAGGSLRLSCAASGTIFYVLMGWYRQAPGKEREFVATIARGANTNYADSVKGRFTISRDNAKNTVYLQMNSLKPEDTAVYYCAVYTYDYGLYGYWGQGTQVTVSS

SEQ ID NO: 26145 - protein, 120 aa, Artificial Sequence
  Chemically Synthesized
QVQLQESGGGLVQAGGSLRLSCAASGYISVSDLMGWYRQAPGKERELLPLLMVVLPYADSVKGRFTISRDNAKNTVYLQMNSLKPEDTAVYYCAADYTGYGSAVYLHTYWGQGTQVTVSS

SEQ ID NO: 26146 - protein, 118 aa, Artificial Sequence
  Chemically Synthesized
QVQLQESGGGLVQAGGSLRLSCAASGYISFDYYMGWYRQAPGKERELVAGMCYYLYADSVKGRFTISRDNAKNTVYLQMNSLKPEDTAVYYCAARYWYGWPSTWVLYWGQGTQVTVSS

SEQ ID NO: 26147 - protein, 116 aa, Artificial Sequence
  Chemically Synthesized
QVQLQESGGGLVQAGGSLRLSCAASGTIFGNYDMGWYRQAPGKERELVAAIGRGNQYADSVKGRFTISRDNAKNTVYLQMNSLKPEDTAVYYCAVLGQRRPYSSYWGQGTQVTVSS

SEQ ID NO: 26148 - protein, 117 aa, Artificial Sequence
  Chemically Synthesized
QVQLQESGGGLVQAGGSLRLSCAASGTISSLTMGWYRQAPGKEREFVATIDGGATTYYADSVKGRFTISRDNAKNTVYLQMNSLKPEDTAVYYCAADDSNIRDYAYWGQGTQVTVSS

SEQ ID NO: 26149 - protein, 117 aa, Artificial Sequence
  Chemically Synthesized
QVQLQESGGGLVQAGGSLRLSCAASGTISTDYVMGWYRQAPGKEREFVASITDGTITNYADSVKGRFTISRDNAKNTVYLQMNSLKPEDTAVYYCAAYYQYYSAFYWGQGTQVTVSS

SEQ ID NO: 26150 - protein, 125 aa, Artificial Sequence
  Chemically Synthesized
QVQLQESGGGLVQAGGSLRLSCAASGSIFGGPLMGWYRQAPGKERELLPLLITVLLPYADSVKGRFTISRDNAKNTVYLQMNSLKPEDTAVYYCAVLPDLTDDYDDYGATGYVYWGQGTQVTVSS

SEQ ID NO: 26151 - protein, 117 aa, Artificial Sequence
  Chemically Synthesized
QVQLQESGGGLVQAGGSLRLSCAASGSISTYYPMGWYRQAPGKEREFVAGIDRGGSTNYADSVKGRFTISRDNAKNTVYLQMNSLKPEDTAVYYCAASYPSYPYYYWGQGTQVTVSS

SEQ ID NO: 26152 - protein, 117 aa, Artificial Sequence
  Chemically Synthesized
QVQLQESGGGLVQAGGSLRLSCAASGSISVDRTMGWYRQAPGKEREFVASMLRCYYQYADSVKGRFTISRDNAKNTVYLQMNSLKPEDTAVYYCAAWVRGPYTHLYWGQGTQVTVSS

SEQ ID NO: 26153 - protein, 118 aa, Artificial Sequence
  Chemically Synthesized
QVQLQESGGGLVQAGGSLRLSCAASGYISVFLDMGWYRQAPGKERELVAGITDGASTYYADSVKGRFTISRDNAKNTVYLQMNSLKPEDTAVYYCAVPYHARFGLRYWGQGTQVTVSS

SEQ ID NO: 26154 - protein, 130 aa, Artificial Sequence
  Chemically Synthesized
QVQLQESGGGLVQAGGSLRLSCAASGTISDYSSMGWYRQAPGKERELVATIDLGANTKYADSVKGRFTISRDNAKNTVYLQMNSLKPEDTAVYYCAVYYSLTWTTLLLLVRVTVTTVFYWGQGTQVTVSS

SEQ ID NO: 26155 - protein, 122 aa, Artificial Sequence
  Chemically Synthesized
QVQLQESGGGLVQAGGSLRLSCAASGTIFFSNVMGWYRQAPGKERELVASIAWGSTTYYADSVKGRFTISRDNAKNTVYLQMNSLKPEDTAVYYCAVLFYEYGETRYYLIYWGQGTQVTVSS

SEQ ID NO: 26156 - protein, 118 aa, Artificial Sequence
  Chemically Synthesized
QVQLQESGGGLVQAGGSLRLSCAASGYISDYTVMGWYRQAPGKERELVAGIGDGTNTYYADSVKGRFTISRDNAKNTVYLQMNSLKPEDTAVYYCAALYDTIYAFAYWGQGTQVTVSS

SEQ ID NO: 26157 - protein, 118 aa, Artificial Sequence
  Chemically Synthesized
QVQLQESGGGLVQAGGSLRLSCAASGSIFDRDPMGWYRQAPGKERELVAGISDGANTYYADSVKGRFTISRDNAKNTVYLQMNSLKPEDTAVYYCAAAYRTTDGYIYWGQGTQVTVSS

SEQ ID NO: 26158 - protein, 118 aa, Artificial Sequence
  Chemically Synthesized
QVQLQESGGGLVQAGGSLRLSCAASGSIFRYDDMGWYRQAPGKEREFVASIASGTITYYADSVKGRFTISRDNAKNTVYLQMNSLKPEDTAVYYCAVGPEEPRTFDYWGQGTQVTVSS

SEQ ID NO: 26159 - protein, 119 aa, Artificial Sequence
  Chemically Synthesized
QVQLQESGGGLVQAGGSLRLSCAASGYIFPGYVMGWYRQAPGKEREFVAAIDYGSNTNYADSVKGRFTISRDNAKNTVYLQMNSLKPEDTAVYYCAATEGYTYYDHYYWGQGTQVTVSS

SEQ ID NO: 26160 - protein, 118 aa, Artificial Sequence
  Chemically Synthesized
QVQLQESGGGLVQAGGSLRLSCAASGSISTTFSMGWYRQAPGKEREFVASISLGTSTYYADSVKGRFTISRDNAKNTVYLQMNSLKPEDTAVYYCAVVREQTQQFNYWGQGTQVTVSS

SEQ ID NO: 26161 - protein, 122 aa, Artificial Sequence
  Chemically Synthesized
QVQLQESGGGLVQAGGSLRLSCAASGYISSYVVMGWYRQAPGKERELVASIGAGSTTYYADSVKGRFTISRDNAKNTVYLQMNSLKPEDTAVYYCAVLWDYLGTNDYTHFYWGQGTQVTVSS

SEQ ID NO: 26162 - protein, 122 aa, Artificial Sequence
  Chemically Synthesized
QVQLQESGGGLVQAGGSLRLSCAASGYISFDYAMGWYRQAPGKERELVAAISRGGSTNYADSVKGRFTISRDNAKNTVYLQMNSLKPEDTAVYYCAVGNDRTDPPRWQHYYWGQGTQVTVSS

SEQ ID NO: 26163 - protein, 126 aa, Artificial Sequence
  Chemically Synthesized
QVQLQESGGGLVQAGGSLRLSCAASGYIFYYDYMGWYRQAPGKERELVATIDYGTNTYYADSVKGRFTISRDNAKNTVYLQMNSLKPEDTAVYYCAVYDPYYEYYRYTWSDDYRYWGQGTQVTVSS

SEQ ID NO: 26164 - protein, 118 aa, Artificial Sequence
  Chemically Synthesized
QVQLQESGGGLVQAGGSLRLSCAASGTIFPIYSMGWYRQAPGKEREFVAAITDGGNTYYADSVKGRFTISRDNAKNTVYLQMNSLKPEDTAVYYCAVAYGQNSWHYYWGQGTQVTVSS

SEQ ID NO: 26165 - protein, 121 aa, Artificial Sequence
  Chemically Synthesized
QVQLQESGGGLVQAGGSLRLSCAASGNISGAYGMGWYRQAPGKERELVAAIATGANTNYADSVKGRFTISRDNAKNTVYLQMNSLKPEDTAVYYCAAGVTYAYYVHISFYWGQGTQVTVSS

SEQ ID NO: 26166 - protein, 118 aa, Artificial Sequence
  Chemically Synthesized
QVQLQESGGGLVQAGGSLRLSCAASGTIFGRYIMGWYRQAPGKERELVAAIGEGAITYYADSVKGRFTISRDNAKNTVYLQMNSLKPEDTAVYYCAVYLYDPVGYYYWGQGTQVTVSS

SEQ ID NO: 26167 - protein, 121 aa, Artificial Sequence
  Chemically Synthesized
QVQLQESGGGLVQAGGSLRLSCAASGSILLNLMGWYRQAPGKEREFVAGITDGAITYYADSVKGRFTISRDNAKNTVYLQMNSLKPEDTAVYYCAAYGYYTPLYASDLDYWGQGTQVTVSS

SEQ ID NO: 26168 - protein, 118 aa, Artificial Sequence
  Chemically Synthesized
QVQLQESGGGLVQAGGSLRLSCAASGTISGDYLMGWYRQAPGKERELVAGINDGGTTYYADSVKGRFTISRDNAKNTVYLQMNSLKPEDTAVYYCAAGPGEYRAYDYWGQGTQVTVSS

SEQ ID NO: 26169 - protein, 125 aa, Artificial Sequence
  Chemically Synthesized
QVQLQESGGGLVQAGGSLRLSCAASGTIFLGYSMGWYRQAPGKEREFVAGIGAGSTTNYADSVKGRFTISRDNAKNTVYLQMNSLKPEDTAVYYCAAAANGAIAEADDQFVDHYWGQGTQVTVSS

SEQ ID NO: 26170 - protein, 126 aa, Artificial Sequence
  Chemically Synthesized
QVQLQESGGGLVQAGGSLRLSCAASGYISQEGHMGWYRQAPGKEREFVAGINWGASTNYADSVKGRFTISRDNAKNTVYLQMNSLKPEDTAVYYCAVYWADWPGPRGDDWGYHRYWGQGTQVTVSS

SEQ ID NO: 26171 - protein, 117 aa, Artificial Sequence
  Chemically Synthesized
QVQLQESGGGLVQAGGSLRLSCAASGTIFWISMGWYRQAPGKEREFVASISIGTTTNYADSVKGRFTISRDNAKNTVYLQMNSLKPEDTAVYYCAAPWQDPGRYLYWGQGTQVTVSS

SEQ ID NO: 26172 - protein, 117 aa, Artificial Sequence
  Chemically Synthesized
QVQLQESGGGLVQAGGSLRLSCAASGTISISRLMGWYRQAPGKERELVAGIGDGGTTNYADSVKGRFTISRDNAKNTVYLQMNSLKPEDTAVYYCAADADADLTLYWGQGTQVTVSS

SEQ ID NO: 26173 - protein, 121 aa, Artificial Sequence
  Chemically Synthesized
QVQLQESGGGLVQAGGSLRLSCAASGSISSPFMGWYRQAPGKERELVATIDRGSTTNYADSVKGRFTISRDNAKNTVYLQMNSLKPEDTAVYYCAAFRLYTYTNDADLIYWGQGTQVTVSS

SEQ ID NO: 26174 - protein, 117 aa, Artificial Sequence
  Chemically Synthesized
QVQLQESGGGLVQAGGSLRLSCAASGNISYFNFMGWYRQAPGKEREFVATIADGGSTYYADSVKGRFTISRDNAKNTVYLQMNSLKPEDTAVYYCAVRTYRGPFWYWGQGTQVTVSS

SEQ ID NO: 26175 - protein, 113 aa, Artificial Sequence
  Chemically Synthesized
QVQLQESGGGLVQAGGSLRLSCAASGSISSYVQMGWYRQAPGKEREFVAGIGQYADSVKGRFTISRDNAKNTVYLQMNSLKPEDTAVYYCAARNATYYVHYYWGQGTQVTVSS

SEQ ID NO: 26176 - protein, 122 aa, Artificial Sequence
  Chemically Synthesized
QVQLQESGGGLVQAGGSLRLSCAASGSISVPTWMGWYRQAPGKEREFVASISTGSNTNYADSVKGRFTISRDNAKNTVYLQMNSLKPEDTAVYYCAVILGDFSYAWSFHYYWGQGTQVTVSS

SEQ ID NO: 26177 - protein, 122 aa, Artificial Sequence
  Chemically Synthesized
QVQLQESGGGLVQAGGSLRLSCAASGTIFRRKYMGWYRQAPGKERELVAAIAYGATTYYADSVKGRFTISRDNAKNTVYLQMNSLKPEDTAVYYCAVYYYDGGFGYFGHQYWGQGTQVTVSS

SEQ ID NO: 26178 - protein, 124 aa, Artificial Sequence
  Chemically Synthesized
QVQLQESGGGLVQAGGSLRLSCAASGYIFRFSMGWYRQAPGKEREFVAAIDPGTITNYADSVKGRFTISRDNAKNTVYLQMNSLKPEDTAVYYCAVDELYPHVATAYRQYLDYWGQGTQVTVSS

SEQ ID NO: 26179 - protein, 118 aa, Artificial Sequence
  Chemically Synthesized
QVQLQESGGGLVQAGGSLRLSCAASGTIFEYGGMGWYRQAPGKEREFVAGIGVGSNTNYADSVKGRFTISRDNAKNTVYLQMNSLKPEDTAVYYCAVYWAYDRDFRYWGQGTQVTVSS

SEQ ID NO: 26180 - protein, 125 aa, Artificial Sequence
  Chemically Synthesized
QVQLQESGGGLVQAGGSLRLSCAASGTISQSENMGWYRQAPGKEREFVAGIDYGANTYYADSVKGRFTISRDNAKNTVYLQMNSLKPEDTAVYYCAVRSLTTLKLTRTLLTTIYWGQGTQVTVSS

SEQ ID NO: 26181 - protein, 120 aa, Artificial Sequence
  Chemically Synthesized
QVQLQESGGGLVQAGGSLRLSCAASGNIFGSGMGWYRQAPGKERELVASIDQGTSTYYADSVKGRFTISRDNAKNTVYLQMNSLKPEDTAVYYCAAVATYLSDNDSLMYWGQGTQVTVSS

SEQ ID NO: 26182 - protein, 117 aa, Artificial Sequence
  Chemically Synthesized
QVQLQESGGGLVQAGGSLRLSCAASGSIFYVAPMGWYRQAPGKEREFVATIDLGTTYYADSVKGRFTISRDNAKNTVYLQMNSLKPEDTAVYYCAVYQYITDYLAYWGQGTQVTVSS

SEQ ID NO: 26183 - protein, 117 aa, Artificial Sequence
  Chemically Synthesized
QVQLQESGGGLVQAGGSLRLSCAASGNIFYGVTMGWYRQAPGKEREFVASIAIGGNTNYADSVKGRFTISRDNAKNTVYLQMNSLKPEDTAVYYCAAGDVVYDHNYWGQGTQVTVSS

SEQ ID NO: 26184 - protein, 127 aa, Artificial Sequence
  Chemically Synthesized
QVQLQESGGGLVQAGGSLRLSCAASGNIGFVLLMGWYRQAPGKERELVAAIAIGTSTNYADSVKGRFTISRDNAKNTVYLQMNSLKPEDTAVYYCAVGWGRYSGYTEPEYRVPLYYWGQGTQVTVSS

SEQ ID NO: 26185 - protein, 122 aa, Artificial Sequence
  Chemically Synthesized
QVQLQESGGGLVQAGGSLRLSCAASGYISYYPIMGWYRQAPGKEREFVAAISYGAITNYADSVKGRFTISRDNAKNTVYLQMNSLKPEDTAVYYCAVYFIGEGIRYNYHYYWGQGTQVTVSS

SEQ ID NO: 26186 - protein, 118 aa, Artificial Sequence
  Chemically Synthesized
QVQLQESGGGLVQAGGSLRLSCAASGNISYVYFMGWYRQAPGKEREFVATITDGGSTNYADSVKGRFTISRDNAKNTVYLQMNSLKPEDTAVYYCAAYGARYSRHVYWGQGTQVTVSS

SEQ ID NO: 26187 - protein, 126 aa, Artificial Sequence
  Chemically Synthesized
QVQLQESGGGLVQAGGSLRLSCAASGTIFDDDLMGWYRQAPGKERELVAGISIGTNTYYADSVKGRFTISRDNAKNTVYLQMNSLKPEDTAVYYCAVKPTGEDGDVEPSFSWHTYWGQGTQVTVSS

SEQ ID NO: 26188 - protein, 122 aa, Artificial Sequence
  Chemically Synthesized
QVQLQESGGGLVQAGGSLRLSCAASGTISPRGLMGWYRQAPGKEREFVAGIAPGSSTNYADSVKGRFTISRDNAKNTVYLQMNSLKPEDTAVYYCAAPRGRDKIRRTPFDYWGQGTQVTVSS

SEQ ID NO: 26189 - protein, 117 aa, Artificial Sequence
  Chemically Synthesized
QVQLQESGGGLVQAGGSLRLSCAASGTISDKAPMGWYRQAPGKERELVAGIGNGTITYYADSVKGRFTISRDNAKNTVYLQMNSLKPEDTAVYYCAVDSMTLRLLYWGQGTQVTVSS

SEQ ID NO: 26190 - protein, 120 aa, Artificial Sequence
  Chemically Synthesized
QVQLQESGGGLVQAGGSLRLSCAASGTISSRWHMGWYRQAPGKERELVAGIDHGSQYADSVKGRFTISRDNAKNTVYLQMNSLKPEDTAVYYCAVLSDTWDSQTGKHRYWGQGTQVTVSS

SEQ ID NO: 26191 - protein, 122 aa, Artificial Sequence
  Chemically Synthesized
QVQLQESGGGLVQAGGSLRLSCAASGTIFTLTCMGWYRQAPGKERELVAAINRGAITYYADSVKGRFTISRDNAKNTVYLQMNSLKPEDTAVYYCAVDYWDSPYATYAYIYWGQGTQVTVSS

SEQ ID NO: 26192 - protein, 118 aa, Artificial Sequence
  Chemically Synthesized
QVQLQESGGGLVQAGGSLRLSCAASGYISPYQGMGWYRQAPGKERELVASIGRGSSTYYADSVKGRFTISRDNAKNTVYLQMNSLKPEDTAVYYCAVGYPDWYLLTYWGQGTQVTVSS

SEQ ID NO: 26193 - protein, 117 aa, Artificial Sequence
  Chemically Synthesized
QVQLQESGGGLVQAGGSLRLSCAASGSIFDDYMGWYRQAPGKERELVASIGLGAITYYADSVKGRFTISRDNAKNTVYLQMNSLKPEDTAVYYCASDKYDTLLHQYWGQGTQVTVSS

SEQ ID NO: 26194 - protein, 118 aa, Artificial Sequence
  Chemically Synthesized
QVQLQESGGGLVQAGGSLRLSCAASGTISRDGRMGWYRQAPGKEREFVASIAGGTNTNYADSVKGRFTISRDNAKNTVYLQMNSLKPEDTAVYYCAAYPSGEPTHAYWGQGTQVTVSS

SEQ ID NO: 26195 - protein, 118 aa, Artificial Sequence
  Chemically Synthesized
QVQLQESGGGLVQAGGSLRLSCAASGNIFEGRDMGWYRQAPGKERELVAAITIGTNTNYADSVKGRFTISRDNAKNTVYLQMNSLKPEDTAVYYCAVLYPRYVTYPYWGQGTQVTVSS

SEQ ID NO: 26196 - protein, 121 aa, Artificial Sequence
  Chemically Synthesized
QVQLQESGGGLVQAGGSLRLSCAASGNISYAATMGWYRQAPGKEREFVAGISYGGITYYADSVKGRFTISRDNAKNTVYLQMNSLKPEDTAVYYCAALQRSPGPSYSVIYWGQGTQVTVSS

SEQ ID NO: 26197 - protein, 118 aa, Artificial Sequence
  Chemically Synthesized
QVQLQESGGGLVQAGGSLRLSCAASGNISDGYAMGWYRQAPGKEREFVAAIDAGSTTQYADSVKGRFTISRDNAKNTVYLQMNSLKPEDTAVYYCAAQDYQVQTYGYWGQGTQVTVSS

SEQ ID NO: 26198 - protein, 118 aa, Artificial Sequence
  Chemically Synthesized
QVQLQESGGGLVQAGGSLRLSCAASGNISVVRYMGWYRQAPGKEREFVATISYGTSTNYADSVKGRFTISRDNAKNTVYLQMNSLKPEDTAVYYCAVAASYNSAYDYWGQGTQVTVSS

SEQ ID NO: 26199 - protein, 118 aa, Artificial Sequence
  Chemically Synthesized
QVQLQESGGGLVQAGGSLRLSCAASGYISNGILMGWYRQAPGKERELVASISGGSNTNYADSVKGRFTISRDNAKNTVYLQMNSLKPEDTAVYYCAADHDVNPVFTYWGQGTQVTVSS

SEQ ID NO: 26200 - protein, 122 aa, Artificial Sequence
  Chemically Synthesized
QVQLQESGGGLVQAGGSLRLSCAASGNISDSYVMGWYRQAPGKEREFVASIGWGASTYYADSVKGRFTISRDNAKNTVYLQMNSLKPEDTAVYYCAVYPGTWSPDAHVHAYWGQGTQVTVSS

SEQ ID NO: 26201 - protein, 118 aa, Artificial Sequence
  Chemically Synthesized
QVQLQESGGGLVQAGGSLRLSCAASGTIFLYDAMGWYRQAPGKEREFVATIGIGATTNYADSVKGRFTISRDNAKNTVYLQMNSLKPEDTAVYYCAADPYPTGIYNYWGQGTQVTVSS

SEQ ID NO: 26202 - protein, 120 aa, Artificial Sequence
  Chemically Synthesized
QVQLQESGGGLVQAGGSLRLSCAASGTFLTTLMGWYRQAPGKERELVAAIASGTITYADSVKGRFTISRDNAKNTVYLQMNSLKPEDTAVYYCAAVDLNANDVYGEFSYWGQGTQVTVSS

SEQ ID NO: 26203 - protein, 118 aa, Artificial Sequence
  Chemically Synthesized
QVQLQESGGGLVQAGGSLRLSCAASGTIFYREFMGWYRQAPGKERELVAAITSGAITYYADSVKGRFTISRDNAKNTVYLQMNSLKPEDTAVYYCAAGQTYDYAHPYWGQGTQVTVSS

SEQ ID NO: 26204 - protein, 118 aa, Artificial Sequence
  Chemically Synthesized
QVQLQESGGGLVQAGGSLRLSCAASGSISATYKTMGWYRQAPGKEREFVAGIDSVVIPYADSVKGRFTISRDNAKNTVYLQMNSLKPEDTAVYYCAAVEAILHAFEYWGQGTQVTVSS

SEQ ID NO: 26205 - protein, 126 aa, Artificial Sequence
  Chemically Synthesized
QVQLQESGGGLVQAGGSLRLSCAASGYISSIVKMGWYRQAPGKEREFVAGIALGGNTYYADSVKGRFTISRDNAKNTVYLQMNSLKPEDTAVYYCAVVYPYHYYGDSYFVVLLYYWGQGTQVTVSS

SEQ ID NO: 26206 - protein, 113 aa, Artificial Sequence
  Chemically Synthesized
QVQLQESGGGLVQAGGSLRLSCAASGNIFARSRMGWYRQAPGKERELVLVVIPYADSVKGRFTISRDNAKNTVYLQMNSLKPEDTAVYYCAAGKYEGFLYYYWGQGTQVTVSS

SEQ ID NO: 26207 - protein, 119 aa, Artificial Sequence
  Chemically Synthesized
QVQLQESGGGLVQAGGSLRLSCAASGSISSYVHMGWYRQAPGKEREFVAGIDYGGTTNYADSVKGRFTISRDNAKNTVYLQMNSLKPEDTAVYYCAVLFYDVYQGHTYWGQGTQVTVSS

SEQ ID NO: 26208 - protein, 126 aa, Artificial Sequence
  Chemically Synthesized
QVQLQESGGGLVQAGGSLRLSCAASGSISQLAVMGWYRQAPGKERELVASISAGASTYYADSVKGRFTISRDNAKNTVYLQMNSLKPEDTAVYYCAVDDYDIDDSRHRYQNYFRYWGQGTQVTVSS

SEQ ID NO: 26209 - protein, 121 aa, Artificial Sequence
  Chemically Synthesized
QVQLQESGGGLVQAGGSLRLSCAASGNIFHVLIMGWYRQAPGKERELVATISGGGSTNYADSVKGRFTISRDNAKNTVYLQMNSLKPEDTAVYYCAATNVTTTLTSLLMYWGQGTQVTVSS

SEQ ID NO: 26210 - protein, 118 aa, Artificial Sequence
  Chemically Synthesized
QVQLQESGGGLVQAGGSLRLSCAASGSISQHELMGWYRQAPGKERELVASISAGGTTYYADSVKGRFTISRDNAKNTVYLQMNSLKPEDTAVYYCAVTSVRSVPVYYWGQGTQVTVSS

SEQ ID NO: 26211 - protein, 117 aa, Artificial Sequence
  Chemically Synthesized
QVQLQESGGGLVQAGGSLRLSCAASGNIFGETDMGWYRQAPGKERELVAGITGGGSTNYADSVKGRFTISRDNAKNTVYLQMNSLKPEDTAVYYCAVSRIGGSTLYWGQGTQVTVSS

SEQ ID NO: 26212 - protein, 118 aa, Artificial Sequence
  Chemically Synthesized
QVQLQESGGGLVQAGGSLRLSCAASGNIFHAHDMGWYRQAPGKERELVATINYGTNTNYADSVKGRFTISRDNAKNTVYLQMNSLKPEDTAVYYCAVGYIAGDDHPYWGQGTQVTVSS

SEQ ID NO: 26213 - protein, 126 aa, Artificial Sequence
  Chemically Synthesized
QVQLQESGGGLVQAGGSLRLSCAASGTISSKPTMGWYRQAPGKERELVASIGGGANTYYADSVKGRFTISRDNAKNTVYLQMNSLKPEDTAVYYCAVDYRRPQHDDYGSKTLRMYWGQGTQVTVSS

SEQ ID NO: 26214 - protein, 122 aa, Artificial Sequence
  Chemically Synthesized
QVQLQESGGGLVQAGGSLRLSCAASGSISDVLTMGWYRQAPGKEREFVAGISEGSTTNYADSVKGRFTISRDNAKNTVYLQMNSLKPEDTAVYYCAADGWWSRHSSRWYWYWGQGTQVTVSS

SEQ ID NO: 26215 - protein, 122 aa, Artificial Sequence
  Chemically Synthesized
QVQLQESGGGLVQAGGSLRLSCAASGTIFRYDTMGWYRQAPGKERELVATITPGTNTNYADSVKGRFTISRDNAKNTVYLQMNSLKPEDTAVYYCAVYSNHKHFYYGWHSYWGQGTQVTVSS

SEQ ID NO: 26216 - protein, 117 aa, Artificial Sequence
  Chemically Synthesized
QVQLQESGGGLVQAGGSLRLSCAASGSIFGYDIMGWYRQAPGKERELVATIAVGGNTNYADSVKGRFTISRDNAKNTVYLQMNSLKPEDTAVYYCAADATSVRLFYWGQGTQVTVSS

SEQ ID NO: 26217 - protein, 122 aa, Artificial Sequence
  Chemically Synthesized
QVQLQESGGGLVQAGGSLRLSCAASGNISSRYGMGWYRQAPGKEREFVASIDSGGTTYYADSVKGRFTISRDNAKNTVYLQMNSLKPEDTAVYYCAAVDYKLRPWSQDHIYWGQGTQVTVSS

SEQ ID NO: 26218 - protein, 118 aa, Artificial Sequence
  Chemically Synthesized
QVQLQESGGGLVQAGGSLRLSCAASGNISANDYMGWYRQAPGKEREFVAGITAGTTTNYADSVKGRFTISRDNAKNTVYLQMNSLKPEDTAVYYCAADPLRTYLHSYWGQGTQVTVSS

SEQ ID NO: 26219 - protein, 118 aa, Artificial Sequence
  Chemically Synthesized
QVQLQESGGGLVQAGGSLRLSCAASGSISYATTMGWYRQAPGKERELVAAITQGTNTNYADSVKGRFTISRDNAKNTVYLQMNSLKPEDTAVYYCAAYVADVPYHSYWGQGTQVTVSS

SEQ ID NO: 26220 - protein, 110 aa, Artificial Sequence
  Chemically Synthesized
QVQLQESGGGLVQAGGSLRLSCAASGTIFRLLPMGWYRQAPGKERELVAAIGIGGSTYYADSVKGRFTISRDNAKNTVYLQMNSLKPEDTAVYYCAALYWGQGTQVTVSS

SEQ ID NO: 26221 - protein, 117 aa, Artificial Sequence
  Chemically Synthesized
QVQLQESGGGLVQAGGSLRLSCAASGTISPYNCMGWYRQAPGKEREFVASIAYGANTYYADSVKGRFTISRDNAKNTVYLQMNSLKPEDTAVYYCAVQYQYHGHGYWGQGTQVTVSS

SEQ ID NO: 26222 - protein, 122 aa, Artificial Sequence
  Chemically Synthesized
QVQLQESGGGLVQAGGSLRLSCAASGYISYTQYMGWYRQAPGKEREFVAGISWGGTTYYADSVKGRFTISRDNAKNTVYLQMNSLKPEDTAVYYCAADKGYYNAYFAVHLYWGQGTQVTVSS

SEQ ID NO: 26223 - protein, 116 aa, Artificial Sequence
  Chemically Synthesized
QVQLQESGGGLVQAGGSLRLSCAASGTISGLYIMGWYRQAPGKEREFVATIGIGGIPYADSVKGRFTISRDNAKNTVYLQMNSLKPEDTAVYYCAATSTSTTTIYWGQGTQVTVSS

SEQ ID NO: 26224 - protein, 122 aa, Artificial Sequence
  Chemically Synthesized
QVQLQESGGGLVQAGGSLRLSCAASGYIFDLYDMGWYRQAPGKEREFVAGIDYGGSTNYADSVKGRFTISRDNAKNTVYLQMNSLKPEDTAVYYCAAWYRTRNDYYDYHWYWGQGTQVTVSS

SEQ ID NO: 26225 - protein, 118 aa, Artificial Sequence
  Chemically Synthesized
QVQLQESGGGLVQAGGSLRLSCAASGYIFSTFFMGWYRQAPGKERELVAAIGTGATTYYADSVKGRFTISRDNAKNTVYLQMNSLKPEDTAVYYCAVYAYDLAGYYYWGQGTQVTVSS

SEQ ID NO: 26226 - protein, 117 aa, Artificial Sequence
  Chemically Synthesized
QVQLQESGGGLVQAGGSLRLSCAASGTIFGLILMGWYRQAPGKEREFVATITSVVVPYADSVKGRFTISRDNAKNTVYLQMNSLKPEDTAVYYCAAVREQNGGFYYWGQGTQVTVSS

SEQ ID NO: 26227 - protein, 118 aa, Artificial Sequence
  Chemically Synthesized
QVQLQESGGGLVQAGGSLRLSCAASGNISYPYDMGWYRQAPGKEREFVAAIDAGTITNYADSVKGRFTISRDNAKNTVYLQMNSLKPEDTAVYYCAVRTNGDVYLPYWGQGTQVTVSS

SEQ ID NO: 26228 - protein, 122 aa, Artificial Sequence
  Chemically Synthesized
QVQLQESGGGLVQAGGSLRLSCAASGSISTNRDMGWYRQAPGKERELVATIDDGANTYYADSVKGRFTISRDNAKNTVYLQMNSLKPEDTAVYYCAVRYVGPRTHDIYHEYWGQGTQVTVSS

SEQ ID NO: 26229 - protein, 118 aa, Artificial Sequence
  Chemically Synthesized
QVQLQESGGGLVQAGGSLRLSCAASGTISLSGYMGWYRQAPGKERELVASIDTGTITYYADSVKGRFTISRDNAKNTVYLQMNSLKPEDTAVYYCAVAYNDSAAYYYWGQGTQVTVSS

SEQ ID NO: 26230 - protein, 126 aa, Artificial Sequence
  Chemically Synthesized
QVQLQESGGGLVQAGGSLRLSCAASGTIFGYRTMGWYRQAPGKERELCCRYYSWYYYQYADSVKGRFTISRDNAKNTVYLQMNSLKPEDTAVYYCAVIEPGWQSTGRSTTDALWYWGQGTQVTVSS

SEQ ID NO: 26231 - protein, 126 aa, Artificial Sequence
  Chemically Synthesized
QVQLQESGGGLVQAGGSLRLSCAASGTISYSLHMGWYRQAPGKERELVAGIGDGASTNYADSVKGRFTISRDNAKNTVYLQMNSLKPEDTAVYYCAVPETHTGHYPSTITIPHDYWGQGTQVTVSS

SEQ ID NO: 26232 - protein, 118 aa, Artificial Sequence
  Chemically Synthesized
QVQLQESGGGLVQAGGSLRLSCAASGTIFSQYGMGWYRQAPGKERELVAAISAGSNTNYADSVKGRFTISRDNAKNTVYLQMNSLKPEDTAVYYCAAYQATGTSFYYWGQGTQVTVSS

SEQ ID NO: 26233 - protein, 126 aa, Artificial Sequence
  Chemically Synthesized
QVQLQESGGGLVQAGGSLRLSCAASGSISEGSSMGWYRQAPGKEREFVATITHGSTTNYADSVKGRFTISRDNAKNTVYLQMNSLKPEDTAVYYCAANPIKYGASIVGSTWYHDYWGQGTQVTVSS

SEQ ID NO: 26234 - protein, 125 aa, Artificial Sequence
  Chemically Synthesized
QVQLQESGGGLVQAGGSLRLSCAASGIFLLTSMGWYRQAPGKEREFVATITDGTSTNYADSVKGRFTISRDNAKNTVYLQMNSLKPEDTAVYYCAVWVDTVPGDRTFSGSDFDYWGQGTQVTVSS

SEQ ID NO: 26235 - protein, 122 aa, Artificial Sequence
  Chemically Synthesized
QVQLQESGGGLVQAGGSLRLSCAASGNIFYPTSMGWYRQAPGKERELVAGISDGTNTYYADSVKGRFTISRDNAKNTVYLQMNSLKPEDTAVYYCAAYRLWKGPLYDPLGYWGQGTQVTVSS

SEQ ID NO: 26236 - protein, 118 aa, Artificial Sequence
  Chemically Synthesized
QVQLQESGGGLVQAGGSLRLSCAASGYIFYIYYMGWYRQAPGKEREFVASIGDGTTTNYADSVKGRFTISRDNAKNTVYLQMNSLKPEDTAVYYCAVIGAFGFGFNYWGQGTQVTVSS

SEQ ID NO: 26237 - protein, 120 aa, Artificial Sequence
  Chemically Synthesized
QVQLQESGGGLVQAGGSLRLSCAASGTISGVDDMGWYRQAPGKERELVAGITSGGSTYYADSVKGRFTISRDNAKNTVYLQMNSLKPEDTAVYYCAAVPGYRFYSELGYWGQGTQVTVSS

SEQ ID NO: 26238 - protein, 118 aa, Artificial Sequence
  Chemically Synthesized
QVQLQESGGGLVQAGGSLRLSCAASGNIFPGYNMGWYRQAPGKERELVAGIDYGTITNYADSVKGRFTISRDNAKNTVYLQMNSLKPEDTAVYYCAALDTYFRYHGYWGQGTQVTVSS

SEQ ID NO: 26239 - protein, 116 aa, Artificial Sequence
  Chemically Synthesized
QVQLQESGGGLVQAGGSLRLSCAASGSISSRDWMGWYRQAPGKEREFVAGITKGATTYYADSVKGRFTISRDNAKNTVYLQMNSLKPEDTAVYYCAVVDPQYHIYWGQGTQVTVSS

SEQ ID NO: 26240 - protein, 122 aa, Artificial Sequence
  Chemically Synthesized
QVQLQESGGGLVQAGGSLRLSCAASGNISYDFYMGWYRQAPGKEREFVAGIGIGSSTYYADSVKGRFTISRDNAKNTVYLQMNSLKPEDTAVYYCAAQAYDIDDYGRPHSYWGQGTQVTVSS

SEQ ID NO: 26241 - protein, 112 aa, Artificial Sequence
  Chemically Synthesized
QVQLQESGGGLVQAGGSLRLSCAASGNIMGWYRQAPGKEREFVATISNGASTNYADSVKGRFTISRDNAKNTVYLQMNSLKPEDTAVYYCALTVTVRLVFYWGQGTQVTVSS

SEQ ID NO: 26242 - protein, 122 aa, Artificial Sequence
  Chemically Synthesized
QVQLQESGGGLVQAGGSLRLSCAASGNISPQVYMGWYRQAPGKERELVAAINVGGTTYYADSVKGRFTISRDNAKNTVYLQMNSLKPEDTAVYYCAAVTLPYQYILGDLDYWGQGTQVTVSS

SEQ ID NO: 26243 - protein, 118 aa, Artificial Sequence
  Chemically Synthesized
QVQLQESGGGLVQAGGSLRLSCAASGNISSSTAMGWYRQAPGKEREFVATITRGAITYYADSVKGRFTISRDNAKNTVYLQMNSLKPEDTAVYYCAAYRQLAPDHGYWGQGTQVTVSS

SEQ ID NO: 26244 - protein, 121 aa, Artificial Sequence
  Chemically Synthesized
QVQLQESGGGLVQAGGSLRLSCAASGSISLGDNMGWYRQAPGKERELVATIARGTNTNYADSVKGRFTISRDNAKNTVYLQMNSLKPEDTAVYYCAVTRYPYYESLTLMYWGQGTQVTVSS

SEQ ID NO: 26245 - protein, 110 aa, Artificial Sequence
  Chemically Synthesized
QVQLQESGGGLVQAGGSLRLSCAASGNISGYHYMGWYRQAPGKEREFVAAYADSVKGRFTISRDNAKNTVYLQMNSLKPEDTAVYYCAASSRVEYGFGYWGQGTQVTVSS

SEQ ID NO: 26246 - protein, 117 aa, Artificial Sequence
  Chemically Synthesized
QVQLQESGGGLVQAGGSLRLSCAASGIFLFITMGWYRQAPGKERELVAAIDNGTITNYADSVKGRFTISRDNAKNTVYLQMNSLKPEDTAVYYCAVARRGGYALDYWGQGTQVTVSS

SEQ ID NO: 26247 - protein, 118 aa, Artificial Sequence
  Chemically Synthesized
QVQLQESGGGLVQAGGSLRLSCAASGNIFYPQYMGWYRQAPGKEREFVASIGYGANTNYADSVKGRFTISRDNAKNTVYLQMNSLKPEDTAVYYCAVELTYFDALRYWGQGTQVTVSS

SEQ ID NO: 26248 - protein, 118 aa, Artificial Sequence
  Chemically Synthesized
QVQLQESGGGLVQAGGSLRLSCAASGSIFVGAPMGWYRQAPGKEREFVASIDAGAITNYADSVKGRFTISRDNAKNTVYLQMNSLKPEDTAVYYCAVGQDRTNEHGYWGQGTQVTVSS

SEQ ID NO: 26249 - protein, 126 aa, Artificial Sequence
  Chemically Synthesized
QVQLQESGGGLVQAGGSLRLSCAASGTISLDVKMGWYRQAPGKERELVATIGYGSTTNYADSVKGRFTISRDNAKNTVYLQMNSLKPEDTAVYYCAAPDRHDAPPNYSVDNYHYYWGQGTQVTVSS

SEQ ID NO: 26250 - protein, 117 aa, Artificial Sequence
  Chemically Synthesized
QVQLQESGGGLVQAGGSLRLSCAASGTISDRDTMGWYRQAPGKEREFVAGIGSGLIPYADSVKGRFTISRDNAKNTVYLQMNSLKPEDTAVYYCAVYGVQYQPFAYWGQGTQVTVSS

SEQ ID NO: 26251 - protein, 118 aa, Artificial Sequence
  Chemically Synthesized
QVQLQESGGGLVQAGGSLRLSCAASGTIFELYVMGWYRQAPGKEREFVAGIDRGSTTNYADSVKGRFTISRDNAKNTVYLQMNSLKPEDTAVYYCAVRLAGTNGLAYWGQGTQVTVSS

SEQ ID NO: 26252 - protein, 108 aa, Artificial Sequence
  Chemically Synthesized
QVQLQESGGGLVQAGGSLRLSCAASGSISGTIPMGWYRQAPGKEREFAYADSVKGRFTISRDNAKNTVYLQMNSLKPEDTAVYYCAVTGQRYSPLGYWGQGTQVTVSS

SEQ ID NO: 26253 - protein, 119 aa, Artificial Sequence
  Chemically Synthesized
QVQLQESGGGLVQAGGSLRLSCAASGSISWGYVMGWYRQAPGKERELVLVPYADSVKGRFTISRDNAKNTVYLQMNSLKPEDTAVYYCAVLYPRYSAKDRGLYPYHFYWGQGTQVTVSS

SEQ ID NO: 26254 - protein, 122 aa, Artificial Sequence
  Chemically Synthesized
QVQLQESGGGLVQAGGSLRLSCAASGNISALYGMGWYRQAPGKEREFVASIGYGSTTYYADSVKGRFTISRDNAKNTVYLQMNSLKPEDTAVYYCAVIHGDDLRGGYRHDYWGQGTQVTVSS

SEQ ID NO: 26255 - protein, 111 aa, Artificial Sequence
  Chemically Synthesized
QVQLQESGGGLVQAGGSLRLSCAASGYISPVGDMGWYRQAPGKEREITVLLPYADSVKGRFTISRDNAKNTVYLQMNSLKPEDTAVYYCAGFFTHYWHIYWGQGTQVTVSS

SEQ ID NO: 26256 - protein, 118 aa, Artificial Sequence
  Chemically Synthesized
QVQLQESGGGLVQAGGSLRLSCAASGNIFDSISMGWYRQAPGKEREFVASIDRGSSTYYADSVKGRFTISRDNAKNTVYLQMNSLKPEDTAVYYCAVRYSYAQHFGYWGQGTQVTVSS

SEQ ID NO: 26257 - protein, 117 aa, Artificial Sequence
  Chemically Synthesized
QVQLQESGGGLVQAGGSLRLSCAASGNIFDYNEMGWYRQAPGKERELVASIDYGSNTNYADSVKGRFTISRDNAKNTVYLQMNSLKPEDTAVYYCAALDISAYQHYWGQGTQVTVSS

SEQ ID NO: 26258 - protein, 122 aa, Artificial Sequence
  Chemically Synthesized
QVQLQESGGGLVQAGGSLRLSCAASGSISGPYDMGWYRQAPGKEREFVAAITGGSNTNYADSVKGRFTISRDNAKNTVYLQMNSLKPEDTAVYYCAVIRYYYDDLIGDYLYWGQGTQVTVSS

SEQ ID NO: 26259 - protein, 118 aa, Artificial Sequence
  Chemically Synthesized
QVQLQESGGGLVQAGGSLRLSCAASGTIFTYSNMGWYRQAPGKEREFVATITGGTITYYADSVKGRFTISRDNAKNTVYLQMNSLKPEDTAVYYCAAPTRTTDGYPYWGQGTQVTVSS

SEQ ID NO: 26260 - protein, 121 aa, Artificial Sequence
  Chemically Synthesized
QVQLQESGGGLVQAGGSLRLSCAASGTISDHQMGWYRQAPGKEREFVATIGVGASTNYADSVKGRFTISRDNAKNTVYLQMNSLKPEDTAVYYCAAVDGYIGGYADYLAYWGQGTQVTVSS

SEQ ID NO: 26261 - protein, 115 aa, Artificial Sequence
  Chemically Synthesized
QVQLQESGGGLVQAGGSLRLSCAASGTISPLGYMGWYRQAPGKERELVATIASGGTTYYADSVKGRFTISRDNAKNTVYLQMNSLKPEDTAVYYCAYIHGDFAYWGQGTQVTVSS

SEQ ID NO: 26262 - protein, 122 aa, Artificial Sequence
  Chemically Synthesized
QVQLQESGGGLVQAGGSLRLSCAASGYISQSPDMGWYRQAPGKERELVAAIGIGANTYYADSVKGRFTISRDNAKNTVYLQMNSLKPEDTAVYYCAAPYDIAWPTRDGHRYWGQGTQVTVSS

SEQ ID NO: 26263 - protein, 115 aa, Artificial Sequence
  Chemically Synthesized
QVQLQESGGGLVQAGGSLRLSCAASGTIFAQRMGWYRQAPGKEREFVAGIGNGGNTYYADSVKGRFTISRDNAKNTVYLQMNSLKPEDTAVYYCAVSRNRTTMYWGQGTQVTVSS

SEQ ID NO: 26264 - protein, 123 aa, Artificial Sequence
  Chemically Synthesized
QVQLQESGGGLVQAGGSLRLSCAASGTIFDYYYMGWYRQAPGKERELVAAIAIGGTTNYADSVKGRFTISRDNAKNTVYLQMNSLKPEDTAVYYCAARDWYDYANESQAYQYWGQGTQVTVSS

SEQ ID NO: 26265 - protein, 122 aa, Artificial Sequence
  Chemically Synthesized
QVQLQESGGGLVQAGGSLRLSCAASGNISLDEGMGWYRQAPGKEREFVAGINVGGSTNYADSVKGRFTISRDNAKNTVYLQMNSLKPEDTAVYYCAVIGQLYYYFVSDYRYWGQGTQVTVSS

SEQ ID NO: 26266 - protein, 122 aa, Artificial Sequence
  Chemically Synthesized
QVQLQESGGGLVQAGGSLRLSCAASGTISYGVSMGWYRQAPGKEREFVAAIATGTTTNYADSVKGRFTISRDNAKNTVYLQMNSLKPEDTAVYYCAVVAQAYSYVYSSHTYWGQGTQVTVSS

SEQ ID NO: 26267 - protein, 117 aa, Artificial Sequence
  Chemically Synthesized
QVQLQESGGGLVQAGGSLRLSCAASGTISYSSVMGWYRQAPGKEREFVAVVLPYADSVKGRFTISRDNAKNTVYLQMNSLKPEDTAVYYCAAISVRYHTYDTRLHYWGQGTQVTVSS

SEQ ID NO: 26268 - protein, 118 aa, Artificial Sequence
  Chemically Synthesized
QVQLQESGGGLVQAGGSLRLSCAASGSIFAATYMGWYRQAPGKEREFVAGIGSGSTTNYADSVKGRFTISRDNAKNTVYLQMNSLKPEDTAVYYCAALTLWLPGLYYWGQGTQVTVSS

SEQ ID NO: 26269 - protein, 118 aa, Artificial Sequence
  Chemically Synthesized
QVQLQESGGGLVQAGGSLRLSCAASGSIFGDVDMGWYRQAPGKERELVAGIATGSITNYADSVKGRFTISRDNAKNTVYLQMNSLKPEDTAVYYCAVYTVPDVIHRYWGQGTQVTVSS

SEQ ID NO: 26270 - protein, 118 aa, Artificial Sequence
  Chemically Synthesized
QVQLQESGGGLVQAGGSLRLSCAASGNISGDDTMGWYRQAPGKEREFVATITQGANTNYADSVKGRFTISRDNAKNTVYLQMNSLKPEDTAVYYCAADFHTWAFFGYWGQGTQVTVSS

SEQ ID NO: 26271 - protein, 113 aa, Artificial Sequence
  Chemically Synthesized
QVQLQESGGGLVQAGGSLRLSCAASGTYMGWYRQAPGKERELVAGIDWGTSTNYADSVKGRFTISRDNAKNTVYLQMNSLKPEDTAVYYCAAGAQRYRTYNYWGQGTQVTVSS

SEQ ID NO: 26272 - protein, 122 aa, Artificial Sequence
  Chemically Synthesized
QVQLQESGGGLVQAGGSLRLSCAASGYISHYYDMGWYRQAPGKEREFVAGITPGSSTNYADSVKGRFTISRDNAKNTVYLQMNSLKPEDTAVYYCAVVGADPPRDLIAHRYWGQGTQVTVSS

SEQ ID NO: 26273 - protein, 117 aa, Artificial Sequence
  Chemically Synthesized
QVQLQESGGGLVQAGGSLRLSCAASGNISHVTMGWYRQAPGKEREFVAAIDTGGITNYADSVKGRFTISRDNAKNTVYLQMNSLKPEDTAVYYCAVFPIQYAHYEYWGQGTQVTVSS

SEQ ID NO: 26274 - protein, 125 aa, Artificial Sequence
  Chemically Synthesized
QVQLQESGGGLVQAGGSLRLSCAASGNISESLMGWYRQAPGKEREFVATITSGTNTNYADSVKGRFTISRDNAKNTVYLQMNSLKPEDTAVYYCAAYDYTGADTASDYRDAFIYWGQGTQVTVSS

SEQ ID NO: 26275 - protein, 122 aa, Artificial Sequence
  Chemically Synthesized
QVQLQESGGGLVQAGGSLRLSCAASGNIFHPYTMGWYRQAPGKEREFVAAISYGSSTNYADSVKGRFTISRDNAKNTVYLQMNSLKPEDTAVYYCAVDDYLYQQSNWDYRYWGQGTQVTVSS

SEQ ID NO: 26276 - protein, 121 aa, Artificial Sequence
  Chemically Synthesized
QVQLQESGGGLVQAGGSLRLSCAASGNISRDTYMGWYRQAPGKERELVAAINRGGITYYADSVKGRFTISRDNAKNTVYLQMNSLKPEDTAVYYCAADLRRPPVTYSVMYWGQGTQVTVSS

SEQ ID NO: 26277 - protein, 122 aa, Artificial Sequence
  Chemically Synthesized
QVQLQESGGGLVQAGGSLRLSCAASGTISVGTSMGWYRQAPGKERELVASISNGTSTNYADSVKGRFTISRDNAKNTVYLQMNSLKPEDTAVYYCAAYAYYGTDPVQAHSYWGQGTQVTVSS

SEQ ID NO: 26278 - protein, 117 aa, Artificial Sequence
  Chemically Synthesized
QVQLQESGGGLVQAGGSLRLSCAASGSISQDLYMGWYRQAPGKERELVASISPGATTNYADSVKGRFTISRDNAKNTVYLQMNSLKPEDTAVYYCAAGDAGRAHDYWGQGTQVTVSS

SEQ ID NO: 26279 - protein, 122 aa, Artificial Sequence
  Chemically Synthesized
QVQLQESGGGLVQAGGSLRLSCAASGNIFRYVTMGWYRQAPGKERELVATIAYGASTYYADSVKGRFTISRDNAKNTVYLQMNSLKPEDTAVYYCAAASDFDDGELYSHWYWGQGTQVTVSS

SEQ ID NO: 26280 - protein, 118 aa, Artificial Sequence
  Chemically Synthesized
QVQLQESGGGLVQAGGSLRLSCAASGNIFVERWMGWYRQAPGKEREFVASIAYGSTTNYADSVKGRFTISRDNAKNTVYLQMNSLKPEDTAVYYCAADSLDTSIHYYWGQGTQVTVSS

SEQ ID NO: 26281 - protein, 120 aa, Artificial Sequence
  Chemically Synthesized
QVQLQESGGGLVQAGGSLRLSCAASGTISPADTMGWYRQAPGKEREFVALLVTVLVPYADSVKGRFTISRDNAKNTVYLQMNSLKPEDTAVYYCAAQWEGIDYYHGLIYWGQGTQVTVSS

SEQ ID NO: 26282 - protein, 110 aa, Artificial Sequence
  Chemically Synthesized
QVQLQESGGGLVQAGGSLRLSCAASGNISGLALMGWYRQAPGKEREFVAAIDYGASTYYADSVKGRFTISRDNAKNTVYLQMNSLKPEDTAVYYCAADYWGQGTQVTVSS

SEQ ID NO: 26283 - protein, 122 aa, Artificial Sequence
  Chemically Synthesized
QVQLQESGGGLVQAGGSLRLSCAASGYISYADTMGWYRQAPGKERELVATIGGGTNTNYADSVKGRFTISRDNAKNTVYLQMNSLKPEDTAVYYCAATSQGREYDGYFFNYWGQGTQVTVSS

SEQ ID NO: 26284 - protein, 118 aa, Artificial Sequence
  Chemically Synthesized
QVQLQESGGGLVQAGGSLRLSCAASGTIFRYHLMGWYRQAPGKERELVAGIAGGASTYYADSVKGRFTISRDNAKNTVYLQMNSLKPEDTAVYYCAAVTYHHLSSFYWGQGTQVTVSS

SEQ ID NO: 26285 - protein, 122 aa, Artificial Sequence
  Chemically Synthesized
QVQLQESGGGLVQAGGSLRLSCAASGNISQGNGMGWYRQAPGKEREFVATIADGTSTYYADSVKGRFTISRDNAKNTVYLQMNSLKPEDTAVYYCAAVITPGILYITGLDYWGQGTQVTVSS

SEQ ID NO: 26286 - protein, 125 aa, Artificial Sequence
  Chemically Synthesized
QVQLQESGGGLVQAGGSLRLSCAASGSISQGSDMGWYRQAPGKERELVAGIGYGGNTNYADSVKGRFTISRDNAKNTVYLQMNSLKPEDTAVYYCAVRYYGDYPYTTVSRRPSYWGQGTQVTVSS

SEQ ID NO: 26287 - protein, 122 aa, Artificial Sequence
  Chemically Synthesized
QVQLQESGGGLVQAGGSLRLSCAASGTISDGIIMGWYRQAPGKEREFVASIDLGATTNYADSVKGRFTISRDNAKNTVYLQMNSLKPEDTAVYYCAVLRYDDYDDDNLFTYWGQGTQVTVSS

SEQ ID NO: 26288 - protein, 117 aa, Artificial Sequence
  Chemically Synthesized
QVQLQESGGGLVQAGGSLRLSCAASGYIFPWRMGWYRQAPGKERELVAAITDGSTTYYADSVKGRFTISRDNAKNTVYLQMNSLKPEDTAVYYCAVALKYFDPHFYWGQGTQVTVSS

SEQ ID NO: 26289 - protein, 118 aa, Artificial Sequence
  Chemically Synthesized
QVQLQESGGGLVQAGGSLRLSCAASGNIFRIDYMGWYRQAPGKERELVATISVGTITYYADSVKGRFTISRDNAKNTVYLQMNSLKPEDTAVYYCAARADKFLYLPYWGQGTQVTVSS

SEQ ID NO: 26290 - protein, 128 aa, Artificial Sequence
  Chemically Synthesized
QVQLQESGGGLVQAGGSLRLSCAASGTIFSLTMGWYRQAPGKERELVATIGSGGNTNYADSVKGRFTISRDNAKNTVYLQMNSLKPEDTAVYYCAADYDIIARSDPVPAHWDDRYDYWGQGTQVTVSS

SEQ ID NO: 26291 - protein, 118 aa, Artificial Sequence
  Chemically Synthesized
QVQLQESGGGLVQAGGSLRLSCAASGNISTYTRMGWYRQAPGKEREFVAAINRGGITYYADSVKGRFTISRDNAKNTVYLQMNSLKPEDTAVYYCAAYSWDNYYHVYWGQGTQVTVSS

SEQ ID NO: 26292 - protein, 119 aa, Artificial Sequence
  Chemically Synthesized
QVQLQESGGGLVQAGGSLRLSCAASGNIFTSYTMGWYRQAPGKERELVATISPGGSTNYADSVKGRFTISRDNAKNTVYLQMNSLKPEDTAVYYCAALSSTSDPYFPYWGQGTQVTVSS

SEQ ID NO: 26293 - protein, 122 aa, Artificial Sequence
  Chemically Synthesized
QVQLQESGGGLVQAGGSLRLSCAASGTISIVLTMGWYRQAPGKERELVAGIGGGASTYYADSVKGRFTISRDNAKNTVYLQMNSLKPEDTAVYYCAVYYFQATSADGTFTYWGQGTQVTVSS

SEQ ID NO: 26294 - protein, 112 aa, Artificial Sequence
  Chemically Synthesized
QVQLQESGGGLVQAGGSLRLSCAASGSISGYDMGWYRQAPGKEREFVASIGSGATTNYADSVKGRFTISRDNAKNTVYLQMNSLKPEDTAVYYCAAAGSCYWGQGTQVTVSS

SEQ ID NO: 26295 - protein, 117 aa, Artificial Sequence
  Chemically Synthesized
QVQLQESGGGLVQAGGSLRLSCAASGNIFAVTYMGWYRQAPGKERELVPLLVLVLVPYADSVKGRFTISRDNAKNTVYLQMNSLKPEDTAVYYCAAGDGDGTVYDYWGQGTQVTVSS

SEQ ID NO: 26296 - protein, 118 aa, Artificial Sequence
  Chemically Synthesized
QVQLQESGGGLVQAGGSLRLSCAASGSIFRERFMGWYRQAPGKEREFVASIGPGSTTYYADSVKGRFTISRDNAKNTVYLQMNSLKPEDTAVYYCAVKINTQYLLYYWGQGTQVTVSS

SEQ ID NO: 26297 - protein, 118 aa, Artificial Sequence
  Chemically Synthesized
QVQLQESGGGLVQAGGSLRLSCAASGSISIHGYMGWYRQAPGKERELVATIAAGGSTNYADSVKGRFTISRDNAKNTVYLQMNSLKPEDTAVYYCAVPRPGIHYHPYWGQGTQVTVSS

SEQ ID NO: 26298 - protein, 125 aa, Artificial Sequence
  Chemically Synthesized
QVQLQESGGGLVQAGGSLRLSCAASGTISTVPSMGWYRQAPGKERELVAAITHGTSTYYADSVKGRFTISRDNAKNTVYLQMNSLKPEDTAVYYCAVGGQELADVGRKAGDHEYWGQGTQVTVSS

SEQ ID NO: 26299 - protein, 118 aa, Artificial Sequence
  Chemically Synthesized
QVQLQESGGGLVQAGGSLRLSCAASGTISRRWLMGWYRQAPGKEREFVATISPGSSTNYADSVKGRFTISRDNAKNTVYLQMNSLKPEDTAVYYCAVILNNYERFFYWGQGTQVTVSS

SEQ ID NO: 26300 - protein, 118 aa, Artificial Sequence
  Chemically Synthesized
QVQLQESGGGLVQAGGSLRLSCAASGYIFQAYDMGWYRQAPGKERELVATIGDGGNTYYADSVKGRFTISRDNAKNTVYLQMNSLKPEDTAVYYCAVRDYSPLYHPYWGQGTQVTVSS

SEQ ID NO: 26301 - protein, 118 aa, Artificial Sequence
  Chemically Synthesized
QVQLQESGGGLVQAGGSLRLSCAASGTISLGVLMGWYRQAPGKERELVATIDDGSTTNYADSVKGRFTISRDNAKNTVYLQMNSLKPEDTAVYYCAVFSNPYSDYPYWGQGTQVTVSS

SEQ ID NO: 26302 - protein, 122 aa, Artificial Sequence
  Chemically Synthesized
QVQLQESGGGLVQAGGSLRLSCAASGTIFDWYRMGWYRQAPGKERELVAGIADGAITNYADSVKGRFTISRDNAKNTVYLQMNSLKPEDTAVYYCAVGAIADVTPSHYHDYWGQGTQVTVSS

SEQ ID NO: 26303 - protein, 113 aa, Artificial Sequence
  Chemically Synthesized
QVQLQESGGGLVQAGGSLRLSCAASGNIFSYTDMGWYRQAPGKERELVAGITTVVLPYADSVKGRFTISRDNAKNTVYLQMNSLKPEDTAVYYCAVSTTRFYWGQGTQVTVSS

SEQ ID NO: 26304 - protein, 122 aa, Artificial Sequence
  Chemically Synthesized
QVQLQESGGGLVQAGGSLRLSCAASGSIFPVDDMGWYRQAPGKERELVAAIDVGGTTYYADSVKGRFTISRDNAKNTVYLQMNSLKPEDTAVYYCAAPKHNNIGDQTEHRYWGQGTQVTVSS

SEQ ID NO: 26305 - protein, 122 aa, Artificial Sequence
  Chemically Synthesized
QVQLQESGGGLVQAGGSLRLSCAASGTIFETRQMGWYRQAPGKEREFVASIAFGSTTNYADSVKGRFTISRDNAKNTVYLQMNSLKPEDTAVYYCAARDDTKRQDYNDYTYWGQGTQVTVSS

SEQ ID NO: 26306 - protein, 126 aa, Artificial Sequence
  Chemically Synthesized
QVQLQESGGGLVQAGGSLRLSCAASGYISRWYIMGWYRQAPGKERELVAGIGAGTITYYADSVKGRFTISRDNAKNTVYLQMNSLKPEDTAVYYCAAYDSAERFGFAASELAFVYWGQGTQVTVSS

SEQ ID NO: 26307 - protein, 118 aa, Artificial Sequence
  Chemically Synthesized
QVQLQESGGGLVQAGGSLRLSCAASGYISYPYSMGWYRQAPGKERELVATISYGTITNYADSVKGRFTISRDNAKNTVYLQMNSLKPEDTAVYYCAAINPAVVEHYYWGQGTQVTVSS

SEQ ID NO: 26308 - protein, 115 aa, Artificial Sequence
  Chemically Synthesized
QVQLQESGGGLVQAGGSLRLSCAASGYISDPPGMGWYRQAPGKEREFVAALLTVVIPYADSVKGRFTISRDNAKNTVYLQMNSLKPEDTAVYYCAADLYSRHYYWGQGTQVTVSS

SEQ ID NO: 26309 - protein, 123 aa, Artificial Sequence
  Chemically Synthesized
QVQLQESGGGLVQAGGSLRLSCAASGTISRDYQMGWYRQAPGKEREFVATIDEGSSYADSVKGRFTISRDNAKNTVYLQMNSLKPEDTAVYYCAAGHHESFTRLLLFTTCIYWGQGTQVTVSS

SEQ ID NO: 26310 - protein, 117 aa, Artificial Sequence
  Chemically Synthesized
QVQLQESGGGLVQAGGSLRLSCAASGNISGSNGMGWYRQAPGKERELVASINQGASTYYADSVKGRFTISRDNAKNTVYLQMNSLKPEDTAVYYCAVTWYVGGLFYWGQGTQVTVSS

SEQ ID NO: 26311 - protein, 117 aa, Artificial Sequence
  Chemically Synthesized
QVQLQESGGGLVQAGGSLRLSCAASGNISPLCMGWYRQAPGKERELVATITDGATTNYADSVKGRFTISRDNAKNTVYLQMNSLKPEDTAVYYCAVNDDYTIWLAYWGQGTQVTVSS

SEQ ID NO: 26312 - protein, 118 aa, Artificial Sequence
  Chemically Synthesized
QVQLQESGGGLVQAGGSLRLSCAASGTIFLYIDMGWYRQAPGKERELVASITAGASTNYADSVKGRFTISRDNAKNTVYLQMNSLKPEDTAVYYCAALRSGLIILDYWGQGTQVTVSS

SEQ ID NO: 26313 - protein, 119 aa, Artificial Sequence
  Chemically Synthesized
QVQLQESGGGLVQAGGSLRLSCAASGTIFGDSYMGWYRQAPGKERELTNTNYADSVKGRFTISRDNAKNTVYLQMNSLKPEDTAVYYCAAVGYLLDYPYDDVYFFHDYWGQGTQVTVSS

SEQ ID NO: 26314 - protein, 121 aa, Artificial Sequence
  Chemically Synthesized
QVQLQESGGGLVQAGGSLRLSCAASGTISEVTAMGWYRQAPGKERELVASIASVLLPYADSVKGRFTISRDNAKNTVYLQMNSLKPEDTAVYYCAVTLDHNYYNGSPLAYWGQGTQVTVSS

SEQ ID NO: 26315 - protein, 122 aa, Artificial Sequence
  Chemically Synthesized
QVQLQESGGGLVQAGGSLRLSCAASGTISRRYYMGWYRQAPGKEREFVASISVGGTTNYADSVKGRFTISRDNAKNTVYLQMNSLKPEDTAVYYCAVDRHVPYYYYIRHDYWGQGTQVTVSS

SEQ ID NO: 26316 - protein, 125 aa, Artificial Sequence
  Chemically Synthesized
QVQLQESGGGLVQAGGSLRLSCAASGTIFGGQPMGWYRQAPGKEREFVAAIAGTSTNYADSVKGRFTISRDNAKNTVYLQMNSLKPEDTAVYYCAVQYPYTDPSREYDNDPLDYWGQGTQVTVSS

SEQ ID NO: 26317 - protein, 121 aa, Artificial Sequence
  Chemically Synthesized
QVQLQESGGGLVQAGGSLRLSCAASGYIFADTYMGWYRQAPGKERELVATIDFEYYLYADSVKGRFTISRDNAKNTVYLQMNSLKPEDTAVYYCAVYGWTNAWRYLGYNYWGQGTQVTVSS

SEQ ID NO: 26318 - protein, 117 aa, Artificial Sequence
  Chemically Synthesized
QVQLQESGGGLVQAGGSLRLSCAASGNISSTFMGWYRQAPGKEREFVAGIGVGSSTYYADSVKGRFTISRDNAKNTVYLQMNSLKPEDTAVYYCAAYRANHATFRYWGQGTQVTVSS

SEQ ID NO: 26319 - protein, 126 aa, Artificial Sequence
  Chemically Synthesized
QVQLQESGGGLVQAGGSLRLSCAASGSIFPEWEMGWYRQAPGKERELVASISLGTITNYADSVKGRFTISRDNAKNTVYLQMNSLKPEDTAVYYCAAWWISGLGSTYHGATYLVYWGQGTQVTVSS

SEQ ID NO: 26320 - protein, 125 aa, Artificial Sequence
  Chemically Synthesized
QVQLQESGGGLVQAGGSLRLSCAASGTISTDPTMGWYRQAPGKERELVAGIDSGGTTNYADSVKGRFTISRDNAKNTVYLQMNSLKPEDTAVYYCAAYAWLDFRTSRLPYPIHYWGQGTQVTVSS

SEQ ID NO: 26321 - protein, 118 aa, Artificial Sequence
  Chemically Synthesized
QVQLQESGGGLVQAGGSLRLSCAASGNISLRGPMGWYRQAPGKERELVATIDAGATTNYADSVKGRFTISRDNAKNTVYLQMNSLKPEDTAVYYCAVTGDTYTGFRYWGQGTQVTVSS

SEQ ID NO: 26322 - protein, 124 aa, Artificial Sequence
  Chemically Synthesized
QVQLQESGGGLVQAGGSLRLSCAASGNISNDMGWYRQAPGKEREFVATIGAGTSTYYADSVKGRFTISRDNAKNTVYLQMNSLKPEDTAVYYCAVAPDRRGYPDDTLVGPYLYWGQGTQVTVSS

SEQ ID NO: 26323 - protein, 118 aa, Artificial Sequence
  Chemically Synthesized
QVQLQESGGGLVQAGGSLRLSCAASGNISQGPYMGWYRQAPGKERELVAGIGDGSSTYYADSVKGRFTISRDNAKNTVYLQMNSLKPEDTAVYYCAVYLDADRYFVYWGQGTQVTVSS

SEQ ID NO: 26324 - protein, 122 aa, Artificial Sequence
  Chemically Synthesized
QVQLQESGGGLVQAGGSLRLSCAASGYIFPYSIMGWYRQAPGKERELVAAINYGGTTYYADSVKGRFTISRDNAKNTVYLQMNSLKPEDTAVYYCAVDQGHRPGVFGVHAYWGQGTQVTVSS

SEQ ID NO: 26325 - protein, 122 aa, Artificial Sequence
  Chemically Synthesized
QVQLQESGGGLVQAGGSLRLSCAASGTIFVRHEMGWYRQAPGKEREFVAAITDGSITYYADSVKGRFTISRDNAKNTVYLQMNSLKPEDTAVYYCAVRSPHAFGVDRTHQYWGQGTQVTVSS

SEQ ID NO: 26326 - protein, 118 aa, Artificial Sequence
  Chemically Synthesized
QVQLQESGGGLVQAGGSLRLSCAASGNIFVPYPMGWYRQAPGKERELVATINEGASTNYADSVKGRFTISRDNAKNTVYLQMNSLKPEDTAVYYCAATSSDYLYYYYWGQGTQVTVSS

SEQ ID NO: 26327 - protein, 118 aa, Artificial Sequence
  Chemically Synthesized
QVQLQESGGGLVQAGGSLRLSCAASGSISGTEIMGWYRQAPGKEREFVATISSGANTYYADSVKGRFTISRDNAKNTVYLQMNSLKPEDTAVYYCAARSGAYTDHAYWGQGTQVTVSS

SEQ ID NO: 26328 - protein, 117 aa, Artificial Sequence
  Chemically Synthesized
QVQLQESGGGLVQAGGSLRLSCAASGYIFRYHIMGWYRQAPGKEREFVATISPGGNTNYADSVKGRFTISRDNAKNTVYLQMNSLKPEDTAVYYCAVHNQSDYSLYWGQGTQVTVSS

SEQ ID NO: 26329 - protein, 121 aa, Artificial Sequence
  Chemically Synthesized
QVQLQESGGGLVQAGGSLRLSCAASGYIFESDYMGWYRQAPGKEREFVASIDGGSSTYYADSVKGRFTISRDNAKNTVYLQMNSLKPEDTAVYYCAVYNFNNGKTFRDLYWGQGTQVTVSS

SEQ ID NO: 26330 - protein, 118 aa, Artificial Sequence
  Chemically Synthesized
QVQLQESGGGLVQAGGSLRLSCAASGYIFLSYYMGWYRQAPGKERELVAGIATGAITNYADSVKGRFTISRDNAKNTVYLQMNSLKPEDTAVYYCAAYLPYVKDLRYWGQGTQVTVSS

SEQ ID NO: 26331 - protein, 116 aa, Artificial Sequence
  Chemically Synthesized
QVQLQESGGGLVQAGGSLRLSCAASGTIFDYYGMGWYRQAPGKERELVATIDDGGTTNYADSVKGRFTISRDNAKNTVYLQMNSLKPEDTAVYYCAAYGYWKLSYWGQGTQVTVSS

SEQ ID NO: 26332 - protein, 115 aa, Artificial Sequence
  Chemically Synthesized
QVQLQESGGGLVQAGGSLRLSCAASGYISWMGWYRQAPGKERELVAGIDQGTTTYYADSVKGRFTISRDNAKNTVYLQMNSLKPEDTAVYYCAAYDNYYPVFGYWGQGTQVTVSS

SEQ ID NO: 26333 - protein, 118 aa, Artificial Sequence
  Chemically Synthesized
QVQLQESGGGLVQAGGSLRLSCAASGTISSPSLMGWYRQAPGKERELVATIGYGSTTYYADSVKGRFTISRDNAKNTVYLQMNSLKPEDTAVYYCAVWYANYTEHSYWGQGTQVTVSS

SEQ ID NO: 26334 - protein, 122 aa, Artificial Sequence
  Chemically Synthesized
QVQLQESGGGLVQAGGSLRLSCAASGYISGTPYMGWYRQAPGKEREFVAAIDYGANTNYADSVKGRFTISRDNAKNTVYLQMNSLKPEDTAVYYCAAGLGPSRYDTVLFAYWGQGTQVTVSS

SEQ ID NO: 26335 - protein, 117 aa, Artificial Sequence
  Chemically Synthesized
QVQLQESGGGLVQAGGSLRLSCAASGYISKSTMGWYRQAPGKERELVAAIAVGGTTNYADSVKGRFTISRDNAKNTVYLQMNSLKPEDTAVYYCAAWYYYAYTFSYWGQGTQVTVSS

SEQ ID NO: 26336 - protein, 119 aa, Artificial Sequence
  Chemically Synthesized
QVQLQESGGGLVQAGGSLRLSCAASGNIFNQAAMGWYRQAPGKERELVATIGYNGSTTYYADSVKGRFTISRDNAKNTVYLQMNSLKPEDTAVYYCAADVSYRDIHRYWGQGTQVTVSS

SEQ ID NO: 26337 - protein, 125 aa, Artificial Sequence
  Chemically Synthesized
QVQLQESGGGLVQAGGSLRLSCAASGTIFDVGHMGWYRQAPGKERELVASIAKGATTNYADSVKGRFTISRDNAKNTVYLQMNSLKPEDTAVYYCAAYVTPDYQVNDSLLRPSYWGQGTQVTVSS

SEQ ID NO: 26338 - protein, 117 aa, Artificial Sequence
  Chemically Synthesized
QVQLQESGGGLVQAGGSLRLSCAASGYISPIVNMGWYRQAPGKERELVATITDGANTYYADSVKGRFTISRDNAKNTVYLQMNSLKPEDTAVYYCAVLDSCSTTMYWGQGTQVTVSS

SEQ ID NO: 26339 - protein, 119 aa, Artificial Sequence
  Chemically Synthesized
QVQLQESGGGLVQAGGSLRLSCAASGTIFQRRPMGWYRQAPGKERELVATIDRGSTTYYADSVKGRFTISRDNAKNTVYLQMNSLKPEDTAVYYCAAHRYGLLRDYVYWGQGTQVTVSS

SEQ ID NO: 26340 - protein, 122 aa, Artificial Sequence
  Chemically Synthesized
QVQLQESGGGLVQAGGSLRLSCAASGNIFGQLYMGWYRQAPGKEREFVAAIDAGGNTNYADSVKGRFTISRDNAKNTVYLQMNSLKPEDTAVYYCAVYYYRDGAERSYFSYWGQGTQVTVSS

SEQ ID NO: 26341 - protein, 120 aa, Artificial Sequence
  Chemically Synthesized
QVQLQESGGGLVQAGGSLRLSCAASGSIFFAGMGWYRQAPGKERELVATIGYGGITYYADSVKGRFTISRDNAKNTVYLQMNSLKPEDTAVYYCAVYHQNAKYDYAYHYWGQGTQVTVSS

SEQ ID NO: 26342 - protein, 122 aa, Artificial Sequence
  Chemically Synthesized
QVQLQESGGGLVQAGGSLRLSCAASGTIFLDWDMGWYRQAPGKERELVAGINNGGSTYYADSVKGRFTISRDNAKNTVYLQMNSLKPEDTAVYYCAVINPFGPYGILRHSYWGQGTQVTVSS

SEQ ID NO: 26343 - protein, 118 aa, Artificial Sequence
  Chemically Synthesized
QVQLQESGGGLVQAGGSLRLSCAASGTISWYQAMGWYRQAPGKEREFVAAITRGGTTYYADSVKGRFTISRDNAKNTVYLQMNSLKPEDTAVYYCAVTNYYIADLVYWGQGTQVTVSS

SEQ ID NO: 26344 - protein, 122 aa, Artificial Sequence
  Chemically Synthesized
QVQLQESGGGLVQAGGSLRLSCAASGYISDYTLMGWYRQAPGKERELVATIGYGAITYYADSVKGRFTISRDNAKNTVYLQMNSLKPEDTAVYYCAAVALDYAADKDVYQYWGQGTQVTVSS

SEQ ID NO: 26345 - protein, 110 aa, Artificial Sequence
  Chemically Synthesized
QVQLQESGGGLVQAGGSLRLSCAASGSISDYISMGWYRQAPGKEREFVATIDGGSTTNYADSVKGRFTISRDNAKNTVYLQMNSLKPEDTAVYYCAAMYWGQGTQVTVSS

SEQ ID NO: 26346 - protein, 122 aa, Artificial Sequence
  Chemically Synthesized
QVQLQESGGGLVQAGGSLRLSCAASGNISDSTNMGWYRQAPGKEREFVAAIGYGTNTYYADSVKGRFTISRDNAKNTVYLQMNSLKPEDTAVYYCAVDGEYQGVESDSHDYWGQGTQVTVSS

SEQ ID NO: 26347 - protein, 121 aa, Artificial Sequence
  Chemically Synthesized
QVQLQESGGGLVQAGGSLRLSCAASGTIFAQRTMGWYRQAPGKERELVAAIALGTSTYYADSVKGRFTISRDNAKNTVYLQMNSLKPEDTAVYYCAAWRYYYYYDWTLYYWGQGTQVTVSS

SEQ ID NO: 26348 - protein, 110 aa, Artificial Sequence
  Chemically Synthesized
QVQLQESGGGLVQAGGSLRLSCAASGSISARPYMGWYRQAPGKERELVAGITVGGSTYYADSVKGRFTISRDNAKNTVYLQMNSLKPEDTAVYYCAVMYWGQGTQVTVSS

SEQ ID NO: 26349 - protein, 113 aa, Artificial Sequence
  Chemically Synthesized
QVQLQESGGGLVQAGGSLRLSCAASGTFMGWYRQAPGKERELVASISYGTNTNYADSVKGRFTISRDNAKNTVYLQMNSLKPEDTAVYYCAVSTWVAVRHSYWGQGTQVTVSS

SEQ ID NO: 26350 - protein, 117 aa, Artificial Sequence
  Chemically Synthesized
QVQLQESGGGLVQAGGSLRLSCAASGNISTHSMGWYRQAPGKEREFVAAINAGSITNYADSVKGRFTISRDNAKNTVYLQMNSLKPEDTAVYYCAADSAGPGDYPYWGQGTQVTVSS

SEQ ID NO: 26351 - protein, 118 aa, Artificial Sequence
  Chemically Synthesized
QVQLQESGGGLVQAGGSLRLSCAASGYIFGSQIMGWYRQAPGKEREFVAGIADGTITNYADSVKGRFTISRDNAKNTVYLQMNSLKPEDTAVYYCAVNAYPNTQLRYWGQGTQVTVSS

SEQ ID NO: 26352 - protein, 118 aa, Artificial Sequence
  Chemically Synthesized
QVQLQESGGGLVQAGGSLRLSCAASGSISTADSMGWYRQAPGKERELVASIDYGGNTNYADSVKGRFTISRDNAKNTVYLQMNSLKPEDTAVYYCAAVGYDVYYYDYWGQGTQVTVSS

SEQ ID NO: 26353 - protein, 113 aa, Artificial Sequence
  Chemically Synthesized
QVQLQESGGGLVQAGGSLRLSCAASGNIFTYHCMGWYRQAPGKERELVASGGTTNYADSVKGRFTISRDNAKNTVYLQMNSLKPEDTAVYYCAADFLGRYVYWGQGTQVTVSS

SEQ ID NO: 26354 - protein, 126 aa, Artificial Sequence
  Chemically Synthesized
QVQLQESGGGLVQAGGSLRLSCAASGSISSYARMGWYRQAPGKERELVAAISYGATTNYADSVKGRFTISRDNAKNTVYLQMNSLKPEDTAVYYCAAENVRLGDALGWRYTPLTYWGQGTQVTVSS

SEQ ID NO: 26355 - protein, 122 aa, Artificial Sequence
  Chemically Synthesized
QVQLQESGGGLVQAGGSLRLSCAASGTISLSSDMGWYRQAPGKERELVATIGHGSSTNYADSVKGRFTISRDNAKNTVYLQMNSLKPEDTAVYYCAVSDDPKDDDVQWHGYWGQGTQVTVSS

SEQ ID NO: 26356 - protein, 121 aa, Artificial Sequence
  Chemically Synthesized
QVQLQESGGGLVQAGGSLRLSCAASGNISIRQYMGWYRQAPGKEREFVASIDEGGITYYADSVKGRFTISRDNAKNTVYLQMNSLKPEDTAVYYCAVLNSAAYSHDYYGYWGQGTQVTVSS

SEQ ID NO: 26357 - protein, 115 aa, Artificial Sequence
  Chemically Synthesized
QVQLQESGGGLVQAGGSLRLSCAASGSIFTGDGMGWYRQAPGKERELVAAIGLGSSTYYADSVKGRFTISRDNAKNTVYLQMNSLKPEDTAVYYCAYLHSDLYYWGQGTQVTVSS

SEQ ID NO: 26358 - protein, 118 aa, Artificial Sequence
  Chemically Synthesized
QVQLQESGGGLVQAGGSLRLSCAASGTIFRPWDMGWYRQAPGKERELVAAIGIGGNTYYADSVKGRFTISRDNAKNTVYLQMNSLKPEDTAVYYCAVDQRDRQRHIYWGQGTQVTVSS

SEQ ID NO: 26359 - protein, 117 aa, Artificial Sequence
  Chemically Synthesized
QVQLQESGGGLVQAGGSLRLSCAASGYISSRPIMGWYRQAPGKERELVATIGRGTTNYADSVKGRFTISRDNAKNTVYLQMNSLKPEDTAVYYCAAKPAWPTYFYYWGQGTQVTVSS

SEQ ID NO: 26360 - protein, 122 aa, Artificial Sequence
  Chemically Synthesized
QVQLQESGGGLVQAGGSLRLSCAASGYIFGDRNMGWYRQAPGKERELVAAITTGGTTYYADSVKGRFTISRDNAKNTVYLQMNSLKPEDTAVYYCAAEYRPYYASWQLHYYWGQGTQVTVSS

SEQ ID NO: 26361 - protein, 120 aa, Artificial Sequence
  Chemically Synthesized
QVQLQESGGGLVQAGGSLRLSCAASGSISSSTMGWYRQAPGKEREFVASIGQGTITNYADSVKGRFTISRDNAKNTVYLQMNSLKPEDTAVYYCAAWTGTDSVYPCSSYWGQGTQVTVSS

SEQ ID NO: 26362 - protein, 110 aa, Artificial Sequence
  Chemically Synthesized
QVQLQESGGGLVQAGGSLRLSCAASGYISTSPEMGWYRQAPGKEREFVAAISRGTNTNYADSVKGRFTISRDNAKNTVYLQMNSLKPEDTAVYYCARLYWGQGTQVTVSS

SEQ ID NO: 26363 - protein, 117 aa, Artificial Sequence
  Chemically Synthesized
QVQLQESGGGLVQAGGSLRLSCAASGTISSGWSMGWYRQAPGKEREFVASIGLGGITYYADSVKGRFTISRDNAKNTVYLQMNSLKPEDTAVYYCAAGRYHESTLYWGQGTQVTVSS

SEQ ID NO: 26364 - protein, 118 aa, Artificial Sequence
  Chemically Synthesized
QVQLQESGGGLVQAGGSLRLSCAASGYISYVQFMGWYRQAPGKEREFVATIGEGGSTNYADSVKGRFTISRDNAKNTVYLQMNSLKPEDTAVYYCAVTSKDLTYLDYWGQGTQVTVSS

SEQ ID NO: 26365 - protein, 126 aa, Artificial Sequence
  Chemically Synthesized
QVQLQESGGGLVQAGGSLRLSCAASGYIFSNPWMGWYRQAPGKEREFVASITSGGTTYYADSVKGRFTISRDNAKNTVYLQMNSLKPEDTAVYYCAASQTYRPTRDATCSAAALYWGQGTQVTVSS

SEQ ID NO: 26366 - protein, 118 aa, Artificial Sequence
  Chemically Synthesized
QVQLQESGGGLVQAGGSLRLSCAASGNISVDIYMGWYRQAPGKERELLILVLLPYADSVKGRFTISRDNAKNTVYLQMNSLKPEDTAVYYCAAIADVDTPINDVLTYWGQGTQVTVSS

SEQ ID NO: 26367 - protein, 118 aa, Artificial Sequence
  Chemically Synthesized
QVQLQESGGGLVQAGGSLRLSCAASGNIFYYIEMGWYRQAPGKERELVAAINRGATTNYADSVKGRFTISRDNAKNTVYLQMNSLKPEDTAVYYCAVDGDYQTKLDYWGQGTQVTVSS

SEQ ID NO: 26368 - protein, 118 aa, Artificial Sequence
  Chemically Synthesized
QVQLQESGGGLVQAGGSLRLSCAASGNISRTGYMGWYRQAPGKERELVASITYGTNTYYADSVKGRFTISRDNAKNTVYLQMNSLKPEDTAVYYCAAGTYTDGWYGYWGQGTQVTVSS

SEQ ID NO: 26369 - protein, 118 aa, Artificial Sequence
  Chemically Synthesized
QVQLQESGGGLVQAGGSLRLSCAASGNISNFSDMGWYRQAPGKERELVAAIAEGGTTYYADSVKGRFTISRDNAKNTVYLQMNSLKPEDTAVYYCAVVYWADYPHYYWGQGTQVTVSS

SEQ ID NO: 26370 - protein, 118 aa, Artificial Sequence
  Chemically Synthesized
QVQLQESGGGLVQAGGSLRLSCAASGTIFKIYYMGWYRQAPGKERELVASITVGTITNYADSVKGRFTISRDNAKNTVYLQMNSLKPEDTAVYYCAAFELDTDNHHYWGQGTQVTVSS

SEQ ID NO: 26371 - protein, 126 aa, Artificial Sequence
  Chemically Synthesized
QVQLQESGGGLVQAGGSLRLSCAASGNIFPHADMGWYRQAPGKEREFVAGITYGSITNYADSVKGRFTISRDNAKNTVYLQMNSLKPEDTAVYYCAVVYVYADQAWGYPDWNHVYWGQGTQVTVSS

SEQ ID NO: 26372 - protein, 118 aa, Artificial Sequence
  Chemically Synthesized
QVQLQESGGGLVQAGGSLRLSCAASGNISRTWIMGWYRQAPGKERELVAAIDYGANTYYADSVKGRFTISRDNAKNTVYLQMNSLKPEDTAVYYCAVLRYYLIQHAYWGQGTQVTVSS

SEQ ID NO: 26373 - protein, 124 aa, Artificial Sequence
  Chemically Synthesized
QVQLQESGGGLVQAGGSLRLSCAASGSIFGPLYMGWYRQAPGKERELVAAIAVVVLPYADSVKGRFTISRDNAKNTVYLQMNSLKPEDTAVYYCAFWTVTTGINTGCTLTNFYWGQGTQVTVSS

SEQ ID NO: 26374 - protein, 118 aa, Artificial Sequence
  Chemically Synthesized
QVQLQESGGGLVQAGGSLRLSCAASGTISLGHYMGWYRQAPGKERELVAGITKGSNTNYADSVKGRFTISRDNAKNTVYLQMNSLKPEDTAVYYCAADYYDSNFHGYWGQGTQVTVSS

SEQ ID NO: 26375 - protein, 122 aa, Artificial Sequence
  Chemically Synthesized
QVQLQESGGGLVQAGGSLRLSCAASGTISHNVYMGWYRQAPGKERELVATITGGTITNYADSVKGRFTISRDNAKNTVYLQMNSLKPEDTAVYYCAVDYAWDEAIFYQLDYWGQGTQVTVSS

SEQ ID NO: 26376 - protein, 120 aa, Artificial Sequence
  Chemically Synthesized
QVQLQESGGGLVQAGGSLRLSCAASGYISVTYDMGWYRQAPGKERELVAGIDYGATTNYADSVKGRFTISRDNAKNTVYLQMNSLKPEDTAVYYCAVTYVWIARYYLDYWGQGTQVTVSS

SEQ ID NO: 26377 - protein, 118 aa, Artificial Sequence
  Chemically Synthesized
QVQLQESGGGLVQAGGSLRLSCAASGTIFGIDAMGWYRQAPGKERELVAGIGDGTTTNYADSVKGRFTISRDNAKNTVYLQMNSLKPEDTAVYYCAAAGYPLDLHDYWGQGTQVTVSS

SEQ ID NO: 26378 - protein, 118 aa, Artificial Sequence
  Chemically Synthesized
QVQLQESGGGLVQAGGSLRLSCAASGSISVTRYMGWYRQAPGKERELVAAIAHGGNTNYADSVKGRFTISRDNAKNTVYLQMNSLKPEDTAVYYCAADAPYGDTHPYWGQGTQVTVSS

SEQ ID NO: 26379 - protein, 121 aa, Artificial Sequence
  Chemically Synthesized
QVQLQESGGGLVQAGGSLRLSCAASGTISVPTYMGWYRQAPGKEREFVAGIAGGATTNYADSVKGRFTISRDNAKNTVYLQMNSLKPEDTAVYYCAAHHPENYSYDVRMYWGQGTQVTVSS

SEQ ID NO: 26380 - protein, 117 aa, Artificial Sequence
  Chemically Synthesized
QVQLQESGGGLVQAGGSLRLSCAASGNISSSLMGWYRQAPGKERELVAGIATGTITNYADSVKGRFTISRDNAKNTVYLQMNSLKPEDTAVYYCAVHGNQFTYLVYWGQGTQVTVSS

SEQ ID NO: 26381 - protein, 118 aa, Artificial Sequence
  Chemically Synthesized
QVQLQESGGGLVQAGGSLRLSCAASGTISASASMGWYRQAPGKERELVASIGPGSSTNYADSVKGRFTISRDNAKNTVYLQMNSLKPEDTAVYYCAAYKRDYGRHSYWGQGTQVTVSS

SEQ ID NO: 26382 - protein, 115 aa, Artificial Sequence
  Chemically Synthesized
QVQLQESGGGLVQAGGSLRLSCAASGSISTDHSMGWYRQAPGKEREFVAGIDHGATTYYADSVKGRFTISRDNAKNTVYLQMNSLKPEDTAVYYCAADGYDGMYWGQGTQVTVSS

SEQ ID NO: 26383 - protein, 118 aa, Artificial Sequence
  Chemically Synthesized
QVQLQESGGGLVQAGGSLRLSCAASGSISYRFGMGWYRQAPGKERELVASITRGGTTNYADSVKGRFTISRDNAKNTVYLQMNSLKPEDTAVYYCAAEKWFVQRFPYWGQGTQVTVSS

SEQ ID NO: 26384 - protein, 118 aa, Artificial Sequence
  Chemically Synthesized
QVQLQESGGGLVQAGGSLRLSCAASGNISIFYTMGWYRQAPGKEREFVAGIAAGATTYYADSVKGRFTISRDNAKNTVYLQMNSLKPEDTAVYYCAADYATHDAFYYWGQGTQVTVSS

SEQ ID NO: 26385 - protein, 121 aa, Artificial Sequence
  Chemically Synthesized
QVQLQESGGGLVQAGGSLRLSCAASGNIFTDSAMGWYRQAPGKEREFVAAIDTGSTTNYADSVKGRFTISRDNAKNTVYLQMNSLKPEDTAVYYCAAGYIYPYWAQYPFYWGQGTQVTVSS

SEQ ID NO: 26386 - protein, 118 aa, Artificial Sequence
  Chemically Synthesized
QVQLQESGGGLVQAGGSLRLSCAASGTISDLLIMGWYRQAPGKEREFVASITYGGITYYADSVKGRFTISRDNAKNTVYLQMNSLKPEDTAVYYCAVYGVTSWIHYYWGQGTQVTVSS

SEQ ID NO: 26387 - protein, 122 aa, Artificial Sequence
  Chemically Synthesized
QVQLQESGGGLVQAGGSLRLSCAASGSISPFRAMGWYRQAPGKERELVASIGAGANTNYADSVKGRFTISRDNAKNTVYLQMNSLKPEDTAVYYCAVIQYFYGGSNGQHFYWGQGTQVTVSS

SEQ ID NO: 26388 - protein, 118 aa, Artificial Sequence
  Chemically Synthesized
QVQLQESGGGLVQAGGSLRLSCAASGSISYYRLMGWYRQAPGKERELVAAIGWGSTTYYADSVKGRFTISRDNAKNTVYLQMNSLKPEDTAVYYCAAVGYWSYLFRYWGQGTQVTVSS

SEQ ID NO: 26389 - protein, 118 aa, Artificial Sequence
  Chemically Synthesized
QVQLQESGGGLVQAGGSLRLSCAASGTISAARTMGWYRQAPGKERELVASIANGSNTNYADSVKGRFTISRDNAKNTVYLQMNSLKPEDTAVYYCAVRDVRDSSFTYWGQGTQVTVSS

SEQ ID NO: 26390 - protein, 118 aa, Artificial Sequence
  Chemically Synthesized
QVQLQESGGGLVQAGGSLRLSCAASGTISSDRHMGWYRQAPGKERELVAGIGGGTTTNYADSVKGRFTISRDNAKNTVYLQMNSLKPEDTAVYYCAVYGEAVPVFVYWGQGTQVTVSS

SEQ ID NO: 26391 - protein, 112 aa, Artificial Sequence
  Chemically Synthesized
QVQLQESGGGLVQAGGSLRLSCAASGSISRRAGMGWYRQAPGKERELVAGISFGSTTNYADSVKGRFTISRDNAKNTVYLQMNSLKPEDTAVYYCARGHWYWGQGTQVTVSS

SEQ ID NO: 26392 - protein, 118 aa, Artificial Sequence
  Chemically Synthesized
QVQLQESGGGLVQAGGSLRLSCAASGYISVLPEMGWYRQAPGKERELVATIGRGGITYYADSVKGRFTISRDNAKNTVYLQMNSLKPEDTAVYYCAVYSDLIFILIYWGQGTQVTVSS

SEQ ID NO: 26393 - protein, 121 aa, Artificial Sequence
  Chemically Synthesized
QVQLQESGGGLVQAGGSLRLSCAASGSIFGDRYMGWYRQAPGKEREFVASINGGSITNYADSVKGRFTISRDNAKNTVYLQMNSLKPEDTAVYYCAFTTGSLVLTTVTLYWGQGTQVTVSS

SEQ ID NO: 26394 - protein, 118 aa, Artificial Sequence
  Chemically Synthesized
QVQLQESGGGLVQAGGSLRLSCAASGTISDGVTMGWYRQAPGKEREFVAAIGVGGNTNYADSVKGRFTISRDNAKNTVYLQMNSLKPEDTAVYYCAVVYGYVAYFYYWGQGTQVTVSS

SEQ ID NO: 26395 - protein, 116 aa, Artificial Sequence
  Chemically Synthesized
QVQLQESGGGLVQAGGSLRLSCAASGTISFYSMGWYRQAPGKERELVAGIAGGITNYADSVKGRFTISRDNAKNTVYLQMNSLKPEDTAVYYCAVDYDDLRSHWYWGQGTQVTVSS

SEQ ID NO: 26396 - protein, 117 aa, Artificial Sequence
  Chemically Synthesized
QVQLQESGGGLVQAGGSLRLSCAASGYIFPPNWMGWYRQAPGKERELVAAILKVVLPYADSVKGRFTISRDNAKNTVYLQMNSLKPEDTAVYYCAVSTATVWYLPYWGQGTQVTVSS

SEQ ID NO: 26397 - protein, 118 aa, Artificial Sequence
  Chemically Synthesized
QVQLQESGGGLVQAGGSLRLSCAASGTISYAHWMGWYRQAPGKERELVAAIGRGTSTYYADSVKGRFTISRDNAKNTVYLQMNSLKPEDTAVYYCAVDDGDYQYFLYWGQGTQVTVSS

SEQ ID NO: 26398 - protein, 125 aa, Artificial Sequence
  Chemically Synthesized
QVQLQESGGGLVQAGGSLRLSCAASGNISLRWYMGWYRQAPGKEREFVATISNGATTNYADSVKGRFTISRDNAKNTVYLQMNSLKPEDTAVYYCALTLVTLTGTTGICLLTMYWGQGTQVTVSS

SEQ ID NO: 26399 - protein, 122 aa, Artificial Sequence
  Chemically Synthesized
QVQLQESGGGLVQAGGSLRLSCAASGTISDLYKMGWYRQAPGKERELVAAISYGSITNYADSVKGRFTISRDNAKNTVYLQMNSLKPEDTAVYYCAALWDGHIAGLITHAYWGQGTQVTVSS

SEQ ID NO: 26400 - protein, 118 aa, Artificial Sequence
  Chemically Synthesized
QVQLQESGGGLVQAGGSLRLSCAASGNISAIYVMGWYRQAPGKERELVASITGGTTTNYADSVKGRFTISRDNAKNTVYLQMNSLKPEDTAVYYCAVLIVDDFLYVYWGQGTQVTVSS

SEQ ID NO: 26401 - protein, 117 aa, Artificial Sequence
  Chemically Synthesized
QVQLQESGGGLVQAGGSLRLSCAASGNIFGTAMGWYRQAPGKEREFVAAITEGASTNYADSVKGRFTISRDNAKNTVYLQMNSLKPEDTAVYYCAADLFVRWYLGYWGQGTQVTVSS

SEQ ID NO: 26402 - protein, 122 aa, Artificial Sequence
  Chemically Synthesized
QVQLQESGGGLVQAGGSLRLSCAASGTIFAAIYMGWYRQAPGKEREFVATISYGGITNYADSVKGRFTISRDNAKNTVYLQMNSLKPEDTAVYYCAANKGAPTRDAQPYIYWGQGTQVTVSS

SEQ ID NO: 26403 - protein, 114 aa, Artificial Sequence
  Chemically Synthesized
QVQLQESGGGLVQAGGSLRLSCAASGSISYWLLMGWYRQAPGKEREFVATIALGSTTNYADSVKGRFTISRDNAKNTVYLQMNSLKPEDTAVYYCAVARGFDYWGQGTQVTVSS

SEQ ID NO: 26404 - protein, 125 aa, Artificial Sequence
  Chemically Synthesized
QVQLQESGGGLVQAGGSLRLSCAASGTIFDSNVMGWYRQAPGKERELVAAIAYGAITYYADSVKGRFTISRDNAKNTVYLQMNSLKPEDTAVYYCAAYESDFVEGESLLTVCIYWGQGTQVTVSS

SEQ ID NO: 26405 - protein, 117 aa, Artificial Sequence
  Chemically Synthesized
QVQLQESGGGLVQAGGSLRLSCAASGNIFHIVYMGWYRQAPGKERELVAVLLTVLIPYADSVKGRFTISRDNAKNTVYLQMNSLKPEDTAVYYCAVIVAQRYQYYYWGQGTQVTVSS

SEQ ID NO: 26406 - protein, 115 aa, Artificial Sequence
  Chemically Synthesized
QVQLQESGGGLVQAGGSLRLSCAASGNISDDDDMGWYRQAPGKEREFVATIAVGGNTNYADSVKGRFTISRDNAKNTVYLQMNSLKPEDTAVYYCAVLTRCSSYWGQGTQVTVSS

SEQ ID NO: 26407 - protein, 125 aa, Artificial Sequence
  Chemically Synthesized
QVQLQESGGGLVQAGGSLRLSCAASGYISAPTMGWYRQAPGKEREFVAAISHGATTYYADSVKGRFTISRDNAKNTVYLQMNSLKPEDTAVYYCAVVGPKPRRTASYKRTWHDYWGQGTQVTVSS

SEQ ID NO: 26408 - protein, 126 aa, Artificial Sequence
  Chemically Synthesized
QVQLQESGGGLVQAGGSLRLSCAASGNIFRLDAMGWYRQAPGKERELVAGIGTGGITNYADSVKGRFTISRDNAKNTVYLQMNSLKPEDTAVYYCAAGGPYTQADPYVYAVYHVYWGQGTQVTVSS

SEQ ID NO: 26409 - protein, 126 aa, Artificial Sequence
  Chemically Synthesized
QVQLQESGGGLVQAGGSLRLSCAASGNIFYYDGMGWYRQAPGKERELVATIATGSSTNYADSVKGRFTISRDNAKNTVYLQMNSLKPEDTAVYYCAVYVSNYQGDTDWYYHYLAYWGQGTQVTVSS

SEQ ID NO: 26410 - protein, 112 aa, Artificial Sequence
  Chemically Synthesized
QVQLQESGGGLVQAGGSLRLSCAASGYISAYQVMGWYRQAPGKEREFVAAIDRGGNTNYADSVKGRFTISRDNAKNTVYLQMNSLKPEDTAVYYCAVDDGYWGQGTQVTVSS

SEQ ID NO: 26411 - protein, 114 aa, Artificial Sequence
  Chemically Synthesized
QVQLQESGGGLVQAGGSLRLSCAASGSIFDYYLMGWYRQAPGKEREFVASIDRGAITYYADSVKGRFTISRDNAKNTVYLQMNSLKPEDTAVYYCAPYADFIYWGQGTQVTVSS

SEQ ID NO: 26412 - protein, 117 aa, Artificial Sequence
  Chemically Synthesized
QVQLQESGGGLVQAGGSLRLSCAASGNIFTSVAMGWYRQAPGKEREFVATIAAGTTTNYADSVKGRFTISRDNAKNTVYLQMNSLKPEDTAVYYCAVNYHYGSFIYWGQGTQVTVSS

SEQ ID NO: 26413 - protein, 118 aa, Artificial Sequence
  Chemically Synthesized
QVQLQESGGGLVQAGGSLRLSCAASGTISGPLIMGWYRQAPGKERELVAAIDQGANTNYADSVKGRFTISRDNAKNTVYLQMNSLKPEDTAVYYCAVVSYVRRAHAYWGQGTQVTVSS

SEQ ID NO: 26414 - protein, 125 aa, Artificial Sequence
  Chemically Synthesized
QVQLQESGGGLVQAGGSLRLSCAASGTISTGDSMGWYRQAPGKERELVAGIADGGNTNYADSVKGRFTISRDNAKNTVYLQMNSLKPEDTAVYYCAVLSRSTVFLVSCLNRNLYWGQGTQVTVSS

SEQ ID NO: 26415 - protein, 117 aa, Artificial Sequence
  Chemically Synthesized
QVQLQESGGGLVQAGGSLRLSCAASGSISDRSTMGWYRQAPGKERELVATITSVLLPYADSVKGRFTISRDNAKNTVYLQMNSLKPEDTAVYYCAAYYWYGVTFGYWGQGTQVTVSS

SEQ ID NO: 26416 - protein, 117 aa, Artificial Sequence
  Chemically Synthesized
QVQLQESGGGLVQAGGSLRLSCAASGSISDYYFMGWYRQAPGKEREFVASISYGGTTNYADSVKGRFTISRDNAKNTVYLQMNSLKPEDTAVYYCAVGYPDSDHFYWGQGTQVTVSS

SEQ ID NO: 26417 - protein, 122 aa, Artificial Sequence
  Chemically Synthesized
QVQLQESGGGLVQAGGSLRLSCAASGTIFLDYPMGWYRQAPGKEREFVAAITHGGSTYYADSVKGRFTISRDNAKNTVYLQMNSLKPEDTAVYYCAAYWPYLLYTPDGYTYWGQGTQVTVSS

SEQ ID NO: 26418 - protein, 118 aa, Artificial Sequence
  Chemically Synthesized
QVQLQESGGGLVQAGGSLRLSCAASGTIFWGDIMGWYRQAPGKEREFVASITYGTTTNYADSVKGRFTISRDNAKNTVYLQMNSLKPEDTAVYYCAVETYPARDLHYWGQGTQVTVSS

SEQ ID NO: 26419 - protein, 119 aa, Artificial Sequence
  Chemically Synthesized
QVQLQESGGGLVQAGGSLRLSCAASGNIFPSGVMGWYRQAPGKEREFVAGIDIGSSTNYADSVKGRFTISRDNAKNTVYLQMNSLKPEDTAVYYCAVDHTIYAPNHLYWGQGTQVTVSS

SEQ ID NO: 26420 - protein, 116 aa, Artificial Sequence
  Chemically Synthesized
QVQLQESGGGLVQAGGSLRLSCAASGNIFRARYMGWYRQAPGKERELVAGIDYGATTYYADSVKGRFTISRDNAKNTVYLQMNSLKPEDTAVYYCAAHGRYYHGYWGQGTQVTVSS

SEQ ID NO: 26421 - protein, 120 aa, Artificial Sequence
  Chemically Synthesized
QVQLQESGGGLVQAGGSLRLSCAASGTIFASTMGWYRQAPGKERELVASISGGASTYYADSVKGRFTISRDNAKNTVYLQMNSLKPEDTAVYYCAGGGQALDRSPSLLYWGQGTQVTVSS

SEQ ID NO: 26422 - protein, 118 aa, Artificial Sequence
  Chemically Synthesized
QVQLQESGGGLVQAGGSLRLSCAASGTISEAYEMGWYRQAPGKERELVATIDFGTSTYYADSVKGRFTISRDNAKNTVYLQMNSLKPEDTAVYYCAVADIAPWYHYYWGQGTQVTVSS

SEQ ID NO: 26423 - protein, 121 aa, Artificial Sequence
  Chemically Synthesized
QVQLQESGGGLVQAGGSLRLSCAASGYIFAGGYMGWYRQAPGKEREFVASIGDGGNTYYADSVKGRFTISRDNAKNTVYLQMNSLKPEDTAVYYCAVTSYSWIQRRGYYYWGQGTQVTVSS

SEQ ID NO: 26424 - protein, 123 aa, Artificial Sequence
  Chemically Synthesized
QVQLQESGGGLVQAGGSLRLSCAASGTISWRGNMGWYRQAPGKEREFVAGIDNGGSTYYADSVKGRFTISRDNAKNTVYLQMNSLKPEDTAVYYCAVPDAYGLDHHPPPLNYWGQGTQVTVSS

SEQ ID NO: 26425 - protein, 118 aa, Artificial Sequence
  Chemically Synthesized
QVQLQESGGGLVQAGGSLRLSCAASGTIFYVLDMGWYRQAPGKERELVASITLGATTNYADSVKGRFTISRDNAKNTVYLQMNSLKPEDTAVYYCAAHTPTYDGLGYWGQGTQVTVSS

SEQ ID NO: 26426 - protein, 121 aa, Artificial Sequence
  Chemically Synthesized
QVQLQESGGGLVQAGGSLRLSCAASGNIFVGLMGWYRQAPGKERELVATIGDGATTNYADSVKGRFTISRDNAKNTVYLQMNSLKPEDTAVYYCAAGVDYPFGAYRRHAYWGQGTQVTVSS

SEQ ID NO: 26427 - protein, 122 aa, Artificial Sequence
  Chemically Synthesized
QVQLQESGGGLVQAGGSLRLSCAASGTISLPGYMGWYRQAPGKEREFVASISLGGITYYADSVKGRFTISRDNAKNTVYLQMNSLKPEDTAVYYCAPGLEYGSTNYYVLPYWGQGTQVTVSS

SEQ ID NO: 26428 - protein, 118 aa, Artificial Sequence
  Chemically Synthesized
QVQLQESGGGLVQAGGSLRLSCAASGNISYTRRMGWYRQAPGKEREFVAAITYGGITNYADSVKGRFTISRDNAKNTVYLQMNSLKPEDTAVYYCAAAWRYGLGHSYWGQGTQVTVSS

SEQ ID NO: 26429 - protein, 118 aa, Artificial Sequence
  Chemically Synthesized
QVQLQESGGGLVQAGGSLRLSCAASGTIFSRLVMGWYRQAPGKEREFVASIDSGGITYYADSVKGRFTISRDNAKNTVYLQMNSLKPEDTAVYYCAAGWDDLPDHGYWGQGTQVTVSS

SEQ ID NO: 26430 - protein, 122 aa, Artificial Sequence
  Chemically Synthesized
QVQLQESGGGLVQAGGSLRLSCAASGNIFDATQMGWYRQAPGKEREFVAAIDAGGSTYYADSVKGRFTISRDNAKNTVYLQMNSLKPEDTAVYYCAVVPLGGLQSEYAHWYWGQGTQVTVSS

SEQ ID NO: 26431 - protein, 126 aa, Artificial Sequence
  Chemically Synthesized
QVQLQESGGGLVQAGGSLRLSCAASGYIFDIGNMGWYRQAPGKERELVAGISGGTTTYYADSVKGRFTISRDNAKNTVYLQMNSLKPEDTAVYYCAAGAAPTDGYSNGEYYEHQYWGQGTQVTVSS

SEQ ID NO: 26432 - protein, 126 aa, Artificial Sequence
  Chemically Synthesized
QVQLQESGGGLVQAGGSLRLSCAASGTISPRAGMGWYRQAPGKEREFVAGIDDGATTYYADSVKGRFTISRDNAKNTVYLQMNSLKPEDTAVYYCAVVDRPVRHWFLRYYSAVCYWGQGTQVTVSS

SEQ ID NO: 26433 - protein, 122 aa, Artificial Sequence
  Chemically Synthesized
QVQLQESGGGLVQAGGSLRLSCAASGSISPCFRMGWYRQAPGKERELVATIGYGATTNYADSVKGRFTISRDNAKNTVYLQMNSLKPEDTAVYYCAAWYTRYTIAWLIYDYWGQGTQVTVSS

SEQ ID NO: 26434 - protein, 118 aa, Artificial Sequence
  Chemically Synthesized
QVQLQESGGGLVQAGGSLRLSCAASGTIFLFAVMGWYRQAPGKEREFVATITYGAITNYADSVKGRFTISRDNAKNTVYLQMNSLKPEDTAVYYCAVDYAFYRLFYYWGQGTQVTVSS

SEQ ID NO: 26435 - protein, 118 aa, Artificial Sequence
  Chemically Synthesized
QVQLQESGGGLVQAGGSLRLSCAASGSISALYGMGWYRQAPGKEREFVATINYGSITYYADSVKGRFTISRDNAKNTVYLQMNSLKPEDTAVYYCAVGSRSRAHFAYWGQGTQVTVSS

SEQ ID NO: 26436 - protein, 117 aa, Artificial Sequence
  Chemically Synthesized
QVQLQESGGGLVQAGGSLRLSCAASGTISLGRMGWYRQAPGKERELVAAIAHGANTYYADSVKGRFTISRDNAKNTVYLQMNSLKPEDTAVYYCAADLPDVYPYQYWGQGTQVTVSS

SEQ ID NO: 26437 - protein, 115 aa, Artificial Sequence
  Chemically Synthesized
QVQLQESGGGLVQAGGSLRLSCAASGTISIAIYMGWYRQAPGKERELVAGISDGGYADSVKGRFTISRDNAKNTVYLQMNSLKPEDTAVYYCAAELVFPKRLRYWGQGTQVTVSS

SEQ ID NO: 26438 - protein, 122 aa, Artificial Sequence
  Chemically Synthesized
QVQLQESGGGLVQAGGSLRLSCAASGTIFQDYGMGWYRQAPGKERELVATITLGGITYYADSVKGRFTISRDNAKNTVYLQMNSLKPEDTAVYYCAVYYLYDYLIDGGLLYWGQGTQVTVSS

SEQ ID NO: 26439 - protein, 126 aa, Artificial Sequence
  Chemically Synthesized
QVQLQESGGGLVQAGGSLRLSCAASGNISDSYYMGWYRQAPGKEREFVATINFGASTNYADSVKGRFTISRDNAKNTVYLQMNSLKPEDTAVYYCAVRRLRYGYWDPFLRINLTYWGQGTQVTVSS

SEQ ID NO: 26440 - protein, 122 aa, Artificial Sequence
  Chemically Synthesized
QVQLQESGGGLVQAGGSLRLSCAASGNISPVYAMGWYRQAPGKERELVAGITYGGSTNYADSVKGRFTISRDNAKNTVYLQMNSLKPEDTAVYYCAAPPAGGYNVRYNLDYWGQGTQVTVSS

SEQ ID NO: 26441 - protein, 118 aa, Artificial Sequence
  Chemically Synthesized
QVQLQESGGGLVQAGGSLRLSCAASGSIFVVDIMGWYRQAPGKERELVASIATGATTYYADSVKGRFTISRDNAKNTVYLQMNSLKPEDTAVYYCAVVQYAYYVLAYWGQGTQVTVSS

SEQ ID NO: 26442 - protein, 126 aa, Artificial Sequence
  Chemically Synthesized
QVQLQESGGGLVQAGGSLRLSCAASGNISATSIMGWYRQAPGKERELVAAINYGASTYYADSVKGRFTISRDNAKNTVYLQMNSLKPEDTAVYYCAAVYLDQGLTYDYLVHGHAYWGQGTQVTVSS

SEQ ID NO: 26443 - protein, 112 aa, Artificial Sequence
  Chemically Synthesized
QVQLQESGGGLVQAGGSLRLSCAASGNISYDTTMGWYRQAPGKERELVYADSVKGRFTISRDNAKNTVYLQMNSLKPEDTAVYYCAAVAAWLQDADYDHVYWGQGTQVTVSS

SEQ ID NO: 26444 - protein, 118 aa, Artificial Sequence
  Chemically Synthesized
QVQLQESGGGLVQAGGSLRLSCAASGTISSFLYMGWYRQAPGKEREFVATIGYGANTNYADSVKGRFTISRDNAKNTVYLQMNSLKPEDTAVYYCAVGNALDRTHGYWGQGTQVTVSS

SEQ ID NO: 26445 - protein, 118 aa, Artificial Sequence
  Chemically Synthesized
QVQLQESGGGLVQAGGSLRLSCAASGTIFYGSAMGWYRQAPGKERELVAAIDPGTNTYYADSVKGRFTISRDNAKNTVYLQMNSLKPEDTAVYYCAAEYWWRRAFTYWGQGTQVTVSS

SEQ ID NO: 26446 - protein, 118 aa, Artificial Sequence
  Chemically Synthesized
QVQLQESGGGLVQAGGSLRLSCAASGTISNRPGMGWYRQAPGKEREFVASITDGGSTNYADSVKGRFTISRDNAKNTVYLQMNSLKPEDTAVYYCAAIWYTKGYHYYWGQGTQVTVSS

SEQ ID NO: 26447 - protein, 118 aa, Artificial Sequence
  Chemically Synthesized
QVQLQESGGGLVQAGGSLRLSCAASGNISHRATMGWYRQAPGKEREFVAAITGGSSTNYADSVKGRFTISRDNAKNTVYLQMNSLKPEDTAVYYCAALTYRDGFYYYWGQGTQVTVSS

SEQ ID NO: 26448 - protein, 118 aa, Artificial Sequence
  Chemically Synthesized
QVQLQESGGGLVQAGGSLRLSCAASGTISYTDTMGWYRQAPGKEREFVASIAEGSTTNYADSVKGRFTISRDNAKNTVYLQMNSLKPEDTAVYYCAVRNDAYASFPYWGQGTQVTVSS

SEQ ID NO: 26449 - protein, 122 aa, Artificial Sequence
  Chemically Synthesized
QVQLQESGGGLVQAGGSLRLSCAASGTIFGQFYMGWYRQAPGKERELVAGIDYGGSTNYADSVKGRFTISRDNAKNTVYLQMNSLKPEDTAVYYCAVYYYSDLWISKTHGYWGQGTQVTVSS

SEQ ID NO: 26450 - protein, 118 aa, Artificial Sequence
  Chemically Synthesized
QVQLQESGGGLVQAGGSLRLSCAASGNISRDLVMGWYRQAPGKERELVATIDTGGITNYADSVKGRFTISRDNAKNTVYLQMNSLKPEDTAVYYCAAYPYTYVGYVYWGQGTQVTVSS

SEQ ID NO: 26451 - protein, 122 aa, Artificial Sequence
  Chemically Synthesized
QVQLQESGGGLVQAGGSLRLSCAASGNISDVVAMGWYRQAPGKEREFVAAIAGGTSTNYADSVKGRFTISRDNAKNTVYLQMNSLKPEDTAVYYCAAIFRTWVDVGPYYAYWGQGTQVTVSS

SEQ ID NO: 26452 - protein, 118 aa, Artificial Sequence
  Chemically Synthesized
QVQLQESGGGLVQAGGSLRLSCAASGSISDYTFMGWYRQAPGKERELVAAIAYGATTNYADSVKGRFTISRDNAKNTVYLQMNSLKPEDTAVYYCAATHRDIEYFYYWGQGTQVTVSS

SEQ ID NO: 26453 - protein, 109 aa, Artificial Sequence
  Chemically Synthesized
QVQLQESGGGLVQAGGSLRLSCAASGYIFTTVMGWYRQAPGKERELVAGIDFGSNTNYADSVKGRFTISRDNAKNTVYLQMNSLKPEDTAVYYCALGYWGQGTQVTVSS

SEQ ID NO: 26454 - protein, 126 aa, Artificial Sequence
  Chemically Synthesized
QVQLQESGGGLVQAGGSLRLSCAASGSISDGTQMGWYRQAPGKERELVAGIDYGGITNYADSVKGRFTISRDNAKNTVYLQMNSLKPEDTAVYYCAAVDAVIERYSQYNRDTFHYWGQGTQVTVSS

SEQ ID NO: 26455 - protein, 121 aa, Artificial Sequence
  Chemically Synthesized
QVQLQESGGGLVQAGGSLRLSCAASGSISSLLMGWYRQAPGKERELVAGIGDGSSTNYADSVKGRFTISRDNAKNTVYLQMNSLKPEDTAVYYCAADADPIYYIADDFIYWGQGTQVTVSS

SEQ ID NO: 26456 - protein, 118 aa, Artificial Sequence
  Chemically Synthesized
QVQLQESGGGLVQAGGSLRLSCAASGTISQNYTMGWYRQAPGKEREFVAGIASGTSTNYADSVKGRFTISRDNAKNTVYLQMNSLKPEDTAVYYCAAVTYRDGWYSYWGQGTQVTVSS

SEQ ID NO: 26457 - protein, 124 aa, Artificial Sequence
  Chemically Synthesized
QVQLQESGGGLVQAGGSLRLSCAASGTISGSLYMGWYRQAPGKEREFVAAITRGTNTNYADSVKGRFTISRDNAKNTVYLQMNSLKPEDTAVYYCAAGDTFYQLGDGSDRLVYWGQGTQVTVSS

SEQ ID NO: 26458 - protein, 118 aa, Artificial Sequence
  Chemically Synthesized
QVQLQESGGGLVQAGGSLRLSCAASGNIFYLYGMGWYRQAPGKEREFVAAIADGTTTNYADSVKGRFTISRDNAKNTVYLQMNSLKPEDTAVYYCAAIVRWRGIHGYWGQGTQVTVSS

SEQ ID NO: 26459 - protein, 121 aa, Artificial Sequence
  Chemically Synthesized
QVQLQESGGGLVQAGGSLRLSCAASGNISGILYMGWYRQAPGKEREFVATISRGTTNYADSVKGRFTISRDNAKNTVYLQMNSLKPEDTAVYYCAAVVDDYISYSRYHHYWGQGTQVTVSS

SEQ ID NO: 26460 - protein, 118 aa, Artificial Sequence
  Chemically Synthesized
QVQLQESGGGLVQAGGSLRLSCAASGTISPDYYMGWYRQAPGKEREFVAAIGPGATTNYADSVKGRFTISRDNAKNTVYLQMNSLKPEDTAVYYCAVVYYLSRWHWYWGQGTQVTVSS

SEQ ID NO: 26461 - protein, 120 aa, Artificial Sequence
  Chemically Synthesized
QVQLQESGGGLVQAGGSLRLSCAASGNISISDRMGWYRQAPGKEREFVATIVVVVLPYADSVKGRFTISRDNAKNTVYLQMNSLKPEDTAVYYCAVVVLLTSLTLFRMYWGQGTQVTVSS

SEQ ID NO: 26462 - protein, 117 aa, Artificial Sequence
  Chemically Synthesized
QVQLQESGGGLVQAGGSLRLSCAASGSISLEGYMGWYRQAPGKERELVASIDYGGNTNYADSVKGRFTISRDNAKNTVYLQMNSLKPEDTAVYYCALLVRRSKVFYWGQGTQVTVSS

SEQ ID NO: 26463 - protein, 118 aa, Artificial Sequence
  Chemically Synthesized
QVQLQESGGGLVQAGGSLRLSCAASGSIFRATTMGWYRQAPGKEREFVAGINDGGTTNYADSVKGRFTISRDNAKNTVYLQMNSLKPEDTAVYYCAVLERLGDRHYYWGQGTQVTVSS

SEQ ID NO: 26464 - protein, 126 aa, Artificial Sequence
  Chemically Synthesized
QVQLQESGGGLVQAGGSLRLSCAASGNIFGPRVMGWYRQAPGKERELVAAISQGANTNYADSVKGRFTISRDNAKNTVYLQMNSLKPEDTAVYYCAAGYDSIRYGPYAGYDGHNYWGQGTQVTVSS

SEQ ID NO: 26465 - protein, 121 aa, Artificial Sequence
  Chemically Synthesized
QVQLQESGGGLVQAGGSLRLSCAASGTISDISMGWYRQAPGKEREFVAGANTNYADSVKGRFTISRDNAKNTVYLQMNSLKPEDTAVYYCAVFVAGLDGRQDLDDIDYWYWGQGTQVTVSS

SEQ ID NO: 26466 - protein, 121 aa, Artificial Sequence
  Chemically Synthesized
QVQLQESGGGLVQAGGSLRLSCAASGTIFHSVMGWYRQAPGKERELVAAIGGGTTTNYADSVKGRFTISRDNAKNTVYLQMNSLKPEDTAVYYCAVRLTYDQWDLSPYRYWGQGTQVTVSS

SEQ ID NO: 26467 - protein, 118 aa, Artificial Sequence
  Chemically Synthesized
QVQLQESGGGLVQAGGSLRLSCAASGSISQYTYMGWYRQAPGKEREFVASIGDGGITYYADSVKGRFTISRDNAKNTVYLQMNSLKPEDTAVYYCAVGDHTSDLLQYWGQGTQVTVSS

SEQ ID NO: 26468 - protein, 118 aa, Artificial Sequence
  Chemically Synthesized
QVQLQESGGGLVQAGGSLRLSCAASGSISPSTGMGWYRQAPGKERELVAAISTGGNTYYADSVKGRFTISRDNAKNTVYLQMNSLKPEDTAVYYCAVDDVGKYYHAYWGQGTQVTVSS

SEQ ID NO: 26469 - protein, 121 aa, Artificial Sequence
  Chemically Synthesized
QVQLQESGGGLVQAGGSLRLSCAASGNIFYGLYMGWYRQAPGKERELVATINRGWYYLYADSVKGRFTISRDNAKNTVYLQMNSLKPEDTAVYYCAVSDAYVYVTLLTMYWGQGTQVTVSS

SEQ ID NO: 26470 - protein, 122 aa, Artificial Sequence
  Chemically Synthesized
QVQLQESGGGLVQAGGSLRLSCAASGYIFIVVDMGWYRQAPGKERELVAGISYGGITNYADSVKGRFTISRDNAKNTVYLQMNSLKPEDTAVYYCAVWYVPDPPDSDYLVYWGQGTQVTVSS

SEQ ID NO: 26471 - protein, 118 aa, Artificial Sequence
  Chemically Synthesized
QVQLQESGGGLVQAGGSLRLSCAASGTISYDWDMGWYRQAPGKEREFVASIAEGTITNYADSVKGRFTISRDNAKNTVYLQMNSLKPEDTAVYYCAVPYYIATIHYYWGQGTQVTVSS

SEQ ID NO: 26472 - protein, 115 aa, Artificial Sequence
  Chemically Synthesized
QVQLQESGGGLVQAGGSLRLSCAASGNISWDGSMGWYRQAPGKEREFVASIDNGTSTYYADSVKGRFTISRDNAKNTVYLQMNSLKPEDTAVYYCAYNGPLFGYWGQGTQVTVSS

SEQ ID NO: 26473 - protein, 117 aa, Artificial Sequence
  Chemically Synthesized
QVQLQESGGGLVQAGGSLRLSCAASGNISYTWTMGWYRQAPGKEREFVAGISSVLLPYADSVKGRFTISRDNAKNTVYLQMNSLKPEDTAVYYCAVGYLSDRRHLYWGQGTQVTVSS

SEQ ID NO: 26474 - protein, 118 aa, Artificial Sequence
  Chemically Synthesized
QVQLQESGGGLVQAGGSLRLSCAASGTISDVRIMGWYRQAPGKERELVATISAGANTNYADSVKGRFTISRDNAKNTVYLQMNSLKPEDTAVYYCAVSIQDYLYHPYWGQGTQVTVSS

SEQ ID NO: 26475 - protein, 118 aa, Artificial Sequence
  Chemically Synthesized
QVQLQESGGGLVQAGGSLRLSCAASGSIFPSVDMGWYRQAPGKERELVAAINYGGITYYADSVKGRFTISRDNAKNTVYLQMNSLKPEDTAVYYCAAYSNSDVYFEYWGQGTQVTVSS

SEQ ID NO: 26476 - protein, 122 aa, Artificial Sequence
  Chemically Synthesized
QVQLQESGGGLVQAGGSLRLSCAASGSIFEYVGMGWYRQAPGKERELVAAINYGATTNYADSVKGRFTISRDNAKNTVYLQMNSLKPEDTAVYYCAVDGGGYITVPTTHDYWGQGTQVTVSS

SEQ ID NO: 26477 - protein, 117 aa, Artificial Sequence
  Chemically Synthesized
QVQLQESGGGLVQAGGSLRLSCAASGNISHPYTMGWYRQAPGKEREFVAGINEGGNTNYADSVKGRFTISRDNAKNTVYLQMNSLKPEDTAVYYCAAVFAYLRYYYWGQGTQVTVSS

SEQ ID NO: 26478 - protein, 118 aa, Artificial Sequence
  Chemically Synthesized
QVQLQESGGGLVQAGGSLRLSCAASGTISPSLTMGWYRQAPGKEREFVAGITAGANTNYADSVKGRFTISRDNAKNTVYLQMNSLKPEDTAVYYCAAVYYRDVWHTYWGQGTQVTVSS

SEQ ID NO: 26479 - protein, 126 aa, Artificial Sequence
  Chemically Synthesized
QVQLQESGGGLVQAGGSLRLSCAASGYIFTFYNMGWYRQAPGKERELVAGIGIGTNTYYADSVKGRFTISRDNAKNTVYLQMNSLKPEDTAVYYCAALDIRGVQQDPYTTAYYNYWGQGTQVTVSS

SEQ ID NO: 26480 - protein, 117 aa, Artificial Sequence
  Chemically Synthesized
QVQLQESGGGLVQAGGSLRLSCAASGNISPGFIMGWYRQAPGKERELVASITAGTIIYADSVKGRFTISRDNAKNTVYLQMNSLKPEDTAVYYCAVDVYPNWLLIYWGQGTQVTVSS

SEQ ID NO: 26481 - protein, 118 aa, Artificial Sequence
  Chemically Synthesized
QVQLQESGGGLVQAGGSLRLSCAASGTIFRYQYMGWYRQAPGKEREFVASIDPGGSTYYADSVKGRFTISRDNAKNTVYLQMNSLKPEDTAVYYCAAERAYTGAHYYWGQGTQVTVSS

SEQ ID NO: 26482 - protein, 121 aa, Artificial Sequence
  Chemically Synthesized
QVQLQESGGGLVQAGGSLRLSCAASGNISSVEMGWYRQAPGKEREFVASIAPGTNTNYADSVKGRFTISRDNAKNTVYLQMNSLKPEDTAVYYCAADDGAISGIDSDLGYWGQGTQVTVSS

SEQ ID NO: 26483 - protein, 111 aa, Artificial Sequence
  Chemically Synthesized
QVQLQESGGGLVQAGGSLRLSCAASGTIFGPRVMGWYRQAPGKERELVAAIDTGTSTYYADSVKGRFTISRDNAKNTVYLQMNSLKPEDTAVYYCAYHGYWGQGTQVTVSS

SEQ ID NO: 26484 - protein, 118 aa, Artificial Sequence
  Chemically Synthesized
QVQLQESGGGLVQAGGSLRLSCAASGNIFHDDAMGWYRQAPGKEREFVAGIAYGGTTNYADSVKGRFTISRDNAKNTVYLQMNSLKPEDTAVYYCAAITYYRSYHSYWGQGTQVTVSS

SEQ ID NO: 26485 - protein, 125 aa, Artificial Sequence
  Chemically Synthesized
QVQLQESGGGLVQAGGSLRLSCAASGNIFPPYYMGWYRQAPGKERELVATIGHGSTTYYADSVKGRFTISRDNAKNTVYLQMNSLKPEDTAVYYCAAPYIKRYWDWWAPYSSLYWGQGTQVTVSS

SEQ ID NO: 26486 - protein, 118 aa, Artificial Sequence
  Chemically Synthesized
QVQLQESGGGLVQAGGSLRLSCAASGYISYADSMGWYRQAPGKEREFVATIGVGSTTNYADSVKGRFTISRDNAKNTVYLQMNSLKPEDTAVYYCAAILYRDRWLAYWGQGTQVTVSS

SEQ ID NO: 26487 - protein, 118 aa, Artificial Sequence
  Chemically Synthesized
QVQLQESGGGLVQAGGSLRLSCAASGSISGRTYMGWYRQAPGKERELVASINRGATTNYADSVKGRFTISRDNAKNTVYLQMNSLKPEDTAVYYCAVLRYYQTYHYYWGQGTQVTVSS

SEQ ID NO: 26488 - protein, 122 aa, Artificial Sequence
  Chemically Synthesized
QVQLQESGGGLVQAGGSLRLSCAASGTISPYTSMGWYRQAPGKERELVAAINAGATTNYADSVKGRFTISRDNAKNTVYLQMNSLKPEDTAVYYCAALDRAPDRRGSYYYYWGQGTQVTVSS

SEQ ID NO: 26489 - protein, 118 aa, Artificial Sequence
  Chemically Synthesized
QVQLQESGGGLVQAGGSLRLSCAASGNIFDPRRMGWYRQAPGKEREFVAGITRGGTTNYADSVKGRFTISRDNAKNTVYLQMNSLKPEDTAVYYCAAILYYRYLLYYWGQGTQVTVSS

SEQ ID NO: 26490 - protein, 118 aa, Artificial Sequence
  Chemically Synthesized
QVQLQESGGGLVQAGGSLRLSCAASGNISNYGNMGWYRQAPGKEREFVAAIGYGTNTNYADSVKGRFTISRDNAKNTVYLQMNSLKPEDTAVYYCAVIYRRHFYHWYWGQGTQVTVSS

SEQ ID NO: 26491 - protein, 118 aa, Artificial Sequence
  Chemically Synthesized
QVQLQESGGGLVQAGGSLRLSCAASGTISPIYAMGWYRQAPGKEREFVAAIGGGSNTNYADSVKGRFTISRDNAKNTVYLQMNSLKPEDTAVYYCAALVYRYTYHYYWGQGTQVTVSS

SEQ ID NO: 26492 - protein, 118 aa, Artificial Sequence
  Chemically Synthesized
QVQLQESGGGLVQAGGSLRLSCAASGSISRWWSMGWYRQAPGKERELVAAIASGGNTNYADSVKGRFTISRDNAKNTVYLQMNSLKPEDTAVYYCAAVVRYYRLHGYWGQGTQVTVSS

SEQ ID NO: 26493 - protein, 122 aa, Artificial Sequence
  Chemically Synthesized
QVQLQESGGGLVQAGGSLRLSCAASGSISDRIAMGWYRQAPGKEREFVASITLGGTTNYADSVKGRFTISRDNAKNTVYLQMNSLKPEDTAVYYCAAVVRSYTDRYAYLFYWGQGTQVTVSS

SEQ ID NO: 26494 - protein, 122 aa, Artificial Sequence
  Chemically Synthesized
QVQLQESGGGLVQAGGSLRLSCAASGNISRDRSMGWYRQAPGKERELVASITLGSTTYYADSVKGRFTISRDNAKNTVYLQMNSLKPEDTAVYYCAALSWTLQDTLGRYDYWGQGTQVTVSS

SEQ ID NO: 26495 - protein, 118 aa, Artificial Sequence
  Chemically Synthesized
QVQLQESGGGLVQAGGSLRLSCAASGSISGRWAMGWYRQAPGKERELVASIATGANTNYADSVKGRFTISRDNAKNTVYLQMNSLKPEDTAVYYCAVIYWYNVWHGYWGQGTQVTVSS

SEQ ID NO: 26496 - protein, 118 aa, Artificial Sequence
  Chemically Synthesized
QVQLQESGGGLVQAGGSLRLSCAASGSISDPLSMGWYRQAPGKEREFVAGIGTGGSTNYADSVKGRFTISRDNAKNTVYLQMNSLKPEDTAVYYCAAIVPTHYTHWYWGQGTQVTVSS

SEQ ID NO: 26497 - protein, 122 aa, Artificial Sequence
  Chemically Synthesized
QVQLQESGGGLVQAGGSLRLSCAASGYISGRVSMGWYRQAPGKERELVATIAHGGSTYYADSVKGRFTISRDNAKNTVYLQMNSLKPEDTAVYYCAVLDVYQTLYRVLYGYWGQGTQVTVSS

SEQ ID NO: 26498 - protein, 118 aa, Artificial Sequence
  Chemically Synthesized
QVQLQESGGGLVQAGGSLRLSCAASGTIFPFYRMGWYRQAPGKEREFVATIAIGTNTNYADSVKGRFTISRDNAKNTVYLQMNSLKPEDTAVYYCAVVFIKHGYHGYWGQGTQVTVSS

SEQ ID NO: 26499 - protein, 122 aa, Artificial Sequence
  Chemically Synthesized
QVQLQESGGGLVQAGGSLRLSCAASGNISPPAAMGWYRQAPGKERELVASINDGSITNYADSVKGRFTISRDNAKNTVYLQMNSLKPEDTAVYYCAAIWTGHDGSVVYYGYWGQGTQVTVSS

SEQ ID NO: 26500 - protein, 122 aa, Artificial Sequence
  Chemically Synthesized
QVQLQESGGGLVQAGGSLRLSCAASGYIFPYYAMGWYRQAPGKEREFVAGIARGANTNYADSVKGRFTISRDNAKNTVYLQMNSLKPEDTAVYYCAALRYRRYPYGRDHVYWGQGTQVTVSS

SEQ ID NO: 26501 - protein, 118 aa, Artificial Sequence
  Chemically Synthesized
QVQLQESGGGLVQAGGSLRLSCAASGSIFQGGYMGWYRQAPGKEREFVAAIAHGATTNYADSVKGRFTISRDNAKNTVYLQMNSLKPEDTAVYYCAVVVYEQLYLYYWGQGTQVTVSS

SEQ ID NO: 26502 - protein, 118 aa, Artificial Sequence
  Chemically Synthesized
QVQLQESGGGLVQAGGSLRLSCAASGTIFQRSAMGWYRQAPGKEREFVAAIAYGGTTNYADSVKGRFTISRDNAKNTVYLQMNSLKPEDTAVYYCAAVHQDVQVHYYWGQGTQVTVSS

SEQ ID NO: 26503 - protein, 118 aa, Artificial Sequence
  Chemically Synthesized
QVQLQESGGGLVQAGGSLRLSCAASGNISGAFAMGWYRQAPGKEREFVAAIGQGATTYYADSVKGRFTISRDNAKNTVYLQMNSLKPEDTAVYYCAAVGHRHLWYYYWGQGTQVTVSS

SEQ ID NO: 26504 - protein, 122 aa, Artificial Sequence
  Chemically Synthesized
QVQLQESGGGLVQAGGSLRLSCAASGNISYYTKMGWYRQAPGKEREFVAAISSGSSTNYADSVKGRFTISRDNAKNTVYLQMNSLKPEDTAVYYCAVYYRYLDVAWEHHYYWGQGTQVTVSS

SEQ ID NO: 26505 - protein, 126 aa, Artificial Sequence
  Chemically Synthesized
QVQLQESGGGLVQAGGSLRLSCAASGTISYSGSMGWYRQAPGKEREFVASIAPGSTTYYADSVKGRFTISRDNAKNTVYLQMNSLKPEDTAVYYCAAVGKFYDADKGGRPYLLGYWGQGTQVTVSS

SEQ ID NO: 26506 - protein, 117 aa, Artificial Sequence
  Chemically Synthesized
QVQLQESGGGLVQAGGSLRLSCAASGYIFPLYMGWYRQAPGKEREFVAGINRGGSTNYADSVKGRFTISRDNAKNTVYLQMNSLKPEDTAVYYCAAIEYTNGYHSYWGQGTQVTVSS

SEQ ID NO: 26507 - protein, 126 aa, Artificial Sequence
  Chemically Synthesized
QVQLQESGGGLVQAGGSLRLSCAASGTISDTGYMGWYRQAPGKEREFVAAINAGANTNYADSVKGRFTISRDNAKNTVYLQMNSLKPEDTAVYYCAALYADPEADGRKRWTYLHYWGQGTQVTVSS

SEQ ID NO: 26508 - protein, 118 aa, Artificial Sequence
  Chemically Synthesized
QVQLQESGGGLVQAGGSLRLSCAASGSIFTRFAMGWYRQAPGKEREFVASISSGGSTNYADSVKGRFTISRDNAKNTVYLQMNSLKPEDTAVYYCAALYELIYSHYYWGQGTQVTVSS

SEQ ID NO: 26509 - protein, 118 aa, Artificial Sequence
  Chemically Synthesized
QVQLQESGGGLVQAGGSLRLSCAASGYISPYWGMGWYRQAPGKEREFVAAISYGSSTYYADSVKGRFTISRDNAKNTVYLQMNSLKPEDTAVYYCAVPRRYYPPFGYWGQGTQVTVSS

SEQ ID NO: 26510 - protein, 118 aa, Artificial Sequence
  Chemically Synthesized
QVQLQESGGGLVQAGGSLRLSCAASGYIFRLQYMGWYRQAPGKEREFVASIADGSITNYADSVKGRFTISRDNAKNTVYLQMNSLKPEDTAVYYCAAVYYTAVYHGYWGQGTQVTVSS

SEQ ID NO: 26511 - protein, 118 aa, Artificial Sequence
  Chemically Synthesized
QVQLQESGGGLVQAGGSLRLSCAASGSISRVVYMGWYRQAPGKEREFVASISRGAITYYADSVKGRFTISRDNAKNTVYLQMNSLKPEDTAVYYCAAIARYAAYHGYWGQGTQVTVSS

SEQ ID NO: 26512 - protein, 118 aa, Artificial Sequence
  Chemically Synthesized
QVQLQESGGGLVQAGGSLRLSCAASGTISVILGMGWYRQAPGKERELVASITAGGTTNYADSVKGRFTISRDNAKNTVYLQMNSLKPEDTAVYYCAAVIQRTQHHGYWGQGTQVTVSS

SEQ ID NO: 26513 - protein, 118 aa, Artificial Sequence
  Chemically Synthesized
QVQLQESGGGLVQAGGSLRLSCAASGNISAYLTMGWYRQAPGKEREFVAGINHGGNTNYADSVKGRFTISRDNAKNTVYLQMNSLKPEDTAVYYCAVVYYYYGWHNYWGQGTQVTVSS

SEQ ID NO: 26514 - protein, 118 aa, Artificial Sequence
  Chemically Synthesized
QVQLQESGGGLVQAGGSLRLSCAASGTIFDRDVMGWYRQAPGKEREFVASISGGATTNYADSVKGRFTISRDNAKNTVYLQMNSLKPEDTAVYYCAVLTITRQRHYYWGQGTQVTVSS

SEQ ID NO: 26515 - protein, 122 aa, Artificial Sequence
  Chemically Synthesized
QVQLQESGGGLVQAGGSLRLSCAASGYISSLLAMGWYRQAPGKEREFVAAITGGGSTNYADSVKGRFTISRDNAKNTVYLQMNSLKPEDTAVYYCAAVVTYQYSHTRYYSYWGQGTQVTVSS

SEQ ID NO: 26516 - protein, 118 aa, Artificial Sequence
  Chemically Synthesized
QVQLQESGGGLVQAGGSLRLSCAASGTIFPIHVMGWYRQAPGKEREFVAGITAGGSTNYADSVKGRFTISRDNAKNTVYLQMNSLKPEDTAVYYCAAVVIYDAPYGYWGQGTQVTVSS

SEQ ID NO: 26517 - protein, 122 aa, Artificial Sequence
  Chemically Synthesized
QVQLQESGGGLVQAGGSLRLSCAASGSISGYSTMGWYRQAPGKERELVAAISLGTITNYADSVKGRFTISRDNAKNTVYLQMNSLKPEDTAVYYCAAVHRAERGRYGPHGYWGQGTQVTVSS

SEQ ID NO: 26518 - protein, 122 aa, Artificial Sequence
  Chemically Synthesized
QVQLQESGGGLVQAGGSLRLSCAASGNISPSGAMGWYRQAPGKEREFVAAIDYGTSTNYADSVKGRFTISRDNAKNTVYLQMNSLKPEDTAVYYCAVVDQRSGYTVRWYYYWGQGTQVTVSS

SEQ ID NO: 26519 - protein, 118 aa, Artificial Sequence
  Chemically Synthesized
QVQLQESGGGLVQAGGSLRLSCAASGYISEGYTMGWYRQAPGKEREFVAGIAYGGNTNYADSVKGRFTISRDNAKNTVYLQMNSLKPEDTAVYYCAAVFYKAPYYYYWGQGTQVTVSS

SEQ ID NO: 26520 - protein, 118 aa, Artificial Sequence
  Chemically Synthesized
QVQLQESGGGLVQAGGSLRLSCAASGNISAVAWMGWYRQAPGKEREFVAAIDGGTTTYYADSVKGRFTISRDNAKNTVYLQMNSLKPEDTAVYYCAVITYDWTGLSYWGQGTQVTVSS

SEQ ID NO: 26521 - protein, 122 aa, Artificial Sequence
  Chemically Synthesized
QVQLQESGGGLVQAGGSLRLSCAASGSISGLWAMGWYRQAPGKEREFVATIASGGSTNYADSVKGRFTISRDNAKNTVYLQMNSLKPEDTAVYYCAAVIVATSGNYRYHGYWGQGTQVTVSS

SEQ ID NO: 26522 - protein, 118 aa, Artificial Sequence
  Chemically Synthesized
QVQLQESGGGLVQAGGSLRLSCAASGTIFRWYYMGWYRQAPGKEREFVAGISIGTSTNYADSVKGRFTISRDNAKNTVYLQMNSLKPEDTAVYYCAARYYRAQYLTYWGQGTQVTVSS

SEQ ID NO: 26523 - protein, 118 aa, Artificial Sequence
  Chemically Synthesized
QVQLQESGGGLVQAGGSLRLSCAASGTIFLARVMGWYRQAPGKEREFVAAIDYGTTTNYADSVKGRFTISRDNAKNTVYLQMNSLKPEDTAVYYCAALRYYGGWHYYWGQGTQVTVSS

SEQ ID NO: 26524 - protein, 122 aa, Artificial Sequence
  Chemically Synthesized
QVQLQESGGGLVQAGGSLRLSCAASGYIFWRYTMGWYRQAPGKEREFVAAINGGGITYYADSVKGRFTISRDNAKNTVYLQMNSLKPEDTAVYYCAVYRGRTYYQKWYHVYWGQGTQVTVSS

SEQ ID NO: 26525 - protein, 118 aa, Artificial Sequence
  Chemically Synthesized
QVQLQESGGGLVQAGGSLRLSCAASGNISSNYYMGWYRQAPGKEREFVAAINRGATTNYADSVKGRFTISRDNAKNTVYLQMNSLKPEDTAVYYCAAIANSPQYHYYWGQGTQVTVSS

SEQ ID NO: 26526 - protein, 117 aa, Artificial Sequence
  Chemically Synthesized
QVQLQESGGGLVQAGGSLRLSCAASGYIFVPVAMGWYRQAPGKEREFVAGIGSGSITYYADSVKGRFTISRDNAKNTVYLQMNSLKPEDTAVYYCAVVERIPDLYYWGQGTQVTVSS

SEQ ID NO: 26527 - protein, 122 aa, Artificial Sequence
  Chemically Synthesized
QVQLQESGGGLVQAGGSLRLSCAASGNIFELLAMGWYRQAPGKEREFVAAIGNGTNTNYADSVKGRFTISRDNAKNTVYLQMNSLKPEDTAVYYCAAIRNDDLQEKGYYWYWGQGTQVTVSS

SEQ ID NO: 26528 - protein, 121 aa, Artificial Sequence
  Chemically Synthesized
QVQLQESGGGLVQAGGSLRLSCAASGTISGDDEMGWYRQAPGKEREFVAAIAVGTNTNYADSVKGRFTISRDNAKNTVYLQMNSLKPEDTAVYYCAAGPVYYRRSGFGLYWGQGTQVTVSS

SEQ ID NO: 26529 - protein, 118 aa, Artificial Sequence
  Chemically Synthesized
QVQLQESGGGLVQAGGSLRLSCAASGNIFYYRYMGWYRQAPGKEREFVAGIAYGATTYYADSVKGRFTISRDNAKNTVYLQMNSLKPEDTAVYYCAVGFRYYVPHAYWGQGTQVTVSS

SEQ ID NO: 26530 - protein, 118 aa, Artificial Sequence
  Chemically Synthesized
QVQLQESGGGLVQAGGSLRLSCAASGNISDGVAMGWYRQAPGKEREFVAGINTGATTYYADSVKGRFTISRDNAKNTVYLQMNSLKPEDTAVYYCAAIVRYYGYLYYWGQGTQVTVSS

SEQ ID NO: 26531 - protein, 116 aa, Artificial Sequence
  Chemically Synthesized
QVQLQESGGGLVQAGGSLRLSCAASGSISTAKGMGWYRQAPGKEREFVAAITVGGNTNYADSVKGRFTISRDNAKNTVYLQMNSLKPEDTAVYYCAVYYGRDYYYWGQGTQVTVSS

SEQ ID NO: 26532 - protein, 117 aa, Artificial Sequence
  Chemically Synthesized
QVQLQESGGGLVQAGGSLRLSCAASGNISLDGHMGWYRQAPGKEREFVAAIGLGAITYYADSVKGRFTISRDNAKNTVYLQMNSLKPEDTAVYYCAADPRHLIDSYWGQGTQVTVSS

SEQ ID NO: 26533 - protein, 121 aa, Artificial Sequence
  Chemically Synthesized
QVQLQESGGGLVQAGGSLRLSCAASGTIFVSRIMGWYRQAPGKERELVATIDPGVLPYADSVKGRFTISRDNAKNTVYLQMNSLKPEDTAVYYCAVYDYFITDGRFYYAYWGQGTQVTVSS

SEQ ID NO: 26534 - protein, 118 aa, Artificial Sequence
  Chemically Synthesized
QVQLQESGGGLVQAGGSLRLSCAASGNISQAVQMGWYRQAPGKERELVATISVGSNTYYADSVKGRFTISRDNAKNTVYLQMNSLKPEDTAVYYCAVGYSTYYAHDYWGQGTQVTVSS

SEQ ID NO: 26535 - protein, 111 aa, Artificial Sequence
  Chemically Synthesized
QVQLQESGGGLVQAGGSLRLSCAASGNIFWRGWMGWYRQAPGKERELVAAIGYGSITYYADSVKGRFTISRDNAKNTVYLQMNSLKPEDTAVYYCAGLWYWGQGTQVTVSS

SEQ ID NO: 26536 - protein, 122 aa, Artificial Sequence
  Chemically Synthesized
QVQLQESGGGLVQAGGSLRLSCAASGYISGASGMGWYRQAPGKEREFVAAIDQGSNTNYADSVKGRFTISRDNAKNTVYLQMNSLKPEDTAVYYCAAVNVAKGAANLRHYYWGQGTQVTVSS

SEQ ID NO: 26537 - protein, 118 aa, Artificial Sequence
  Chemically Synthesized
QVQLQESGGGLVQAGGSLRLSCAASGNIFYISYMGWYRQAPGKERELVAAIDAGGNTNYADSVKGRFTISRDNAKNTVYLQMNSLKPEDTAVYYCAAYYVVDTGYWYWGQGTQVTVSS

SEQ ID NO: 26538 - protein, 125 aa, Artificial Sequence
  Chemically Synthesized
QVQLQESGGGLVQAGGSLRLSCAASGTIFSRLMGWYRQAPGKERELVASIGTGSSTNYADSVKGRFTISRDNAKNTVYLQMNSLKPEDTAVYYCAVSTTQPTWGYPRPYDPFYYWGQGTQVTVSS

SEQ ID NO: 26539 - protein, 118 aa, Artificial Sequence
  Chemically Synthesized
QVQLQESGGGLVQAGGSLRLSCAASGSIFYPYVMGWYRQAPGKEREFVAGIGTGGNTNYADSVKGRFTISRDNAKNTVYLQMNSLKPEDTAVYYCAVLFRRARYYPYWGQGTQVTVSS

SEQ ID NO: 26540 - protein, 116 aa, Artificial Sequence
  Chemically Synthesized
QVQLQESGGGLVQAGGSLRLSCAASGSIFPRYTMGWYRQAPGKEREFVAAIARGASTYYADSVKGRFTISRDNAKNTVYLQMNSLKPEDTAVYYCAALGDEYHYYWGQGTQVTVSS

SEQ ID NO: 26541 - protein, 122 aa, Artificial Sequence
  Chemically Synthesized
QVQLQESGGGLVQAGGSLRLSCAASGSIFSRSGMGWYRQAPGKERELVATITLGGITNYADSVKGRFTISRDNAKNTVYLQMNSLKPEDTAVYYCAVGYPFNGWFVFQHRYWGQGTQVTVSS

SEQ ID NO: 26542 - protein, 118 aa, Artificial Sequence
  Chemically Synthesized
QVQLQESGGGLVQAGGSLRLSCAASGSIFDIVVMGWYRQAPGKEREFVAGIDQGGITNYADSVKGRFTISRDNAKNTVYLQMNSLKPEDTAVYYCAVVLLRRQYHYYWGQGTQVTVSS

SEQ ID NO: 26543 - protein, 126 aa, Artificial Sequence
  Chemically Synthesized
QVQLQESGGGLVQAGGSLRLSCAASGSIFRDTYMGWYRQAPGKEREFVASITAGSSTNYADSVKGRFTISRDNAKNTVYLQMNSLKPEDTAVYYCAAVVPSVRGQGGGDGYYHGYWGQGTQVTVSS

SEQ ID NO: 26544 - protein, 117 aa, Artificial Sequence
  Chemically Synthesized
QVQLQESGGGLVQAGGSLRLSCAASGNIFATGAMGWYRQAPGKERELVASITYGTNTNYADSVKGRFTISRDNAKNTVYLQMNSLKPEDTAVYYCAVIRTGYGHRYWGQGTQVTVSS

SEQ ID NO: 26545 - protein, 118 aa, Artificial Sequence
  Chemically Synthesized
QVQLQESGGGLVQAGGSLRLSCAASGSIFGGARMGWYRQAPGKERELVASISDGASTNYADSVKGRFTISRDNAKNTVYLQMNSLKPEDTAVYYCAAGDVGSQQLYYWGQGTQVTVSS

SEQ ID NO: 26546 - protein, 118 aa, Artificial Sequence
  Chemically Synthesized
QVQLQESGGGLVQAGGSLRLSCAASGSIFYYSDMGWYRQAPGKEREFVAAIGTGAITYYADSVKGRFTISRDNAKNTVYLQMNSLKPEDTAVYYCAVVGLGDAQYGYWGQGTQVTVSS

SEQ ID NO: 26547 - protein, 122 aa, Artificial Sequence
  Chemically Synthesized
QVQLQESGGGLVQAGGSLRLSCAASGNISDSTYMGWYRQAPGKEREFVAGIAYGGNTNYADSVKGRFTISRDNAKNTVYLQMNSLKPEDTAVYYCAVGDSYDGRYLTAYFYWGQGTQVTVSS

SEQ ID NO: 26548 - protein, 126 aa, Artificial Sequence
  Chemically Synthesized
QVQLQESGGGLVQAGGSLRLSCAASGTIFGWPAMGWYRQAPGKEREFVASIDGGSITNYADSVKGRFTISRDNAKNTVYLQMNSLKPEDTAVYYCAVRYVDVGPPGTYARYAYGYWGQGTQVTVSS

SEQ ID NO: 26549 - protein, 113 aa, Artificial Sequence
  Chemically Synthesized
QVQLQESGGGLVQAGGSLRLSCAASGTIMGWYRQAPGKEREFVATIAPGSSTYYADSVKGRFTISRDNAKNTVYLQMNSLKPEDTAVYYCAVHDAGNVIHTYWGQGTQVTVSS

SEQ ID NO: 26550 - protein, 122 aa, Artificial Sequence
  Chemically Synthesized
QVQLQESGGGLVQAGGSLRLSCAASGSISGLKTMGWYRQAPGKEREFVAAIAGGTNTNYADSVKGRFTISRDNAKNTVYLQMNSLKPEDTAVYYCAVQVWYTAGYRTPFPYWGQGTQVTVSS

SEQ ID NO: 26551 - protein, 122 aa, Artificial Sequence
  Chemically Synthesized
QVQLQESGGGLVQAGGSLRLSCAASGNIFSYGVMGWYRQAPGKERELVATIGYGGSTNYADSVKGRFTISRDNAKNTVYLQMNSLKPEDTAVYYCAVTHYYSRFGGYTYGYWGQGTQVTVSS

SEQ ID NO: 26552 - protein, 117 aa, Artificial Sequence
  Chemically Synthesized
QVQLQESGGGLVQAGGSLRLSCAASGNISVFQSMGWYRQAPGKEREFVAGIDVGANTNYADSVKGRFTISRDNAKNTVYLQMNSLKPEDTAVYYCAADTYPIGQHYWGQGTQVTVSS

SEQ ID NO: 26553 - protein, 118 aa, Artificial Sequence
  Chemically Synthesized
QVQLQESGGGLVQAGGSLRLSCAASGNISYVSYMGWYRQAPGKERELVAAINAGTNTYYADSVKGRFTISRDNAKNTVYLQMNSLKPEDTAVYYCAVRGESDHLHYYWGQGTQVTVSS

SEQ ID NO: 26554 - protein, 118 aa, Artificial Sequence
  Chemically Synthesized
QVQLQESGGGLVQAGGSLRLSCAASGTISHTYFMGWYRQAPGKEREFVATIGIGTITNYADSVKGRFTISRDNAKNTVYLQMNSLKPEDTAVYYCAALSIYALYLGYWGQGTQVTVSS

SEQ ID NO: 26555 - protein, 118 aa, Artificial Sequence
  Chemically Synthesized
QVQLQESGGGLVQAGGSLRLSCAASGNISYVSYMGWYRQAPGKERELVAAIGWGASTYYADSVKGRFTISRDNAKNTVYLQMNSLKPEDTAVYYCAVRGESDHLHYYWGQGTQVTVSS

SEQ ID NO: 26556 - protein, 117 aa, Artificial Sequence
  Chemically Synthesized
QVQLQESGGGLVQAGGSLRLSCAASGSISGWDIMGWYRQAPGKERELVAAIGFGAITNYADSVKGRFTISRDNAKNTVYLQMNSLKPEDTAVYYCAAYVRVFDYRYWGQGTQVTVSS

SEQ ID NO: 26557 - protein, 122 aa, Artificial Sequence
  Chemically Synthesized
QVQLQESGGGLVQAGGSLRLSCAASGSIFWGADMGWYRQAPGKEREFVAGITDGSITNYADSVKGRFTISRDNAKNTVYLQMNSLKPEDTAVYYCAVYTVIFYQAGYGYIYWGQGTQVTVSS

SEQ ID NO: 26558 - protein, 118 aa, Artificial Sequence
  Chemically Synthesized
QVQLQESGGGLVQAGGSLRLSCAASGSISGWDIMGWYRQAPGKERELVAAIGFGAITNYADSVKGRFTISRDNAKNTVYLQMNSLKPEDTAVYYCAVRGESDHLHYYWGQGTQVTVSS

SEQ ID NO: 26559 - protein, 126 aa, Artificial Sequence
  Chemically Synthesized
QVQLQESGGGLVQAGGSLRLSCAASGSIFYVTTMGWYRQAPGKEREFVAAITPGASTNYADSVKGRFTISRDNAKNTVYLQMNSLKPEDTAVYYCAVVEVYYRRDYYRYSHGLPYWGQGTQVTVSS

SEQ ID NO: 26560 - protein, 118 aa, Artificial Sequence
  Chemically Synthesized
QVQLQESGGGLVQAGGSLRLSCAASGNISTDGGMGWYRQAPGKERELVAGINRGGITYYADSVKGRFTISRDNAKNTVYLQMNSLKPEDTAVYYCAVSRNVVLLFSYWGQGTQVTVSS

SEQ ID NO: 26561 - protein, 117 aa, Artificial Sequence
  Chemically Synthesized
QVQLQESGGGLVQAGGSLRLSCAASGSIYTYDTMGWYRQAPGKERELVASIDYGSSTYYADSVKGRFTISRDNAKNTVYLQMNSLKPEDTAVYYCAADMLTTSFIYWGQGTQVTVSS

SEQ ID NO: 26562 - protein, 126 aa, Artificial Sequence
  Chemically Synthesized
QVQLQESGGGLVQAGGSLRLSCAASGTIFPSGYMGWYRQAPGKEREFVAAINNGTTTYYADSVKGRFTISRDNAKNTVYLQMNSLKPEDTAVYYCAVGYPYRGPLVTATFSYLDYWGQGTQVTVSS

SEQ ID NO: 26563 - protein, 109 aa, Artificial Sequence
  Chemically Synthesized
QVQLQESGGGLVQAGGSLRLSCAASGSIFDTGEMGWYRQAPGKEREFVASISDGTSTYYADSVKGRFTISRDNAKNTVYLQMNSLKPEDTAVYYCAVYWGQGTQVTVSS

SEQ ID NO: 26564 - protein, 117 aa, Artificial Sequence
  Chemically Synthesized
QVQLQESGGGLVQAGGSLRLSCAASGTISAPNEDMGWYRQAPGKERELVAGISDGSITNYADSVKGRFTISRDNAKNTVYLQMNSLKPEDTAVYYCAVAEDVPHTYWGQGTQVTVSS

SEQ ID NO: 26565 - protein, 123 aa, Artificial Sequence
  Chemically Synthesized
QVQLQESGGGLVQAGGSLRLSCAASGSIFHGSMGWYRQAPGKEREFVAGISTGSTTYYADSVKGRFTISRDNAKNTVYLQMNSLKPEDTAVYYCAARYTGTDKVRDPSDHSYWGQGTQVTVSS

SEQ ID NO: 26566 - protein, 121 aa, Artificial Sequence
  Chemically Synthesized
QVQLQESGGGLVQAGGSLRLSCAASGNIFYDYVMGWYRQAPGKERELLPVLMTVLLPYADSVKGRFTISRDNAKNTVYLQMNSLKPEDTAVYYCAANDWNNFSDHYVFAYWGQGTQVTVSS

SEQ ID NO: 26567 - protein, 122 aa, Artificial Sequence
  Chemically Synthesized
QVQLQESGGGLVQAGGSLRLSCAASGTISLSYDMGWYRQAPGKERELVAGISLGTITYYADSVKGRFTISRDNAKNTVYLQMNSLKPEDTAVYYCAARYYDVTLFYYGHAYWGQGTQVTVSS

SEQ ID NO: 26568 - protein, 122 aa, Artificial Sequence
  Chemically Synthesized
QVQLQESGGGLVQAGGSLRLSCAASGSIFFQRDMGWYRQAPGKERELVASIGNGSSTYYADSVKGRFTISRDNAKNTVYLQMNSLKPEDTAVYYCAVWGGGNQVIDGYHRYWGQGTQVTVSS

SEQ ID NO: 26569 - protein, 117 aa, Artificial Sequence
  Chemically Synthesized
QVQLQESGGGLVQAGGSLRLSCAASGTIFDAYQMGWYRQAPGKEREFVAAINRGAITYADSVKGRFTISRDNAKNTVYLQMNSLKPEDTAVYYCAADQLYNPYFVYWGQGTQVTVSS

SEQ ID NO: 26570 - protein, 122 aa, Artificial Sequence
  Chemically Synthesized
QVQLQESGGGLVQAGGSLRLSCAASGKFLVLLMGWYRQAPGKERELLPVLMVVVLPYADSVKGRFTISRDNAKNTVYLQMNSLKPEDTAVYYCAAVYTIDRIRSISVQFVYWGQGTQVTVSS

SEQ ID NO: 26571 - protein, 127 aa, Artificial Sequence
  Chemically Synthesized
QVQLQESGGGLVQAGGSLRLSCAASGYISVVYTYMGWYRQAPGKEREFVATITAGGSTYYADSVKGRFTISRDNAKNTVYLQMNSLKPEDTAVYYCAADDYGYTWDYNYAGDVLPYWGQGTQVTVSS

SEQ ID NO: 26572 - protein, 120 aa, Artificial Sequence
  Chemically Synthesized
QVQLQESGGGLVQAGGSLRLSCAASGTISKLYTMGWYRQAPGKEREFVAGITSGGTTYYADSVKGRFTISRDNAKNTVYLQMNSLKPEDTAVYYCAVEYNYWRYSKHTYWGQGTQVTVSS

SEQ ID NO: 26573 - protein, 117 aa, Artificial Sequence
  Chemically Synthesized
QVQLQESGGGLVQAGGSLRLSCAASGTISYSSQMGWYRQAPGKEREFVAVLLTVVLPYADSVKGRFTISRDNAKNTVYLQMNSLKPEDTAVYYCAVQGQGGIYFYYWGQGTQVTVSS

SEQ ID NO: 26574 - protein, 118 aa, Artificial Sequence
  Chemically Synthesized
QVQLQESGGGLVQAGGSLRLSCAASGSIFGGSAMGWYRQAPGKERELVASIDRGGSTYYADSVKGRFTISRDNAKNTVYLQMNSLKPEDTAVYYCAALYPYYATHTYWGQGTQVTVSS

SEQ ID NO: 26575 - protein, 122 aa, Artificial Sequence
  Chemically Synthesized
QVQLQESGGGLVQAGGSLRLSCAASGSISDTYHMGWYRQAPGKEREFVASIAPGGITYYADSVKGRFTISRDNAKNTVYLQMNSLKPEDTAVYYCAAYYDDLAYLVEDFYYWGQGTQVTVSS

SEQ ID NO: 26576 - protein, 122 aa, Artificial Sequence
  Chemically Synthesized
QVQLQESGGGLVQAGGSLRLSCAASGSIFLSSYMGWYRQAPGKEREFVASIGYGTNTYYADSVKGRFTISRDNAKNTVYLQMNSLKPEDTAVYYCAARGDSLRSSPYEFDYWGQGTQVTVSS

SEQ ID NO: 26577 - protein, 118 aa, Artificial Sequence
  Chemically Synthesized
QVQLQESGGGLVQAGGSLRLSCAASGNISGLYLMGWYRQAPGKERELVASIALGTSTNYADSVKGRFTISRDNAKNTVYLQMNSLKPEDTAVYYCAVLQLTDSTHQYWGQGTQVTVSS

SEQ ID NO: 26578 - protein, 126 aa, Artificial Sequence
  Chemically Synthesized
QVQLQESGGGLVQAGGSLRLSCAASGTIFTYDDMGWYRQAPGKEREFVAAITTGGSTNYADSVKGRFTISRDNAKNTVYLQMNSLKPEDTAVYYCAVPLDELRGDRVDDAASYYYWGQGTQVTVSS

SEQ ID NO: 26579 - protein, 121 aa, Artificial Sequence
  Chemically Synthesized
QVQLQESGGGLVQAGGSLRLSCAASGYIFDLRGMGWYRQAPGKERELVASITRGGNTNYADSVKGRFTISRDNAKNTVYLQMNSLKPEDTAVYYCAVQYSTVRTSCSTFYWGQGTQVTVSS

SEQ ID NO: 26580 - protein, 126 aa, Artificial Sequence
  Chemically Synthesized
QVQLQESGGGLVQAGGSLRLSCAASGTIFYAGRMGWYRQAPGKERELVAAINAGGSTYYADSVKGRFTISRDNAKNTVYLQMNSLKPEDTAVYYCAVHIGVYLYGWRSPEPVFAYWGQGTQVTVSS

SEQ ID NO: 26581 - protein, 115 aa, Artificial Sequence
  Chemically Synthesized
QVQLQESGGGLVQAGGSLRLSCAASGYIFWPDYMGWYRQAPGKEREFVATINYGNYADSVKGRFTISRDNAKNTVYLQMNSLKPEDTAVYYCAAIGGGRNPYPYWGQGTQVTVSS

SEQ ID NO: 26582 - protein, 117 aa, Artificial Sequence
  Chemically Synthesized
QVQLQESGGGLVQAGGSLRLSCAASGNISSLLMGWYRQAPGKEREFVAAIGYGSNTNYADSVKGRFTISRDNAKNTVYLQMNSLKPEDTAVYYCAVGRTHYTQFLYWGQGTQVTVSS

SEQ ID NO: 26583 - protein, 117 aa, Artificial Sequence
  Chemically Synthesized
QVQLQESGGGLVQAGGSLRLSCAASGNISLRNDMGWYRQAPGKERELVASIDYGTITNYADSVKGRFTISRDNAKNTVYLQMNSLKPEDTAVYYCAARLQDSTLFYWGQGTQVTVSS

SEQ ID NO: 26584 - protein, 126 aa, Artificial Sequence
  Chemically Synthesized
QVQLQESGGGLVQAGGSLRLSCAASGTIFEGKYMGWYRQAPGKEREFVATIAPGGITYYADSVKGRFTISRDNAKNTVYLQMNSLKPEDTAVYYCAVGYTIRGSQDYYGHIAFEYWGQGTQVTVSS

SEQ ID NO: 26585 - protein, 126 aa, Artificial Sequence
  Chemically Synthesized
QVQLQESGGGLVQAGGSLRLSCAASGSIFRRGGMGWYRQAPGKERELVAAITDGTSTYYADSVKGRFTISRDNAKNTVYLQMNSLKPEDTAVYYCAVLPDYYRVSENVRIIPYPYWGQGTQVTVSS

SEQ ID NO: 26586 - protein, 118 aa, Artificial Sequence
  Chemically Synthesized
QVQLQESGGGLVQAGGSLRLSCAASGNISTRYPMGWYRQAPGKEREFVAAIGDGGITYYADSVKGRFTISRDNAKNTVYLQMNSLKPEDTAVYYCAVNESQTATLRYWGQGTQVTVSS

SEQ ID NO: 26587 - protein, 118 aa, Artificial Sequence
  Chemically Synthesized
QVQLQESGGGLVQAGGSLRLSCAASGTISYPGEMGWYRQAPGKERELVAAIDPGGSTNYADSVKGRFTISRDNAKNTVYLQMNSLKPEDTAVYYCAVATADWNGYGYWGQGTQVTVSS

SEQ ID NO: 26588 - protein, 118 aa, Artificial Sequence
  Chemically Synthesized
QVQLQESGGGLVQAGGSLRLSCAASGNISLDDDMGWYRQAPGKEREFVATISVGGNTNYADSVKGRFTISRDNAKNTVYLQMNSLKPEDTAVYYCAAWTVSLSVLYYWGQGTQVTVSS

SEQ ID NO: 26589 - protein, 126 aa, Artificial Sequence
  Chemically Synthesized
QVQLQESGGGLVQAGGSLRLSCAASGSIFYVWIMGWYRQAPGKEREFVASIAVGGSTNYADSVKGRFTISRDNAKNTVYLQMNSLKPEDTAVYYCAAYGNDESLEFSWSAAGHIYWGQGTQVTVSS

SEQ ID NO: 26590 - protein, 117 aa, Artificial Sequence
  Chemically Synthesized
QVQLQESGGGLVQAGGSLRLSCAASGNISSWSTMGWYRQAPGKEREFVAGIAFGSTTNYADSVKGRFTISRDNAKNTVYLQMNSLKPEDTAVYYCAVSTLTTTTLYWGQGTQVTVSS

SEQ ID NO: 26591 - protein, 117 aa, Artificial Sequence
  Chemically Synthesized
QVQLQESGGGLVQAGGSLRLSCAASGTISPRADMGWYRQAPGKERELVAGITDGANTNYADSVKGRFTISRDNAKNTVYLQMNSLKPEDTAVYYCAAYEITDRQLYWGQGTQVTVSS

SEQ ID NO: 26592 - protein, 119 aa, Artificial Sequence
  Chemically Synthesized
QVQLQESGGGLVQAGGSLRLSCAASGSISPAPFMGWYRQAPGKERELVATIAAGATTYYADSVKGRFTISRDNAKNTVYLQMNSLKPEDTAVYYCAALSISTSTVTIYWGQGTQVTVSS

SEQ ID NO: 26593 - protein, 121 aa, Artificial Sequence
  Chemically Synthesized
QVQLQESGGGLVQAGGSLRLSCAASGYIFYVSSMGWYRQAPGKERELVASIAYGGSTYYADSVKGRFTISRDNAKNTVYLQMNSLKPEDTAVYYCAAYSAYNNYVQRLSYWGQGTQVTVSS

SEQ ID NO: 26594 - protein, 118 aa, Artificial Sequence
  Chemically Synthesized
QVQLQESGGGLVQAGGSLRLSCAASGYISGRVPMGWYRQAPGKEREFVATISRGGTTNYADSVKGRFTISRDNAKNTVYLQMNSLKPEDTAVYYCAAIGFWTRSFSYWGQGTQVTVSS

SEQ ID NO: 26595 - protein, 122 aa, Artificial Sequence
  Chemically Synthesized
QVQLQESGGGLVQAGGSLRLSCAASGSISWYRYMGWYRQAPGKEREFVAGISKGTSTNYADSVKGRFTISRDNAKNTVYLQMNSLKPEDTAVYYCAATVWRLAATRLDLVYWGQGTQVTVSS

SEQ ID NO: 26596 - protein, 126 aa, Artificial Sequence
  Chemically Synthesized
QVQLQESGGGLVQAGGSLRLSCAASGTIFTYDIMGWYRQAPGKEREFVAGISRGSITYYADSVKGRFTISRDNAKNTVYLQMNSLKPEDTAVYYCAVYRDIGRFSWAVPEADLYYWGQGTQVTVSS

SEQ ID NO: 26597 - protein, 122 aa, Artificial Sequence
  Chemically Synthesized
QVQLQESGGGLVQAGGSLRLSCAASGNIFYGPYMGWYRQAPGKERELVAAISVGATTYYADSVKGRFTISRDNAKNTVYLQMNSLKPEDTAVYYCAARRYLQPPWDLTHRYWGQGTQVTVSS

SEQ ID NO: 26598 - protein, 117 aa, Artificial Sequence
  Chemically Synthesized
QVQLQESGGGLVQAGGSLRLSCAASGTISLLSRMGWYRQAPGKEREFVAAIATVVVPYADSVKGRFTISRDNAKNTVYLQMNSLKPEDTAVYYCAVKPYRPGYLAYWGQGTQVTVSS

SEQ ID NO: 26599 - protein, 122 aa, Artificial Sequence
  Chemically Synthesized
QVQLQESGGGLVQAGGSLRLSCAASGYISRYTTMGWYRQAPGKEREFVAAIGIGATTYYADSVKGRFTISRDNAKNTVYLQMNSLKPEDTAVYYCAAFPAVRRGKFDRFPYWGQGTQVTVSS

SEQ ID NO: 26600 - protein, 118 aa, Artificial Sequence
  Chemically Synthesized
QVQLQESGGGLVQAGGSLRLSCAASGYISYYDYMGWYRQAPGKERELVAGIDYGGITYYADSVKGRFTISRDNAKNTVYLQMNSLKPEDTAVYYCAVATVWRDAFLYWGQGTQVTVSS

SEQ ID NO: 26601 - protein, 126 aa, Artificial Sequence
  Chemically Synthesized
QVQLQESGGGLVQAGGSLRLSCAASGTIFGTSDMGWYRQAPGKEREFVATINPGSSTNYADSVKGRFTISRDNAKNTVYLQMNSLKPEDTAVYYCAVYAYSYDGHYVYRYDPLTYWGQGTQVTVSS

SEQ ID NO: 26602 - protein, 121 aa, Artificial Sequence
  Chemically Synthesized
QVQLQESGGGLVQAGGSLRLSCAASGSISPRYLMGWYRQAPGKERELVAAINQGTVPYADSVKGRFTISRDNAKNTVYLQMNSLKPEDTAVYYCAVTDYFDTDYPDTYGYWGQGTQVTVSS

SEQ ID NO: 26603 - protein, 122 aa, Artificial Sequence
  Chemically Synthesized
QVQLQESGGGLVQAGGSLRLSCAASGTISYGDYMGWYRQAPGKERELVASIGGGGSTYYADSVKGRFTISRDNAKNTVYLQMNSLKPEDTAVYYCAVEGLDYYRGGHRLSYWGQGTQVTVSS

SEQ ID NO: 26604 - protein, 118 aa, Artificial Sequence
  Chemically Synthesized
QVQLQESGGGLVQAGGSLRLSCAASGYISPVDVMGWYRQAPGKEREFVATISWGTSTYYADSVKGRFTISRDNAKNTVYLQMNSLKPEDTAVYYCAVLPFLRYNFLYWGQGTQVTVSS

SEQ ID NO: 26605 - protein, 126 aa, Artificial Sequence
  Chemically Synthesized
QVQLQESGGGLVQAGGSLRLSCAASGSISLPYEMGWYRQAPGKERELVAAITTGGITNYADSVKGRFTISRDNAKNTVYLQMNSLKPEDTAVYYCAVLDLAYQLLYRYYGGKHPYWGQGTQVTVSS

SEQ ID NO: 26606 - protein, 120 aa, Artificial Sequence
  Chemically Synthesized
QVQLQESGGGLVQAGGSLRLSCAASGNIFSTVMGWYRQAPGKERELVAGIGLGTSTYADSVKGRFTISRDNAKNTVYLQMNSLKPEDTAVYYCAADLVEYFGWVAVHKYWGQGTQVTVSS

SEQ ID NO: 26607 - protein, 118 aa, Artificial Sequence
  Chemically Synthesized
QVQLQESGGGLVQAGGSLRLSCAASGNISRTAYMGWYRQAPGKEREFVASISDGTNTNYADSVKGRFTISRDNAKNTVYLQMNSLKPEDTAVYYCAATHLSDLFHQYWGQGTQVTVSS

SEQ ID NO: 26608 - protein, 122 aa, Artificial Sequence
  Chemically Synthesized
QVQLQESGGGLVQAGGSLRLSCAASGYISTRDVMGWYRQAPGKEREFVAGIGYGASTYYADSVKGRFTISRDNAKNTVYLQMNSLKPEDTAVYYCAVRGRRPDRYVEDHAYWGQGTQVTVSS

SEQ ID NO: 26609 - protein, 125 aa, Artificial Sequence
  Chemically Synthesized
QVQLQESGGGLVQAGGSLRLSCAASGTIFRYDDMGWYRQAPGKERELVAGIDDGSNTYYADSVKGRFTISRDNAKNTVYLQMNSLKPEDTAVYYCAVSVRDPLGEYSVSTTLIYWGQGTQVTVSS

SEQ ID NO: 26610 - protein, 126 aa, Artificial Sequence
  Chemically Synthesized
QVQLQESGGGLVQAGGSLRLSCAASGYIFAPGAMGWYRQAPGKERELVATIGVGSITYYADSVKGRFTISRDNAKNTVYLQMNSLKPEDTAVYYCAVLPQNRYYTIWKGWWYLAYWGQGTQVTVSS

SEQ ID NO: 26611 - protein, 113 aa, Artificial Sequence
  Chemically Synthesized
QVQLQESGGGLVQAGGSLRLSCAASGYIFAISYMGWYRQAPGKEREFVATIDYGANTYYADSVKGRFTISRDNAKNTVYLQMNSLKPEDTAVYYCAVDPLWYWGQGTQVTVSS

SEQ ID NO: 26612 - protein, 122 aa, Artificial Sequence
  Chemically Synthesized
QVQLQESGGGLVQAGGSLRLSCAASGTISSWTSMGWYRQAPGKEREFVATITPGAITYYADSVKGRFTISRDNAKNTVYLQMNSLKPEDTAVYYCAVRRYDATPRVPLLYYWGQGTQVTVSS

SEQ ID NO: 26613 - protein, 122 aa, Artificial Sequence
  Chemically Synthesized
QVQLQESGGGLVQAGGSLRLSCAASGYIFFNRSMGWYRQAPGKERELVAAIGLGSNTYYADSVKGRFTISRDNAKNTVYLQMNSLKPEDTAVYYCAVGPQILYNFVYLHWYWGQGTQVTVSS

SEQ ID NO: 26614 - protein, 118 aa, Artificial Sequence
  Chemically Synthesized
QVQLQESGGGLVQAGGSLRLSCAASGSISVWLNMGWYRQAPGKERELVASISYGTNTNYADSVKGRFTISRDNAKNTVYLQMNSLKPEDTAVYYCAVVYGDPGGLQYWGQGTQVTVSS

SEQ ID NO: 26615 - protein, 122 aa, Artificial Sequence
  Chemically Synthesized
QVQLQESGGGLVQAGGSLRLSCAASGNISADIYMGWYRQAPGKEREFVAGIDYGTITYYADSVKGRFTISRDNAKNTVYLQMNSLKPEDTAVYYCAADYLDAYYSLDGFYYWGQGTQVTVSS

SEQ ID NO: 26616 - protein, 118 aa, Artificial Sequence
  Chemically Synthesized
QVQLQESGGGLVQAGGSLRLSCAASGNISIGPAMGWYRQAPGKERELVAAINYGGSTYYADSVKGRFTISRDNAKNTVYLQMNSLKPEDTAVYYCAVFDQLFGPHFYWGQGTQVTVSS

SEQ ID NO: 26617 - protein, 125 aa, Artificial Sequence
  Chemically Synthesized
QVQLQESGGGLVQAGGSLRLSCAASGNIFNYSYMGWYRQAPGKERELLPLLMVVVLPYADSVKGRFTISRDNAKNTVYLQMNSLKPEDTAVYYCAVFNPEVLGTYRSPYDYLSYWGQGTQVTVSS

SEQ ID NO: 26618 - protein, 124 aa, Artificial Sequence
  Chemically Synthesized
QVQLQESGGGLVQAGGSLRLSCAASGTIFDKDGMGWYRQAPGKEREFVAAITSGSTNYADSVKGRFTISRDNAKNTVYLQMNSLKPEDTAVYYCAAFQRESAGGSLITLCTIYWGQGTQVTVSS

SEQ ID NO: 26619 - protein, 115 aa, Artificial Sequence
  Chemically Synthesized
QVQLQESGGGLVQAGGSLRLSCAASGYISITGGMGWYRQAPGKEREFVAIMVLLPYADSVKGRFTISRDNAKNTVYLQMNSLKPEDTAVYYCAVGVDPIRDHPYWGQGTQVTVSS

SEQ ID NO: 26620 - protein, 122 aa, Artificial Sequence
  Chemically Synthesized
QVQLQESGGGLVQAGGSLRLSCAASGTIFVLLDMGWYRQAPGKERELVASITDGATTYYADSVKGRFTISRDNAKNTVYLQMNSLKPEDTAVYYCAATYYHSVRPDVTYYYWGQGTQVTVSS

SEQ ID NO: 26621 - protein, 121 aa, Artificial Sequence
  Chemically Synthesized
QVQLQESGGGLVQAGGSLRLSCAASGTISSWYRMGWYRQAPGKERELVASINQVVVPYADSVKGRFTISRDNAKNTVYLQMNSLKPEDTAVYYCAVTSRYSSTPYSEHLYWGQGTQVTVSS

SEQ ID NO: 26622 - protein, 118 aa, Artificial Sequence
  Chemically Synthesized
QVQLQESGGGLVQAGGSLRLSCAASGNISRVNSMGWYRQAPGKERELVAGIANGTITYYADSVKGRFTISRDNAKNTVYLQMNSLKPEDTAVYYCAVGASNGLVHVYWGQGTQVTVSS

SEQ ID NO: 26623 - protein, 121 aa, Artificial Sequence
  Chemically Synthesized
QVQLQESGGGLVQAGGSLRLSCAASGNISGDITMGWYRQAPGKERELVASIDSVVLPYADSVKGRFTISRDNAKNTVYLQMNSLKPEDTAVYYCAAQVRIYPIRVSYLYYWGQGTQVTVSS

SEQ ID NO: 26624 - protein, 118 aa, Artificial Sequence
  Chemically Synthesized
QVQLQESGGGLVQAGGSLRLSCAASGTISRDDIMGWYRQAPGKERELVAGIDFGSITNYADSVKGRFTISRDNAKNTVYLQMNSLKPEDTAVYYCAANSGPRTNHPYWGQGTQVTVSS

SEQ ID NO: 26625 - protein, 122 aa, Artificial Sequence
  Chemically Synthesized
QVQLQESGGGLVQAGGSLRLSCAASGNIFYITPMGWYRQAPGKERELVAAIDLGTITYYADSVKGRFTISRDNAKNTVYLQMNSLKPEDTAVYYCAVDPPSDAKTSQGHVYWGQGTQVTVSS

SEQ ID NO: 26626 - protein, 118 aa, Artificial Sequence
  Chemically Synthesized
QVQLQESGGGLVQAGGSLRLSCAASGTIFYLDYMGWYRQAPGKEREFVASIGAGAITYYADSVKGRFTISRDNAKNTVYLQMNSLKPEDTAVYYCAVNFWTLLGLSYWGQGTQVTVSS

SEQ ID NO: 26627 - protein, 118 aa, Artificial Sequence
  Chemically Synthesized
QVQLQESGGGLVQAGGSLRLSCAASGYISNLYGMGWYRQAPGKEREFVAGIDDGGSTYYADSVKGRFTISRDNAKNTVYLQMNSLKPEDTAVYYCAVDSNSHYWLSYWGQGTQVTVSS

SEQ ID NO: 26628 - protein, 122 aa, Artificial Sequence
  Chemically Synthesized
QVQLQESGGGLVQAGGSLRLSCAASGSIFDGKSMGWYRQAPGKEREFVAAITFGTSTYYADSVKGRFTISRDNAKNTVYLQMNSLKPEDTAVYYCAARQWYGARYLERLDYWGQGTQVTVSS

SEQ ID NO: 26629 - protein, 110 aa, Artificial Sequence
  Chemically Synthesized
QVQLQESGGGLVQAGGSLRLSCAASGSIFREYRMGWYRQAPGKERELVATITGGATTNYADSVKGRFTISRDNAKNTVYLQMNSLKPEDTAVYYCAAWYWGQGTQVTVSS

SEQ ID NO: 26630 - protein, 118 aa, Artificial Sequence
  Chemically Synthesized
QVQLQESGGGLVQAGGSLRLSCAASGSISRTYGMGWYRQAPGKERELVAAITGGGSTYYADSVKGRFTISRDNAKNTVYLQMNSLKPEDTAVYYCAVQTYKYDYYQYWGQGTQVTVSS

SEQ ID NO: 26631 - protein, 118 aa, Artificial Sequence
  Chemically Synthesized
QVQLQESGGGLVQAGGSLRLSCAASGYIFRVPSMGWYRQAPGKERELVASIDVGGSTNYADSVKGRFTISRDNAKNTVYLQMNSLKPEDTAVYYCAAYTRFVWTHYYWGQGTQVTVSS

SEQ ID NO: 26632 - protein, 122 aa, Artificial Sequence
  Chemically Synthesized
QVQLQESGGGLVQAGGSLRLSCAASGNISYYEYMGWYRQAPGKERELVATIDGGTITYYADSVKGRFTISRDNAKNTVYLQMNSLKPEDTAVYYCAAKYDRDDGDHVNYAYWGQGTQVTVSS

SEQ ID NO: 26633 - protein, 117 aa, Artificial Sequence
  Chemically Synthesized
QVQLQESGGGLVQAGGSLRLSCAASGNIFPGWYMGWYRQAPGKEREFVAGIAAGSTTNYADSVKGRFTISRDNAKNTVYLQMNSLKPEDTAVYYCAVSLLRRYLFYWGQGTQVTVSS

SEQ ID NO: 26634 - protein, 122 aa, Artificial Sequence
  Chemically Synthesized
QVQLQESGGGLVQAGGSLRLSCAASGTISYYIIMGWYRQAPGKERELVAAIDIGTITNYADSVKGRFTISRDNAKNTVYLQMNSLKPEDTAVYYCAVIDIPTTGYADDHDYWGQGTQVTVSS

SEQ ID NO: 26635 - protein, 118 aa, Artificial Sequence
  Chemically Synthesized
QVQLQESGGGLVQAGGSLRLSCAASGNIFSVGLMGWYRQAPGKEREFVATISFGGNTNYADSVKGRFTISRDNAKNTVYLQMNSLKPEDTAVYYCAATQSFDRILYYWGQGTQVTVSS

SEQ ID NO: 26636 - protein, 122 aa, Artificial Sequence
  Chemically Synthesized
QVQLQESGGGLVQAGGSLRLSCAASGSISYHEGMGWYRQAPGKEREFVASIGNGTITNYADSVKGRFTISRDNAKNTVYLQMNSLKPEDTAVYYCAADPPRGIGGSADHNYWGQGTQVTVSS

SEQ ID NO: 26637 - protein, 113 aa, Artificial Sequence
  Chemically Synthesized
QVQLQESGGGLVQAGGSLRLSCAASGNISPPSDMGWYRQAPGKERELVATITDGTTTNYADSVKGRFTISRDNAKNTVYLQMNSLKPEDTAVYYCAADDLMYWGQGTQVTVSS

SEQ ID NO: 26638 - protein, 123 aa, Artificial Sequence
  Chemically Synthesized
QVQLQESGGGLVQAGGSLRLSCAASGSISYSIRMGWYRQAPGKERELVATIDGGGTTNYADSVKGRFTISRDNAKNTVYLQMNSLKPEDTAVYYCAATLYDGIGSDVDDHDYWGQGTQVTVSS

SEQ ID NO: 26639 - protein, 118 aa, Artificial Sequence
  Chemically Synthesized
QVQLQESGGGLVQAGGSLRLSCAASGTIFLGDYMGWYRQAPGKEREFVAAIAVGANTNYADSVKGRFTISRDNAKNTVYLQMNSLKPEDTAVYYCAVEDYTAQVHYYWGQGTQVTVSS

SEQ ID NO: 26640 - protein, 118 aa, Artificial Sequence
  Chemically Synthesized
QVQLQESGGGLVQAGGSLRLSCAASGYIFRRYSMGWYRQAPGKEREFVAGIGYGGTTNYADSVKGRFTISRDNAKNTVYLQMNSLKPEDTAVYYCAAVAFDQRYYGYWGQGTQVTVSS

SEQ ID NO: 26641 - protein, 122 aa, Artificial Sequence
  Chemically Synthesized
QVQLQESGGGLVQAGGSLRLSCAASGNISHDLSMGWYRQAPGKEREFVATIGPGTSTYYADSVKGRFTISRDNAKNTVYLQMNSLKPEDTAVYYCAVTSVDTYRYPYTLDYWGQGTQVTVSS

SEQ ID NO: 26642 - protein, 118 aa, Artificial Sequence
  Chemically Synthesized
QVQLQESGGGLVQAGGSLRLSCAASGSISDGFPMGWYRQAPGKEREFVAGIGQGANTNYADSVKGRFTISRDNAKNTVYLQMNSLKPEDTAVYYCAAYRYLGGYHGYWGQGTQVTVSS

SEQ ID NO: 26643 - protein, 118 aa, Artificial Sequence
  Chemically Synthesized
QVQLQESGGGLVQAGGSLRLSCAASGTIFGRTWMGWYRQAPGKEREFVAAITPGGNTYYADSVKGRFTISRDNAKNTVYLQMNSLKPEDTAVYYCAADDWQEPQYDYWGQGTQVTVSS

SEQ ID NO: 26644 - protein, 117 aa, Artificial Sequence
  Chemically Synthesized
QVQLQESGGGLVQAGGSLRLSCAASGTISYRGDMGWYRQAPGKERELVATINGGSTTNYADSVKGRFTISRDNAKNTVYLQMNSLKPEDTAVYYCAVYYVYLPVCYWGQGTQVTVSS

SEQ ID NO: 26645 - protein, 118 aa, Artificial Sequence
  Chemically Synthesized
QVQLQESGGGLVQAGGSLRLSCAASGNISGLPYMGWYRQAPGKEREFVAAISEGGSTNYADSVKGRFTISRDNAKNTVYLQMNSLKPEDTAVYYCAAVQARDTWHGYWGQGTQVTVSS

SEQ ID NO: 26646 - protein, 118 aa, Artificial Sequence
  Chemically Synthesized
QVQLQESGGGLVQAGGSLRLSCAASGNISDTYSMGWYRQAPGKERELVATITYGANTYYADSVKGRFTISRDNAKNTVYLQMNSLKPEDTAVYYCAVRYFYEYYLRYWGQGTQVTVSS

SEQ ID NO: 26647 - protein, 122 aa, Artificial Sequence
  Chemically Synthesized
QVQLQESGGGLVQAGGSLRLSCAASGTISYKHVMGWYRQAPGKEREFVASIAYGGITNYADSVKGRFTISRDNAKNTVYLQMNSLKPEDTAVYYCAVRVAYHDYYYIWHYYWGQGTQVTVSS

SEQ ID NO: 26648 - protein, 118 aa, Artificial Sequence
  Chemically Synthesized
QVQLQESGGGLVQAGGSLRLSCAASGTISLLSSMGWYRQAPGKEREFVAAIGTGGITNYADSVKGRFTISRDNAKNTVYLQMNSLKPEDTAVYYCAAVAYIRGPHGYWGQGTQVTVSS

SEQ ID NO: 26649 - protein, 118 aa, Artificial Sequence
  Chemically Synthesized
QVQLQESGGGLVQAGGSLRLSCAASGTISFTASMGWYRQAPGKEREFVAVISWGGNTYYADSVKGRFTISRDNAKNTVYLQMNSLKPEDTAVYYCAVVTPYLENFDYWGQGTQVTVSS

SEQ ID NO: 26650 - protein, 118 aa, Artificial Sequence
  Chemically Synthesized
QVQLQESGGGLVQAGGSLRLSCAASGNISSYYFMGWYRQAPGKEREFVASISKGGNTYYADSVKGRFTISRDNAKNTVYLQMNSLKPEDTAVYYCAAYGAWGGDHPYWGQGTQVTVSS

SEQ ID NO: 26651 - protein, 118 aa, Artificial Sequence
  Chemically Synthesized
QVQLQESGGGLVQAGGSLRLSCAASGNISSYYFMGWYRQAPGKEREFVASISKGGNTYYADSVKGRFTISRDNAKNTVYLQMNSLKPEDTAVYYCAAWYAVFDDLVYWGQGTQVTVSS

SEQ ID NO: 26652 - protein, 113 aa, Artificial Sequence
  Chemically Synthesized
QVQLQESGGGLVQAGGSLRLSCAASGNISSYYFMGWYRQAPGKEREFVASISKGGNTYYADSVKGRFTISRDNAKNTVYLQMNSLKPEDTAVYYCAVPYLGYWGQGTQVTVSS

SEQ ID NO: 26653 - protein, 123 aa, Artificial Sequence
  Chemically Synthesized
QVQLQESGGGLVQAGGSLRLSCAASGTISQHYYMGWYRQAPGKERELVAAIGDGSSTYYADSVKGRFTISRDNAKNTVYLQMNSLKPEDTAVYYCAAEAYYYGDDGPYGHAYWGQGTQVTVSS

SEQ ID NO: 26654 - protein, 118 aa, Artificial Sequence
  Chemically Synthesized
QVQLQESGGGLVQAGGSLRLSCAASGSISPYYFMGWYRQAPGKEREFVASISKGGNTYYADSVKGRFTISRDNAKNTVYLQMNSLKPEDTAVYYCAVVTPYLENFDYWGQGTQVTVSS

SEQ ID NO: 26655 - protein, 118 aa, Artificial Sequence
  Chemically Synthesized
QVQLQESGGGLVQAGGSLRLSCAASGNIFQSYYMGWYRQAPGKEREFVAGITYGGNTYYADSVKGRFTISRDNAKNTVYLQMNSLKPEDTAVYYCAVVTPYLENFDYWGQGTQVTVSS

SEQ ID NO: 26656 - protein, 118 aa, Artificial Sequence
  Chemically Synthesized
QVQLQESGGGLVQAGGSLRLSCAASGNISQQGRMGWYRQAPGKEREFVASIGVGGNTNYADSVKGRFTISRDNAKNTVYLQMNSLKPEDTAVYYCAVVTPYLENFDYWGQGTQVTVSS

SEQ ID NO: 26657 - protein, 118 aa, Artificial Sequence
  Chemically Synthesized
QVQLQESGGGLVQAGGSLRLSCAASGYIFTYYFMGWYRQAPGKEREFVASISKGGNTYYADSVKGRFTISRDNAKNTVYLQMNSLKPEDTAVYYCAVVTPYLENFDYWGQGTQVTVSS

SEQ ID NO: 26658 - protein, 118 aa, Artificial Sequence
  Chemically Synthesized
QVQLQESGGGLVQAGGSLRLSCAASGNISSYYFMGWYRQAPGKERELVASISPGANTYYADSVKGRFTISRDNAKNTVYLQMNSLKPEDTAVYYCAAYGAWGGDHPYWGQGTQVTVSS

SEQ ID NO: 26659 - protein, 118 aa, Artificial Sequence
  Chemically Synthesized
QVQLQESGGGLVQAGGSLRLSCAASGNISAYWYMGWYRQAPGKEREFVATISHGGNTNYADSVKGRFTISRDNAKNTVYLQMNSLKPEDTAVYYCAVVTPYLENFDYWGQGTQVTVSS

SEQ ID NO: 26660 - protein, 118 aa, Artificial Sequence
  Chemically Synthesized
QVQLQESGGGLVQAGGSLRLSCAASGNISSYYYMGWYRQAPGKERELVASISPGANTYYADSVKGRFTISRDNAKNTVYLQMNSLKPEDTAVYYCAAYGAWGGDHPYWGQGTQVTVSS

SEQ ID NO: 26661 - protein, 118 aa, Artificial Sequence
  Chemically Synthesized
QVQLQESGGGLVQAGGSLRLSCAASGTISFTASMGWYRQAPGKEREFVASISKGGNTYYADSVKGRFTISRDNAKNTVYLQMNSLKPEDTAVYYCAVVTPYLENFDYWGQGTQVTVSS

SEQ ID NO: 26662 - protein, 118 aa, Artificial Sequence
  Chemically Synthesized
QVQLQESGGGLVQAGGSLRLSCAASGTISFTASMGWYRQAPGKEREFVAVISWGGNTYYADSVKGRFTISRDNAKNTVYLQMNSLKPEDTAVYYCAAYGAWGGDHPYWGQGTQVTVSS

SEQ ID NO: 26663 - protein, 118 aa, Artificial Sequence
  Chemically Synthesized
QVQLQESGGGLVQAGGSLRLSCAASGYIFTYYYMGWYRQAPGKERELVASISPGANTYYADSVKGRFTISRDNAKNTVYLQMNSLKPEDTAVYYCAAWYAVFDDLVYWGQGTQVTVSS

SEQ ID NO: 26664 - protein, 118 aa, Artificial Sequence
  Chemically Synthesized
QVQLQESGGGLVQAGGSLRLSCAASGSIFDGGRMGWYRQAPGKEREFVASITLGANTYYADSVKGRFTISRDNAKNTVYLQMNSLKPEDTAVYYCAVVTPYLENFDYWGQGTQVTVSS

SEQ ID NO: 26665 - protein, 118 aa, Artificial Sequence
  Chemically Synthesized
QVQLQESGGGLVQAGGSLRLSCAASGNISSYYFMGWYRQAPGKEREFVASISKGGNTYYADSVKGRFTISRDNAKNTVYLQMNSLKPEDTAVYYCAAWDAYGTSLFYWGQGTQVTVSS

SEQ ID NO: 26666 - protein, 113 aa, Artificial Sequence
  Chemically Synthesized
QVQLQESGGGLVQAGGSLRLSCAASGNISSYYFMGWYRQAPGKEREFVASISKGGNTYYADSVKGRFTISRDNAKNTVYLQMNSLKPEDTAVYYCAVPYHGYWGQGTQVTVSS

SEQ ID NO: 26667 - protein, 113 aa, Artificial Sequence
  Chemically Synthesized
QVQLQESGGGLVQAGGSLRLSCAASGYIFTYYYMGWYRQAPGKERELVASISPGANTYYADSVKGRFTISRDNAKNTVYLQMNSLKPEDTAVYYCAVPYLGYWGQGTQVTVSS

SEQ ID NO: 26668 - protein, 122 aa, Artificial Sequence
  Chemically Synthesized
QVQLQESGGGLVQAGGSLRLSCAASGTISWFPGMGWYRQAPGKEREFVASIAYGGITNYADSVKGRFTISRDNAKNTVYLQMNSLKPEDTAVYYCAAIHQYDLYSHDLYGYWGQGTQVTVSS

SEQ ID NO: 26669 - protein, 117 aa, Artificial Sequence
  Chemically Synthesized
QVQLQESGGGLVQAGGSLRLSCAASGTISVLYTMGWYRQAPGKERELVAAIGSVVVPYADSVKGRFTISRDNAKNTVYLQMNSLKPEDTAVYYCAAKQWNYYSFSYWGQGTQVTVSS

SEQ ID NO: 26670 - protein, 122 aa, Artificial Sequence
  Chemically Synthesized
QVQLQESGGGLVQAGGSLRLSCAASGTISIGTYMGWYRQAPGKEREFVATIDRGANTYYADSVKGRFTISRDNAKNTVYLQMNSLKPEDTAVYYCAANGYTNNVALTELDYWGQGTQVTVSS

SEQ ID NO: 26671 - protein, 122 aa, Artificial Sequence
  Chemically Synthesized
QVQLQESGGGLVQAGGSLRLSCAASGTISTIDAMGWYRQAPGKERELVASISDGTSTNYADSVKGRFTISRDNAKNTVYLQMNSLKPEDTAVYYCAVYERDAVRERVYHSYWGQGTQVTVSS

SEQ ID NO: 26672 - protein, 118 aa, Artificial Sequence
  Chemically Synthesized
QVQLQESGGGLVQAGGSLRLSCAASGTISLGATMGWYRQAPGKEREFVATIDDGTNTYYADSVKGRFTISRDNAKNTVYLQMNSLKPEDTAVYYCAAGYLTDGDYVYWGQGTQVTVSS

SEQ ID NO: 26673 - protein, 118 aa, Artificial Sequence
  Chemically Synthesized
QVQLQESGGGLVQAGGSLRLSCAASGNISLLNDMGWYRQAPGKERELVATIGLGGTTNYADSVKGRFTISRDNAKNTVYLQMNSLKPEDTAVYYCAVSWIRRYGYYYWGQGTQVTVSS

SEQ ID NO: 26674 - protein, 105 aa, Artificial Sequence
  Chemically Synthesized
QVQLQESGGGLVQAGGSLRLSCAASGTMGWYRQAPGKEREFVATIAQGANTNYADSVKGRFTISRDNAKNTVYLQMNSLKPEDTAVYYCAVYYYWGQGTQVTVSS

SEQ ID NO: 26675 - protein, 122 aa, Artificial Sequence
  Chemically Synthesized
QVQLQESGGGLVQAGGSLRLSCAASGTIFDYPFMGWYRQAPGKEREFVATIGYGTTTYYADSVKGRFTISRDNAKNTVYLQMNSLKPEDTAVYYCAARSYASYLLDVTHAYWGQGTQVTVSS

SEQ ID NO: 26676 - protein, 118 aa, Artificial Sequence
  Chemically Synthesized
QVQLQESGGGLVQAGGSLRLSCAASGTIFEYAYMGWYRQAPGKEREFVATIAYGSNTYYADSVKGRFTISRDNAKNTVYLQMNSLKPEDTAVYYCAAIVDQETYYPYWGQGTQVTVSS

SEQ ID NO: 26677 - protein, 118 aa, Artificial Sequence
  Chemically Synthesized
QVQLQESGGGLVQAGGSLRLSCAASGNISVSPSMGWYRQAPGKEREFVAGIGPGSTTNYADSVKGRFTISRDNAKNTVYLQMNSLKPEDTAVYYCAVADTDGDALYYWGQGTQVTVSS

SEQ ID NO: 26678 - protein, 118 aa, Artificial Sequence
  Chemically Synthesized
QVQLQESGGGLVQAGGSLRLSCAASGNISGSGQMGWYRQAPGKERELVAAIGPGGSTYYADSVKGRFTISRDNAKNTVYLQMNSLKPEDTAVYYCAAYVDTLDGYWYWGQGTQVTVSS

SEQ ID NO: 26679 - protein, 122 aa, Artificial Sequence
  Chemically Synthesized
QVQLQESGGGLVQAGGSLRLSCAASGYISTFISMGWYRQAPGKERELVAAISPGSSTYYADSVKGRFTISRDNAKNTVYLQMNSLKPEDTAVYYCAVTYQGDYPEFFQLGYWGQGTQVTVSS

SEQ ID NO: 26680 - protein, 111 aa, Artificial Sequence
  Chemically Synthesized
QVQLQESGGGLVQAGGSLRLSCAASGSISPPVMGWYRQAPGKERELVATITAGTTTNYADSVKGRFTISRDNAKNTVYLQMNSLKPEDTAVYYCAVRSGYWGQGTQVTVSS

SEQ ID NO: 26681 - protein, 126 aa, Artificial Sequence
  Chemically Synthesized
QVQLQESGGGLVQAGGSLRLSCAASGNIFTIFGMGWYRQAPGKEREFVAAIGRGAITNYADSVKGRFTISRDNAKNTVYLQMNSLKPEDTAVYYCAAGYPGGGYWDYETRPSLAYWGQGTQVTVSS

SEQ ID NO: 26682 - protein, 117 aa, Artificial Sequence
  Chemically Synthesized
QVQLQESGGGLVQAGGSLRLSCAASGTISYYGVMGWYRQAPGKERELVAAIAYGSITNYADSVKGRFTISRDNAKNTVYLQMNSLKPEDTAVYYCAALLVPGTYSYWGQGTQVTVSS

SEQ ID NO: 26683 - protein, 115 aa, Artificial Sequence
  Chemically Synthesized
QVQLQESGGGLVQAGGSLRLSCAASGYISYPHVMGWYRQAPGKEREFVASISRGSTTNYADSVKGRFTISRDNAKNTVYLQMNSLKPEDTAVYYCAAWTPTHEYWGQGTQVTVSS

SEQ ID NO: 26684 - protein, 122 aa, Artificial Sequence
  Chemically Synthesized
QVQLQESGGGLVQAGGSLRLSCAASGTISDYIFMGWYRQAPGKERELVAGITYGSITYYADSVKGRFTISRDNAKNTVYLQMNSLKPEDTAVYYCAVRRHVGDNTGPEHIYWGQGTQVTVSS

SEQ ID NO: 26685 - protein, 122 aa, Artificial Sequence
  Chemically Synthesized
QVQLQESGGGLVQAGGSLRLSCAASGNISGYVSMGWYRQAPGKEREFVAAIAPGGSTYYADSVKGRFTISRDNAKNTVYLQMNSLKPEDTAVYYCAAPDFYYYYYAYNFDYWGQGTQVTVSS

SEQ ID NO: 26686 - protein, 125 aa, Artificial Sequence
  Chemically Synthesized
QVQLQESGGGLVQAGGSLRLSCAASGYISDYNYMGWYRQAPGKEREFVASITTGGSTYYADSVKGRFTISRDNAKNTVYLQMNSLKPEDTAVYYCAVYFYSVTAFLSWYSGHSYWGQGTQVTVSS

SEQ ID NO: 26687 - protein, 118 aa, Artificial Sequence
  Chemically Synthesized
QVQLQESGGGLVQAGGSLRLSCAASGSIFSYQGMGWYRQAPGKERELVAAINDGSITYYADSVKGRFTISRDNAKNTVYLQMNSLKPEDTAVYYCAAVAWSDDGHEYWGQGTQVTVSS

SEQ ID NO: 26688 - protein, 110 aa, Artificial Sequence
  Chemically Synthesized
QVQLQESGGGLVQAGGSLRLSCAASGNISVRRYMGWYRQAPGKEREFVASVPYADSVKGRFTISRDNAKNTVYLQMNSLKPEDTAVYYCAVDPAERHDYWGQGTQVTVSS

SEQ ID NO: 26689 - protein, 118 aa, Artificial Sequence
  Chemically Synthesized
QVQLQESGGGLVQAGGSLRLSCAASGTIFSSSLMGWYRQAPGKEREFVATISDGTITYYADSVKGRFTISRDNAKNTVYLQMNSLKPEDTAVYYCAAYWRDRTRYLYWGQGTQVTVSS

SEQ ID NO: 26690 - protein, 118 aa, Artificial Sequence
  Chemically Synthesized
QVQLQESGGGLVQAGGSLRLSCAASGYIFGQSIMGWYRQAPGKERELVATIGVGSSTNYADSVKGRFTISRDNAKNTVYLQMNSLKPEDTAVYYCAVGHDTGTRFIYWGQGTQVTVSS

SEQ ID NO: 26691 - protein, 126 aa, Artificial Sequence
  Chemically Synthesized
QVQLQESGGGLVQAGGSLRLSCAASGSISESTDMGWYRQAPGKERELVATIGEGSSTNYADSVKGRFTISRDNAKNTVYLQMNSLKPEDTAVYYCAVDYTALWWVPRRSYYYYLYWGQGTQVTVSS

SEQ ID NO: 26692 - protein, 117 aa, Artificial Sequence
  Chemically Synthesized
QVQLQESGGGLVQAGGSLRLSCAASGNIFGIDRMGWYRQAPGKEREFVATIGGGTTYYADSVKGRFTISRDNAKNTVYLQMNSLKPEDTAVYYCAAWVYIYSPYAYWGQGTQVTVSS

SEQ ID NO: 26693 - protein, 126 aa, Artificial Sequence
  Chemically Synthesized
QVQLQESGGGLVQAGGSLRLSCAASGTIFWVGVMGWYRQAPGKERELVASISAGSSTYYADSVKGRFTISRDNAKNTVYLQMNSLKPEDTAVYYCAVSYRYDYRIRGRYGTPHGYWGQGTQVTVSS

SEQ ID NO: 26694 - protein, 113 aa, Artificial Sequence
  Chemically Synthesized
QVQLQESGGGLVQAGGSLRLSCAASGYIFANQVMGWYRQAPGKERELVAAIAADTYYADSVKGRFTISRDNAKNTVYLQMNSLKPEDTAVYYCAAVASGFEYWGQGTQVTVSS

SEQ ID NO: 26695 - protein, 122 aa, Artificial Sequence
  Chemically Synthesized
QVQLQESGGGLVQAGGSLRLSCAASGTISDASVMGWYRQAPGKERELVASITVGTITNYADSVKGRFTISRDNAKNTVYLQMNSLKPEDTAVYYCAADLTPQGFYPPRHPYWGQGTQVTVSS

SEQ ID NO: 26696 - protein, 118 aa, Artificial Sequence
  Chemically Synthesized
QVQLQESGGGLVQAGGSLRLSCAASGYIFSYDVMGWYRQAPGKEREFVATIGDGSITYYADSVKGRFTISRDNAKNTVYLQMNSLKPEDTAVYYCAANYSEDLPFRYWGQGTQVTVSS

SEQ ID NO: 26697 - protein, 118 aa, Artificial Sequence
  Chemically Synthesized
QVQLQESGGGLVQAGGSLRLSCAASGSIFLVRDMGWYRQAPGKERELVAGIAGGTITNYADSVKGRFTISRDNAKNTVYLQMNSLKPEDTAVYYCAATDDSELPYHYWGQGTQVTVSS

SEQ ID NO: 26698 - protein, 122 aa, Artificial Sequence
  Chemically Synthesized
QVQLQESGGGLVQAGGSLRLSCAASGTIFTYPGMGWYRQAPGKERELVATINRGSSTNYADSVKGRFTISRDNAKNTVYLQMNSLKPEDTAVYYCAARWRGVWGVFAQFYYWGQGTQVTVSS

SEQ ID NO: 26699 - protein, 121 aa, Artificial Sequence
  Chemically Synthesized
QVQLQESGGGLVQAGGSLRLSCAASGNISGRRMGWYRQAPGKERELVAGIDVGTTTNYADSVKGRFTISRDNAKNTVYLQMNSLKPEDTAVYYCAALHADHASYTTWHSYWGQGTQVTVSS

SEQ ID NO: 26700 - protein, 118 aa, Artificial Sequence
  Chemically Synthesized
QVQLQESGGGLVQAGGSLRLSCAASGYISDLGYMGWYRQAPGKEREFVATIGPGTSTNYADSVKGRFTISRDNAKNTVYLQMNSLKPEDTAVYYCAAYTPPRSTLYYWGQGTQVTVSS

SEQ ID NO: 26701 - protein, 117 aa, Artificial Sequence
  Chemically Synthesized
QVQLQESGGGLVQAGGSLRLSCAASGNIFSASMGWYRQAPGKERELVASINRGSTTNYADSVKGRFTISRDNAKNTVYLQMNSLKPEDTAVYYCAAFAVVTDSYGYWGQGTQVTVSS

SEQ ID NO: 26702 - protein, 117 aa, Artificial Sequence
  Chemically Synthesized
QVQLQESGGGLVQAGGSLRLSCAASGTIFGSPYMGWYRQAPGKERELVAAINSVLLPYADSVKGRFTISRDNAKNTVYLQMNSLKPEDTAVYYCAVHRGTDGDLWYWGQGTQVTVSS

SEQ ID NO: 26703 - protein, 122 aa, Artificial Sequence
  Chemically Synthesized
QVQLQESGGGLVQAGGSLRLSCAASGNISYYYSMGWYRQAPGKERELVAAIDLGAITNYADSVKGRFTISRDNAKNTVYLQMNSLKPEDTAVYYCAAAIRLWSQAQYTHGYWGQGTQVTVSS

SEQ ID NO: 26704 - protein, 118 aa, Artificial Sequence
  Chemically Synthesized
QVQLQESGGGLVQAGGSLRLSCAASGTISSYDAMGWYRQAPGKEREFVAAIGAGGSTYYADSVKGRFTISRDNAKNTVYLQMNSLKPEDTAVYYCAAYYNQDDDFDYWGQGTQVTVSS

SEQ ID NO: 26705 - protein, 126 aa, Artificial Sequence
  Chemically Synthesized
QVQLQESGGGLVQAGGSLRLSCAASGYIFVPGSMGWYRQAPGKEREFVATIAYGGTTYYADSVKGRFTISRDNAKNTVYLQMNSLKPEDTAVYYCAAVLPITTSWRHHVSPYHEYWGQGTQVTVSS

SEQ ID NO: 26706 - protein, 122 aa, Artificial Sequence
  Chemically Synthesized
QVQLQESGGGLVQAGGSLRLSCAASGNISRGNAMGWYRQAPGKEREFVAAIDYGSTTYYADSVKGRFTISRDNAKNTVYLQMNSLKPEDTAVYYCAVDKYVLGGTRGYYDYWGQGTQVTVSS

SEQ ID NO: 26707 - protein, 118 aa, Artificial Sequence
  Chemically Synthesized
QVQLQESGGGLVQAGGSLRLSCAASGYIFTYYLMGWYRQAPGKERELVASIGRGGNTNYADSVKGRFTISRDNAKNTVYLQMNSLKPEDTAVYYCAAGRWYSWRYYYWGQGTQVTVSS

SEQ ID NO: 26708 - protein, 118 aa, Artificial Sequence
  Chemically Synthesized
QVQLQESGGGLVQAGGSLRLSCAASGYISYYWSMGWYRQAPGKERELVAGIGYGAITYYADSVKGRFTISRDNAKNTVYLQMNSLKPEDTAVYYCAAWKVVHPGHRYWGQGTQVTVSS

SEQ ID NO: 26709 - protein, 117 aa, Artificial Sequence
  Chemically Synthesized
QVQLQESGGGLVQAGGSLRLSCAASGYISTGIFMGWYRQAPGKERELLPLLITVVVPYADSVKGRFTISRDNAKNTVYLQMNSLKPEDTAVYYCAAWNQYIWYHAYWGQGTQVTVSS

SEQ ID NO: 26710 - protein, 121 aa, Artificial Sequence
  Chemically Synthesized
QVQLQESGGGLVQAGGSLRLSCAASGYISYPYQMGWYRQAPGKEREFVASINVGTNTNYADSVKGRFTISRDNAKNTVYLQMNSLKPEDTAVYYCAVDSYFREPRYPNYYWGQGTQVTVSS

SEQ ID NO: 26711 - protein, 116 aa, Artificial Sequence
  Chemically Synthesized
QVQLQESGGGLVQAGGSLRLSCAASGYIFANQVMGWYRQAPGKERELVAAIAADTYYADSVKGRFTISRDNAKNTVYLQMNSLKPEDTAVYYCAAYYNPDDDFDYWGQGTQVTVSS

SEQ ID NO: 26712 - protein, 122 aa, Artificial Sequence
  Chemically Synthesized
QVQLQESGGGLVQAGGSLRLSCAASGTIFDATIMGWYRQAPGKERELVATIAYGSTTYYADSVKGRFTISRDNAKNTVYLQMNSLKPEDTAVYYCAAAYWDETVYYQYHQYWGQGTQVTVSS

SEQ ID NO: 26713 - protein, 118 aa, Artificial Sequence
  Chemically Synthesized
QVQLQESGGGLVQAGGSLRLSCAASGTISSYLQMGWYRQAPGKERELVASINYGGNTYYADSVKGRFTISRDNAKNTVYLQMNSLKPEDTAVYYCAALPASSTGYWYWGQGTQVTVSS

SEQ ID NO: 26714 - protein, 118 aa, Artificial Sequence
  Chemically Synthesized
QVQLQESGGGLVQAGGSLRLSCAASGTIFNTYFMGWYRQAPGKERELVASIGIGAITNYADSVKGRFTISRDNAKNTVYLQMNSLKPEDTAVYYCAVATDTRGALYYWGQGTQVTVSS

SEQ ID NO: 26715 - protein, 127 aa, Artificial Sequence
  Chemically Synthesized
QVQLQESGGGLVQAGGSLRLSCAASGYISLWLDMGWYRQAPGKERELVATIDDGTSTNYADSVKGRFTISRDNAKNTVYLQMNSLKPEDTAVYYCAVYWVPDHPTARPYSRYGLEYWGQGTQVTVSS

SEQ ID NO: 26716 - protein, 119 aa, Artificial Sequence
  Chemically Synthesized
QVQLQESGGGLVQAGGSLRLSCAASGNISPSRFMGWYRQAPGKERELVAGIGVGGTTYYADSVKGRFTISRDNAKNTVYLQMNSLKPEDTAVYYCAVLGRYANDPLIYWGQGTQVTVSS

SEQ ID NO: 26717 - protein, 122 aa, Artificial Sequence
  Chemically Synthesized
QVQLQESGGGLVQAGGSLRLSCAASGYIFNYSYMGWYRQAPGKEREFVATIGSGANTNYADSVKGRFTISRDNAKNTVYLQMNSLKPEDTAVYYCAVALYDWVVSNTRYVYWGQGTQVTVSS

SEQ ID NO: 26718 - protein, 116 aa, Artificial Sequence
  Chemically Synthesized
QVQLQESGGGLVQAGGSLRLSCAASGYIFANQVMGWYRQAPGKERELVAAIAADTYYADSVKGRFTISRDNAKNTVYLQMNSLKPEDTAVYYCAVYYYDYDYLAYWGQGTQVTVSS

SEQ ID NO: 26719 - protein, 117 aa, Artificial Sequence
  Chemically Synthesized
QVQLQESGGGLVQAGGSLRLSCAASGNISWQYDMGWYRQAPGKERELVATIGYGAITYYADSVKGRFTISRDNAKNTVYLQMNSLKPEDTAVYYCAVAVSGPKTFYWGQGTQVTVSS

SEQ ID NO: 26720 - protein, 118 aa, Artificial Sequence
  Chemically Synthesized
QVQLQESGGGLVQAGGSLRLSCAASGNISLGRYMGWYRQAPGKERELVATITRGGTTYYADSVKGRFTISRDNAKNTVYLQMNSLKPEDTAVYYCAVDEYGDASLWYWGQGTQVTVSS

SEQ ID NO: 26721 - protein, 126 aa, Artificial Sequence
  Chemically Synthesized
QVQLQESGGGLVQAGGSLRLSCAASGTIFYSTYMGWYRQAPGKEREFVATITVGATTNYADSVKGRFTISRDNAKNTVYLQMNSLKPEDTAVYYCAVRLAYSDFDIVRSVYTHGYWGQGTQVTVSS

SEQ ID NO: 26722 - protein, 118 aa, Artificial Sequence
  Chemically Synthesized
QVQLQESGGGLVQAGGSLRLSCAASGTIFDYRAMGWYRQAPGKEREFVAAITGGSTTYYADSVKGRFTISRDNAKNTVYLQMNSLKPEDTAVYYCAVYIYYLWRHYYWGQGTQVTVSS

SEQ ID NO: 26723 - protein, 123 aa, Artificial Sequence
  Chemically Synthesized
QVQLQESGGGLVQAGGSLRLSCAASGNIFYNGYMGWYRQAPGKERELVATIDTGASTNYADSVKGRFTISRDNAKNTVYLQMNSLKPEDTAVYYCAAVWIDDPRYFSVGHSYWGQGTQVTVSS

SEQ ID NO: 26724 - protein, 126 aa, Artificial Sequence
  Chemically Synthesized
QVQLQESGGGLVQAGGSLRLSCAASGNIFYDTYMGWYRQAPGKEREFVAAIAKGGTTYYADSVKGRFTISRDNAKNTVYLQMNSLKPEDTAVYYCAAPDVLGDNVIYGGDNYHWYWGQGTQVTVSS

SEQ ID NO: 26725 - protein, 118 aa, Artificial Sequence
  Chemically Synthesized
QVQLQESGGGLVQAGGSLRLSCAASGNISSSSFMGWYRQAPGKEREFVAAIGSGSTTNYADSVKGRFTISRDNAKNTVYLQMNSLKPEDTAVYYCAVDGRFRRWFRYWGQGTQVTVSS

SEQ ID NO: 26726 - protein, 118 aa, Artificial Sequence
  Chemically Synthesized
QVQLQESGGGLVQAGGSLRLSCAASGSIFEVYDMGWYRQAPGKERELVAGISYGGTTYYADSVKGRFTISRDNAKNTVYLQMNSLKPEDTAVYYCAAIYYGNLWFWYWGQGTQVTVSS

SEQ ID NO: 26727 - protein, 117 aa, Artificial Sequence
  Chemically Synthesized
QVQLQESGGGLVQAGGSLRLSCAASGNIFVVGSMGWYRQAPGKERELVASIADGGITNYADSVKGRFTISRDNAKNTVYLQMNSLKPEDTAVYYCAVRGGYGYFYYWGQGTQVTVSS

SEQ ID NO: 26728 - protein, 121 aa, Artificial Sequence
  Chemically Synthesized
QVQLQESGGGLVQAGGSLRLSCAASGNIFTTTMGWYRQAPGKERELVAAIAPGTTTYYADSVKGRFTISRDNAKNTVYLQMNSLKPEDTAVYYCAARGYGYLDRADAHWYWGQGTQVTVSS

SEQ ID NO: 26729 - protein, 118 aa, Artificial Sequence
  Chemically Synthesized
QVQLQESGGGLVQAGGSLRLSCAASGNIFTVPYMGWYRQAPGKERELVAAIAYGGTTYYADSVKGRFTISRDNAKNTVYLQMNSLKPEDTAVYYCAVGVAGRELLYYWGQGTQVTVSS

SEQ ID NO: 26730 - protein, 114 aa, Artificial Sequence
  Chemically Synthesized
QVQLQESGGGLVQAGGSLRLSCAASGYIFANQVMGWYRQAPGKERELVAAIAADTYYADSVKGRFTISRDNAKNTVYLQMNSLKPEDTAVYYCAVVDPQYHIYWGQGTQVTVSS

SEQ ID NO: 26731 - protein, 126 aa, Artificial Sequence
  Chemically Synthesized
QVQLQESGGGLVQAGGSLRLSCAASGTIFDDSWMGWYRQAPGKEREFVASIADGTSTNYADSVKGRFTISRDNAKNTVYLQMNSLKPEDTAVYYCAVVGRYHRWAGRHYSRYHNYWGQGTQVTVSS

SEQ ID NO: 26732 - protein, 115 aa, Artificial Sequence
  Chemically Synthesized
QVQLQESGGGLVQAGGSLRLSCAASGTISSYDAMGWYRQAPGKEREFVAAIGAGGSTYYADSVKGRFTISRDNAKNTVYLQMNSLKPEDTAVYYCAAVASGFEYWGQGTQVTVSS

SEQ ID NO: 26733 - protein, 112 aa, Artificial Sequence
  Chemically Synthesized
QVQLQESGGGLVQAGGSLRLSCAASGSIFHPGYMGWYRQAPGKERELVAGIAGGSITYYADSVKGRFTISRDNAKNTVYLQMNSLKPEDTAVYYCAARDMYWGQGTQVTVSS

SEQ ID NO: 26734 - protein, 117 aa, Artificial Sequence
  Chemically Synthesized
QVQLQESGGGLVQAGGSLRLSCAASGSIFSHDYMGWYRQAPGKERELVAAITSGASTNYADSVKGRFTISRDNAKNTVYLQMNSLKPEDTAVYYCAAYNDDFGTIYWGQGTQVTVSS

SEQ ID NO: 26735 - protein, 118 aa, Artificial Sequence
  Chemically Synthesized
QVQLQESGGGLVQAGGSLRLSCAASGTIFTYHYMGWYRQAPGKEREFVAAIDTGSNTNYADSVKGRFTISRDNAKNTVYLQMNSLKPEDTAVYYCAVYYALYGYHTYWGQGTQVTVSS

SEQ ID NO: 26736 - protein, 117 aa, Artificial Sequence
  Chemically Synthesized
QVQLQESGGGLVQAGGSLRLSCAASGTISDSRPMGWYRQAPGKERELVASINRGGITYADSVKGRFTISRDNAKNTVYLQMNSLKPEDTAVYYCAAFYRGVGDYTYWGQGTQVTVSS

SEQ ID NO: 26737 - protein, 121 aa, Artificial Sequence
  Chemically Synthesized
QVQLQESGGGLVQAGGSLRLSCAASGSISGGDGMGWYRQAPGKEREFVAGIGGGSTTYADSVKGRFTISRDNAKNTVYLQMNSLKPEDTAVYYCAATRHAWADYDDFHYYWGQGTQVTVSS

SEQ ID NO: 26738 - protein, 125 aa, Artificial Sequence
  Chemically Synthesized
QVQLQESGGGLVQAGGSLRLSCAASGSIFDYNMGWYRQAPGKERELVATISWGGTTYYADSVKGRFTISRDNAKNTVYLQMNSLKPEDTAVYYCAAWLGPQAAKTYAYVDNYDYWGQGTQVTVSS

SEQ ID NO: 26739 - protein, 127 aa, Artificial Sequence
  Chemically Synthesized
QVQLQESGGGLVQAGGSLRLSCAASGYISPWIAMGWYRQAPGKERELVAGISSGGNTYYADSVKGRFTISRDNAKNTVYLQMNSLKPEDTAVYYCAVQWDPWTWTDPWSYVIAHSYWGQGTQVTVSS

SEQ ID NO: 26740 - protein, 118 aa, Artificial Sequence
  Chemically Synthesized
QVQLQESGGGLVQAGGSLRLSCAASGTIFDVEYMGWYRQAPGKEREFVAAISFGAITYYADSVKGRFTISRDNAKNTVYLQMNSLKPEDTAVYYCAAYYNQDDDFDYWGQGTQVTVSS

SEQ ID NO: 26741 - protein, 114 aa, Artificial Sequence
  Chemically Synthesized
QVQLQESGGGLVQAGGSLRLSCAASGTISDDIPMGWYRQAPGKEREFVATITAGTITNYADSVKGRFTISRDNAKNTVYLQMNSLKPEDTAVYYCAVRSFPYYWGQGTQVTVSS

SEQ ID NO: 26742 - protein, 118 aa, Artificial Sequence
  Chemically Synthesized
QVQLQESGGGLVQAGGSLRLSCAASGYISLSRQMGWYRQAPGKEREFVASIGYGGSTNYADSVKGRFTISRDNAKNTVYLQMNSLKPEDTAVYYCAARRRTSFPHRYWGQGTQVTVSS

SEQ ID NO: 26743 - protein, 126 aa, Artificial Sequence
  Chemically Synthesized
QVQLQESGGGLVQAGGSLRLSCAASGNIFSPAGMGWYRQAPGKERELVAAISDGSSTYYADSVKGRFTISRDNAKNTVYLQMNSLKPEDTAVYYCAAPVDPTDVKWYPSDLHYWYWGQGTQVTVSS

SEQ ID NO: 26744 - protein, 126 aa, Artificial Sequence
  Chemically Synthesized
QVQLQESGGGLVQAGGSLRLSCAASGYIFISPTMGWYRQAPGKERELVAAIGYGGSTNYADSVKGRFTISRDNAKNTVYLQMNSLKPEDTAVYYCAVTDPVYVPIFGGGHYWYPYWGQGTQVTVSS

SEQ ID NO: 26745 - protein, 122 aa, Artificial Sequence
  Chemically Synthesized
QVQLQESGGGLVQAGGSLRLSCAASGSIFPSIIMGWYRQAPGKERELVAGIGRGSSTNYADSVKGRFTISRDNAKNTVYLQMNSLKPEDTAVYYCAVWDTNYDPGHVSHPYWGQGTQVTVSS

SEQ ID NO: 26746 - protein, 118 aa, Artificial Sequence
  Chemically Synthesized
QVQLQESGGGLVQAGGSLRLSCAASGTISRRDVMGWYRQAPGKEREFVAAIDHGANTYYADSVKGRFTISRDNAKNTVYLQMNSLKPEDTAVYYCAAPGARRHRFSYWGQGTQVTVSS

SEQ ID NO: 26747 - protein, 118 aa, Artificial Sequence
  Chemically Synthesized
QVQLQESGGGLVQAGGSLRLSCAASGNIFRWPYMGWYRQAPGKERELVAAIDVGGITYYADSVKGRFTISRDNAKNTVYLQMNSLKPEDTAVYYCAADDDTRPELAYWGQGTQVTVSS

SEQ ID NO: 26748 - protein, 126 aa, Artificial Sequence
  Chemically Synthesized
QVQLQESGGGLVQAGGSLRLSCAASGSISRVSQMGWYRQAPGKERELVASIDYGGTTYYADSVKGRFTISRDNAKNTVYLQMNSLKPEDTAVYYCAVYSYWGDFYIRYDDWSHTYWGQGTQVTVSS

SEQ ID NO: 26749 - protein, 119 aa, Artificial Sequence
  Chemically Synthesized
QVQLQESGGGLVQAGGSLRLSCAASGSISPDEAMGWYRQAPGKERELVASIADGGSTYYADSVKGRFTISRDNAKNTVYLQMNSLKPEDTAVYYCAAYVGDYPDNHAYWGQGTQVTVSS

SEQ ID NO: 26750 - protein, 113 aa, Artificial Sequence
  Chemically Synthesized
QVQLQESGGGLVQAGGSLRLSCAASGNMMGWYRQAPGKERELVAAIANGTSTNYADSVKGRFTISRDNAKNTVYLQMNSLKPEDTAVYYCAAGYYPHPYLPYWGQGTQVTVSS

SEQ ID NO: 26751 - protein, 119 aa, Artificial Sequence
  Chemically Synthesized
QVQLQESGGGLVQAGGSLRLSCAASGYIFGLYPMGWYRQAPGKEREFVAAIAYGGSTYYADSVKGRFTISRDNAKNTVYLQMNSLKPEDTAVYYCAVRKWTGALYHYYWGQGTQVTVSS

SEQ ID NO: 26752 - protein, 126 aa, Artificial Sequence
  Chemically Synthesized
QVQLQESGGGLVQAGGSLRLSCAASGTISDDYVMGWYRQAPGKERELVAAIASGTTTNYADSVKGRFTISRDNAKNTVYLQMNSLKPEDTAVYYCAVGAYQNKVSDVPRGHRYYYWGQGTQVTVSS

SEQ ID NO: 26753 - protein, 117 aa, Artificial Sequence
  Chemically Synthesized
QVQLQESGGGLVQAGGSLRLSCAASGTISRYASMGWYRQAPGKEREFVATIGVVVIPYADSVKGRFTISRDNAKNTVYLQMNSLKPEDTAVYYCAVRISIGLYFLYWGQGTQVTVSS

SEQ ID NO: 26754 - protein, 118 aa, Artificial Sequence
  Chemically Synthesized
QVQLQESGGGLVQAGGSLRLSCAASGNISDISSMGWYRQAPGKERELVASISYGASTYYADSVKGRFTISRDNAKNTVYLQMNSLKPEDTAVYYCAAYTYQGAFHYYWGQGTQVTVSS

SEQ ID NO: 26755 - protein, 119 aa, Artificial Sequence
  Chemically Synthesized
QVQLQESGGGLVQAGGSLRLSCAASGTIFLRRGMGWYRQAPGKEREFVAAINVGTTTYYADSVKGRFTISRDNAKNTVYLQMNSLKPEDTAVYYCAVELDAQRDLFKYWGQGTQVTVSS

SEQ ID NO: 26756 - protein, 117 aa, Artificial Sequence
  Chemically Synthesized
QVQLQESGGGLVQAGGSLRLSCAASGYFLLTLMGWYRQAPGKERELVAAIGGGASTNYADSVKGRFTISRDNAKNTVYLQMNSLKPEDTAVYYCAAWEYEYDYHAYWGQGTQVTVSS

SEQ ID NO: 26757 - protein, 122 aa, Artificial Sequence
  Chemically Synthesized
QVQLQESGGGLVQAGGSLRLSCAASGSISQDIYMGWYRQAPGKEREFVATIDYGGNTYYADSVKGRFTISRDNAKNTVYLQMNSLKPEDTAVYYCAVELRYDQNASFIHWYWGQGTQVTVSS

SEQ ID NO: 26758 - protein, 121 aa, Artificial Sequence
  Chemically Synthesized
QVQLQESGGGLVQAGGSLRLSCAASGNISVAGGMGWYRQAPGKERELVATIANGSTTYYADSVKGRFTISRDNAKNTVYLQMNSLKPEDTAVYYCAAKDFDRSPYYPSFYWGQGTQVTVSS

SEQ ID NO: 26759 - protein, 126 aa, Artificial Sequence
  Chemically Synthesized
QVQLQESGGGLVQAGGSLRLSCAASGTIFASSSMGWYRQAPGKERELVAAISIGTSTYYADSVKGRFTISRDNAKNTVYLQMNSLKPEDTAVYYCAVYYAVIRSPYNRFFSAYYYWGQGTQVTVSS

SEQ ID NO: 26760 - protein, 126 aa, Artificial Sequence
  Chemically Synthesized
QVQLQESGGGLVQAGGSLRLSCAASGNIFRVWYMGWYRQAPGKERELVAGITYGGSTYYADSVKGRFTISRDNAKNTVYLQMNSLKPEDTAVYYCAAYYSLFKTGYNGWDTWHHYWGQGTQVTVSS

SEQ ID NO: 26761 - protein, 118 aa, Artificial Sequence
  Chemically Synthesized
QVQLQESGGGLVQAGGSLRLSCAASGYISTTYAMGWYRQAPGKERELVAGITYGAITYYADSVKGRFTISRDNAKNTVYLQMNSLKPEDTAVYYCAARRGHKYGFFYWGQGTQVTVSS

SEQ ID NO: 26762 - protein, 122 aa, Artificial Sequence
  Chemically Synthesized
QVQLQESGGGLVQAGGSLRLSCAASGTISYDVDMGWYRQAPGKERELVASISTGGTTNYADSVKGRFTISRDNAKNTVYLQMNSLKPEDTAVYYCAAGRVRDNYIYASHGYWGQGTQVTVSS

SEQ ID NO: 26763 - protein, 118 aa, Artificial Sequence
  Chemically Synthesized
QVQLQESGGGLVQAGGSLRLSCAASGTISEWYIMGWYRQAPGKEREFVAAITTGSSTYYADSVKGRFTISRDNAKNTVYLQMNSLKPEDTAVYYCAATADYDPLYTYWGQGTQVTVSS

SEQ ID NO: 26764 - protein, 126 aa, Artificial Sequence
  Chemically Synthesized
QVQLQESGGGLVQAGGSLRLSCAASGTISWWPNMGWYRQAPGKEREFVATISGGTNTNYADSVKGRFTISRDNAKNTVYLQMNSLKPEDTAVYYCAAWRYTYRYSTINILFDYTYWGQGTQVTVSS

SEQ ID NO: 26765 - protein, 118 aa, Artificial Sequence
  Chemically Synthesized
QVQLQESGGGLVQAGGSLRLSCAASGYISPDGEMGWYRQAPGKEREFVAGIDGGGTTNYADSVKGRFTISRDNAKNTVYLQMNSLKPEDTAVYYCAVNYYGGADHNYWGQGTQVTVSS

SEQ ID NO: 26766 - protein, 122 aa, Artificial Sequence
  Chemically Synthesized
QVQLQESGGGLVQAGGSLRLSCAASGTIFAFAAMGWYRQAPGKEREFVATIAYGGTTNYADSVKGRFTISRDNAKNTVYLQMNSLKPEDTAVYYCAALSYYYVPLTLFHLYWGQGTQVTVSS

SEQ ID NO: 26767 - protein, 117 aa, Artificial Sequence
  Chemically Synthesized
QVQLQESGGGLVQAGGSLRLSCAASGNIFRSYYMGWYRQAPGKERELVAAIDLGGITYYADSVKGRFTISRDNAKNTVYLQMNSLKPEDTAVYYCAIARYSADFHYWGQGTQVTVSS

SEQ ID NO: 26768 - protein, 118 aa, Artificial Sequence
  Chemically Synthesized
QVQLQESGGGLVQAGGSLRLSCAASGYISYGLQMGWYRQAPGKERELVAGIDFGANTNYADSVKGRFTISRDNAKNTVYLQMNSLKPEDTAVYYCAVEFYQSNELTYWGQGTQVTVSS

SEQ ID NO: 26769 - protein, 120 aa, Artificial Sequence
  Chemically Synthesized
QVQLQESGGGLVQAGGSLRLSCAASGTIFSAHSMGWYRQAPGKEREFLPLLLTVVVPYADSVKGRFTISRDNAKNTVYLQMNSLKPEDTAVYYCAVDVNVAFILYNLIYWGQGTQVTVSS

SEQ ID NO: 26770 - protein, 122 aa, Artificial Sequence
  Chemically Synthesized
QVQLQESGGGLVQAGGSLRLSCAASGNISALDRMGWYRQAPGKEREFVATIDPGGTTYYADSVKGRFTISRDNAKNTVYLQMNSLKPEDTAVYYCAVGRVTKDHPYALFVYWGQGTQVTVSS

SEQ ID NO: 26771 - protein, 114 aa, Artificial Sequence
  Chemically Synthesized
QVQLQESGGGLVQAGGSLRLSCAASGSIFGSTMGWYRQAPGKERELVASISTGGNTYYADSVKGRFTISRDNAKNTVYLQMNSLKPEDTAVYYCAAYIWYDRYWGQGTQVTVSS

SEQ ID NO: 26772 - protein, 122 aa, Artificial Sequence
  Chemically Synthesized
QVQLQESGGGLVQAGGSLRLSCAASGSIFRANSMGWYRQAPGKERELVAAINAGTITNYADSVKGRFTISRDNAKNTVYLQMNSLKPEDTAVYYCAVPRGDGGYGSPDHYYWGQGTQVTVSS

SEQ ID NO: 26773 - protein, 121 aa, Artificial Sequence
  Chemically Synthesized
QVQLQESGGGLVQAGGSLRLSCAASGTIFRLVDMGWYRQAPGKEREFVAGIDPGGSTYYADSVKGRFTISRDNAKNTVYLQMNSLKPEDTAVYYCAADSYDDVRFGKSFYWGQGTQVTVSS

SEQ ID NO: 26774 - protein, 118 aa, Artificial Sequence
  Chemically Synthesized
QVQLQESGGGLVQAGGSLRLSCAASGYISYGFYMGWYRQAPGKERELVAGIAWGGNTYYADSVKGRFTISRDNAKNTVYLQMNSLKPEDTAVYYCAVTGAQLPHLNYWGQGTQVTVSS

SEQ ID NO: 26775 - protein, 122 aa, Artificial Sequence
  Chemically Synthesized
QVQLQESGGGLVQAGGSLRLSCAASGNISGLYYMGWYRQAPGKEREFVATISSGTTTYYADSVKGRFTISRDNAKNTVYLQMNSLKPEDTAVYYCAVGSRYNRRPSRGLEYWGQGTQVTVSS

SEQ ID NO: 26776 - protein, 115 aa, Artificial Sequence
  Chemically Synthesized
QVQLQESGGGLVQAGGSLRLSCAASGTIFGYGRMGWYRQAPGKERELVATITAGANTNYADSVKGRFTISRDNAKNTVYLQMNSLKPEDTAVYYCAAQFYYHTYWGQGTQVTVSS

SEQ ID NO: 26777 - protein, 118 aa, Artificial Sequence
  Chemically Synthesized
QVQLQESGGGLVQAGGSLRLSCAASGTISRINTMGWYRQAPGKEREFVASISDGTNTNYADSVKGRFTISRDNAKNTVYLQMNSLKPEDTAVYYCAVRDTYDVDLVYWGQGTQVTVSS

SEQ ID NO: 26778 - protein, 122 aa, Artificial Sequence
  Chemically Synthesized
QVQLQESGGGLVQAGGSLRLSCAASGYISEYTAMGWYRQAPGKERELVATIGHGTNTYYADSVKGRFTISRDNAKNTVYLQMNSLKPEDTAVYYCAAVVNYSDSITGYLYYWGQGTQVTVSS

SEQ ID NO: 26779 - protein, 118 aa, Artificial Sequence
  Chemically Synthesized
QVQLQESGGGLVQAGGSLRLSCAASGTIFPELAMGWYRQAPGKERELVASIAYGTSTNYADSVKGRFTISRDNAKNTVYLQMNSLKPEDTAVYYCAAYYSHAQYHYYWGQGTQVTVSS

SEQ ID NO: 26780 - protein, 118 aa, Artificial Sequence
  Chemically Synthesized
QVQLQESGGGLVQAGGSLRLSCAASGTIFWYLTMGWYRQAPGKEREFVAGISRGGITYYADSVKGRFTISRDNAKNTVYLQMNSLKPEDTAVYYCAVTNWRYYKHAYWGQGTQVTVSS

SEQ ID NO: 26781 - protein, 125 aa, Artificial Sequence
  Chemically Synthesized
QVQLQESGGGLVQAGGSLRLSCAASGTIFRPEYMGWYRQAPGKEREFVAAIIGVLIPYADSVKGRFTISRDNAKNTVYLQMNSLKPEDTAVYYCAVVDATVSIDVDWDPLGYGYWGQGTQVTVSS

SEQ ID NO: 26782 - protein, 122 aa, Artificial Sequence
  Chemically Synthesized
QVQLQESGGGLVQAGGSLRLSCAASGSIFLLKYMGWYRQAPGKERELVAAISNGSTTYYADSVKGRFTISRDNAKNTVYLQMNSLKPEDTAVYYCAVQFKQEALDYATLDYWGQGTQVTVSS

SEQ ID NO: 26783 - protein, 126 aa, Artificial Sequence
  Chemically Synthesized
QVQLQESGGGLVQAGGSLRLSCAASGTIFGEGRMGWYRQAPGKERELVAGIGSGTITYYADSVKGRFTISRDNAKNTVYLQMNSLKPEDTAVYYCAAWDYAAYNNSDYVENRHDYWGQGTQVTVSS

SEQ ID NO: 26784 - protein, 117 aa, Artificial Sequence
  Chemically Synthesized
QVQLQESGGGLVQAGGSLRLSCAASGNIFTGRMGWYRQAPGKERELVASITHGSITNYADSVKGRFTISRDNAKNTVYLQMNSLKPEDTAVYYCAALTIGAPGYEYWGQGTQVTVSS

SEQ ID NO: 26785 - protein, 121 aa, Artificial Sequence
  Chemically Synthesized
QVQLQESGGGLVQAGGSLRLSCAASGTISAYWGMGWYRQAPGKEREFVASINGGGTTNYADSVKGRFTISRDNAKNTVYLQMNSLKPEDTAVYYCAADDYYYWGPVRLCYWGQGTQVTVSS

SEQ ID NO: 26786 - protein, 117 aa, Artificial Sequence
  Chemically Synthesized
QVQLQESGGGLVQAGGSLRLSCAASGNIFNADNMGWYRQAPGKEREFVASIAIGGTTNYADSVKGRFTISRDNAKNTVYLQMNSLKPEDTAVYYCAAYDDYDTLFYWGQGTQVTVSS

SEQ ID NO: 26787 - protein, 125 aa, Artificial Sequence
  Chemically Synthesized
QVQLQESGGGLVQAGGSLRLSCAASGSIFIYLMGWYRQAPGKERELVATIGIGATTYYADSVKGRFTISRDNAKNTVYLQMNSLKPEDTAVYYCAAFGDEGGSRWLGNDLTYAYWGQGTQVTVSS

SEQ ID NO: 26788 - protein, 118 aa, Artificial Sequence
  Chemically Synthesized
QVQLQESGGGLVQAGGSLRLSCAASGYIFYLRPMGWYRQAPGKEREFVAGINYGATTYYADSVKGRFTISRDNAKNTVYLQMNSLKPEDTAVYYCAAGGYRGVFHKYWGQGTQVTVSS

SEQ ID NO: 26789 - protein, 118 aa, Artificial Sequence
  Chemically Synthesized
QVQLQESGGGLVQAGGSLRLSCAASGSIFITYAMGWYRQAPGKERELVATISYGTITYYADSVKGRFTISRDNAKNTVYLQMNSLKPEDTAVYYCAADYPPWYSLAYWGQGTQVTVSS

SEQ ID NO: 26790 - protein, 118 aa, Artificial Sequence
  Chemically Synthesized
QVQLQESGGGLVQAGGSLRLSCAASGNISRWVYMGWYRQAPGKERELVAAIGGGTSTYYADSVKGRFTISRDNAKNTVYLQMNSLKPEDTAVYYCAVWRRDRYYLTYWGQGTQVTVSS

SEQ ID NO: 26791 - protein, 118 aa, Artificial Sequence
  Chemically Synthesized
QVQLQESGGGLVQAGGSLRLSCAASGNISPNYSMGWYRQAPGKERELVAGINYGTNTNYADSVKGRFTISRDNAKNTVYLQMNSLKPEDTAVYYCAAPRQTYSSHLYWGQGTQVTVSS

SEQ ID NO: 26792 - protein, 118 aa, Artificial Sequence
  Chemically Synthesized
QVQLQESGGGLVQAGGSLRLSCAASGTIFAYGGMGWYRQAPGKERELVASINGGGITYYADSVKGRFTISRDNAKNTVYLQMNSLKPEDTAVYYCAANGWYAGAHPYWGQGTQVTVSS

SEQ ID NO: 26793 - protein, 118 aa, Artificial Sequence
  Chemically Synthesized
QVQLQESGGGLVQAGGSLRLSCAASGNIFFAYYMGWYRQAPGKERELVASISGGTNTNYADSVKGRFTISRDNAKNTVYLQMNSLKPEDTAVYYCAASWDTDYAFHYWGQGTQVTVSS

SEQ ID NO: 26794 - protein, 118 aa, Artificial Sequence
  Chemically Synthesized
QVQLQESGGGLVQAGGSLRLSCAASGNIFSRDNMGWYRQAPGKERELVAGIAVGGSTNYADSVKGRFTISRDNAKNTVYLQMNSLKPEDTAVYYCAVRYPQYYSYGYWGQGTQVTVSS

SEQ ID NO: 26795 - protein, 118 aa, Artificial Sequence
  Chemically Synthesized
QVQLQESGGGLVQAGGSLRLSCAASGTIFSYVAMGWYRQAPGKERELVATITWGATTNYADSVKGRFTISRDNAKNTVYLQMNSLKPEDTAVYYCAVYVYGWDYLGYWGQGTQVTVSS

SEQ ID NO: 26796 - protein, 122 aa, Artificial Sequence
  Chemically Synthesized
QVQLQESGGGLVQAGGSLRLSCAASGSISAPYRMGWYRQAPGKEREFVATISLGTTTNYADSVKGRFTISRDNAKNTVYLQMNSLKPEDTAVYYCAAWDDYVPRYRQPLTYWGQGTQVTVSS

SEQ ID NO: 26797 - protein, 118 aa, Artificial Sequence
  Chemically Synthesized
QVQLQESGGGLVQAGGSLRLSCAASGNISRYEYMGWYRQAPGKEREFVATIGRGSSTYYADSVKGRFTISRDNAKNTVYLQMNSLKPEDTAVYYCAVGYRTYLYHAYWGQGTQVTVSS

SEQ ID NO: 26798 - protein, 111 aa, Artificial Sequence
  Chemically Synthesized
QVQLQESGGGLVQAGGSLRLSCAASGNIFRAWYMGWYRQAPGKEREFVAYLYADSVKGRFTISRDNAKNTVYLQMNSLKPEDTAVYYCAVSSSRTTYHYYWGQGTQVTVSS

SEQ ID NO: 26799 - protein, 122 aa, Artificial Sequence
  Chemically Synthesized
QVQLQESGGGLVQAGGSLRLSCAASGNISGLNVMGWYRQAPGKEREFVAAITEGTSTNYADSVKGRFTISRDNAKNTVYLQMNSLKPEDTAVYYCAVYPDGYVPRLDDHPYWGQGTQVTVSS

SEQ ID NO: 26800 - protein, 117 aa, Artificial Sequence
  Chemically Synthesized
QVQLQESGGGLVQAGGSLRLSCAASGNIFGDPIMGWYRQAPGKERELVAAIGSVVVPYADSVKGRFTISRDNAKNTVYLQMNSLKPEDTAVYYCAARELYNDVHGYWGQGTQVTVSS

SEQ ID NO: 26801 - protein, 114 aa, Artificial Sequence
  Chemically Synthesized
QVQLQESGGGLVQAGGSLRLSCAASGSIFDRGDMGWYRQAPGKERELVAAIADGGTTNYADSVKGRFTISRDNAKNTVYLQMNSLKPEDTAVYYCAAITAHRYWGQGTQVTVSS

SEQ ID NO: 26802 - protein, 122 aa, Artificial Sequence
  Chemically Synthesized
QVQLQESGGGLVQAGGSLRLSCAASGSIFFYDNMGWYRQAPGKERELVATISDGSSTYYADSVKGRFTISRDNAKNTVYLQMNSLKPEDTAVYYCAVPTSTYAADFYDLSYWGQGTQVTVSS

SEQ ID NO: 26803 - protein, 117 aa, Artificial Sequence
  Chemically Synthesized
QVQLQESGGGLVQAGGSLRLSCAASGYIFGRTTMGWYRQAPGKEREFVAGISYGGITYYADSVKGRFTISRDNAKNTVYLQMNSLKPEDTAVYYCAAVFRRGALRYWGQGTQVTVSS

SEQ ID NO: 26804 - protein, 117 aa, Artificial Sequence
  Chemically Synthesized
QVQLQESGGGLVQAGGSLRLSCAASGNISQSTYMGWYRQAPGKEREFVPLLVLVLVPYADSVKGRFTISRDNAKNTVYLQMNSLKPEDTAVYYCAVSYLHQGQYYYWGQGTQVTVSS

SEQ ID NO: 26805 - protein, 118 aa, Artificial Sequence
  Chemically Synthesized
QVQLQESGGGLVQAGGSLRLSCAASGSIFQDGYMGWYRQAPGKEREFVAAITAGTSTNYADSVKGRFTISRDNAKNTVYLQMNSLKPEDTAVYYCAAVYYLQGYHYYWGQGTQVTVSS

SEQ ID NO: 26806 - protein, 116 aa, Artificial Sequence
  Chemically Synthesized
QVQLQESGGGLVQAGGSLRLSCAASGNISSQSMGWYRQAPGKERELVAAITWGTITNYADSVKGRFTISRDNAKNTVYLQMNSLKPEDTAVYYCAVSTQTYLALYWGQGTQVTVSS

SEQ ID NO: 26807 - protein, 122 aa, Artificial Sequence
  Chemically Synthesized
QVQLQESGGGLVQAGGSLRLSCAASGYIFGPNGMGWYRQAPGKEREFVAGIGYGGSTYYADSVKGRFTISRDNAKNTVYLQMNSLKPEDTAVYYCAAYLQGEHHWLSQLDYWGQGTQVTVSS

SEQ ID NO: 26808 - protein, 118 aa, Artificial Sequence
  Chemically Synthesized
QVQLQESGGGLVQAGGSLRLSCAASGTISRVHRMGWYRQAPGKERELVASIGTGGNTNYADSVKGRFTISRDNAKNTVYLQMNSLKPEDTAVYYCAVYYSCTTLTFYWGQGTQVTVSS

SEQ ID NO: 26809 - protein, 122 aa, Artificial Sequence
  Chemically Synthesized
QVQLQESGGGLVQAGGSLRLSCAASGNISDRAAMGWYRQAPGKEREFVATISGGTTTNYADSVKGRFTISRDNAKNTVYLQMNSLKPEDTAVYYCAAPKDADANIAVDLGYWGQGTQVTVSS

SEQ ID NO: 26810 - protein, 112 aa, Artificial Sequence
  Chemically Synthesized
QVQLQESGGGLVQAGGSLRLSCAASGYISTVPTMGWYRQAPGKERELVATINDGGTTNYADSVKGRFTISRDNAKNTVYLQMNSLKPEDTAVYYCAAGGPYWGQGTQVTVSS

SEQ ID NO: 26811 - protein, 118 aa, Artificial Sequence
  Chemically Synthesized
QVQLQESGGGLVQAGGSLRLSCAASGNISQSYSMGWYRQAPGKEREFVASIDAGTSTYYADSVKGRFTISRDNAKNTVYLQMNSLKPEDTAVYYCAVIQSYYPYHYYWGQGTQVTVSS

SEQ ID NO: 26812 - protein, 116 aa, Artificial Sequence
  Chemically Synthesized
QVQLQESGGGLVQAGGSLRLSCAASGTISYVASMGWYRQAPGKEREFVATINRGASTNYADSVKGRFTISRDNAKNTVYLQMNSLKPEDTAVYYCAAVIDWAHYYWGQGTQVTVSS

SEQ ID NO: 26813 - protein, 125 aa, Artificial Sequence
  Chemically Synthesized
QVQLQESGGGLVQAGGSLRLSCAASGTIFYVYYMGWYRQAPGKERELVASINQGTSTYYADSVKGRFTISRDNAKNTVYLQMNSLKPEDTAVYYCAVHSYVPYISYNYYLDLGYWGQGTQVTVSS

SEQ ID NO: 26814 - protein, 122 aa, Artificial Sequence
  Chemically Synthesized
QVQLQESGGGLVQAGGSLRLSCAASGTIFTYNDMGWYRQAPGKERELVATISDGGTTNYADSVKGRFTISRDNAKNTVYLQMNSLKPEDTAVYYCAVLEVPTRDYWYWLDYWGQGTQVTVSS

SEQ ID NO: 26815 - protein, 118 aa, Artificial Sequence
  Chemically Synthesized
QVQLQESGGGLVQAGGSLRLSCAASGTIFDVLDMGWYRQAPGKERELVASIDTGATTYYADSVKGRFTISRDNAKNTVYLQMNSLKPEDTAVYYCAAVFYSDIYLYYWGQGTQVTVSS

SEQ ID NO: 26816 - protein, 122 aa, Artificial Sequence
  Chemically Synthesized
QVQLQESGGGLVQAGGSLRLSCAASGTISRADPMGWYRQAPGKEREFVAAIGVGANTNYADSVKGRFTISRDNAKNTVYLQMNSLKPEDTAVYYCAVPYRGWYHHRWYYDYWGQGTQVTVSS

SEQ ID NO: 26817 - protein, 126 aa, Artificial Sequence
  Chemically Synthesized
QVQLQESGGGLVQAGGSLRLSCAASGTISRGERMGWYRQAPGKERELVATINRGANTNYADSVKGRFTISRDNAKNTVYLQMNSLKPEDTAVYYCAVWYQTAIGPKYDYVAGYGYWGQGTQVTVSS

SEQ ID NO: 26818 - protein, 118 aa, Artificial Sequence
  Chemically Synthesized
QVQLQESGGGLVQAGGSLRLSCAASGNISIRGYMGWYRQAPGKERELVAAISYGSTTYYADSVKGRFTISRDNAKNTVYLQMNSLKPEDTAVYYCAAGEGSYYFHQYWGQGTQVTVSS

SEQ ID NO: 26819 - protein, 118 aa, Artificial Sequence
  Chemically Synthesized
QVQLQESGGGLVQAGGSLRLSCAASGTISYPTDMGWYRQAPGKEREFVATIDYGAITYYADSVKGRFTISRDNAKNTVYLQMNSLKPEDTAVYYCAAGLNTGYGYYYWGQGTQVTVSS

SEQ ID NO: 26820 - protein, 122 aa, Artificial Sequence
  Chemically Synthesized
QVQLQESGGGLVQAGGSLRLSCAASGSISAYDRMGWYRQAPGKERELVAGIAYGAITYYADSVKGRFTISRDNAKNTVYLQMNSLKPEDTAVYYCAVTLTIADVYDITHTYWGQGTQVTVSS

SEQ ID NO: 26821 - protein, 118 aa, Artificial Sequence
  Chemically Synthesized
QVQLQESGGGLVQAGGSLRLSCAASGYIFYRYDMGWYRQAPGKERELVASIGYGTNTNYADSVKGRFTISRDNAKNTVYLQMNSLKPEDTAVYYCAALSYYEHGLTYWGQGTQVTVSS

SEQ ID NO: 26822 - protein, 126 aa, Artificial Sequence
  Chemically Synthesized
QVQLQESGGGLVQAGGSLRLSCAASGSISRGVPMGWYRQAPGKEREFVAAITLGSSTYYADSVKGRFTISRDNAKNTVYLQMNSLKPEDTAVYYCAVHSERPYRYEAHYTSYFRYWGQGTQVTVSS

SEQ ID NO: 26823 - protein, 118 aa, Artificial Sequence
  Chemically Synthesized
QVQLQESGGGLVQAGGSLRLSCAASGTISDPVRMGWYRQAPGKEREFVAGISYGAITNYADSVKGRFTISRDNAKNTVYLQMNSLKPEDTAVYYCAVIISHYGYHYYWGQGTQVTVSS

SEQ ID NO: 26824 - protein, 122 aa, Artificial Sequence
  Chemically Synthesized
QVQLQESGGGLVQAGGSLRLSCAASGNISWYLDMGWYRQAPGKEREFVASIDWGGKYQYADSVKGRFTISRDNAKNTVYLQMNSLKPEDTAVYYCAVNTYVTHDVDPPFVYWGQGTQVTVSS

SEQ ID NO: 26825 - protein, 127 aa, Artificial Sequence
  Chemically Synthesized
QVQLQESGGGLVQAGGSLRLSCAASGSISYNFGMGWYRQAPGKERELVAAINGGTNTYYADSVKGRFTISRDNAKNTVYLQMNSLKPEDTAVYYCAVRDGGDYRDVYIDTTTYHYYWGQGTQVTVSS

SEQ ID NO: 26826 - protein, 118 aa, Artificial Sequence
  Chemically Synthesized
QVQLQESGGGLVQAGGSLRLSCAASGYISYYSAMGWYRQAPGKEREFVAAIDSGGTTYYADSVKGRFTISRDNAKNTVYLQMNSLKPEDTAVYYCAVVNGNYGFLRYWGQGTQVTVSS

SEQ ID NO: 26827 - protein, 125 aa, Artificial Sequence
  Chemically Synthesized
QVQLQESGGGLVQAGGSLRLSCAASGSISFGGMGWYRQAPGKERELVATIGPGGNTNYADSVKGRFTISRDNAKNTVYLQMNSLKPEDTAVYYCAVYVVVLTSFENGDYIYLAYWGQGTQVTVSS

SEQ ID NO: 26828 - protein, 117 aa, Artificial Sequence
  Chemically Synthesized
QVQLQESGGGLVQAGGSLRLSCAASGTIFYGDEMGWYRQAPGKERELVATITYGAYQYADSVKGRFTISRDNAKNTVYLQMNSLKPEDTAVYYCAAQYVYGYVHRYWGQGTQVTVSS

SEQ ID NO: 26829 - protein, 118 aa, Artificial Sequence
  Chemically Synthesized
QVQLQESGGGLVQAGGSLRLSCAASGNISNYWGMGWYRQAPGKEREFVAAIAQGATTNYADSVKGRFTISRDNAKNTVYLQMNSLKPEDTAVYYCAVVSYERSWHFYWGQGTQVTVSS

SEQ ID NO: 26830 - protein, 121 aa, Artificial Sequence
  Chemically Synthesized
QVQLQESGGGLVQAGGSLRLSCAASGNISTSTMGWYRQAPGKEREFVATITVGASTNYADSVKGRFTISRDNAKNTVYLQMNSLKPEDTAVYYCAVDHDTAITNSQDYGYWGQGTQVTVSS

SEQ ID NO: 26831 - protein, 119 aa, Artificial Sequence
  Chemically Synthesized
QVQLQESGGGLVQAGGSLRLSCAASGSILVSLMGWYRQAPGKERELVASIGFGATTNYADSVKGRFTISRDNAKNTVYLQMNSLKPEDTAVYYCAAYTYSAYGTPFYYWGQGTQVTVSS

SEQ ID NO: 26832 - protein, 126 aa, Artificial Sequence
  Chemically Synthesized
QVQLQESGGGLVQAGGSLRLSCAASGTISPNWAMGWYRQAPGKEREFVATIAGGSSTYYADSVKGRFTISRDNAKNTVYLQMNSLKPEDTAVYYCAVDYTDNWRYLGQVPRWHTYWGQGTQVTVSS

SEQ ID NO: 26833 - protein, 126 aa, Artificial Sequence
  Chemically Synthesized
QVQLQESGGGLVQAGGSLRLSCAASGSIFRRSAMGWYRQAPGKERELVASINTGASTYYADSVKGRFTISRDNAKNTVYLQMNSLKPEDTAVYYCAVHSQLYHYELRGYSESLTYWGQGTQVTVSS

SEQ ID NO: 26834 - protein, 120 aa, Artificial Sequence
  Chemically Synthesized
QVQLQESGGGLVQAGGSLRLSCAASGTISSWTGMGWYRQAPGKERELVAAIASVLIPYADSVKGRFTISRDNAKNTVYLQMNSLKPEDTAVYYCAAYQETRTLFVTVLYWGQGTQVTVSS

SEQ ID NO: 26835 - protein, 121 aa, Artificial Sequence
  Chemically Synthesized
QVQLQESGGGLVQAGGSLRLSCAASGNISYSRMGWYRQAPGKERELVAGIDLGSITYYADSVKGRFTISRDNAKNTVYLQMNSLKPEDTAVYYCAAGYYRYRYYQDIHYYWGQGTQVTVSS

SEQ ID NO: 26836 - protein, 122 aa, Artificial Sequence
  Chemically Synthesized
QVQLQESGGGLVQAGGSLRLSCAASGTISGYGGMGWYRQAPGKEREFVAGIGGGGSTNYADSVKGRFTISRDNAKNTVYLQMNSLKPEDTAVYYCAVVNRYPGINHSWHYYWGQGTQVTVSS

SEQ ID NO: 26837 - protein, 115 aa, Artificial Sequence
  Chemically Synthesized
QVQLQESGGGLVQAGGSLRLSCAASGTISYGANMGWYRQAPGKEREFVAAIDAGTITYYADSVKGRFTISRDNAKNTVYLQMNSLKPEDTAVYYCAALDRAHYYWGQGTQVTVSS

SEQ ID NO: 26838 - protein, 121 aa, Artificial Sequence
  Chemically Synthesized
QVQLQESGGGLVQAGGSLRLSCAASGTISSGYAMGWYRQAPGKEREFVASIGFGATTYYADSVKGRFTISRDNAKNTVYLQMNSLKPEDTAVYYCAAYRDYWGGSVTTLYWGQGTQVTVSS

SEQ ID NO: 26839 - protein, 126 aa, Artificial Sequence
  Chemically Synthesized
QVQLQESGGGLVQAGGSLRLSCAASGTISDTTGMGWYRQAPGKEREFVAGITPGSNTYYADSVKGRFTISRDNAKNTVYLQMNSLKPEDTAVYYCAVDAIGPIDYIYGGSAYFQYWGQGTQVTVSS

SEQ ID NO: 26840 - protein, 118 aa, Artificial Sequence
  Chemically Synthesized
QVQLQESGGGLVQAGGSLRLSCAASGSISAIDVMGWYRQAPGKEREFVATIDFGANTNYADSVKGRFTISRDNAKNTVYLQMNSLKPEDTAVYYCAVLIHLAHYYYYWGQGTQVTVSS

SEQ ID NO: 26841 - protein, 118 aa, Artificial Sequence
  Chemically Synthesized
QVQLQESGGGLVQAGGSLRLSCAASGSIFHATRMGWYRQAPGKERELVAGIGYGGTTYYADSVKGRFTISRDNAKNTVYLQMNSLKPEDTAVYYCAAPPYWDTDHGYWGQGTQVTVSS

SEQ ID NO: 26842 - protein, 118 aa, Artificial Sequence
  Chemically Synthesized
QVQLQESGGGLVQAGGSLRLSCAASGTFFSLPYMGWYRQAPGKEREFVATIGQGTITNYADSVKGRFTISRDNAKNTVYLQMNSLKPEDTAVYYCAAVVFDDQYYGYWGQGTQVTVSS

SEQ ID NO: 26843 - protein, 118 aa, Artificial Sequence
  Chemically Synthesized
QVQLQESGGGLVQAGGSLRLSCAASGNISYHAFMGWYRQAPGKERELVATINVGSNTNYADSVKGRFTISRDNAKNTVYLQMNSLKPEDTAVYYCAVVRSYVRDLTYWGQGTQVTVSS

SEQ ID NO: 26844 - protein, 111 aa, Artificial Sequence
  Chemically Synthesized
QVQLQESGGGLVQAGGSLRLSCAASGYISRLDTMGWYRQAPGKERELVATIGTGSITYYADSVKGRFTISRDNAKNTVYLQMNSLKPEDTAVYYCAGTLYWGQGTQVTVSS

SEQ ID NO: 26845 - protein, 119 aa, Artificial Sequence
  Chemically Synthesized
QVQLQESGGGLVQAGGSLRLSCAASGTISDVYAMGWYRQAPGKEREFVAAIGRGTTTYYADSVKGRFTISRDNAKNTVYLQMNSLKPEDTAVYYCAALSSDYSDYHQYWGQGTQVTVSS

SEQ ID NO: 26846 - protein, 117 aa, Artificial Sequence
  Chemically Synthesized
QVQLQESGGGLVQAGGSLRLSCAASGTISAYVYMGWYRQAPGKERELVAAISSGSITYYADSVKGRFTISRDNAKNTVYLQMNSLKPEDTAVYYCAAPDALPCSFYWGQGTQVTVSS

SEQ ID NO: 26847 - protein, 117 aa, Artificial Sequence
  Chemically Synthesized
QVQLQESGGGLVQAGGSLRLSCAASGTISAVYRMGWYRQAPGKEREFVASMVTVLLPYADSVKGRFTISRDNAKNTVYLQMNSLKPEDTAVYYCAVYPGNLSAHDYWGQGTQVTVSS

SEQ ID NO: 26848 - protein, 118 aa, Artificial Sequence
  Chemically Synthesized
QVQLQESGGGLVQAGGSLRLSCAASGSIFGQVRMGWYRQAPGKERELVASIALGTITNYADSVKGRFTISRDNAKNTVYLQMNSLKPEDTAVYYCAARAWGTNYYPYWGQGTQVTVSS

SEQ ID NO: 26849 - protein, 126 aa, Artificial Sequence
  Chemically Synthesized
QVQLQESGGGLVQAGGSLRLSCAASGTIFHGYYMGWYRQAPGKEREFVATIGGGANTNYADSVKGRFTISRDNAKNTVYLQMNSLKPEDTAVYYCAAGYHDYDAIYLGDDYRHIYWGQGTQVTVSS

SEQ ID NO: 26850 - protein, 116 aa, Artificial Sequence
  Chemically Synthesized
QVQLQESGGGLVQAGGSLRLSCAASGTISPIYMGWYRQAPGKEREFVASITNGYYQYADSVKGRFTISRDNAKNTVYLQMNSLKPEDTAVYYCAVDDKYSRDLDYWGQGTQVTVSS

SEQ ID NO: 26851 - protein, 122 aa, Artificial Sequence
  Chemically Synthesized
QVQLQESGGGLVQAGGSLRLSCAASGTISRIPHMGWYRQAPGKEREFVAAINLGGITNYADSVKGRFTISRDNAKNTVYLQMNSLKPEDTAVYYCAALRVAGTDRYQYYFYWGQGTQVTVSS

SEQ ID NO: 26852 - protein, 118 aa, Artificial Sequence
  Chemically Synthesized
QVQLQESGGGLVQAGGSLRLSCAASGTISIGGEMGWYRQAPGKEREFVASIALGGITYYADSVKGRFTISRDNAKNTVYLQMNSLKPEDTAVYYCAAIFYNSYQHHYWGQGTQVTVSS

SEQ ID NO: 26853 - protein, 122 aa, Artificial Sequence
  Chemically Synthesized
QVQLQESGGGLVQAGGSLRLSCAASGNISWIYFMGWYRQAPGKEREFVAAISQGATTNYADSVKGRFTISRDNAKNTVYLQMNSLKPEDTAVYYCAAGFQYIQVDIIDYRYWGQGTQVTVSS

SEQ ID NO: 26854 - protein, 121 aa, Artificial Sequence
  Chemically Synthesized
QVQLQESGGGLVQAGGSLRLSCAASGSISPGYLMGWYRQAPGKEREFVATIILVVVPYADSVKGRFTISRDNAKNTVYLQMNSLKPEDTAVYYCAAWDIGYTRYDVNLDYWGQGTQVTVSS

SEQ ID NO: 26855 - protein, 118 aa, Artificial Sequence
  Chemically Synthesized
QVQLQESGGGLVQAGGSLRLSCAASGYIFYDYPMGWYRQAPGKEREFVATIGQGTSTNYADSVKGRFTISRDNAKNTVYLQMNSLKPEDTAVYYCAVGRKTLGNHEYWGQGTQVTVSS

SEQ ID NO: 26856 - protein, 118 aa, Artificial Sequence
  Chemically Synthesized
QVQLQESGGGLVQAGGSLRLSCAASGNISLRVVMGWYRQAPGKEREFVAAITVGSNTNYADSVKGRFTISRDNAKNTVYLQMNSLKPEDTAVYYCAALAVDSLPHYYWGQGTQVTVSS

SEQ ID NO: 26857 - protein, 118 aa, Artificial Sequence
  Chemically Synthesized
QVQLQESGGGLVQAGGSLRLSCAASGTIFDGAYMGWYRQAPGKERELVASITPGTTTNYADSVKGRFTISRDNAKNTVYLQMNSLKPEDTAVYYCAAPRQVRDAYFYWGQGTQVTVSS

SEQ ID NO: 26858 - protein, 119 aa, Artificial Sequence
  Chemically Synthesized
QVQLQESGGGLVQAGGSLRLSCAASGNIFTEYYLMGWYRQAPGKEREFVATIGLGSITNYADSVKGRFTISRDNAKNTVYLQMNSLKPEDTAVYYCAALGAGRTRHYYWGQGTQVTVSS

SEQ ID NO: 26859 - protein, 118 aa, Artificial Sequence
  Chemically Synthesized
QVQLQESGGGLVQAGGSLRLSCAASGYIFSTGTMGWYRQAPGKEREFVAAITVGGNTYYADSVKGRFTISRDNAKNTVYLQMNSLKPEDTAVYYCAARYRRAWRLRYWGQGTQVTVSS

SEQ ID NO: 26860 - protein, 118 aa, Artificial Sequence
  Chemically Synthesized
QVQLQESGGGLVQAGGSLRLSCAASGTISRDVPMGWYRQAPGKEREFVATIAYGGTTNYADSVKGRFTISRDNAKNTVYLQMNSLKPEDTAVYYCAVYGQVWGKHYYWGQGTQVTVSS

SEQ ID NO: 26861 - protein, 126 aa, Artificial Sequence
  Chemically Synthesized
QVQLQESGGGLVQAGGSLRLSCAASGTIFYLTAMGWYRQAPGKEREFVAGINGGSSTYYADSVKGRFTISRDNAKNTVYLQMNSLKPEDTAVYYCAAYVHARLQGSRGDGTYHYYWGQGTQVTVSS

SEQ ID NO: 26862 - protein, 121 aa, Artificial Sequence
  Chemically Synthesized
QVQLQESGGGLVQAGGSLRLSCAASGYIFPGDYMGWYRQAPGKERELVASISRGGSTYYADSVKGRFTISRDNAKNTVYLQMNSLKPEDTAVYYCAAVIFNGDGSTLVIYWGQGTQVTVSS

SEQ ID NO: 26863 - protein, 118 aa, Artificial Sequence
  Chemically Synthesized
QVQLQESGGGLVQAGGSLRLSCAASGYIFRSQAMGWYRQAPGKEREFVASIGRGATTYYADSVKGRFTISRDNAKNTVYLQMNSLKPEDTAVYYCAVYGGRYQYHAYWGQGTQVTVSS

SEQ ID NO: 26864 - protein, 122 aa, Artificial Sequence
  Chemically Synthesized
QVQLQESGGGLVQAGGSLRLSCAASGTIFGRENMGWYRQAPGKEREFVAAITRGTITYYADSVKGRFTISRDNAKNTVYLQMNSLKPEDTAVYYCAVDGWGTKFFGYLLGYWGQGTQVTVSS

SEQ ID NO: 26865 - protein, 118 aa, Artificial Sequence
  Chemically Synthesized
QVQLQESGGGLVQAGGSLRLSCAASGNISGEYFMGWYRQAPGKEREFVATINVGGSTNYADSVKGRFTISRDNAKNTVYLQMNSLKPEDTAVYYCAVLDYVGSYYWYWGQGTQVTVSS

SEQ ID NO: 26866 - protein, 118 aa, Artificial Sequence
  Chemically Synthesized
QVQLQESGGGLVQAGGSLRLSCAASGTISVYPYMGWYRQAPGKEREFVASINQGGITNYADSVKGRFTISRDNAKNTVYLQMNSLKPEDTAVYYCAAVRRSNVYHAYWGQGTQVTVSS

SEQ ID NO: 26867 - protein, 122 aa, Artificial Sequence
  Chemically Synthesized
QVQLQESGGGLVQAGGSLRLSCAASGTIFLKITMGWYRQAPGKEREFVASIAYGGITNYADSVKGRFTISRDNAKNTVYLQMNSLKPEDTAVYYCAVTYHARPSALVVHPYWGQGTQVTVSS

SEQ ID NO: 26868 - protein, 125 aa, Artificial Sequence
  Chemically Synthesized
QVQLQESGGGLVQAGGSLRLSCAASGSISADVRMGWYRQAPGKERELVAGIGYGTSTNYADSVKGRFTISRDNAKNTVYLQMNSLKPEDTAVYYCAVQPVLSGDSRVCTTLTIYWGQGTQVTVSS

SEQ ID NO: 26869 - protein, 131 aa, Artificial Sequence
  Chemically Synthesized
QVQLQESGGGLVQAGGSLRLSCAASGTIFVGDAMGWYRQAPGKERELVAAITWGGTTNYADSVKGRFTISRDNAKNTVYLQMNSLKPEDTAVYYCAVTWYDDFQFAVDTAYRDWWQYHDYWGQGTQVTVSS

SEQ ID NO: 26870 - protein, 122 aa, Artificial Sequence
  Chemically Synthesized
QVQLQESGGGLVQAGGSLRLSCAASGTISGGTNMGWYRQAPGKEREFVAGITAGASTNYADSVKGRFTISRDNAKNTVYLQMNSLKPEDTAVYYCAAIVAGPYRGDRIHYYWGQGTQVTVSS

SEQ ID NO: 26871 - protein, 118 aa, Artificial Sequence
  Chemically Synthesized
QVQLQESGGGLVQAGGSLRLSCAASGTISGAYVMGWYRQAPGKEREFVAAINPGGSTNYADSVKGRFTISRDNAKNTVYLQMNSLKPEDTAVYYCAAVRTYRQYLYYWGQGTQVTVSS

SEQ ID NO: 26872 - protein, 121 aa, Artificial Sequence
  Chemically Synthesized
QVQLQESGGGLVQAGGSLRLSCAASGTIFSSVMGWYRQAPGKERELVASISNGAITYYADSVKGRFTISRDNAKNTVYLQMNSLKPEDTAVYYCAVDGATAVGYGYGHDYWGQGTQVTVSS

SEQ ID NO: 26873 - protein, 118 aa, Artificial Sequence
  Chemically Synthesized
QVQLQESGGGLVQAGGSLRLSCAASGNISHRPLMGWYRQAPGKEREFVAGIAEGSNTNYADSVKGRFTISRDNAKNTVYLQMNSLKPEDTAVYYCAAIYRNEQVHYYWGQGTQVTVSS

SEQ ID NO: 26874 - protein, 121 aa, Artificial Sequence
  Chemically Synthesized
QVQLQESGGGLVQAGGSLRLSCAASGNISYDFEMGWYRQAPGKEREFVAGIADGTSTNYADSVKGRFTISRDNAKNTVYLQMNSLKPEDTAVYYCAVHNWYNYSVLLLLYWGQGTQVTVSS

SEQ ID NO: 26875 - protein, 122 aa, Artificial Sequence
  Chemically Synthesized
QVQLQESGGGLVQAGGSLRLSCAASGNISDTGSMGWYRQAPGKEREFVAAIDYGGTTYYADSVKGRFTISRDNAKNTVYLQMNSLKPEDTAVYYCAAIYYYHDDSGGWHGYWGQGTQVTVSS

SEQ ID NO: 26876 - protein, 121 aa, Artificial Sequence
  Chemically Synthesized
QVQLQESGGGLVQAGGSLRLSCAASGSISPDYSMGWYRQAPGKEREFVAAIDRGTSTNYADSVKGRFTISRDNAKNTVYLQMNSLKPEDTAVYYCAVLYVNRAIGDVHYYWGQGTQVTVSS

SEQ ID NO: 26877 - protein, 122 aa, Artificial Sequence
  Chemically Synthesized
QVQLQESGGGLVQAGGSLRLSCAASGYISHIRRMGWYRQAPGKEREFVASINYGGTTNYADSVKGRFTISRDNAKNTVYLQMNSLKPEDTAVYYCAVLDIGQPSIRRYYWYWGQGTQVTVSS

SEQ ID NO: 26878 - protein, 118 aa, Artificial Sequence
  Chemically Synthesized
QVQLQESGGGLVQAGGSLRLSCAASGNISPHYFMGWYRQAPGKEREFVAGITVGTTTNYADSVKGRFTISRDNAKNTVYLQMNSLKPEDTAVYYCAVVWYTVGWHYYWGQGTQVTVSS

SEQ ID NO: 26879 - protein, 122 aa, Artificial Sequence
  Chemically Synthesized
QVQLQESGGGLVQAGGSLRLSCAASGTISSSRRMGWYRQAPGKEREFVAAINTGSSTNYADSVKGRFTISRDNAKNTVYLQMNSLKPEDTAVYYCAVLDTYIYPRSYYLAYWGQGTQVTVSS

SEQ ID NO: 26880 - protein, 118 aa, Artificial Sequence
  Chemically Synthesized
QVQLQESGGGLVQAGGSLRLSCAASGSIFRDANMGWYRQAPGKEREFVAAINFGGSTYYADSVKGRFTISRDNAKNTVYLQMNSLKPEDTAVYYCAAYISRDGHHHYWGQGTQVTVSS

SEQ ID NO: 26881 - protein, 118 aa, Artificial Sequence
  Chemically Synthesized
QVQLQESGGGLVQAGGSLRLSCAASGYIFDDYLMGWYRQAPGKERELVATIDGGSITNYADSVKGRFTISRDNAKNTVYLQMNSLKPEDTAVYYCAVDDYYTSYYPYWGQGTQVTVSS

SEQ ID NO: 26882 - protein, 122 aa, Artificial Sequence
  Chemically Synthesized
QVQLQESGGGLVQAGGSLRLSCAASGTIFFGRFMGWYRQAPGKERELVAGIGNGTSTYYADSVKGRFTISRDNAKNTVYLQMNSLKPEDTAVYYCAAGWRPPWYLLYPFEYWGQGTQVTVSS

SEQ ID NO: 26883 - protein, 118 aa, Artificial Sequence
  Chemically Synthesized
QVQLQESGGGLVQAGGSLRLSCAASGSISGQAYMGWYRQAPGKEREFVAAISFGGTTNYADSVKGRFTISRDNAKNTVYLQMNSLKPEDTAVYYCAVAYYSVSWHWYWGQGTQVTVSS

SEQ ID NO: 26884 - protein, 121 aa, Artificial Sequence
  Chemically Synthesized
QVQLQESGGGLVQAGGSLRLSCAASGSISVSLMGWYRQAPGKEREFVATIDDGTSTNYADSVKGRFTISRDNAKNTVYLQMNSLKPEDTAVYYCAVDADTTYAAIDDHHYWGQGTQVTVSS

SEQ ID NO: 26885 - protein, 118 aa, Artificial Sequence
  Chemically Synthesized
QVQLQESGGGLVQAGGSLRLSCAASGSISPYRGMGWYRQAPGKERELVAGIGSGTTTNYADSVKGRFTISRDNAKNTVYLQMNSLKPEDTAVYYCAVGILHAYSFLYWGQGTQVTVSS

SEQ ID NO: 26886 - protein, 118 aa, Artificial Sequence
  Chemically Synthesized
QVQLQESGGGLVQAGGSLRLSCAASGTIFYAFVMGWYRQAPGKERELVATIDTGGNTYYADSVKGRFTISRDNAKNTVYLQMNSLKPEDTAVYYCAVWDPKLQAHSYWGQGTQVTVSS

SEQ ID NO: 26887 - protein, 125 aa, Artificial Sequence
  Chemically Synthesized
QVQLQESGGGLVQAGGSLRLSCAASGNIFYVSYMGWYRQAPGKERELVALLLVVLIPYADSVKGRFTISRDNAKNTVYLQMNSLKPEDTAVYYCAAVLKFGADIAHTTYYYLDYWGQGTQVTVSS

SEQ ID NO: 26888 - protein, 126 aa, Artificial Sequence
  Chemically Synthesized
QVQLQESGGGLVQAGGSLRLSCAASGTISQLDVMGWYRQAPGKEREFVAAISKGASTNYADSVKGRFTISRDNAKNTVYLQMNSLKPEDTAVYYCAAISKDRSRVGYQYTTYHWYWGQGTQVTVSS

SEQ ID NO: 26889 - protein, 118 aa, Artificial Sequence
  Chemically Synthesized
QVQLQESGGGLVQAGGSLRLSCAASGTISKPQSMGWYRQAPGKERELVAGISSGGNTNYADSVKGRFTISRDNAKNTVYLQMNSLKPEDTAVYYCAVIVYRDDWYGYWGQGTQVTVSS

SEQ ID NO: 26890 - protein, 120 aa, Artificial Sequence
  Chemically Synthesized
QVQLQESGGGLVQAGGSLRLSCAASGTISWTMGWYRQAPGKERELVAGIGDGSTTNYADSVKGRFTISRDNAKNTVYLQMNSLKPEDTAVYYCAAQAGPWHALLAPYTYWGQGTQVTVSS

SEQ ID NO: 26891 - protein, 125 aa, Artificial Sequence
  Chemically Synthesized
QVQLQESGGGLVQAGGSLRLSCAASGYIFHDSTMGWYRQAPGKEREFVASIAYGGNTNYADSVKGRFTISRDNAKNTVYLQMNSLKPEDTAVYYCAALYVAWPVGTGPRQYYWYWGQGTQVTVSS

SEQ ID NO: 26892 - protein, 117 aa, Artificial Sequence
  Chemically Synthesized
QVQLQESGGGLVQAGGSLRLSCAASGSISVAVDMGWYRQAPGKEREFVASIDDGANTNYADSVKGRFTISRDNAKNTVYLQMNSLKPEDTAVYYCAANEVDASTFYWGQGTQVTVSS

SEQ ID NO: 26893 - protein, 118 aa, Artificial Sequence
  Chemically Synthesized
QVQLQESGGGLVQAGGSLRLSCAASGNISGHGSMGWYRQAPGKEREFVAAIGWGGITNYADSVKGRFTISRDNAKNTVYLQMNSLKPEDTAVYYCAALTYAEHYHFYWGQGTQVTVSS

SEQ ID NO: 26894 - protein, 118 aa, Artificial Sequence
  Chemically Synthesized
QVQLQESGGGLVQAGGSLRLSCAASGTISGDNDMGWYRQAPGKERELVAGIAVGGTTYYADSVKGRFTISRDNAKNTVYLQMNSLKPEDTAVYYCAVDRWASRYHGYWGQGTQVTVSS

SEQ ID NO: 26895 - protein, 126 aa, Artificial Sequence
  Chemically Synthesized
QVQLQESGGGLVQAGGSLRLSCAASGSISPSSDMGWYRQAPGKEREFVAAIAYGSSTNYADSVKGRFTISRDNAKNTVYLQMNSLKPEDTAVYYCAAVRGDKVAADVASASVYWYWGQGTQVTVSS

SEQ ID NO: 26896 - protein, 118 aa, Artificial Sequence
  Chemically Synthesized
QVQLQESGGGLVQAGGSLRLSCAASGNISDSYGMGWYRQAPGKEREFVASITIGSTTYYADSVKGRFTISRDNAKNTVYLQMNSLKPEDTAVYYCAAWSGGWYTHRYWGQGTQVTVSS

SEQ ID NO: 26897 - protein, 118 aa, Artificial Sequence
  Chemically Synthesized
QVQLQESGGGLVQAGGSLRLSCAASGNISDSPPMGWYRQAPGKEREFVAGIDEGTSTLYADSVKGRFTISRDNAKNTVYLQMNSLKPEDTAVYYCAAITTYDGPLHYWGQGTQVTVSS

SEQ ID NO: 26898 - protein, 125 aa, Artificial Sequence
  Chemically Synthesized
QVQLQESGGGLVQAGGSLRLSCAASGNIFAGAFMGWYRQAPGKERELVASIAVGGSTYYADSVKGRFTISRDNAKNTVYLQMNSLKPEDTAVYYCAAYGFGDGGRRPYRGDLTYWGQGTQVTVSS

SEQ ID NO: 26899 - protein, 117 aa, Artificial Sequence
  Chemically Synthesized
QVQLQESGGGLVQAGGSLRLSCAASGSIFSPSAMGWYRQAPGKERELVASIASVVLPYADSVKGRFTISRDNAKNTVYLQMNSLKPEDTAVYYCAAEDGLSIAYAYWGQGTQVTVSS

SEQ ID NO: 26900 - protein, 114 aa, Artificial Sequence
  Chemically Synthesized
QVQLQESGGGLVQAGGSLRLSCAASGSIFRDEGMGWYRQAPGKERELVAGITDGANTYYADSVKGRFTISRDNAKNTVYLQMNSLKPEDTAVYYCAVSVSTFYWGQGTQVTVSS

SEQ ID NO: 26901 - protein, 118 aa, Artificial Sequence
  Chemically Synthesized
QVQLQESGGGLVQAGGSLRLSCAASGNISPGVGMGWYRQAPGKERELVASITYGTITYYADSVKGRFTISRDNAKNTVYLQMNSLKPEDTAVYYCAVQPWDFQYFGYWGQGTQVTVSS

SEQ ID NO: 26902 - protein, 118 aa, Artificial Sequence
  Chemically Synthesized
QVQLQESGGGLVQAGGSLRLSCAASGTIFGLFTMGWYRQAPGKERELVAGISYGGSTNYADSVKGRFTISRDNAKNTVYLQMNSLKPEDTAVYYCAAANSAYPWYYYWGQGTQVTVSS

SEQ ID NO: 26903 - protein, 122 aa, Artificial Sequence
  Chemically Synthesized
QVQLQESGGGLVQAGGSLRLSCAASGTISRTSYMGWYRQAPGKERELVATIAYGTNTNYADSVKGRFTISRDNAKNTVYLQMNSLKPEDTAVYYCAAAINTYSFWRQRHLYWGQGTQVTVSS

SEQ ID NO: 26904 - protein, 117 aa, Artificial Sequence
  Chemically Synthesized
QVQLQESGGGLVQAGGSLRLSCAASGTISADEYMGWYRQAPGKERELVAGIGFGTNTNYADSVKGRFTISRDNAKNTVYLQMNSLKPEDTAVYYCAVVSPGDRSIYWGQGTQVTVSS

SEQ ID NO: 26905 - protein, 118 aa, Artificial Sequence
  Chemically Synthesized
QVQLQESGGGLVQAGGSLRLSCAASGYISSGSLMGWYRQAPGKERELVAAITHGSSTNYADSVKGRFTISRDNAKNTVYLQMNSLKPEDTAVYYCAAYDRILDEHKYWGQGTQVTVSS

SEQ ID NO: 26906 - protein, 118 aa, Artificial Sequence
  Chemically Synthesized
QVQLQESGGGLVQAGGSLRLSCAASGTISRLGGMGWYRQAPGKEREFVAGIASGTITNYADSVKGRFTISRDNAKNTVYLQMNSLKPEDTAVYYCAAYAYYNKYHYYWGQGTQVTVSS

SEQ ID NO: 26907 - protein, 121 aa, Artificial Sequence
  Chemically Synthesized
QVQLQESGGGLVQAGGSLRLSCAASGSISVIYLMGWYRQAPGKERELVAAIGNGAIPYADSVKGRFTISRDNAKNTVYLQMNSLKPEDTAVYYCAAQRVERPGTVYAHTYWGQGTQVTVSS

SEQ ID NO: 26908 - protein, 118 aa, Artificial Sequence
  Chemically Synthesized
QVQLQESGGGLVQAGGSLRLSCAASGTISYYYLMGWYRQAPGKEREFVATISYGTNTYYADSVKGRFTISRDNAKNTVYLQMNSLKPEDTAVYYCAATYIANLWFYYWGQGTQVTVSS

SEQ ID NO: 26909 - protein, 118 aa, Artificial Sequence
  Chemically Synthesized
QVQLQESGGGLVQAGGSLRLSCAASGNISGAGTMGWYRQAPGKEREFVASINSGGTTNYADSVKGRFTISRDNAKNTVYLQMNSLKPEDTAVYYCAAKLTQDGDHSYWGQGTQVTVSS

SEQ ID NO: 26910 - protein, 121 aa, Artificial Sequence
  Chemically Synthesized
QVQLQESGGGLVQAGGSLRLSCAASGSIFDVTGMGWYRQAPGKERELVATIDYGSITYYADSVKGRFTISRDNAKNTVYLQMNSLKPEDTAVYYCAAYLSWLDTDYSSMYWGQGTQVTVSS

SEQ ID NO: 26911 - protein, 121 aa, Artificial Sequence
  Chemically Synthesized
QVQLQESGGGLVQAGGSLRLSCAASGSISTARTMGWYRQAPGKERELVAAIAYGSRPYADSVKGRFTISRDNAKNTVYLQMNSLKPEDTAVYYCAVGGDYDQYITYDHEYWGQGTQVTVSS

SEQ ID NO: 26912 - protein, 118 aa, Artificial Sequence
  Chemically Synthesized
QVQLQESGGGLVQAGGSLRLSCAASGNISPPNGMGWYRQAPGKEREFVAGITNGAITNYADSVKGRFTISRDNAKNTVYLQMNSLKPEDTAVYYCAVLIRGRTYLYYWGQGTQVTVSS

SEQ ID NO: 26913 - protein, 126 aa, Artificial Sequence
  Chemically Synthesized
QVQLQESGGGLVQAGGSLRLSCAASGTISSYFYMGWYRQAPGKEREFVAAISPGTITNYADSVKGRFTISRDNAKNTVYLQMNSLKPEDTAVYYCAAVQRASEDSPDNDSQWHSYWGQGTQVTVSS

SEQ ID NO: 26914 - protein, 110 aa, Artificial Sequence
  Chemically Synthesized
QVQLQESGGGLVQAGGSLRLSCAASGSISSRPDMGWYRQAPGKERELVAGIADGSITNYADSVKGRFTISRDNAKNTVYLQMNSLKPEDTAVYYCAVIYWGQGTQVTVSS

SEQ ID NO: 26915 - protein, 118 aa, Artificial Sequence
  Chemically Synthesized
QVQLQESGGGLVQAGGSLRLSCAASGTISVYSTMGWYRQAPGKEREFVAGITYGSTTYYADSVKGRFTISRDNAKNTVYLQMNSLKPEDTAVYYCAAGWYDNGNHYYWGQGTQVTVSS

SEQ ID NO: 26916 - protein, 118 aa, Artificial Sequence
  Chemically Synthesized
QVQLQESGGGLVQAGGSLRLSCAASGSISTRYYLMGWYRQAPGKEREFVAAIDRGGNTNYADSVKGRFTISRDNAKNTVYLQMNSLKPEDTAVYYCAARQDGDSYFYWGQGTQVTVSS

SEQ ID NO: 26917 - protein, 118 aa, Artificial Sequence
  Chemically Synthesized
QVQLQESGGGLVQAGGSLRLSCAASGNISWIGFMGWYRQAPGKEREFVATISWGGNTYYADSVKGRFTISRDNAKNTVYLQMNSLKPEDTAVYYCAVHWLVGRYLDYWGQGTQVTVSS

SEQ ID NO: 26918 - protein, 118 aa, Artificial Sequence
  Chemically Synthesized
QVQLQESGGGLVQAGGSLRLSCAASGTISVAQVMGWYRQAPGKERELVAGITFGSITYYADSVKGRFTISRDNAKNTVYLQMNSLKPEDTAVYYCAVSRPPYYILGYWGQGTQVTVSS

SEQ ID NO: 26919 - protein, 118 aa, Artificial Sequence
  Chemically Synthesized
QVQLQESGGGLVQAGGSLRLSCAASGTISEFYNMGWYRQAPGKEREFVAAIAYGGNTNYADSVKGRFTISRDNAKNTVYLQMNSLKPEDTAVYYCAALFHYQRYLAYWGQGTQVTVSS

SEQ ID NO: 26920 - protein, 126 aa, Artificial Sequence
  Chemically Synthesized
QVQLQESGGGLVQAGGSLRLSCAASGYIFLLWYMGWYRQAPGKERELVAAIGNGSITYYADSVKGRFTISRDNAKNTVYLQMNSLKPEDTAVYYCAAEKDFVQRYEGRYYSPFAYWGQGTQVTVSS

SEQ ID NO: 26921 - protein, 118 aa, Artificial Sequence
  Chemically Synthesized
QVQLQESGGGLVQAGGSLRLSCAASGNISYIAYMGWYRQAPGKERELVAAISDGGTTNYADSVKGRFTISRDNAKNTVYLQMNSLKPEDTAVYYCAAYIYATNVYSYWGQGTQVTVSS

SEQ ID NO: 26922 - protein, 121 aa, Artificial Sequence
  Chemically Synthesized
QVQLQESGGGLVQAGGSLRLSCAASGYIFGYGNMGWYRQAPGKERELVASIDYGAITNYADSVKGRFTISRDNAKNTVYLQMNSLKPEDTAVYYCAVDYSTLVTTTVTFYWGQGTQVTVSS

SEQ ID NO: 26923 - protein, 118 aa, Artificial Sequence
  Chemically Synthesized
QVQLQESGGGLVQAGGSLRLSCAASGTCFMGWYRQAPGKERELVATIAPGANTYYADSVKGRFTISRDNAKNTVYLQMNSLKPEDTAVYYCAVRTIWYVQSITAHKYWGQGTQVTVSS

SEQ ID NO: 26924 - protein, 118 aa, Artificial Sequence
  Chemically Synthesized
QVQLQESGGGLVQAGGSLRLSCAASGTISYTPVMGWYRQAPGKEREFVASIAGGGNTNYADSVKGRFTISRDNAKNTVYLQMNSLKPEDTAVYYCAVLIYRNGYLYYWGQGTQVTVSS

SEQ ID NO: 26925 - protein, 122 aa, Artificial Sequence
  Chemically Synthesized
QVQLQESGGGLVQAGGSLRLSCAASGTIFRFGPMGWYRQAPGKEREFVASITSGTTTNYADSVKGRFTISRDNAKNTVYLQMNSLKPEDTAVYYCAVYGNGYGSTHYNYDYWGQGTQVTVSS

SEQ ID NO: 26926 - protein, 117 aa, Artificial Sequence
  Chemically Synthesized
QVQLQESGGGLVQAGGSLRLSCAASGSISYYATMGWYRQAPGKERELVARVVLPYADSVKGRFTISRDNAKNTVYLQMNSLKPEDTAVYYCAVYTRYGTAQVTLQYWGQGTQVTVSS

SEQ ID NO: 26927 - protein, 118 aa, Artificial Sequence
  Chemically Synthesized
QVQLQESGGGLVQAGGSLRLSCAASGYISRNPLMGWYRQAPGKEREFVAGISTGTITNYADSVKGRFTISRDNAKNTVYLQMNSLKPEDTAVYYCAAIDGYKVRHYYWGQGTQVTVSS

SEQ ID NO: 26928 - protein, 125 aa, Artificial Sequence
  Chemically Synthesized
QVQLQESGGGLVQAGGSLRLSCAASGSIFDYVGMGWYRQAPGKERELVAGIDAGGITYYADSVKGRFTISRDNAKNTVYLQMNSLKPEDTAVYYCAATSCVVSTLLSTLLTTLYWGQGTQVTVSS

SEQ ID NO: 26929 - protein, 118 aa, Artificial Sequence
  Chemically Synthesized
QVQLQESGGGLVQAGGSLRLSCAASGSISNVPLMGWYRQAPGKEREFVAGIGHGTSTNYADSVKGRFTISRDNAKNTVYLQMNSLKPEDTAVYYCAALTGLTYNHYYWGQGTQVTVSS

SEQ ID NO: 26930 - protein, 121 aa, Artificial Sequence
  Chemically Synthesized
QVQLQESGGGLVQAGGSLRLSCAASGYISSWSMGWYRQAPGKEREFVASIDTGSSTNYADSVKGRFTISRDNAKNTVYLQMNSLKPEDTAVYYCAAPISERAQPQRTYRYWGQGTQVTVSS

SEQ ID NO: 26931 - protein, 117 aa, Artificial Sequence
  Chemically Synthesized
QVQLQESGGGLVQAGGSLRLSCAASGSISRYFMGWYRQAPGKERELVAGINRGSTTNYADSVKGRFTISRDNAKNTVYLQMNSLKPEDTAVYYCAAYHGSLHDHRYWGQGTQVTVSS

SEQ ID NO: 26932 - protein, 125 aa, Artificial Sequence
  Chemically Synthesized
QVQLQESGGGLVQAGGSLRLSCAASGYIFPFPHMGWYRQAPGKEREFVAGIAYGSTTYYADSVKGRFTISRDNAKNTVYLQMNSLKPEDTAVYYCAVAPYPYVYSRLTVTLFMYWGQGTQVTVSS

SEQ ID NO: 26933 - protein, 121 aa, Artificial Sequence
  Chemically Synthesized
QVQLQESGGGLVQAGGSLRLSCAASGSIFETSAMGWYRQAPGKEREFVAGIGVGGSTNYADSVKGRFTISRDNAKNTVYLQMNSLKPEDTAVYYCAVDVRSTLLTTSGFYWGQGTQVTVSS

SEQ ID NO: 26934 - protein, 118 aa, Artificial Sequence
  Chemically Synthesized
QVQLQESGGGLVQAGGSLRLSCAASGNIFPRGSMGWYRQAPGKEREFVAAITQGTNTYYADSVKGRFTISRDNAKNTVYLQMNSLKPEDTAVYYCAAVPYARPYHAYWGQGTQVTVSS

SEQ ID NO: 26935 - protein, 118 aa, Artificial Sequence
  Chemically Synthesized
QVQLQESGGGLVQAGGSLRLSCAASGTISPYAAMGWYRQAPGKEREFVAGIGSGGNTNYADSVKGRFTISRDNAKNTVYLQMNSLKPEDTAVYYCAAIDGDKYAHYYWGQGTQVTVSS

SEQ ID NO: 26936 - protein, 121 aa, Artificial Sequence
  Chemically Synthesized
QVQLQESGGGLVQAGGSLRLSCAASGTIFALYSMGWYRQAPGKERELVASITKGATTNYADSVKGRFTISRDNAKNTVYLQMNSLKPEDTAVYYCAAVYTNPLTYRYYGYWGQGTQVTVSS

SEQ ID NO: 26937 - protein, 118 aa, Artificial Sequence
  Chemically Synthesized
QVQLQESGGGLVQAGGSLRLSCAASGYISDRSYMGWYRQAPGKEREFVASITAGSITNYADSVKGRFTISRDNAKNTVYLQMNSLKPEDTAVYYCAAVDWRDRYYSYWGQGTQVTVSS

SEQ ID NO: 26938 - protein, 126 aa, Artificial Sequence
  Chemically Synthesized
QVQLQESGGGLVQAGGSLRLSCAASGNISGSAIMGWYRQAPGKERELVATINGGGSTYYADSVKGRFTISRDNAKNTVYLQMNSLKPEDTAVYYCAAVDSSAVGDGNKYGIYHYYWGQGTQVTVSS

SEQ ID NO: 26939 - protein, 118 aa, Artificial Sequence
  Chemically Synthesized
QVQLQESGGGLVQAGGSLRLSCAASGNISGIGRMGWYRQAPGKERELVASIGRGANTYYADSVKGRFTISRDNAKNTVYLQMNSLKPEDTAVYYCAALVYYHQWHGYWGQGTQVTVSS

SEQ ID NO: 26940 - protein, 119 aa, Artificial Sequence
  Chemically Synthesized
QVQLQESGGGLVQAGGSLRLSCAASGNISAQYAMGWYRQAPGKEREFVAGINYGAITNYADSVKGRFTISRDNAKNTVYLQMNSLKPEDTAVYYCAVDPRPKADFFRYWGQGTQVTVSS

SEQ ID NO: 26941 - protein, 118 aa, Artificial Sequence
  Chemically Synthesized
QVQLQESGGGLVQAGGSLRLSCAASGTISDWYSMGWYRQAPGKEREFVAAITFGGSTNYADSVKGRFTISRDNAKNTVYLQMNSLKPEDTAVYYCAVLSTKTVYYYYWGQGTQVTVSS

SEQ ID NO: 26942 - protein, 122 aa, Artificial Sequence
  Chemically Synthesized
QVQLQESGGGLVQAGGSLRLSCAASGTIFTTFTMGWYRQAPGKERELVAAINYGSSTYYADSVKGRFTISRDNAKNTVYLQMNSLKPEDTAVYYCAVYDDRVYRYSSRYSYWGQGTQVTVSS

SEQ ID NO: 26943 - protein, 122 aa, Artificial Sequence
  Chemically Synthesized
QVQLQESGGGLVQAGGSLRLSCAASGNIFYGLYMGWYRQAPGKEREFVAGITPGSNTYYADSVKGRFTISRDNAKNTVYLQMNSLKPEDTAVYYCAVRLWRAQYEGRRHRYWGQGTQVTVSS

SEQ ID NO: 26944 - protein, 122 aa, Artificial Sequence
  Chemically Synthesized
QVQLQESGGGLVQAGGSLRLSCAASGSISPDTRMGWYRQAPGKEREFVASIDYGTTTYYADSVKGRFTISRDNAKNTVYLQMNSLKPEDTAVYYCAAVDLTAGATHRYLYYWGQGTQVTVSS

SEQ ID NO: 26945 - protein, 118 aa, Artificial Sequence
  Chemically Synthesized
QVQLQESGGGLVQAGGSLRLSCAASGNISGDDFMGWYRQAPGKEREFVAGIGRGTSTNYADSVKGRFTISRDNAKNTVYLQMNSLKPEDTAVYYCAAVNNRPFYHYYWGQGTQVTVSS

SEQ ID NO: 26946 - protein, 118 aa, Artificial Sequence
  Chemically Synthesized
QVQLQESGGGLVQAGGSLRLSCAASGYISYDIRMGWYRQAPGKERELVAAITAGSITNYADSVKGRFTISRDNAKNTVYLQMNSLKPEDTAVYYCAVDLAYTDSYRYWGQGTQVTVSS

SEQ ID NO: 26947 - protein, 122 aa, Artificial Sequence
  Chemically Synthesized
QVQLQESGGGLVQAGGSLRLSCAASGTISDPIYMGWYRQAPGKEREFVAAIAAGGTTNYADSVKGRFTISRDNAKNTVYLQMNSLKPEDTAVYYCAVIYRGYTISVRWHYYWGQGTQVTVSS

SEQ ID NO: 26948 - protein, 118 aa, Artificial Sequence
  Chemically Synthesized
QVQLQESGGGLVQAGGSLRLSCAASGYISRGTYMGWYRQAPGKEREFVAGIDQGGITNYADSVKGRFTISRDNAKNTVYLQMNSLKPEDTAVYYCAVIWSDGGYYYYWGQGTQVTVSS

SEQ ID NO: 26949 - protein, 118 aa, Artificial Sequence
  Chemically Synthesized
QVQLQESGGGLVQAGGSLRLSCAASGSISKYGVMGWYRQAPGKEREFVAGISDGGNTYYADSVKGRFTISRDNAKNTVYLQMNSLKPEDTAVYYCAAIAYSRAWYAYWGQGTQVTVSS

SEQ ID NO: 26950 - protein, 118 aa, Artificial Sequence
  Chemically Synthesized
QVQLQESGGGLVQAGGSLRLSCAASGTISTLSPMGWYRQAPGKERELVAGIAYGGTTYYADSVKGRFTISRDNAKNTVYLQMNSLKPEDTAVYYCAAIQYRAQWHYYWGQGTQVTVSS

SEQ ID NO: 26951 - protein, 117 aa, Artificial Sequence
  Chemically Synthesized
QVQLQESGGGLVQAGGSLRLSCAASGSIFGTAEGMGWYRQAPGKERELVAGIAAGTSTYYADSVKGRFTISRDNAKNTVYLQMNSLKPEDTAVYYCAVADDSGYAYWGQGTQVTVSS

SEQ ID NO: 26952 - protein, 119 aa, Artificial Sequence
  Chemically Synthesized
QVQLQESGGGLVQAGGSLRLSCAASGYIFITVSMGWYRQAPGKEREFVATIGLGGSTYYADSVKGRFTISRDNAKNTVYLQMNSLKPEDTAVYYCAVVTYYTFPQYRYWGQGTQVTVSS

SEQ ID NO: 26953 - protein, 118 aa, Artificial Sequence
  Chemically Synthesized
QVQLQESGGGLVQAGGSLRLSCAASGNISTVGSMGWYRQAPGKERELVAAIDPGATTNYADSVKGRFTISRDNAKNTVYLQMNSLKPEDTAVYYCAALGYVDRWLGYWGQGTQVTVSS

SEQ ID NO: 26954 - protein, 121 aa, Artificial Sequence
  Chemically Synthesized
QVQLQESGGGLVQAGGSLRLSCAASGTILVVVMGWYRQAPGKEREFVAAIGDGGITNYADSVKGRFTISRDNAKNTVYLQMNSLKPEDTAVYYCAAYNWDKGLAGGYHEYWGQGTQVTVSS

SEQ ID NO: 26955 - protein, 126 aa, Artificial Sequence
  Chemically Synthesized
QVQLQESGGGLVQAGGSLRLSCAASGYISPYYTMGWYRQAPGKEREFVASISTGTSTNYADSVKGRFTISRDNAKNTVYLQMNSLKPEDTAVYYCAALFRDNQRGDAILYYYHYYWGQGTQVTVSS

SEQ ID NO: 26956 - protein, 118 aa, Artificial Sequence
  Chemically Synthesized
QVQLQESGGGLVQAGGSLRLSCAASGTIFQQGNMGWYRQAPGKERELVATINYGTTTYYADSVKGRFTISRDNAKNTVYLQMNSLKPEDTAVYYCAAENGLWQVYDYWGQGTQVTVSS

SEQ ID NO: 26957 - protein, 122 aa, Artificial Sequence
  Chemically Synthesized
QVQLQESGGGLVQAGGSLRLSCAASGTISQPNAMGWYRQAPGKEREFVAAIAGGASTNYADSVKGRFTISRDNAKNTVYLQMNSLKPEDTAVYYCAAIYAVAKRRTYIHYYWGQGTQVTVSS

SEQ ID NO: 26958 - protein, 118 aa, Artificial Sequence
  Chemically Synthesized
QVQLQESGGGLVQAGGSLRLSCAASGTISNAVYMGWYRQAPGKERELVAGITYGGITYYADSVKGRFTISRDNAKNTVYLQMNSLKPEDTAVYYCAANPAYALEYGYWGQGTQVTVSS

SEQ ID NO: 26959 - protein, 118 aa, Artificial Sequence
  Chemically Synthesized
QVQLQESGGGLVQAGGSLRLSCAASGTIFIPRYMGWYRQAPGKERELVAGIGRGGTTYYADSVKGRFTISRDNAKNTVYLQMNSLKPEDTAVYYCAASATRGYSHVYWGQGTQVTVSS

SEQ ID NO: 26960 - protein, 118 aa, Artificial Sequence
  Chemically Synthesized
QVQLQESGGGLVQAGGSLRLSCAASGYIFLYYSMGWYRQAPGKEREFVATIAQGGITNYADSVKGRFTISRDNAKNTVYLQMNSLKPEDTAVYYCAATYAGRLLYRYWGQGTQVTVSS

SEQ ID NO: 26961 - protein, 117 aa, Artificial Sequence
  Chemically Synthesized
QVQLQESGGGLVQAGGSLRLSCAASGSIFDVYAMGWYRQAPGKEREFVAGINGTTTYYADSVKGRFTISRDNAKNTVYLQMNSLKPEDTAVYYCAAVTRSTRVHAYWGQGTQVTVSS

SEQ ID NO: 26962 - protein, 118 aa, Artificial Sequence
  Chemically Synthesized
QVQLQESGGGLVQAGGSLRLSCAASGSISYTSAMGWYRQAPGKEREFVAGITIGATTNYADSVKGRFTISRDNAKNTVYLQMNSLKPEDTAVYYCAVLVIDDYAHYYWGQGTQVTVSS

SEQ ID NO: 26963 - protein, 126 aa, Artificial Sequence
  Chemically Synthesized
QVQLQESGGGLVQAGGSLRLSCAASGTIFYIRRMGWYRQAPGKEREFVATITHGASTYYADSVKGRFTISRDNAKNTVYLQMNSLKPEDTAVYYCAVSRYSRPYPGASRWAQHDYWGQGTQVTVSS

SEQ ID NO: 26964 - protein, 118 aa, Artificial Sequence
  Chemically Synthesized
QVQLQESGGGLVQAGGSLRLSCAASGTISSISAMGWYRQAPGKEREFVATIGTGTTTNYADSVKGRFTISRDNAKNTVYLQMNSLKPEDTAVYYCAVVLIRRNVYYYWGQGTQVTVSS

SEQ ID NO: 26965 - protein, 124 aa, Artificial Sequence
  Chemically Synthesized
QVQLQESGGGLVQAGGSLRLSCAASGTISRSMGWYRQAPGKERELVATISSGSNTNYADSVKGRFTISRDNAKNTVYLQMNSLKPEDTAVYYCAVHPLPYYRAYYLSYYGHTYWGQGTQVTVSS

SEQ ID NO: 26966 - protein, 120 aa, Artificial Sequence
  Chemically Synthesized
QVQLQESGGGLVQAGGSLRLSCAASGSIFIEPDMGWYRQAPGKERELVAAIGTGGITYYADSVKGRFTISRDNAKNTVYLQMNSLKPEDTAVYYCAAYRGSQETSSALYWGQGTQVTVSS

SEQ ID NO: 26967 - protein, 126 aa, Artificial Sequence
  Chemically Synthesized
QVQLQESGGGLVQAGGSLRLSCAASGTIFRYTRMGWYRQAPGKERELVASITYGASTNYADSVKGRFTISRDNAKNTVYLQMNSLKPEDTAVYYCAAGDNPQARRSGVGSYFLYYWGQGTQVTVSS

SEQ ID NO: 26968 - protein, 112 aa, Artificial Sequence
  Chemically Synthesized
QVQLQESGGGLVQAGGSLRLSCAASGTIFIVDDMGWYRQAPGKERELVAAINYGATTYYADSVKGRFTISRDNAKNTVYLQMNSLKPEDTAVYYCAARHDYWGQGTQVTVSS

SEQ ID NO: 26969 - protein, 118 aa, Artificial Sequence
  Chemically Synthesized
QVQLQESGGGLVQAGGSLRLSCAASGTISWYYGMGWYRQAPGKEREFVAAITRGATTNYADSVKGRFTISRDNAKNTVYLQMNSLKPEDTAVYYCAAAAYSGRYHGYWGQGTQVTVSS

SEQ ID NO: 26970 - protein, 122 aa, Artificial Sequence
  Chemically Synthesized
QVQLQESGGGLVQAGGSLRLSCAASGTISKGVVMGWYRQAPGKEREFVAGINYGSTTNYADSVKGRFTISRDNAKNTVYLQMNSLKPEDTAVYYCAAAKWPDGRGDRYLYYWGQGTQVTVSS

SEQ ID NO: 26971 - protein, 122 aa, Artificial Sequence
  Chemically Synthesized
QVQLQESGGGLVQAGGSLRLSCAASGNIFTGGVMGWYRQAPGKEREFVASIGIGASTYYADSVKGRFTISRDNAKNTVYLQMNSLKPEDTAVYYCAAVDKPHRGKREYHYYWGQGTQVTVSS

SEQ ID NO: 26972 - protein, 125 aa, Artificial Sequence
  Chemically Synthesized
QVQLQESGGGLVQAGGSLRLSCAASGSISPSLSMGWYRQAPGKERELVALLLLVVLPYADSVKGRFTISRDNAKNTVYLQMNSLKPEDTAVYYCAVDDETAGWTSYDGADYLAYWGQGTQVTVSS

SEQ ID NO: 26973 - protein, 118 aa, Artificial Sequence
  Chemically Synthesized
QVQLQESGGGLVQAGGSLRLSCAASGTISDARYMGWYRQAPGKEREFVATINYGTSTNYADSVKGRFTISRDNAKNTVYLQMNSLKPEDTAVYYCAANRPRYDPYLYWGQGTQVTVSS

SEQ ID NO: 26974 - protein, 118 aa, Artificial Sequence
  Chemically Synthesized
QVQLQESGGGLVQAGGSLRLSCAASGTIFKPEIMGWYRQAPGKEREFVASITRGSSTNYADSVKGRFTISRDNAKNTVYLQMNSLKPEDTAVYYCAALDWYRSRLYYWGQGTQVTVSS

SEQ ID NO: 26975 - protein, 125 aa, Artificial Sequence
  Chemically Synthesized
QVQLQESGGGLVQAGGSLRLSCAASGYISRPSVMGWYRQAPGKERELVAAITYGTNTYYADSVKGRFTISRDNAKNTVYLQMNSLKPEDTAVYYCAVGPQADTIYYLKYPPYDYWGQGTQVTVSS

SEQ ID NO: 26976 - protein, 118 aa, Artificial Sequence
  Chemically Synthesized
QVQLQESGGGLVQAGGSLRLSCAASGSISSSDVMGWYRQAPGKEREFVAGIDKGGTTNYADSVKGRFTISRDNAKNTVYLQMNSLKPEDTAVYYCAVLQRNELYHWYWGQGTQVTVSS

SEQ ID NO: 26977 - protein, 118 aa, Artificial Sequence
  Chemically Synthesized
QVQLQESGGGLVQAGGSLRLSCAASGNISRRDAMGWYRQAPGKEREFVAAINPGSITNYADSVKGRFTISRDNAKNTVYLQMNSLKPEDTAVYYCAAITRHLYRHYYWGQGTQVTVSS

SEQ ID NO: 26978 - protein, 118 aa, Artificial Sequence
  Chemically Synthesized
QVQLQESGGGLVQAGGSLRLSCAASGTIFQWYFMGWYRQAPGKERELVAGIGLGTITNYADSVKGRFTISRDNAKNTVYLQMNSLKPEDTAVYYCAVRDASNDGYRYWGQGTQVTVSS

SEQ ID NO: 26979 - protein, 117 aa, Artificial Sequence
  Chemically Synthesized
QVQLQESGGGLVQAGGSLRLSCAASGSIFHINDMGWYRQAPGKERELVAALVVVLVPYADSVKGRFTISRDNAKNTVYLQMNSLKPEDTAVYYCAAPSIRRDPHWYWGQGTQVTVSS

SEQ ID NO: 26980 - protein, 118 aa, Artificial Sequence
  Chemically Synthesized
QVQLQESGGGLVQAGGSLRLSCAASGSIFPRGIMGWYRQAPGKEREFVASIGDGTITYYADSVKGRFTISRDNAKNTVYLQMNSLKPEDTAVYYCAALYRDTSLHYYWGQGTQVTVSS

SEQ ID NO: 26981 - protein, 126 aa, Artificial Sequence
  Chemically Synthesized
QVQLQESGGGLVQAGGSLRLSCAASGTIFRYSYMGWYRQAPGKEREFVATISRGGTTYYADSVKGRFTISRDNAKNTVYLQMNSLKPEDTAVYYCAVNHDAGSDYDEFRNRAHWYWGQGTQVTVSS

SEQ ID NO: 26982 - protein, 118 aa, Artificial Sequence
  Chemically Synthesized
QVQLQESGGGLVQAGGSLRLSCAASGSIFRDYYMGWYRQAPGKEREFVASIAFGASTNYADSVKGRFTISRDNAKNTVYLQMNSLKPEDTAVYYCAVAAYSHGWHAYWGQGTQVTVSS

SEQ ID NO: 26983 - protein, 126 aa, Artificial Sequence
  Chemically Synthesized
QVQLQESGGGLVQAGGSLRLSCAASGYISSVADMGWYRQAPGKERELVATISRGGSTNYADSVKGRFTISRDNAKNTVYLQMNSLKPEDTAVYYCAVRPYAVTQWGDTAWSYHRYWGQGTQVTVSS

SEQ ID NO: 26984 - protein, 122 aa, Artificial Sequence
  Chemically Synthesized
QVQLQESGGGLVQAGGSLRLSCAASGYIFPRFNMGWYRQAPGKERELVAGIAIGSTTQYADSVKGRFTISRDNAKNTVYLQMNSLKPEDTAVYYCAVYHTQDVPIDLNYVYWGQGTQVTVSS

SEQ ID NO: 26985 - protein, 123 aa, Artificial Sequence
  Chemically Synthesized
QVQLQESGGGLVQAGGSLRLSCAASGSISYRLVMGWYRQAPGKEREFVASIGRGASTNYADSVKGRFTISRDNAKNTVYLQMNSLKPEDTAVYYCAAVGRYWGDGNRNFFHYWGQGTQVTVSS

SEQ ID NO: 26986 - protein, 118 aa, Artificial Sequence
  Chemically Synthesized
QVQLQESGGGLVQAGGSLRLSCAASGSISYYDFMGWYRQAPGKERELVAAIAYGASTNYADSVKGRFTISRDNAKNTVYLQMNSLKPEDTAVYYCAAFPYELGHHFYWGQGTQVTVSS

SEQ ID NO: 26987 - protein, 122 aa, Artificial Sequence
  Chemically Synthesized
QVQLQESGGGLVQAGGSLRLSCAASGSISVLAAMGWYRQAPGKEREFVAGIGYGASTNYADSVKGRFTISRDNAKNTVYLQMNSLKPEDTAVYYCAALAVAEQTQRTTLYYWGQGTQVTVSS

SEQ ID NO: 26988 - protein, 121 aa, Artificial Sequence
  Chemically Synthesized
QVQLQESGGGLVQAGGSLRLSCAASGSIFVAYAMGWYRQAPGKEREFVAGINGGNTNYADSVKGRFTISRDNAKNTVYLQMNSLKPEDTAVYYCAALVYGADQGGVLLYYWGQGTQVTVSS

SEQ ID NO: 26989 - protein, 118 aa, Artificial Sequence
  Chemically Synthesized
QVQLQESGGGLVQAGGSLRLSCAASGNISGHTAMGWYRQAPGKEREFVASIASGSNTYYADSVKGRFTISRDNAKNTVYLQMNSLKPEDTAVYYCAAIGWSRIRYWYWGQGTQVTVSS

SEQ ID NO: 26990 - protein, 118 aa, Artificial Sequence
  Chemically Synthesized
QVQLQESGGGLVQAGGSLRLSCAASGTISWDVYMGWYRQAPGKEREFVAGIDAGAITYYADSVKGRFTISRDNAKNTVYLQMNSLKPEDTAVYYCAALYSFIGYHSYWGQGTQVTVSS

SEQ ID NO: 26991 - protein, 117 aa, Artificial Sequence
  Chemically Synthesized
QVQLQESGGGLVQAGGSLRLSCAASGTISRGRYMGWYRQAPGKEREFVASISPGSTTYYADSVKGRFTISRDNAKNTVYLQMNSLKPEDTAVYYCAVLYVRPTLWYWGQGTQVTVSS

SEQ ID NO: 26992 - protein, 118 aa, Artificial Sequence
  Chemically Synthesized
QVQLQESGGGLVQAGGSLRLSCAASGTISDRWIMGWYRQAPGKEREFVASIDNGGTTNYADSVKGRFTISRDNAKNTVYLQMNSLKPEDTAVYYCAALWYGQARLFYWGQGTQVTVSS

SEQ ID NO: 26993 - protein, 117 aa, Artificial Sequence
  Chemically Synthesized
QVQLQESGGGLVQAGGSLRLSCAASGTISGYDYMGWYRQAPGKEREFVASIATGTITNYADSVKGRFTISRDNAKNTVYLQMNSLKPEDTAVYYCAVPRTWLSNIYWGQGTQVTVSS

SEQ ID NO: 26994 - protein, 122 aa, Artificial Sequence
  Chemically Synthesized
QVQLQESGGGLVQAGGSLRLSCAASGTIFVSAIMGWYRQAPGKEREFVAGIAGGTITNYADSVKGRFTISRDNAKNTVYLQMNSLKPEDTAVYYCAAISDDGAEHSSYHYYWGQGTQVTVSS

SEQ ID NO: 26995 - protein, 118 aa, Artificial Sequence
  Chemically Synthesized
QVQLQESGGGLVQAGGSLRLSCAASGSISGWRGMGWYRQAPGKEREFVASITRGSITNYADSVKGRFTISRDNAKNTVYLQMNSLKPEDTAVYYCAVLYLHGYYFYYWGQGTQVTVSS

SEQ ID NO: 26996 - protein, 118 aa, Artificial Sequence
  Chemically Synthesized
QVQLQESGGGLVQAGGSLRLSCAASGTISGHYRMGWYRQAPGKERELVASIAYGATTNYADSVKGRFTISRDNAKNTVYLQMNSLKPEDTAVYYCAALSWTSTYHYYWGQGTQVTVSS

SEQ ID NO: 26997 - protein, 122 aa, Artificial Sequence
  Chemically Synthesized
QVQLQESGGGLVQAGGSLRLSCAASGTIFEDRVMGWYRQAPGKEREFVAGITDGGTTNYADSVKGRFTISRDNAKNTVYLQMNSLKPEDTAVYYCAAVARTRGYGEPYHGYWGQGTQVTVSS

SEQ ID NO: 26998 - protein, 122 aa, Artificial Sequence
  Chemically Synthesized
QVQLQESGGGLVQAGGSLRLSCAASGNIFGDIYMGWYRQAPGKERELVATIAYGTTTNYADSVKGRFTISRDNAKNTVYLQMNSLKPEDTAVYYCAVGSAYRVWGTTFLYYWGQGTQVTVSS

SEQ ID NO: 26999 - protein, 118 aa, Artificial Sequence
  Chemically Synthesized
QVQLQESGGGLVQAGGSLRLSCAASGSISTIYGMGWYRQAPGKEREFVATIAVGSNTYYADSVKGRFTISRDNAKNTVYLQMNSLKPEDTAVYYCAAVQRSVRYYYYWGQGTQVTVSS

SEQ ID NO: 27000 - protein, 118 aa, Artificial Sequence
  Chemically Synthesized
QVQLQESGGGLVQAGGSLRLSCAASGSISGTYAMGWYRQAPGKEREFVAGIAVGSTTYYADSVKGRFTISRDNAKNTVYLQMNSLKPEDTAVYYCAALGHNSHWHAYWGQGTQVTVSS

SEQ ID NO: 27001 - protein, 114 aa, Artificial Sequence
  Chemically Synthesized
QVQLQESGGGLVQAGGSLRLSCAASGSISLGLYMGWYRQAPGKEREFVAAISYGSSTNYADSVKGRFTISRDNAKNTVYLQMNSLKPEDTAVYYCAAWRTLDYWGQGTQVTVSS

SEQ ID NO: 27002 - protein, 116 aa, Artificial Sequence
  Chemically Synthesized
QVQLQESGGGLVQAGGSLRLSCAASGNIFYFGMGWYRQAPGKEREFVATIARGSSTNYADSVKGRFTISRDNAKNTVYLQMNSLKPEDTAVYYCAVNTLLVSVIYWGQGTQVTVSS

SEQ ID NO: 27003 - protein, 116 aa, Artificial Sequence
  Chemically Synthesized
QVQLQESGGGLVQAGGSLRLSCAASGSISGVMGWYRQAPGKEREFVASIGDGASTNYADSVKGRFTISRDNAKNTVYLQMNSLKPEDTAVYYCAVIWYDNGYHYYWGQGTQVTVSS

SEQ ID NO: 27004 - protein, 120 aa, Artificial Sequence
  Chemically Synthesized
QVQLQESGGGLVQAGGSLRLSCAASGYISDVRYMGWYRQAPGKEREFVAAITFGSNTNYADSVKGRFTISRDNAKNTVYLQMNSLKPEDTAVYYCAAVAQGTAYRWFYYWGQGTQVTVSS

SEQ ID NO: 27005 - protein, 118 aa, Artificial Sequence
  Chemically Synthesized
QVQLQESGGGLVQAGGSLRLSCAASGNIFGYGIMGWYRQAPGKEREFVASIGYGTNTNYADSVKGRFTISRDNAKNTVYLQMNSLKPEDTAVYYCAVLYYRRSYHAYWGQGTQVTVSS

SEQ ID NO: 27006 - protein, 118 aa, Artificial Sequence
  Chemically Synthesized
QVQLQESGGGLVQAGGSLRLSCAASGYIFKYVAMGWYRQAPGKERELVASISYGGSTNYADSVKGRFTISRDNAKNTVYLQMNSLKPEDTAVYYCAAVRYDGGYYYYWGQGTQVTVSS

SEQ ID NO: 27007 - protein, 126 aa, Artificial Sequence
  Chemically Synthesized
QVQLQESGGGLVQAGGSLRLSCAASGSISQPDAMGWYRQAPGKEREFVAGINVGANTYYADSVKGRFTISRDNAKNTVYLQMNSLKPEDTAVYYCAAYRADEYGIGLRRGDIFLYWGQGTQVTVSS

SEQ ID NO: 27008 - protein, 126 aa, Artificial Sequence
  Chemically Synthesized
QVQLQESGGGLVQAGGSLRLSCAASGTISYLGAMGWYRQAPGKEREFVAGIGLGTNTNYADSVKGRFTISRDNAKNTVYLQMNSLKPEDTAVYYCAAITYATNTDYLIRYGYHVYWGQGTQVTVSS

SEQ ID NO: 27009 - protein, 122 aa, Artificial Sequence
  Chemically Synthesized
QVQLQESGGGLVQAGGSLRLSCAASGSISSYFAMGWYRQAPGKEREFVAAIANGTNTNYADSVKGRFTISRDNAKNTVYLQMNSLKPEDTAVYYCAALARDKGYTVGYHAYWGQGTQVTVSS

SEQ ID NO: 27010 - protein, 118 aa, Artificial Sequence
  Chemically Synthesized
QVQLQESGGGLVQAGGSLRLSCAASGNISRRAYMGWYRQAPGKEREFVASIDYGASTNYADSVKGRFTISRDNAKNTVYLQMNSLKPEDTAVYYCAVADYSAVAFDYWGQGTQVTVSS

SEQ ID NO: 27011 - protein, 118 aa, Artificial Sequence
  Chemically Synthesized
QVQLQESGGGLVQAGGSLRLSCAASGSISHDDTMGWYRQAPGKEREFVAGINAGTITNYADSVKGRFTISRDNAKNTVYLQMNSLKPEDTAVYYCAALWFRGGWHWYWGQGTQVTVSS

SEQ ID NO: 27012 - protein, 118 aa, Artificial Sequence
  Chemically Synthesized
QVQLQESGGGLVQAGGSLRLSCAASGNIFAIHAMGWYRQAPGKEREFVAGITSGTTTNYADSVKGRFTISRDNAKNTVYLQMNSLKPEDTAVYYCAAYGRQSRYYGYWGQGTQVTVSS

SEQ ID NO: 27013 - protein, 118 aa, Artificial Sequence
  Chemically Synthesized
QVQLQESGGGLVQAGGSLRLSCAASGTISFLGDMGWYRQAPGKEREFVASIADGTSTYYADSVKGRFTISRDNAKNTVYLQMNSLKPEDTAVYYCAAVYVSDQPHPYWGQGTQVTVSS

SEQ ID NO: 27014 - protein, 118 aa, Artificial Sequence
  Chemically Synthesized
QVQLQESGGGLVQAGGSLRLSCAASGNIFGIIAMGWYRQAPGKEREFVASINGGTTTNYADSVKGRFTISRDNAKNTVYLQMNSLKPEDTAVYYCAVLYRETVYHAYWGQGTQVTVSS

SEQ ID NO: 27015 - protein, 118 aa, Artificial Sequence
  Chemically Synthesized
QVQLQESGGGLVQAGGSLRLSCAASGNISARTSMGWYRQAPGKEREFVATISSGGITNYADSVKGRFTISRDNAKNTVYLQMNSLKPEDTAVYYCAVLGGGNPYFYYWGQGTQVTVSS

SEQ ID NO: 27016 - protein, 123 aa, Artificial Sequence
  Chemically Synthesized
QVQLQESGGGLVQAGGSLRLSCAASGTISDANIMGWYRQAPGKERELVATIARGTTTNYADSVKGRFTISRDNAKNTVYLQMNSLKPEDTAVYYCAATCLRPGWLGWLAVSYWGQGTQVTVSS

SEQ ID NO: 27017 - protein, 120 aa, Artificial Sequence
  Chemically Synthesized
QVQLQESGGGLVQAGGSLRLSCAASGYISQRWYMGWYRQAPGKERELVASIGDGGNTYYADSVKGRFTISRDNAKNTVYLQMNSLKPEDTAVYYCAVVTTLLWVKKTMYWGQGTQVTVSS

SEQ ID NO: 27018 - protein, 118 aa, Artificial Sequence
  Chemically Synthesized
QVQLQESGGGLVQAGGSLRLSCAASGSIFSRPRMGWYRQAPGKEREFVAGISPGANTNYADSVKGRFTISRDNAKNTVYLQMNSLKPEDTAVYYCAVRPRIYYWHGYWGQGTQVTVSS

SEQ ID NO: 27019 - protein, 118 aa, Artificial Sequence
  Chemically Synthesized
QVQLQESGGGLVQAGGSLRLSCAASGYIFDYYGMGWYRQAPGKEREFVASIAKGTSTNYADSVKGRFTISRDNAKNTVYLQMNSLKPEDTAVYYCAAVVNTRGLHGYWGQGTQVTVSS

SEQ ID NO: 27020 - protein, 118 aa, Artificial Sequence
  Chemically Synthesized
QVQLQESGGGLVQAGGSLRLSCAASGNISDRPSMGWYRQAPGKEREFVASINVGGTTNYADSVKGRFTISRDNAKNTVYLQMNSLKPEDTAVYYCAVLTYYRGYLWYWGQGTQVTVSS

SEQ ID NO: 27021 - protein, 125 aa, Artificial Sequence
  Chemically Synthesized
QVQLQESGGGLVQAGGSLRLSCAASGNIFPLYGMGWYRQAPGKEREFVAGISGGTSTNYADSVKGRFTISRDNAKNTVYLQMNSLKPEDTAVYYCAVYGYSTQEDQGGRRYFYYWGQGTQVTVSS

SEQ ID NO: 27022 - protein, 118 aa, Artificial Sequence
  Chemically Synthesized
QVQLQESGGGLVQAGGSLRLSCAASGTIFQWALMGWYRQAPGKEREFVAGIGEGGSTNYADSVKGRFTISRDNAKNTVYLQMNSLKPEDTAVYYCAAIYYGRSYHAYWGQGTQVTVSS

SEQ ID NO: 27023 - protein, 122 aa, Artificial Sequence
  Chemically Synthesized
QVQLQESGGGLVQAGGSLRLSCAASGTIFDDTDMGWYRQAPGKERELVATIGYGGSTNYADSVKGRFTISRDNAKNTVYLQMNSLKPEDTAVYYCAARQPLFGDASNLHDYWGQGTQVTVSS

SEQ ID NO: 27024 - protein, 117 aa, Artificial Sequence
  Chemically Synthesized
QVQLQESGGGLVQAGGSLRLSCAASGTIFGHRKMGWYRQAPGKERELVAGITYGSTYYADSVKGRFTISRDNAKNTVYLQMNSLKPEDTAVYYCAVRPYWKGWFYYWGQGTQVTVSS

SEQ ID NO: 27025 - protein, 117 aa, Artificial Sequence
  Chemically Synthesized
QVQLQESGGGLVQAGGSLRLSCAASGYISDATYMGWYRQAPGKERELVAAIGYGTTTYYADSVKGRFTISRDNAKNTVYLQMNSLKPEDTAVYYCAAEYGEVTLMYWGQGTQVTVSS

SEQ ID NO: 27026 - protein, 118 aa, Artificial Sequence
  Chemically Synthesized
QVQLQESGGGLVQAGGSLRLSCAASGTISGYAAMGWYRQAPGKERELVAAIGAGATTYYADSVKGRFTISRDNAKNTVYLQMNSLKPEDTAVYYCAVLPYDYASLRYWGQGTQVTVSS

SEQ ID NO: 27027 - protein, 118 aa, Artificial Sequence
  Chemically Synthesized
QVQLQESGGGLVQAGGSLRLSCAASGNIFVIYAMGWYRQAPGKEREFVAGINPGGNTNYADSVKGRFTISRDNAKNTVYLQMNSLKPEDTAVYYCAATEYGPRHHYYWGQGTQVTVSS

SEQ ID NO: 27028 - protein, 118 aa, Artificial Sequence
  Chemically Synthesized
QVQLQESGGGLVQAGGSLRLSCAASGYISTRRYMGWYRQAPGKEREFVATITFGASTYYADSVKGRFTISRDNAKNTVYLQMNSLKPEDTAVYYCAVNSGRGWNFNYWGQGTQVTVSS

SEQ ID NO: 27029 - protein, 118 aa, Artificial Sequence
  Chemically Synthesized
QVQLQESGGGLVQAGGSLRLSCAASGYIFTVLGMGWYRQAPGKEREFVAGITGGGNTNYADSVKGRFTISRDNAKNTVYLQMNSLKPEDTAVYYCAAYVIAYTTSSYWGQGTQVTVSS

SEQ ID NO: 27030 - protein, 118 aa, Artificial Sequence
  Chemically Synthesized
QVQLQESGGGLVQAGGSLRLSCAASGSISRYDSMGWYRQAPGKEREFVAAIGYGGSTNYADSVKGRFTISRDNAKNTVYLQMNSLKPEDTAVYYCAVTYRDDTWHGYWGQGTQVTVSS

SEQ ID NO: 27031 - protein, 117 aa, Artificial Sequence
  Chemically Synthesized
QVQLQESGGGLVQAGGSLRLSCAASGSISIVSYMGWYRQAPGKEREFVATIDAGTNTYYADSVKGRFTISRDNAKNTVYLQMNSLKPEDTAVYYCAADTHYVSIFYWGQGTQVTVSS

SEQ ID NO: 27032 - protein, 118 aa, Artificial Sequence
  Chemically Synthesized
QVQLQESGGGLVQAGGSLRLSCAASGSISYDTNMGWYRQAPGKEREFVATITYGGTTYYADSVKGRFTISRDNAKNTVYLQMNSLKPEDTAVYYCAALWDERPVHYYWGQGTQVTVSS

SEQ ID NO: 27033 - protein, 122 aa, Artificial Sequence
  Chemically Synthesized
QVQLQESGGGLVQAGGSLRLSCAASGTIFDSDYMGWYRQAPGKEREFVATISSGGITNYADSVKGRFTISRDNAKNTVYLQMNSLKPEDTAVYYCAARVSGYVYDVTNLQYWGQGTQVTVSS

SEQ ID NO: 27034 - protein, 122 aa, Artificial Sequence
  Chemically Synthesized
QVQLQESGGGLVQAGGSLRLSCAASGTISVVPYMGWYRQAPGKEREFVAAISPGSTTNYADSVKGRFTISRDNAKNTVYLQMNSLKPEDTAVYYCAVAYWDSQANVGYLYYWGQGTQVTVSS

SEQ ID NO: 27035 - protein, 121 aa, Artificial Sequence
  Chemically Synthesized
QVQLQESGGGLVQAGGSLRLSCAASGYISRGSNMGWYRQAPGKEREFVAGIDGGANTYYADSVKGRFTISRDNAKNTVYLQMNSLKPEDTAVYYCAVTKRPNYAYYRHTYWGQGTQVTVSS

SEQ ID NO: 27036 - protein, 126 aa, Artificial Sequence
  Chemically Synthesized
QVQLQESGGGLVQAGGSLRLSCAASGTIFYLAYMGWYRQAPGKERELVAAIDQGGNTNYADSVKGRFTISRDNAKNTVYLQMNSLKPEDTAVYYCAVDLYWNDTLPYTYYVPYTYWGQGTQVTVSS

SEQ ID NO: 27037 - protein, 126 aa, Artificial Sequence
  Chemically Synthesized
QVQLQESGGGLVQAGGSLRLSCAASGSIFLGDYMGWYRQAPGKERELVATIGYGTITYYADSVKGRFTISRDNAKNTVYLQMNSLKPEDTAVYYCAVESWRHIIIPYRTVDDHRYWGQGTQVTVSS

SEQ ID NO: 27038 - protein, 118 aa, Artificial Sequence
  Chemically Synthesized
QVQLQESGGGLVQAGGSLRLSCAASGYISLDAFMGWYRQAPGKEREFVAGIDKGSTTNYADSVKGRFTISRDNAKNTVYLQMNSLKPEDTAVYYCAVTYYPYRQHYYWGQGTQVTVSS

SEQ ID NO: 27039 - protein, 118 aa, Artificial Sequence
  Chemically Synthesized
QVQLQESGGGLVQAGGSLRLSCAASGSISNYYSMGWYRQAPGKEREFVATIDQGTTTNYADSVKGRFTISRDNAKNTVYLQMNSLKPEDTAVYYCAALRKSPSWFGYWGQGTQVTVSS

SEQ ID NO: 27040 - protein, 118 aa, Artificial Sequence
  Chemically Synthesized
QVQLQESGGGLVQAGGSLRLSCAASGTIFQAGYMGWYRQAPGKERELVAAIGQGATTNYADSVKGRFTISRDNAKNTVYLQMNSLKPEDTAVYYCAANYALDATYDYWGQGTQVTVSS

SEQ ID NO: 27041 - protein, 118 aa, Artificial Sequence
  Chemically Synthesized
QVQLQESGGGLVQAGGSLRLSCAASGTISDDYVMGWYRQAPGKEREFVATIGYGGNTYYADSVKGRFTISRDNAKNTVYLQMNSLKPEDTAVYYCAVGAIHPGSHPYWGQGTQVTVSS

SEQ ID NO: 27042 - protein, 118 aa, Artificial Sequence
  Chemically Synthesized
QVQLQESGGGLVQAGGSLRLSCAASGTIFPAYHMGWYRQAPGKEREFVAAIALGGTTNYADSVKGRFTISRDNAKNTVYLQMNSLKPEDTAVYYCAVQYVWRLAHGYWGQGTQVTVSS

SEQ ID NO: 27043 - protein, 119 aa, Artificial Sequence
  Chemically Synthesized
QVQLQESGGGLVQAGGSLRLSCAASGNISRETSVMGWYRQAPGKERELVATIAAGANTNYADSVKGRFTISRDNAKNTVYLQMNSLKPEDTAVYYCAAHGGLFRDHVYWGQGTQVTVSS

SEQ ID NO: 27044 - protein, 118 aa, Artificial Sequence
  Chemically Synthesized
QVQLQESGGGLVQAGGSLRLSCAASGTIFDNPLMGWYRQAPGKEREFVAGIGYGGSTNYADSVKGRFTISRDNAKNTVYLQMNSLKPEDTAVYYCAVVTIGVNYHNYWGQGTQVTVSS

SEQ ID NO: 27045 - protein, 118 aa, Artificial Sequence
  Chemically Synthesized
QVQLQESGGGLVQAGGSLRLSCAASGTISSLFVMGWYRQAPGKEREFVAGIDGGTNTNYADSVKGRFTISRDNAKNTVYLQMNSLKPEDTAVYYCAAATYDGRYYYYWGQGTQVTVSS

SEQ ID NO: 27046 - protein, 118 aa, Artificial Sequence
  Chemically Synthesized
QVQLQESGGGLVQAGGSLRLSCAASGYISSIRGMGWYRQAPGKEREFVAAIGRGANTYYADSVKGRFTISRDNAKNTVYLQMNSLKPEDTAVYYCAAYSRPAWGYGYWGQGTQVTVSS

SEQ ID NO: 27047 - protein, 118 aa, Artificial Sequence
  Chemically Synthesized
QVQLQESGGGLVQAGGSLRLSCAASGSISFLGTMGWYRQAPGKEREFVAAIDYGATTNYADSVKGRFTISRDNAKNTVYLQMNSLKPEDTAVYYCAALLYYRERHYYWGQGTQVTVSS

SEQ ID NO: 27048 - protein, 119 aa, Artificial Sequence
  Chemically Synthesized
QVQLQESGGGLVQAGGSLRLSCAASGYISVDLDVMGWYRQAPGKEREFVATIDDGTNTNYADSVKGRFTISRDNAKNTVYLQMNSLKPEDTAVYYCAAYSQYGGHHSYWGQGTQVTVSS

SEQ ID NO: 27049 - protein, 118 aa, Artificial Sequence
  Chemically Synthesized
QVQLQESGGGLVQAGGSLRLSCAASGYIFADAIMGWYRQAPGKEREFVAAINLGSTTNYADSVKGRFTISRDNAKNTVYLQMNSLKPEDTAVYYCAAVHYYRYYHYYWGQGTQVTVSS

SEQ ID NO: 27050 - protein, 118 aa, Artificial Sequence
  Chemically Synthesized
QVQLQESGGGLVQAGGSLRLSCAASGNIFPFPGMGWYRQAPGKEREFVASISAGTNTNYADSVKGRFTISRDNAKNTVYLQMNSLKPEDTAVYYCAAYRRYQVWHSYWGQGTQVTVSS

SEQ ID NO: 27051 - protein, 118 aa, Artificial Sequence
  Chemically Synthesized
QVQLQESGGGLVQAGGSLRLSCAASGYISGLTRMGWYRQAPGKEREFVAGINYGTITYYADSVKGRFTISRDNAKNTVYLQMNSLKPEDTAVYYCAAIGGRGRYHYYWGQGTQVTVSS

SEQ ID NO: 27052 - protein, 118 aa, Artificial Sequence
  Chemically Synthesized
QVQLQESGGGLVQAGGSLRLSCAASGNISNWRGMGWYRQAPGKEREFVASINGGGITYYADSVKGRFTISRDNAKNTVYLQMNSLKPEDTAVYYCAVVVHDLSLHAYWGQGTQVTVSS

SEQ ID NO: 27053 - protein, 118 aa, Artificial Sequence
  Chemically Synthesized
QVQLQESGGGLVQAGGSLRLSCAASGTISVYQYMGWYRQAPGKEREFVAAIDPGTSTNYADSVKGRFTISRDNAKNTVYLQMNSLKPEDTAVYYCAAFDAVIYQHDYWGQGTQVTVSS

SEQ ID NO: 27054 - protein, 117 aa, Artificial Sequence
  Chemically Synthesized
QVQLQESGGGLVQAGGSLRLSCAASGNISILAYMGWYRQAPGKERELVPVLVRVVLPYADSVKGRFTISRDNAKNTVYLQMNSLKPEDTAVYYCAVGTAPYEPHEYWGQGTQVTVSS

SEQ ID NO: 27055 - protein, 122 aa, Artificial Sequence
  Chemically Synthesized
QVQLQESGGGLVQAGGSLRLSCAASGSISAYDNMGWYRQAPGKEREFVASIDPGASTNYADSVKGRFTISRDNAKNTVYLQMNSLKPEDTAVYYCAAVRQRVGHDIRYLYYWGQGTQVTVSS

SEQ ID NO: 27056 - protein, 118 aa, Artificial Sequence
  Chemically Synthesized
QVQLQESGGGLVQAGGSLRLSCAASGNISVRLVMGWYRQAPGKEREFVAAINVGSSTNYADSVKGRFTISRDNAKNTVYLQMNSLKPEDTAVYYCAALAYRAAWHWYWGQGTQVTVSS

SEQ ID NO: 27057 - protein, 118 aa, Artificial Sequence
  Chemically Synthesized
QVQLQESGGGLVQAGGSLRLSCAASGNIFDRASMGWYRQAPGKEREFVAGIGIGTTTYYADSVKGRFTISRDNAKNTVYLQMNSLKPEDTAVYYCAALDHSRPRFYYWGQGTQVTVSS

SEQ ID NO: 27058 - protein, 116 aa, Artificial Sequence
  Chemically Synthesized
QVQLQESGGGLVQAGGSLRLSCAASGSISEYVTMGWYRQAPGKERELVAAIDDGASTNYADSVKGRFTISRDNAKNTVYLQMNSLKPEDTAVYYCAVYDIARTSYWGQGTQVTVSS

SEQ ID NO: 27059 - protein, 118 aa, Artificial Sequence
  Chemically Synthesized
QVQLQESGGGLVQAGGSLRLSCAASGNISVKYYMGWYRQAPGKEREFVAGINLGGNTNYADSVKGRFTISRDNAKNTVYLQMNSLKPEDTAVYYCAVVWYEGDWHYYWGQGTQVTVSS

SEQ ID NO: 27060 - protein, 121 aa, Artificial Sequence
  Chemically Synthesized
QVQLQESGGGLVQAGGSLRLSCAASGSISGQYVMGWYRQAPGKEREFVAGIAQGGTTNYADSVKGRFTISRDNAKNTVYLQMNSLKPEDTAVYYCAAQDVYARDVSLTFYWGQGTQVTVSS

SEQ ID NO: 27061 - protein, 118 aa, Artificial Sequence
  Chemically Synthesized
QVQLQESGGGLVQAGGSLRLSCAASGTISRQGVMGWYRQAPGKEREFVAGITDGGNTNYADSVKGRFTISRDNAKNTVYLQMNSLKPEDTAVYYCAVIYTYIPYHYYWGQGTQVTVSS

SEQ ID NO: 27062 - protein, 122 aa, Artificial Sequence
  Chemically Synthesized
QVQLQESGGGLVQAGGSLRLSCAASGTIFDSTAMGWYRQAPGKERELVATINGGTTTNYADSVKGRFTISRDNAKNTVYLQMNSLKPEDTAVYYCAATRYYKYLYTTYYQYWGQGTQVTVSS

SEQ ID NO: 27063 - protein, 118 aa, Artificial Sequence
  Chemically Synthesized
QVQLQESGGGLVQAGGSLRLSCAASGSISTKSVMGWYRQAPGKERELVASISTGGNTYYADSVKGRFTISRDNAKNTVYLQMNSLKPEDTAVYYCAVVQYFGSWLYYWGQGTQVTVSS

SEQ ID NO: 27064 - protein, 122 aa, Artificial Sequence
  Chemically Synthesized
QVQLQESGGGLVQAGGSLRLSCAASGYIFSYNSMGWYRQAPGKERELVAAIGFGAITNYADSVKGRFTISRDNAKNTVYLQMNSLKPEDTAVYYCAAIARGYGTQAGWHGYWGQGTQVTVSS

SEQ ID NO: 27065 - protein, 118 aa, Artificial Sequence
  Chemically Synthesized
QVQLQESGGGLVQAGGSLRLSCAASGNISHATAMGWYRQAPGKEREFVASITYGTTTNYADSVKGRFTISRDNAKNTVYLQMNSLKPEDTAVYYCAAVSWADTWYHYWGQGTQVTVSS

SEQ ID NO: 27066 - protein, 118 aa, Artificial Sequence
  Chemically Synthesized
QVQLQESGGGLVQAGGSLRLSCAASGTISGYGAMGWYRQAPGKEREFVAAIGGGGITNYADSVKGRFTISRDNAKNTVYLQMNSLKPEDTAVYYCAAYYYDSQYFGYWGQGTQVTVSS

SEQ ID NO: 27067 - protein, 118 aa, Artificial Sequence
  Chemically Synthesized
QVQLQESGGGLVQAGGSLRLSCAASGNISGTEGMGWYRQAPGKEREFVATIGTGGTTNYADSVKGRFTISRDNAKNTVYLQMNSLKPEDTAVYYCAAIYYYYQWHFYWGQGTQVTVSS

SEQ ID NO: 27068 - protein, 122 aa, Artificial Sequence
  Chemically Synthesized
QVQLQESGGGLVQAGGSLRLSCAASGSIFTGILMGWYRQAPGKEREFVAGINDGGSTNYADSVKGRFTISRDNAKNTVYLQMNSLKPEDTAVYYCAAIIKYEIAHPAYHFYWGQGTQVTVSS

SEQ ID NO: 27069 - protein, 118 aa, Artificial Sequence
  Chemically Synthesized
QVQLQESGGGLVQAGGSLRLSCAASGSISSPDYMGWYRQAPGKEREFVAAINRGTTTNYADSVKGRFTISRDNAKNTVYLQMNSLKPEDTAVYYCAAIGATQRYHYYWGQGTQVTVSS

SEQ ID NO: 27070 - protein, 118 aa, Artificial Sequence
  Chemically Synthesized
QVQLQESGGGLVQAGGSLRLSCAASGNISADLVMGWYRQAPGKEREFVASIGVGTITYYADSVKGRFTISRDNAKNTVYLQMNSLKPEDTAVYYCAALFHLAGYHAYWGQGTQVTVSS

SEQ ID NO: 27071 - protein, 126 aa, Artificial Sequence
  Chemically Synthesized
QVQLQESGGGLVQAGGSLRLSCAASGTIFGYIYMGWYRQAPGKERELVAAINAGGSTYYADSVKGRFTISRDNAKNTVYLQMNSLKPEDTAVYYCAVEVYWIYYYGYIAPPWFNYWGQGTQVTVSS

SEQ ID NO: 27072 - protein, 118 aa, Artificial Sequence
  Chemically Synthesized
QVQLQESGGGLVQAGGSLRLSCAASGNISYARRMGWYRQAPGKERELVAAISRGASTYYADSVKGRFTISRDNAKNTVYLQMNSLKPEDTAVYYCAAVRGRPYYHPYWGQGTQVTVSS

SEQ ID NO: 27073 - protein, 122 aa, Artificial Sequence
  Chemically Synthesized
QVQLQESGGGLVQAGGSLRLSCAASGTISPRDAMGWYRQAPGKEREFVATITYGTSTYYADSVKGRFTISRDNAKNTVYLQMNSLKPEDTAVYYCAAVTRSRNGPSIGLGYWGQGTQVTVSS

SEQ ID NO: 27074 - protein, 118 aa, Artificial Sequence
  Chemically Synthesized
QVQLQESGGGLVQAGGSLRLSCAASGNISARTNMGWYRQAPGKEREFVAAIDVGTTTNYADSVKGRFTISRDNAKNTVYLQMNSLKPEDTAVYYCAVVANDAVLYLYWGQGTQVTVSS

SEQ ID NO: 27075 - protein, 109 aa, Artificial Sequence
  Chemically Synthesized
QVQLQESGGGLVQAGGSLRLSCAASGNIFYYYEMGWYRQAPGKERELVATINSGSNTNYADSVKGRFTISRDNAKNTVYLQMNSLKPEDTAVYYCAHYWGQGTQVTVSS

SEQ ID NO: 27076 - protein, 115 aa, Artificial Sequence
  Chemically Synthesized
QVQLQESGGGLVQAGGSLRLSCAASGTIFPYVMGWYRQAPGKEREFVAGITVVLPYADSVKGRFTISRDNAKNTVYLQMNSLKPEDTAVYYCAAVVSNRIAHPYWGQGTQVTVSS

SEQ ID NO: 27077 - protein, 125 aa, Artificial Sequence
  Chemically Synthesized
QVQLQESGGGLVQAGGSLRLSCAASGTIFDYDDMGWYRQAPGKEREFVASIAGGTTNYADSVKGRFTISRDNAKNTVYLQMNSLKPEDTAVYYCAVDTSSGYRVYTRRYYLHGYWGQGTQVTVSS

SEQ ID NO: 27078 - protein, 118 aa, Artificial Sequence
  Chemically Synthesized
QVQLQESGGGLVQAGGSLRLSCAASGTISPSYSMGWYRQAPGKEREFVASIDTGSSTYYADSVKGRFTISRDNAKNTVYLQMNSLKPEDTAVYYCAALTRTDRWLNYWGQGTQVTVSS

SEQ ID NO: 27079 - protein, 118 aa, Artificial Sequence
  Chemically Synthesized
QVQLQESGGGLVQAGGSLRLSCAASGNISRYSGMGWYRQAPGKEREFVAGITSGANTNYADSVKGRFTISRDNAKNTVYLQMNSLKPEDTAVYYCAVTYWDDIWFYYWGQGTQVTVSS

SEQ ID NO: 27080 - protein, 118 aa, Artificial Sequence
  Chemically Synthesized
QVQLQESGGGLVQAGGSLRLSCAASGNISSIYGMGWYRQAPGKERELVAGIAPGGITNYADSVKGRFTISRDNAKNTVYLQMNSLKPEDTAVYYCAAIATANGWHYYWGQGTQVTVSS

SEQ ID NO: 27081 - protein, 122 aa, Artificial Sequence
  Chemically Synthesized
QVQLQESGGGLVQAGGSLRLSCAASGSISVADTMGWYRQAPGKERELVATIGHGGTTYYADSVKGRFTISRDNAKNTVYLQMNSLKPEDTAVYYCAADQNSVDYTDVVHAYWGQGTQVTVSS

SEQ ID NO: 27082 - protein, 122 aa, Artificial Sequence
  Chemically Synthesized
QVQLQESGGGLVQAGGSLRLSCAASGTISGDIYMGWYRQAPGKEREFVAAITDGANTNYADSVKGRFTISRDNAKNTVYLQMNSLKPEDTAVYYCAALTEPYRYRDGWLYYWGQGTQVTVSS

SEQ ID NO: 27083 - protein, 118 aa, Artificial Sequence
  Chemically Synthesized
QVQLQESGGGLVQAGGSLRLSCAASGYISLDRRMGWYRQAPGKERELVAGIGKGANTYYADSVKGRFTISRDNAKNTVYLQMNSLKPEDTAVYYCAAKYRYSYYYGYWGQGTQVTVSS

SEQ ID NO: 27084 - protein, 118 aa, Artificial Sequence
  Chemically Synthesized
QVQLQESGGGLVQAGGSLRLSCAASGNIFQYKYMGWYRQAPGKEREFVAGIDEGGTTNYADSVKGRFTISRDNAKNTVYLQMNSLKPEDTAVYYCAVFDSGYVIHHYWGQGTQVTVSS

SEQ ID NO: 27085 - protein, 117 aa, Artificial Sequence
  Chemically Synthesized
QVQLQESGGGLVQAGGSLRLSCAASGSISYDGDMGWYRQAPGKERELVAGIGQGTTTNYADSVKGRFTISRDNAKNTVYLQMNSLKPEDTAVYYCAVYKSNSTSIYWGQGTQVTVSS

SEQ ID NO: 27086 - protein, 125 aa, Artificial Sequence
  Chemically Synthesized
QVQLQESGGGLVQAGGSLRLSCAASGTISTWFYMGWYRQAPGKERELVAGISGGTSTNYADSVKGRFTISRDNAKNTVYLQMNSLKPEDTAVYYCAVNLNPRAGPTYYHDLLGYWGQGTQVTVSS

SEQ ID NO: 27087 - protein, 118 aa, Artificial Sequence
  Chemically Synthesized
QVQLQESGGGLVQAGGSLRLSCAASGTIFTWGLMGWYRQAPGKERELVAGIDGGGNTYYADSVKGRFTISRDNAKNTVYLQMNSLKPEDTAVYYCAVDSDPSQRLGYWGQGTQVTVSS

SEQ ID NO: 27088 - protein, 120 aa, Artificial Sequence
  Chemically Synthesized
QVQLQESGGGLVQAGGSLRLSCAASGSISDISYMGWYRQAPGKERELVATINDGTNTNYADSVKGRFTISRDNAKNTVYLQMNSLKPEDTAVYYCAVYGDGGVPYTHFYWGQGTQVTVSS

SEQ ID NO: 27089 - protein, 121 aa, Artificial Sequence
  Chemically Synthesized
QVQLQESGGGLVQAGGSLRLSCAASGSISVDDYMGWYRQAPGKERELVAAISEVVIPYADSVKGRFTISRDNAKNTVYLQMNSLKPEDTAVYYCAVGDADPVLRNVYYYYWGQGTQVTVSS

SEQ ID NO: 27090 - protein, 118 aa, Artificial Sequence
  Chemically Synthesized
QVQLQESGGGLVQAGGSLRLSCAASGNISVYVYMGWYRQAPGKEREFVAAISDGANTYYADSVKGRFTISRDNAKNTVYLQMNSLKPEDTAVYYCAVRIRPVLLLTYWGQGTQVTVSS

SEQ ID NO: 27091 - protein, 118 aa, Artificial Sequence
  Chemically Synthesized
QVQLQESGGGLVQAGGSLRLSCAASGTISQYIDMGWYRQAPGKERELVAGIGNGSYYLYADSVKGRFTISRDNAKNTVYLQMNSLKPEDTAVYYCAVLTYVVYQYIYWGQGTQVTVSS

SEQ ID NO: 27092 - protein, 112 aa, Artificial Sequence
  Chemically Synthesized
QVQLQESGGGLVQAGGSLRLSCAASGSISVTNQMGWYRQAPGKEREFVAGIDYGSNTYYADSVKGRFTISRDNAKNTVYLQMNSLKPEDTAVYYCAVPYAYWGQGTQVTVSS

SEQ ID NO: 27093 - protein, 112 aa, Artificial Sequence
  Chemically Synthesized
QVQLQESGGGLVQAGGSLRLSCAASGNISEVAYMGWYRQAPGKEREFVAGIGTGATTYYADSVKGRFTISRDNAKNTVYLQMNSLKPEDTAVYYCAVPYAYWGQGTQVTVSS

SEQ ID NO: 27094 - protein, 120 aa, Artificial Sequence
  Chemically Synthesized
QVQLQESGGGLVQAGGSLRLSCAASGSIFRYIDMGWYRQAPGKERELVASINTVVIPYADSVKGRFTISRDNAKNTVYLQMNSLKPEDTAVYYCAVVGSTTTTFTVVIYWGQGTQVTVSS

SEQ ID NO: 27095 - protein, 126 aa, Artificial Sequence
  Chemically Synthesized
QVQLQESGGGLVQAGGSLRLSCAASGYIFVYYGMGWYRQAPGKEREFVAAIGDGGSTNYADSVKGRFTISRDNAKNTVYLQMNSLKPEDTAVYYCAALILRTDETRANAGKWHDYWGQGTQVTVSS

SEQ ID NO: 27096 - protein, 122 aa, Artificial Sequence
  Chemically Synthesized
QVQLQESGGGLVQAGGSLRLSCAASGYISRRVYMGWYRQAPGKEREFVAGIAQGGSTYYADSVKGRFTISRDNAKNTVYLQMNSLKPEDTAVYYCAAFDEWLLYTGSFFGYWGQGTQVTVSS

SEQ ID NO: 27097 - protein, 112 aa, Artificial Sequence
  Chemically Synthesized
QVQLQESGGGLVQAGGSLRLSCAASGYISRAQYMGWYRQAPGKEREFVAGIDTGTITYYADSVKGRFTISRDNAKNTVYLQMNSLKPEDTAVYYCAVPYRYWGQGTQVTVSS

SEQ ID NO: 27098 - protein, 112 aa, Artificial Sequence
  Chemically Synthesized
QVQLQESGGGLVQAGGSLRLSCAASGSISADDYMGWYRQAPGKEREFVAGIDPGSTTYYADSVKGRFTISRDNAKNTVYLQMNSLKPEDTAVYYCAVPYHYWGQGTQVTVSS

SEQ ID NO: 27099 - protein, 118 aa, Artificial Sequence
  Chemically Synthesized
QVQLQESGGGLVQAGGSLRLSCAASGSIFIGAAMGWYRQAPGKERELVAGIARGATTYYADSVKGRFTISRDNAKNTVYLQMNSLKPEDTAVYYCAAYYYATYRYDYWGQGTQVTVSS

SEQ ID NO: 27100 - protein, 122 aa, Artificial Sequence
  Chemically Synthesized
QVQLQESGGGLVQAGGSLRLSCAASGTIFAGPYMGWYRQAPGKERELVATIGYGGNTYYADSVKGRFTISRDNAKNTVYLQMNSLKPEDTAVYYCAVVPWRDNDQYRTFTYWGQGTQVTVSS

SEQ ID NO: 27101 - protein, 122 aa, Artificial Sequence
  Chemically Synthesized
QVQLQESGGGLVQAGGSLRLSCAASGSISEPVSMGWYRQAPGKERELVATIAAGTNTNYADSVKGRFTISRDNAKNTVYLQMNSLKPEDTAVYYCAVGDSGGANDRYGLGYWGQGTQVTVSS

SEQ ID NO: 27102 - protein, 125 aa, Artificial Sequence
  Chemically Synthesized
QVQLQESGGGLVQAGGSLRLSCAASGYIFGETAMGWYRQAPGKERELVAAITFGANTNYADSVKGRFTISRDNAKNTVYLQMNSLKPEDTAVYYCALGLLHLLLLLTRSRTVMYWGQGTQVTVSS

SEQ ID NO: 27103 - protein, 125 aa, Artificial Sequence
  Chemically Synthesized
QVQLQESGGGLVQAGGSLRLSCAASGLFFVLRMGWYRQAPGKEREFVAGIGYGGTTNYADSVKGRFTISRDNAKNTVYLQMNSLKPEDTAVYYCAATWLYYIDYDGYHRFPHQYWGQGTQVTVSS

SEQ ID NO: 27104 - protein, 112 aa, Artificial Sequence
  Chemically Synthesized
QVQLQESGGGLVQAGGSLRLSCAASGTISDPPAMGWYRQAPGKEREFVAGIDDGGTTYYADSVKGRFTISRDNAKNTVYLQMNSLKPEDTAVYYCAVPYRYWGQGTQVTVSS

SEQ ID NO: 27105 - protein, 121 aa, Artificial Sequence
  Chemically Synthesized
QVQLQESGGGLVQAGGSLRLSCAASGSISKYYPMGWYRQAPGKEREFVATIAYGGSTNYADSVKGRFTISRDNAKNTVYLQMNSLKPEDTAVYYCAVGHTRIRYYPTVMYWGQGTQVTVSS

SEQ ID NO: 27106 - protein, 112 aa, Artificial Sequence
  Chemically Synthesized
QVQLQESGGGLVQAGGSLRLSCAASGTIFPNVAMGWYRQAPGKEREFVAGIDSGTNTYYADSVKGRFTISRDNAKNTVYLQMNSLKPEDTAVYYCAVPYRYWGQGTQVTVSS

SEQ ID NO: 27107 - protein, 118 aa, Artificial Sequence
  Chemically Synthesized
QVQLQESGGGLVQAGGSLRLSCAASGTIFYVLYMGWYRQAPGKEREFVAAINYGGITYYADSVKGRFTISRDNAKNTVYLQMNSLKPEDTAVYYCAVYPWWYRLFTYWGQGTQVTVSS

SEQ ID NO: 27108 - protein, 112 aa, Artificial Sequence
  Chemically Synthesized
QVQLQESGGGLVQAGGSLRLSCAASGYIFDASMGWYRQAPGKERELVAGIDIGTSTYYADSVKGRFTISRDNAKNTVYLQMNSLKPEDTAVYYCAAYQHTYWGQGTQVTVSS

SEQ ID NO: 27109 - protein, 112 aa, Artificial Sequence
  Chemically Synthesized
QVQLQESGGGLVQAGGSLRLSCAASGYISGGNFMGWYRQAPGKEREFVAGIDPGTTTYYADSVKGRFTISRDNAKNTVYLQMNSLKPEDTAVYYCALPYAYWGQGTQVTVSS

SEQ ID NO: 27110 - protein, 122 aa, Artificial Sequence
  Chemically Synthesized
QVQLQESGGGLVQAGGSLRLSCAASGNISESSPMGWYRQAPGKEREFVAGIAAGANTYYADSVKGRFTISRDNAKNTVYLQMNSLKPEDTAVYYCAVYLWVDYTYAGFYEYWGQGTQVTVSS

SEQ ID NO: 27111 - protein, 119 aa, Artificial Sequence
  Chemically Synthesized
QVQLQESGGGLVQAGGSLRLSCAASGTISLEADMGWYRQAPGKERELVAAIASGTNNLYADSVKGRFTISRDNAKNTVYLQMNSLKPEDTAVYYCAAWYYLIRERQGYWGQGTQVTVSS

SEQ ID NO: 27112 - protein, 112 aa, Artificial Sequence
  Chemically Synthesized
QVQLQESGGGLVQAGGSLRLSCAASGNISYRYPMGWYRQAPGKEREFVAGIDPGSSTYYADSVKGRFTISRDNAKNTVYLQMNSLKPEDTAVYYCAVPYYYWGQGTQVTVSS

SEQ ID NO: 27113 - protein, 126 aa, Artificial Sequence
  Chemically Synthesized
QVQLQESGGGLVQAGGSLRLSCAASGNISWYKVMGWYRQAPGKERELVAGITYGASTYYADSVKGRFTISRDNAKNTVYLQMNSLKPEDTAVYYCAVIWGLPLLLHDVYGQAYSYWGQGTQVTVSS

SEQ ID NO: 27114 - protein, 118 aa, Artificial Sequence
  Chemically Synthesized
QVQLQESGGGLVQAGGSLRLSCAASGYIFQLDYMGWYRQAPGKEREFVAGISPGSTTYYADSVKGRFTISRDNAKNTVYLQMNSLKPEDTAVYYCAVVRGAADPYSYWGQGTQVTVSS

SEQ ID NO: 27115 - protein, 118 aa, Artificial Sequence
  Chemically Synthesized
QVQLQESGGGLVQAGGSLRLSCAASGTISADYLMGWYRQAPGKEREFVASIDDGTITNYADSVKGRFTISRDNAKNTVYLQMNSLKPEDTAVYYCAAEYTWFPQHWYWGQGTQVTVSS

SEQ ID NO: 27116 - protein, 118 aa, Artificial Sequence
  Chemically Synthesized
QVQLQESGGGLVQAGGSLRLSCAASGYISPDYGMGWYRQAPGKEREFVATIGLGASTYYADSVKGRFTISRDNAKNTVYLQMNSLKPEDTAVYYCAVYGESYYVLYYWGQGTQVTVSS

SEQ ID NO: 27117 - protein, 112 aa, Artificial Sequence
  Chemically Synthesized
QVQLQESGGGLVQAGGSLRLSCAASGSISLTQPMGWYRQAPGKEREFVAGIDRGASTYYADSVKGRFTISRDNAKNTVYLQMNSLKPEDTAVYYCAAPYRYWGQGTQVTVSS

SEQ ID NO: 27118 - protein, 117 aa, Artificial Sequence
  Chemically Synthesized
QVQLQESGGGLVQAGGSLRLSCAASGTIFVEGYMGWYRQAPGKEREFVAGIGGGSTYYADSVKGRFTISRDNAKNTVYLQMNSLKPEDTAVYYCAVPFYDWSPLWYWGQGTQVTVSS

SEQ ID NO: 27119 - protein, 118 aa, Artificial Sequence
  Chemically Synthesized
QVQLQESGGGLVQAGGSLRLSCAASGNISDPGVMGWYRQAPGKEREFVAGIDGGSNTYYADSVKGRFTISRDNAKNTVYLQMNSLKPEDTAVYYCAAVAYYGYRFGYWGQGTQVTVSS

SEQ ID NO: 27120 - protein, 118 aa, Artificial Sequence
  Chemically Synthesized
QVQLQESGGGLVQAGGSLRLSCAASGNISLYGYMGWYRQAPGKEREFVAAIDGGTTTYYADSVKGRFTISRDNAKNTVYLQMNSLKPEDTAVYYCAVGGPYGGDHWYWGQGTQVTVSS

SEQ ID NO: 27121 - protein, 118 aa, Artificial Sequence
  Chemically Synthesized
QVQLQESGGGLVQAGGSLRLSCAASGTIFSTEWMGWYRQAPGKEREFVATIDYGTSTNYADSVKGRFTISRDNAKNTVYLQMNSLKPEDTAVYYCAVVRNFYPYHIYWGQGTQVTVSS

SEQ ID NO: 27122 - protein, 126 aa, Artificial Sequence
  Chemically Synthesized
QVQLQESGGGLVQAGGSLRLSCAASGTIFRQGDMGWYRQAPGKEREFVAAITEGGSTYYADSVKGRFTISRDNAKNTVYLQMNSLKPEDTAVYYCAAHIWFGRDIYYRLIVEYPYWGQGTQVTVSS

SEQ ID NO: 27123 - protein, 112 aa, Artificial Sequence
  Chemically Synthesized
QVQLQESGGGLVQAGGSLRLSCAASGYIFQVDYMGWYRQAPGKEREFVAGISPGTITYYADSVKGRFTISRDNAKNTVYLQMNSLKPEDTAVYYCAVPFRYWGQGTQVTVSS

SEQ ID NO: 27124 - protein, 122 aa, Artificial Sequence
  Chemically Synthesized
QVQLQESGGGLVQAGGSLRLSCAASGYISRYDYMGWYRQAPGKERELVAGITYGTTTYYADSVKGRFTISRDNAKNTVYLQMNSLKPEDTAVYYCAVYLDYRGLASVYYIYWGQGTQVTVSS

SEQ ID NO: 27125 - protein, 118 aa, Artificial Sequence
  Chemically Synthesized
QVQLQESGGGLVQAGGSLRLSCAASGSISSNGYMGWYRQAPGKEREFVASIDTGGNTYYADSVKGRFTISRDNAKNTVYLQMNSLKPEDTAVYYCAVGTFRDYRLTYWGQGTQVTVSS

SEQ ID NO: 27126 - protein, 117 aa, Artificial Sequence
  Chemically Synthesized
QVQLQESGGGLVQAGGSLRLSCAASGSISPYDRMGWYRQAPGKEREFVAAITQGTITNYADSVKGRFTISRDNAKNTVYLQMNSLKPEDTAVYYCAAYVYPSLVMYWGQGTQVTVSS

SEQ ID NO: 27127 - protein, 121 aa, Artificial Sequence
  Chemically Synthesized
QVQLQESGGGLVQAGGSLRLSCAASGSISYIADMGWYRQAPGKEREFVASIAGGSTNYADSVKGRFTISRDNAKNTVYLQMNSLKPEDTAVYYCAATYEYLYFTDRGFAYWGQGTQVTVSS

SEQ ID NO: 27128 - protein, 118 aa, Artificial Sequence
  Chemically Synthesized
QVQLQESGGGLVQAGGSLRLSCAASGTISEITVMGWYRQAPGKERELVAAITDGSNTNYADSVKGRFTISRDNAKNTVYLQMNSLKPEDTAVYYCAVTYGPVNRHTYWGQGTQVTVSS

SEQ ID NO: 27129 - protein, 112 aa, Artificial Sequence
  Chemically Synthesized
QVQLQESGGGLVQAGGSLRLSCAASGNISHVDYMGWYRQAPGKEREFVAGIGAGTTTYYADSVKGRFTISRDNAKNTVYLQMNSLKPEDTAVYYCAVPYLYWGQGTQVTVSS

SEQ ID NO: 27130 - protein, 122 aa, Artificial Sequence
  Chemically Synthesized
QVQLQESGGGLVQAGGSLRLSCAASGTIFVIYYMGWYRQAPGKEREFVASIGNGGTTYYADSVKGRFTISRDNAKNTVYLQMNSLKPEDTAVYYCAVYYDQYNEQTGPHAYWGQGTQVTVSS

SEQ ID NO: 27131 - protein, 112 aa, Artificial Sequence
  Chemically Synthesized
QVQLQESGGGLVQAGGSLRLSCAASGSISVLDYMGWYRQAPGKEREFVAGIGTGSTTYYADSVKGRFTISRDNAKNTVYLQMNSLKPEDTAVYYCAAPYRYWGQGTQVTVSS

SEQ ID NO: 27132 - protein, 124 aa, Artificial Sequence
  Chemically Synthesized
QVQLQESGGGLVQAGGSLRLSCAASGNIFLSFMGWYRQAPGKERELVAAIAVGTITYYADSVKGRFTISRDNAKNTVYLQMNSLKPEDTAVYYCAAGQDSFIGTTFRWTLTLYWGQGTQVTVSS

SEQ ID NO: 27133 - protein, 117 aa, Artificial Sequence
  Chemically Synthesized
QVQLQESGGGLVQAGGSLRLSCAASGSIFYDYRMGWYRQAPGKEREFVAAISIGASTNYADSVKGRFTISRDNAKNTVYLQMNSLKPEDTAVYYCAADQRGSYFGYWGQGTQVTVSS

SEQ ID NO: 27134 - protein, 118 aa, Artificial Sequence
  Chemically Synthesized
QVQLQESGGGLVQAGGSLRLSCAASGYISGLRGMGWYRQAPGKEREFVASINYGTSTNYADSVKGRFTISRDNAKNTVYLQMNSLKPEDTAVYYCAAIYGVTGSFDYWGQGTQVTVSS

SEQ ID NO: 27135 - protein, 117 aa, Artificial Sequence
  Chemically Synthesized
QVQLQESGGGLVQAGGSLRLSCAASGNIFVPADMGWYRQAPGKERELVATIGQGSLPYADSVKGRFTISRDNAKNTVYLQMNSLKPEDTAVYYCANTDGWLTPLDYWGQGTQVTVSS

SEQ ID NO: 27136 - protein, 122 aa, Artificial Sequence
  Chemically Synthesized
QVQLQESGGGLVQAGGSLRLSCAASGTIFNGAYMGWYRQAPGKERELVAAIGAGSNTNYADSVKGRFTISRDNAKNTVYLQMNSLKPEDTAVYYCAAKWLHWYPRITGHGYWGQGTQVTVSS

SEQ ID NO: 27137 - protein, 118 aa, Artificial Sequence
  Chemically Synthesized
QVQLQESGGGLVQAGGSLRLSCAASGYISYLAAMGWYRQAPGKEREFVAGIDDGSITYYADSVKGRFTISRDNAKNTVYLQMNSLKPEDTAVYYCAAFEAIYSAYSYWGQGTQVTVSS

SEQ ID NO: 27138 - protein, 122 aa, Artificial Sequence
  Chemically Synthesized
QVQLQESGGGLVQAGGSLRLSCAASGNIFGYPTMGWYRQAPGKEREFVATISDGTNTYYADSVKGRFTISRDNAKNTVYLQMNSLKPEDTAVYYCAVHDNLTRYHRDAYYYWGQGTQVTVSS

SEQ ID NO: 27139 - protein, 118 aa, Artificial Sequence
  Chemically Synthesized
QVQLQESGGGLVQAGGSLRLSCAASGNISQYQEMGWYRQAPGKERELVASIGYGSSTNYADSVKGRFTISRDNAKNTVYLQMNSLKPEDTAVYYCAAYAYLSPWFLYWGQGTQVTVSS

SEQ ID NO: 27140 - protein, 125 aa, Artificial Sequence
  Chemically Synthesized
QVQLQESGGGLVQAGGSLRLSCAASGTISVLSMGWYRQAPGKEREFVAGIDPGAITYYADSVKGRFTISRDNAKNTVYLQMNSLKPEDTAVYYCAVWTYGYYYPRDEASTYHDYWGQGTQVTVSS

SEQ ID NO: 27141 - protein, 116 aa, Artificial Sequence
  Chemically Synthesized
QVQLQESGGGLVQAGGSLRLSCAASGYISYYNMGWYRQAPGKEREFVAAISGASTYYADSVKGRFTISRDNAKNTVYLQMNSLKPEDTAVYYCAATIIYLRDHDYWGQGTQVTVSS

SEQ ID NO: 27142 - protein, 118 aa, Artificial Sequence
  Chemically Synthesized
QVQLQESGGGLVQAGGSLRLSCAASGSISDGDTMGWYRQAPGKEREFVASIGSGGNTYYADSVKGRFTISRDNAKNTVYLQMNSLKPEDTAVYYCAVYGPFDRVYQYWGQGTQVTVSS

SEQ ID NO: 27143 - protein, 118 aa, Artificial Sequence
  Chemically Synthesized
QVQLQESGGGLVQAGGSLRLSCAASGNIFPLRTMGWYRQAPGKEREFVAAIDRGGITYYADSVKGRFTISRDNAKNTVYLQMNSLKPEDTAVYYCAARPYIAPVFRYWGQGTQVTVSS

SEQ ID NO: 27144 - protein, 125 aa, Artificial Sequence
  Chemically Synthesized
QVQLQESGGGLVQAGGSLRLSCAASGSISAAENMGWYRQAPGKEREFVAAIAYGSNTYYADSVKGRFTISRDNAKNTVYLQMNSLKPEDTAVYYCAVDGDISSPSSVYWGDHYYWGQGTQVTVSS

SEQ ID NO: 27145 - protein, 118 aa, Artificial Sequence
  Chemically Synthesized
QVQLQESGGGLVQAGGSLRLSCAASGTIFGTRGMGWYRQAPGKERELVAAITYGGSTNYADSVKGRFTISRDNAKNTVYLQMNSLKPEDTAVYYCAVNHQPWQYLGYWGQGTQVTVSS

SEQ ID NO: 27146 - protein, 118 aa, Artificial Sequence
  Chemically Synthesized
QVQLQESGGGLVQAGGSLRLSCAASGSIFAAIYMGWYRQAPGKEREFVAGIDPGATTYYADSVKGRFTISRDNAKNTVYLQMNSLKPEDTAVYYCAASDGSYYTHWYWGQGTQVTVSS

SEQ ID NO: 27147 - protein, 118 aa, Artificial Sequence
  Chemically Synthesized
QVQLQESGGGLVQAGGSLRLSCAASGTIFASNEMGWYRQAPGKERELVAGIDGGTITYYADSVKGRFTISRDNAKNTVYLQMNSLKPEDTAVYYCAAYYYTYQSYYYWGQGTQVTVSS

SEQ ID NO: 27148 - protein, 110 aa, Artificial Sequence
  Chemically Synthesized
QVQLQESGGGLVQAGGSLRLSCAASGTISGPYDMGWYRQAPGKERELVATITDGGSTYYADSVKGRFTISRDNAKNTVYLQMNSLKPEDTAVYYCALSYWGQGTQVTVSS

SEQ ID NO: 27149 - protein, 122 aa, Artificial Sequence
  Chemically Synthesized
QVQLQESGGGLVQAGGSLRLSCAASGSISDGYLMGWYRQAPGKERELVAGISDGATTYYADSVKGRFTISRDNAKNTVYLQMNSLKPEDTAVYYCAAPYFVYYAVVYALRYWGQGTQVTVSS

SEQ ID NO: 27150 - protein, 111 aa, Artificial Sequence
  Chemically Synthesized
QVQLQESGGGLVQAGGSLRLSCAASGNIFAADYMGWYRQAPGKEREFVASIDYGGITNYADSVKGRFTISRDNAKNTVYLQMNSLKPEDTAVYYCAAVIYWGQGTQVTVSS

SEQ ID NO: 27151 - protein, 118 aa, Artificial Sequence
  Chemically Synthesized
QVQLQESGGGLVQAGGSLRLSCAASGSISYAWSMGWYRQAPGKEREFVASINRGTTTNYADSVKGRFTISRDNAKNTVYLQMNSLKPEDTAVYYCAAWSFGFSVLGYWGQGTQVTVSS

SEQ ID NO: 27152 - protein, 116 aa, Artificial Sequence
  Chemically Synthesized
QVQLQESGGGLVQAGGSLRLSCAASGNISLSRGMGWYRQAPGKERELVASINRGAITYYADSVKGRFTISRDNAKNTVYLQMNSLKPEDTAVYYCAAYYHWRHPYWGQGTQVTVSS

SEQ ID NO: 27153 - protein, 118 aa, Artificial Sequence
  Chemically Synthesized
QVQLQESGGGLVQAGGSLRLSCAASGNISDYWAMGWYRQAPGKEREFVAGIANGGNTNYADSVKGRFTISRDNAKNTVYLQMNSLKPEDTAVYYCAVYGWIADIHDYWGQGTQVTVSS

SEQ ID NO: 27154 - protein, 117 aa, Artificial Sequence
  Chemically Synthesized
QVQLQESGGGLVQAGGSLRLSCAASGNIFLVDRMGWYRQAPGKERELVASIDYGSSTYYADSVKGRFTISRDNAKNTVYLQMNSLKPEDTAVYYCAVPEQTSLTIYWGQGTQVTVSS

SEQ ID NO: 27155 - protein, 112 aa, Artificial Sequence
  Chemically Synthesized
QVQLQESGGGLVQAGGSLRLSCAASGNISDRYAMGWYRQAPGKERELVAGIGAGATTYYADSVKGRFTISRDNAKNTVYLQMNSLKPEDTAVYYCAYLHRYWGQGTQVTVSS

SEQ ID NO: 27156 - protein, 122 aa, Artificial Sequence
  Chemically Synthesized
QVQLQESGGGLVQAGGSLRLSCAASGNIFDWAAMGWYRQAPGKEREFVAAINTGTNTYYADSVKGRFTISRDNAKNTVYLQMNSLKPEDTAVYYCAAWLYEGLDRGDRYIYWGQGTQVTVSS

SEQ ID NO: 27157 - protein, 118 aa, Artificial Sequence
  Chemically Synthesized
QVQLQESGGGLVQAGGSLRLSCAASGTIFRRAGMGWYRQAPGKEREFVAAIAFGASTNYADSVKGRFTISRDNAKNTVYLQMNSLKPEDTAVYYCAAAYYDDGYYWYWGQGTQVTVSS

SEQ ID NO: 27158 - protein, 126 aa, Artificial Sequence
  Chemically Synthesized
QVQLQESGGGLVQAGGSLRLSCAASGNIFDADLMGWYRQAPGKEREFVASIDQGANTYYADSVKGRFTISRDNAKNTVYLQMNSLKPEDTAVYYCAATDRPHYLYAYVTNDFFLYWGQGTQVTVSS

SEQ ID NO: 27159 - protein, 122 aa, Artificial Sequence
  Chemically Synthesized
QVQLQESGGGLVQAGGSLRLSCAASGSIFLLRYMGWYRQAPGKERELVASINFGSSTNYADSVKGRFTISRDNAKNTVYLQMNSLKPEDTAVYYCAAPIFKVRPRGAYHGYWGQGTQVTVSS

SEQ ID NO: 27160 - protein, 118 aa, Artificial Sequence
  Chemically Synthesized
QVQLQESGGGLVQAGGSLRLSCAASGTIFPYYAMGWYRQAPGKEREFVAAIGAGGTTYYADSVKGRFTISRDNAKNTVYLQMNSLKPEDTAVYYCAVAWLGDRFYWYWGQGTQVTVSS

SEQ ID NO: 27161 - protein, 118 aa, Artificial Sequence
  Chemically Synthesized
QVQLQESGGGLVQAGGSLRLSCAASGYISSTVYMGWYRQAPGKEREFVAGITRGATTNYADSVKGRFTISRDNAKNTVYLQMNSLKPEDTAVYYCAAYDTPAPDLNYWGQGTQVTVSS

SEQ ID NO: 27162 - protein, 118 aa, Artificial Sequence
  Chemically Synthesized
QVQLQESGGGLVQAGGSLRLSCAASGTISLPWRMGWYRQAPGKEREFVASISPGGITYYADSVKGRFTISRDNAKNTVYLQMNSLKPEDTAVYYCAAYGDYGNDFLYWGQGTQVTVSS

SEQ ID NO: 27163 - protein, 118 aa, Artificial Sequence
  Chemically Synthesized
QVQLQESGGGLVQAGGSLRLSCAASGNIFSIYTMGWYRQAPGKERELVAGIAYGGTTNYADSVKGRFTISRDNAKNTVYLQMNSLKPEDTAVYYCAVDWDPYTWLDYWGQGTQVTVSS

SEQ ID NO: 27164 - protein, 118 aa, Artificial Sequence
  Chemically Synthesized
QVQLQESGGGLVQAGGSLRLSCAASGNISVDLWMGWYRQAPGKEREFVASIAPGGITNYADSVKGRFTISRDNAKNTVYLQMNSLKPEDTAVYYCAVLRTRSQKLYYWGQGTQVTVSS

SEQ ID NO: 27165 - protein, 118 aa, Artificial Sequence
  Chemically Synthesized
QVQLQESGGGLVQAGGSLRLSCAASGSIFRVRAMGWYRQAPGKEREFVAGINYGGTTYYADSVKGRFTISRDNAKNTVYLQMNSLKPEDTAVYYCAADPRPGYTFGYWGQGTQVTVSS

SEQ ID NO: 27166 - protein, 118 aa, Artificial Sequence
  Chemically Synthesized
QVQLQESGGGLVQAGGSLRLSCAASGTIFPFDYMGWYRQAPGKERELVATINLGANYQYADSVKGRFTISRDNAKNTVYLQMNSLKPEDTAVYYCAVDRYDDDVFGYWGQGTQVTVSS

SEQ ID NO: 27167 - protein, 126 aa, Artificial Sequence
  Chemically Synthesized
QVQLQESGGGLVQAGGSLRLSCAASGNIFDDFSMGWYRQAPGKERELVATISDGGTTNYADSVKGRFTISRDNAKNTVYLQMNSLKPEDTAVYYCAVYYVDHGYYVSAQGYKYTYWGQGTQVTVSS

SEQ ID NO: 27168 - protein, 118 aa, Artificial Sequence
  Chemically Synthesized
QVQLQESGGGLVQAGGSLRLSCAASGTIFTRRAMGWYRQAPGKERELVAGIGGGASTYYADSVKGRFTISRDNAKNTVYLQMNSLKPEDTAVYYCAAAGLRYYRYRYWGQGTQVTVSS

SEQ ID NO: 27169 - protein, 122 aa, Artificial Sequence
  Chemically Synthesized
QVQLQESGGGLVQAGGSLRLSCAASGSIFGTASMGWYRQAPGKERELVASIDAGGSTNYADSVKGRFTISRDNAKNTVYLQMNSLKPEDTAVYYCAVLHRYRTDTSYRYDYWGQGTQVTVSS

SEQ ID NO: 27170 - protein, 126 aa, Artificial Sequence
  Chemically Synthesized
QVQLQESGGGLVQAGGSLRLSCAASGSISDTYYMGWYRQAPGKEREFVAGISYGASTYYADSVKGRFTISRDNAKNTVYLQMNSLKPEDTAVYYCAVYIYSVGTGTYYYTAHHSYWGQGTQVTVSS

SEQ ID NO: 27171 - protein, 106 aa, Artificial Sequence
  Chemically Synthesized
QVQLQESGGGLVQAGGSLRLSCAASGSIFVAAYMGWYRQAPGKERELVAIPYADSVKGRFTISRDNAKNTVYLQMNSLKPEDTAVYYCAARAYAYWGQGTQVTVSS

SEQ ID NO: 27172 - protein, 122 aa, Artificial Sequence
  Chemically Synthesized
QVQLQESGGGLVQAGGSLRLSCAASGTIFDPHTMGWYRQAPGKEREFVASINPGTTTYYADSVKGRFTISRDNAKNTVYLQMNSLKPEDTAVYYCAAYFYVDDYRQVQLYYWGQGTQVTVSS

SEQ ID NO: 27173 - protein, 118 aa, Artificial Sequence
  Chemically Synthesized
QVQLQESGGGLVQAGGSLRLSCAASGTISYYPVMGWYRQAPGKEREFVASIGSGGTTYYADSVKGRFTISRDNAKNTVYLQMNSLKPEDTAVYYCAVTYIVSVYFYYWGQGTQVTVSS

SEQ ID NO: 27174 - protein, 118 aa, Artificial Sequence
  Chemically Synthesized
QVQLQESGGGLVQAGGSLRLSCAASGYISRTTTMGWYRQAPGKEREFVASINVGAITYYADSVKGRFTISRDNAKNTVYLQMNSLKPEDTAVYYCAAITKPRWYHRYWGQGTQVTVSS

SEQ ID NO: 27175 - protein, 126 aa, Artificial Sequence
  Chemically Synthesized
QVQLQESGGGLVQAGGSLRLSCAASGSIFGTRVMGWYRQAPGKERELVAAITDGANTNYADSVKGRFTISRDNAKNTVYLQMNSLKPEDTAVYYCAASWRRRLTSLTAWRAYYAYWGQGTQVTVSS

SEQ ID NO: 27176 - protein, 118 aa, Artificial Sequence
  Chemically Synthesized
QVQLQESGGGLVQAGGSLRLSCAASGSIFRRAIMGWYRQAPGKEREFVAGIGRGGITNYADSVKGRFTISRDNAKNTVYLQMNSLKPEDTAVYYCAVHRYYHNPLAYWGQGTQVTVSS

SEQ ID NO: 27177 - protein, 115 aa, Artificial Sequence
  Chemically Synthesized
QVQLQESGGGLVQAGGSLRLSCAASGTISGQTNMGWYRQAPGKERELVAAINYGSSTYYADSVKGRFTISRDNAKNTVYLQMNSLKPEDTAVYYCAVTDPLHFYWGQGTQVTVSS

SEQ ID NO: 27178 - protein, 114 aa, Artificial Sequence
  Chemically Synthesized
QVQLQESGGGLVQAGGSLRLSCAASGLVTVMGWYRQAPGKEREFVASIATGANTYYADSVKGRFTISRDNAKNTVYLQMNSLKPEDTAVYYCAAIQRVSSSMYWGQGTQVTVSS

SEQ ID NO: 27179 - protein, 118 aa, Artificial Sequence
  Chemically Synthesized
QVQLQESGGGLVQAGGSLRLSCAASGTISLWRRMGWYRQAPGKERELVAGIGWGGNTYYADSVKGRFTISRDNAKNTVYLQMNSLKPEDTAVYYCAARALYTVSHRYWGQGTQVTVSS

SEQ ID NO: 27180 - protein, 118 aa, Artificial Sequence
  Chemically Synthesized
QVQLQESGGGLVQAGGSLRLSCAASGYIFRPHYMGWYRQAPGKEREFVATITGGASTYYADSVKGRFTISRDNAKNTVYLQMNSLKPEDTAVYYCAVKGTRSFGHAYWGQGTQVTVSS

SEQ ID NO: 27181 - protein, 114 aa, Artificial Sequence
  Chemically Synthesized
QVQLQESGGGLVQAGGSLRLSCAASGYISALRRMGWYRQAPGKEREFVASITYGSTTYYADSVKGRFTISRDNAKNTVYLQMNSLKPEDTAVYYCAVGRYYLYWGQGTQVTVSS

SEQ ID NO: 27182 - protein, 126 aa, Artificial Sequence
  Chemically Synthesized
QVQLQESGGGLVQAGGSLRLSCAASGTIFYYATMGWYRQAPGKERELVATINYGGITNYADSVKGRFTISRDNAKNTVYLQMNSLKPEDTAVYYCAVDHVGVVVTPWRASPPFLYWGQGTQVTVSS

SEQ ID NO: 27183 - protein, 118 aa, Artificial Sequence
  Chemically Synthesized
QVQLQESGGGLVQAGGSLRLSCAASGSIFAPYDMGWYRQAPGKEREFVATIGYGGTTYYADSVKGRFTISRDNAKNTVYLQMNSLKPEDTAVYYCAARVEVDWRLRYWGQGTQVTVSS

SEQ ID NO: 27184 - protein, 126 aa, Artificial Sequence
  Chemically Synthesized
QVQLQESGGGLVQAGGSLRLSCAASGYISSPYRMGWYRQAPGKERELVASITYGASTNYADSVKGRFTISRDNAKNTVYLQMNSLKPEDTAVYYCAAVAGVYLDDDLGLIGDFRYWGQGTQVTVSS

SEQ ID NO: 27185 - protein, 118 aa, Artificial Sequence
  Chemically Synthesized
QVQLQESGGGLVQAGGSLRLSCAASGTIFSAYRMGWYRQAPGKEREFVAAIARGGITNYADSVKGRFTISRDNAKNTVYLQMNSLKPEDTAVYYCAARWSLGYQLSYWGQGTQVTVSS

SEQ ID NO: 27186 - protein, 118 aa, Artificial Sequence
  Chemically Synthesized
QVQLQESGGGLVQAGGSLRLSCAASGNIFRIHRMGWYRQAPGKERELVAGINRGGTTYYADSVKGRFTISRDNAKNTVYLQMNSLKPEDTAVYYCAVRYWFDQRHEYWGQGTQVTVSS

SEQ ID NO: 27187 - protein, 121 aa, Artificial Sequence
  Chemically Synthesized
QVQLQESGGGLVQAGGSLRLSCAASGSISRRSMGWYRQAPGKERELVASIGYGATTNYADSVKGRFTISRDNAKNTVYLQMNSLKPEDTAVYYCAAGVTGAPDPGYVHNYWGQGTQVTVSS

SEQ ID NO: 27188 - protein, 126 aa, Artificial Sequence
  Chemically Synthesized
QVQLQESGGGLVQAGGSLRLSCAASGYISGLVGMGWYRQAPGKERELVAAITLGGTTNYADSVKGRFTISRDNAKNTVYLQMNSLKPEDTAVYYCAVSPVYNLKLGRQTTYVHYYWGQGTQVTVSS

SEQ ID NO: 27189 - protein, 118 aa, Artificial Sequence
  Chemically Synthesized
QVQLQESGGGLVQAGGSLRLSCAASGYISDGGIMGWYRQAPGKEREFVATISYGSNTNYADSVKGRFTISRDNAKNTVYLQMNSLKPEDTAVYYCAVFYFYWYPFAYWGQGTQVTVSS

SEQ ID NO: 27190 - protein, 122 aa, Artificial Sequence
  Chemically Synthesized
QVQLQESGGGLVQAGGSLRLSCAASGNISTFGSMGWYRQAPGKERELVASIGGGSSTYYADSVKGRFTISRDNAKNTVYLQMNSLKPEDTAVYYCAVGYYSRYKRYVDYGYWGQGTQVTVSS

SEQ ID NO: 27191 - protein, 117 aa, Artificial Sequence
  Chemically Synthesized
QVQLQESGGGLVQAGGSLRLSCAASGNIFLLVGMGWYRQAPGKERELVATIDYGSTTYYADSVKGRFTISRDNAKNTVYLQMNSLKPEDTAVYYCAAALGTSVRLYWGQGTQVTVSS

SEQ ID NO: 27192 - protein, 118 aa, Artificial Sequence
  Chemically Synthesized
QVQLQESGGGLVQAGGSLRLSCAASGSIFVRWAMGWYRQAPGKEREFVAAIAYGAITYYADSVKGRFTISRDNAKNTVYLQMNSLKPEDTAVYYCAVGYYDGRGYWYWGQGTQVTVSS

SEQ ID NO: 27193 - protein, 116 aa, Artificial Sequence
  Chemically Synthesized
QVQLQESGGGLVQAGGSLRLSCAASGTISWDVYMGWYRQAPGKEREFVASISRGVPYADSVKGRFTISRDNAKNTVYLQMNSLKPEDTAVYYCAAGVGTYVLLVYWGQGTQVTVSS

SEQ ID NO: 27194 - protein, 126 aa, Artificial Sequence
  Chemically Synthesized
QVQLQESGGGLVQAGGSLRLSCAASGSIFNNLNMGWYRQAPGKEREFVAGISHGGTTNYADSVKGRFTISRDNAKNTVYLQMNSLKPEDTAVYYCAVLRVRYLTRWYRYDGYHSYWGQGTQVTVSS

SEQ ID NO: 27195 - protein, 118 aa, Artificial Sequence
  Chemically Synthesized
QVQLQESGGGLVQAGGSLRLSCAASGSIFGLAFMGWYRQAPGKERELVAAIDNGTSTNYADSVKGRFTISRDNAKNTVYLQMNSLKPEDTAVYYCAASDYDTDGFDYWGQGTQVTVSS

SEQ ID NO: 27196 - protein, 121 aa, Artificial Sequence
  Chemically Synthesized
QVQLQESGGGLVQAGGSLRLSCAASGYISALDGMGWYRQAPGKERELVAGIGEGANTNYADSVKGRFTISRDNAKNTVYLQMNSLKPEDTAVYYCAVRTPEHPRYYKTHYWGQGTQVTVSS

SEQ ID NO: 27197 - protein, 118 aa, Artificial Sequence
  Chemically Synthesized
QVQLQESGGGLVQAGGSLRLSCAASGSISIYFNMGWYRQAPGKEREFVAGIGVGGTTYYADSVKGRFTISRDNAKNTVYLQMNSLKPEDTAVYYCAVAARVGRDHVYWGQGTQVTVSS

SEQ ID NO: 27198 - protein, 115 aa, Artificial Sequence
  Chemically Synthesized
QVQLQESGGGLVQAGGSLRLSCAASGNISDYDYMGWYRQAPGKEREFVAGISPGANTNYADSVKGRFTISRDNAKNTVYLQMNSLKPEDTAVYYCAAYRHDHDYWGQGTQVTVSS

SEQ ID NO: 27199 - protein, 115 aa, Artificial Sequence
  Chemically Synthesized
QVQLQESGGGLVQAGGSLRLSCAASGSIFLDSGMGWYRQAPGKEREFVAGIDTGATYYADSVKGRFTISRDNAKNTVYLQMNSLKPEDTAVYYCAAPDDGPFSYWGQGTQVTVSS

SEQ ID NO: 27200 - protein, 121 aa, Artificial Sequence
  Chemically Synthesized
QVQLQESGGGLVQAGGSLRLSCAASGNIFDDRTMGWYRQAPGKEREFVAAIAIGTSTNYADSVKGRFTISRDNAKNTVYLQMNSLKPEDTAVYYCAASTVVKLKTLSTMYWGQGTQVTVSS

SEQ ID NO: 27201 - protein, 126 aa, Artificial Sequence
  Chemically Synthesized
QVQLQESGGGLVQAGGSLRLSCAASGSISRSSYMGWYRQAPGKERELVATINDGANTNYADSVKGRFTISRDNAKNTVYLQMNSLKPEDTAVYYCAAPWDDAYPVEDYEGLIYDYWGQGTQVTVSS

SEQ ID NO: 27202 - protein, 122 aa, Artificial Sequence
  Chemically Synthesized
QVQLQESGGGLVQAGGSLRLSCAASGSIFHHYRMGWYRQAPGKERELVATISRGSTTNYADSVKGRFTISRDNAKNTVYLQMNSLKPEDTAVYYCAVKPIQGLYGRYFHVYWGQGTQVTVSS

SEQ ID NO: 27203 - protein, 118 aa, Artificial Sequence
  Chemically Synthesized
QVQLQESGGGLVQAGGSLRLSCAASGNISYYYVMGWYRQAPGKEREFVATIAVGGSTNYADSVKGRFTISRDNAKNTVYLQMNSLKPEDTAVYYCAVWQRDWIYHYYWGQGTQVTVSS

SEQ ID NO: 27204 - protein, 117 aa, Artificial Sequence
  Chemically Synthesized
QVQLQESGGGLVQAGGSLRLSCAASGNIFPSPMGWYRQAPGKERELVASIAPGGSTYYADSVKGRFTISRDNAKNTVYLQMNSLKPEDTAVYYCAARLYRWLHLLYWGQGTQVTVSS

SEQ ID NO: 27205 - protein, 115 aa, Artificial Sequence
  Chemically Synthesized
QVQLQESGGGLVQAGGSLRLSCAASGNIFQLRAMGWYRQAPGKEREFVAGIALGGNTYYADSVKGRFTISRDNAKNTVYLQMNSLKPEDTAVYYCAARGRYHSYWGQGTQVTVSS

SEQ ID NO: 27206 - protein, 126 aa, Artificial Sequence
  Chemically Synthesized
QVQLQESGGGLVQAGGSLRLSCAASGNISWTGAMGWYRQAPGKEREFVASIDWGSNTNYADSVKGRFTISRDNAKNTVYLQMNSLKPEDTAVYYCAVGWYNTDDQDASRGTFHYYWGQGTQVTVSS

SEQ ID NO: 27207 - protein, 118 aa, Artificial Sequence
  Chemically Synthesized
QVQLQESGGGLVQAGGSLRLSCAASGSISRPYSMGWYRQAPGKEREFVAGISYGSNTNYADSVKGRFTISRDNAKNTVYLQMNSLKPEDTAVYYCAVARRVRFWHRYWGQGTQVTVSS

SEQ ID NO: 27208 - protein, 122 aa, Artificial Sequence
  Chemically Synthesized
QVQLQESGGGLVQAGGSLRLSCAASGTISYLRVMGWYRQAPGKERELVASIAVGGTTNYADSVKGRFTISRDNAKNTVYLQMNSLKPEDTAVYYCAAYYSLHYWWGRTHGYWGQGTQVTVSS

SEQ ID NO: 27209 - protein, 121 aa, Artificial Sequence
  Chemically Synthesized
QVQLQESGGGLVQAGGSLRLSCAASGTISTPQGMGWYRQAPGKEREFVAGITSGGTTYYADSVKGRFTISRDNAKNTVYLQMNSLKPEDTAVYYCAVYSDDDRAYEIHVYWGQGTQVTVSS

SEQ ID NO: 27210 - protein, 122 aa, Artificial Sequence
  Chemically Synthesized
QVQLQESGGGLVQAGGSLRLSCAASGTISSPSGMGWYRQAPGKEREFVAGITVGGSTYYADSVKGRFTISRDNAKNTVYLQMNSLKPEDTAVYYCAAYDYTGYDSYTLFVYWGQGTQVTVSS

SEQ ID NO: 27211 - protein, 122 aa, Artificial Sequence
  Chemically Synthesized
QVQLQESGGGLVQAGGSLRLSCAASGSISDYYGMGWYRQAPGKEREFVAGIGLGSSTYYADSVKGRFTISRDNAKNTVYLQMNSLKPEDTAVYYCAAYVSIGYNDRDLYRYWGQGTQVTVSS

SEQ ID NO: 27212 - protein, 121 aa, Artificial Sequence
  Chemically Synthesized
QVQLQESGGGLVQAGGSLRLSCAASGSISRPLAMGWYRQAPGKEREFVAGITGGTTYYADSVKGRFTISRDNAKNTVYLQMNSLKPEDTAVYYCAVYVYGETSTDTILIYWGQGTQVTVSS

SEQ ID NO: 27213 - protein, 122 aa, Artificial Sequence
  Chemically Synthesized
QVQLQESGGGLVQAGGSLRLSCAASGNIFVGQAMGWYRQAPGKEREFVAGITGGGSTYYADSVKGRFTISRDNAKNTVYLQMNSLKPEDTAVYYCAAYDRGSRDDDYIHVYWGQGTQVTVSS

SEQ ID NO: 27214 - protein, 122 aa, Artificial Sequence
  Chemically Synthesized
QVQLQESGGGLVQAGGSLRLSCAASGSISYVAGMGWYRQAPGKEREFVASITIGGNTYYADSVKGRFTISRDNAKNTVYLQMNSLKPEDTAVYYCAVYFYSDDVVNEIHAYWGQGTQVTVSS

SEQ ID NO: 27215 - protein, 122 aa, Artificial Sequence
  Chemically Synthesized
QVQLQESGGGLVQAGGSLRLSCAASGSISQYVGMGWYRQAPGKEREFVAGITPGSSTYYADSVKGRFTISRDNAKNTVYLQMNSLKPEDTAVYYCAAYYDDPQWPSAIFAYWGQGTQVTVSS

SEQ ID NO: 27216 - protein, 123 aa, Artificial Sequence
  Chemically Synthesized
QVQLQESGGGLVQAGGSLRLSCAASGTISDWPGMGWYRQAPGKEREFVAGIDRGGTTYYADSVKGRFTISRDNAKNTVYLQMNSLKPEDTAVYYCAAYVTDIAPDIYGLYRYWGQGTQVTVSS

SEQ ID NO: 27217 - protein, 118 aa, Artificial Sequence
  Chemically Synthesized
QVQLQESGGGLVQAGGSLRLSCAASGSISAPDGMGWYRQAPGKEREFVAAITYGGITYYADSVKGRFTISRDNAKNTVYLQMNSLKPEDTAVYYCAFYFYTLRDYPYWGQGTQVTVSS

SEQ ID NO: 27218 - protein, 122 aa, Artificial Sequence
  Chemically Synthesized
QVQLQESGGGLVQAGGSLRLSCAASGNISTVYAMGWYRQAPGKEREFVAGITYGSNTYYADSVKGRFTISRDNAKNTVYLQMNSLKPEDTAVYYCAVYVTRFYYDDNLFVYWGQGTQVTVSS

SEQ ID NO: 27219 - protein, 122 aa, Artificial Sequence
  Chemically Synthesized
QVQLQESGGGLVQAGGSLRLSCAASGNISGIRGMGWYRQAPGKEREFVAGITYGGITYYADSVKGRFTISRDNAKNTVYLQMNSLKPEDTAVYYCAAYLYPLDYSEELYRYWGQGTQVTVSS

SEQ ID NO: 27220 - protein, 122 aa, Artificial Sequence
  Chemically Synthesized
QVQLQESGGGLVQAGGSLRLSCAASGSIFLPGGMGWYRQAPGKEREFVAGITWGGNTYYADSVKGRFTISRDNAKNTVYLQMNSLKPEDTAVYYCAVFVSYADTDQAYHIYWGQGTQVTVSS

SEQ ID NO: 27221 - protein, 118 aa, Artificial Sequence
  Chemically Synthesized
QVQLQESGGGLVQAGGSLRLSCAASGSISDTLGMGWYRQAPGKEREFVAGITAGASTYYADSVKGRFTISRDNAKNTVYLQMNSLKPEDTAVYYCAAYYYASALLSYWGQGTQVTVSS

SEQ ID NO: 27222 - protein, 122 aa, Artificial Sequence
  Chemically Synthesized
QVQLQESGGGLVQAGGSLRLSCAASGSISGYDGMGWYRQAPGKEREFVAGISAGSTTYYADSVKGRFTISRDNAKNTVYLQMNSLKPEDTAVYYCAVYVYDPYDYIGLLVYWGQGTQVTVSS

SEQ ID NO: 27223 - protein, 122 aa, Artificial Sequence
  Chemically Synthesized
QVQLQESGGGLVQAGGSLRLSCAASGTIFYYGAMGWYRQAPGKEREFVAGITVGGSTYYADSVKGRFTISRDNAKNTVYLQMNSLKPEDTAVYYCAVYAYYYDEWGEILVYWGQGTQVTVSS

SEQ ID NO: 27224 - protein, 122 aa, Artificial Sequence
  Chemically Synthesized
QVQLQESGGGLVQAGGSLRLSCAASGYISYLAGMGWYRQAPGKEREFVAGISSGATTYYADSVKGRFTISRDNAKNTVYLQMNSLKPEDTAVYYCAAWWYDDTYDDNLYRYWGQGTQVTVSS

SEQ ID NO: 27225 - protein, 126 aa, Artificial Sequence
  Chemically Synthesized
QVQLQESGGGLVQAGGSLRLSCAASGTISGQLGMGWYRQAPGKEREFVAGIADGGNTYYADSVKGRFTISRDNAKNTVYLQMNSLKPEDTAVYYCAVYYQASYDIAGDDGYIHVYWGQGTQVTVSS

SEQ ID NO: 27226 - protein, 122 aa, Artificial Sequence
  Chemically Synthesized
QVQLQESGGGLVQAGGSLRLSCAASGNISGQDSMGWYRQAPGKEREFVAGITRGASTYYADSVKGRFTISRDNAKNTVYLQMNSLKPEDTAVYYCAAFIDNGLGDSVLHLYWGQGTQVTVSS

SEQ ID NO: 27227 - protein, 118 aa, Artificial Sequence
  Chemically Synthesized
QVQLQESGGGLVQAGGSLRLSCAASGYIFVYYYMGWYRQAPGKEREFVATIGQGSITYYADSVKGRFTISRDNAKNTVYLQMNSLKPEDTAVYYCAAYNSTQYHHWYWGQGTQVTVSS

SEQ ID NO: 27228 - protein, 118 aa, Artificial Sequence
  Chemically Synthesized
QVQLQESGGGLVQAGGSLRLSCAASGNIFVSYGMGWYRQAPGKEREFVAAIARGSTTYYADSVKGRFTISRDNAKNTVYLQMNSLKPEDTAVYYCAVGYISHWTHSYWGQGTQVTVSS

SEQ ID NO: 27229 - protein, 118 aa, Artificial Sequence
  Chemically Synthesized
QVQLQESGGGLVQAGGSLRLSCAASGYIFRYHSMGWYRQAPGKEREFVAGINYGSNTNYADSVKGRFTISRDNAKNTVYLQMNSLKPEDTAVYYCAAFYTYVPLYQYWGQGTQVTVSS

SEQ ID NO: 27230 - protein, 121 aa, Artificial Sequence
  Chemically Synthesized
QVQLQESGGGLVQAGGSLRLSCAASGSIFPWSFMGWYRQAPGKEREFVATIAGGNTYYADSVKGRFTISRDNAKNTVYLQMNSLKPEDTAVYYCAATYLWGYTGFSWHYYWGQGTQVTVSS

SEQ ID NO: 27231 - protein, 118 aa, Artificial Sequence
  Chemically Synthesized
QVQLQESGGGLVQAGGSLRLSCAASGSIFYHWYMGWYRQAPGKERELVASIASGGNTNYADSVKGRFTISRDNAKNTVYLQMNSLKPEDTAVYYCAAYDAISWYYNYWGQGTQVTVSS

SEQ ID NO: 27232 - protein, 117 aa, Artificial Sequence
  Chemically Synthesized
QVQLQESGGGLVQAGGSLRLSCAASGSIFPWSFMGWYRQAPGKEREFVATIAGGNTYYADSVKGRFTISRDNAKNTVYLQMNSLKPEDTAVYYCAVYYFWYVGLYYWGQGTQVTVSS

SEQ ID NO: 27233 - protein, 122 aa, Artificial Sequence
  Chemically Synthesized
QVQLQESGGGLVQAGGSLRLSCAASGYIFGGHNMGWYRQAPGKERELVASINVGSITNYADSVKGRFTISRDNAKNTVYLQMNSLKPEDTAVYYCAVDIDYGTYGGRYFYYWGQGTQVTVSS

SEQ ID NO: 27234 - protein, 118 aa, Artificial Sequence
  Chemically Synthesized
QVQLQESGGGLVQAGGSLRLSCAASGSIFAIGFMGWYRQAPGKEREFVAGIARGTSTYYADSVKGRFTISRDNAKNTVYLQMNSLKPEDTAVYYCAAWDQQRFLYGYWGQGTQVTVSS

SEQ ID NO: 27235 - protein, 118 aa, Artificial Sequence
  Chemically Synthesized
QVQLQESGGGLVQAGGSLRLSCAASGYIFVYDHMGWYRQAPGKERELVAGIDVGGSTYYADSVKGRFTISRDNAKNTVYLQMNSLKPEDTAVYYCAVYGQYWFGYRYWGQGTQVTVSS

SEQ ID NO: 27236 - protein, 121 aa, Artificial Sequence
  Chemically Synthesized
QVQLQESGGGLVQAGGSLRLSCAASGYIFTRLMGWYRQAPGKEREFVASIGYGSSTNYADSVKGRFTISRDNAKNTVYLQMNSLKPEDTAVYYCAAWEYVRDGRYQYHPYWGQGTQVTVSS

SEQ ID NO: 27237 - protein, 122 aa, Artificial Sequence
  Chemically Synthesized
QVQLQESGGGLVQAGGSLRLSCAASGNIFRGYPMGWYRQAPGKERELVAAIADGAITYYADSVKGRFTISRDNAKNTVYLQMNSLKPEDTAVYYCAAVYGEGDSNDYPHEYWGQGTQVTVSS

SEQ ID NO: 27238 - protein, 117 aa, Artificial Sequence
  Chemically Synthesized
QVQLQESGGGLVQAGGSLRLSCAASGSISSWRAMGWYRQAPGKEREFVATIDRGGTTYYADSVKGRFTISRDNAKNTVYLQMNSLKPEDTAVYYCAVPTYVFSTIYWGQGTQVTVSS

SEQ ID NO: 27239 - protein, 122 aa, Artificial Sequence
  Chemically Synthesized
QVQLQESGGGLVQAGGSLRLSCAASGTISRAYYMGWYRQAPGKERELVAAITSGANTYYADSVKGRFTISRDNAKNTVYLQMNSLKPEDTAVYYCAVYEHSADYDYYPYGYWGQGTQVTVSS

SEQ ID NO: 27240 - protein, 122 aa, Artificial Sequence
  Chemically Synthesized
QVQLQESGGGLVQAGGSLRLSCAASGYISYLTVMGWYRQAPGKERELVASIAYGANTNYADSVKGRFTISRDNAKNTVYLQMNSLKPEDTAVYYCAASRRQYYRLAVLHTYWGQGTQVTVSS

SEQ ID NO: 27241 - protein, 125 aa, Artificial Sequence
  Chemically Synthesized
QVQLQESGGGLVQAGGSLRLSCAASGYIFGGGQMGWYRQAPGKEREFVASIGRGASTYYADSVKGRFTISRDNAKNTVYLQMNSLKPEDTAVYYCAVDQYRDTKWYVLSRVLIYWGQGTQVTVSS

SEQ ID NO: 27242 - protein, 122 aa, Artificial Sequence
  Chemically Synthesized
QVQLQESGGGLVQAGGSLRLSCAASGNIFFLLQMGWYRQAPGKERELVAGIAHGASTNYADSVKGRFTISRDNAKNTVYLQMNSLKPEDTAVYYCAVAGSPVLIVVTVFGYWGQGTQVTVSS

SEQ ID NO: 27243 - protein, 123 aa, Artificial Sequence
  Chemically Synthesized
QVQLQESGGGLVQAGGSLRLSCAASGYIFRYYKMGWYRQAPGKEREFVASISTGGSTYYADSVKGRFTISRDNAKNTVYLQMNSLKPEDTAVYYCAATGPGRTDYGDAYHSYWGQGTQVTVSS

SEQ ID NO: 27244 - protein, 122 aa, Artificial Sequence
  Chemically Synthesized
QVQLQESGGGLVQAGGSLRLSCAASGNISSDVYMGWYRQAPGKERELVAGIGKGTITNYADSVKGRFTISRDNAKNTVYLQMNSLKPEDTAVYYCAATLQTYANVYAFYSYWGQGTQVTVSS

SEQ ID NO: 27245 - protein, 126 aa, Artificial Sequence
  Chemically Synthesized
QVQLQESGGGLVQAGGSLRLSCAASGTISHYTYMGWYRQAPGKERELVAGIDIGTITNYADSVKGRFTISRDNAKNTVYLQMNSLKPEDTAVYYCAVWYDVSLVNDVHPSVWYYYWGQGTQVTVSS

SEQ ID NO: 27246 - protein, 117 aa, Artificial Sequence
  Chemically Synthesized
QVQLQESGGGLVQAGGSLRLSCAASGTIFHGYVMGWYRQAPGKEREFVASITYGSTTNYADSVKGRFTISRDNAKNTVYLQMNSLKPEDTAVYYCAVTVSESPHSYWGQGTQVTVSS

SEQ ID NO: 27247 - protein, 121 aa, Artificial Sequence
  Chemically Synthesized
QVQLQESGGGLVQAGGSLRLSCAASGTIFSVRMGWYRQAPGKERELVAGINYGATTNYADSVKGRFTISRDNAKNTVYLQMNSLKPEDTAVYYCAAYDGDGYGWDPAHSYWGQGTQVTVSS

SEQ ID NO: 27248 - protein, 118 aa, Artificial Sequence
  Chemically Synthesized
QVQLQESGGGLVQAGGSLRLSCAASGNISRRPDMGWYRQAPGKERELVAGIDDGATTNYADSVKGRFTISRDNAKNTVYLQMNSLKPEDTAVYYCAVRYAHRTFLEYWGQGTQVTVSS

SEQ ID NO: 27249 - protein, 112 aa, Artificial Sequence
  Chemically Synthesized
QVQLQESGGGLVQAGGSLRLSCAASGYISTYTLMGWYRQAPGKERELVAGIGYGTNTNYADSVKGRFTISRDNAKNTVYLQMNSLKPEDTAVYYCATLNIYWGQGTQVTVSS

SEQ ID NO: 27250 - protein, 118 aa, Artificial Sequence
  Chemically Synthesized
QVQLQESGGGLVQAGGSLRLSCAASGTIFDYFYMGWYRQAPGKEREFVASISLGTNTYYADSVKGRFTISRDNAKNTVYLQMNSLKPEDTAVYYCAAKYWHYRIHDYWGQGTQVTVSS

SEQ ID NO: 27251 - protein, 118 aa, Artificial Sequence
  Chemically Synthesized
QVQLQESGGGLVQAGGSLRLSCAASGNISHVTTMGWYRQAPGKEREFVATIGGGTNTYYADSVKGRFTISRDNAKNTVYLQMNSLKPEDTAVYYCAAGYETSDALYYWGQGTQVTVSS

SEQ ID NO: 27252 - protein, 117 aa, Artificial Sequence
  Chemically Synthesized
QVQLQESGGGLVQAGGSLRLSCAASGYIFYSDVMGWYRQAPGKEREFVATIGTVLIPYADSVKGRFTISRDNAKNTVYLQMNSLKPEDTAVYYCAASYDSQLEFGYWGQGTQVTVSS

SEQ ID NO: 27253 - protein, 122 aa, Artificial Sequence
  Chemically Synthesized
QVQLQESGGGLVQAGGSLRLSCAASGYISAYTAMGWYRQAPGKEREFVASITSGASTYYADSVKGRFTISRDNAKNTVYLQMNSLKPEDTAVYYCAVLQERDVPYTYDYGYWGQGTQVTVSS

SEQ ID NO: 27254 - protein, 122 aa, Artificial Sequence
  Chemically Synthesized
QVQLQESGGGLVQAGGSLRLSCAASGNIFVVDAMGWYRQAPGKEREFVAGISDGSTTYYADSVKGRFTISRDNAKNTVYLQMNSLKPEDTAVYYCAVEGYYYTPGVQTYDYWGQGTQVTVSS

SEQ ID NO: 27255 - protein, 126 aa, Artificial Sequence
  Chemically Synthesized
QVQLQESGGGLVQAGGSLRLSCAASGTISAYYPMGWYRQAPGKERELVAAIAGGAITYYADSVKGRFTISRDNAKNTVYLQMNSLKPEDTAVYYCAVTYIRYIGNIWHYVDSYGYWGQGTQVTVSS

SEQ ID NO: 27256 - protein, 117 aa, Artificial Sequence
  Chemically Synthesized
QVQLQESGGGLVQAGGSLRLSCAASGTISPDWMGWYRQAPGKERELVATITYGTITYYADSVKGRFTISRDNAKNTVYLQMNSLKPEDTAVYYCAVRLAPDRYLEYWGQGTQVTVSS

SEQ ID NO: 27257 - protein, 118 aa, Artificial Sequence
  Chemically Synthesized
QVQLQESGGGLVQAGGSLRLSCAASGTIFTRGSMGWYRQAPGKERELVAAITYGSITYYADSVKGRFTISRDNAKNTVYLQMNSLKPEDTAVYYCAAQETYGFVLGYWGQGTQVTVSS

SEQ ID NO: 27258 - protein, 126 aa, Artificial Sequence
  Chemically Synthesized
QVQLQESGGGLVQAGGSLRLSCAASGSISAATTMGWYRQAPGKERELVAAISAGGTTYYADSVKGRFTISRDNAKNTVYLQMNSLKPEDTAVYYCAAHYRYSTYYRGSNRGDYIYWGQGTQVTVSS

SEQ ID NO: 27259 - protein, 118 aa, Artificial Sequence
  Chemically Synthesized
QVQLQESGGGLVQAGGSLRLSCAASGTIFDSDNMGWYRQAPGKERELVASITGGTTTNYADSVKGRFTISRDNAKNTVYLQMNSLKPEDTAVYYCAAGPIAWFGFRYWGQGTQVTVSS

SEQ ID NO: 27260 - protein, 116 aa, Artificial Sequence
  Chemically Synthesized
QVQLQESGGGLVQAGGSLRLSCAASGYISRDNVMGWYRQAPGKERELVAAIAGGASTNYADSVKGRFTISRDNAKNTVYLQMNSLKPEDTAVYYCAARFAGPYWYWGQGTQVTVSS

SEQ ID NO: 27261 - protein, 116 aa, Artificial Sequence
  Chemically Synthesized
QVQLQESGGGLVQAGGSLRLSCAASGSISTLVVMGWYRQAPGKEREFVASIDGGGTTNYADSVKGRFTISRDNAKNTVYLQMNSLKPEDTAVYYCAVNSRAWLPYWGQGTQVTVSS

SEQ ID NO: 27262 - protein, 118 aa, Artificial Sequence
  Chemically Synthesized
QVQLQESGGGLVQAGGSLRLSCAASGTIFARSSMGWYRQAPGKEREFVAGIAVGASTYYADSVKGRFTISRDNAKNTVYLQMNSLKPEDTAVYYCAAIVQTASLHTYWGQGTQVTVSS

SEQ ID NO: 27263 - protein, 116 aa, Artificial Sequence
  Chemically Synthesized
QVQLQESGGGLVQAGGSLRLSCAASGSILLTMGWYRQAPGKERELVASIDPGSNTNYADSVKGRFTISRDNAKNTVYLQMNSLKPEDTAVYYCAVDTYDDSPHIYWGQGTQVTVSS

SEQ ID NO: 27264 - protein, 118 aa, Artificial Sequence
  Chemically Synthesized
QVQLQESGGGLVQAGGSLRLSCAASGSIFWQYDMGWYRQAPGKEREFVAGIDVGATTYYADSVKGRFTISRDNAKNTVYLQMNSLKPEDTAVYYCAATLWDGVRHWYWGQGTQVTVSS

SEQ ID NO: 27265 - protein, 125 aa, Artificial Sequence
  Chemically Synthesized
QVQLQESGGGLVQAGGSLRLSCAASGNIFWDYMGWYRQAPGKERELVAGINYGTNTNYADSVKGRFTISRDNAKNTVYLQMNSLKPEDTAVYYCAAWDLLDTDFWYPYNVLYSYWGQGTQVTVSS

SEQ ID NO: 27266 - protein, 122 aa, Artificial Sequence
  Chemically Synthesized
QVQLQESGGGLVQAGGSLRLSCAASGTISHRTGMGWYRQAPGKERELVASIDQGSITYYADSVKGRFTISRDNAKNTVYLQMNSLKPEDTAVYYCAVDPYPYFNWDDSYWYWGQGTQVTVSS

SEQ ID NO: 27267 - protein, 122 aa, Artificial Sequence
  Chemically Synthesized
QVQLQESGGGLVQAGGSLRLSCAASGTIFWTYVMGWYRQAPGKEREFVAGIDVGGNTYYADSVKGRFTISRDNAKNTVYLQMNSLKPEDTAVYYCAVYIGDSYGYARYHRYWGQGTQVTVSS

SEQ ID NO: 27268 - protein, 126 aa, Artificial Sequence
  Chemically Synthesized
QVQLQESGGGLVQAGGSLRLSCAASGNIFDRFAMGWYRQAPGKERELVAAIDFGGSTNYADSVKGRFTISRDNAKNTVYLQMNSLKPEDTAVYYCAADYQYFDYQAYYQTRDFQYWGQGTQVTVSS

SEQ ID NO: 27269 - protein, 118 aa, Artificial Sequence
  Chemically Synthesized
QVQLQESGGGLVQAGGSLRLSCAASGNISLVYSMGWYRQAPGKEREFVAGIGGGGNTYYADSVKGRFTISRDNAKNTVYLQMNSLKPEDTAVYYCAAAWRYPAQHGYWGQGTQVTVSS

SEQ ID NO: 27270 - protein, 126 aa, Artificial Sequence
  Chemically Synthesized
QVQLQESGGGLVQAGGSLRLSCAASGTIFWYFPMGWYRQAPGKEREFVASIDYGTTTNYADSVKGRFTISRDNAKNTVYLQMNSLKPEDTAVYYCAAGEPRGQDGYIYTAKFHTYWGQGTQVTVSS

SEQ ID NO: 27271 - protein, 126 aa, Artificial Sequence
  Chemically Synthesized
QVQLQESGGGLVQAGGSLRLSCAASGTIFWQYGMGWYRQAPGKEREFVASINAGGTTYYADSVKGRFTISRDNAKNTVYLQMNSLKPEDTAVYYCAVRYYNWEATRGYTGLYHSYWGQGTQVTVSS

SEQ ID NO: 27272 - protein, 122 aa, Artificial Sequence
  Chemically Synthesized
QVQLQESGGGLVQAGGSLRLSCAASGTIFVDADMGWYRQAPGKERELVATIGPGGSTYYADSVKGRFTISRDNAKNTVYLQMNSLKPEDTAVYYCAVPWFGYFDRDLLYGYWGQGTQVTVSS

SEQ ID NO: 27273 - protein, 122 aa, Artificial Sequence
  Chemically Synthesized
QVQLQESGGGLVQAGGSLRLSCAASGTIFWSYNMGWYRQAPGKERELVATISYGSITYYADSVKGRFTISRDNAKNTVYLQMNSLKPEDTAVYYCAAQTTEGASDRRKHYYWGQGTQVTVSS

SEQ ID NO: 27274 - protein, 118 aa, Artificial Sequence
  Chemically Synthesized
QVQLQESGGGLVQAGGSLRLSCAASGNISGIWWMGWYRQAPGKEREFVAAISYGTTTYYADSVKGRFTISRDNAKNTVYLQMNSLKPEDTAVYYCAVGTRPGGQYHYWGQGTQVTVSS

SEQ ID NO: 27275 - protein, 122 aa, Artificial Sequence
  Chemically Synthesized
QVQLQESGGGLVQAGGSLRLSCAASGNISWKITMGWYRQAPGKERELVAAIGAGAITYYADSVKGRFTISRDNAKNTVYLQMNSLKPEDTAVYYCAAAYNYPTDAPHYHTYWGQGTQVTVSS

SEQ ID NO: 27276 - protein, 118 aa, Artificial Sequence
  Chemically Synthesized
QVQLQESGGGLVQAGGSLRLSCAASGNISPERGMGWYRQAPGKEREFVAGINPGTTTYYADSVKGRFTISRDNAKNTVYLQMNSLKPEDTAVYYCAAYRPGGRTHYYWGQGTQVTVSS

SEQ ID NO: 27277 - protein, 122 aa, Artificial Sequence
  Chemically Synthesized
QVQLQESGGGLVQAGGSLRLSCAASGNIFPAVEMGWYRQAPGKEREFVATIADGTNTYYADSVKGRFTISRDNAKNTVYLQMNSLKPEDTAVYYCAADFTYFNVSYYSHKYWGQGTQVTVSS

SEQ ID NO: 27278 - protein, 118 aa, Artificial Sequence
  Chemically Synthesized
QVQLQESGGGLVQAGGSLRLSCAASGTIFVPWFMGWYRQAPGKEREFVAGIGYGSSTYYADSVKGRFTISRDNAKNTVYLQMNSLKPEDTAVYYCAAYETRRGYHHYWGQGTQVTVSS

SEQ ID NO: 27279 - protein, 118 aa, Artificial Sequence
  Chemically Synthesized
QVQLQESGGGLVQAGGSLRLSCAASGNISQYYLMGWYRQAPGKEREFVAGINYGTSTYYADSVKGRFTISRDNAKNTVYLQMNSLKPEDTAVYYCAVDDGDYVPHYYWGQGTQVTVSS

SEQ ID NO: 27280 - protein, 122 aa, Artificial Sequence
  Chemically Synthesized
QVQLQESGGGLVQAGGSLRLSCAASGNIFYDGAMGWYRQAPGKERELVASISYGTSTNYADSVKGRFTISRDNAKNTVYLQMNSLKPEDTAVYYCAVYIAGADVNSWPHSYWGQGTQVTVSS

SEQ ID NO: 27281 - protein, 111 aa, Artificial Sequence
  Chemically Synthesized
QVQLQESGGGLVQAGGSLRLSCAASGYIFFWDLMGWYRQAPGKEREFVAAISVGGSTYYADSVKGRFTISRDNAKNTVYLQMNSLKPEDTAVYYCAVPYYWGQGTQVTVSS

SEQ ID NO: 27282 - protein, 122 aa, Artificial Sequence
  Chemically Synthesized
QVQLQESGGGLVQAGGSLRLSCAASGNIFFGASMGWYRQAPGKEREFVATIDVGGTTYYADSVKGRFTISRDNAKNTVYLQMNSLKPEDTAVYYCAVWLPDYGTSYYRYYYWGQGTQVTVSS

SEQ ID NO: 27283 - protein, 126 aa, Artificial Sequence
  Chemically Synthesized
QVQLQESGGGLVQAGGSLRLSCAASGNIFPYSAMGWYRQAPGKEREFVATIGGGGSTYYADSVKGRFTISRDNAKNTVYLQMNSLKPEDTAVYYCAAAYKNWFDSTRALQWDHRYWGQGTQVTVSS

SEQ ID NO: 27284 - protein, 120 aa, Artificial Sequence
  Chemically Synthesized
QVQLQESGGGLVQAGGSLRLSCAASGYISDDDYMGWYRQAPGKEREFVAGINGGASTNYADSVKGRFTISRDNAKNTVYLQMNSLKPEDTAVYYCAAPLYRYFYTPHEYWGQGTQVTVSS

SEQ ID NO: 27285 - protein, 118 aa, Artificial Sequence
  Chemically Synthesized
QVQLQESGGGLVQAGGSLRLSCAASGNISVVSYMGWYRQAPGKEREFVAGISAGTNTNYADSVKGRFTISRDNAKNTVYLQMNSLKPEDTAVYYCAAYSRYQVYHGYWGQGTQVTVSS

SEQ ID NO: 27286 - protein, 122 aa, Artificial Sequence
  Chemically Synthesized
QVQLQESGGGLVQAGGSLRLSCAASGSISHYSRMGWYRQAPGKERELVASIAYGTNTYYADSVKGRFTISRDNAKNTVYLQMNSLKPEDTAVYYCAAWYYDDDDQRYPLGYWGQGTQVTVSS

SEQ ID NO: 27287 - protein, 118 aa, Artificial Sequence
  Chemically Synthesized
QVQLQESGGGLVQAGGSLRLSCAASGSISWTWYMGWYRQAPGKEREFVASIAAGGNTNYADSVKGRFTISRDNAKNTVYLQMNSLKPEDTAVYYCAARDYGAYRYVYWGQGTQVTVSS

SEQ ID NO: 27288 - protein, 122 aa, Artificial Sequence
  Chemically Synthesized
QVQLQESGGGLVQAGGSLRLSCAASGNIFWYSYMGWYRQAPGKERELVASIDVGSNTNYADSVKGRFTISRDNAKNTVYLQMNSLKPEDTAVYYCAVLYRDDDYNKVGFAYWGQGTQVTVSS

SEQ ID NO: 27289 - protein, 122 aa, Artificial Sequence
  Chemically Synthesized
QVQLQESGGGLVQAGGSLRLSCAASGTISFIEAMGWYRQAPGKERELVAAIAGGAITYYADSVKGRFTISRDNAKNTVYLQMNSLKPEDTAVYYCAVRSREWQPGYGSHHYWGQGTQVTVSS

SEQ ID NO: 27290 - protein, 122 aa, Artificial Sequence
  Chemically Synthesized
QVQLQESGGGLVQAGGSLRLSCAASGSISEDSYMGWYRQAPGKEREFVATIADGGITYYADSVKGRFTISRDNAKNTVYLQMNSLKPEDTAVYYCAAEQYNPWYYDYWHGYWGQGTQVTVSS

SEQ ID NO: 27291 - protein, 125 aa, Artificial Sequence
  Chemically Synthesized
QVQLQESGGGLVQAGGSLRLSCAASGSIFWRYYMGWYRQAPGKEREFVAGTVGTITNYADSVKGRFTISRDNAKNTVYLQMNSLKPEDTAVYYCAVGLLGLSIQPGDTAYLHTYWGQGTQVTVSS

SEQ ID NO: 27292 - protein, 122 aa, Artificial Sequence
  Chemically Synthesized
QVQLQESGGGLVQAGGSLRLSCAASGNIFWSYAMGWYRQAPGKERELVAGIAPGGTTNYADSVKGRFTISRDNAKNTVYLQMNSLKPEDTAVYYCAAFVWQWYAQTDYFVYWGQGTQVTVSS

SEQ ID NO: 27293 - protein, 123 aa, Artificial Sequence
  Chemically Synthesized
QVQLQESGGGLVQAGGSLRLSCAASGSISNGSDMGWYRQAPGKEREFVATIGSIGGTTNYADSVKGRFTISRDNAKNTVYLQMNSLKPEDTAVYYCAALGYDVRGSGGWYWYWGQGTQVTVSS

SEQ ID NO: 27294 - protein, 118 aa, Artificial Sequence
  Chemically Synthesized
QVQLQESGGGLVQAGGSLRLSCAASGNIFLVWYMGWYRQAPGKERELVAGITYGGSTYYADSVKGRFTISRDNAKNTVYLQMNSLKPEDTAVYYCAAYGPSYSLHSYWGQGTQVTVSS

SEQ ID NO: 27295 - protein, 126 aa, Artificial Sequence
  Chemically Synthesized
QVQLQESGGGLVQAGGSLRLSCAASGNIFWAFAMGWYRQAPGKEREFVAGIGPGGNTYYADSVKGRFTISRDNAKNTVYLQMNSLKPEDTAVYYCAAHVVDTYGDRLYNRYWYPYWGQGTQVTVSS

SEQ ID NO: 27296 - protein, 122 aa, Artificial Sequence
  Chemically Synthesized
QVQLQESGGGLVQAGGSLRLSCAASGSIFPAAGMGWYRQAPGKERELVASINYGSTTYYADSVKGRFTISRDNAKNTVYLQMNSLKPEDTAVYYCAAQFQYYYGYYYDLSYWGQGTQVTVSS

SEQ ID NO: 27297 - protein, 122 aa, Artificial Sequence
  Chemically Synthesized
QVQLQESGGGLVQAGGSLRLSCAASGNIFTTYDMGWYRQAPGKEREFVATIGWGSSTYYADSVKGRFTISRDNAKNTVYLQMNSLKPEDTAVYYCAAIPRYWSAGRFIHVYWGQGTQVTVSS

SEQ ID NO: 27298 - protein, 125 aa, Artificial Sequence
  Chemically Synthesized
QVQLQESGGGLVQAGGSLRLSCAASGTIFWQYSMGWYRQAPGKERELVAAINYGSNTYYADSVKGRFTISRDNAKNTVYLQMNSLKPEDTAVYYCAVRYYGVDRSDSPYQRFEYWGQGTQVTVSS

SEQ ID NO: 27299 - protein, 116 aa, Artificial Sequence
  Chemically Synthesized
QVQLQESGGGLVQAGGSLRLSCAASGNISRAHGMGWYRQAPGKERELVAAISLGTITYYADSVKGRFTISRDNAKNTVYLQMNSLKPEDTAVYYCADQWYPGHGYWGQGTQVTVSS

SEQ ID NO: 27300 - protein, 126 aa, Artificial Sequence
  Chemically Synthesized
QVQLQESGGGLVQAGGSLRLSCAASGNISDRYFMGWYRQAPGKERELVAAIAFGGTTYYADSVKGRFTISRDNAKNTVYLQMNSLKPEDTAVYYCAAYKTSGNTGDYIWQQYHYYWGQGTQVTVSS

SEQ ID NO: 27301 - protein, 122 aa, Artificial Sequence
  Chemically Synthesized
QVQLQESGGGLVQAGGSLRLSCAASGNIFFDPHMGWYRQAPGKEREFVAGINDGGSTYYADSVKGRFTISRDNAKNTVYLQMNSLKPEDTAVYYCAALVWYYDSKYFYHYYWGQGTQVTVSS

SEQ ID NO: 27302 - protein, 122 aa, Artificial Sequence
  Chemically Synthesized
QVQLQESGGGLVQAGGSLRLSCAASGYIFWQRNMGWYRQAPGKEREFVAGISVGGITYYADSVKGRFTISRDNAKNTVYLQMNSLKPEDTAVYYCAAVGYIFDTRYHVYHYWGQGTQVTVSS

SEQ ID NO: 27303 - protein, 122 aa, Artificial Sequence
  Chemically Synthesized
QVQLQESGGGLVQAGGSLRLSCAASGYISYGLPMGWYRQAPGKEREFVATIGYGANTYYADSVKGRFTISRDNAKNTVYLQMNSLKPEDTAVYYCAARPWAWGFGRWDHAYWGQGTQVTVSS

SEQ ID NO: 27304 - protein, 117 aa, Artificial Sequence
  Chemically Synthesized
QVQLQESGGGLVQAGGSLRLSCAASGNISRPYFMGWYRQAPGKEREFVATIGYGVTNYADSVKGRFTISRDNAKNTVYLQMNSLKPEDTAVYYCAAGLYGTQAYGYWGQGTQVTVSS

SEQ ID NO: 27305 - protein, 118 aa, Artificial Sequence
  Chemically Synthesized
QVQLQESGGGLVQAGGSLRLSCAASGTIFWQYKMGWYRQAPGKEREFVASIGVGSITYYADSVKGRFTISRDNAKNTVYLQMNSLKPEDTAVYYCAASYWPYRGYGYWGQGTQVTVSS

SEQ ID NO: 27306 - protein, 122 aa, Artificial Sequence
  Chemically Synthesized
QVQLQESGGGLVQAGGSLRLSCAASGSIFDPVYMGWYRQAPGKERELVAGITYGSNTNYADSVKGRFTISRDNAKNTVYLQMNSLKPEDTAVYYCAADLAYYQLVYYDHRYWGQGTQVTVSS

SEQ ID NO: 27307 - protein, 125 aa, Artificial Sequence
  Chemically Synthesized
QVQLQESGGGLVQAGGSLRLSCAASGSIFPSAYMGWYRQAPGKERELVAGISIGASTNYADSVKGRFTISRDNAKNTVYLQMNSLKPEDTAVYYCAVYVDRAHGEYYLHSSTFYWGQGTQVTVSS

SEQ ID NO: 27308 - protein, 117 aa, Artificial Sequence
  Chemically Synthesized
QVQLQESGGGLVQAGGSLRLSCAASGTISYAEMGWYRQAPGKERELVAGIDGGASTYYADSVKGRFTISRDNAKNTVYLQMNSLKPEDTAVYYCAAQYLAYYYHSYWGQGTQVTVSS

SEQ ID NO: 27309 - protein, 116 aa, Artificial Sequence
  Chemically Synthesized
QVQLQESGGGLVQAGGSLRLSCAASGNIFDPDYMGWYRQAPGKERELVATITPGSTTNYADSVKGRFTISRDNAKNTVYLQMNSLKPEDTAVYYCAATQHGYDGYWGQGTQVTVSS

SEQ ID NO: 27310 - protein, 118 aa, Artificial Sequence
  Chemically Synthesized
QVQLQESGGGLVQAGGSLRLSCAASGTIFGYGPMGWYRQAPGKEREFVAAITGGGNTNYADSVKGRFTISRDNAKNTVYLQMNSLKPEDTAVYYCAVGSGYWIPYHYWGQGTQVTVSS

SEQ ID NO: 27311 - protein, 118 aa, Artificial Sequence
  Chemically Synthesized
QVQLQESGGGLVQAGGSLRLSCAASGTIFLFTTMGWYRQAPGKEREFVASISYGSTTYYADSVKGRFTISRDNAKNTVYLQMNSLKPEDTAVYYCAVTERQYGYHDYWGQGTQVTVSS

SEQ ID NO: 27312 - protein, 121 aa, Artificial Sequence
  Chemically Synthesized
QVQLQESGGGLVQAGGSLRLSCAASGTIFPLKYMGWYRQAPGKERELVASIDPGANTYYADSVKGRFTISRDNAKNTVYLQMNSLKPEDTAVYYCAVLYEDAPTNLDYDYWGQGTQVTVSS

SEQ ID NO: 27313 - protein, 126 aa, Artificial Sequence
  Chemically Synthesized
QVQLQESGGGLVQAGGSLRLSCAASGYISSFGYMGWYRQAPGKEREFVATIDTGSITYYADSVKGRFTISRDNAKNTVYLQMNSLKPEDTAVYYCAVYDVYDEYVGHYRYQTLAYWGQGTQVTVSS

SEQ ID NO: 27314 - protein, 122 aa, Artificial Sequence
  Chemically Synthesized
QVQLQESGGGLVQAGGSLRLSCAASGSISSNWYMGWYRQAPGKEREFVATIAYGASTNYADSVKGRFTISRDNAKNTVYLQMNSLKPEDTAVYYCAVTYDIAIGYIVQLDYWGQGTQVTVSS

SEQ ID NO: 27315 - protein, 122 aa, Artificial Sequence
  Chemically Synthesized
QVQLQESGGGLVQAGGSLRLSCAASGSIFYVGDMGWYRQAPGKERELVAGIGVGSITNYADSVKGRFTISRDNAKNTVYLQMNSLKPEDTAVYYCAAFAYVGPRTDTTLVYWGQGTQVTVSS

SEQ ID NO: 27316 - protein, 118 aa, Artificial Sequence
  Chemically Synthesized
QVQLQESGGGLVQAGGSLRLSCAASGSIFGYSYMGWYRQAPGKERELVATITVGATTYYADSVKGRFTISRDNAKNTVYLQMNSLKPEDTAVYYCAVGGHYDDTHFYWGQGTQVTVSS

SEQ ID NO: 27317 - protein, 118 aa, Artificial Sequence
  Chemically Synthesized
QVQLQESGGGLVQAGGSLRLSCAASGNISLYGVMGWYRQAPGKERELVAAIDHGASTYYADSVKGRFTISRDNAKNTVYLQMNSLKPEDTAVYYCAVGGYSASGHVYWGQGTQVTVSS

SEQ ID NO: 27318 - protein, 122 aa, Artificial Sequence
  Chemically Synthesized
QVQLQESGGGLVQAGGSLRLSCAASGSISQQVLMGWYRQAPGKERELVAAIGDGTSTNYADSVKGRFTISRDNAKNTVYLQMNSLKPEDTAVYYCAAYTYLRGGLIAEFWYWGQGTQVTVSS

SEQ ID NO: 27319 - protein, 125 aa, Artificial Sequence
  Chemically Synthesized
QVQLQESGGGLVQAGGSLRLSCAASGSISSVYYMGWYRQAPGKEREFVATIATGTNTYYADSVKGRFTISRDNAKNTVYLQMNSLKPEDTAVYYCAAFTSRAPSALPSLRTLIYWGQGTQVTVSS

SEQ ID NO: 27320 - protein, 119 aa, Artificial Sequence
  Chemically Synthesized
QVQLQESGGGLVQAGGSLRLSCAASGSIFANPYMGWYRQAPGKERELVATITGGGTNTNYADSVKGRFTISRDNAKNTVYLQMNSLKPEDTAVYYCAAYVYPRYYHAYWGQGTQVTVSS

SEQ ID NO: 27321 - protein, 118 aa, Artificial Sequence
  Chemically Synthesized
QVQLQESGGGLVQAGGSLRLSCAASGNISQGWDMGWYRQAPGKERELVAGIGFGGNTYYADSVKGRFTISRDNAKNTVYLQMNSLKPEDTAVYYCAATNEATVILLYWGQGTQVTVSS

SEQ ID NO: 27322 - protein, 117 aa, Artificial Sequence
  Chemically Synthesized
QVQLQESGGGLVQAGGSLRLSCAASGNISRPDRMGWYRQAPGKERELVATITVGSLPYADSVKGRFTISRDNAKNTVYLQMNSLKPEDTAVYYCAAIQRYDTDLPYWGQGTQVTVSS

SEQ ID NO: 27323 - protein, 120 aa, Artificial Sequence
  Chemically Synthesized
QVQLQESGGGLVQAGGSLRLSCAASGNIFVDYFMGWYRQAPGKEREFVATITFGATTNYADSVKGRFTISRDNAKNTVYLQMNSLKPEDTAVYYCAVTTSTTRTLVSMYWGQGTQVTVSS

SEQ ID NO: 27324 - protein, 118 aa, Artificial Sequence
  Chemically Synthesized
QVQLQESGGGLVQAGGSLRLSCAASGSIFEYAYMGWYRQAPGKERELVATIAAGSITNYADSVKGRFTISRDNAKNTVYLQMNSLKPEDTAVYYCAVHAYYDEYFPYWGQGTQVTVSS

SEQ ID NO: 27325 - protein, 122 aa, Artificial Sequence
  Chemically Synthesized
QVQLQESGGGLVQAGGSLRLSCAASGSISVLDHMGWYRQAPGKERELVASIDRGSNTNYADSVKGRFTISRDNAKNTVYLQMNSLKPEDTAVYYCAVDRYVGTARTRNYDYWGQGTQVTVSS

SEQ ID NO: 27326 - protein, 122 aa, Artificial Sequence
  Chemically Synthesized
QVQLQESGGGLVQAGGSLRLSCAASGNIFRDSLMGWYRQAPGKERELVAGISHGATTYYADSVKGRFTISRDNAKNTVYLQMNSLKPEDTAVYYCAAYGYDKYYIYLGYPYWGQGTQVTVSS

SEQ ID NO: 27327 - protein, 118 aa, Artificial Sequence
  Chemically Synthesized
QVQLQESGGGLVQAGGSLRLSCAASGSIFLEYDMGWYRQAPGKERELVAAINAGSITYYADSVKGRFTISRDNAKNTVYLQMNSLKPEDTAVYYCAVLTDFVGNHGYWGQGTQVTVSS

SEQ ID NO: 27328 - protein, 118 aa, Artificial Sequence
  Chemically Synthesized
QVQLQESGGGLVQAGGSLRLSCAASGTIFHNTGMGWYRQAPGKERELVAAITWGGSTYYADSVKGRFTISRDNAKNTVYLQMNSLKPEDTAVYYCAVTGPITGALKYWGQGTQVTVSS

SEQ ID NO: 27329 - protein, 126 aa, Artificial Sequence
  Chemically Synthesized
QVQLQESGGGLVQAGGSLRLSCAASGNISRGGDMGWYRQAPGKEREFVAGIDAGAITYYADSVKGRFTISRDNAKNTVYLQMNSLKPEDTAVYYCAVQPTFRGYTKGIPPYGLDYWGQGTQVTVSS

SEQ ID NO: 27330 - protein, 117 aa, Artificial Sequence
  Chemically Synthesized
QVQLQESGGGLVQAGGSLRLSCAASGSISYGAAMGWYRQAPGKEREFVAAINSGTNTNYADSVKGRFTISRDNAKNTVYLQMNSLKPEDTAVYYCAATAPESTSFYWGQGTQVTVSS

SEQ ID NO: 27331 - protein, 121 aa, Artificial Sequence
  Chemically Synthesized
QVQLQESGGGLVQAGGSLRLSCAASGNISSGSTMGWYRQAPGKEREFVAAIAYGGNTNYADSVKGRFTISRDNAKNTVYLQMNSLKPEDTAVYYCAVPSTRTNTLCSRMYWGQGTQVTVSS

SEQ ID NO: 27332 - protein, 122 aa, Artificial Sequence
  Chemically Synthesized
QVQLQESGGGLVQAGGSLRLSCAASGYISDDSRMGWYRQAPGKEREFVATITGGTSTYYADSVKGRFTISRDNAKNTVYLQMNSLKPEDTAVYYCAAYDTYYIARQYVFGYWGQGTQVTVSS

SEQ ID NO: 27333 - protein, 118 aa, Artificial Sequence
  Chemically Synthesized
QVQLQESGGGLVQAGGSLRLSCAASGNISRSPTMGWYRQAPGKERELVATITVGSITNYADSVKGRFTISRDNAKNTVYLQMNSLKPEDTAVYYCAVRFSGHRYHGYWGQGTQVTVSS

SEQ ID NO: 27334 - protein, 118 aa, Artificial Sequence
  Chemically Synthesized
QVQLQESGGGLVQAGGSLRLSCAASGNIFIELDMGWYRQAPGKEREFVASISGGSSTNYADSVKGRFTISRDNAKNTVYLQMNSLKPEDTAVYYCAVYDTVRPGYRYWGQGTQVTVSS

SEQ ID NO: 27335 - protein, 120 aa, Artificial Sequence
  Chemically Synthesized
QVQLQESGGGLVQAGGSLRLSCAASGSISILRYMGWYRQAPGKEREFVAAISDGSYLYADSVKGRFTISRDNAKNTVYLQMNSLKPEDTAVYYCAVQAYYPRLYNRVIYWGQGTQVTVSS

SEQ ID NO: 27336 - protein, 122 aa, Artificial Sequence
  Chemically Synthesized
QVQLQESGGGLVQAGGSLRLSCAASGNIFLDYGMGWYRQAPGKERELVAGITYGTTTYYADSVKGRFTISRDNAKNTVYLQMNSLKPEDTAVYYCAARYPYDDKYIDLHGYWGQGTQVTVSS

SEQ ID NO: 27337 - protein, 113 aa, Artificial Sequence
  Chemically Synthesized
QVQLQESGGGLVQAGGSLRLSCAASGTISSDYRMGWYRQAPGKERELVAVLLPYADSVKGRFTISRDNAKNTVYLQMNSLKPEDTAVYYCAADERDRWLLAYWGQGTQVTVSS

SEQ ID NO: 27338 - protein, 110 aa, Artificial Sequence
  Chemically Synthesized
QVQLQESGGGLVQAGGSLRLSCAASGYIFWHYRMGWYRQAPGKERELVATIDPGATTNYADSVKGRFTISRDNAKNTVYLQMNSLKPEDTAVYYCAVIYWGQGTQVTVSS

SEQ ID NO: 27339 - protein, 121 aa, Artificial Sequence
  Chemically Synthesized
QVQLQESGGGLVQAGGSLRLSCAASGSISGTDFMGWYRQAPGKEREVAAIDYGASPYADSVKGRFTISRDNAKNTVYLQMNSLKPEDTAVYYCAAGDVEQSHYQYLSFDYWGQGTQVTVSS

SEQ ID NO: 27340 - protein, 116 aa, Artificial Sequence
  Chemically Synthesized
QVQLQESGGGLVQAGGSLRLSCAASGSISVRGMGWYRQAPGKEREFVASITSGGSTYYADSVKGRFTISRDNAKNTVYLQMNSLKPEDTAVYYCAVLVTTTVVFYWGQGTQVTVSS

SEQ ID NO: 27341 - protein, 116 aa, Artificial Sequence
  Chemically Synthesized
QVQLQESGGGLVQAGGSLRLSCAASGTISSYEWMGWYRQAPGKERELVAGINYGSNTYYADSVKGRFTISRDNAKNTVYLQMNSLKPEDTAVYYCALLFRLTLMYWGQGTQVTVSS

SEQ ID NO: 27342 - protein, 118 aa, Artificial Sequence
  Chemically Synthesized
QVQLQESGGGLVQAGGSLRLSCAASGNIFPSADMGWYRQAPGKEREFVASIGYGSNTYYADSVKGRFTISRDNAKNTVYLQMNSLKPEDTAVYYCAVPAEDQSGLGYWGQGTQVTVSS

SEQ ID NO: 27343 - protein, 109 aa, Artificial Sequence
  Chemically Synthesized
QVQLQESGGGLVQAGGSLRLSCAASGTISDEVMGWYRQAPGKERELVAAIGLGGTTYYADSVKGRFTISRDNAKNTVYLQMNSLKPEDTAVYYCAYDYWGQGTQVTVSS

SEQ ID NO: 27344 - protein, 118 aa, Artificial Sequence
  Chemically Synthesized
QVQLQESGGGLVQAGGSLRLSCAASGTISDYPYMGWYRQAPGKEREFVAGIGFGGNTNYADSVKGRFTISRDNAKNTVYLQMNSLKPEDTAVYYCAASDERYADYSYWGQGTQVTVSS

SEQ ID NO: 27345 - protein, 110 aa, Artificial Sequence
  Chemically Synthesized
QVQLQESGGGLVQAGGSLRLSCAASGTISYGSYMGWYRQAPGKERELVATISYGSSTYYADSVKGRFTISRDNAKNTVYLQMNSLKPEDTAVYYCAAIYWGQGTQVTVSS

SEQ ID NO: 27346 - protein, 122 aa, Artificial Sequence
  Chemically Synthesized
QVQLQESGGGLVQAGGSLRLSCAASGTISGYYFMGWYRQAPGKERELVAAIAQGSSTNYADSVKGRFTISRDNAKNTVYLQMNSLKPEDTAVYYCAAPQYSDGRGDDRYGYWGQGTQVTVSS

SEQ ID NO: 27347 - protein, 118 aa, Artificial Sequence
  Chemically Synthesized
QVQLQESGGGLVQAGGSLRLSCAASGNISHDPSMGWYRQAPGKERELVASIDAGTNTNYADSVKGRFTISRDNAKNTVYLQMNSLKPEDTAVYYCAAYAYGSGVLLYWGQGTQVTVSS

SEQ ID NO: 27348 - protein, 114 aa, Artificial Sequence
  Chemically Synthesized
QVQLQESGGGLVQAGGSLRLSCAASGNIFYRSDMGWYRQAPGKEREFVASYADSVKGRFTISRDNAKNTVYLQMNSLKPEDTAVYYCAVDLYTNRDRNFPHNYWGQGTQVTVSS

SEQ ID NO: 27349 - protein, 126 aa, Artificial Sequence
  Chemically Synthesized
QVQLQESGGGLVQAGGSLRLSCAASGSISQPYFMGWYRQAPGKERELVAAISYGANTYYADSVKGRFTISRDNAKNTVYLQMNSLKPEDTAVYYCAVVVQYAEPALGPHTRIHDYWGQGTQVTVSS

SEQ ID NO: 27350 - protein, 118 aa, Artificial Sequence
  Chemically Synthesized
QVQLQESGGGLVQAGGSLRLSCAASGTISQAYWMGWYRQAPGKERELVAGIGYGSITYYADSVKGRFTISRDNAKNTVYLQMNSLKPEDTAVYYCAASRLPDNDYDYWGQGTQVTVSS

SEQ ID NO: 27351 - protein, 113 aa, Artificial Sequence
  Chemically Synthesized
QVQLQESGGGLVQAGGSLRLSCAASGSISKGYTMGWYRQAPGKEREFVAGIGDGSITYYADSVKGRFTISRDNAKNTVYLQMNSLKPEDTAVYYCAVVRTMYWGQGTQVTVSS

SEQ ID NO: 27352 - protein, 121 aa, Artificial Sequence
  Chemically Synthesized
QVQLQESGGGLVQAGGSLRLSCAASGNISTRDIMGWYRQAPGKERELVATIDWGGNTNYADSVKGRFTISRDNAKNTVYLQMNSLKPEDTAVYYCAVPYTSVDLTLYPHYWGQGTQVTVSS

SEQ ID NO: 27353 - protein, 122 aa, Artificial Sequence
  Chemically Synthesized
QVQLQESGGGLVQAGGSLRLSCAASGSIFGPQYMGWYRQAPGKERELVATINYGSITNYADSVKGRFTISRDNAKNTVYLQMNSLKPEDTAVYYCAAGRRPYNYAYRYFVYWGQGTQVTVSS

SEQ ID NO: 27354 - protein, 118 aa, Artificial Sequence
  Chemically Synthesized
QVQLQESGGGLVQAGGSLRLSCAASGNISPQSMGWYRQAPGKERELVAAIDDGGSTNYADSVKGRFTISRDNAKNTVYLQMNSLKPEDTAVYYCAADLYDPTYYHPYWGQGTQVTVSS

SEQ ID NO: 27355 - protein, 117 aa, Artificial Sequence
  Chemically Synthesized
QVQLQESGGGLVQAGGSLRLSCAASGYISAKYVMGWYRQAPGKEREFVASIGYGVIPYADSVKGRFTISRDNAKNTVYLQMNSLKPEDTAVYYCAVVGYFYTRHHYWGQGTQVTVSS

SEQ ID NO: 27356 - protein, 113 aa, Artificial Sequence
  Chemically Synthesized
QVQLQESGGGLVQAGGSLRLSCAASGYIFAFNTMGWYRQAPGKEREFVAAISRGGSTNYADSVKGRFTISRDNAKNTVYLQMNSLKPEDTAVYYCAVTTTMYWGQGTQVTVSS

SEQ ID NO: 27357 - protein, 118 aa, Artificial Sequence
  Chemically Synthesized
QVQLQESGGGLVQAGGSLRLSCAASGSISSGYFMGWYRQAPGKERELVATISRGASTNYADSVKGRFTISRDNAKNTVYLQMNSLKPEDTAVYYCAVDFGDADYFWYWGQGTQVTVSS

SEQ ID NO: 27358 - protein, 123 aa, Artificial Sequence
  Chemically Synthesized
QVQLQESGGGLVQAGGSLRLSCAASGYISSSSDMGWYRQAPGKERELVATINDGTTTNYADSVKGRFTISRDNAKNTVYLQMNSLKPEDTAVYYCAAEQLSYPYAYNVNYDYWGQGTQVTVSS

SEQ ID NO: 27359 - protein, 117 aa, Artificial Sequence
  Chemically Synthesized
QVQLQESGGGLVQAGGSLRLSCAASGSISYPVMGWYRQAPGKERELVASITAGSSTNYADSVKGRFTISRDNAKNTVYLQMNSLKPEDTAVYYCAATHTNARDYDYWGQGTQVTVSS

SEQ ID NO: 27360 - protein, 118 aa, Artificial Sequence
  Chemically Synthesized
QVQLQESGGGLVQAGGSLRLSCAASGTIFYDYVMGWYRQAPGKEREFVAAITFGTTTYYADSVKGRFTISRDNAKNTVYLQMNSLKPEDTAVYYCAAGAGEWDDHFYWGQGTQVTVSS

SEQ ID NO: 27361 - protein, 122 aa, Artificial Sequence
  Chemically Synthesized
QVQLQESGGGLVQAGGSLRLSCAASGTIFGSLIMGWYRQAPGKERELVATIGFGTTTNYADSVKGRFTISRDNAKNTVYLQMNSLKPEDTAVYYCAAGTITDIQPVGVYTYWGQGTQVTVSS

SEQ ID NO: 27362 - protein, 121 aa, Artificial Sequence
  Chemically Synthesized
QVQLQESGGGLVQAGGSLRLSCAASGTIFPLAQMGWYRQAPGKERELVAAINVGASTYYADSVKGRFTISRDNAKNTVYLQMNSLKPEDTAVYYCAVPSDQDYNPYDSFYWGQGTQVTVSS

SEQ ID NO: 27363 - protein, 126 aa, Artificial Sequence
  Chemically Synthesized
QVQLQESGGGLVQAGGSLRLSCAASGNISQDVQMGWYRQAPGKERELVAGIDFGANTNYADSVKGRFTISRDNAKNTVYLQMNSLKPEDTAVYYCAADDVQAGIVDEQRTRGLGYWGQGTQVTVSS

SEQ ID NO: 27364 - protein, 112 aa, Artificial Sequence
  Chemically Synthesized
QVQLQESGGGLVQAGGSLRLSCAASGTIFSDPYMGWYRQAPGKERELILVVLPYADSVKGRFTISRDNAKNTVYLQMNSLKPEDTAVYYCAVPLLLADHPYWGQGTQVTVSS

SEQ ID NO: 27365 - protein, 121 aa, Artificial Sequence
  Chemically Synthesized
QVQLQESGGGLVQAGGSLRLSCAASGTISIRRYMGWYRQAPGKERELVATIAFGGNTYYADSVKGRFTISRDNAKNTVYLQMNSLKPEDTAVYYCAVYYIDRYYDSTYGYWGQGTQVTVSS

SEQ ID NO: 27366 - protein, 111 aa, Artificial Sequence
  Chemically Synthesized
QVQLQESGGGLVQAGGSLRLSCAASGSIFLPYYMGWYRQAPGKEREFVASLYADSVKGRFTISRDNAKNTVYLQMNSLKPEDTAVYYCAVVADVDAGFAYWGQGTQVTVSS

SEQ ID NO: 27367 - protein, 118 aa, Artificial Sequence
  Chemically Synthesized
QVQLQESGGGLVQAGGSLRLSCAASGYIFGAWDMGWYRQAPGKEREFVAAIDGGTNTNYADSVKGRFTISRDNAKNTVYLQMNSLKPEDTAVYYCAVRTRLALQHGYWGQGTQVTVSS

SEQ ID NO: 27368 - protein, 117 aa, Artificial Sequence
  Chemically Synthesized
QVQLQESGGGLVQAGGSLRLSCAASGNIFGPTWMGWYRQAPGKEREFVALLMTVLLPYADSVKGRFTISRDNAKNTVYLQMNSLKPEDTAVYYCAVIVSDITTLSYWGQGTQVTVSS

SEQ ID NO: 27369 - protein, 126 aa, Artificial Sequence
  Chemically Synthesized
QVQLQESGGGLVQAGGSLRLSCAASGTIFWPYYMGWYRQAPGKEREFVAAISTGTTTYYADSVKGRFTISRDNAKNTVYLQMNSLKPEDTAVYYCAAWGDIVAKQRPTDLDNLYYWGQGTQVTVSS

SEQ ID NO: 27370 - protein, 122 aa, Artificial Sequence
  Chemically Synthesized
QVQLQESGGGLVQAGGSLRLSCAASGTISQYPYMGWYRQAPGKEREFVATIAYGGNTNYADSVKGRFTISRDNAKNTVYLQMNSLKPEDTAVYYCAVERSLLSDWVNDFRYWGQGTQVTVSS

SEQ ID NO: 27371 - protein, 125 aa, Artificial Sequence
  Chemically Synthesized
QVQLQESGGGLVQAGGSLRLSCAASGTIFGYQYMGWYRQAPGKERELVATISEGSTTYYADSVKGRFTISRDNAKNTVYLQMNSLKPEDTAVYYCAVDNSSVWTSLSTLWKLFYWGQGTQVTVSS

SEQ ID NO: 27372 - protein, 120 aa, Artificial Sequence
  Chemically Synthesized
QVQLQESGGGLVQAGGSLRLSCAASGTIFARDMGWYRQAPGKERELVASIGYGTSTYYADSVKGRFTISRDNAKNTVYLQMNSLKPEDTAVYYCAVDSSTDSYSQSLMYWGQGTQVTVSS

SEQ ID NO: 27373 - protein, 117 aa, Artificial Sequence
  Chemically Synthesized
QVQLQESGGGLVQAGGSLRLSCAASGTILHHHMGWYRQAPGKERELVATITFGAITNYADSVKGRFTISRDNAKNTVYLQMNSLKPEDTAVYYCAAGYDSVDDLAYWGQGTQVTVSS

SEQ ID NO: 27374 - protein, 117 aa, Artificial Sequence
  Chemically Synthesized
QVQLQESGGGLVQAGGSLRLSCAASGTISPPDMGWYRQAPGKERELVASITSGGITYYADSVKGRFTISRDNAKNTVYLQMNSLKPEDTAVYYCAARWYVATALGYWGQGTQVTVSS

SEQ ID NO: 27375 - protein, 113 aa, Artificial Sequence
  Chemically Synthesized
QVQLQESGGGLVQAGGSLRLSCAASGFTMGWYRQAPGKERELVAGIARGSITNYADSVKGRFTISRDNAKNTVYLQMNSLKPEDTAVYYCAVYYRAGYYHTYWGQGTQVTVSS

SEQ ID NO: 27376 - protein, 118 aa, Artificial Sequence
  Chemically Synthesized
QVQLQESGGGLVQAGGSLRLSCAASGYISGPGTMGWYRQAPGKEREFVAAISHGGTTYYADSVKGRFTISRDNAKNTVYLQMNSLKPEDTAVYYCAVSYVYPGLFSYWGQGTQVTVSS

SEQ ID NO: 27377 - protein, 118 aa, Artificial Sequence
  Chemically Synthesized
QVQLQESGGGLVQAGGSLRLSCAASGSISYYVDMGWYRQAPGKEREFVAGINRGGITYYADSVKGRFTISRDNAKNTVYLQMNSLKPEDTAVYYCAVDYYYGNALFYWGQGTQVTVSS

SEQ ID NO: 27378 - protein, 118 aa, Artificial Sequence
  Chemically Synthesized
QVQLQESGGGLVQAGGSLRLSCAASGTISETADMGWYRQAPGKERELVATIAEGASTNYADSVKGRFTISRDNAKNTVYLQMNSLKPEDTAVYYCAAYDWYQGWLTYWGQGTQVTVSS

SEQ ID NO: 27379 - protein, 118 aa, Artificial Sequence
  Chemically Synthesized
QVQLQESGGGLVQAGGSLRLSCAASGYISGPDWMGWYRQAPGKERELVAGINLGGTTYYADSVKGRFTISRDNAKNTVYLQMNSLKPEDTAVYYCAAHDSYYYTLQYWGQGTQVTVSS

SEQ ID NO: 27380 - protein, 126 aa, Artificial Sequence
  Chemically Synthesized
QVQLQESGGGLVQAGGSLRLSCAASGTISYGTYMGWYRQAPGKERELVAGIGRGGTTNYADSVKGRFTISRDNAKNTVYLQMNSLKPEDTAVYYCAAYPEFRFDRADTLLWAHAYWGQGTQVTVSS

SEQ ID NO: 27381 - protein, 122 aa, Artificial Sequence
  Chemically Synthesized
QVQLQESGGGLVQAGGSLRLSCAASGYISRYTYMGWYRQAPGKERELVAAIGRGGNTNYADSVKGRFTISRDNAKNTVYLQMNSLKPEDTAVYYCAAGPPSPSPVTDSHWYWGQGTQVTVSS

SEQ ID NO: 27382 - protein, 118 aa, Artificial Sequence
  Chemically Synthesized
QVQLQESGGGLVQAGGSLRLSCAASGTIFSLLDMGWYRQAPGKERELVAAIGLGSITYYADSVKGRFTISRDNAKNTVYLQMNSLKPEDTAVYYCAAYQQDLYSHQYWGQGTQVTVSS

SEQ ID NO: 27383 - protein, 126 aa, Artificial Sequence
  Chemically Synthesized
QVQLQESGGGLVQAGGSLRLSCAASGSIFRYSYMGWYRQAPGKERELVASIGLGGSTNYADSVKGRFTISRDNAKNTVYLQMNSLKPEDTAVYYCAAYFTGFYNLYYVDTLHFNYWGQGTQVTVSS

SEQ ID NO: 27384 - protein, 117 aa, Artificial Sequence
  Chemically Synthesized
QVQLQESGGGLVQAGGSLRLSCAASGTILVSVMGWYRQAPGKERELVASIGYGANTYYADSVKGRFTISRDNAKNTVYLQMNSLKPEDTAVYYCAVLIWLFALHLYWGQGTQVTVSS

SEQ ID NO: 27385 - protein, 121 aa, Artificial Sequence
  Chemically Synthesized
QVQLQESGGGLVQAGGSLRLSCAASGYISDHSMGWYRQAPGKERELVAAIGRGTITYYADSVKGRFTISRDNAKNTVYLQMNSLKPEDTAVYYCAVPYDSDANWDFDHRYWGQGTQVTVSS

SEQ ID NO: 27386 - protein, 118 aa, Artificial Sequence
  Chemically Synthesized
QVQLQESGGGLVQAGGSLRLSCAASGTIFGYLRMGWYRQAPGKERELVAGITDGSITYYADSVKGRFTISRDNAKNTVYLQMNSLKPEDTAVYYCAVDPTGDGDYGYWGQGTQVTVSS

SEQ ID NO: 27387 - protein, 117 aa, Artificial Sequence
  Chemically Synthesized
QVQLQESGGGLVQAGGSLRLSCAASGTISYRQYMGWYRQAPGKEREFVAAIDSVLLPYADSVKGRFTISRDNAKNTVYLQMNSLKPEDTAVYYCAAQQQTVIYFSYWGQGTQVTVSS

SEQ ID NO: 27388 - protein, 117 aa, Artificial Sequence
  Chemically Synthesized
QVQLQESGGGLVQAGGSLRLSCAASGTISTLVMGWYRQAPGKERELVATIGYGSSTNYADSVKGRFTISRDNAKNTVYLQMNSLKPEDTAVYYCAVSGKDYYYHYYWGQGTQVTVSS

SEQ ID NO: 27389 - protein, 110 aa, Artificial Sequence
  Chemically Synthesized
QVQLQESGGGLVQAGGSLRLSCAASGTFFLTNMGWYRQAPGKEREFVATISSGGSTNYADSVKGRFTISRDNAKNTVYLQMNSLKPEDTAVYYCAVTLYWGQGTQVTVSS

SEQ ID NO: 27390 - protein, 121 aa, Artificial Sequence
  Chemically Synthesized
QVQLQESGGGLVQAGGSLRLSCAASGTIFDNLYMGWYRQAPGKERELVASIGDGANTNYADSVKGRFTISRDNAKNTVYLQMNSLKPEDTAVYYCAAYWDLIPYYFSLLYWGQGTQVTVSS

SEQ ID NO: 27391 - protein, 118 aa, Artificial Sequence
  Chemically Synthesized
QVQLQESGGGLVQAGGSLRLSCAASGSIFVYRVMGWYRQAPGKERELVAAINLGASTYYADSVKGRFTISRDNAKNTVYLQMNSLKPEDTAVYYCAVDLTSPYYHVYWGQGTQVTVSS

SEQ ID NO: 27392 - protein, 121 aa, Artificial Sequence
  Chemically Synthesized
QVQLQESGGGLVQAGGSLRLSCAASGNISPDVLMGWYRQAPGKEREFVASITGGSITNYADSVKGRFTISRDNAKNTVYLQMNSLKPEDTAVYYCAVAPSVTLTTLKFFYWGQGTQVTVSS

SEQ ID NO: 27393 - protein, 118 aa, Artificial Sequence
  Chemically Synthesized
QVQLQESGGGLVQAGGSLRLSCAASGSISPADDMGWYRQAPGKEREFVAAIDSGASTYYADSVKGRFTISRDNAKNTVYLQMNSLKPEDTAVYYCAAYRFSDPCLLYWGQGTQVTVSS

SEQ ID NO: 27394 - protein, 118 aa, Artificial Sequence
  Chemically Synthesized
QVQLQESGGGLVQAGGSLRLSCAASGNISVSARMGWYRQAPGKERELVASIDRGGNTNYADSVKGRFTISRDNAKNTVYLQMNSLKPEDTAVYYCAAVLLLNDPFGYWGQGTQVTVSS

SEQ ID NO: 27395 - protein, 122 aa, Artificial Sequence
  Chemically Synthesized
QVQLQESGGGLVQAGGSLRLSCAASGNISPLFIMGWYRQAPGKEREFVASIADGTSTNYADSVKGRFTISRDNAKNTVYLQMNSLKPEDTAVYYCAVGYTRRAYIDSWYAYWGQGTQVTVSS

SEQ ID NO: 27396 - protein, 126 aa, Artificial Sequence
  Chemically Synthesized
QVQLQESGGGLVQAGGSLRLSCAASGNISYTYEMGWYRQAPGKEREFVASIDNGSNTNYADSVKGRFTISRDNAKNTVYLQMNSLKPEDTAVYYCAAASRAGWLYGGVYNDQFDYWGQGTQVTVSS

SEQ ID NO: 27397 - protein, 118 aa, Artificial Sequence
  Chemically Synthesized
QVQLQESGGGLVQAGGSLRLSCAASGNISYYTYMGWYRQAPGKEREFVAAIAWGGTTYYADSVKGRFTISRDNAKNTVYLQMNSLKPEDTAVYYCAVWYYADRYHYYWGQGTQVTVSS

SEQ ID NO: 27398 - protein, 123 aa, Artificial Sequence
  Chemically Synthesized
QVQLQESGGGLVQAGGSLRLSCAASGNISQYFYYMGWYRQAPGKERELVAGIATGGITYYADSVKGRFTISRDNAKNTVYLQMNSLKPEDTAVYYCAADGTSYYNYFKGFYYWGQGTQVTVSS

SEQ ID NO: 27399 - protein, 118 aa, Artificial Sequence
  Chemically Synthesized
QVQLQESGGGLVQAGGSLRLSCAASGYISVNQRMGWYRQAPGKEREFVASIDGGSNTYYADSVKGRFTISRDNAKNTVYLQMNSLKPEDTAVYYCAVGGYRFRQYSYWGQGTQVTVSS

SEQ ID NO: 27400 - protein, 118 aa, Artificial Sequence
  Chemically Synthesized
QVQLQESGGGLVQAGGSLRLSCAASGNISAPYIMGWYRQAPGKEREFVASIGFGSRYLYADSVKGRFTISRDNAKNTVYLQMNSLKPEDTAVYYCAAQERDIVGLGYWGQGTQVTVSS

SEQ ID NO: 27401 - protein, 118 aa, Artificial Sequence
  Chemically Synthesized
QVQLQESGGGLVQAGGSLRLSCAASGYISPYLIMGWYRQAPGKEREFVATIGGGGTTNYADSVKGRFTISRDNAKNTVYLQMNSLKPEDTAVYYCAAGTSTNSGHVYWGQGTQVTVSS

SEQ ID NO: 27402 - protein, 125 aa, Artificial Sequence
  Chemically Synthesized
QVQLQESGGGLVQAGGSLRLSCAASGSISPGDQMGWYRQAPGKEREFAGIADGSTTNYADSVKGRFTISRDNAKNTVYLQMNSLKPEDTAVYYCAASDGYHLYWSNLSAQFHQYWGQGTQVTVSS

SEQ ID NO: 27403 - protein, 121 aa, Artificial Sequence
  Chemically Synthesized
QVQLQESGGGLVQAGGSLRLSCAASGYISQYISMGWYRQAPGKEREFVAGINYGSITNYADSVKGRFTISRDNAKNTVYLQMNSLKPEDTAVYYCAAPFDHLVDILAYGYWGQGTQVTVSS

SEQ ID NO: 27404 - protein, 118 aa, Artificial Sequence
  Chemically Synthesized
QVQLQESGGGLVQAGGSLRLSCAASGTISSNGWMGWYRQAPGKERELVAAISYGAITNYADSVKGRFTISRDNAKNTVYLQMNSLKPEDTAVYYCAADDAYFNGYWYWGQGTQVTVSS

SEQ ID NO: 27405 - protein, 118 aa, Artificial Sequence
  Chemically Synthesized
QVQLQESGGGLVQAGGSLRLSCAASGTIFLILLMGWYRQAPGKEREFVASINYGSSTNYADSVKGRFTISRDNAKNTVYLQMNSLKPEDTAVYYCAVQRAQTGRYPYWGQGTQVTVSS

SEQ ID NO: 27406 - protein, 112 aa, Artificial Sequence
  Chemically Synthesized
QVQLQESGGGLVQAGGSLRLSCAASGTIFPHDYMGWYRQAPGKERELVAGITYGTSTNYADSVKGRFTISRDNAKNTVYLQMNSLKPEDTAVYYCAAYWMYWGQGTQVTVSS

SEQ ID NO: 27407 - protein, 125 aa, Artificial Sequence
  Chemically Synthesized
QVQLQESGGGLVQAGGSLRLSCAASGSISSIHHMGWYRQAPGKERELVATITIGAITYYADSVKGRFTISRDNAKNTVYLQMNSLKPEDTAVYYCAVTSTYSYPPAYQQVYLLYWGQGTQVTVSS

SEQ ID NO: 27408 - protein, 122 aa, Artificial Sequence
  Chemically Synthesized
QVQLQESGGGLVQAGGSLRLSCAASGYISDTGTMGWYRQAPGKERELVAAIDPGTSTYYADSVKGRFTISRDNAKNTVYLQMNSLKPEDTAVYYCAAGDHDVYDYDANHRYWGQGTQVTVSS

SEQ ID NO: 27409 - protein, 122 aa, Artificial Sequence
  Chemically Synthesized
QVQLQESGGGLVQAGGSLRLSCAASGNISFGVPMGWYRQAPGKEREFVAAIGDGSNTYYADSVKGRFTISRDNAKNTVYLQMNSLKPEDTAVYYCAVDVLDADIQYSYYDYWGQGTQVTVSS

SEQ ID NO: 27410 - protein, 122 aa, Artificial Sequence
  Chemically Synthesized
QVQLQESGGGLVQAGGSLRLSCAASGNIFTSDRMGWYRQAPGKEREFVATINYGGITNYADSVKGRFTISRDNAKNTVYLQMNSLKPEDTAVYYCAAAGYVGHGDAVLHTYWGQGTQVTVSS

SEQ ID NO: 27411 - protein, 125 aa, Artificial Sequence
  Chemically Synthesized
QVQLQESGGGLVQAGGSLRLSCAASGNISAIPYMGWYRQAPGKEREFVAGIGSGSTTNYADSVKGRFTISRDNAKNTVYLQMNSLKPEDTAVYYCAVEPQDIYDPVNRNNYFDYWGQGTQVTVSS

SEQ ID NO: 27412 - protein, 117 aa, Artificial Sequence
  Chemically Synthesized
QVQLQESGGGLVQAGGSLRLSCAASGNIFDQDYMGWYRQAPGKEREFVATIGFGTITNYADSVKGRFTISRDNAKNTVYLQMNSLKPEDTAVYYCAANGRDIRSMYWGQGTQVTVSS

SEQ ID NO: 27413 - protein, 118 aa, Artificial Sequence
  Chemically Synthesized
QVQLQESGGGLVQAGGSLRLSCAASGTIFPYSRMGWYRQAPGKEREFVAGIGNGGNTYYADSVKGRFTISRDNAKNTVYLQMNSLKPEDTAVYYCAVPIPSGWPYDYWGQGTQVTVSS

SEQ ID NO: 27414 - protein, 117 aa, Artificial Sequence
  Chemically Synthesized
QVQLQESGGGLVQAGGSLRLSCAASGTISKSNMGWYRQAPGKEREFVATISYGANTNYADSVKGRFTISRDNAKNTVYLQMNSLKPEDTAVYYCAARKEDYVSLAYWGQGTQVTVSS

SEQ ID NO: 27415 - protein, 118 aa, Artificial Sequence
  Chemically Synthesized
QVQLQESGGGLVQAGGSLRLSCAASGTIFPYWYMGWYRQAPGKERELVASIDGGSSTNYADSVKGRFTISRDNAKNTVYLQMNSLKPEDTAVYYCAVKRREHETHAYWGQGTQVTVSS

SEQ ID NO: 27416 - protein, 122 aa, Artificial Sequence
  Chemically Synthesized
QVQLQESGGGLVQAGGSLRLSCAASGSISPTYRMGWYRQAPGKERELVAGINVGATTNYADSVKGRFTISRDNAKNTVYLQMNSLKPEDTAVYYCAAAASDLYPVVYTHYYWGQGTQVTVSS

SEQ ID NO: 27417 - protein, 121 aa, Artificial Sequence
  Chemically Synthesized
QVQLQESGGGLVQAGGSLRLSCAASGTISSGQNMGWYRQAPGKEREFVATIGGGTTTNYADSVKGRFTISRDNAKNTVYLQMNSLKPEDTAVYYCAAGYYAYDTVSSRMYWGQGTQVTVSS

SEQ ID NO: 27418 - protein, 121 aa, Artificial Sequence
  Chemically Synthesized
QVQLQESGGGLVQAGGSLRLSCAASGTIFWGGRMGWYRQAPGKEREFVASIGSVVLPYADSVKGRFTISRDNAKNTVYLQMNSLKPEDTAVYYCAAYELRDWDADHDLTYWGQGTQVTVSS

SEQ ID NO: 27419 - protein, 110 aa, Artificial Sequence
  Chemically Synthesized
QVQLQESGGGLVQAGGSLRLSCAASGNISDRSQMGWYRQAPGKERELVASINNGANTNYADSVKGRFTISRDNAKNTVYLQMNSLKPEDTAVYYCAVPYWGQGTQVTVSS

SEQ ID NO: 27420 - protein, 122 aa, Artificial Sequence
  Chemically Synthesized
QVQLQESGGGLVQAGGSLRLSCAASGNISLPRYMGWYRQAPGKERELVASIADGGSTNYADSVKGRFTISRDNAKNTVYLQMNSLKPEDTAVYYCAADTTWQPYARFAYQYWGQGTQVTVSS

SEQ ID NO: 27421 - protein, 118 aa, Artificial Sequence
  Chemically Synthesized
QVQLQESGGGLVQAGGSLRLSCAASGTIFVAGSMGWYRQAPGKERELVAAIAGGSTTNYADSVKGRFTISRDNAKNTVYLQMNSLKPEDTAVYYCAARSWNFTSLKYWGQGTQVTVSS

SEQ ID NO: 27422 - protein, 110 aa, Artificial Sequence
  Chemically Synthesized
QVQLQESGGGLVQAGGSLRLSCAASGTISFDYDMGWYRQAPGKERELVATIDYGTTTYYADSVKGRFTISRDNAKNTVYLQMNSLKPEDTAVYYCAVYYWGQGTQVTVSS

SEQ ID NO: 27423 - protein, 118 aa, Artificial Sequence
  Chemically Synthesized
QVQLQESGGGLVQAGGSLRLSCAASGTISGRYFMGWYRQAPGKEREFVASITYGGTTYYADSVKGRFTISRDNAKNTVYLQMNSLKPEDTAVYYCAVFYEPRASHNYWGQGTQVTVSS

SEQ ID NO: 27424 - protein, 118 aa, Artificial Sequence
  Chemically Synthesized
QVQLQESGGGLVQAGGSLRLSCAASGTISYGLYMGWYRQAPGKERELVAGIGAGSSTNYADSVKGRFTISRDNAKNTVYLQMNSLKPEDTAVYYCAAYYGDVSRLRYWGQGTQVTVSS

SEQ ID NO: 27425 - protein, 122 aa, Artificial Sequence
  Chemically Synthesized
QVQLQESGGGLVQAGGSLRLSCAASGSIFDRRVMGWYRQAPGKEREFVASIAYGSTTNYADSVKGRFTISRDNAKNTVYLQMNSLKPEDTAVYYCAVDGSLDEGINTELDYWGQGTQVTVSS

SEQ ID NO: 27426 - protein, 126 aa, Artificial Sequence
  Chemically Synthesized
QVQLQESGGGLVQAGGSLRLSCAASGNIFLANGMGWYRQAPGKEREFVATINYGGTTYYADSVKGRFTISRDNAKNTVYLQMNSLKPEDTAVYYCAVWAGSSLPFVYASYYPHGYWGQGTQVTVSS

SEQ ID NO: 27427 - protein, 117 aa, Artificial Sequence
  Chemically Synthesized
QVQLQESGGGLVQAGGSLRLSCAASGSISYGYYMGWYRQAPGKERELVATIAGGASTYYADSVKGRFTISRDNAKNTVYLQMNSLKPEDTAVYYCAVWDATPSFLYWGQGTQVTVSS

SEQ ID NO: 27428 - protein, 118 aa, Artificial Sequence
  Chemically Synthesized
QVQLQESGGGLVQAGGSLRLSCAASGSISRYWYMGWYRQAPGKERELVATIAQGGTTYYADSVKGRFTISRDNAKNTVYLQMNSLKPEDTAVYYCAADWPDRLDFPYWGQGTQVTVSS

SEQ ID NO: 27429 - protein, 115 aa, Artificial Sequence
  Chemically Synthesized
QVQLQESGGGLVQAGGSLRLSCAASGNISRYYYMGWYRQAPGKERELVASIGAGSSTYYADSVKGRFTISRDNAKNTVYLQMNSLKPEDTAVYYCAVQYGNAMYWGQGTQVTVSS

SEQ ID NO: 27430 - protein, 121 aa, Artificial Sequence
  Chemically Synthesized
QVQLQESGGGLVQAGGSLRLSCAASGSIFDGYDMGWYRQAPGKERELLPLLVWVVLPYADSVKGRFTISRDNAKNTVYLQMNSLKPEDTAVYYCAVWGRRLVSPDNDFGYWGQGTQVTVSS

SEQ ID NO: 27431 - protein, 118 aa, Artificial Sequence
  Chemically Synthesized
QVQLQESGGGLVQAGGSLRLSCAASGYISLADYMGWYRQAPGKEREFVATIGYGTITYYADSVKGRFTISRDNAKNTVYLQMNSLKPEDTAVYYCAALWWNSDRYYYWGQGTQVTVSS

SEQ ID NO: 27432 - protein, 121 aa, Artificial Sequence
  Chemically Synthesized
QVQLQESGGGLVQAGGSLRLSCAASGTISYGYWMGWYRQAPGKEREFVAAIGQGGTTYADSVKGRFTISRDNAKNTVYLQMNSLKPEDTAVYYCAVNWRFYWYERIDHSYWGQGTQVTVSS

SEQ ID NO: 27433 - protein, 117 aa, Artificial Sequence
  Chemically Synthesized
QVQLQESGGGLVQAGGSLRLSCAASGNIFYVQTMGWYRQAPGKERELVAGIGYGANTNYADSVKGRFTISRDNAKNTVYLQMNSLKPEDTAVYYCAVLRVSNTCIYWGQGTQVTVSS

SEQ ID NO: 27434 - protein, 119 aa, Artificial Sequence
  Chemically Synthesized
QVQLQESGGGLVQAGGSLRLSCAASGNISGGDDMGWYRQAPGKERELVATIGTGSTTYYADSVKGRFTISRDNAKNTVYLQMNSLKPEDTAVYYCAANGQWTRDRHGYWGQGTQVTVSS

SEQ ID NO: 27435 - protein, 118 aa, Artificial Sequence
  Chemically Synthesized
QVQLQESGGGLVQAGGSLRLSCAASGNISGSYLMGWYRQAPGKERELVATIAAGGTTNYADSVKGRFTISRDNAKNTVYLQMNSLKPEDTAVYYCAVYHKSTRKYSYWGQGTQVTVSS

SEQ ID NO: 27436 - protein, 118 aa, Artificial Sequence
  Chemically Synthesized
QVQLQESGGGLVQAGGSLRLSCAASGTISYPWDMGWYRQAPGKERELVASIGYGGNTYYADSVKGRFTISRDNAKNTVYLQMNSLKPEDTAVYYCAAWQGDSPLYVYWGQGTQVTVSS

SEQ ID NO: 27437 - protein, 122 aa, Artificial Sequence
  Chemically Synthesized
QVQLQESGGGLVQAGGSLRLSCAASGNISPTADMGWYRQAPGKEREFVASIAGGTNTNYADSVKGRFTISRDNAKNTVYLQMNSLKPEDTAVYYCAAYYATWGYDQDSALYWGQGTQVTVSS

SEQ ID NO: 27438 - protein, 123 aa, Artificial Sequence
  Chemically Synthesized
QVQLQESGGGLVQAGGSLRLSCAASGYISRDEAMGWYRQAPGKEREFVATINSGATTNYADSVKGRFTISRDNAKNTVYLQMNSLKPEDTAVYYCAVYYADLIHEGSFRLDYWGQGTQVTVSS

SEQ ID NO: 27439 - protein, 124 aa, Artificial Sequence
  Chemically Synthesized
QVQLQESGGGLVQAGGSLRLSCAASGTISRYVAMGWYRQAPGKEREFVAAIGSVVVPYADSVKGRFTISRDNAKNTVYLQMNSLKPEDTAVYYCAALIGDYTDHSYTPAGYRYWGQGTQVTVSS

SEQ ID NO: 27440 - protein, 118 aa, Artificial Sequence
  Chemically Synthesized
QVQLQESGGGLVQAGGSLRLSCAASGTIFRYVDMGWYRQAPGKERELVATIGGGTITYYADSVKGRFTISRDNAKNTVYLQMNSLKPEDTAVYYCAARPYHDYQFYYWGQGTQVTVSS

SEQ ID NO: 27441 - protein, 118 aa, Artificial Sequence
  Chemically Synthesized
QVQLQESGGGLVQAGGSLRLSCAASGSIFWPAGMGWYRQAPGKERELVAAIDDGANTNYADSVKGRFTISRDNAKNTVYLQMNSLKPEDTAVYYCAADSWAYGDFGYWGQGTQVTVSS

SEQ ID NO: 27442 - protein, 118 aa, Artificial Sequence
  Chemically Synthesized
QVQLQESGGGLVQAGGSLRLSCAASGYISPYYIMGWYRQAPGKEREFVASINTGSSTNYADSVKGRFTISRDNAKNTVYLQMNSLKPEDTAVYYCAVYFYDGYDLPYWGQGTQVTVSS

SEQ ID NO: 27443 - protein, 118 aa, Artificial Sequence
  Chemically Synthesized
QVQLQESGGGLVQAGGSLRLSCAASGTIFSRRYMGWYRQAPGKERELVAAISRGGSTNYADSVKGRFTISRDNAKNTVYLQMNSLKPEDTAVYYCAAYYTRVYRYTYWGQGTQVTVSS

SEQ ID NO: 27444 - protein, 121 aa, Artificial Sequence
  Chemically Synthesized
QVQLQESGGGLVQAGGSLRLSCAASGYISSEGMGWYRQAPGKERELVAGISGGGSTYYADSVKGRFTISRDNAKNTVYLQMNSLKPEDTAVYYCAVYYLYIDNRGEYLGYWGQGTQVTVSS

SEQ ID NO: 27445 - protein, 121 aa, Artificial Sequence
  Chemically Synthesized
QVQLQESGGGLVQAGGSLRLSCAASGYIFAQHFMGWYRQAPGKERELVAGISDGAITYYADSVKGRFTISRDNAKNTVYLQMNSLKPEDTAVYYCAASSYRPDRADTLYYWGQGTQVTVSS

SEQ ID NO: 27446 - protein, 126 aa, Artificial Sequence
  Chemically Synthesized
QVQLQESGGGLVQAGGSLRLSCAASGTIFRDNDMGWYRQAPGKERELVATIGYGGTTNYADSVKGRFTISRDNAKNTVYLQMNSLKPEDTAVYYCAVANADGNRGYLRTDAKHYYWGQGTQVTVSS

SEQ ID NO: 27447 - protein, 122 aa, Artificial Sequence
  Chemically Synthesized
QVQLQESGGGLVQAGGSLRLSCAASGNISVRPYMGWYRQAPGKERELVATIDFGTNTYYADSVKGRFTISRDNAKNTVYLQMNSLKPEDTAVYYCAADGTWYDYDDNDFAYWGQGTQVTVSS

SEQ ID NO: 27448 - protein, 116 aa, Artificial Sequence
  Chemically Synthesized
QVQLQESGGGLVQAGGSLRLSCAASGRMGWYRQAPGKEREFVATIGSGTSTNYADSVKGRFTISRDNAKNTVYLQMNSLKPEDTAVYYCAVDGSGVDGTYRTLAYWGQGTQVTVSS

SEQ ID NO: 27449 - protein, 121 aa, Artificial Sequence
  Chemically Synthesized
QVQLQESGGGLVQAGGSLRLSCAASGSISGAGNMGWYRQAPGKERELVAAIGSGGSTNYADSVKGRFTISRDNAKNTVYLQMNSLKPEDTAVYYCAVDNSRDAYSTGFCYWGQGTQVTVSS

SEQ ID NO: 27450 - protein, 121 aa, Artificial Sequence
  Chemically Synthesized
QVQLQESGGGLVQAGGSLRLSCAASGNIFTYYTMGWYRQAPGKERELVATIVVVVIPYADSVKGRFTISRDNAKNTVYLQMNSLKPEDTAVYYCAALQRYATPYRVPHYYWGQGTQVTVSS

SEQ ID NO: 27451 - protein, 114 aa, Artificial Sequence
  Chemically Synthesized
QVQLQESGGGLVQAGGSLRLSCAASGNISVEDAMGWYRQAPGKEREFVAAIGTGAITYYADSVKGRFTISRDNAKNTVYLQMNSLKPEDTAVYYCAVTLLVLYWGQGTQVTVSS

SEQ ID NO: 27452 - protein, 117 aa, Artificial Sequence
  Chemically Synthesized
QVQLQESGGGLVQAGGSLRLSCAASGYIFAWRMGWYRQAPGKERELVATIDYGSITNYADSVKGRFTISRDNAKNTVYLQMNSLKPEDTAVYYCAVRNAGQGFHDYWGQGTQVTVSS

SEQ ID NO: 27453 - protein, 122 aa, Artificial Sequence
  Chemically Synthesized
QVQLQESGGGLVQAGGSLRLSCAASGTIFSATYMGWYRQAPGKEREFVAGIDYGSSTNYADSVKGRFTISRDNAKNTVYLQMNSLKPEDTAVYYCAVHGRYRTPYQRQHPYWGQGTQVTVSS

SEQ ID NO: 27454 - protein, 110 aa, Artificial Sequence
  Chemically Synthesized
QVQLQESGGGLVQAGGSLRLSCAASGTIFRLPDMGWYRQAPGKERELVATITSGTNTYADSVKGRFTISRDNAKNTVYLQMNSLKPEDTAVYYCAVACYWGQGTQVTVSS

SEQ ID NO: 27455 - protein, 118 aa, Artificial Sequence
  Chemically Synthesized
QVQLQESGGGLVQAGGSLRLSCAASGNIFPDYPMGWYRQAPGKEREFVATIGHGATTYYADSVKGRFTISRDNAKNTVYLQMNSLKPEDTAVYYCAVTGHLNATFAYWGQGTQVTVSS

SEQ ID NO: 27456 - protein, 122 aa, Artificial Sequence
  Chemically Synthesized
QVQLQESGGGLVQAGGSLRLSCAASGSISYYVQMGWYRQAPGKEREFVAAITAGTNTYYADSVKGRFTISRDNAKNTVYLQMNSLKPEDTAVYYCAVTGSYDRYAFDDYDYWGQGTQVTVSS

SEQ ID NO: 27457 - protein, 118 aa, Artificial Sequence
  Chemically Synthesized
QVQLQESGGGLVQAGGSLRLSCAASGTIFAVLIMGWYRQAPGKERELVASINYGSSTYYADSVKGRFTISRDNAKNTVYLQMNSLKPEDTAVYYCAADDKGTSSHLYWGQGTQVTVSS

SEQ ID NO: 27458 - protein, 117 aa, Artificial Sequence
  Chemically Synthesized
QVQLQESGGGLVQAGGSLRLSCAASGTIFAIYSMGWYRQAPGKERELVASIGIGGSTNYADSVKGRFTISRDNAKNTVYLQMNSLKPEDTAVYYCAVGADEGTLPYWGQGTQVTVSS

SEQ ID NO: 27459 - protein, 122 aa, Artificial Sequence
  Chemically Synthesized
QVQLQESGGGLVQAGGSLRLSCAASGNIFSYGVMGWYRQAPGKERELVAAINPGASTYYADSVKGRFTISRDNAKNTVYLQMNSLKPEDTAVYYCAVRQYWQSDRGADFDYWGQGTQVTVSS

SEQ ID NO: 27460 - protein, 118 aa, Artificial Sequence
  Chemically Synthesized
QVQLQESGGGLVQAGGSLRLSCAASGNISYDKYMGWYRQAPGKEREFVATINIGASTNYADSVKGRFTISRDNAKNTVYLQMNSLKPEDTAVYYCAAHDGEPYYYDYWGQGTQVTVSS

SEQ ID NO: 27461 - protein, 122 aa, Artificial Sequence
  Chemically Synthesized
QVQLQESGGGLVQAGGSLRLSCAASGNISPTYTMGWYRQAPGKERELVATIDVGGNTYYADSVKGRFTISRDNAKNTVYLQMNSLKPEDTAVYYCAVYRWATALSFTYFRYWGQGTQVTVSS

SEQ ID NO: 27462 - protein, 118 aa, Artificial Sequence
  Chemically Synthesized
QVQLQESGGGLVQAGGSLRLSCAASGTIFGTVNMGWYRQAPGKERELVASISNGATTNYADSVKGRFTISRDNAKNTVYLQMNSLKPEDTAVYYCAAPRPFPGYHRYWGQGTQVTVSS

SEQ ID NO: 27463 - protein, 122 aa, Artificial Sequence
  Chemically Synthesized
QVQLQESGGGLVQAGGSLRLSCAASGYIFGFLYMGWYRQAPGKERELVAAIGLGSTTNYADSVKGRFTISRDNAKNTVYLQMNSLKPEDTAVYYCAAGLTNYDVYSLLLDYWGQGTQVTVSS

SEQ ID NO: 27464 - protein, 114 aa, Artificial Sequence
  Chemically Synthesized
QVQLQESGGGLVQAGGSLRLSCAASGNIFQYLTMGWYRQAPGKERELVATINFGSSTYYADSVKGRFTISRDNAKNTVYLQMNSLKPEDTAVYYCAVQDFSIYWGQGTQVTVSS

SEQ ID NO: 27465 - protein, 118 aa, Artificial Sequence
  Chemically Synthesized
QVQLQESGGGLVQAGGSLRLSCAASGTISALYIMGWYRQAPGKEREFVASITDGGSTYYADSVKGRFTISRDNAKNTVYLQMNSLKPEDTAVYYCAAFTNEGYLYTYWGQGTQVTVSS

SEQ ID NO: 27466 - protein, 118 aa, Artificial Sequence
  Chemically Synthesized
QVQLQESGGGLVQAGGSLRLSCAASGYIFPYVSMGWYRQAPGKERELVAAIAYGGITYYADSVKGRFTISRDNAKNTVYLQMNSLKPEDTAVYYCAALRYFHPDFSYWGQGTQVTVSS

SEQ ID NO: 27467 - protein, 118 aa, Artificial Sequence
  Chemically Synthesized
QVQLQESGGGLVQAGGSLRLSCAASGTISVQPYMGWYRQAPGKEREFVAGIGLGTTTNYADSVKGRFTISRDNAKNTVYLQMNSLKPEDTAVYYCAATAPISGYHYYWGQGTQVTVSS

SEQ ID NO: 27468 - protein, 116 aa, Artificial Sequence
  Chemically Synthesized
QVQLQESGGGLVQAGGSLRLSCAASGTIFTPYMGWYRQAPGKEREFVATIDPGGITYYADSVKGRFTISRDNAKNTVYLQMNSLKPEDTAVYYCAVSPYTPLYLYWGQGTQVTVSS

SEQ ID NO: 27469 - protein, 114 aa, Artificial Sequence
  Chemically Synthesized
QVQLQESGGGLVQAGGSLRLSCAASGTIFWAAIMGWYRQAPGKEREFVAAIGYGGTTNYADSVKGRFTISRDNAKNTVYLQMNSLKPEDTAVYYCAVSRYRAYWGQGTQVTVSS

SEQ ID NO: 27470 - protein, 118 aa, Artificial Sequence
  Chemically Synthesized
QVQLQESGGGLVQAGGSLRLSCAASGTISYYFRMGWYRQAPGKEREFVATIGYGTNTYYADSVKGRFTISRDNAKNTVYLQMNSLKPEDTAVYYCAVYWYDYYYHDYWGQGTQVTVSS

SEQ ID NO: 27471 - protein, 109 aa, Artificial Sequence
  Chemically Synthesized
QVQLQESGGGLVQAGGSLRLSCAASGYISWVDYMGWYRQAPGKERELVASIGDGASTNYADSVKGRFTISRDNAKNTVYLQMNSLKPEDTAVYYCAYYWGQGTQVTVSS

SEQ ID NO: 27472 - protein, 117 aa, Artificial Sequence
  Chemically Synthesized
QVQLQESGGGLVQAGGSLRLSCAASGTISQYDFMGWYRQAPGKEREFVAAIDVGTTTYYADSVKGRFTISRDNAKNTVYLQMNSLKPEDTAVYYCAVPYTWVYDIYWGQGTQVTVSS

SEQ ID NO: 27473 - protein, 118 aa, Artificial Sequence
  Chemically Synthesized
QVQLQESGGGLVQAGGSLRLSCAASGTISSDLYMGWYRQAPGKEREFVAAITDGGNTNYADSVKGRFTISRDNAKNTVYLQMNSLKPEDTAVYYCAVAYLAVVRYLYWGQGTQVTVSS

SEQ ID NO: 27474 - protein, 117 aa, Artificial Sequence
  Chemically Synthesized
QVQLQESGGGLVQAGGSLRLSCAASGYISQSTIMGWYRQAPGKEREFVAGIARGSTYYADSVKGRFTISRDNAKNTVYLQMNSLKPEDTAVYYCAVGRLSFLTHYYWGQGTQVTVSS

SEQ ID NO: 27475 - protein, 126 aa, Artificial Sequence
  Chemically Synthesized
QVQLQESGGGLVQAGGSLRLSCAASGTIFYRVGMGWYRQAPGKEREFVAAIDAGGSTYYADSVKGRFTISRDNAKNTVYLQMNSLKPEDTAVYYCAAFADGAGDVGIRYRTKYHYWGQGTQVTVSS

SEQ ID NO: 27476 - protein, 120 aa, Artificial Sequence
  Chemically Synthesized
QVQLQESGGGLVQAGGSLRLSCAASGYIFRDSIMGWYRQAPGKEREFTIAGGTTTYYADSVKGRFTISRDNAKNTVYLQMNSLKPEDTAVYYCAVGLYGDQAAYTDHAYWGQGTQVTVSS

SEQ ID NO: 27477 - protein, 122 aa, Artificial Sequence
  Chemically Synthesized
QVQLQESGGGLVQAGGSLRLSCAASGYISRGDYMGWYRQAPGKEREFVASISLGTSTYYADSVKGRFTISRDNAKNTVYLQMNSLKPEDTAVYYCAAWYPYNRDSNYDYQYWGQGTQVTVSS

SEQ ID NO: 27478 - protein, 118 aa, Artificial Sequence
  Chemically Synthesized
QVQLQESGGGLVQAGGSLRLSCAASGSISTADPMGWYRQAPGKERELVASIDPGGNTYYADSVKGRFTISRDNAKNTVYLQMNSLKPEDTAVYYCAARGSPYILHWYWGQGTQVTVSS

SEQ ID NO: 27479 - protein, 118 aa, Artificial Sequence
  Chemically Synthesized
QVQLQESGGGLVQAGGSLRLSCAASGNIFPRSTMGWYRQAPGKERELVATIDYGAITYYADSVKGRFTISRDNAKNTVYLQMNSLKPEDTAVYYCAAQDQQWQAYIYWGQGTQVTVSS

SEQ ID NO: 27480 - protein, 113 aa, Artificial Sequence
  Chemically Synthesized
QVQLQESGGGLVQAGGSLRLSCAASGSISWPDYMGWYRQAPGKEREFVAGINTVVVPYADSVKGRFTISRDNAKNTVYLQMNSLKPEDTAVYYCAAIDWYAYWGQGTQVTVSS

SEQ ID NO: 27481 - protein, 118 aa, Artificial Sequence
  Chemically Synthesized
QVQLQESGGGLVQAGGSLRLSCAASGYISNYASMGWYRQAPGKEREFVATIDYGGSTNYADSVKGRFTISRDNAKNTVYLQMNSLKPEDTAVYYCAAWSYELVGHRYWGQGTQVTVSS

SEQ ID NO: 27482 - protein, 118 aa, Artificial Sequence
  Chemically Synthesized
QVQLQESGGGLVQAGGSLRLSCAASGTISDASDMGWYRQAPGKEREFVAAIAGGGITNYADSVKGRFTISRDNAKNTVYLQMNSLKPEDTAVYYCAADESYHRVTIYWGQGTQVTVSS

SEQ ID NO: 27483 - protein, 126 aa, Artificial Sequence
  Chemically Synthesized
QVQLQESGGGLVQAGGSLRLSCAASGTISVDDYMGWYRQAPGKERELVAGISTGSNTYYADSVKGRFTISRDNAKNTVYLQMNSLKPEDTAVYYCAVRPARYEYSYYGNYVYHYYWGQGTQVTVSS

SEQ ID NO: 27484 - protein, 118 aa, Artificial Sequence
  Chemically Synthesized
QVQLQESGGGLVQAGGSLRLSCAASGNISLFSYMGWYRQAPGKEREFVAGIGYGTTTNYADSVKGRFTISRDNAKNTVYLQMNSLKPEDTAVYYCAADANPITRYTYWGQGTQVTVSS

SEQ ID NO: 27485 - protein, 117 aa, Artificial Sequence
  Chemically Synthesized
QVQLQESGGGLVQAGGSLRLSCAASGSIFYIAFMGWYRQAPGKEREFVATISYGTSTNYADSVKGRFTISRDNAKNTVYLQMNSLKPEDTAVYYCAAPQYSSWTIYWGQGTQVTVSS

SEQ ID NO: 27486 - protein, 122 aa, Artificial Sequence
  Chemically Synthesized
QVQLQESGGGLVQAGGSLRLSCAASGNISRIDDMGWYRQAPGKERELVAAIGDGGNTNYADSVKGRFTISRDNAKNTVYLQMNSLKPEDTAVYYCAAYYDGYVSGLTTYEYWGQGTQVTVSS

SEQ ID NO: 27487 - protein, 117 aa, Artificial Sequence
  Chemically Synthesized
QVQLQESGGGLVQAGGSLRLSCAASGYISDAIAMGWYRQAPGKERELVAAMIRVLVPYADSVKGRFTISRDNAKNTVYLQMNSLKPEDTAVYYCAATDSWLPVFYYWGQGTQVTVSS

SEQ ID NO: 27488 - protein, 109 aa, Artificial Sequence
  Chemically Synthesized
QVQLQESGGGLVQAGGSLRLSCAASGYISSRYNMGWYRQAPGKERELVASINTGGNTNYADSVKGRFTISRDNAKNTVYLQMNSLKPEDTAVYYCADYWGQGTQVTVSS

SEQ ID NO: 27489 - protein, 117 aa, Artificial Sequence
  Chemically Synthesized
QVQLQESGGGLVQAGGSLRLSCAASGNISGYEDMGWYRQAPGKEREFVAGIGRGSITNYADSVKGRFTISRDNAKNTVYLQMNSLKPEDTAVYYCAVLRTVRLAHYWGQGTQVTVSS

SEQ ID NO: 27490 - protein, 122 aa, Artificial Sequence
  Chemically Synthesized
QVQLQESGGGLVQAGGSLRLSCAASGNISSYVHMGWYRQAPGKEREFVAAIDRGTTTNYADSVKGRFTISRDNAKNTVYLQMNSLKPEDTAVYYCAADNYHSDYLLDFFGYWGQGTQVTVSS

SEQ ID NO: 27491 - protein, 118 aa, Artificial Sequence
  Chemically Synthesized
QVQLQESGGGLVQAGGSLRLSCAASGSIFQTTRMGWYRQAPGKERELVAGITWGGNTNYADSVKGRFTISRDNAKNTVYLQMNSLKPEDTAVYYCAVLDWYDYGLDYWGQGTQVTVSS

SEQ ID NO: 27492 - protein, 121 aa, Artificial Sequence
  Chemically Synthesized
QVQLQESGGGLVQAGGSLRLSCAASGYISYRGDMGWYRQAPGKERELVAGIAYGGSTNYADSVKGRFTISRDNAKNTVYLQMNSLKPEDTAVYYCAVRPTVTLSTTTTMYWGQGTQVTVSS

SEQ ID NO: 27493 - protein, 122 aa, Artificial Sequence
  Chemically Synthesized
QVQLQESGGGLVQAGGSLRLSCAASGTISDYSYMGWYRQAPGKEREFVATIDYGGITYYADSVKGRFTISRDNAKNTVYLQMNSLKPEDTAVYYCAVDGPYTTFGRRTFAYWGQGTQVTVSS

SEQ ID NO: 27494 - protein, 118 aa, Artificial Sequence
  Chemically Synthesized
QVQLQESGGGLVQAGGSLRLSCAASGTISNTPYMGWYRQAPGKERELVATISSGASTYYADSVKGRFTISRDNAKNTVYLQMNSLKPEDTAVYYCAAYAPYVVSHAYWGQGTQVTVSS

SEQ ID NO: 27495 - protein, 116 aa, Artificial Sequence
  Chemically Synthesized
QVQLQESGGGLVQAGGSLRLSCAASGTISTIVLMGWYRQAPGKERELVAAISYGGITNYADSVKGRFTISRDNAKNTVYLQMNSLKPEDTAVYYCAVRYYSDLPYWGQGTQVTVSS

SEQ ID NO: 27496 - protein, 124 aa, Artificial Sequence
  Chemically Synthesized
QVQLQESGGGLVQAGGSLRLSCAASGNISGSSDMGWYRQAPGKERELVAGIGDGGNTNYADSVKGRFTISRDNAKNTVYLQMNSLKPEDTAVYYCAADPQWYARWVHYEFLVYWGQGTQVTVSS

SEQ ID NO: 27497 - protein, 120 aa, Artificial Sequence
  Chemically Synthesized
QVQLQESGGGLVQAGGSLRLSCAASGSISGIADMGWYRQAPGKERELVAVLLVVLLPYADSVKGRFTISRDNAKNTVYLQMNSLKPEDTAVYYCAAQDVEGLRVYVLMYWGQGTQVTVSS

SEQ ID NO: 27498 - protein, 125 aa, Artificial Sequence
  Chemically Synthesized
QVQLQESGGGLVQAGGSLRLSCAASGSISDGVFMGWYRQAPGKERELVAAIGNGSTTNYADSVKGRFTISRDNAKNTVYLQMNSLKPEDTAVYYCAVTWPTWDGWSTGLAALRYWGQGTQVTVSS

SEQ ID NO: 27499 - protein, 118 aa, Artificial Sequence
  Chemically Synthesized
QVQLQESGGGLVQAGGSLRLSCAASGTIFPARVMGWYRQAPGKERELVAAITDGSNTYYADSVKGRFTISRDNAKNTVYLQMNSLKPEDTAVYYCAAGVYYDLPYVYWGQGTQVTVSS

SEQ ID NO: 27500 - protein, 118 aa, Artificial Sequence
  Chemically Synthesized
QVQLQESGGGLVQAGGSLRLSCAASGTIFDLYYMGWYRQAPGKEREFVAAISGGATTYYADSVKGRFTISRDNAKNTVYLQMNSLKPEDTAVYYCAVIGGSTRQLPYWGQGTQVTVSS

SEQ ID NO: 27501 - protein, 118 aa, Artificial Sequence
  Chemically Synthesized
QVQLQESGGGLVQAGGSLRLSCAASGSIFYYRDMGWYRQAPGKEREFVAGINEGASTYYADSVKGRFTISRDNAKNTVYLQMNSLKPEDTAVYYCAVWTYWTVPYGYWGQGTQVTVSS

SEQ ID NO: 27502 - protein, 118 aa, Artificial Sequence
  Chemically Synthesized
QVQLQESGGGLVQAGGSLRLSCAASGYIFDYSGMGWYRQAPGKERELVAGIGGGGNTYYADSVKGRFTISRDNAKNTVYLQMNSLKPEDTAVYYCAVAYTGQGLHSYWGQGTQVTVSS

SEQ ID NO: 27503 - protein, 117 aa, Artificial Sequence
  Chemically Synthesized
QVQLQESGGGLVQAGGSLRLSCAASGSIFVPIAMGWYRQAPGKEREFVAGIDDGANTNYADSVKGRFTISRDNAKNTVYLQMNSLKPEDTAVYYCAVYSYDLSHRYWGQGTQVTVSS

SEQ ID NO: 27504 - protein, 122 aa, Artificial Sequence
  Chemically Synthesized
QVQLQESGGGLVQAGGSLRLSCAASGTISYDWQMGWYRQAPGKERELVATIGHGTSTYYADSVKGRFTISRDNAKNTVYLQMNSLKPEDTAVYYCAVYSTRHRYQYPSLVYWGQGTQVTVSS

SEQ ID NO: 27505 - protein, 114 aa, Artificial Sequence
  Chemically Synthesized
QVQLQESGGGLVQAGGSLRLSCAASGSISRAQIMGWYRQAPGKERELVAAITVGANTYYADSVKGRFTISRDNAKNTVYLQMNSLKPEDTAVYYCAAGPTWYYWGQGTQVTVSS

SEQ ID NO: 27506 - protein, 117 aa, Artificial Sequence
  Chemically Synthesized
QVQLQESGGGLVQAGGSLRLSCAASGNISAISVMGWYRQAPGKEREFVAGISDGANTNYADSVKGRFTISRDNAKNTVYLQMNSLKPEDTAVYYCAVEHQSDSLLYWGQGTQVTVSS

SEQ ID NO: 27507 - protein, 111 aa, Artificial Sequence
  Chemically Synthesized
QVQLQESGGGLVQAGGSLRLSCAASGTIFLSYIMGWYRQAPGKEREFVPPYYADSVKGRFTISRDNAKNTVYLQMNSLKPEDTAVYYCAAYYSEYLRLVYWGQGTQVTVSS

SEQ ID NO: 27508 - protein, 116 aa, Artificial Sequence
  Chemically Synthesized
QVQLQESGGGLVQAGGSLRLSCAASGTIFTTVHMGWYRQAPGKEREFVAAINYGATTNYADSVKGRFTISRDNAKNTVYLQMNSLKPEDTAVYYCAVVDWTDHYYWGQGTQVTVSS

SEQ ID NO: 27509 - protein, 126 aa, Artificial Sequence
  Chemically Synthesized
QVQLQESGGGLVQAGGSLRLSCAASGTIFASWVMGWYRQAPGKERELVASISQGTNTNYADSVKGRFTISRDNAKNTVYLQMNSLKPEDTAVYYCAVRSDYDYADPHDAGGSLGYWGQGTQVTVSS

SEQ ID NO: 27510 - protein, 122 aa, Artificial Sequence
  Chemically Synthesized
QVQLQESGGGLVQAGGSLRLSCAASGTISRYLQMGWYRQAPGKERELVAAITGGTNTNYADSVKGRFTISRDNAKNTVYLQMNSLKPEDTAVYYCAVKAHDDADYPVTHWYWGQGTQVTVSS

SEQ ID NO: 27511 - protein, 118 aa, Artificial Sequence
  Chemically Synthesized
QVQLQESGGGLVQAGGSLRLSCAASGTIFTIAIMGWYRQAPGKERELVATINGGSNTNYADSVKGRFTISRDNAKNTVYLQMNSLKPEDTAVYYCAVPLDGWYTYRYWGQGTQVTVSS

SEQ ID NO: 27512 - protein, 122 aa, Artificial Sequence
  Chemically Synthesized
QVQLQESGGGLVQAGGSLRLSCAASGTISPSRGMGWYRQAPGKEREFVASINDGTTTYYADSVKGRFTISRDNAKNTVYLQMNSLKPEDTAVYYCAVHIPGKRYDTDALGYWGQGTQVTVSS

SEQ ID NO: 27513 - protein, 118 aa, Artificial Sequence
  Chemically Synthesized
QVQLQESGGGLVQAGGSLRLSCAASGTIFPRAYMGWYRQAPGKEREFVASISRGAITNYADSVKGRFTISRDNAKNTVYLQMNSLKPEDTAVYYCAVDNDYYSVLDYWGQGTQVTVSS

SEQ ID NO: 27514 - protein, 126 aa, Artificial Sequence
  Chemically Synthesized
QVQLQESGGGLVQAGGSLRLSCAASGNISRPRTMGWYRQAPGKERELVASITYGASTYYADSVKGRFTISRDNAKNTVYLQMNSLKPEDTAVYYCAVPRYFDVDVSNHATNNHTYWGQGTQVTVSS

SEQ ID NO: 27515 - protein, 117 aa, Artificial Sequence
  Chemically Synthesized
QVQLQESGGGLVQAGGSLRLSCAASGTISDGWGMGWYRQAPGKERELVAAIGAGTTTNYADSVKGRFTISRDNAKNTVYLQMNSLKPEDTAVYYCAAGYWDSSHWYWGQGTQVTVSS

SEQ ID NO: 27516 - protein, 109 aa, Artificial Sequence
  Chemically Synthesized
QVQLQESGGGLVQAGGSLRLSCAASGSIFATTYMGWYRQAPGKEREFVAGIDSVVIPYADSVKGRFTISRDNAKNTVYLQMNSLKPEDTAVYYCALDYWGQGTQVTVSS

SEQ ID NO: 27517 - protein, 122 aa, Artificial Sequence
  Chemically Synthesized
QVQLQESGGGLVQAGGSLRLSCAASGNISDTRFMGWYRQAPGKEREFVAAIADGGSTYYADSVKGRFTISRDNAKNTVYLQMNSLKPEDTAVYYCAVQTTNTDYHYYLFGYWGQGTQVTVSS

SEQ ID NO: 27518 - protein, 118 aa, Artificial Sequence
  Chemically Synthesized
QVQLQESGGGLVQAGGSLRLSCAASGYISNSLNMGWYRQAPGKERELVAGIADGGTTYYADSVKGRFTISRDNAKNTVYLQMNSLKPEDTAVYYCAASYYTQYLLAYWGQGTQVTVSS

SEQ ID NO: 27519 - protein, 118 aa, Artificial Sequence
  Chemically Synthesized
QVQLQESGGGLVQAGGSLRLSCAASGTIFDYSYMGWYRQAPGKERELVAGISSGASTNYADSVKGRFTISRDNAKNTVYLQMNSLKPEDTAVYYCAVYYHTDVALVYWGQGTQVTVSS

SEQ ID NO: 27520 - protein, 121 aa, Artificial Sequence
  Chemically Synthesized
QVQLQESGGGLVQAGGSLRLSCAASGTIFFDHRMGWYRQAPGKERELVAGIDDGGSTYYADSVKGRFTISRDNAKNTVYLQMNSLKPEDTAVYYCAVLSWFTLVLVVLLYWGQGTQVTVSS

SEQ ID NO: 27521 - protein, 124 aa, Artificial Sequence
  Chemically Synthesized
QVQLQESGGGLVQAGGSLRLSCAASGTIFSWSMGWYRQAPGKERELVASISYGGTTNYADSVKGRFTISRDNAKNTVYLQMNSLKPEDTAVYYCAAVRYSLYDSVLLKLLTLYWGQGTQVTVSS

SEQ ID NO: 27522 - protein, 112 aa, Artificial Sequence
  Chemically Synthesized
QVQLQESGGGLVQAGGSLRLSCAASGTIFYVGYMGWYRQAPGKERELSVLLPYADSVKGRFTISRDNAKNTVYLQMNSLKPEDTAVYYCAVYGWAYVDLYYWGQGTQVTVSS

SEQ ID NO: 27523 - protein, 109 aa, Artificial Sequence
  Chemically Synthesized
QVQLQESGGGLVQAGGSLRLSCAASGSISWDMGWYRQAPGKEREFVAGIDAAYADSVKGRFTISRDNAKNTVYLQMNSLKPEDTAVYYCAVRGDYSLYWGQGTQVTVSS

SEQ ID NO: 27524 - protein, 118 aa, Artificial Sequence
  Chemically Synthesized
QVQLQESGGGLVQAGGSLRLSCAASGTISAGDGMGWYRQAPGKERELVAGISNGTNTNYADSVKGRFTISRDNAKNTVYLQMNSLKPEDTAVYYCAVGEWSTPTYWYWGQGTQVTVSS

SEQ ID NO: 27525 - protein, 118 aa, Artificial Sequence
  Chemically Synthesized
QVQLQESGGGLVQAGGSLRLSCAASGNIFSYEYMGWYRQAPGKEREFVASISRGGTTNYADSVKGRFTISRDNAKNTVYLQMNSLKPEDTAVYYCAVRYLGHWDYGYWGQGTQVTVSS

SEQ ID NO: 27526 - protein, 126 aa, Artificial Sequence
  Chemically Synthesized
QVQLQESGGGLVQAGGSLRLSCAASGNISYAYYMGWYRQAPGKERELVATINQGWYYLYADSVKGRFTISRDNAKNTVYLQMNSLKPEDTAVYYCAVHYQFDYTTDGFHYWGLFYWGQGTQVTVSS

SEQ ID NO: 27527 - protein, 118 aa, Artificial Sequence
  Chemically Synthesized
QVQLQESGGGLVQAGGSLRLSCAASGTISYANYMGWYRQAPGKEREFVAGIDDGTTTNYADSVKGRFTISRDNAKNTVYLQMNSLKPEDTAVYYCAVFDSGVQWHYYWGQGTQVTVSS

SEQ ID NO: 27528 - protein, 118 aa, Artificial Sequence
  Chemically Synthesized
QVQLQESGGGLVQAGGSLRLSCAASGSISGYGYMGWYRQAPGKERELVATIDYGSSTQYADSVKGRFTISRDNAKNTVYLQMNSLKPEDTAVYYCAVQYERDYVYTYWGQGTQVTVSS

SEQ ID NO: 27529 - protein, 117 aa, Artificial Sequence
  Chemically Synthesized
QVQLQESGGGLVQAGGSLRLSCAASGYIFRLDSMGWYRQAPGKEREFVAAIDAGGTNYADSVKGRFTISRDNAKNTVYLQMNSLKPEDTAVYYCAVSQHHWWRLTYWGQGTQVTVSS

SEQ ID NO: 27530 - protein, 113 aa, Artificial Sequence
  Chemically Synthesized
QVQLQESGGGLVQAGGSLRLSCAASGYISGSLMGWYRQAPGKERELVASINLGTTTYYADSVKGRFTISRDNAKNTVYLQMNSLKPEDTAVYYCAVISLIFYWGQGTQVTVSS

SEQ ID NO: 27531 - protein, 125 aa, Artificial Sequence
  Chemically Synthesized
QVQLQESGGGLVQAGGSLRLSCAASGTISQPTYMGWYRQAPGKEREFVAGIAQGGTTNYADSVKGRFTISRDNAKNTVYLQMNSLKPEDTAVYYCAAYRPNNTFYVHYVGAHYYWGQGTQVTVSS

SEQ ID NO: 27532 - protein, 126 aa, Artificial Sequence
  Chemically Synthesized
QVQLQESGGGLVQAGGSLRLSCAASGNISYWEDMGWYRQAPGKERELVASISNGASTYYADSVKGRFTISRDNAKNTVYLQMNSLKPEDTAVYYCAADVYDHDQRYGRSDWPFGYWGQGTQVTVSS

SEQ ID NO: 27533 - protein, 118 aa, Artificial Sequence
  Chemically Synthesized
QVQLQESGGGLVQAGGSLRLSCAASGNISPDASMGWYRQAPGKEREFVATIGAGATTYYADSVKGRFTISRDNAKNTVYLQMNSLKPEDTAVYYCAANVEYPPSHTYWGQGTQVTVSS

SEQ ID NO: 27534 - protein, 112 aa, Artificial Sequence
  Chemically Synthesized
QVQLQESGGGLVQAGGSLRLSCAASGNIFTTAIMGWYRQAPGKEREFVASITRGSTTYYADSVKGRFTISRDNAKNTVYLQMNSLKPEDTAVYYCALSFEYWGQGTQVTVSS

SEQ ID NO: 27535 - protein, 117 aa, Artificial Sequence
  Chemically Synthesized
QVQLQESGGGLVQAGGSLRLSCAASGNIFPRIDMGWYRQAPGKERELVATINLGGNTYADSVKGRFTISRDNAKNTVYLQMNSLKPEDTAVYYCAVTWNADDRYYYWGQGTQVTVSS

SEQ ID NO: 27536 - protein, 117 aa, Artificial Sequence
  Chemically Synthesized
QVQLQESGGGLVQAGGSLRLSCAASGTISTTADMGWYRQAPGKEREFVALLVTVVVPYADSVKGRFTISRDNAKNTVYLQMNSLKPEDTAVYYCAVAQSVYTLFRYWGQGTQVTVSS

SEQ ID NO: 27537 - protein, 118 aa, Artificial Sequence
  Chemically Synthesized
QVQLQESGGGLVQAGGSLRLSCAASGNISNGDHMGWYRQAPGKERELVAAINQGTNTNYADSVKGRFTISRDNAKNTVYLQMNSLKPEDTAVYYCAVYDYDKRYHYYWGQGTQVTVSS

SEQ ID NO: 27538 - protein, 122 aa, Artificial Sequence
  Chemically Synthesized
QVQLQESGGGLVQAGGSLRLSCAASGSISDPDKMGWYRQAPGKERELVASIDLGSNTYYADSVKGRFTISRDNAKNTVYLQMNSLKPEDTAVYYCAADKYHKWYERWRYVYWGQGTQVTVSS

SEQ ID NO: 27539 - protein, 118 aa, Artificial Sequence
  Chemically Synthesized
QVQLQESGGGLVQAGGSLRLSCAASGYISDPFVMGWYRQAPGKERELVAGINNGATTNYADSVKGRFTISRDNAKNTVYLQMNSLKPEDTAVYYCAARTYLPCLPCYWGQGTQVTVSS

SEQ ID NO: 27540 - protein, 118 aa, Artificial Sequence
  Chemically Synthesized
QVQLQESGGGLVQAGGSLRLSCAASGNISYPLYMGWYRQAPGKERELVAAISYGTITNYADSVKGRFTISRDNAKNTVYLQMNSLKPEDTAVYYCAASDDQDVALTYWGQGTQVTVSS

SEQ ID NO: 27541 - protein, 111 aa, Artificial Sequence
  Chemically Synthesized
QVQLQESGGGLVQAGGSLRLSCAASGTIFWNTVMGWYRQAPGKEREFVATIAYGATTNYADSVKGRFTISRDNAKNTVYLQMNSLKPEDTAVYYCAATSYWGQGTQVTVSS

SEQ ID NO: 27542 - protein, 119 aa, Artificial Sequence
  Chemically Synthesized
QVQLQESGGGLVQAGGSLRLSCAASGSIFPYRLMGWYRQAPGKERELVATIDWTGGTTYYADSVKGRFTISRDNAKNTVYLQMNSLKPEDTAVYYCAVGYEDYIRLSYWGQGTQVTVSS

SEQ ID NO: 27543 - protein, 112 aa, Artificial Sequence
  Chemically Synthesized
QVQLQESGGGLVQAGGSLRLSCAASGSMGWYRQAPGKERELVAGIDSGTTTNYADSVKGRFTISRDNAKNTVYLQMNSLKPEDTAVYYCAAGQYSPLDFSYWGQGTQVTVSS

SEQ ID NO: 27544 - protein, 122 aa, Artificial Sequence
  Chemically Synthesized
QVQLQESGGGLVQAGGSLRLSCAASGSISDIPDMGWYRQAPGKERELVATIGNGSTTNYADSVKGRFTISRDNAKNTVYLQMNSLKPEDTAVYYCAAFPLPKGGLVVRYGYWGQGTQVTVSS

SEQ ID NO: 27545 - protein, 118 aa, Artificial Sequence
  Chemically Synthesized
QVQLQESGGGLVQAGGSLRLSCAASGTIFLFDDMGWYRQAPGKEREFVASISDGATTNYADSVKGRFTISRDNAKNTVYLQMNSLKPEDTAVYYCAARYYAPVNFIYWGQGTQVTVSS

SEQ ID NO: 27546 - protein, 111 aa, Artificial Sequence
  Chemically Synthesized
QVQLQESGGGLVQAGGSLRLSCAASGTIFFGRGMGWYRQAPGKERELVASIAEGTSTYYADSVKGRFTISRDNAKNTVYLQMNSLKPEDTAVYYCAAEDYWGQGTQVTVSS

SEQ ID NO: 27547 - protein, 126 aa, Artificial Sequence
  Chemically Synthesized
QVQLQESGGGLVQAGGSLRLSCAASGNISWITDMGWYRQAPGKERELVASINQGTITNYADSVKGRFTISRDNAKNTVYLQMNSLKPEDTAVYYCAAGWESYQVQLWKVDGGHYYWGQGTQVTVSS

SEQ ID NO: 27548 - protein, 117 aa, Artificial Sequence
  Chemically Synthesized
QVQLQESGGGLVQAGGSLRLSCAASGSIFDRYHMGWYRQAPGKEREFVASITHGGNTNYADSVKGRFTISRDNAKNTVYLQMNSLKPEDTAVYYCAVTLRPWYLSYWGQGTQVTVSS

SEQ ID NO: 27549 - protein, 115 aa, Artificial Sequence
  Chemically Synthesized
QVQLQESGGGLVQAGGSLRLSCAASGTISYTSYMGWYRQAPGKEREFVAYQYADSVKGRFTISRDNAKNTVYLQMNSLKPEDTAVYYCAVYYYLTGPSGINHDYWGQGTQVTVSS

SEQ ID NO: 27550 - protein, 118 aa, Artificial Sequence
  Chemically Synthesized
QVQLQESGGGLVQAGGSLRLSCAASGNIFDTYYMGWYRQAPGKEREFVATITDGGITNYADSVKGRFTISRDNAKNTVYLQMNSLKPEDTAVYYCAVRDPNTGSFHYWGQGTQVTVSS

SEQ ID NO: 27551 - protein, 122 aa, Artificial Sequence
  Chemically Synthesized
QVQLQESGGGLVQAGGSLRLSCAASGTISGEWSMGWYRQAPGKEREFVATIGIGTNTYYADSVKGRFTISRDNAKNTVYLQMNSLKPEDTAVYYCAVWGRIEYGWRLGLDYWGQGTQVTVSS

SEQ ID NO: 27552 - protein, 111 aa, Artificial Sequence
  Chemically Synthesized
QVQLQESGGGLVQAGGSLRLSCAASGTIFDRWVMGWYRQAPGKERELVAAIANGGITNYADSVKGRFTISRDNAKNTVYLQMNSLKPEDTAVYYCAALEYWGQGTQVTVSS

SEQ ID NO: 27553 - protein, 121 aa, Artificial Sequence
  Chemically Synthesized
QVQLQESGGGLVQAGGSLRLSCAASGNISLYVLMGWYRQAPGKEREFVASIASVLLPYADSVKGRFTISRDNAKNTVYLQMNSLKPEDTAVYYCAAPLSKRYYFYDPFRYWGQGTQVTVSS

SEQ ID NO: 27554 - protein, 122 aa, Artificial Sequence
  Chemically Synthesized
QVQLQESGGGLVQAGGSLRLSCAASGTIFVWTVMGWYRQAPGKERELVAGITNGGSTYYADSVKGRFTISRDNAKNTVYLQMNSLKPEDTAVYYCAAETPYSNDLRDTYGYWGQGTQVTVSS

SEQ ID NO: 27555 - protein, 115 aa, Artificial Sequence
  Chemically Synthesized
QVQLQESGGGLVQAGGSLRLSCAASGSIFVWGSMGWYRQAPGKEREFVATINYGTITNYADSVKGRFTISRDNAKNTVYLQMNSLKPEDTAVYYCAVTRYGLDYWGQGTQVTVSS

SEQ ID NO: 27556 - protein, 118 aa, Artificial Sequence
  Chemically Synthesized
QVQLQESGGGLVQAGGSLRLSCAASGNIFVRGSMGWYRQAPGKEREFVASIDPGGSTYYADSVKGRFTISRDNAKNTVYLQMNSLKPEDTAVYYCAARVDYYDVFPYWGQGTQVTVSS

SEQ ID NO: 27557 - protein, 118 aa, Artificial Sequence
  Chemically Synthesized
QVQLQESGGGLVQAGGSLRLSCAASGNISDVENMGWYRQAPGKEREFVAAISRGSTTNYADSVKGRFTISRDNAKNTVYLQMNSLKPEDTAVYYCAAFTSYSVHLKYWGQGTQVTVSS

SEQ ID NO: 27558 - protein, 122 aa, Artificial Sequence
  Chemically Synthesized
QVQLQESGGGLVQAGGSLRLSCAASGTIFDTLQMGWYRQAPGKERELVAGIGQGASTNYADSVKGRFTISRDNAKNTVYLQMNSLKPEDTAVYYCAVATDDYIRDGGDLQYWGQGTQVTVSS

SEQ ID NO: 27559 - protein, 117 aa, Artificial Sequence
  Chemically Synthesized
QVQLQESGGGLVQAGGSLRLSCAASGTISDEKLMGWYRQAPGKERELVPLLLTVVLPYADSVKGRFTISRDNAKNTVYLQMNSLKPEDTAVYYCAVDLLSRYYHYYWGQGTQVTVSS

SEQ ID NO: 27560 - protein, 122 aa, Artificial Sequence
  Chemically Synthesized
QVQLQESGGGLVQAGGSLRLSCAASGYISYAVMGWYRQAPGKERELVAGIDAGTSTYYADSVKGRFTISRDNAKNTVYLQMNSLKPEDTAVYYCAAWYDGALPRWYYLHGYWGQGTQVTVSS

SEQ ID NO: 27561 - protein, 118 aa, Artificial Sequence
  Chemically Synthesized
QVQLQESGGGLVQAGGSLRLSCAASGYIFDGYDMGWYRQAPGKEREFVAGITDGGNTYYADSVKGRFTISRDNAKNTVYLQMNSLKPEDTAVYYCAAVANVDVVLVYWGQGTQVTVSS

SEQ ID NO: 27562 - protein, 117 aa, Artificial Sequence
  Chemically Synthesized
QVQLQESGGGLVQAGGSLRLSCAASGYISDARVMGWYRQAPGKERELVAAIDLGGNTNYADSVKGRFTISRDNAKNTVYLQMNSLKPEDTAVYYCADDGWSDSHYYWGQGTQVTVSS

SEQ ID NO: 27563 - protein, 118 aa, Artificial Sequence
  Chemically Synthesized
QVQLQESGGGLVQAGGSLRLSCAASGTIFASFYMGWYRQAPGKEREFVAGINPGSTTNYADSVKGRFTISRDNAKNTVYLQMNSLKPEDTAVYYCAVVLPVGASYRYWGQGTQVTVSS

SEQ ID NO: 27564 - protein, 118 aa, Artificial Sequence
  Chemically Synthesized
QVQLQESGGGLVQAGGSLRLSCAASGNIFYYWSMGWYRQAPGKEREFVAAIDPGSSTNYADSVKGRFTISRDNAKNTVYLQMNSLKPEDTAVYYCAAADYDDPRLIYWGQGTQVTVSS

SEQ ID NO: 27565 - protein, 122 aa, Artificial Sequence
  Chemically Synthesized
QVQLQESGGGLVQAGGSLRLSCAASGTISVYSYMGWYRQAPGKEREFVASIAAGANTNYADSVKGRFTISRDNAKNTVYLQMNSLKPEDTAVYYCAGRGYRGADTLDFHDYWGQGTQVTVSS

SEQ ID NO: 27566 - protein, 126 aa, Artificial Sequence
  Chemically Synthesized
QVQLQESGGGLVQAGGSLRLSCAASGSIFSSAPMGWYRQAPGKEREFVAAISFGTTTNYADSVKGRFTISRDNAKNTVYLQMNSLKPEDTAVYYCAADASGPAKNGITPDGPYGYWGQGTQVTVSS

SEQ ID NO: 27567 - protein, 121 aa, Artificial Sequence
  Chemically Synthesized
QVQLQESGGGLVQAGGSLRLSCAASGSIFTRYDMGWYRQAPGKERELVAAIGPGSSTYADSVKGRFTISRDNAKNTVYLQMNSLKPEDTAVYYCAVTLFRGHAYTVPHGYWGQGTQVTVSS

SEQ ID NO: 27568 - protein, 114 aa, Artificial Sequence
  Chemically Synthesized
QVQLQESGGGLVQAGGSLRLSCAASGSISSFRDMGWYRQAPGKEREFVAGINDGASTNYADSVKGRFTISRDNAKNTVYLQMNSLKPEDTAVYYCAASTLLFYWGQGTQVTVSS

SEQ ID NO: 27569 - protein, 109 aa, Artificial Sequence
  Chemically Synthesized
QVQLQESGGGLVQAGGSLRLSCAASGNISRRVAMGWYRQAPGKEREFVAGINSGGNTNYADSVKGRFTISRDNAKNTVYLQMNSLKPEDTAVYYCAAYWGQGTQVTVSS

SEQ ID NO: 27570 - protein, 116 aa, Artificial Sequence
  Chemically Synthesized
QVQLQESGGGLVQAGGSLRLSCAASGTISRYAGMGWYRQAPGKEREFVASIGIGGITNYADSVKGRFTISRDNAKNTVYLQMNSLKPEDTAVYYCAADVDANHQYWGQGTQVTVSS

SEQ ID NO: 27571 - protein, 122 aa, Artificial Sequence
  Chemically Synthesized
QVQLQESGGGLVQAGGSLRLSCAASGYISPAYLMGWYRQAPGKEREFVASIAEGSNTNYADSVKGRFTISRDNAKNTVYLQMNSLKPEDTAVYYCAVGSPTPDYPRDGHDYWGQGTQVTVSS

SEQ ID NO: 27572 - protein, 121 aa, Artificial Sequence
  Chemically Synthesized
QVQLQESGGGLVQAGGSLRLSCAASGTIFAYGVMGWYRQAPGKERELVATINWGSSTNYADSVKGRFTISRDNAKNTVYLQMNSLKPEDTAVYYCAAPEMVTVRGLTLIYWGQGTQVTVSS

SEQ ID NO: 27573 - protein, 118 aa, Artificial Sequence
  Chemically Synthesized
QVQLQESGGGLVQAGGSLRLSCAASGSIFNNGSMGWYRQAPGKERELVASITQGTSTNYADSVKGRFTISRDNAKNTVYLQMNSLKPEDTAVYYCAADDSFEGVHFYWGQGTQVTVSS

SEQ ID NO: 27574 - protein, 126 aa, Artificial Sequence
  Chemically Synthesized
QVQLQESGGGLVQAGGSLRLSCAASGYISDWAEMGWYRQAPGKERELVASIGGGGSTYYADSVKGRFTISRDNAKNTVYLQMNSLKPEDTAVYYCAAEGGYFYGYLSVYDGDHSYWGQGTQVTVSS

SEQ ID NO: 27575 - protein, 126 aa, Artificial Sequence
  Chemically Synthesized
QVQLQESGGGLVQAGGSLRLSCAASGTISGLSHMGWYRQAPGKERELVAAIGAGSITNYADSVKGRFTISRDNAKNTVYLQMNSLKPEDTAVYYCAARGDSGDYQSQYYDQWFNYWGQGTQVTVSS

SEQ ID NO: 27576 - protein, 118 aa, Artificial Sequence
  Chemically Synthesized
QVQLQESGGGLVQAGGSLRLSCAASGYIFPLYAMGWYRQAPGKEREFVAAITDGTTTNYADSVKGRFTISRDNAKNTVYLQMNSLKPEDTAVYYCAVPPDVDDGFAYWGQGTQVTVSS

SEQ ID NO: 27577 - protein, 125 aa, Artificial Sequence
  Chemically Synthesized
QVQLQESGGGLVQAGGSLRLSCAASGSISSLTMGWYRQAPGKERELVAAITDGASTNYADSVKGRFTISRDNAKNTVYLQMNSLKPEDTAVYYCAAAVGNYHDRQVRSGSCSLYWGQGTQVTVSS

SEQ ID NO: 27578 - protein, 111 aa, Artificial Sequence
  Chemically Synthesized
QVQLQESGGGLVQAGGSLRLSCAASGTIFASDPMGWYRQAPGKERELVATIATGAITNYADSVKGRFTISRDNAKNTVYLQMNSLKPEDTAVYYCASYDYWGQGTQVTVSS

SEQ ID NO: 27579 - protein, 122 aa, Artificial Sequence
  Chemically Synthesized
QVQLQESGGGLVQAGGSLRLSCAASGTISADVDMGWYRQAPGKEREFVASIADGSNTNYADSVKGRFTISRDNAKNTVYLQMNSLKPEDTAVYYCAAGYQGAWTYQTYHVYWGQGTQVTVSS

SEQ ID NO: 27580 - protein, 122 aa, Artificial Sequence
  Chemically Synthesized
QVQLQESGGGLVQAGGSLRLSCAASGSIFQYYRMGWYRQAPGKEREFVATIGDGSTTYYADSVKGRFTISRDNAKNTVYLQMNSLKPEDTAVYYCAVSLKAPYHGIVIHTYWGQGTQVTVSS

SEQ ID NO: 27581 - protein, 125 aa, Artificial Sequence
  Chemically Synthesized
QVQLQESGGGLVQAGGSLRLSCAASGSISFLEPMGWYRQAPGKERELVASIGTVLVPYADSVKGRFTISRDNAKNTVYLQMNSLKPEDTAVYYCAVDSPAPDINGWNVRYAFTYWGQGTQVTVSS

SEQ ID NO: 27582 - protein, 118 aa, Artificial Sequence
  Chemically Synthesized
QVQLQESGGGLVQAGGSLRLSCAASGNISATTNMGWYRQAPGKEREFVAGIGGGANTYYADSVKGRFTISRDNAKNTVYLQMNSLKPEDTAVYYCAVRGDGSGTLRYWGQGTQVTVSS

SEQ ID NO: 27583 - protein, 122 aa, Artificial Sequence
  Chemically Synthesized
QVQLQESGGGLVQAGGSLRLSCAASGYISRVVEMGWYRQAPGKEREFVAAINYGSSTYYADSVKGRFTISRDNAKNTVYLQMNSLKPEDTAVYYCAVLDGIDIDRYANHDYWGQGTQVTVSS

SEQ ID NO: 27584 - protein, 121 aa, Artificial Sequence
  Chemically Synthesized
QVQLQESGGGLVQAGGSLRLSCAASGYIFDYYSMGWYRQAPGKEREFVASIATGANTYYADSVKGRFTISRDNAKNTVYLQMNSLKPEDTAVYYCAAVDSSLCLLTTTLYWGQGTQVTVSS

SEQ ID NO: 27585 - protein, 122 aa, Artificial Sequence
  Chemically Synthesized
QVQLQESGGGLVQAGGSLRLSCAASGNISATPGMGWYRQAPGKEREFVATITGGTTTYYADSVKGRFTISRDNAKNTVYLQMNSLKPEDTAVYYCAVTDPGPFAGLVDHYYWGQGTQVTVSS

SEQ ID NO: 27586 - protein, 114 aa, Artificial Sequence
  Chemically Synthesized
QVQLQESGGGLVQAGGSLRLSCAASGYISHPHTMGWYRQAPGKERELVASINDPYADSVKGRFTISRDNAKNTVYLQMNSLKPEDTAVYYCAAYPYGSYLLDYWGQGTQVTVSS

SEQ ID NO: 27587 - protein, 113 aa, Artificial Sequence
  Chemically Synthesized
QVQLQESGGGLVQAGGSLRLSCAASGTIFLNLPMGWYRQAPGKERELVASISVGSSTNYADSVKGRFTISRDNAKNTVYLQMNSLKPEDTAVYYCAVPRHGYWGQGTQVTVSS

SEQ ID NO: 27588 - protein, 118 aa, Artificial Sequence
  Chemically Synthesized
QVQLQESGGGLVQAGGSLRLSCAASGSISASIDMGWYRQAPGKERELVAAINYGGTTNYADSVKGRFTISRDNAKNTVYLQMNSLKPEDTAVYYCAAYYYRGSDYFYWGQGTQVTVSS

SEQ ID NO: 27589 - protein, 122 aa, Artificial Sequence
  Chemically Synthesized
QVQLQESGGGLVQAGGSLRLSCAASGYISAYGIMGWYRQAPGKERELVASITIGAITNYADSVKGRFTISRDNAKNTVYLQMNSLKPEDTAVYYCAVRRSVYPYWYVWHIYWGQGTQVTVSS

SEQ ID NO: 27590 - protein, 118 aa, Artificial Sequence
  Chemically Synthesized
QVQLQESGGGLVQAGGSLRLSCAASGNIFLTDDMGWYRQAPGKERELVASIDPGATTNYADSVKGRFTISRDNAKNTVYLQMNSLKPEDTAVYYCAADNGEVDTLSYWGQGTQVTVSS

SEQ ID NO: 27591 - protein, 118 aa, Artificial Sequence
  Chemically Synthesized
QVQLQESGGGLVQAGGSLRLSCAASGTIFRPVIMGWYRQAPGKERELVAAINYGGTTYYADSVKGRFTISRDNAKNTVYLQMNSLKPEDTAVYYCAARDWIWYYHTYWGQGTQVTVSS

SEQ ID NO: 27592 - protein, 118 aa, Artificial Sequence
  Chemically Synthesized
QVQLQESGGGLVQAGGSLRLSCAASGNIFGVAFMGWYRQAPGKERELVATINRGTNTNYADSVKGRFTISRDNAKNTVYLQMNSLKPEDTAVYYCAVARDGPGRHKYWGQGTQVTVSS

SEQ ID NO: 27593 - protein, 109 aa, Artificial Sequence
  Chemically Synthesized
QVQLQESGGGLVQAGGSLRLSCAASGNISYPDTMGWYRQAPGKERELVATITSGANTNYADSVKGRFTISRDNAKNTVYLQMNSLKPEDTAVYYCAVYWGQGTQVTVSS

SEQ ID NO: 27594 - protein, 122 aa, Artificial Sequence
  Chemically Synthesized
QVQLQESGGGLVQAGGSLRLSCAASGSISEYVYMGWYRQAPGKERELVAAISVGSNTYYADSVKGRFTISRDNAKNTVYLQMNSLKPEDTAVYYCAAHRAPSYPNDDDHAYWGQGTQVTVSS

SEQ ID NO: 27595 - protein, 126 aa, Artificial Sequence
  Chemically Synthesized
QVQLQESGGGLVQAGGSLRLSCAASGTISPSIRMGWYRQAPGKERELVASINYGSNTNYADSVKGRFTISRDNAKNTVYLQMNSLKPEDTAVYYCAALSAFAYKTTHAYWLYHSYWGQGTQVTVSS

SEQ ID NO: 27596 - protein, 118 aa, Artificial Sequence
  Chemically Synthesized
QVQLQESGGGLVQAGGSLRLSCAASGTISYRRAMGWYRQAPGKEREFVASIGGGGITNYADSVKGRFTISRDNAKNTVYLQMNSLKPEDTAVYYCAVFYPWRAYLLYWGQGTQVTVSS

SEQ ID NO: 27597 - protein, 124 aa, Artificial Sequence
  Chemically Synthesized
QVQLQESGGGLVQAGGSLRLSCAASGSISDLMGWYRQAPGKERELVASIGYGATTNYADSVKGRFTISRDNAKNTVYLQMNSLKPEDTAVYYCAVPYDTVTDGLSPDGNYFGYWGQGTQVTVSS

SEQ ID NO: 27598 - protein, 122 aa, Artificial Sequence
  Chemically Synthesized
QVQLQESGGGLVQAGGSLRLSCAASGSIFEPWTMGWYRQAPGKEREFVASIGPGASTYYADSVKGRFTISRDNAKNTVYLQMNSLKPEDTAVYYCAVGVAHYYPSSRAYEYWGQGTQVTVSS

SEQ ID NO: 27599 - protein, 118 aa, Artificial Sequence
  Chemically Synthesized
QVQLQESGGGLVQAGGSLRLSCAASGNISQHSFMGWYRQAPGKERELVAAITTGTNTYYADSVKGRFTISRDNAKNTVYLQMNSLKPEDTAVYYCAVYGSWSRFFPYWGQGTQVTVSS

SEQ ID NO: 27600 - protein, 120 aa, Artificial Sequence
  Chemically Synthesized
QVQLQESGGGLVQAGGSLRLSCAASGTISATHGMGWYRQAPGKEREFVAGINQGGTTNYADSVKGRFTISRDNAKNTVYLQMNSLKPEDTAVYYCAAGLQRPSLRFVIYWGQGTQVTVSS

SEQ ID NO: 27601 - protein, 122 aa, Artificial Sequence
  Chemically Synthesized
QVQLQESGGGLVQAGGSLRLSCAASGYISRQYGMGWYRQAPGKERELVAGISGGSITYYADSVKGRFTISRDNAKNTVYLQMNSLKPEDTAVYYCAVYPISLPEPDSRHPYWGQGTQVTVSS

SEQ ID NO: 27602 - protein, 122 aa, Artificial Sequence
  Chemically Synthesized
QVQLQESGGGLVQAGGSLRLSCAASGSISGFYAMGWYRQAPGKEREFVAGINFGTITNYADSVKGRFTISRDNAKNTVYLQMNSLKPEDTAVYYCAVVYRDPSDFSRGYSYWGQGTQVTVSS

SEQ ID NO: 27603 - protein, 109 aa, Artificial Sequence
  Chemically Synthesized
QVQLQESGGGLVQAGGSLRLSCAASGTIFILHMGWYRQAPGKERELVAGISFGGTTNYADSVKGRFTISRDNAKNTVYLQMNSLKPEDTAVYYCAASYWGQGTQVTVSS

SEQ ID NO: 27604 - protein, 118 aa, Artificial Sequence
  Chemically Synthesized
QVQLQESGGGLVQAGGSLRLSCAASGTISYWDTMGWYRQAPGKERELVAAIDAGTTTNYADSVKGRFTISRDNAKNTVYLQMNSLKPEDTAVYYCAALWRENVTHYYWGQGTQVTVSS

SEQ ID NO: 27605 - protein, 122 aa, Artificial Sequence
  Chemically Synthesized
QVQLQESGGGLVQAGGSLRLSCAASGYISTYNYMGWYRQAPGKERELVASIAYGANTNYADSVKGRFTISRDNAKNTVYLQMNSLKPEDTAVYYCAVIDYWYRGRDKHFTYWGQGTQVTVSS

SEQ ID NO: 27606 - protein, 117 aa, Artificial Sequence
  Chemically Synthesized
QVQLQESGGGLVQAGGSLRLSCAASGNISYNDVMGWYRQAPGKERELVAAIDWGGTTYYADSVKGRFTISRDNAKNTVYLQMNSLKPEDTAVYYCAATAYGARTFYWGQGTQVTVSS

SEQ ID NO: 27607 - protein, 109 aa, Artificial Sequence
  Chemically Synthesized
QVQLQESGGGLVQAGGSLRLSCAASGYISSTRMGWYRQAPGKERELVATITYGGSTYYADSVKGRFTISRDNAKNTVYLQMNSLKPEDTAVYYCAAFYWGQGTQVTVSS

SEQ ID NO: 27608 - protein, 117 aa, Artificial Sequence
  Chemically Synthesized
QVQLQESGGGLVQAGGSLRLSCAASGNIFGFLGMGWYRQAPGKERELVASITYGANTNYADSVKGRFTISRDNAKNTVYLQMNSLKPEDTAVYYCAAYADTGYHSYWGQGTQVTVSS

SEQ ID NO: 27609 - protein, 122 aa, Artificial Sequence
  Chemically Synthesized
QVQLQESGGGLVQAGGSLRLSCAASGTIFFSYVMGWYRQAPGKERELVAAIDSGAITNYADSVKGRFTISRDNAKNTVYLQMNSLKPEDTAVYYCAALAPDPHYSTVDHGYWGQGTQVTVSS

SEQ ID NO: 27610 - protein, 118 aa, Artificial Sequence
  Chemically Synthesized
QVQLQESGGGLVQAGGSLRLSCAASGTIFAAYAMGWYRQAPGKERELVASINAGGTTNYADSVKGRFTISRDNAKNTVYLQMNSLKPEDTAVYYCAVWEDRGASFTYWGQGTQVTVSS

SEQ ID NO: 27611 - protein, 126 aa, Artificial Sequence
  Chemically Synthesized
QVQLQESGGGLVQAGGSLRLSCAASGYISPFDVMGWYRQAPGKERELVAAIGGGGTTYYADSVKGRFTISRDNAKNTVYLQMNSLKPEDTAVYYCASRYYGDVVPIYRRHYHHPYWGQGTQVTVSS

SEQ ID NO: 27612 - protein, 117 aa, Artificial Sequence
  Chemically Synthesized
QVQLQESGGGLVQAGGSLRLSCAASGSIFYPNPMGWYRQAPGKERELVATIGSVVIPYADSVKGRFTISRDNAKNTVYLQMNSLKPEDTAVYYCAARFDHDITYGYWGQGTQVTVSS

SEQ ID NO: 27613 - protein, 118 aa, Artificial Sequence
  Chemically Synthesized
QVQLQESGGGLVQAGGSLRLSCAASGSIFPLYDMGWYRQAPGKERELVAGIADGGNTYYADSVKGRFTISRDNAKNTVYLQMNSLKPEDTAVYYCAVFGWYVRDYVYWGQGTQVTVSS

SEQ ID NO: 27614 - protein, 122 aa, Artificial Sequence
  Chemically Synthesized
QVQLQESGGGLVQAGGSLRLSCAASGSIFASWTMGWYRQAPGKERELVATITQGGITYYADSVKGRFTISRDNAKNTVYLQMNSLKPEDTAVYYCAVGYTYYYYGYSYHYYWGQGTQVTVSS

SEQ ID NO: 27615 - protein, 111 aa, Artificial Sequence
  Chemically Synthesized
QVQLQESGGGLVQAGGSLRLSCAASGSIFDRDWMGWYRQAPGKERELVAAIDGGTTTYYADSVKGRFTISRDNAKNTVYLQMNSLKPEDTAVYYCAVYYYWGQGTQVTVSS

SEQ ID NO: 27616 - protein, 118 aa, Artificial Sequence
  Chemically Synthesized
QVQLQESGGGLVQAGGSLRLSCAASGSISGGDYMGWYRQAPGKERELVAGIAVGTSTNYADSVKGRFTISRDNAKNTVYLQMNSLKPEDTAVYYCAVDLDYASYYLYWGQGTQVTVSS

SEQ ID NO: 27617 - protein, 118 aa, Artificial Sequence
  Chemically Synthesized
QVQLQESGGGLVQAGGSLRLSCAASGTIFTYYIMGWYRQAPGKERELVASIGLGGITNYADSVKGRFTISRDNAKNTVYLQMNSLKPEDTAVYYCAVQPSIGYWHAYWGQGTQVTVSS

SEQ ID NO: 27618 - protein, 121 aa, Artificial Sequence
  Chemically Synthesized
QVQLQESGGGLVQAGGSLRLSCAASGSIFYDLMGWYRQAPGKEREFVATIGGGSTTNYADSVKGRFTISRDNAKNTVYLQMNSLKPEDTAVYYCAATNGVIAFAGYDLDYWGQGTQVTVSS

SEQ ID NO: 27619 - protein, 122 aa, Artificial Sequence
  Chemically Synthesized
QVQLQESGGGLVQAGGSLRLSCAASGSIFQSWYMGWYRQAPGKEREFVAGIDAGSSTYYADSVKGRFTISRDNAKNTVYLQMNSLKPEDTAVYYCAVYYYFYHWPYYWFVYWGQGTQVTVSS

SEQ ID NO: 27620 - protein, 126 aa, Artificial Sequence
  Chemically Synthesized
QVQLQESGGGLVQAGGSLRLSCAASGTISGADYMGWYRQAPGKEREFVAAIARGTSTYYADSVKGRFTISRDNAKNTVYLQMNSLKPEDTAVYYCAVTYSGSPVLPRAYPLALMYWGQGTQVTVSS

SEQ ID NO: 27621 - protein, 125 aa, Artificial Sequence
  Chemically Synthesized
QVQLQESGGGLVQAGGSLRLSCAASGTISTQHGMGWYRQAPGKEREFVAAISSVVVPYADSVKGRFTISRDNAKNTVYLQMNSLKPEDTAVYYCAVVNYWYVQSPGGYDGYHGYWGQGTQVTVSS

SEQ ID NO: 27622 - protein, 121 aa, Artificial Sequence
  Chemically Synthesized
QVQLQESGGGLVQAGGSLRLSCAASGTISIVTDMGWYRQAPGKERELVAGIADGGITNYADSVKGRFTISRDNAKNTVYLQMNSLKPEDTAVYYCAADIAQPYRASRTMYWGQGTQVTVSS

SEQ ID NO: 27623 - protein, 117 aa, Artificial Sequence
  Chemically Synthesized
QVQLQESGGGLVQAGGSLRLSCAASGYISYDYAMGWYRQAPGKEREFVAAIDSGGTTNYADSVKGRFTISRDNAKNTVYLQMNSLKPEDTAVYYCAGLVLLQRSSYWGQGTQVTVSS

SEQ ID NO: 27624 - protein, 116 aa, Artificial Sequence
  Chemically Synthesized
QVQLQESGGGLVQAGGSLRLSCAASGYIFYLTSMGWYRQAPGKEREFVATIMKVLVPYADSVKGRFTISRDNAKNTVYLQMNSLKPEDTAVYYCAARVPYIYHNYWGQGTQVTVSS

SEQ ID NO: 27625 - protein, 118 aa, Artificial Sequence
  Chemically Synthesized
QVQLQESGGGLVQAGGSLRLSCAASGTIFLSDKMGWYRQAPGKERELVAAISGGATTNYADSVKGRFTISRDNAKNTVYLQMNSLKPEDTAVYYCAAYLNTSLLHTYWGQGTQVTVSS

SEQ ID NO: 27626 - protein, 118 aa, Artificial Sequence
  Chemically Synthesized
QVQLQESGGGLVQAGGSLRLSCAASGSIFATGAMGWYRQAPGKERELVATIGYGANTYYADSVKGRFTISRDNAKNTVYLQMNSLKPEDTAVYYCAVDQQTQPRHSYWGQGTQVTVSS

SEQ ID NO: 27627 - protein, 118 aa, Artificial Sequence
  Chemically Synthesized
QVQLQESGGGLVQAGGSLRLSCAASGYIFGIPRMGWYRQAPGKEREFVAAITIGSITYYADSVKGRFTISRDNAKNTVYLQMNSLKPEDTAVYYCAAYYLYASWFYYWGQGTQVTVSS

SEQ ID NO: 27628 - protein, 122 aa, Artificial Sequence
  Chemically Synthesized
QVQLQESGGGLVQAGGSLRLSCAASGNIFRFPLMGWYRQAPGKEREFVAGIAPGTITYYADSVKGRFTISRDNAKNTVYLQMNSLKPEDTAVYYCAAADEHYVDRWIGLGYWGQGTQVTVSS

SEQ ID NO: 27629 - protein, 118 aa, Artificial Sequence
  Chemically Synthesized
QVQLQESGGGLVQAGGSLRLSCAASGTIFSLESMGWYRQAPGKEREFVATIDSGSITYYADSVKGRFTISRDNAKNTVYLQMNSLKPEDTAVYYCAAFEGSSIQHDYWGQGTQVTVSS

SEQ ID NO: 27630 - protein, 126 aa, Artificial Sequence
  Chemically Synthesized
QVQLQESGGGLVQAGGSLRLSCAASGYIFGYIVMGWYRQAPGKERELVAGISAGTITNYADSVKGRFTISRDNAKNTVYLQMNSLKPEDTAVYYCAVGYLFDLDEFGPYIPYHGYWGQGTQVTVSS

SEQ ID NO: 27631 - protein, 113 aa, Artificial Sequence
  Chemically Synthesized
QVQLQESGGGLVQAGGSLRLSCAASGSISGVRYMGWYRQAPGKEREFVATITLGSTTNYADSVKGRFTISRDNAKNTVYLQMNSLKPEDTAVYYCAVYDHYYWGQGTQVTVSS

SEQ ID NO: 27632 - protein, 122 aa, Artificial Sequence
  Chemically Synthesized
QVQLQESGGGLVQAGGSLRLSCAASGYIFYPYGMGWYRQAPGKERELVASITYGTSTNYADSVKGRFTISRDNAKNTVYLQMNSLKPEDTAVYYCAAPYDLTVGSDLRFPYWGQGTQVTVSS

SEQ ID NO: 27633 - protein, 122 aa, Artificial Sequence
  Chemically Synthesized
QVQLQESGGGLVQAGGSLRLSCAASGNIFGGGDMGWYRQAPGKEREFVAGINWGSNTNYADSVKGRFTISRDNAKNTVYLQMNSLKPEDTAVYYCAVKDGRDRGGVSGLRYWGQGTQVTVSS

SEQ ID NO: 27634 - protein, 118 aa, Artificial Sequence
  Chemically Synthesized
QVQLQESGGGLVQAGGSLRLSCAASGNISQATYMGWYRQAPGKEREFVAAIAGGAITNYADSVKGRFTISRDNAKNTVYLQMNSLKPEDTAVYYCAAVIWQGTYFGYWGQGTQVTVSS

SEQ ID NO: 27635 - protein, 118 aa, Artificial Sequence
  Chemically Synthesized
QVQLQESGGGLVQAGGSLRLSCAASGNISLTDRMGWYRQAPGKEREFVASIGGGATTNYADSVKGRFTISRDNAKNTVYLQMNSLKPEDTAVYYCAADYRYPIAFFYWGQGTQVTVSS

SEQ ID NO: 27636 - protein, 118 aa, Artificial Sequence
  Chemically Synthesized
QVQLQESGGGLVQAGGSLRLSCAASGNISHRDTMGWYRQAPGKEREFVASIGYGANTNYADSVKGRFTISRDNAKNTVYLQMNSLKPEDTAVYYCAVIIRLPFAFYYWGQGTQVTVSS

SEQ ID NO: 27637 - protein, 118 aa, Artificial Sequence
  Chemically Synthesized
QVQLQESGGGLVQAGGSLRLSCAASGTIFTGDDMGWYRQAPGKEREFVASIAFGSITYYADSVKGRFTISRDNAKNTVYLQMNSLKPEDTAVYYCAVITQYPFPFLYWGQGTQVTVSS

SEQ ID NO: 27638 - protein, 118 aa, Artificial Sequence
  Chemically Synthesized
QVQLQESGGGLVQAGGSLRLSCAASGTISVHDTMGWYRQAPGKERELVAAINAGTNTNYADSVKGRFTISRDNAKNTVYLQMNSLKPEDTAVYYCAVLPGRYGWFFYWGQGTQVTVSS

SEQ ID NO: 27639 - protein, 118 aa, Artificial Sequence
  Chemically Synthesized
QVQLQESGGGLVQAGGSLRLSCAASGSISLIDWMGWYRQAPGKEREVVASITYGSSTYYADSVKGRFTISRDNAKNTVYLQMNSLKPEDTAVYYCAVTPYVYARFTYWGQGTQVTVSS

SEQ ID NO: 27640 - protein, 118 aa, Artificial Sequence
  Chemically Synthesized
QVQLQESGGGLVQAGGSLRLSCAASGNISLYDDMGWYRQAPGKERELVASISLGTSTNYADSVKGRFTISRDNAKNTVYLQMNSLKPEDTAVYYCAAWYYYPWSLYYWGQGTQVTVSS

SEQ ID NO: 27641 - protein, 118 aa, Artificial Sequence
  Chemically Synthesized
QVQLQESGGGLVQAGGSLRLSCAASGTISDWETMGWYRQAPGKEREFVATIAEGSTTNYADSVKGRFTISRDNAKNTVYLQMNSLKPEDTAVYYCAALVRYPWPYYYWGQGTQVTVSS

SEQ ID NO: 27642 - protein, 126 aa, Artificial Sequence
  Chemically Synthesized
QVQLQESGGGLVQAGGSLRLSCAASGNIFTYGIMGWYRQAPGKEREFVASINGGGTTNYADSVKGRFTISRDNAKNTVYLQMNSLKPEDTAVYYCAAIAQSPNRTDYGLTAYYWYWGQGTQVTVSS

SEQ ID NO: 27643 - protein, 118 aa, Artificial Sequence
  Chemically Synthesized
QVQLQESGGGLVQAGGSLRLSCAASGTISKTDTMGWYRQAPGKEREFVATIADGGTTKYADSVKGRFTISRDNAKNTVYLQMNSLKPEDTAVYYCAAIARYPLPFYYWGQGTQVTVSS

SEQ ID NO: 27644 - protein, 118 aa, Artificial Sequence
  Chemically Synthesized
QVQLQESGGGLVQAGGSLRLSCAASGYISPRDQMGWYRQAPGKEREFVAAIGRGTSTYYADSVKGRFTISRDNAKNTVYLQMNSLKPEDTAVYYCAALTTYPWAHYYWGQGTQVTVSS

SEQ ID NO: 27645 - protein, 119 aa, Artificial Sequence
  Chemically Synthesized
QVQLQESGGGLVQAGGSLRLSCAASGTISYLDDMGWYRQAPGKEREFVATIGFGGTTNYADSVKGRFTISRDNAKNTVYLQMNSLKPEDTAVYYCAVYYSLGPWTHIYWGQGTQVTVSS

SEQ ID NO: 27646 - protein, 118 aa, Artificial Sequence
  Chemically Synthesized
QVQLQESGGGLVQAGGSLRLSCAASGYISARDLMGWYRQAPGKERELVAGIATGGSTNYADSVKGRFTISRDNAKNTVYLQMNSLKPEDTAVYYCAAHSRYPIPFHYWGQGTQVTVSS

SEQ ID NO: 27647 - protein, 118 aa, Artificial Sequence
  Chemically Synthesized
QVQLQESGGGLVQAGGSLRLSCAASGNIFKQEDMGWYRQAPGKEREFVAAIGSGGTTNYADSVKGRFTISRDNAKNTVYLQMNSLKPEDTAVYYCAAAYWWGGVHRYWGQGTQVTVSS

SEQ ID NO: 27648 - protein, 118 aa, Artificial Sequence
  Chemically Synthesized
QVQLQESGGGLVQAGGSLRLSCAASGNISVYDTMGWYRQAPGKEREFVATINPGASTNYADSVKGRFTISRDNAKNTVYLQMNSLKPEDTAVYYCAVLYYYPFPFVYWGQGTQVTVSS

SEQ ID NO: 27649 - protein, 122 aa, Artificial Sequence
  Chemically Synthesized
QVQLQESGGGLVQAGGSLRLSCAASGTISRGQHMGWYRQAPGKEREFVAGIADGANTNYADSVKGRFTISRDNAKNTVYLQMNSLKPEDTAVYYCAVTVTLDLYWQGAYGYWGQGTQVTVSS

SEQ ID NO: 27650 - protein, 117 aa, Artificial Sequence
  Chemically Synthesized
QVQLQESGGGLVQAGGSLRLSCAASGTISTYQIMGWYRQAPGKEREFVATITAGAITYYADSVKGRFTISRDNAKNTVYLQMNSLKPEDTAVYYCAVDQWPSYYLYWGQGTQVTVSS

SEQ ID NO: 27651 - protein, 118 aa, Artificial Sequence
  Chemically Synthesized
QVQLQESGGGLVQAGGSLRLSCAASGNISYTDGMGWYRQAPGKERELVAGIGRGTSTNYADSVKGRFTISRDNAKNTVYLQMNSLKPEDTAVYYCAAIARYPLPFYYWGQGTQVTVSS

SEQ ID NO: 27652 - protein, 122 aa, Artificial Sequence
  Chemically Synthesized
QVQLQESGGGLVQAGGSLRLSCAASGSISHSGTMGWYRQAPGKERELVAGIASGTNTYYADSVKGRFTISRDNAKNTVYLQMNSLKPEDTAVYYCAAAYALLIGPSYHLWYWGQGTQVTVSS

SEQ ID NO: 27653 - protein, 116 aa, Artificial Sequence
  Chemically Synthesized
QVQLQESGGGLVQAGGSLRLSCAASGNIFVVRMGWYRQAPGKEREFVATIASGTSTYYADSVKGRFTISRDNAKNTVYLQMNSLKPEDTAVYYCAVNELDYDDLYWGQGTQVTVSS

SEQ ID NO: 27654 - protein, 118 aa, Artificial Sequence
  Chemically Synthesized
QVQLQESGGGLVQAGGSLRLSCAASGSIFLLWGMGWYRQAPGKEREFVAAIAIGTTTNYADSVKGRFTISRDNAKNTVYLQMNSLKPEDTAVYYCAARTQIYFPHDYWGQGTQVTVSS

SEQ ID NO: 27655 - protein, 110 aa, Artificial Sequence
  Chemically Synthesized
QVQLQESGGGLVQAGGSLRLSCAASGNIFDTKNMGWYRQAPGKERELVAGIDKGANTNYADSVKGRFTISRDNAKNTVYLQMNSLKPEDTAVYYCAVMYWGQGTQVTVSS

SEQ ID NO: 27656 - protein, 118 aa, Artificial Sequence
  Chemically Synthesized
QVQLQESGGGLVQAGGSLRLSCAASGYISVYETMGWYRQAPGKERELVAGITTGGNTNYADSVKGRFTISRDNAKNTVYLQMNSLKPEDTAVYYCAVDRDDFPYLVYWGQGTQVTVSS

SEQ ID NO: 27657 - protein, 117 aa, Artificial Sequence
  Chemically Synthesized
QVQLQESGGGLVQAGGSLRLSCAASGNISLLSYMGWYRQAPGKERELVAAIAHGGTTNYADSVKGRFTISRDNAKNTVYLQMNSLKPEDTAVYYCAAATTSVTVMYWGQGTQVTVSS

SEQ ID NO: 27658 - protein, 121 aa, Artificial Sequence
  Chemically Synthesized
QVQLQESGGGLVQAGGSLRLSCAASGSISPRDAMGWYRQAPGKERELVASITPGSITYYADSVKGRFTISRDNAKNTVYLQMNSLKPEDTAVYYCAAAYYSLLRVTKTMYWGQGTQVTVSS

SEQ ID NO: 27659 - protein, 118 aa, Artificial Sequence
  Chemically Synthesized
QVQLQESGGGLVQAGGSLRLSCAASGSIFWYTSMGWYRQAPGKERELVAAISGGAITNYADSVKGRFTISRDNAKNTVYLQMNSLKPEDTAVYYCAVLRYVNTLFTYWGQGTQVTVSS

SEQ ID NO: 27660 - protein, 111 aa, Artificial Sequence
  Chemically Synthesized
QVQLQESGGGLVQAGGSLRLSCAASGTISLAYSMGWYRQAPGKERELVAAISRGGNTNYADSVKGRFTISRDNAKNTVYLQMNSLKPEDTAVYYCAFCIYWGQGTQVTVSS

SEQ ID NO: 27661 - protein, 118 aa, Artificial Sequence
  Chemically Synthesized
QVQLQESGGGLVQAGGSLRLSCAASGSISDTGVMGWYRQAPGKEREFVAGINPGSTTNYADSVKGRFTISRDNAKNTVYLQMNSLKPEDTAVYYCAVDITTHVPYLYWGQGTQVTVSS

SEQ ID NO: 27662 - protein, 125 aa, Artificial Sequence
  Chemically Synthesized
QVQLQESGGGLVQAGGSLRLSCAASGYISARSMGWYRQAPGKEREFVAGIGVGASTYYADSVKGRFTISRDNAKNTVYLQMNSLKPEDTAVYYCAVAIADYWYADDYAYNAFYYWGQGTQVTVSS

SEQ ID NO: 27663 - protein, 117 aa, Artificial Sequence
  Chemically Synthesized
QVQLQESGGGLVQAGGSLRLSCAASGSISVVSMGWYRQAPGKEREFVAGIAYGTTTYYADSVKGRFTISRDNAKNTVYLQMNSLKPEDTAVYYCAVYSYPFQTYDYWGQGTQVTVSS

SEQ ID NO: 27664 - protein, 118 aa, Artificial Sequence
  Chemically Synthesized
QVQLQESGGGLVQAGGSLRLSCAASGSISNDRGMGWYRQAPGKEREFVATISYGAITYYADSVKGRFTISRDNAKNTVYLQMNSLKPEDTAVYYCAVNYYEIYTHIYWGQGTQVTVSS

SEQ ID NO: 27665 - protein, 117 aa, Artificial Sequence
  Chemically Synthesized
QVQLQESGGGLVQAGGSLRLSCAASGTISGVWTMGWYRQAPGKERELVATIASVLLPYADSVKGRFTISRDNAKNTVYLQMNSLKPEDTAVYYCAVDYNIRDGFNYWGQGTQVTVSS

SEQ ID NO: 27666 - protein, 117 aa, Artificial Sequence
  Chemically Synthesized
QVQLQESGGGLVQAGGSLRLSCAASGTISDGDDMGWYRQAPGKERELVAAIDYGSITYYADSVKGRFTISRDNAKNTVYLQMNSLKPEDTAVYYCAVDVFSVNTLYWGQGTQVTVSS

SEQ ID NO: 27667 - protein, 117 aa, Artificial Sequence
  Chemically Synthesized
QVQLQESGGGLVQAGGSLRLSCAASGNIFTGDYMGWYRQAPGKEREFVASINDGSNTYYADSVKGRFTISRDNAKNTVYLQMNSLKPEDTAVYYCAANYRDGSLFYWGQGTQVTVSS

SEQ ID NO: 27668 - protein, 117 aa, Artificial Sequence
  Chemically Synthesized
QVQLQESGGGLVQAGGSLRLSCAASGTISSVFMGWYRQAPGKERELVAGITTGTNTNYADSVKGRFTISRDNAKNTVYLQMNSLKPEDTAVYYCAVRGSGLYYLGYWGQGTQVTVSS

SEQ ID NO: 27669 - protein, 111 aa, Artificial Sequence
  Chemically Synthesized
QVQLQESGGGLVQAGGSLRLSCAASGSISGPPMGWYRQAPGKERELVASITFGSTTNYADSVKGRFTISRDNAKNTVYLQMNSLKPEDTAVYYCAAVNLYWGQGTQVTVSS

SEQ ID NO: 27670 - protein, 124 aa, Artificial Sequence
  Chemically Synthesized
QVQLQESGGGLVQAGGSLRLSCAASGNISTYYSMGWYRQAPGKERELVAAIAYGTTNYADSVKGRFTISRDNAKNTVYLQMNSLKPEDTAVYYCAAGPYDWLYGVPSIDTSIYWGQGTQVTVSS

SEQ ID NO: 27671 - protein, 118 aa, Artificial Sequence
  Chemically Synthesized
QVQLQESGGGLVQAGGSLRLSCAASGSIFTYDQMGWYRQAPGKERELVASISIGGSTNYADSVKGRFTISRDNAKNTVYLQMNSLKPEDTAVYYCAVRALSNDGYYYWGQGTQVTVSS

SEQ ID NO: 27672 - protein, 113 aa, Artificial Sequence
  Chemically Synthesized
QVQLQESGGGLVQAGGSLRLSCAASGSIFLYARMGWYRQAPGKEREFVAAITYGAITNYADSVKGRFTISRDNAKNTVYLQMNSLKPEDTAVYYCAELYLCYWGQGTQVTVSS

SEQ ID NO: 27673 - protein, 126 aa, Artificial Sequence
  Chemically Synthesized
QVQLQESGGGLVQAGGSLRLSCAASGTIFQFKWMGWYRQAPGKERELVASITYGGSTNYADSVKGRFTISRDNAKNTVYLQMNSLKPEDTAVYYCAVYAYRYRGTHTWRYWSHTYWGQGTQVTVSS

SEQ ID NO: 27674 - protein, 122 aa, Artificial Sequence
  Chemically Synthesized
QVQLQESGGGLVQAGGSLRLSCAASGTIFTRHPMGWYRQAPGKEREFVAAIDYGANTNYADSVKGRFTISRDNAKNTVYLQMNSLKPEDTAVYYCAARTQYPAWYHYSHWYWGQGTQVTVSS

SEQ ID NO: 27675 - protein, 121 aa, Artificial Sequence
  Chemically Synthesized
QVQLQESGGGLVQAGGSLRLSCAASGNIFAYDMGWYRQAPGKERELVAAIGFGGSTNYADSVKGRFTISRDNAKNTVYLQMNSLKPEDTAVYYCAANLYDITPGGSYYDYWGQGTQVTVSS

SEQ ID NO: 27676 - protein, 117 aa, Artificial Sequence
  Chemically Synthesized
QVQLQESGGGLVQAGGSLRLSCAASGYISGYWEMGWYRQAPGKEREFVATIDGATTYYADSVKGRFTISRDNAKNTVYLQMNSLKPEDTAVYYCAVEVWPIYRHGYWGQGTQVTVSS

SEQ ID NO: 27677 - protein, 126 aa, Artificial Sequence
  Chemically Synthesized
QVQLQESGGGLVQAGGSLRLSCAASGTISKYYYMGWYRQAPGKEREFVASIDSGGNTYYADSVKGRFTISRDNAKNTVYLQMNSLKPEDTAVYYCAANDLDSDSGRTGVWALYDYWGQGTQVTVSS

SEQ ID NO: 27678 - protein, 117 aa, Artificial Sequence
  Chemically Synthesized
QVQLQESGGGLVQAGGSLRLSCAASGTIFSYVTMGWYRQAPGKERELVAAIANGANTNYADSVKGRFTISRDNAKNTVYLQMNSLKPEDTAVYYCAARPQHGDHTYWGQGTQVTVSS

SEQ ID NO: 27679 - protein, 126 aa, Artificial Sequence
  Chemically Synthesized
QVQLQESGGGLVQAGGSLRLSCAASGSISSGAWMGWYRQAPGKERELVAGITYGANTNYADSVKGRFTISRDNAKNTVYLQMNSLKPEDTAVYYCAAGYAGYHTDAPGYADGHTYWGQGTQVTVSS

SEQ ID NO: 27680 - protein, 122 aa, Artificial Sequence
  Chemically Synthesized
QVQLQESGGGLVQAGGSLRLSCAASGSISSINGMGWYRQAPGKERELVAAINDGGSTNYADSVKGRFTISRDNAKNTVYLQMNSLKPEDTAVYYCAVLPDGVQPLVDVLAYWGQGTQVTVSS

SEQ ID NO: 27681 - protein, 118 aa, Artificial Sequence
  Chemically Synthesized
QVQLQESGGGLVQAGGSLRLSCAASGYISAYRRMGWYRQAPGKERELVAGIDEGSTTYYADSVKGRFTISRDNAKNTVYLQMNSLKPEDTAVYYCAVDDYAGDTYDYWGQGTQVTVSS

SEQ ID NO: 27682 - protein, 111 aa, Artificial Sequence
  Chemically Synthesized
QVQLQESGGGLVQAGGSLRLSCAASGNISYPIGMGWYRQAPGKEREFVASIADGTITNYADSVKGRFTISRDNAKNTVYLQMNSLKPEDTAVYYCAEPSYWGQGTQVTVSS

SEQ ID NO: 27683 - protein, 121 aa, Artificial Sequence
  Chemically Synthesized
QVQLQESGGGLVQAGGSLRLSCAASGTIFAVDGMGWYRQAPGKEREFVAAITWGGIPYADSVKGRFTISRDNAKNTVYLQMNSLKPEDTAVYYCAVEIVQRAVDYTTHDYWGQGTQVTVSS

SEQ ID NO: 27684 - protein, 118 aa, Artificial Sequence
  Chemically Synthesized
QVQLQESGGGLVQAGGSLRLSCAASGNIFGGPDMGWYRQAPGKERELVAGIAGGTNTNYADSVKGRFTISRDNAKNTVYLQMNSLKPEDTAVYYCAVYNDVPAYLYYWGQGTQVTVSS

SEQ ID NO: 27685 - protein, 118 aa, Artificial Sequence
  Chemically Synthesized
QVQLQESGGGLVQAGGSLRLSCAASGYISNIAYMGWYRQAPGKERELVASIDSGAITYYADSVKGRFTISRDNAKNTVYLQMNSLKPEDTAVYYCAVYEAGKTYHLYWGQGTQVTVSS

SEQ ID NO: 27686 - protein, 122 aa, Artificial Sequence
  Chemically Synthesized
QVQLQESGGGLVQAGGSLRLSCAASGSISADGGMGWYRQAPGKERELVAGIASGAITYYADSVKGRFTISRDNAKNTVYLQMNSLKPEDTAVYYCAAATTRYYDRLIAHAYWGQGTQVTVSS

SEQ ID NO: 27687 - protein, 118 aa, Artificial Sequence
  Chemically Synthesized
QVQLQESGGGLVQAGGSLRLSCAASGNIFGYLRMGWYRQAPGKERELVASITAGAITNYADSVKGRFTISRDNAKNTVYLQMNSLKPEDTAVYYCAADDPVQRGLSYWGQGTQVTVSS

SEQ ID NO: 27688 - protein, 116 aa, Artificial Sequence
  Chemically Synthesized
QVQLQESGGGLVQAGGSLRLSCAASGNISPYSMGWYRQAPGKERELVAAIASGTNTYYADSVKGRFTISRDNAKNTVYLQMNSLKPEDTAVYYCAVAIDQASFIYWGQGTQVTVSS

SEQ ID NO: 27689 - protein, 118 aa, Artificial Sequence
  Chemically Synthesized
QVQLQESGGGLVQAGGSLRLSCAASGTISAWVDMGWYRQAPGKERELVASIGTGANTNYADSVKGRFTISRDNAKNTVYLQMNSLKPEDTAVYYCAVGRFSGPRLAYWGQGTQVTVSS

SEQ ID NO: 27690 - protein, 127 aa, Artificial Sequence
  Chemically Synthesized
QVQLQESGGGLVQAGGSLRLSCAASGNISILYYMGWYRQAPGKERELVAAIGDGTITNYADSVKGRFTISRDNAKNTVYLQMNSLKPEDTAVYYCAAWRVDDPLGKLDQESDGYRYWGQGTQVTVSS

SEQ ID NO: 27691 - protein, 114 aa, Artificial Sequence
  Chemically Synthesized
QVQLQESGGGLVQAGGSLRLSCAASGSIFYGYYMGWYRQAPGKERELVASIDAGSSTYYADSVKGRFTISRDNAKNTVYLQMNSLKPEDTAVYYCAGQMVPSYWGQGTQVTVSS

SEQ ID NO: 27692 - protein, 126 aa, Artificial Sequence
  Chemically Synthesized
QVQLQESGGGLVQAGGSLRLSCAASGYIFRPYEMGWYRQAPGKERELVAAIDGGTTTNYADSVKGRFTISRDNAKNTVYLQMNSLKPEDTAVYYCAADSAWRASTGGYQRYVHVYWGQGTQVTVSS

SEQ ID NO: 27693 - protein, 117 aa, Artificial Sequence
  Chemically Synthesized
QVQLQESGGGLVQAGGSLRLSCAASGYILLLSMGWYRQAPGKERELVAGITPGASTNYADSVKGRFTISRDNAKNTVYLQMNSLKPEDTAVYYCAAANGYGFRHGYWGQGTQVTVSS

SEQ ID NO: 27694 - protein, 126 aa, Artificial Sequence
  Chemically Synthesized
QVQLQESGGGLVQAGGSLRLSCAASGTISWYKFMGWYRQAPGKERELVATINYGGNTYYADSVKGRFTISRDNAKNTVYLQMNSLKPEDTAVYYCAANIYDYAVIPYPYFGNYAYWGQGTQVTVSS

SEQ ID NO: 27695 - protein, 122 aa, Artificial Sequence
  Chemically Synthesized
QVQLQESGGGLVQAGGSLRLSCAASGTISTPYLMGWYRQAPGKEREFVAGIGVGTTTNYADSVKGRFTISRDNAKNTVYLQMNSLKPEDTAVYYCAAIDVDWDRVFYKHYYWGQGTQVTVSS

SEQ ID NO: 27696 - protein, 118 aa, Artificial Sequence
  Chemically Synthesized
QVQLQESGGGLVQAGGSLRLSCAASGSIFQGYYMGWYRQAPGKEREFVAGITTGANTNYADSVKGRFTISRDNAKNTVYLQMNSLKPEDTAVYYCAVLYYNAYWHYYWGQGTQVTVSS

SEQ ID NO: 27697 - protein, 118 aa, Artificial Sequence
  Chemically Synthesized
QVQLQESGGGLVQAGGSLRLSCAASGSISWGSYMGWYRQAPGKERELVLSVVLPYADSVKGRFTISRDNAKNTVYLQMNSLKPEDTAVYYCAVIYHWYLSLSDDLDYWGQGTQVTVSS

SEQ ID NO: 27698 - protein, 118 aa, Artificial Sequence
  Chemically Synthesized
QVQLQESGGGLVQAGGSLRLSCAASGSISETLYMGWYRQAPGKEREFVATIAPGTTTNYADSVKGRFTISRDNAKNTVYLQMNSLKPEDTAVYYCAAVGYGDGYYAYWGQGTQVTVSS

SEQ ID NO: 27699 - protein, 121 aa, Artificial Sequence
  Chemically Synthesized
QVQLQESGGGLVQAGGSLRLSCAASGTISYYKQMGWYRQAPGKERELVAGITVGTTTYYADSVKGRFTISRDNAKNTVYLQMNSLKPEDTAVYYCAAKQQTWGPIYTALYWGQGTQVTVSS

SEQ ID NO: 27700 - protein, 118 aa, Artificial Sequence
  Chemically Synthesized
QVQLQESGGGLVQAGGSLRLSCAASGSISDQGAMGWYRQAPGKEREFVATIAYGASTYYADSVKGRFTISRDNAKNTVYLQMNSLKPEDTAVYYCAADKSSVWYHLYWGQGTQVTVSS

SEQ ID NO: 27701 - protein, 110 aa, Artificial Sequence
  Chemically Synthesized
QVQLQESGGGLVQAGGSLRLSCAASGSIFDPTGMGWYRQAPGKERELDTYYADSVKGRFTISRDNAKNTVYLQMNSLKPEDTAVYYCAAWDTQLWDHPYWGQGTQVTVSS

SEQ ID NO: 27702 - protein, 118 aa, Artificial Sequence
  Chemically Synthesized
QVQLQESGGGLVQAGGSLRLSCAASGTIFDHLPMGWYRQAPGKEREFVATIGYGTITYYADSVKGRFTISRDNAKNTVYLQMNSLKPEDTAVYYCAADYAFHRGHGYWGQGTQVTVSS

SEQ ID NO: 27703 - protein, 122 aa, Artificial Sequence
  Chemically Synthesized
QVQLQESGGGLVQAGGSLRLSCAASGSISYSHEMGWYRQAPGKERELVAAIDYGTITNYADSVKGRFTISRDNAKNTVYLQMNSLKPEDTAVYYCAASDYAVERDEQYHFYWGQGTQVTVSS

SEQ ID NO: 27704 - protein, 122 aa, Artificial Sequence
  Chemically Synthesized
QVQLQESGGGLVQAGGSLRLSCAASGTIFGTLAMGWYRQAPGKEREFVATITYGSSTYYADSVKGRFTISRDNAKNTVYLQMNSLKPEDTAVYYCAAVYVGRTQSLRVYYYWGQGTQVTVSS

SEQ ID NO: 27705 - protein, 116 aa, Artificial Sequence
  Chemically Synthesized
QVQLQESGGGLVQAGGSLRLSCAASGTISSSNMGWYRQAPGKERELVAGIGDGTSTNYADSVKGRFTISRDNAKNTVYLQMNSLKPEDTAVYYCAVLVVLVNSLYWGQGTQVTVSS

SEQ ID NO: 27706 - protein, 121 aa, Artificial Sequence
  Chemically Synthesized
QVQLQESGGGLVQAGGSLRLSCAASGTISKRTYMGWYRQAPGKERELVASIGRGGSTNYADSVKGRFTISRDNAKNTVYLQMNSLKPEDTAVYYCAVDGYAKGSYQNHVYWGQGTQVTVSS

SEQ ID NO: 27707 - protein, 122 aa, Artificial Sequence
  Chemically Synthesized
QVQLQESGGGLVQAGGSLRLSCAASGNIFQTKPMGWYRQAPGKEREFVAAIALGGTTYYADSVKGRFTISRDNAKNTVYLQMNSLKPEDTAVYYCAVSTEEDWLYANVHAYWGQGTQVTVSS

SEQ ID NO: 27708 - protein, 119 aa, Artificial Sequence
  Chemically Synthesized
QVQLQESGGGLVQAGGSLRLSCAASGYIFDWTSMGWYRQAPGKERELVAAITYGSITNYADSVKGRFTISRDNAKNTVYLQMNSLKPEDTAVYYCAAVYRYLGRYFGYWGQGTQVTVSS

SEQ ID NO: 27709 - protein, 118 aa, Artificial Sequence
  Chemically Synthesized
QVQLQESGGGLVQAGGSLRLSCAASGYIFRGDTMGWYRQAPGKERELVATINGGGSTNYADSVKGRFTISRDNAKNTVYLQMNSLKPEDTAVYYCAAYVTRGQEHGYWGQGTQVTVSS

SEQ ID NO: 27710 - protein, 126 aa, Artificial Sequence
  Chemically Synthesized
QVQLQESGGGLVQAGGSLRLSCAASGTIFPFPYMGWYRQAPGKERELVAAITVGGITYYADSVKGRFTISRDNAKNTVYLQMNSLKPEDTAVYYCAAGYNTFVAASQYAVHEHDYWGQGTQVTVSS

SEQ ID NO: 27711 - protein, 122 aa, Artificial Sequence
  Chemically Synthesized
QVQLQESGGGLVQAGGSLRLSCAASGNISGWYIMGWYRQAPGKERELVAGITLGGSTNYADSVKGRFTISRDNAKNTVYLQMNSLKPEDTAVYYCAVPGYRPIIDNSDYSYWGQGTQVTVSS

SEQ ID NO: 27712 - protein, 125 aa, Artificial Sequence
  Chemically Synthesized
QVQLQESGGGLVQAGGSLRLSCAASGNISYSTGMGWYRQAPGKEREFVATITDGSSTYYADSVKGRFTISRDNAKNTVYLQMNSLKPEDTAVYYCAASLLYYYSYDYYGGGSIYWGQGTQVTVSS

SEQ ID NO: 27713 - protein, 118 aa, Artificial Sequence
  Chemically Synthesized
QVQLQESGGGLVQAGGSLRLSCAASGTISERYSMGWYRQAPGKERELVATINTGSSTYYADSVKGRFTISRDNAKNTVYLQMNSLKPEDTAVYYCAAYYYGYYTHDYWGQGTQVTVSS

SEQ ID NO: 27714 - protein, 114 aa, Artificial Sequence
  Chemically Synthesized
QVQLQESGGGLVQAGGSLRLSCAASGSISALGDMGWYRQAPGKEREFVAGINYGANTNYADSVKGRFTISRDNAKNTVYLQMNSLKPEDTAVYYCAASNTTIYWGQGTQVTVSS

SEQ ID NO: 27715 - protein, 125 aa, Artificial Sequence
  Chemically Synthesized
QVQLQESGGGLVQAGGSLRLSCAASGYISALESMGWYRQAPGKEREFVAGIGDGTTTYYADSVKGRFTISRDNAKNTVYLQMNSLKPEDTAVYYCAVWSADRGGGYSLLLSTIYWGQGTQVTVSS

SEQ ID NO: 27716 - protein, 118 aa, Artificial Sequence
  Chemically Synthesized
QVQLQESGGGLVQAGGSLRLSCAASGNISEYNYMGWYRQAPGKEREFVATINGGGTTYYADSVKGRFTISRDNAKNTVYLQMNSLKPEDTAVYYCAAGLHGTYPHSYWGQGTQVTVSS

SEQ ID NO: 27717 - protein, 118 aa, Artificial Sequence
  Chemically Synthesized
QVQLQESGGGLVQAGGSLRLSCAASGSIFWLFYMGWYRQAPGKERELVAAIAYGANTYYADSVKGRFTISRDNAKNTVYLQMNSLKPEDTAVYYCAAYVYQLFELDYWGQGTQVTVSS

SEQ ID NO: 27718 - protein, 118 aa, Artificial Sequence
  Chemically Synthesized
QVQLQESGGGLVQAGGSLRLSCAASGSISLNYVMGWYRQAPGKEREFVATINYGSTTYYADSVKGRFTISRDNAKNTVYLQMNSLKPEDTAVYYCAVYRYLYYALPYWGQGTQVTVSS

SEQ ID NO: 27719 - protein, 117 aa, Artificial Sequence
  Chemically Synthesized
QVQLQESGGGLVQAGGSLRLSCAASGTIFDSDFMGWYRQAPGKEREFVAAIASGTSTNYADSVKGRFTISRDNAKNTVYLQMNSLKPEDTAVYYCAADYSTLNLMYWGQGTQVTVSS

SEQ ID NO: 27720 - protein, 118 aa, Artificial Sequence
  Chemically Synthesized
QVQLQESGGGLVQAGGSLRLSCAASGNIFASAYMGWYRQAPGKERELVAGIDWGGNTNYADSVKGRFTISRDNAKNTVYLQMNSLKPEDTAVYYCAADHPGRQYLEYWGQGTQVTVSS

SEQ ID NO: 27721 - protein, 122 aa, Artificial Sequence
  Chemically Synthesized
QVQLQESGGGLVQAGGSLRLSCAASGTISQSQGMGWYRQAPGKEREFVATISHGTITNYADSVKGRFTISRDNAKNTVYLQMNSLKPEDTAVYYCAVNDVYYVYAIANLGYWGQGTQVTVSS

SEQ ID NO: 27722 - protein, 118 aa, Artificial Sequence
  Chemically Synthesized
QVQLQESGGGLVQAGGSLRLSCAASGSISIARAMGWYRQAPGKEREFVASITDGSTTNYADSVKGRFTISRDNAKNTVYLQMNSLKPEDTAVYYCAVLWYELGWHGYWGQGTQVTVSS

SEQ ID NO: 27723 - protein, 118 aa, Artificial Sequence
  Chemically Synthesized
QVQLQESGGGLVQAGGSLRLSCAASGYISRDDYMGWYRQAPGKEREFVAGIGQGGNTNYADSVKGRFTISRDNAKNTVYLQMNSLKPEDTAVYYCAAKDYPGDGYDYWGQGTQVTVSS

SEQ ID NO: 27724 - protein, 110 aa, Artificial Sequence
  Chemically Synthesized
QVQLQESGGGLVQAGGSLRLSCAASGTISDDLGMGWYRQAPGKERELVAGISDGTITYYADSVKGRFTISRDNAKNTVYLQMNSLKPEDTAVYYCAVCYWGQGTQVTVSS

SEQ ID NO: 27725 - protein, 126 aa, Artificial Sequence
  Chemically Synthesized
QVQLQESGGGLVQAGGSLRLSCAASGTIFRTSYMGWYRQAPGKEREFVAAINDGANTYYADSVKGRFTISRDNAKNTVYLQMNSLKPEDTAVYYCAVGTGQYSGTLSNEQYIHQYWGQGTQVTVSS

SEQ ID NO: 27726 - protein, 110 aa, Artificial Sequence
  Chemically Synthesized
QVQLQESGGGLVQAGGSLRLSCAASGYISRYYGMGWYRQAPGKEREFVAGIAGGSNTNYADSVKGRFTISRDNAKNTVYLQMNSLKPEDTAVYYCAHGYWGQGTQVTVSS

SEQ ID NO: 27727 - protein, 119 aa, Artificial Sequence
  Chemically Synthesized
QVQLQESGGGLVQAGGSLRLSCAASGNISRYDLMGWYRQAPGKEREFVAAISAGATTYADSVKGRFTISRDNAKNTVYLQMNSLKPEDTAVYYCAVYDYPLLSKVHPYWGQGTQVTVSS

SEQ ID NO: 27728 - protein, 117 aa, Artificial Sequence
  Chemically Synthesized
QVQLQESGGGLVQAGGSLRLSCAASGNIFQYYYMGWYRQAPGKERELVAAISRGGITYYADSVKGRFTISRDNAKNTVYLQMNSLKPEDTAVYYCAVGARGYYLYYWGQGTQVTVSS

SEQ ID NO: 27729 - protein, 122 aa, Artificial Sequence
  Chemically Synthesized
QVQLQESGGGLVQAGGSLRLSCAASGSISRSTHMGWYRQAPGKERELVASISVGANTNYADSVKGRFTISRDNAKNTVYLQMNSLKPEDTAVYYCAAGAFRDGHPYGDHYYWGQGTQVTVSS

SEQ ID NO: 27730 - protein, 118 aa, Artificial Sequence
  Chemically Synthesized
QVQLQESGGGLVQAGGSLRLSCAASGNIFAEGDMGWYRQAPGKEREFVATIGYGTNTNYADSVKGRFTISRDNAKNTVYLQMNSLKPEDTAVYYCAVDAFGSAPYYYWGQGTQVTVSS

SEQ ID NO: 27731 - protein, 118 aa, Artificial Sequence
  Chemically Synthesized
QVQLQESGGGLVQAGGSLRLSCAASGSISDGMGWYRQAPGKERELVASIDSVVLPYADSVKGRFTISRDNAKNTVYLQMNSLKPEDTAVYYCAVSLVTRSTSGVLIYWGQGTQVTVSS

SEQ ID NO: 27732 - protein, 118 aa, Artificial Sequence
  Chemically Synthesized
QVQLQESGGGLVQAGGSLRLSCAASGNIFYLVYMGWYRQAPGKEREFVATIDYGSTTNYADSVKGRFTISRDNAKNTVYLQMNSLKPEDTAVYYCAAKRYPGVQFEYWGQGTQVTVSS

SEQ ID NO: 27733 - protein, 117 aa, Artificial Sequence
  Chemically Synthesized
QVQLQESGGGLVQAGGSLRLSCAASGTIFYYYVMGWYRQAPGKEREFVASIASVVIPYADSVKGRFTISRDNAKNTVYLQMNSLKPEDTAVYYCAASDTGYYAYYYWGQGTQVTVSS

SEQ ID NO: 27734 - protein, 118 aa, Artificial Sequence
  Chemically Synthesized
QVQLQESGGGLVQAGGSLRLSCAASGYIFYGRYMGWYRQAPGKEREFVAAIAGGATTYYADSVKGRFTISRDNAKNTVYLQMNSLKPEDTAVYYCAAWTIYGDKLWYWGQGTQVTVSS

SEQ ID NO: 27735 - protein, 111 aa, Artificial Sequence
  Chemically Synthesized
QVQLQESGGGLVQAGGSLRLSCAASGSISYDTYMGWYRQAPGKEREFVAAINSGSSTNYADSVKGRFTISRDNAKNTVYLQMNSLKPEDTAVYYCASHPYWGQGTQVTVSS

SEQ ID NO: 27736 - protein, 126 aa, Artificial Sequence
  Chemically Synthesized
QVQLQESGGGLVQAGGSLRLSCAASGSISVRDHMGWYRQAPGKERELVAGIGYGTSTNYADSVKGRFTISRDNAKNTVYLQMNSLKPEDTAVYYCAADRFDRWRWHYGYFGTHRYWGQGTQVTVSS

SEQ ID NO: 27737 - protein, 125 aa, Artificial Sequence
  Chemically Synthesized
QVQLQESGGGLVQAGGSLRLSCAASGNISPGDIMGWYRQAPGKEREFVASIDAGSITYADSVKGRFTISRDNAKNTVYLQMNSLKPEDTAVYYCAADGYTVIYGDAYAVQPFRYWGQGTQVTVSS

SEQ ID NO: 27738 - protein, 114 aa, Artificial Sequence
  Chemically Synthesized
QVQLQESGGGLVQAGGSLRLSCAASGSISWILRMGWYRQAPGKEREFVDQYADSVKGRFTISRDNAKNTVYLQMNSLKPEDTAVYYCAVYYPLRDFYDSQHWYWGQGTQVTVSS

SEQ ID NO: 27739 - protein, 125 aa, Artificial Sequence
  Chemically Synthesized
QVQLQESGGGLVQAGGSLRLSCAASGSISPGEFMGWYRQAPGKERELVAGIATGGNTNYADSVKGRFTISRDNAKNTVYLQMNSLKPEDTAVYYCAVVSLAEDGDDTESSRLIYWGQGTQVTVSS

SEQ ID NO: 27740 - protein, 117 aa, Artificial Sequence
  Chemically Synthesized
QVQLQESGGGLVQAGGSLRLSCAASGYIFVPYNMGWYRQAPGKERELVAVLLLVVLPYADSVKGRFTISRDNAKNTVYLQMNSLKPEDTAVYYCAAYETSGSVYPYWGQGTQVTVSS

SEQ ID NO: 27741 - protein, 126 aa, Artificial Sequence
  Chemically Synthesized
QVQLQESGGGLVQAGGSLRLSCAASGSISYQDFMGWYRQAPGKERELVAGITDGSSTYYADSVKGRFTISRDNAKNTVYLQMNSLKPEDTAVYYCAAPYAYYQYYGTSYDGYYTYWGQGTQVTVSS

SEQ ID NO: 27742 - protein, 122 aa, Artificial Sequence
  Chemically Synthesized
QVQLQESGGGLVQAGGSLRLSCAASGNISYNDYMGWYRQAPGKEREFVAGIDYGTNTYYADSVKGRFTISRDNAKNTVYLQMNSLKPEDTAVYYCAAVLWVNLVFGRQHLYWGQGTQVTVSS

SEQ ID NO: 27743 - protein, 118 aa, Artificial Sequence
  Chemically Synthesized
QVQLQESGGGLVQAGGSLRLSCAASGSISGPDIMGWYRQAPGKERELVASIATGGSTYYADSVKGRFTISRDNAKNTVYLQMNSLKPEDTAVYYCAVDETYYDLHYYWGQGTQVTVSS

SEQ ID NO: 27744 - protein, 117 aa, Artificial Sequence
  Chemically Synthesized
QVQLQESGGGLVQAGGSLRLSCAASGTIFDAVYMGWYRQAPGKEREFVAAINYGSNTNYADSVKGRFTISRDNAKNTVYLQMNSLKPEDTAVYYCAADAYYVDDLYWGQGTQVTVSS

SEQ ID NO: 27745 - protein, 118 aa, Artificial Sequence
  Chemically Synthesized
QVQLQESGGGLVQAGGSLRLSCAASGYIFAGFYMGWYRQAPGKEREFVAGIGDGTNTYYADSVKGRFTISRDNAKNTVYLQMNSLKPEDTAVYYCAAFAPRDAYLDYWGQGTQVTVSS

SEQ ID NO: 27746 - protein, 122 aa, Artificial Sequence
  Chemically Synthesized
QVQLQESGGGLVQAGGSLRLSCAASGNISARGEMGWYRQAPGKERELVATINYGSNTNYADSVKGRFTISRDNAKNTVYLQMNSLKPEDTAVYYCAADSYYYVNGFIAHVYWGQGTQVTVSS

SEQ ID NO: 27747 - protein, 118 aa, Artificial Sequence
  Chemically Synthesized
QVQLQESGGGLVQAGGSLRLSCAASGNISDKYQMGWYRQAPGKERELVAGISYGSITNYADSVKGRFTISRDNAKNTVYLQMNSLKPEDTAVYYCAADLDSYNNYQYWGQGTQVTVSS

SEQ ID NO: 27748 - protein, 121 aa, Artificial Sequence
  Chemically Synthesized
QVQLQESGGGLVQAGGSLRLSCAASGTIFIDPQMGWYRQAPGKEREFVATISQGANTYYADSVKGRFTISRDNAKNTVYLQMNSLKPEDTAVYYCAAYTYGNYAYYQPLYWGQGTQVTVSS

SEQ ID NO: 27749 - protein, 122 aa, Artificial Sequence
  Chemically Synthesized
QVQLQESGGGLVQAGGSLRLSCAASGSISSNDYMGWYRQAPGKEREFVASIDYGGNTYYADSVKGRFTISRDNAKNTVYLQMNSLKPEDTAVYYCAVYVKPYYITYVHHGYWGQGTQVTVSS

SEQ ID NO: 27750 - protein, 110 aa, Artificial Sequence
  Chemically Synthesized
QVQLQESGGGLVQAGGSLRLSCAASGSISTGYAMGWYRQAPGKEREFVATITYGSITYYADSVKGRFTISRDNAKNTVYLQMNSLKPEDTAVYYCATIYWGQGTQVTVSS

SEQ ID NO: 27751 - protein, 126 aa, Artificial Sequence
  Chemically Synthesized
QVQLQESGGGLVQAGGSLRLSCAASGYIFVYGYMGWYRQAPGKERELVAGISVGGSTNYADSVKGRFTISRDNAKNTVYLQMNSLKPEDTAVYYCAVDYTQYAGQLAYYVQFFPYWGQGTQVTVSS

SEQ ID NO: 27752 - protein, 121 aa, Artificial Sequence
  Chemically Synthesized
QVQLQESGGGLVQAGGSLRLSCAASGTISNTRDMGWYRQAPGKEREFVAAIGYGSSTYYADSVKGRFTISRDNAKNTVYLQMNSLKPEDTAVYYCAVPSDYYGLTGDHDYWGQGTQVTVSS

SEQ ID NO: 27753 - protein, 118 aa, Artificial Sequence
  Chemically Synthesized
QVQLQESGGGLVQAGGSLRLSCAASGYISRRYWMGWYRQAPGKERELVAAIGDGAITYYADSVKGRFTISRDNAKNTVYLQMNSLKPEDTAVYYCAVYTDVGYYHQYWGQGTQVTVSS

SEQ ID NO: 27754 - protein, 121 aa, Artificial Sequence
  Chemically Synthesized
QVQLQESGGGLVQAGGSLRLSCAASGYISNGSMGWYRQAPGKERELVATINDGSTTYYADSVKGRFTISRDNAKNTVYLQMNSLKPEDTAVYYCAVHQATYDDHVGVLYYWGQGTQVTVSS

SEQ ID NO: 27755 - protein, 116 aa, Artificial Sequence
  Chemically Synthesized
QVQLQESGGGLVQAGGSLRLSCAASGTISADEAMGWYRQAPGKERELLPLLLVVLVPYADSVKGRFTISRDNAKNTVYLQMNSLKPEDTAVYYCAAVLGTLLTMYWGQGTQVTVSS

SEQ ID NO: 27756 - protein, 117 aa, Artificial Sequence
  Chemically Synthesized
QVQLQESGGGLVQAGGSLRLSCAASGTISELNHMGWYRQAPGKEREFVAGIIKVVLPYADSVKGRFTISRDNAKNTVYLQMNSLKPEDTAVYYCAVHKPSIDDHTYWGQGTQVTVSS

SEQ ID NO: 27757 - protein, 122 aa, Artificial Sequence
  Chemically Synthesized
QVQLQESGGGLVQAGGSLRLSCAASGSISGAHYMGWYRQAPGKERELVAAIATGGSTNYADSVKGRFTISRDNAKNTVYLQMNSLKPEDTAVYYCAVYGTDYSYTHNGFDYWGQGTQVTVSS

SEQ ID NO: 27758 - protein, 121 aa, Artificial Sequence
  Chemically Synthesized
QVQLQESGGGLVQAGGSLRLSCAASGYIFDTSSMGWYRQAPGKEREFVAAITSVVVPYADSVKGRFTISRDNAKNTVYLQMNSLKPEDTAVYYCAVAENSRYVYADQHYYWGQGTQVTVSS

SEQ ID NO: 27759 - protein, 126 aa, Artificial Sequence
  Chemically Synthesized
QVQLQESGGGLVQAGGSLRLSCAASGNISPLSAMGWYRQAPGKEREFVASIDRGSTTNYADSVKGRFTISRDNAKNTVYLQMNSLKPEDTAVYYCAAPTGPPPYYITGTGDSSFYWGQGTQVTVSS

SEQ ID NO: 27760 - protein, 122 aa, Artificial Sequence
  Chemically Synthesized
QVQLQESGGGLVQAGGSLRLSCAASGTISDRDDMGWYRQAPGKERELVATITRGGTTYYADSVKGRFTISRDNAKNTVYLQMNSLKPEDTAVYYCAADDRFYDPAPTGYYYWGQGTQVTVSS

SEQ ID NO: 27761 - protein, 120 aa, Artificial Sequence
  Chemically Synthesized
QVQLQESGGGLVQAGGSLRLSCAASGNISYSTMGWYRQAPGKERELVPVLLLVLVPYADSVKGRFTISRDNAKNTVYLQMNSLKPEDTAVYYCAADIVRIPWPGEDHDYWGQGTQVTVSS

SEQ ID NO: 27762 - protein, 117 aa, Artificial Sequence
  Chemically Synthesized
QVQLQESGGGLVQAGGSLRLSCAASGNISGGALMGWYRQAPGKEREFVPVLIKVVLPYADSVKGRFTISRDNAKNTVYLQMNSLKPEDTAVYYCAVTHDYGAGYYYWGQGTQVTVSS

SEQ ID NO: 27763 - protein, 119 aa, Artificial Sequence
  Chemically Synthesized
QVQLQESGGGLVQAGGSLRLSCAASGTISWWVNMGWYRQAPGKEREFVAGIAAGGNTYYADSVKGRFTISRDNAKNTVYLQMNSLKPEDTAVYYCAAVILVAYDDYSYWGQGTQVTVSS

SEQ ID NO: 27764 - protein, 118 aa, Artificial Sequence
  Chemically Synthesized
QVQLQESGGGLVQAGGSLRLSCAASGSIFPDNYMGWYRQAPGKEREFVATIGTGASTYYADSVKGRFTISRDNAKNTVYLQMNSLKPEDTAVYYCAVDWPYSAVLRYWGQGTQVTVSS

SEQ ID NO: 27765 - protein, 118 aa, Artificial Sequence
  Chemically Synthesized
QVQLQESGGGLVQAGGSLRLSCAASGYISRYWGMGWYRQAPGKERELVAGIARGGTTYYADSVKGRFTISRDNAKNTVYLQMNSLKPEDTAVYYCAVGARGIRVHAYWGQGTQVTVSS

SEQ ID NO: 27766 - protein, 118 aa, Artificial Sequence
  Chemically Synthesized
QVQLQESGGGLVQAGGSLRLSCAASGSISLWADMGWYRQAPGKEREFVAAINWGGITYYADSVKGRFTISRDNAKNTVYLQMNSLKPEDTAVYYCAVAGHTRSPHDYWGQGTQVTVSS

SEQ ID NO: 27767 - protein, 118 aa, Artificial Sequence
  Chemically Synthesized
QVQLQESGGGLVQAGGSLRLSCAASGNIFRDAGMGWYRQAPGKERELVAGIDAGTSTYYADSVKGRFTISRDNAKNTVYLQMNSLKPEDTAVYYCAAGRAREEIHRYWGQGTQVTVSS

SEQ ID NO: 27768 - protein, 118 aa, Artificial Sequence
  Chemically Synthesized
QVQLQESGGGLVQAGGSLRLSCAASGSISTTYFMGWYRQAPGKERELVATIDQGGITYYADSVKGRFTISRDNAKNTVYLQMNSLKPEDTAVYYCAVFGKWIDRHSYWGQGTQVTVSS

SEQ ID NO: 27769 - protein, 118 aa, Artificial Sequence
  Chemically Synthesized
QVQLQESGGGLVQAGGSLRLSCAASGNIFPVAVMGWYRQAPGKEREFVASIATGSNTNYADSVKGRFTISRDNAKNTVYLQMNSLKPEDTAVYYCAAFEYVRPNFIYWGQGTQVTVSS

SEQ ID NO: 27770 - protein, 121 aa, Artificial Sequence
  Chemically Synthesized
QVQLQESGGGLVQAGGSLRLSCAASGNISLSSYMGWYRQAPGKEREFVAGITFGSITYYADSVKGRFTISRDNAKNTVYLQMNSLKPEDTAVYYCAVSPWGSSTGTSTFYWGQGTQVTVSS

SEQ ID NO: 27771 - protein, 122 aa, Artificial Sequence
  Chemically Synthesized
QVQLQESGGGLVQAGGSLRLSCAASGSISVPSEMGWYRQAPGKERELVASIGTGSNTNYADSVKGRFTISRDNAKNTVYLQMNSLKPEDTAVYYCAVANRQATTYSDYHGYWGQGTQVTVSS

SEQ ID NO: 27772 - protein, 118 aa, Artificial Sequence
  Chemically Synthesized
QVQLQESGGGLVQAGGSLRLSCAASGYISYYYLMGWYRQAPGKEREFVATIASGTITYYADSVKGRFTISRDNAKNTVYLQMNSLKPEDTAVYYCAAYDRFRTPHSYWGQGTQVTVSS

SEQ ID NO: 27773 - protein, 118 aa, Artificial Sequence
  Chemically Synthesized
QVQLQESGGGLVQAGGSLRLSCAASGTIFYYWDMGWYRQAPGKERELVAGIDYGGITNYADSVKGRFTISRDNAKNTVYLQMNSLKPEDTAVYYCAAWYVQRGRHWYWGQGTQVTVSS

SEQ ID NO: 27774 - protein, 118 aa, Artificial Sequence
  Chemically Synthesized
QVQLQESGGGLVQAGGSLRLSCAASGNIFDYNDMGWYRQAPGKEREFVAAISTGTSYLYADSVKGRFTISRDNAKNTVYLQMNSLKPEDTAVYYCAALSYDYRSLAYWGQGTQVTVSS

SEQ ID NO: 27775 - protein, 117 aa, Artificial Sequence
  Chemically Synthesized
QVQLQESGGGLVQAGGSLRLSCAASGNISPLEEMGWYRQAPGKERELVAAIDQGAITYYADSVKGRFTISRDNAKNTVYLQMNSLKPEDTAVYYCAAGVVYSLSIYWGQGTQVTVSS

SEQ ID NO: 27776 - protein, 126 aa, Artificial Sequence
  Chemically Synthesized
QVQLQESGGGLVQAGGSLRLSCAASGSISTTWRMGWYRQAPGKEREFVAGIDHGASTNYADSVKGRFTISRDNAKNTVYLQMNSLKPEDTAVYYCAVSLYSQPYINPVTIVNYPYWGQGTQVTVSS

SEQ ID NO: 27777 - protein, 120 aa, Artificial Sequence
  Chemically Synthesized
QVQLQESGGGLVQAGGSLRLSCAASGNIFGLHYMGWYRQAPGKERELVAAIAGGAITNYADSVKGRFTISRDNAKNTVYLQMNSLKPEDTAVYYCAAGVWAGLDYTLSYWGQGTQVTVSS

SEQ ID NO: 27778 - protein, 118 aa, Artificial Sequence
  Chemically Synthesized
QVQLQESGGGLVQAGGSLRLSCAASGSIFYRPGMGWYRQAPGKERELVASIAYGTSTYYADSVKGRFTISRDNAKNTVYLQMNSLKPEDTAVYYCAALDSYQVDLTYWGQGTQVTVSS

SEQ ID NO: 27779 - protein, 121 aa, Artificial Sequence
  Chemically Synthesized
QVQLQESGGGLVQAGGSLRLSCAASGTISSSLYMGWYRQAPGKEREFVATIDAGTSTYYADSVKGRFTISRDNAKNTVYLQMNSLKPEDTAVYYCAVDILHRDALRILQYWGQGTQVTVSS

SEQ ID NO: 27780 - protein, 122 aa, Artificial Sequence
  Chemically Synthesized
QVQLQESGGGLVQAGGSLRLSCAASGSISLYLRMGWYRQAPGKEREFVATIDAGTTTNYADSVKGRFTISRDNAKNTVYLQMNSLKPEDTAVYYCAATGTNPSQDVPDYLYWGQGTQVTVSS

SEQ ID NO: 27781 - protein, 118 aa, Artificial Sequence
  Chemically Synthesized
QVQLQESGGGLVQAGGSLRLSCAASGSISAYGAMGWYRQAPGKEREFVASIGFGGTTYYADSVKGRFTISRDNAKNTVYLQMNSLKPEDTAVYYCAVERYIASGHYYWGQGTQVTVSS

SEQ ID NO: 27782 - protein, 117 aa, Artificial Sequence
  Chemically Synthesized
QVQLQESGGGLVQAGGSLRLSCAASGSIFTDDDMGWYRQAPGKERELVASIDWGGNTYYADSVKGRFTISRDNAKNTVYLQMNSLKPEDTAVYYCAVLHDGAVVYYWGQGTQVTVSS

SEQ ID NO: 27783 - protein, 118 aa, Artificial Sequence
  Chemically Synthesized
QVQLQESGGGLVQAGGSLRLSCAASGYIFGYPHMGWYRQAPGKERELVATIAWGSITNYADSVKGRFTISRDNAKNTVYLQMNSLKPEDTAVYYCAAYGYTRWRYKYWGQGTQVTVSS

SEQ ID NO: 27784 - protein, 118 aa, Artificial Sequence
  Chemically Synthesized
QVQLQESGGGLVQAGGSLRLSCAASGSISQLIGMGWYRQAPGKERELVAAIAGGGSTNYADSVKGRFTISRDNAKNTVYLQMNSLKPEDTAVYYCAALLAYVAFHSYWGQGTQVTVSS

SEQ ID NO: 27785 - protein, 117 aa, Artificial Sequence
  Chemically Synthesized
QVQLQESGGGLVQAGGSLRLSCAASGTIFYLSVMGWYRQAPGKERELVAAISSGANTNYADSVKGRFTISRDNAKNTVYLQMNSLKPEDTAVYYCAVLTLSTTNFYWGQGTQVTVSS

SEQ ID NO: 27786 - protein, 122 aa, Artificial Sequence
  Chemically Synthesized
QVQLQESGGGLVQAGGSLRLSCAASGYIFDSYSMGWYRQAPGKERELVASISDGAITNYADSVKGRFTISRDNAKNTVYLQMNSLKPEDTAVYYCAASTYWSDHDWTYHVYWGQGTQVTVSS

SEQ ID NO: 27787 - protein, 114 aa, Artificial Sequence
  Chemically Synthesized
QVQLQESGGGLVQAGGSLRLSCAASGSIFSFSQMGWYRQAPGKERELLPLLVTVLLPYADSVKGRFTISRDNAKNTVYLQMNSLKPEDTAVYYCADHCSSFSYWGQGTQVTVSS

SEQ ID NO: 27788 - protein, 118 aa, Artificial Sequence
  Chemically Synthesized
QVQLQESGGGLVQAGGSLRLSCAASGNIFSYIYMGWYRQAPGKEREFVASIANGTSTYYADSVKGRFTISRDNAKNTVYLQMNSLKPEDTAVYYCAALEDVGVLFGYWGQGTQVTVSS

SEQ ID NO: 27789 - protein, 118 aa, Artificial Sequence
  Chemically Synthesized
QVQLQESGGGLVQAGGSLRLSCAASGSISFTDGMGWYRQAPGKEREFVAAISAGGSTYYADSVKGRFTISRDNAKNTVYLQMNSLKPEDTAVYYCAAYARRGWGFTYWGQGTQVTVSS

SEQ ID NO: 27790 - protein, 122 aa, Artificial Sequence
  Chemically Synthesized
QVQLQESGGGLVQAGGSLRLSCAASGYIFVRDLMGWYRQAPGKERELVAGIDRGANTYYADSVKGRFTISRDNAKNTVYLQMNSLKPEDTAVYYCAALWWDRVVYGDNFDYWGQGTQVTVSS

SEQ ID NO: 27791 - protein, 118 aa, Artificial Sequence
  Chemically Synthesized
QVQLQESGGGLVQAGGSLRLSCAASGYISLWPTMGWYRQAPGKEREFVAGIAWGSTTYYADSVKGRFTISRDNAKNTVYLQMNSLKPEDTAVYYCAALAFPDSGHDYWGQGTQVTVSS

SEQ ID NO: 27792 - protein, 118 aa, Artificial Sequence
  Chemically Synthesized
QVQLQESGGGLVQAGGSLRLSCAASGNIFGQGNMGWYRQAPGKEREFVASINTGTITYYADSVKGRFTISRDNAKNTVYLQMNSLKPEDTAVYYCAVYYDIGTVHQYWGQGTQVTVSS

SEQ ID NO: 27793 - protein, 118 aa, Artificial Sequence
  Chemically Synthesized
QVQLQESGGGLVQAGGSLRLSCAASGNISSWAVMGWYRQAPGKEREFVASIGSGSNTNYADSVKGRFTISRDNAKNTVYLQMNSLKPEDTAVYYCAVYARRYDSLSYWGQGTQVTVSS

SEQ ID NO: 27794 - protein, 121 aa, Artificial Sequence
  Chemically Synthesized
QVQLQESGGGLVQAGGSLRLSCAASGTIFVFAAMGWYRQAPGKERELVAGIAGGSTNYADSVKGRFTISRDNAKNTVYLQMNSLKPEDTAVYYCAVYSYGPSSGIGRHYYWGQGTQVTVSS

SEQ ID NO: 27795 - protein, 118 aa, Artificial Sequence
  Chemically Synthesized
QVQLQESGGGLVQAGGSLRLSCAASGTISRQVTMGWYRQAPGKEREFVAGITTGANTYYADSVKGRFTISRDNAKNTVYLQMNSLKPEDTAVYYCAADDYSPFHHRYWGQGTQVTVSS

SEQ ID NO: 27796 - protein, 125 aa, Artificial Sequence
  Chemically Synthesized
QVQLQESGGGLVQAGGSLRLSCAASGYIFQYQGMGWYRQAPGKERELVAGITFGANTYYADSVKGRFTISRDNAKNTVYLQMNSLKPEDTAVYYCAAIRYYAPAATEQRRGHRYWGQGTQVTVSS

SEQ ID NO: 27797 - protein, 126 aa, Artificial Sequence
  Chemically Synthesized
QVQLQESGGGLVQAGGSLRLSCAASGNIFVSFVMGWYRQAPGKERELVASINGGAITYYADSVKGRFTISRDNAKNTVYLQMNSLKPEDTAVYYCAVRAIEYGYVEYWQHYDFYYWGQGTQVTVSS

SEQ ID NO: 27798 - protein, 122 aa, Artificial Sequence
  Chemically Synthesized
QVQLQESGGGLVQAGGSLRLSCAASGYIFDETTMGWYRQAPGKEREFVATIADGTTTYYADSVKGRFTISRDNAKNTVYLQMNSLKPEDTAVYYCAAADYDWRNIFNPLYYWGQGTQVTVSS

SEQ ID NO: 27799 - protein, 118 aa, Artificial Sequence
  Chemically Synthesized
QVQLQESGGGLVQAGGSLRLSCAASGTISWYSEMGWYRQAPGKEREFVASINYGTNTYYADSVKGRFTISRDNAKNTVYLQMNSLKPEDTAVYYCAVFDYAYFAHLYWGQGTQVTVSS

SEQ ID NO: 27800 - protein, 116 aa, Artificial Sequence
  Chemically Synthesized
QVQLQESGGGLVQAGGSLRLSCAASGTISATTMGWYRQAPGKERELLPLLLSVVLPYADSVKGRFTISRDNAKNTVYLQMNSLKPEDTAVYYCAAYDSYYRAHAYWGQGTQVTVSS

SEQ ID NO: 27801 - protein, 118 aa, Artificial Sequence
  Chemically Synthesized
QVQLQESGGGLVQAGGSLRLSCAASGYISDARWMGWYRQAPGKERELVAGITGGANTNYADSVKGRFTISRDNAKNTVYLQMNSLKPEDTAVYYCAAGIRLRPDSYYWGQGTQVTVSS

SEQ ID NO: 27802 - protein, 121 aa, Artificial Sequence
  Chemically Synthesized
QVQLQESGGGLVQAGGSLRLSCAASGTIFDYVVMGWYRQAPGKEREFVASIDPGTTTYYADSVKGRFTISRDNAKNTVYLQMNSLKPEDTAVYYCAVGYLGIVVFGDYGYWGQGTQVTVSS

SEQ ID NO: 27803 - protein, 112 aa, Artificial Sequence
  Chemically Synthesized
QVQLQESGGGLVQAGGSLRLSCAASGNIFSYLWMGWYRQAPGKERELVATISQGASTYYADSVKGRFTISRDNAKNTVYLQMNSLKPEDTAVYYCAAGHWYWGQGTQVTVSS

SEQ ID NO: 27804 - protein, 123 aa, Artificial Sequence
  Chemically Synthesized
QVQLQESGGGLVQAGGSLRLSCAASGSIFRIVWMGWYRQAPGKEREFVAAITRGGSNTNYADSVKGRFTISRDNAKNTVYLQMNSLKPEDTAVYYCAALDLYRYAYDRYHRYWGQGTQVTVSS

SEQ ID NO: 27805 - protein, 117 aa, Artificial Sequence
  Chemically Synthesized
QVQLQESGGGLVQAGGSLRLSCAASGTISDYDMGWYRQAPGKEREFVAAIDPGTSTNYADSVKGRFTISRDNAKNTVYLQMNSLKPEDTAVYYCAAFGDRILVHWYWGQGTQVTVSS

SEQ ID NO: 27806 - protein, 119 aa, Artificial Sequence
  Chemically Synthesized
QVQLQESGGGLVQAGGSLRLSCAASGSISRDDYMGWYRQAPGKEREFVATIAIGGITYYADSVKGRFTISRDNAKNTVYLQMNSLKPEDTAVYYCAGRPADRLGYFCYWGQGTQVTVSS

SEQ ID NO: 27807 - protein, 124 aa, Artificial Sequence
  Chemically Synthesized
QVQLQESGGGLVQAGGSLRLSCAASGYISYRPYMGWYRQAPGKERELVAAIGAGGSTYYADSVKGRFTISRDNAKNTVYLQMNSLKPEDTAVYYCAVQYINYFQNGGYREHGYWGQGTQVTVSS

SEQ ID NO: 27808 - protein, 117 aa, Artificial Sequence
  Chemically Synthesized
QVQLQESGGGLVQAGGSLRLSCAASGSIFDNDWMGWYRQAPGKERELVASIGSGITYYADSVKGRFTISRDNAKNTVYLQMNSLKPEDTAVYYCAVQLGYYYAYWYWGQGTQVTVSS

SEQ ID NO: 27809 - protein, 118 aa, Artificial Sequence
  Chemically Synthesized
QVQLQESGGGLVQAGGSLRLSCAASGNIFSYYYMGWYRQAPGKERELVAAIGRGASTYYADSVKGRFTISRDNAKNTVYLQMNSLKPEDTAVYYCAAYRLGRYLHHYWGQGTQVTVSS

SEQ ID NO: 27810 - protein, 110 aa, Artificial Sequence
  Chemically Synthesized
QVQLQESGGGLVQAGGSLRLSCAASGNYFLLLPMGWYRQAPGKEREFVATIDGGGITNYADSVKGRFTISRDNAKNTVYLQMNSLKPEDTAVYYCALIYWGQGTQVTVSS

SEQ ID NO: 27811 - protein, 122 aa, Artificial Sequence
  Chemically Synthesized
QVQLQESGGGLVQAGGSLRLSCAASGYISGGRAMGWYRQAPGKERELVASIDVGSSTNYADSVKGRFTISRDNAKNTVYLQMNSLKPEDTAVYYCAVGTPNRVTHRGDHVYWGQGTQVTVSS

SEQ ID NO: 27812 - protein, 122 aa, Artificial Sequence
  Chemically Synthesized
QVQLQESGGGLVQAGGSLRLSCAASGYISHTRFMGWYRQAPGKERELVASISEGGSTYYADSVKGRFTISRDNAKNTVYLQMNSLKPEDTAVYYCAVYDLYRGFWRQSYWYWGQGTQVTVSS

SEQ ID NO: 27813 - protein, 126 aa, Artificial Sequence
  Chemically Synthesized
QVQLQESGGGLVQAGGSLRLSCAASGTISRIPIMGWYRQAPGKEREFVAGISYGGITYYADSVKGRFTISRDNAKNTVYLQMNSLKPEDTAVYYCAAVYLYTDHVPYRYLRRFYYWGQGTQVTVSS

SEQ ID NO: 27814 - protein, 112 aa, Artificial Sequence
  Chemically Synthesized
QVQLQESGGGLVQAGGSLRLSCAASGSMGWYRQAPGKEREFVASITGGSNTNYADSVKGRFTISRDNAKNTVYLQMNSLKPEDTAVYYCAATPASTYIHYYWGQGTQVTVSS

SEQ ID NO: 27815 - protein, 116 aa, Artificial Sequence
  Chemically Synthesized
QVQLQESGGGLVQAGGSLRLSCAASGNISEDMGWYRQAPGKEREFVATINRGGTTYYADSVKGRFTISRDNAKNTVYLQMNSLKPEDTAVYYCAAPYGWDNPYYYWGQGTQVTVSS

SEQ ID NO: 27816 - protein, 126 aa, Artificial Sequence
  Chemically Synthesized
QVQLQESGGGLVQAGGSLRLSCAASGYISRYFWMGWYRQAPGKEREFVAGIGDGGSTNYADSVKGRFTISRDNAKNTVYLQMNSLKPEDTAVYYCAVTYGYQQVWDASRQHWLAYWGQGTQVTVSS

SEQ ID NO: 27817 - protein, 122 aa, Artificial Sequence
  Chemically Synthesized
QVQLQESGGGLVQAGGSLRLSCAASGYISYDSSMGWYRQAPGKERELVATIGSGGSTNYADSVKGRFTISRDNAKNTVYLQMNSLKPEDTAVYYCAVTRVRSDGGVRYLVYWGQGTQVTVSS

SEQ ID NO: 27818 - protein, 118 aa, Artificial Sequence
  Chemically Synthesized
QVQLQESGGGLVQAGGSLRLSCAASGNIFPRGRMGWYRQAPGKERELVAAIGTGAKYLYADSVKGRFTISRDNAKNTVYLQMNSLKPEDTAVYYCAAAHIKSLWLYYWGQGTQVTVSS

SEQ ID NO: 27819 - protein, 113 aa, Artificial Sequence
  Chemically Synthesized
QVQLQESGGGLVQAGGSLRLSCAASGTIFAYAFMGWYRQAPGKERELVAGIDPYADSVKGRFTISRDNAKNTVYLQMNSLKPEDTAVYYCAADGYRTTKLPYWGQGTQVTVSS

SEQ ID NO: 27820 - protein, 121 aa, Artificial Sequence
  Chemically Synthesized
QVQLQESGGGLVQAGGSLRLSCAASGTISDSQYMGWYRQAPGKERELVASIGDGSTTNYADSVKGRFTISRDNAKNTVYLQMNSLKPEDTAVYYCAVSLLMTTLTTLRMYWGQGTQVTVSS

SEQ ID NO: 27821 - protein, 126 aa, Artificial Sequence
  Chemically Synthesized
QVQLQESGGGLVQAGGSLRLSCAASGNISGVDAMGWYRQAPGKERELVAGITQGTTTNYADSVKGRFTISRDNAKNTVYLQMNSLKPEDTAVYYCAAYATFGDYDSAKYRPSLFYWGQGTQVTVSS

SEQ ID NO: 27822 - protein, 122 aa, Artificial Sequence
  Chemically Synthesized
QVQLQESGGGLVQAGGSLRLSCAASGSISWDPSMGWYRQAPGKERELVAAINDGSTTNYADSVKGRFTISRDNAKNTVYLQMNSLKPEDTAVYYCAAGHEKDSYPDGDFYYWGQGTQVTVSS

SEQ ID NO: 27823 - protein, 112 aa, Artificial Sequence
  Chemically Synthesized
QVQLQESGGGLVQAGGSLRLSCAASGSISGKYIMGWYRQAPGKERELGANTNYADSVKGRFTISRDNAKNTVYLQMNSLKPEDTAVYYCAVEGDYANALWYWGQGTQVTVSS

SEQ ID NO: 27824 - protein, 118 aa, Artificial Sequence
  Chemically Synthesized
QVQLQESGGGLVQAGGSLRLSCAASGTIFTPFRMGWYRQAPGKEREFVASITRGGSTYYADSVKGRFTISRDNAKNTVYLQMNSLKPEDTAVYYCAAYRFYFDAYSYWGQGTQVTVSS

SEQ ID NO: 27825 - protein, 126 aa, Artificial Sequence
  Chemically Synthesized
QVQLQESGGGLVQAGGSLRLSCAASGNISYEPGMGWYRQAPGKERELVATISHGAITNYADSVKGRFTISRDNAKNTVYLQMNSLKPEDTAVYYCAAEVPFKDTVGSLFDHFHQYWGQGTQVTVSS

SEQ ID NO: 27826 - protein, 119 aa, Artificial Sequence
  Chemically Synthesized
QVQLQESGGGLVQAGGSLRLSCAASGTIFISDMGWYRQAPGKEREFVAAINDGANTYYADSVKGRFTISRDNAKNTVYLQMNSLKPEDTAVYYCAVIYAPYDFPDHVYWGQGTQVTVSS

SEQ ID NO: 27827 - protein, 118 aa, Artificial Sequence
  Chemically Synthesized
QVQLQESGGGLVQAGGSLRLSCAASGTIFFIYAMGWYRQAPGKEREFVAGINPGGTTNYADSVKGRFTISRDNAKNTVYLQMNSLKPEDTAVYYCAVGPLGSGRLNYWGQGTQVTVSS

SEQ ID NO: 27828 - protein, 121 aa, Artificial Sequence
  Chemically Synthesized
QVQLQESGGGLVQAGGSLRLSCAASGTISPPSYMGWYRQAPGKERELVAAIAHGASTYYADSVKGRFTISRDNAKNTVYLQMNSLKPEDTAVYYCAARDSWAWPYSTGMYWGQGTQVTVSS

SEQ ID NO: 27829 - protein, 117 aa, Artificial Sequence
  Chemically Synthesized
QVQLQESGGGLVQAGGSLRLSCAASGYIFLYTGMGWYRQAPGKERELVASIAWGSTTNYADSVKGRFTISRDNAKNTVYLQMNSLKPEDTAVYYCAAGDGSLTNIYWGQGTQVTVSS

SEQ ID NO: 27830 - protein, 122 aa, Artificial Sequence
  Chemically Synthesized
QVQLQESGGGLVQAGGSLRLSCAASGYISPDQGMGWYRQAPGKERELVAGISYGTSTNYADSVKGRFTISRDNAKNTVYLQMNSLKPEDTAVYYCAVNNVRFYVVADGHVYWGQGTQVTVSS

SEQ ID NO: 27831 - protein, 117 aa, Artificial Sequence
  Chemically Synthesized
QVQLQESGGGLVQAGGSLRLSCAASGTISSAGYMGWYRQAPGKERELVAAIGSVLVPYADSVKGRFTISRDNAKNTVYLQMNSLKPEDTAVYYCAVLQYGFTQYDYWGQGTQVTVSS

SEQ ID NO: 27832 - protein, 121 aa, Artificial Sequence
  Chemically Synthesized
QVQLQESGGGLVQAGGSLRLSCAASGTIFAYGEMGWYRQAPGKEREFVVTIAHGGSTYYADSVKGRFTISRDNAKNTVYLQMNSLKPEDTAVYYCAAWSRYDPLSYAYPYWGQGTQVTVSS

SEQ ID NO: 27833 - protein, 122 aa, Artificial Sequence
  Chemically Synthesized
QVQLQESGGGLVQAGGSLRLSCAASGSIFLRYLMGWYRQAPGKEREFVAGIGAGANTNYADSVKGRFTISRDNAKNTVYLQMNSLKPEDTAVYYCAADLRNEGAHYGYHSYWGQGTQVTVSS

SEQ ID NO: 27834 - protein, 124 aa, Artificial Sequence
  Chemically Synthesized
QVQLQESGGGLVQAGGSLRLSCAASGLFTFTMGWYRQAPGKEREFVASIAIGSSTNYADSVKGRFTISRDNAKNTVYLQMNSLKPEDTAVYYCAVPHTAGGVPRYDAIQHHDYWGQGTQVTVSS

SEQ ID NO: 27835 - protein, 122 aa, Artificial Sequence
  Chemically Synthesized
QVQLQESGGGLVQAGGSLRLSCAASGNIFPYPVMGWYRQAPGKEREFVAGIGYGTSTNYADSVKGRFTISRDNAKNTVYLQMNSLKPEDTAVYYCAVVSPVDTIGVYRHFYWGQGTQVTVSS

SEQ ID NO: 27836 - protein, 122 aa, Artificial Sequence
  Chemically Synthesized
QVQLQESGGGLVQAGGSLRLSCAASGTISPPIAMGWYRQAPGKERELVAAISNGSNTNYADSVKGRFTISRDNAKNTVYLQMNSLKPEDTAVYYCAVWYIAYDYYYREHQYWGQGTQVTVSS

SEQ ID NO: 27837 - protein, 122 aa, Artificial Sequence
  Chemically Synthesized
QVQLQESGGGLVQAGGSLRLSCAASGSISLYPSMGWYRQAPGKERELVAGINDGSTTYYADSVKGRFTISRDNAKNTVYLQMNSLKPEDTAVYYCAVYNVANDYYSYFHLYWGQGTQVTVSS

SEQ ID NO: 27838 - protein, 110 aa, Artificial Sequence
  Chemically Synthesized
QVQLQESGGGLVQAGGSLRLSCAASGSIFGQGEMGWYRQAPGKERELVAAITRGANTYYADSVKGRFTISRDNAKNTVYLQMNSLKPEDTAVYYCAAQYWGQGTQVTVSS

SEQ ID NO: 27839 - protein, 118 aa, Artificial Sequence
  Chemically Synthesized
QVQLQESGGGLVQAGGSLRLSCAASGYIFFLYNMGWYRQAPGKEREFVAAISSGATTNYADSVKGRFTISRDNAKNTVYLQMNSLKPEDTAVYYCAAGYFDAYGYYYWGQGTQVTVSS

SEQ ID NO: 27840 - protein, 118 aa, Artificial Sequence
  Chemically Synthesized
QVQLQESGGGLVQAGGSLRLSCAASGNISRDDDMGWYRQAPGKERELVATISDGTNTYYADSVKGRFTISRDNAKNTVYLQMNSLKPEDTAVYYCAAYNLYKQDYHYWGQGTQVTVSS

SEQ ID NO: 27841 - protein, 122 aa, Artificial Sequence
  Chemically Synthesized
QVQLQESGGGLVQAGGSLRLSCAASGTISRAGDMGWYRQAPGKERELVAAIDYGGTTYYADSVKGRFTISRDNAKNTVYLQMNSLKPEDTAVYYCAAWKKRYDDRRYYHRYWGQGTQVTVSS

SEQ ID NO: 27842 - protein, 118 aa, Artificial Sequence
  Chemically Synthesized
QVQLQESGGGLVQAGGSLRLSCAASGSISDDRDMGWYRQAPGKEREFVAAISYGSITNYADSVKGRFTISRDNAKNTVYLQMNSLKPEDTAVYYCAVDVQHSADHDYWGQGTQVTVSS

SEQ ID NO: 27843 - protein, 116 aa, Artificial Sequence
  Chemically Synthesized
QVQLQESGGGLVQAGGSLRLSCAASGTIFVTLPMGWYRQAPGKEREFVAAIGQGSTTYYADSVKGRFTISRDNAKNTVYLQMNSLKPEDTAVYYCAVYYNSSLRYWGQGTQVTVSS

SEQ ID NO: 27844 - protein, 117 aa, Artificial Sequence
  Chemically Synthesized
QVQLQESGGGLVQAGGSLRLSCAASGNISVYAYMGWYRQAPGKEREFVAAIDSVVLPYADSVKGRFTISRDNAKNTVYLQMNSLKPEDTAVYYCAVGYRYEPSLIYWGQGTQVTVSS

SEQ ID NO: 27845 - protein, 126 aa, Artificial Sequence
  Chemically Synthesized
QVQLQESGGGLVQAGGSLRLSCAASGTISARYIMGWYRQAPGKERELVASITTGGNTYYADSVKGRFTISRDNAKNTVYLQMNSLKPEDTAVYYCAVYTGRGTDDYGTVYPSHNYWGQGTQVTVSS

SEQ ID NO: 27846 - protein, 121 aa, Artificial Sequence
  Chemically Synthesized
QVQLQESGGGLVQAGGSLRLSCAASGSISNAPSMGWYRQAPGKEREFVAGIGSVVVPYADSVKGRFTISRDNAKNTVYLQMNSLKPEDTAVYYCAVPDPRGGTNIVAHDYWGQGTQVTVSS

SEQ ID NO: 27847 - protein, 118 aa, Artificial Sequence
  Chemically Synthesized
QVQLQESGGGLVQAGGSLRLSCAASGSISRLIRMGWYRQAPGKEREFVAAIGYGGTTNYADSVKGRFTISRDNAKNTVYLQMNSLKPEDTAVYYCAVWTRFTGVLYYWGQGTQVTVSS

SEQ ID NO: 27848 - protein, 126 aa, Artificial Sequence
  Chemically Synthesized
QVQLQESGGGLVQAGGSLRLSCAASGSISHQYVMGWYRQAPGKERELVAGISYGANTNYADSVKGRFTISRDNAKNTVYLQMNSLKPEDTAVYYCAVLVRTQAASYRQYLGRLAYWGQGTQVTVSS

SEQ ID NO: 27849 - protein, 119 aa, Artificial Sequence
  Chemically Synthesized
QVQLQESGGGLVQAGGSLRLSCAASGYIFYPYYMGWYRQAPGKERELVATIDWGGITNYADSVKGRFTISRDNAKNTVYLQMNSLKPEDTAVYYCAADSYIAVYAHGYWGQGTQVTVSS

SEQ ID NO: 27850 - protein, 118 aa, Artificial Sequence
  Chemically Synthesized
QVQLQESGGGLVQAGGSLRLSCAASGNIFGPYAMGWYRQAPGKEREFVASIDGGGITYYADSVKGRFTISRDNAKNTVYLQMNSLKPEDTAVYYCAATHTYGDVYSYWGQGTQVTVSS

SEQ ID NO: 27851 - protein, 122 aa, Artificial Sequence
  Chemically Synthesized
QVQLQESGGGLVQAGGSLRLSCAASGNIFYSDFMGWYRQAPGKEREFVATISGGTSTNYADSVKGRFTISRDNAKNTVYLQMNSLKPEDTAVYYCAVYRLEIYFRADYLRYWGQGTQVTVSS

SEQ ID NO: 27852 - protein, 123 aa, Artificial Sequence
  Chemically Synthesized
QVQLQESGGGLVQAGGSLRLSCAASGYIFGGRDMGWYRQAPGKEREFVASINTGGTTYYADSVKGRFTISRDNAKNTVYLQMNSLKPEDTAVYYCAVLQHDDDDPGGDYLNYWGQGTQVTVSS

SEQ ID NO: 27853 - protein, 118 aa, Artificial Sequence
  Chemically Synthesized
QVQLQESGGGLVQAGGSLRLSCAASGTISQDAYMGWYRQAPGKEREFVASIANGSNTYYADSVKGRFTISRDNAKNTVYLQMNSLKPEDTAVYYCAADLIRRGAYYYWGQGTQVTVSS

SEQ ID NO: 27854 - protein, 115 aa, Artificial Sequence
  Chemically Synthesized
QVQLQESGGGLVQAGGSLRLSCAASGYIPTMGWYRQAPGKERELVASIDGGSSTNYADSVKGRFTISRDNAKNTVYLQMNSLKPEDTAVYYCAAWRDSDDVLGYWGQGTQVTVSS

SEQ ID NO: 27855 - protein, 118 aa, Artificial Sequence
  Chemically Synthesized
QVQLQESGGGLVQAGGSLRLSCAASGYISAGAYMGWYRQAPGKEREFVAGIGAGSTTYYADSVKGRFTISRDNAKNTVYLQMNSLKPEDTAVYYCAAYPVGRVNFGYWGQGTQVTVSS

SEQ ID NO: 27856 - protein, 119 aa, Artificial Sequence
  Chemically Synthesized
QVQLQESGGGLVQAGGSLRLSCAASGYISPKYRMGWYRQAPGKERELVATIGAGSITNYADSVKGRFTISRDNAKNTVYLQMNSLKPEDTAVYYCADTSLYYYDNHDYWGQGTQVTVSS

SEQ ID NO: 27857 - protein, 123 aa, Artificial Sequence
  Chemically Synthesized
QVQLQESGGGLVQAGGSLRLSCAASGSISSWTMGWYRQAPGKERELLPLLMVVLIPYADSVKGRFTISRDNAKNTVYLQMNSLKPEDTAVYYCAVDTRTVGYGGFSGGLYTYWGQGTQVTVSS

SEQ ID NO: 27858 - protein, 122 aa, Artificial Sequence
  Chemically Synthesized
QVQLQESGGGLVQAGGSLRLSCAASGTIFYLYDMGWYRQAPGKERELVAGISRGATTNYADSVKGRFTISRDNAKNTVYLQMNSLKPEDTAVYYCAVDGRTYTDPGSVHGYWGQGTQVTVSS

SEQ ID NO: 27859 - protein, 118 aa, Artificial Sequence
  Chemically Synthesized
QVQLQESGGGLVQAGGSLRLSCAASGSISQFGRMGWYRQAPGKERELVASITGGASTYYADSVKGRFTISRDNAKNTVYLQMNSLKPEDTAVYYCAVRTYTYYNLQYWGQGTQVTVSS

SEQ ID NO: 27860 - protein, 118 aa, Artificial Sequence
  Chemically Synthesized
QVQLQESGGGLVQAGGSLRLSCAASGTIFLSGAMGWYRQAPGKERELVATISDGTITNYADSVKGRFTISRDNAKNTVYLQMNSLKPEDTAVYYCAADKQHDDTHAYWGQGTQVTVSS

SEQ ID NO: 27861 - protein, 121 aa, Artificial Sequence
  Chemically Synthesized
QVQLQESGGGLVQAGGSLRLSCAASGTISFSVMGWYRQAPGKEREFVATITGGGNTNYADSVKGRFTISRDNAKNTVYLQMNSLKPEDTAVYYCAAYSAYPITYLRNLLYWGQGTQVTVSS

SEQ ID NO: 27862 - protein, 118 aa, Artificial Sequence
  Chemically Synthesized
QVQLQESGGGLVQAGGSLRLSCAASGNISYPQTMGWYRQAPGKERELVASIGNGANTYYADSVKGRFTISRDNAKNTVYLQMNSLKPEDTAVYYCAVQILAPSGHAYWGQGTQVTVSS

SEQ ID NO: 27863 - protein, 121 aa, Artificial Sequence
  Chemically Synthesized
QVQLQESGGGLVQAGGSLRLSCAASGTISPDAAMGWYRQAPGKERELVATIAYGSNTNYADSVKGRFTISRDNAKNTVYLQMNSLKPEDTAVYYCAVSTTTSNRMTLLLYWGQGTQVTVSS

SEQ ID NO: 27864 - protein, 126 aa, Artificial Sequence
  Chemically Synthesized
QVQLQESGGGLVQAGGSLRLSCAASGSISPQSYMGWYRQAPGKERELVAAIGSGANTNYADSVKGRFTISRDNAKNTVYLQMNSLKPEDTAVYYCAVSDQTDYVDWDYKAYDFVYWGQGTQVTVSS

SEQ ID NO: 27865 - protein, 126 aa, Artificial Sequence
  Chemically Synthesized
QVQLQESGGGLVQAGGSLRLSCAASGSIFIYFAMGWYRQAPGKERELVASIANGSITNYADSVKGRFTISRDNAKNTVYLQMNSLKPEDTAVYYCAASDNIDRTRGRLQTGEHTYWGQGTQVTVSS

SEQ ID NO: 27866 - protein, 122 aa, Artificial Sequence
  Chemically Synthesized
QVQLQESGGGLVQAGGSLRLSCAASGYISDTLRMGWYRQAPGKERELVAAIDDGANTYYADSVKGRFTISRDNAKNTVYLQMNSLKPEDTAVYYCAVTFRYWDYDPNDYHYWGQGTQVTVSS

SEQ ID NO: 27867 - protein, 118 aa, Artificial Sequence
  Chemically Synthesized
QVQLQESGGGLVQAGGSLRLSCAASGYISARKSMGWYRQAPGKERELVAAIAVGGITNYADSVKGRFTISRDNAKNTVYLQMNSLKPEDTAVYYCAVWRVYFVPFAYWGQGTQVTVSS

SEQ ID NO: 27868 - protein, 118 aa, Artificial Sequence
  Chemically Synthesized
QVQLQESGGGLVQAGGSLRLSCAASGSISIDYLMGWYRQAPGKERELVAGIAYGTTTNYADSVKGRFTISRDNAKNTVYLQMNSLKPEDTAVYYCAAVGPYGNSYSYWGQGTQVTVSS

SEQ ID NO: 27869 - protein, 122 aa, Artificial Sequence
  Chemically Synthesized
QVQLQESGGGLVQAGGSLRLSCAASGSIFDYDPMGWYRQAPGKEREFVATINFGSNTNYADSVKGRFTISRDNAKNTVYLQMNSLKPEDTAVYYCAATSYVWTDFDYAFQYWGQGTQVTVSS

SEQ ID NO: 27870 - protein, 126 aa, Artificial Sequence
  Chemically Synthesized
QVQLQESGGGLVQAGGSLRLSCAASGNIFPVLPMGWYRQAPGKEREFVAAINAGTTTYYADSVKGRFTISRDNAKNTVYLQMNSLKPEDTAVYYCAAGNYNIDDYEDDLYANHPYWGQGTQVTVSS

SEQ ID NO: 27871 - protein, 122 aa, Artificial Sequence
  Chemically Synthesized
QVQLQESGGGLVQAGGSLRLSCAASGNISLPRNMGWYRQAPGKERELVATIDQGATTNYADSVKGRFTISRDNAKNTVYLQMNSLKPEDTAVYYCAAFITFSQRYLDYHHYWGQGTQVTVSS

SEQ ID NO: 27872 - protein, 126 aa, Artificial Sequence
  Chemically Synthesized
QVQLQESGGGLVQAGGSLRLSCAASGTIFGDVDMGWYRQAPGKEREFVATISSGGTTNYADSVKGRFTISRDNAKNTVYLQMNSLKPEDTAVYYCAVGDYTSRYKQPIVAVGLYYWGQGTQVTVSS

SEQ ID NO: 27873 - protein, 118 aa, Artificial Sequence
  Chemically Synthesized
QVQLQESGGGLVQAGGSLRLSCAASGNISPDLEMGWYRQAPGKEREFVATIDYGGTTNYADSVKGRFTISRDNAKNTVYLQMNSLKPEDTAVYYCAVATEVTVDHSYWGQGTQVTVSS

SEQ ID NO: 27874 - protein, 118 aa, Artificial Sequence
  Chemically Synthesized
QVQLQESGGGLVQAGGSLRLSCAASGSIFGATYMGWYRQAPGKEREFVAAISFGGNTNYADSVKGRFTISRDNAKNTVYLQMNSLKPEDTAVYYCAVSWWYSPDHWYWGQGTQVTVSS

SEQ ID NO: 27875 - protein, 122 aa, Artificial Sequence
  Chemically Synthesized
QVQLQESGGGLVQAGGSLRLSCAASGYIFGPVAMGWYRQAPGKERELVAGIGWGSTTNYADSVKGRFTISRDNAKNTVYLQMNSLKPEDTAVYYCAVAPYHYTIFYATYLYWGQGTQVTVSS

SEQ ID NO: 27876 - protein, 116 aa, Artificial Sequence
  Chemically Synthesized
QVQLQESGGGLVQAGGSLRLSCAASGNISWSSMGWYRQAPGKERELVASIDDGGVPYADSVKGRFTISRDNAKNTVYLQMNSLKPEDTAVYYCAVYGHSALPLYYWGQGTQVTVSS

SEQ ID NO: 27877 - protein, 122 aa, Artificial Sequence
  Chemically Synthesized
QVQLQESGGGLVQAGGSLRLSCAASGTIFTTVSMGWYRQAPGKEREFVATIGGGAITYYADSVKGRFTISRDNAKNTVYLQMNSLKPEDTAVYYCAVDADIPIYDGDWFDYWGQGTQVTVSS

SEQ ID NO: 27878 - protein, 118 aa, Artificial Sequence
  Chemically Synthesized
QVQLQESGGGLVQAGGSLRLSCAASGTISPIIKMGWYRQAPGKEREFVAAITQGTNTNYADSVKGRFTISRDNAKNTVYLQMNSLKPEDTAVYYCAASASHFGNHPYWGQGTQVTVSS

SEQ ID NO: 27879 - protein, 122 aa, Artificial Sequence
  Chemically Synthesized
QVQLQESGGGLVQAGGSLRLSCAASGTISQIIFMGWYRQAPGKEREFVASIGYGGTTYYADSVKGRFTISRDNAKNTVYLQMNSLKPEDTAVYYCAVYGRGYSWNWVKHTYWGQGTQVTVSS

SEQ ID NO: 27880 - protein, 118 aa, Artificial Sequence
  Chemically Synthesized
QVQLQESGGGLVQAGGSLRLSCAASGNISYIADMGWYRQAPGKEREFVATINVGGTTNYADSVKGRFTISRDNAKNTVYLQMNSLKPEDTAVYYCAVTSYAGGYHRYWGQGTQVTVSS

SEQ ID NO: 27881 - protein, 118 aa, Artificial Sequence
  Chemically Synthesized
QVQLQESGGGLVQAGGSLRLSCAASGNIFRFSNMGWYRQAPGKERELVAGISSGAITYYADSVKGRFTISRDNAKNTVYLQMNSLKPEDTAVYYCAVYHDTDQPYDYWGQGTQVTVSS

SEQ ID NO: 27882 - protein, 122 aa, Artificial Sequence
  Chemically Synthesized
QVQLQESGGGLVQAGGSLRLSCAASGNISFNDYMGWYRQAPGKERELVAGISLGSSTNYADSVKGRFTISRDNAKNTVYLQMNSLKPEDTAVYYCAAHTPATAVHVSPLSYWGQGTQVTVSS

SEQ ID NO: 27883 - protein, 122 aa, Artificial Sequence
  Chemically Synthesized
QVQLQESGGGLVQAGGSLRLSCAASGSISTYRRMGWYRQAPGKEREFVAAISPGANTYYADSVKGRFTISRDNAKNTVYLQMNSLKPEDTAVYYCAVTTEHSVPINIDYFYWGQGTQVTVSS

SEQ ID NO: 27884 - protein, 122 aa, Artificial Sequence
  Chemically Synthesized
QVQLQESGGGLVQAGGSLRLSCAASGNISYRFRMGWYRQAPGKERELVAAISNGGITNYADSVKGRFTISRDNAKNTVYLQMNSLKPEDTAVYYCAAYRYNVNHGRHYLGYWGQGTQVTVSS

SEQ ID NO: 27885 - protein, 116 aa, Artificial Sequence
  Chemically Synthesized
QVQLQESGGGLVQAGGSLRLSCAASGTIFDSRSMGWYRQAPGKEREFVASIAYGAIPYADSVKGRFTISRDNAKNTVYLQMNSLKPEDTAVYYCAVYYDRNSYPYWGQGTQVTVSS

SEQ ID NO: 27886 - protein, 118 aa, Artificial Sequence
  Chemically Synthesized
QVQLQESGGGLVQAGGSLRLSCAASGYISYIGSMGWYRQAPGKERELVAGIADGANTNYADSVKGRFTISRDNAKNTVYLQMNSLKPEDTAVYYCAARLGRNLGHDYWGQGTQVTVSS

SEQ ID NO: 27887 - protein, 118 aa, Artificial Sequence
  Chemically Synthesized
QVQLQESGGGLVQAGGSLRLSCAASGTIFGYYAMGWYRQAPGKEREFVATIASGSTTYYADSVKGRFTISRDNAKNTVYLQMNSLKPEDTAVYYCAVYVSQDYNFPYWGQGTQVTVSS

SEQ ID NO: 27888 - protein, 118 aa, Artificial Sequence
  Chemically Synthesized
QVQLQESGGGLVQAGGSLRLSCAASGNISYLYGMGWYRQAPGKEREFVAAIDFGTTTNYADSVKGRFTISRDNAKNTVYLQMNSLKPEDTAVYYCAVLRFGTVYLTYWGQGTQVTVSS

SEQ ID NO: 27889 - protein, 116 aa, Artificial Sequence
  Chemically Synthesized
QVQLQESGGGLVQAGGSLRLSCAASGNISYHWFMGWYRQAPGKEREFVAALMLVLLPYADSVKGRFTISRDNAKNTVYLQMNSLKPEDTAVYYCAVYIYPYQLRYWGQGTQVTVSS

SEQ ID NO: 27890 - protein, 118 aa, Artificial Sequence
  Chemically Synthesized
QVQLQESGGGLVQAGGSLRLSCAASGSISSLLYMGWYRQAPGKEREFVASITLGGITNYADSVKGRFTISRDNAKNTVYLQMNSLKPEDTAVYYCAAIIDVAGPHSYWGQGTQVTVSS

SEQ ID NO: 27891 - protein, 118 aa, Artificial Sequence
  Chemically Synthesized
QVQLQESGGGLVQAGGSLRLSCAASGTIFADDAMGWYRQAPGKERELVAAISDGGTTYYADSVKGRFTISRDNAKNTVYLQMNSLKPEDTAVYYCAVYYPSNVGHTYWGQGTQVTVSS

SEQ ID NO: 27892 - protein, 118 aa, Artificial Sequence
  Chemically Synthesized
QVQLQESGGGLVQAGGSLRLSCAASGSISVVWDMGWYRQAPGKEREFVATISSGGSTNYADSVKGRFTISRDNAKNTVYLQMNSLKPEDTAVYYCAADSRAEYTLDYWGQGTQVTVSS

SEQ ID NO: 27893 - protein, 115 aa, Artificial Sequence
  Chemically Synthesized
QVQLQESGGGLVQAGGSLRLSCAASGTISTSLVMGWYRQAPGKEREFVAGITEGTITNYADSVKGRFTISRDNAKNTVYLQMNSLKPEDTAVYYCAVYQYSFVYWGQGTQVTVSS

SEQ ID NO: 27894 - protein, 122 aa, Artificial Sequence
  Chemically Synthesized
QVQLQESGGGLVQAGGSLRLSCAASGNISYPRWMGWYRQAPGKEREFVAGIAVGAITNYADSVKGRFTISRDNAKNTVYLQMNSLKPEDTAVYYCAADRYHNGTVRVGLEYWGQGTQVTVSS

SEQ ID NO: 27895 - protein, 122 aa, Artificial Sequence
  Chemically Synthesized
QVQLQESGGGLVQAGGSLRLSCAASGSISRPTFMGWYRQAPGKEREFVASINQGGNTNYADSVKGRFTISRDNAKNTVYLQMNSLKPEDTAVYYCAAYRYDSSHSLDGFDYWGQGTQVTVSS

SEQ ID NO: 27896 - protein, 122 aa, Artificial Sequence
  Chemically Synthesized
QVQLQESGGGLVQAGGSLRLSCAASGTISTYVHMGWYRQAPGKERELVASINVGRYYQYADSVKGRFTISRDNAKNTVYLQMNSLKPEDTAVYYCAAVLDDYYDDVEAHYYWGQGTQVTVSS

SEQ ID NO: 27897 - protein, 122 aa, Artificial Sequence
  Chemically Synthesized
QVQLQESGGGLVQAGGSLRLSCAASGYISAEYDMGWYRQAPGKERELVASIDAGANTNYADSVKGRFTISRDNAKNTVYLQMNSLKPEDTAVYYCAAPVQLFWPDQWYHYYWGQGTQVTVSS

SEQ ID NO: 27898 - protein, 122 aa, Artificial Sequence
  Chemically Synthesized
QVQLQESGGGLVQAGGSLRLSCAASGSISDPWAMGWYRQAPGKERELVAAIGLGGTTNYADSVKGRFTISRDNAKNTVYLQMNSLKPEDTAVYYCAVFYRRPIRVVYYHAYWGQGTQVTVSS

SEQ ID NO: 27899 - protein, 118 aa, Artificial Sequence
  Chemically Synthesized
QVQLQESGGGLVQAGGSLRLSCAASGNIFIGKSMGWYRQAPGKEREFVASIGFGGSTYYADSVKGRFTISRDNAKNTVYLQMNSLKPEDTAVYYCAVEAGRYGYHGYWGQGTQVTVSS

SEQ ID NO: 27900 - protein, 118 aa, Artificial Sequence
  Chemically Synthesized
QVQLQESGGGLVQAGGSLRLSCAASGSIFPTVTMGWYRQAPGKEREFVAAIGPGATTYYADSVKGRFTISRDNAKNTVYLQMNSLKPEDTAVYYCAVTRYYYETYYYWGQGTQVTVSS

SEQ ID NO: 27901 - protein, 121 aa, Artificial Sequence
  Chemically Synthesized
QVQLQESGGGLVQAGGSLRLSCAASGSIFRFTEMGWYRQAPGKEREFVASISYGSTTYYADSVKGRFTISRDNAKNTVYLQMNSLKPEDTAVYYCAARGTRPWGGLHRFYWGQGTQVTVSS

SEQ ID NO: 27902 - protein, 118 aa, Artificial Sequence
  Chemically Synthesized
QVQLQESGGGLVQAGGSLRLSCAASGNIFGIYYMGWYRQAPGKERELVAAISDGGSTYYADSVKGRFTISRDNAKNTVYLQMNSLKPEDTAVYYCAAFVYVYVVLDYWGQGTQVTVSS

SEQ ID NO: 27903 - protein, 118 aa, Artificial Sequence
  Chemically Synthesized
QVQLQESGGGLVQAGGSLRLSCAASGYIFRYEHMGWYRQAPGKEREFVASIARGGNTNYADSVKGRFTISRDNAKNTVYLQMNSLKPEDTAVYYCAVRDYYDSSFDYWGQGTQVTVSS

SEQ ID NO: 27904 - protein, 125 aa, Artificial Sequence
  Chemically Synthesized
QVQLQESGGGLVQAGGSLRLSCAASGTFLLLLMGWYRQAPGKERELVATITRGSTTYYADSVKGRFTISRDNAKNTVYLQMNSLKPEDTAVYYCAVVLYEWSYGDTSDSSSFRYWGQGTQVTVSS

SEQ ID NO: 27905 - protein, 118 aa, Artificial Sequence
  Chemically Synthesized
QVQLQESGGGLVQAGGSLRLSCAASGSISETGVMGWYRQAPGKEREFVAAITAGTSTYYADSVKGRFTISRDNAKNTVYLQMNSLKPEDTAVYYCAAWNYSRTTYSYWGQGTQVTVSS

SEQ ID NO: 27906 - protein, 117 aa, Artificial Sequence
  Chemically Synthesized
QVQLQESGGGLVQAGGSLRLSCAASGTILVGLMGWYRQAPGKERELVASIDRGGSTYYADSVKGRFTISRDNAKNTVYLQMNSLKPEDTAVYYCAALDPYGAYHYYWGQGTQVTVSS

SEQ ID NO: 27907 - protein, 118 aa, Artificial Sequence
  Chemically Synthesized
QVQLQESGGGLVQAGGSLRLSCAASGSISYYYHMGWYRQAPGKERELVATISSGANTNYADSVKGRFTISRDNAKNTVYLQMNSLKPEDTAVYYCAASYYTYDVFSYWGQGTQVTVSS

SEQ ID NO: 27908 - protein, 118 aa, Artificial Sequence
  Chemically Synthesized
QVQLQESGGGLVQAGGSLRLSCAASGYIFAGALMGWYRQAPGKEREFVATIGKGATTYYADSVKGRFTISRDNAKNTVYLQMNSLKPEDTAVYYCAADGNDYDLYGYWGQGTQVTVSS

SEQ ID NO: 27909 - protein, 121 aa, Artificial Sequence
  Chemically Synthesized
QVQLQESGGGLVQAGGSLRLSCAASGNISAVPDMGWYRQAPGKERELVATIGGGTTNYADSVKGRFTISRDNAKNTVYLQMNSLKPEDTAVYYCAVKWDGKNSISVLHIYWGQGTQVTVSS

SEQ ID NO: 27910 - protein, 122 aa, Artificial Sequence
  Chemically Synthesized
QVQLQESGGGLVQAGGSLRLSCAASGTISYFGYMGWYRQAPGKERELVASIGPGGSTYYADSVKGRFTISRDNAKNTVYLQMNSLKPEDTAVYYCAAYYYGRDLFGGTHYYWGQGTQVTVSS

SEQ ID NO: 27911 - protein, 126 aa, Artificial Sequence
  Chemically Synthesized
QVQLQESGGGLVQAGGSLRLSCAASGTISQDVVMGWYRQAPGKERELVAAIDIGGSTNYADSVKGRFTISRDNAKNTVYLQMNSLKPEDTAVYYCAVAASLSDLTVVLTAYNFTYWGQGTQVTVSS

SEQ ID NO: 27912 - protein, 120 aa, Artificial Sequence
  Chemically Synthesized
QVQLQESGGGLVQAGGSLRLSCAASGNIFTVRMGWYRQAPGKERELLPVLVLVLVPYADSVKGRFTISRDNAKNTVYLQMNSLKPEDTAVYYCAADTRGSELSWYAHLYWGQGTQVTVSS

SEQ ID NO: 27913 - protein, 122 aa, Artificial Sequence
  Chemically Synthesized
QVQLQESGGGLVQAGGSLRLSCAASGYISYSDFMGWYRQAPGKERELVATIDYGGSTYYADSVKGRFTISRDNAKNTVYLQMNSLKPEDTAVYYCAVIYDDGRYYSTAHQYWGQGTQVTVSS

SEQ ID NO: 27914 - protein, 126 aa, Artificial Sequence
  Chemically Synthesized
QVQLQESGGGLVQAGGSLRLSCAASGSISARWYMGWYRQAPGKERELVASISRGSNTNYADSVKGRFTISRDNAKNTVYLQMNSLKPEDTAVYYCAAYVSIQILYVDYRDYQHDYWGQGTQVTVSS

SEQ ID NO: 27915 - protein, 118 aa, Artificial Sequence
  Chemically Synthesized
QVQLQESGGGLVQAGGSLRLSCAASGSISYGSDMGWYRQAPGKERELVATINYGASTNYADSVKGRFTISRDNAKNTVYLQMNSLKPEDTAVYYCAAYDYATYSHEYWGQGTQVTVSS

SEQ ID NO: 27916 - protein, 121 aa, Artificial Sequence
  Chemically Synthesized
QVQLQESGGGLVQAGGSLRLSCAASGTILCRRMGWYRQAPGKEREFVAGISWGSITYYADSVKGRFTISRDNAKNTVYLQMNSLKPEDTAVYYCAVPSNLGYRDDVYYDYWGQGTQVTVSS

SEQ ID NO: 27917 - protein, 126 aa, Artificial Sequence
  Chemically Synthesized
QVQLQESGGGLVQAGGSLRLSCAASGTIFQYTWMGWYRQAPGKEREFVASIGGGGTTYYADSVKGRFTISRDNAKNTVYLQMNSLKPEDTAVYYCAAFDGAVPSYTLFDPYNLPYWGQGTQVTVSS

SEQ ID NO: 27918 - protein, 125 aa, Artificial Sequence
  Chemically Synthesized
QVQLQESGGGLVQAGGSLRLSCAASGTIFANWLMGWYRQAPGKERELVATITTGSNTNYADSVKGRFTISRDNAKNTVYLQMNSLKPEDTAVYYCAARDSFYSTVTDGYRSVLYWGQGTQVTVSS

SEQ ID NO: 27919 - protein, 126 aa, Artificial Sequence
  Chemically Synthesized
QVQLQESGGGLVQAGGSLRLSCAASGSISSSAYMGWYRQAPGKERELVATIALGTSTNYADSVKGRFTISRDNAKNTVYLQMNSLKPEDTAVYYCAVDYWGDAVSYRGARYYFYYWGQGTQVTVSS

SEQ ID NO: 27920 - protein, 118 aa, Artificial Sequence
  Chemically Synthesized
QVQLQESGGGLVQAGGSLRLSCAASGSIFTCLRMGWYRQAPGKEREFVAAIDWGTSTNYADSVKGRFTISRDNAKNTVYLQMNSLKPEDTAVYYCAANYVLGYYFLYWGQGTQVTVSS

SEQ ID NO: 27921 - protein, 126 aa, Artificial Sequence
  Chemically Synthesized
QVQLQESGGGLVQAGGSLRLSCAASGTIFGDPFMGWYRQAPGKERELVASINQGGNTYYADSVKGRFTISRDNAKNTVYLQMNSLKPEDTAVYYCAAVYSSQNHPNRGALRFHSYWGQGTQVTVSS

SEQ ID NO: 27922 - protein, 122 aa, Artificial Sequence
  Chemically Synthesized
QVQLQESGGGLVQAGGSLRLSCAASGYIFRTRYMGWYRQAPGKEREFVAAIADGTTTNYADSVKGRFTISRDNAKNTVYLQMNSLKPEDTAVYYCAAYYLTWYTDQHQHPYWGQGTQVTVSS

SEQ ID NO: 27923 - protein, 119 aa, Artificial Sequence
  Chemically Synthesized
QVQLQESGGGLVQAGGSLRLSCAASGNIFPSGQMGWYRQAPGKERELVAAIGQGPYADSVKGRFTISRDNAKNTVYLQMNSLKPEDTAVYYCAAYNYIDYGYRYSYAYWGQGTQVTVSS

SEQ ID NO: 27924 - protein, 122 aa, Artificial Sequence
  Chemically Synthesized
QVQLQESGGGLVQAGGSLRLSCAASGYIFYDQVMGWYRQAPGKERELVAGITPGSITYYADSVKGRFTISRDNAKNTVYLQMNSLKPEDTAVYYCAVTDGGDNGGPYPHVYWGQGTQVTVSS

SEQ ID NO: 27925 - protein, 122 aa, Artificial Sequence
  Chemically Synthesized
QVQLQESGGGLVQAGGSLRLSCAASGTISGNRYMGWYRQAPGKEREFVATIDGGTTTYYADSVKGRFTISRDNAKNTVYLQMNSLKPEDTAVYYCAVRRDRQQDLDTDHSYWGQGTQVTVSS

SEQ ID NO: 27926 - protein, 118 aa, Artificial Sequence
  Chemically Synthesized
QVQLQESGGGLVQAGGSLRLSCAASGNISGPLWMGWYRQAPGKEREFVAGIDGGTTTYYADSVKGRFTISRDNAKNTVYLQMNSLKPEDTAVYYCAVTSPIKTALVYWGQGTQVTVSS

SEQ ID NO: 27927 - protein, 118 aa, Artificial Sequence
  Chemically Synthesized
QVQLQESGGGLVQAGGSLRLSCAASGSIFPSRAMGWYRQAPGKERELVASIDAGGSTYYADSVKGRFTISRDNAKNTVYLQMNSLKPEDTAVYYCAVVNGVYQSHNYWGQGTQVTVSS

SEQ ID NO: 27928 - protein, 118 aa, Artificial Sequence
  Chemically Synthesized
QVQLQESGGGLVQAGGSLRLSCAASGYISRLPDMGWYRQAPGKEREFVAAITAGGNTYYADSVKGRFTISRDNAKNTVYLQMNSLKPEDTAVYYCAALDGRDAGLDYWGQGTQVTVSS

SEQ ID NO: 27929 - protein, 118 aa, Artificial Sequence
  Chemically Synthesized
QVQLQESGGGLVQAGGSLRLSCAASGSIFNVSPMGWYRQAPGKERELVATIDTGTTTYYADSVKGRFTISRDNAKNTVYLQMNSLKPEDTAVYYCAVRYRGYTRFSYWGQGTQVTVSS

SEQ ID NO: 27930 - protein, 117 aa, Artificial Sequence
  Chemically Synthesized
QVQLQESGGGLVQAGGSLRLSCAASGNISEADIMGWYRQAPGKEREFVASIDGGSSTYYADSVKGRFTISRDNAKNTVYLQMNSLKPEDTAVYYCALSTNTWTLLYWGQGTQVTVSS

SEQ ID NO: 27931 - protein, 117 aa, Artificial Sequence
  Chemically Synthesized
QVQLQESGGGLVQAGGSLRLSCAASGTISPLDSMGWYRQAPGKEREFVPVLVLVVLPYADSVKGRFTISRDNAKNTVYLQMNSLKPEDTAVYYCAVTRYAVRSYYYWGQGTQVTVSS

SEQ ID NO: 27932 - protein, 121 aa, Artificial Sequence
  Chemically Synthesized
QVQLQESGGGLVQAGGSLRLSCAASGYIFGNYSMGWYRQAPGKEREFVAAIATGGLPYADSVKGRFTISRDNAKNTVYLQMNSLKPEDTAVYYCAAHPSEVSDKSDLLDYWGQGTQVTVSS

SEQ ID NO: 27933 - protein, 118 aa, Artificial Sequence
  Chemically Synthesized
QVQLQESGGGLVQAGGSLRLSCAASGTISPGLHMGWYRQAPGKEREFVAGIAYGGTTYYADSVKGRFTISRDNAKNTVYLQMNSLKPEDTAVYYCAAHDYVRKSHSYWGQGTQVTVSS

SEQ ID NO: 27934 - protein, 126 aa, Artificial Sequence
  Chemically Synthesized
QVQLQESGGGLVQAGGSLRLSCAASGSIFYPFYMGWYRQAPGKERELVAAITVGGSTYYADSVKGRFTISRDNAKNTVYLQMNSLKPEDTAVYYCAVVDGTPRWVPRAYAYQLTYWGQGTQVTVSS

SEQ ID NO: 27935 - protein, 126 aa, Artificial Sequence
  Chemically Synthesized
QVQLQESGGGLVQAGGSLRLSCAASGTIFWAVGMGWYRQAPGKEREFVAAIAAGSTTYYADSVKGRFTISRDNAKNTVYLQMNSLKPEDTAVYYCAAYTHATSSGQAFSDHTHDYWGQGTQVTVSS

SEQ ID NO: 27936 - protein, 122 aa, Artificial Sequence
  Chemically Synthesized
QVQLQESGGGLVQAGGSLRLSCAASGSISTPIYMGWYRQAPGKEREFVAGIASGTTTYYADSVKGRFTISRDNAKNTVYLQMNSLKPEDTAVYYCAARQNYIRDRVASHDYWGQGTQVTVSS

SEQ ID NO: 27937 - protein, 118 aa, Artificial Sequence
  Chemically Synthesized
QVQLQESGGGLVQAGGSLRLSCAASGNISSRADMGWYRQAPGKEREFVASIGYGGSTYYADSVKGRFTISRDNAKNTVYLQMNSLKPEDTAVYYCAALGLQPRRYQYWGQGTQVTVSS

SEQ ID NO: 27938 - protein, 118 aa, Artificial Sequence
  Chemically Synthesized
QVQLQESGGGLVQAGGSLRLSCAASGYIFRPSAMGWYRQAPGKERELVATIARGATTNYADSVKGRFTISRDNAKNTVYLQMNSLKPEDTAVYYCAADAKHAYGYYYWGQGTQVTVSS

SEQ ID NO: 27939 - protein, 117 aa, Artificial Sequence
  Chemically Synthesized
QVQLQESGGGLVQAGGSLRLSCAASGSISDRAPMGWYRQAPGKERELVAAINFGAITYYADSVKGRFTISRDNAKNTVYLQMNSLKPEDTAVYYCAAPTLDQNHLYWGQGTQVTVSS

SEQ ID NO: 27940 - protein, 116 aa, Artificial Sequence
  Chemically Synthesized
QVQLQESGGGLVQAGGSLRLSCAASGYISWRGDMGWYRQAPGKERELVATIDGGSITYYADSVKGRFTISRDNAKNTVYLQMNSLKPEDTAVYYCATPSYLPHPYWGQGTQVTVSS

SEQ ID NO: 27941 - protein, 126 aa, Artificial Sequence
  Chemically Synthesized
QVQLQESGGGLVQAGGSLRLSCAASGYIFGSAPMGWYRQAPGKERELVAAINVGSITYYADSVKGRFTISRDNAKNTVYLQMNSLKPEDTAVYYCAVPSYTDRAPQPSSYRRHIYWGQGTQVTVSS

SEQ ID NO: 27942 - protein, 118 aa, Artificial Sequence
  Chemically Synthesized
QVQLQESGGGLVQAGGSLRLSCAASGTISIELPMGWYRQAPGKERELVAGITDGGSTNYADSVKGRFTISRDNAKNTVYLQMNSLKPEDTAVYYCAARLASSHYLEYWGQGTQVTVSS

SEQ ID NO: 27943 - protein, 118 aa, Artificial Sequence
  Chemically Synthesized
QVQLQESGGGLVQAGGSLRLSCAASGNISNVIIMGWYRQAPGKEREFVAGINYGATTYYADSVKGRFTISRDNAKNTVYLQMNSLKPEDTAVYYCAASHTDTLLHRYWGQGTQVTVSS

SEQ ID NO: 27944 - protein, 116 aa, Artificial Sequence
  Chemically Synthesized
QVQLQESGGGLVQAGGSLRLSCAASGTISAGMGWYRQAPGKERELVATIGYGASTNYADSVKGRFTISRDNAKNTVYLQMNSLKPEDTAVYYCAALITRREILRYWGQGTQVTVSS

SEQ ID NO: 27945 - protein, 118 aa, Artificial Sequence
  Chemically Synthesized
QVQLQESGGGLVQAGGSLRLSCAASGNIFSGYAMGWYRQAPGKERELVAAIGSGAITYYADSVKGRFTISRDNAKNTVYLQMNSLKPEDTAVYYCAVQDRNGRRHPYWGQGTQVTVSS

SEQ ID NO: 27946 - protein, 118 aa, Artificial Sequence
  Chemically Synthesized
QVQLQESGGGLVQAGGSLRLSCAASGYIFDNTVMGWYRQAPGKEREFVAGIDLGANTNYADSVKGRFTISRDNAKNTVYLQMNSLKPEDTAVYYCAVQYRNGRRHPYWGQGTQVTVSS

SEQ ID NO: 27947 - protein, 122 aa, Artificial Sequence
  Chemically Synthesized
QVQLQESGGGLVQAGGSLRLSCAASGNISAGFSMGWYRQAPGKEREFVAGIDLGSTTYYADSVKGRFTISRDNAKNTVYLQMNSLKPEDTAVYYCAVRSETLRWSDSLHGYWGQGTQVTVSS

SEQ ID NO: 27948 - protein, 117 aa, Artificial Sequence
  Chemically Synthesized
QVQLQESGGGLVQAGGSLRLSCAASGSIFQLSMGWYRQAPGKERELVASIGGGTSTYYADSVKGRFTISRDNAKNTVYLQMNSLKPEDTAVYYCAAYRLDLTNYPYWGQGTQVTVSS

SEQ ID NO: 27949 - protein, 117 aa, Artificial Sequence
  Chemically Synthesized
QVQLQESGGGLVQAGGSLRLSCAASGTISYDDNMGWYRQAPGKEREFVAGITAGGITNYADSVKGRFTISRDNAKNTVYLQMNSLKPEDTAVYYCAATWTTSLTIYWGQGTQVTVSS

SEQ ID NO: 27950 - protein, 118 aa, Artificial Sequence
  Chemically Synthesized
QVQLQESGGGLVQAGGSLRLSCAASGTISDKSNMGWYRQAPGKEREFVATITGGTNTNYADSVKGRFTISRDNAKNTVYLQMNSLKPEDTAVYYCAVDISYDDRLDYWGQGTQVTVSS

SEQ ID NO: 27951 - protein, 117 aa, Artificial Sequence
  Chemically Synthesized
QVQLQESGGGLVQAGGSLRLSCAASGNISNHLMGWYRQAPGKERELVAAISTGAITYYADSVKGRFTISRDNAKNTVYLQMNSLKPEDTAVYYCAAADSLYEGFAYWGQGTQVTVSS

SEQ ID NO: 27952 - protein, 118 aa, Artificial Sequence
  Chemically Synthesized
QVQLQESGGGLVQAGGSLRLSCAASGSISGSIYMGWYRQAPGKEREFVAGIAQGSSTYYADSVKGRFTISRDNAKNTVYLQMNSLKPEDTAVYYCAANNTGDPLFSYWGQGTQVTVSS

SEQ ID NO: 27953 - protein, 126 aa, Artificial Sequence
  Chemically Synthesized
QVQLQESGGGLVQAGGSLRLSCAASGTIFSQTEMGWYRQAPGKEREFVASIDYGSTTNYADSVKGRFTISRDNAKNTVYLQMNSLKPEDTAVYYCAVLLYLWLGYHGPKYPYLDYWGQGTQVTVSS

SEQ ID NO: 27954 - protein, 118 aa, Artificial Sequence
  Chemically Synthesized
QVQLQESGGGLVQAGGSLRLSCAASGTIFYLIFMGWYRQAPGKEREFVATINVGGNTNYADSVKGRFTISRDNAKNTVYLQMNSLKPEDTAVYYCAVTRFRYGRLSYWGQGTQVTVSS

SEQ ID NO: 27955 - protein, 118 aa, Artificial Sequence
  Chemically Synthesized
QVQLQESGGGLVQAGGSLRLSCAASGNISDYAVMGWYRQAPGKEREFVAAIDYGTTTNYADSVKGRFTISRDNAKNTVYLQMNSLKPEDTAVYYCAVSDYLDDPHLYWGQGTQVTVSS

SEQ ID NO: 27956 - protein, 117 aa, Artificial Sequence
  Chemically Synthesized
QVQLQESGGGLVQAGGSLRLSCAASGNIFYSYYMGWYRQAPGKEREFVATINKGGTTYYADSVKGRFTISRDNAKNTVYLQMNSLKPEDTAVYYCAAYRFIRYHWYWGQGTQVTVSS

SEQ ID NO: 27957 - protein, 126 aa, Artificial Sequence
  Chemically Synthesized
QVQLQESGGGLVQAGGSLRLSCAASGSIFYTPPMGWYRQAPGKEREFVATIAFGTNTYYADSVKGRFTISRDNAKNTVYLQMNSLKPEDTAVYYCAVGWDPTPYDGGAAYYPHDYWGQGTQVTVSS

SEQ ID NO: 27958 - protein, 120 aa, Artificial Sequence
  Chemically Synthesized
QVQLQESGGGLVQAGGSLRLSCAASGTIFYTASMGWYRQAPGKEREFVATIGPGGTTYYADSVKGRFTISRDNAKNTVYLQMNSLKPEDTAVYYCAVDRTDDLSVVTMYWGQGTQVTVSS

SEQ ID NO: 27959 - protein, 122 aa, Artificial Sequence
  Chemically Synthesized
QVQLQESGGGLVQAGGSLRLSCAASGTIFLDYPMGWYRQAPGKEREFVATISRGATTYYADSVKGRFTISRDNAKNTVYLQMNSLKPEDTAVYYCAVVYYDPHSSYGQLAYWGQGTQVTVSS

SEQ ID NO: 27960 - protein, 122 aa, Artificial Sequence
  Chemically Synthesized
QVQLQESGGGLVQAGGSLRLSCAASGNIFAYYVMGWYRQAPGKEREFVATISVGATTNYADSVKGRFTISRDNAKNTVYLQMNSLKPEDTAVYYCAAISRIDDFDDLDLAYWGQGTQVTVSS

SEQ ID NO: 27961 - protein, 118 aa, Artificial Sequence
  Chemically Synthesized
QVQLQESGGGLVQAGGSLRLSCAASGTISHIDYMGWYRQAPGKERELVATIDDGSTTNYADSVKGRFTISRDNAKNTVYLQMNSLKPEDTAVYYCAVDVVSYNSHGYWGQGTQVTVSS

SEQ ID NO: 27962 - protein, 118 aa, Artificial Sequence
  Chemically Synthesized
QVQLQESGGGLVQAGGSLRLSCAASGTISRHAYMGWYRQAPGKERELVAAINFGSSTYYADSVKGRFTISRDNAKNTVYLQMNSLKPEDTAVYYCAVIGNHVYHFHYWGQGTQVTVSS

SEQ ID NO: 27963 - protein, 117 aa, Artificial Sequence
  Chemically Synthesized
QVQLQESGGGLVQAGGSLRLSCAASGSIFAVTSMGWYRQAPGKEREFVASINTGAITNYADSVKGRFTISRDNAKNTVYLQMNSLKPEDTAVYYCAVNRLWDDSLYWGQGTQVTVSS

SEQ ID NO: 27964 - protein, 112 aa, Artificial Sequence
  Chemically Synthesized
QVQLQESGGGLVQAGGSLRLSCAASGSISDYYIMGWYRQAPGKEREFVATIPYADSVKGRFTISRDNAKNTVYLQMNSLKPEDTAVYYCAVGVRADDFHLYWGQGTQVTVSS

SEQ ID NO: 27965 - protein, 118 aa, Artificial Sequence
  Chemically Synthesized
QVQLQESGGGLVQAGGSLRLSCAASGSISDFPEMGWYRQAPGKEREFVAGITTGSTTNYADSVKGRFTISRDNAKNTVYLQMNSLKPEDTAVYYCAAYTGVYDNFRYWGQGTQVTVSS

SEQ ID NO: 27966 - protein, 118 aa, Artificial Sequence
  Chemically Synthesized
QVQLQESGGGLVQAGGSLRLSCAASGSISRYASMGWYRQAPGKERELVATISAGSTTNYADSVKGRFTISRDNAKNTVYLQMNSLKPEDTAVYYCAVVYAKKSRYVYWGQGTQVTVSS

SEQ ID NO: 27967 - protein, 122 aa, Artificial Sequence
  Chemically Synthesized
QVQLQESGGGLVQAGGSLRLSCAASGSIFYPYWMGWYRQAPGKERELVASIDVGASTYYADSVKGRFTISRDNAKNTVYLQMNSLKPEDTAVYYCAVDSDEYQYDYLVHAYWGQGTQVTVSS

SEQ ID NO: 27968 - protein, 122 aa, Artificial Sequence
  Chemically Synthesized
QVQLQESGGGLVQAGGSLRLSCAASGNISYYTGMGWYRQAPGKERELVAGIDAGGSTYYADSVKGRFTISRDNAKNTVYLQMNSLKPEDTAVYYCAAYVYFLYRTDYVHPYWGQGTQVTVSS

SEQ ID NO: 27969 - protein, 126 aa, Artificial Sequence
  Chemically Synthesized
QVQLQESGGGLVQAGGSLRLSCAASGSIFARYVMGWYRQAPGKEREFVASINGGGITNYADSVKGRFTISRDNAKNTVYLQMNSLKPEDTAVYYCAAGDDAPVDSYDADPDTHRYWGQGTQVTVSS

SEQ ID NO: 27970 - protein, 118 aa, Artificial Sequence
  Chemically Synthesized
QVQLQESGGGLVQAGGSLRLSCAASGNISSDYIMGWYRQAPGKEREFVAGIAHGANTYYADSVKGRFTISRDNAKNTVYLQMNSLKPEDTAVYYCAVHSWPQAYHNYWGQGTQVTVSS

SEQ ID NO: 27971 - protein, 122 aa, Artificial Sequence
  Chemically Synthesized
QVQLQESGGGLVQAGGSLRLSCAASGTIFYDTFMGWYRQAPGKERELVASIASGGNTNYADSVKGRFTISRDNAKNTVYLQMNSLKPEDTAVYYCAVPRDDAILYGAALPYWGQGTQVTVSS

SEQ ID NO: 27972 - protein, 122 aa, Artificial Sequence
  Chemically Synthesized
QVQLQESGGGLVQAGGSLRLSCAASGTISGSWYMGWYRQAPGKERELVATIAAGSNTNYADSVKGRFTISRDNAKNTVYLQMNSLKPEDTAVYYCAAWGDGWDTRDISHPYWGQGTQVTVSS

SEQ ID NO: 27973 - protein, 118 aa, Artificial Sequence
  Chemically Synthesized
QVQLQESGGGLVQAGGSLRLSCAASGTISPVTYMGWYRQAPGKEREFVASIDGGSNTYYADSVKGRFTISRDNAKNTVYLQMNSLKPEDTAVYYCAVIFPADDALVYWGQGTQVTVSS

SEQ ID NO: 27974 - protein, 122 aa, Artificial Sequence
  Chemically Synthesized
QVQLQESGGGLVQAGGSLRLSCAASGSISGTADMGWYRQAPGKERELVAGIDNGANTYYADSVKGRFTISRDNAKNTVYLQMNSLKPEDTAVYYCAVDQGGSGNWGRPHAYWGQGTQVTVSS

SEQ ID NO: 27975 - protein, 122 aa, Artificial Sequence
  Chemically Synthesized
QVQLQESGGGLVQAGGSLRLSCAASGNIFVYYGMGWYRQAPGKERELVATITPGSNTYYADSVKGRFTISRDNAKNTVYLQMNSLKPEDTAVYYCAARHRLVPPRYGVYLYWGQGTQVTVSS

SEQ ID NO: 27976 - protein, 118 aa, Artificial Sequence
  Chemically Synthesized
QVQLQESGGGLVQAGGSLRLSCAASGNISTYGRMGWYRQAPGKEREFVASIGQGANTNYADSVKGRFTISRDNAKNTVYLQMNSLKPEDTAVYYCAAAWDGIRSFDYWGQGTQVTVSS

SEQ ID NO: 27977 - protein, 117 aa, Artificial Sequence
  Chemically Synthesized
QVQLQESGGGLVQAGGSLRLSCAASGTIFPDVPMGWYRQAPGKEREFVAAIAEGGSTYYADSVKGRFTISRDNAKNTVYLQMNSLKPEDTAVYYCAVERVDPDAHYWGQGTQVTVSS

SEQ ID NO: 27978 - protein, 122 aa, Artificial Sequence
  Chemically Synthesized
QVQLQESGGGLVQAGGSLRLSCAASGYIFHTAGMGWYRQAPGKEREFVAGITNGATTYYADSVKGRFTISRDNAKNTVYLQMNSLKPEDTAVYYCAAYRGYRNHGPAVLVYWGQGTQVTVSS

SEQ ID NO: 27979 - protein, 116 aa, Artificial Sequence
  Chemically Synthesized
QVQLQESGGGLVQAGGSLRLSCAASGSISYSKMGWYRQAPGKEREFVAAISSGGTTNYADSVKGRFTISRDNAKNTVYLQMNSLKPEDTAVYYCAVGFTLRYHYYWGQGTQVTVSS

SEQ ID NO: 27980 - protein, 118 aa, Artificial Sequence
  Chemically Synthesized
QVQLQESGGGLVQAGGSLRLSCAASGTISYGYSMGWYRQAPGKEREFVAGIDSGSITYYADSVKGRFTISRDNAKNTVYLQMNSLKPEDTAVYYCAAVYLYDAAHDYWGQGTQVTVSS

SEQ ID NO: 27981 - protein, 122 aa, Artificial Sequence
  Chemically Synthesized
QVQLQESGGGLVQAGGSLRLSCAASGNIFALTQMGWYRQAPGKERELVAGIATGSTTNYADSVKGRFTISRDNAKNTVYLQMNSLKPEDTAVYYCAVYDDSFYRDDDAFQYWGQGTQVTVSS

SEQ ID NO: 27982 - protein, 109 aa, Artificial Sequence
  Chemically Synthesized
QVQLQESGGGLVQAGGSLRLSCAASGSISFYSTMGWYRQAPGKERELTYYADSVKGRFTISRDNAKNTVYLQMNSLKPEDTAVYYCAVGLTYTVAFHYWGQGTQVTVSS

SEQ ID NO: 27983 - protein, 117 aa, Artificial Sequence
  Chemically Synthesized
QVQLQESGGGLVQAGGSLRLSCAASGSIFPSKMGWYRQAPGKEREFVASIDSGGITYYADSVKGRFTISRDNAKNTVYLQMNSLKPEDTAVYYCAAYTWLQQGFPYWGQGTQVTVSS

SEQ ID NO: 27984 - protein, 118 aa, Artificial Sequence
  Chemically Synthesized
QVQLQESGGGLVQAGGSLRLSCAASGNIFFPWTMGWYRQAPGKEREFVAAINSGSTTYYADSVKGRFTISRDNAKNTVYLQMNSLKPEDTAVYYCAALVSDLDDFYYWGQGTQVTVSS

SEQ ID NO: 27985 - protein, 118 aa, Artificial Sequence
  Chemically Synthesized
QVQLQESGGGLVQAGGSLRLSCAASGTISFAYAMGWYRQAPGKEREFVATIDSGSITNYADSVKGRFTISRDNAKNTVYLQMNSLKPEDTAVYYCAVDSGSDPPFYYWGQGTQVTVSS

SEQ ID NO: 27986 - protein, 117 aa, Artificial Sequence
  Chemically Synthesized
QVQLQESGGGLVQAGGSLRLSCAASGYIFARYGMGWYRQAPGKEREFVAAISIVVIPYADSVKGRFTISRDNAKNTVYLQMNSLKPEDTAVYYCAVALNRYWVHSYWGQGTQVTVSS

SEQ ID NO: 27987 - protein, 122 aa, Artificial Sequence
  Chemically Synthesized
QVQLQESGGGLVQAGGSLRLSCAASGYISPGGSMGWYRQAPGKEREFVAAIAHGATTYYADSVKGRFTISRDNAKNTVYLQMNSLKPEDTAVYYCAARGRWWYGWNRDHWYWGQGTQVTVSS

SEQ ID NO: 27988 - protein, 118 aa, Artificial Sequence
  Chemically Synthesized
QVQLQESGGGLVQAGGSLRLSCAASGSISATGLMGWYRQAPGKEREFVAGIGNGSITYYADSVKGRFTISRDNAKNTVYLQMNSLKPEDTAVYYCAVFDDYSVTHDYWGQGTQVTVSS

SEQ ID NO: 27989 - protein, 118 aa, Artificial Sequence
  Chemically Synthesized
QVQLQESGGGLVQAGGSLRLSCAASGYISQYGLMGWYRQAPGKERELVASIDTGAITYYADSVKGRFTISRDNAKNTVYLQMNSLKPEDTAVYYCAARGASNYYHGYWGQGTQVTVSS

SEQ ID NO: 27990 - protein, 117 aa, Artificial Sequence
  Chemically Synthesized
QVQLQESGGGLVQAGGSLRLSCAASGYISGNPNMGWYRQAPGKERELVAGIGNGGSTYYADSVKGRFTISRDNAKNTVYLQMNSLKPEDTAVYYCAADTDTFLFHYWGQGTQVTVSS

SEQ ID NO: 27991 - protein, 118 aa, Artificial Sequence
  Chemically Synthesized
QVQLQESGGGLVQAGGSLRLSCAASGTIFAVIVMGWYRQAPGKEREFVAAIGDGGTTNYADSVKGRFTISRDNAKNTVYLQMNSLKPEDTAVYYCAVGIAITPYLPYWGQGTQVTVSS

SEQ ID NO: 27992 - protein, 118 aa, Artificial Sequence
  Chemically Synthesized
QVQLQESGGGLVQAGGSLRLSCAASGTISYAYHMGWYRQAPGKEREFVASIGNGTTTYYADSVKGRFTISRDNAKNTVYLQMNSLKPEDTAVYYCAATVQDDGAYSYWGQGTQVTVSS

SEQ ID NO: 27993 - protein, 110 aa, Artificial Sequence
  Chemically Synthesized
QVQLQESGGGLVQAGGSLRLSCAASGTISLQWTMGWYRQAPGKEREFVAAIGYGGNTNYADSVKGRFTISRDNAKNTVYLQMNSLKPEDTAVYYCAAGYWGQGTQVTVSS

SEQ ID NO: 27994 - protein, 115 aa, Artificial Sequence
  Chemically Synthesized
QVQLQESGGGLVQAGGSLRLSCAASGSIFGDYFMGWYRQAPGKEREFVAAIAVLPYADSVKGRFTISRDNAKNTVYLQMNSLKPEDTAVYYCAVRYTIALALAYWGQGTQVTVSS

SEQ ID NO: 27995 - protein, 122 aa, Artificial Sequence
  Chemically Synthesized
QVQLQESGGGLVQAGGSLRLSCAASGNISTLIYMGWYRQAPGKERELVAAIDSGSITYYADSVKGRFTISRDNAKNTVYLQMNSLKPEDTAVYYCAADLGAGATGYDAHYYWGQGTQVTVSS

SEQ ID NO: 27996 - protein, 118 aa, Artificial Sequence
  Chemically Synthesized
QVQLQESGGGLVQAGGSLRLSCAASGSIFSYDYMGWYRQAPGKEREFVASIAYGATTNYADSVKGRFTISRDNAKNTVYLQMNSLKPEDTAVYYCAVGYFYQTGYDYWGQGTQVTVSS

SEQ ID NO: 27997 - protein, 120 aa, Artificial Sequence
  Chemically Synthesized
QVQLQESGGGLVQAGGSLRLSCAASGNISDLAYMGWYRQAPGKERELVASIALGSTYADSVKGRFTISRDNAKNTVYLQMNSLKPEDTAVYYCAVYVLTATYYTQIYIYWGQGTQVTVSS

SEQ ID NO: 27998 - protein, 122 aa, Artificial Sequence
  Chemically Synthesized
QVQLQESGGGLVQAGGSLRLSCAASGYIFRVGWMGWYRQAPGKERELVAGISYGTTTYYADSVKGRFTISRDNAKNTVYLQMNSLKPEDTAVYYCAARRRYRYPDNFYFTYWGQGTQVTVSS

SEQ ID NO: 27999 - protein, 122 aa, Artificial Sequence
  Chemically Synthesized
QVQLQESGGGLVQAGGSLRLSCAASGTISKSSGMGWYRQAPGKERELVAAITDGGITYYADSVKGRFTISRDNAKNTVYLQMNSLKPEDTAVYYCAAPYDGADRPHGYYGYWGQGTQVTVSS

SEQ ID NO: 28000 - protein, 122 aa, Artificial Sequence
  Chemically Synthesized
QVQLQESGGGLVQAGGSLRLSCAASGYISRTASMGWYRQAPGKERELVAAISYGTITYYADSVKGRFTISRDNAKNTVYLQMNSLKPEDTAVYYCAAYPIASGPYPDTHSYWGQGTQVTVSS

SEQ ID NO: 28001 - protein, 126 aa, Artificial Sequence
  Chemically Synthesized
QVQLQESGGGLVQAGGSLRLSCAASGSIFQSAHMGWYRQAPGKEREFVAGITTGATTYYADSVKGRFTISRDNAKNTVYLQMNSLKPEDTAVYYCAAYYLTHRSNSTVQRSKLDYWGQGTQVTVSS

SEQ ID NO: 28002 - protein, 122 aa, Artificial Sequence
  Chemically Synthesized
QVQLQESGGGLVQAGGSLRLSCAASGTISPLAYMGWYRQAPGKERELVAAITGGSNTYYADSVKGRFTISRDNAKNTVYLQMNSLKPEDTAVYYCAAPLVRDDENRDDYYYWGQGTQVTVSS

SEQ ID NO: 28003 - protein, 118 aa, Artificial Sequence
  Chemically Synthesized
QVQLQESGGGLVQAGGSLRLSCAASGYISYVFIMGWYRQAPGKEREFVATITYGSNTYYADSVKGRFTISRDNAKNTVYLQMNSLKPEDTAVYYCAVYILYVGPLYYWGQGTQVTVSS

SEQ ID NO: 28004 - protein, 113 aa, Artificial Sequence
  Chemically Synthesized
QVQLQESGGGLVQAGGSLRLSCAASGNISGWADMGWYRQAPGKERELVATITQGSSTYYADSVKGRFTISRDNAKNTVYLQMNSLKPEDTAVYYCAADGSVYWGQGTQVTVSS

SEQ ID NO: 28005 - protein, 125 aa, Artificial Sequence
  Chemically Synthesized
QVQLQESGGGLVQAGGSLRLSCAASGTISAIYYMGWYRQAPGKEREFVATISYGTTTNYADSVKGRFTISRDNAKNTVYLQMNSLKPEDTAVYYCAARRDYRWDYYYEVGEFPYWGQGTQVTVSS

SEQ ID NO: 28006 - protein, 118 aa, Artificial Sequence
  Chemically Synthesized
QVQLQESGGGLVQAGGSLRLSCAASGYIFTDVRMGWYRQAPGKEREFVATITGGTNTNYADSVKGRFTISRDNAKNTVYLQMNSLKPEDTAVYYCAAGYRYYYDHQYWGQGTQVTVSS

SEQ ID NO: 28007 - protein, 117 aa, Artificial Sequence
  Chemically Synthesized
QVQLQESGGGLVQAGGSLRLSCAASGYIFQNRYMGWYRQAPGKERELVAGITSGSTTNYADSVKGRFTISRDNAKNTVYLQMNSLKPEDTAVYYCAVVITLLTFFYWGQGTQVTVSS

SEQ ID NO: 28008 - protein, 122 aa, Artificial Sequence
  Chemically Synthesized
QVQLQESGGGLVQAGGSLRLSCAASGNISGGDYMGWYRQAPGKERELVATISDGGITNYADSVKGRFTISRDNAKNTVYLQMNSLKPEDTAVYYCAAEDGGQDYYATSFDYWGQGTQVTVSS

SEQ ID NO: 28009 - protein, 116 aa, Artificial Sequence
  Chemically Synthesized
QVQLQESGGGLVQAGGSLRLSCAASGNISYHVMGWYRQAPGKERELVASISGGSTTYYADSVKGRFTISRDNAKNTVYLQMNSLKPEDTAVYYCAVSSVVCRCIYWGQGTQVTVSS

SEQ ID NO: 28010 - protein, 118 aa, Artificial Sequence
  Chemically Synthesized
QVQLQESGGGLVQAGGSLRLSCAASGYIFSRNLMGWYRQAPGKEREFVAGITAGGITYYADSVKGRFTISRDNAKNTVYLQMNSLKPEDTAVYYCAVYAWPDRWFDYWGQGTQVTVSS

SEQ ID NO: 28011 - protein, 116 aa, Artificial Sequence
  Chemically Synthesized
QVQLQESGGGLVQAGGSLRLSCAASGTIFGIDDMGWYRQAPGKEREFVASIDSGANTYADSVKGRFTISRDNAKNTVYLQMNSLKPEDTAVYYCAAGDTVTLLIYWGQGTQVTVSS

SEQ ID NO: 28012 - protein, 121 aa, Artificial Sequence
  Chemically Synthesized
QVQLQESGGGLVQAGGSLRLSCAASGYIFRSAGMGWYRQAPGKERELVATITYGGTTNYADSVKGRFTISRDNAKNTVYLQMNSLKPEDTAVYYCAVDYFLTYAASTTIYWGQGTQVTVSS

SEQ ID NO: 28013 - protein, 118 aa, Artificial Sequence
  Chemically Synthesized
QVQLQESGGGLVQAGGSLRLSCAASGYIFANRFMGWYRQAPGKERELVAAIAEGAITYYADSVKGRFTISRDNAKNTVYLQMNSLKPEDTAVYYCAATDVTGSGHQYWGQGTQVTVSS

SEQ ID NO: 28014 - protein, 124 aa, Artificial Sequence
  Chemically Synthesized
QVQLQESGGGLVQAGGSLRLSCAASGTIFYIVRMGWYRQAPGKERELVASIGYGGITNYADSVKGRFTISRDNAKNTVYLQMNSLKPEDTAVYYCAVANYDTDYSYYAYWLYYWGQGTQVTVSS

SEQ ID NO: 28015 - protein, 121 aa, Artificial Sequence
  Chemically Synthesized
QVQLQESGGGLVQAGGSLRLSCAASGNISLRWMGWYRQAPGKEREFVATIDTGASTNYADSVKGRFTISRDNAKNTVYLQMNSLKPEDTAVYYCAVPDAYDGPYEAPYDYWGQGTQVTVSS

SEQ ID NO: 28016 - protein, 118 aa, Artificial Sequence
  Chemically Synthesized
QVQLQESGGGLVQAGGSLRLSCAASGTISVLPYMGWYRQAPGKERELVATIDVGSNTNYADSVKGRFTISRDNAKNTVYLQMNSLKPEDTAVYYCAVEYSDAYDHYYWGQGTQVTVSS

SEQ ID NO: 28017 - protein, 121 aa, Artificial Sequence
  Chemically Synthesized
QVQLQESGGGLVQAGGSLRLSCAASGYIFTATPMGWYRQAPGKERELVAAIDHGGTTNYADSVKGRFTISRDNAKNTVYLQMNSLKPEDTAVYYCAAWRYADTILSTCMYWGQGTQVTVSS

SEQ ID NO: 28018 - protein, 118 aa, Artificial Sequence
  Chemically Synthesized
QVQLQESGGGLVQAGGSLRLSCAASGSIFYFGRMGWYRQAPGKEREFVATIDGGGSTNYADSVKGRFTISRDNAKNTVYLQMNSLKPEDTAVYYCAVTGSRLPAFAYWGQGTQVTVSS

SEQ ID NO: 28019 - protein, 118 aa, Artificial Sequence
  Chemically Synthesized
QVQLQESGGGLVQAGGSLRLSCAASGSIFTLYAMGWYRQAPGKEREFVAGIGYGATTNYADSVKGRFTISRDNAKNTVYLQMNSLKPEDTAVYYCAVVYGSFGRLLYWGQGTQVTVSS

SEQ ID NO: 28020 - protein, 117 aa, Artificial Sequence
  Chemically Synthesized
QVQLQESGGGLVQAGGSLRLSCAASGTISQVDDMGWYRQAPGKEREFVASIGAGGVPYADSVKGRFTISRDNAKNTVYLQMNSLKPEDTAVYYCAVDYRGDSDLPYWGQGTQVTVSS

SEQ ID NO: 28021 - protein, 118 aa, Artificial Sequence
  Chemically Synthesized
QVQLQESGGGLVQAGGSLRLSCAASGNISDNWSMGWYRQAPGKERELVASIDLGTITYYADSVKGRFTISRDNAKNTVYLQMNSLKPEDTAVYYCAAYDPWRPWFIYWGQGTQVTVSS

SEQ ID NO: 28022 - protein, 118 aa, Artificial Sequence
  Chemically Synthesized
QVQLQESGGGLVQAGGSLRLSCAASGSISGRLPMGWYRQAPGKEREFVAGITSGTTTNYADSVKGRFTISRDNAKNTVYLQMNSLKPEDTAVYYCAVYRAGWHDFYYWGQGTQVTVSS

SEQ ID NO: 28023 - protein, 118 aa, Artificial Sequence
  Chemically Synthesized
QVQLQESGGGLVQAGGSLRLSCAASGSISYNQYMGWYRQAPGKERELVATIGLGTTTNYADSVKGRFTISRDNAKNTVYLQMNSLKPEDTAVYYCAASYAYSTYYGYWGQGTQVTVSS

SEQ ID NO: 28024 - protein, 126 aa, Artificial Sequence
  Chemically Synthesized
QVQLQESGGGLVQAGGSLRLSCAASGYISQDGYMGWYRQAPGKERELVAAITEGGTTYYADSVKGRFTISRDNAKNTVYLQMNSLKPEDTAVYYCAVWSFGYAYRLDRWVYDHGYWGQGTQVTVSS

SEQ ID NO: 28025 - protein, 116 aa, Artificial Sequence
  Chemically Synthesized
QVQLQESGGGLVQAGGSLRLSCAASGYIFTTVMGWYRQAPGKERELVASIGYGTTTNYADSVKGRFTISRDNAKNTVYLQMNSLKPEDTAVYYCAALSLTSLTFYWGQGTQVTVSS

SEQ ID NO: 28026 - protein, 124 aa, Artificial Sequence
  Chemically Synthesized
QVQLQESGGGLVQAGGSLRLSCAASGSIFPPYRMGWYRQAPGKERELVASILLVVLPYADSVKGRFTISRDNAKNTVYLQMNSLKPEDTAVYYCAVDYVPSSCTTTTVVTSMYWGQGTQVTVSS

SEQ ID NO: 28027 - protein, 118 aa, Artificial Sequence
  Chemically Synthesized
QVQLQESGGGLVQAGGSLRLSCAASGSISYYQIMGWYRQAPGKEREFVAGIGDGASTNYADSVKGRFTISRDNAKNTVYLQMNSLKPEDTAVYYCAVHSYPVPFYDYWGQGTQVTVSS

SEQ ID NO: 28028 - protein, 118 aa, Artificial Sequence
  Chemically Synthesized
QVQLQESGGGLVQAGGSLRLSCAASGSIFVSVTMGWYRQAPGKEREFVAGITTGANTYYADSVKGRFTISRDNAKNTVYLQMNSLKPEDTAVYYCAAVYFGSNLFRYWGQGTQVTVSS

SEQ ID NO: 28029 - protein, 122 aa, Artificial Sequence
  Chemically Synthesized
QVQLQESGGGLVQAGGSLRLSCAASGSISRWQRMGWYRQAPGKEREFVAGITIGGNTNYADSVKGRFTISRDNAKNTVYLQMNSLKPEDTAVYYCAVRYKYYRGWPAGLRYWGQGTQVTVSS

SEQ ID NO: 28030 - protein, 120 aa, Artificial Sequence
  Chemically Synthesized
QVQLQESGGGLVQAGGSLRLSCAASGSIFVPGGMGWYRQAPGKERELVAAITYGANTNYADSVKGRFTISRDNAKNTVYLQMNSLKPEDTAVYYCAARAFARYWGSHVYWGQGTQVTVSS

SEQ ID NO: 28031 - protein, 121 aa, Artificial Sequence
  Chemically Synthesized
QVQLQESGGGLVQAGGSLRLSCAASGNIFTVRYMGWYRQAPGKERELVASITLGTTTNYADSVKGRFTISRDNAKNTVYLQMNSLKPEDTAVYYCAAFYNGRRWRGWYTYWGQGTQVTVSS

SEQ ID NO: 28032 - protein, 118 aa, Artificial Sequence
  Chemically Synthesized
QVQLQESGGGLVQAGGSLRLSCAASGSISPFSDMGWYRQAPGKEREFVAGIAQGGSTNYADSVKGRFTISRDNAKNTVYLQMNSLKPEDTAVYYCAVYRTADGSHSYWGQGTQVTVSS

SEQ ID NO: 28033 - protein, 118 aa, Artificial Sequence
  Chemically Synthesized
QVQLQESGGGLVQAGGSLRLSCAASGNIFGYTLMGWYRQAPGKEREFVAGIGTGGNTYYADSVKGRFTISRDNAKNTVYLQMNSLKPEDTAVYYCAASYWPGPALDYWGQGTQVTVSS

SEQ ID NO: 28034 - protein, 122 aa, Artificial Sequence
  Chemically Synthesized
QVQLQESGGGLVQAGGSLRLSCAASGNIFIVDVMGWYRQAPGKEREFVAGISYGGTTNYADSVKGRFTISRDNAKNTVYLQMNSLKPEDTAVYYCAAGILLNRYLKPAYYYWGQGTQVTVSS

SEQ ID NO: 28035 - protein, 122 aa, Artificial Sequence
  Chemically Synthesized
QVQLQESGGGLVQAGGSLRLSCAASGSIFNINFMGWYRQAPGKEREFVASITHGTITNYADSVKGRFTISRDNAKNTVYLQMNSLKPEDTAVYYCAANRYAPPSYTDHLSYWGQGTQVTVSS

SEQ ID NO: 28036 - protein, 120 aa, Artificial Sequence
  Chemically Synthesized
QVQLQESGGGLVQAGGSLRLSCAASGSISDYNYMGWYRQAPGKERELVAYYDGVILYADSVKGRFTISRDNAKNTVYLQMNSLKPEDTAVYYCAVHANLYGGRYSTYRYWGQGTQVTVSS

SEQ ID NO: 28037 - protein, 118 aa, Artificial Sequence
  Chemically Synthesized
QVQLQESGGGLVQAGGSLRLSCAASGNISLWRTMGWYRQAPGKERELVAGIAFGAITYYADSVKGRFTISRDNAKNTVYLQMNSLKPEDTAVYYCAVYYRYSGKHGYWGQGTQVTVSS

SEQ ID NO: 28038 - protein, 118 aa, Artificial Sequence
  Chemically Synthesized
QVQLQESGGGLVQAGGSLRLSCAASGNISPYTLMGWYRQAPGKEREFVAGIAPGSNTYYADSVKGRFTISRDNAKNTVYLQMNSLKPEDTAVYYCAAYPYYRADLDYWGQGTQVTVSS

SEQ ID NO: 28039 - protein, 118 aa, Artificial Sequence
  Chemically Synthesized
QVQLQESGGGLVQAGGSLRLSCAASGNISYVLGMGWYRQAPGKERELVAGITFGTITNYADSVKGRFTISRDNAKNTVYLQMNSLKPEDTAVYYCAAPWSSYIGYGYWGQGTQVTVSS

SEQ ID NO: 28040 - protein, 118 aa, Artificial Sequence
  Chemically Synthesized
QVQLQESGGGLVQAGGSLRLSCAASGSISDYYAMGWYRQAPGKEREFVAGIDGGGTTYYADSVKGRFTISRDNAKNTVYLQMNSLKPEDTAVYYCAAYSYAAGVYDYWGQGTQVTVSS

SEQ ID NO: 28041 - protein, 118 aa, Artificial Sequence
  Chemically Synthesized
QVQLQESGGGLVQAGGSLRLSCAASGYIFWYQRMGWYRQAPGKERELVATIASGGITNYADSVKGRFTISRDNAKNTVYLQMNSLKPEDTAVYYCAATSRVFWRYTYWGQGTQVTVSS

SEQ ID NO: 28042 - protein, 122 aa, Artificial Sequence
  Chemically Synthesized
QVQLQESGGGLVQAGGSLRLSCAASGNIFGVVLMGWYRQAPGKERELVAAIARGANTYYADSVKGRFTISRDNAKNTVYLQMNSLKPEDTAVYYCAALYRGREGGARYHWYWGQGTQVTVSS

SEQ ID NO: 28043 - protein, 118 aa, Artificial Sequence
  Chemically Synthesized
QVQLQESGGGLVQAGGSLRLSCAASGSISAQDYMGWYRQAPGKERELVATISPGANTNYADSVKGRFTISRDNAKNTVYLQMNSLKPEDTAVYYCAAIAYYAPWFPYWGQGTQVTVSS

SEQ ID NO: 28044 - protein, 122 aa, Artificial Sequence
  Chemically Synthesized
QVQLQESGGGLVQAGGSLRLSCAASGNISVPLSMGWYRQAPGKEREFVAAISGGTSTYYADSVKGRFTISRDNAKNTVYLQMNSLKPEDTAVYYCAVYWRYDVDGYRQYDYWGQGTQVTVSS

SEQ ID NO: 28045 - protein, 118 aa, Artificial Sequence
  Chemically Synthesized
QVQLQESGGGLVQAGGSLRLSCAASGNISTDYLMGWYRQAPGKEREFVAGIDLGAITNYADSVKGRFTISRDNAKNTVYLQMNSLKPEDTAVYYCAAFSWYNGPHDYWGQGTQVTVSS

SEQ ID NO: 28046 - protein, 118 aa, Artificial Sequence
  Chemically Synthesized
QVQLQESGGGLVQAGGSLRLSCAASGTIFYLRYMGWYRQAPGKERELVAAIGYGANTYYADSVKGRFTISRDNAKNTVYLQMNSLKPEDTAVYYCAASRDYFWDYGYWGQGTQVTVSS

SEQ ID NO: 28047 - protein, 121 aa, Artificial Sequence
  Chemically Synthesized
QVQLQESGGGLVQAGGSLRLSCAASGSIFSYDYMGWYRQAPGKERELVAAISSGGITYYADSVKGRFTISRDNAKNTVYLQMNSLKPEDTAVYYCAVKSGLTSTCCTNFYWGQGTQVTVSS

SEQ ID NO: 28048 - protein, 118 aa, Artificial Sequence
  Chemically Synthesized
QVQLQESGGGLVQAGGSLRLSCAASGYIFSYDLMGWYRQAPGKEREFVAGIAYGATTYYADSVKGRFTISRDNAKNTVYLQMNSLKPEDTAVYYCAADGNQDTDLDYWGQGTQVTVSS

SEQ ID NO: 28049 - protein, 122 aa, Artificial Sequence
  Chemically Synthesized
QVQLQESGGGLVQAGGSLRLSCAASGSISYDVAMGWYRQAPGKERELVASITAGSSTYYADSVKGRFTISRDNAKNTVYLQMNSLKPEDTAVYYCAVYKAYDRSWVYFHSYWGQGTQVTVSS

SEQ ID NO: 28050 - protein, 115 aa, Artificial Sequence
  Chemically Synthesized
QVQLQESGGGLVQAGGSLRLSCAASGYISQQRRMGWYRQAPGKERELVAGIARGASTYYADSVKGRFTISRDNAKNTVYLQMNSLKPEDTAVYYCAVRGYFYPYWGQGTQVTVSS

SEQ ID NO: 28051 - protein, 126 aa, Artificial Sequence
  Chemically Synthesized
QVQLQESGGGLVQAGGSLRLSCAASGTISRDSPMGWYRQAPGKEREFVASITGGGITNYADSVKGRFTISRDNAKNTVYLQMNSLKPEDTAVYYCAADDAGQYHPKDRDASPHYYWGQGTQVTVSS

SEQ ID NO: 28052 - protein, 118 aa, Artificial Sequence
  Chemically Synthesized
QVQLQESGGGLVQAGGSLRLSCAASGYIFNTNTMGWYRQAPGKERELVAAINRGTNTNYADSVKGRFTISRDNAKNTVYLQMNSLKPEDTAVYYCAVTQRFWRRHPYWGQGTQVTVSS

SEQ ID NO: 28053 - protein, 118 aa, Artificial Sequence
  Chemically Synthesized
QVQLQESGGGLVQAGGSLRLSCAASGNIFYRGVMGWYRQAPGKEREFVAGIGYGAITNYADSVKGRFTISRDNAKNTVYLQMNSLKPEDTAVYYCAVYQLWKRNYGYWGQGTQVTVSS

SEQ ID NO: 28054 - protein, 118 aa, Artificial Sequence
  Chemically Synthesized
QVQLQESGGGLVQAGGSLRLSCAASGTIFASRYMGWYRQAPGKEREFVAGISDGSSTYYADSVKGRFTISRDNAKNTVYLQMNSLKPEDTAVYYCAALYWYVQAHDYWGQGTQVTVSS

SEQ ID NO: 28055 - protein, 122 aa, Artificial Sequence
  Chemically Synthesized
QVQLQESGGGLVQAGGSLRLSCAASGTISRYYKMGWYRQAPGKEREFVAAISYGASTNYADSVKGRFTISRDNAKNTVYLQMNSLKPEDTAVYYCAAGWWTVSTFYPHHRYWGQGTQVTVSS

SEQ ID NO: 28056 - protein, 123 aa, Artificial Sequence
  Chemically Synthesized
QVQLQESGGGLVQAGGSLRLSCAASGSISIWPSMGWYRQAPGKERELVATISRGGITYYADSVKGRFTISRDNAKNTVYLQMNSLKPEDTAVYYCAAGHARLYRRGVVGFGYWGQGTQVTVSS

SEQ ID NO: 28057 - protein, 118 aa, Artificial Sequence
  Chemically Synthesized
QVQLQESGGGLVQAGGSLRLSCAASGNISHVYGMGWYRQAPGKEREFVAGINAGSITYYADSVKGRFTISRDNAKNTVYLQMNSLKPEDTAVYYCAAVVSYRRSYAYWGQGTQVTVSS

SEQ ID NO: 28058 - protein, 118 aa, Artificial Sequence
  Chemically Synthesized
QVQLQESGGGLVQAGGSLRLSCAASGSIFLYYFMGWYRQAPGKEREFVAAIGYGGSTNYADSVKGRFTISRDNAKNTVYLQMNSLKPEDTAVYYCASGDRQRTEYPYWGQGTQVTVSS

SEQ ID NO: 28059 - protein, 127 aa, Artificial Sequence
  Chemically Synthesized
QVQLQESGGGLVQAGGSLRLSCAASGTISRRYVMGWYRQAPGKEREFVASITQGGNTNYADSVKGRFTISRDNAKNTVYLQMNSLKPEDTAVYYCAALQRAFADYRQGYYLPYHIYWGQGTQVTVSS

SEQ ID NO: 28060 - protein, 122 aa, Artificial Sequence
  Chemically Synthesized
QVQLQESGGGLVQAGGSLRLSCAASGNIFGGDVMGWYRQAPGKEREFVAGISYGANTNYADSVKGRFTISRDNAKNTVYLQMNSLKPEDTAVYYCAAFWWVRRPDLDRHDYWGQGTQVTVSS

SEQ ID NO: 28061 - protein, 118 aa, Artificial Sequence
  Chemically Synthesized
QVQLQESGGGLVQAGGSLRLSCAASGNIFIGPYMGWYRQAPGKEREFVASIGPGGITNYADSVKGRFTISRDNAKNTVYLQMNSLKPEDTAVYYCAVWYQSIDLYYYWGQGTQVTVSS

SEQ ID NO: 28062 - protein, 122 aa, Artificial Sequence
  Chemically Synthesized
QVQLQESGGGLVQAGGSLRLSCAASGTISGDYIMGWYRQAPGKEREFVAGITDGSNTYYADSVKGRFTISRDNAKNTVYLQMNSLKPEDTAVYYCAALTFSYLVGIGSYPYWGQGTQVTVSS

SEQ ID NO: 28063 - protein, 120 aa, Artificial Sequence
  Chemically Synthesized
QVQLQESGGGLVQAGGSLRLSCAASGTISTRYTMGWYRQAPGKERELVAGITSVLLPYADSVKGRFTISRDNAKNTVYLQMNSLKPEDTAVYYCAAYVSLMTFGLKTIYWGQGTQVTVSS

SEQ ID NO: 28064 - protein, 121 aa, Artificial Sequence
  Chemically Synthesized
QVQLQESGGGLVQAGGSLRLSCAASGTISTYDGMGWYRQAPGKERELVAAIDDGASTNYADSVKGRFTISRDNAKNTVYLQMNSLKPEDTAVYYCAARDGGRYVVSCTFYWGQGTQVTVSS

SEQ ID NO: 28065 - protein, 122 aa, Artificial Sequence
  Chemically Synthesized
QVQLQESGGGLVQAGGSLRLSCAASGTIFTQYYMGWYRQAPGKEREFVAAINSGGSTYYADSVKGRFTISRDNAKNTVYLQMNSLKPEDTAVYYCAVGVWGTDILYDIHRYWGQGTQVTVSS

SEQ ID NO: 28066 - protein, 116 aa, Artificial Sequence
  Chemically Synthesized
QVQLQESGGGLVQAGGSLRLSCAASGNMGWYRQAPGKEREFVAGITIGANTNYADSVKGRFTISRDNAKNTVYLQMNSLKPEDTAVYYCAAYNRWFYPKSTEHPYWGQGTQVTVSS

SEQ ID NO: 28067 - protein, 122 aa, Artificial Sequence
  Chemically Synthesized
QVQLQESGGGLVQAGGSLRLSCAASGTIFRTVQMGWYRQAPGKERELVAAINAGSSTNYADSVKGRFTISRDNAKNTVYLQMNSLKPEDTAVYYCAAIPKNYYQTTYWLIYWGQGTQVTVSS

SEQ ID NO: 28068 - protein, 126 aa, Artificial Sequence
  Chemically Synthesized
QVQLQESGGGLVQAGGSLRLSCAASGTISATRTMGWYRQAPGKEREFVASIANGSNTNYADSVKGRFTISRDNAKNTVYLQMNSLKPEDTAVYYCAVNYDHGDDYSYDPGRLHGYWGQGTQVTVSS

SEQ ID NO: 28069 - protein, 122 aa, Artificial Sequence
  Chemically Synthesized
QVQLQESGGGLVQAGGSLRLSCAASGSISRRYGMGWYRQAPGKEREFVAGISAGTSTYYADSVKGRFTISRDNAKNTVYLQMNSLKPEDTAVYYCAAVTGVTYYKYTPLYYWGQGTQVTVSS

SEQ ID NO: 28070 - protein, 126 aa, Artificial Sequence
  Chemically Synthesized
QVQLQESGGGLVQAGGSLRLSCAASGTIFFGIPMGWYRQAPGKERELVATIGRGATTNYADSVKGRFTISRDNAKNTVYLQMNSLKPEDTAVYYCAAYVGGHSDNWVNYDGYFYYWGQGTQVTVSS

SEQ ID NO: 28071 - protein, 122 aa, Artificial Sequence
  Chemically Synthesized
QVQLQESGGGLVQAGGSLRLSCAASGYIFRTQYMGWYRQAPGKERELVASISDGTSTNYADSVKGRFTISRDNAKNTVYLQMNSLKPEDTAVYYCAATTLSTSSLTTVNIYWGQGTQVTVSS

SEQ ID NO: 28072 - protein, 118 aa, Artificial Sequence
  Chemically Synthesized
QVQLQESGGGLVQAGGSLRLSCAASGYISQDVYMGWYRQAPGKERELVATITVGGSTYYADSVKGRFTISRDNAKNTVYLQMNSLKPEDTAVYYCAVTRTDHDDYLYWGQGTQVTVSS

SEQ ID NO: 28073 - protein, 118 aa, Artificial Sequence
  Chemically Synthesized
QVQLQESGGGLVQAGGSLRLSCAASGSISWDRDMGWYRQAPGKERELVAGIDVGGTTNYADSVKGRFTISRDNAKNTVYLQMNSLKPEDTAVYYCAVIPFDVPRYRYWGQGTQVTVSS

SEQ ID NO: 28074 - protein, 118 aa, Artificial Sequence
  Chemically Synthesized
QVQLQESGGGLVQAGGSLRLSCAASGNISATDDMGWYRQAPGKEREFVAAISLGGNTYYADSVKGRFTISRDNAKNTVYLQMNSLKPEDTAVYYCAVRRWFQRGHIYWGQGTQVTVSS

SEQ ID NO: 28075 - protein, 122 aa, Artificial Sequence
  Chemically Synthesized
QVQLQESGGGLVQAGGSLRLSCAASGSISTTLVMGWYRQAPGKEREFVASIAYGTITNYADSVKGRFTISRDNAKNTVYLQMNSLKPEDTAVYYCAVLGYGENPAGYYYPYWGQGTQVTVSS

SEQ ID NO: 28076 - protein, 118 aa, Artificial Sequence
  Chemically Synthesized
QVQLQESGGGLVQAGGSLRLSCAASGSIFAWWSMGWYRQAPGKERELVASIDYGGITYYADSVKGRFTISRDNAKNTVYLQMNSLKPEDTAVYYCAALFYTGTDLGYWGQGTQVTVSS

SEQ ID NO: 28077 - protein, 122 aa, Artificial Sequence
  Chemically Synthesized
QVQLQESGGGLVQAGGSLRLSCAASGNIFYNSGMGWYRQAPGKERELVASIDTGSITNYADSVKGRFTISRDNAKNTVYLQMNSLKPEDTAVYYCAVHAFDTIDHTWIFEYWGQGTQVTVSS

SEQ ID NO: 28078 - protein, 126 aa, Artificial Sequence
  Chemically Synthesized
QVQLQESGGGLVQAGGSLRLSCAASGNISPHYYMGWYRQAPGKERELVAAIAYGTNTYYADSVKGRFTISRDNAKNTVYLQMNSLKPEDTAVYYCAVLYYHYEWNPVNVAPRHRYWGQGTQVTVSS

SEQ ID NO: 28079 - protein, 117 aa, Artificial Sequence
  Chemically Synthesized
QVQLQESGGGLVQAGGSLRLSCAASGYIFWTSNMGWYRQAPGKEREFVAGITYGSNTNYADSVKGRFTISRDNAKNTVYLQMNSLKPEDTAVYYCAARSAVSTGFYWGQGTQVTVSS

SEQ ID NO: 28080 - protein, 118 aa, Artificial Sequence
  Chemically Synthesized
QVQLQESGGGLVQAGGSLRLSCAASGYIFRGTRMGWYRQAPGKERELVAAITRGTTTYYADSVKGRFTISRDNAKNTVYLQMNSLKPEDTAVYYCAVRPWFYTQLKYWGQGTQVTVSS

SEQ ID NO: 28081 - protein, 118 aa, Artificial Sequence
  Chemically Synthesized
QVQLQESGGGLVQAGGSLRLSCAASGNIFNDDVMGWYRQAPGKERELVAAIGLGSITYYADSVKGRFTISRDNAKNTVYLQMNSLKPEDTAVYYCAVAYGGYPHLPYWGQGTQVTVSS

SEQ ID NO: 28082 - protein, 124 aa, Artificial Sequence
  Chemically Synthesized
QVQLQESGGGLVQAGGSLRLSCAASGYIFTYDYMGWYRQAPGKEREFVAGISNGSITNYADSVKGRFTISRDNAKNTVYLQMNSLKPEDTAVYYCAVRWDYSDVYDPLYLVDYWGQGTQVTVSS

SEQ ID NO: 28083 - protein, 117 aa, Artificial Sequence
  Chemically Synthesized
QVQLQESGGGLVQAGGSLRLSCAASGYIFSTVMGWYRQAPGKERELVATIDDGSNTYYADSVKGRFTISRDNAKNTVYLQMNSLKPEDTAVYYCAAYDYIYGQLAYWGQGTQVTVSS

SEQ ID NO: 28084 - protein, 122 aa, Artificial Sequence
  Chemically Synthesized
QVQLQESGGGLVQAGGSLRLSCAASGTIFEDNLMGWYRQAPGKERELVAGIGTGTITYYADSVKGRFTISRDNAKNTVYLQMNSLKPEDTAVYYCAATGYTHIDTGSYHVYWGQGTQVTVSS

SEQ ID NO: 28085 - protein, 118 aa, Artificial Sequence
  Chemically Synthesized
QVQLQESGGGLVQAGGSLRLSCAASGTISGDVYMGWYRQAPGKEREFVAAIGYGGTTYYADSVKGRFTISRDNAKNTVYLQMNSLKPEDTAVYYCAASDVTYTYLYYWGQGTQVTVSS

SEQ ID NO: 28086 - protein, 117 aa, Artificial Sequence
  Chemically Synthesized
QVQLQESGGGLVQAGGSLRLSCAASGTIYTMGWYRQAPGKERELVATITNGGSTNYADSVKGRFTISRDNAKNTVYLQMNSLKPEDTAVYYCAAYDDNYGAGRHRYWGQGTQVTVSS

SEQ ID NO: 28087 - protein, 126 aa, Artificial Sequence
  Chemically Synthesized
QVQLQESGGGLVQAGGSLRLSCAASGYISYRYTMGWYRQAPGKERELVATISRGATTYYADSVKGRFTISRDNAKNTVYLQMNSLKPEDTAVYYCAARYRTGWYYTPTRRPYYVYWGQGTQVTVSS

SEQ ID NO: 28088 - protein, 122 aa, Artificial Sequence
  Chemically Synthesized
QVQLQESGGGLVQAGGSLRLSCAASGTIFGYTNMGWYRQAPGKEREFVAAIASGTTTYYADSVKGRFTISRDNAKNTVYLQMNSLKPEDTAVYYCAAGYEGYDAPYRTYVYWGQGTQVTVSS

SEQ ID NO: 28089 - protein, 122 aa, Artificial Sequence
  Chemically Synthesized
QVQLQESGGGLVQAGGSLRLSCAASGSISLTPNMGWYRQAPGKEREFVAGIGSGTSTNYADSVKGRFTISRDNAKNTVYLQMNSLKPEDTAVYYCAVGYTTDSTDYTYFYYWGQGTQVTVSS

SEQ ID NO: 28090 - protein, 122 aa, Artificial Sequence
  Chemically Synthesized
QVQLQESGGGLVQAGGSLRLSCAASGNISPRKIMGWYRQAPGKEREFVAGITLGTTTYYADSVKGRFTISRDNAKNTVYLQMNSLKPEDTAVYYCAAFYWYNGNRYVGHVYWGQGTQVTVSS

SEQ ID NO: 28091 - protein, 126 aa, Artificial Sequence
  Chemically Synthesized
QVQLQESGGGLVQAGGSLRLSCAASGTIFIDYFMGWYRQAPGKEREFVATISDGSSTNYADSVKGRFTISRDNAKNTVYLQMNSLKPEDTAVYYCAAQQNTDVYEDTPQRRPLYYWGQGTQVTVSS

SEQ ID NO: 28092 - protein, 125 aa, Artificial Sequence
  Chemically Synthesized
QVQLQESGGGLVQAGGSLRLSCAASGTISPDYYMGWYRQAPGKERELVASIAVGTSTNYADSVKGRFTISRDNAKNTVYLQMNSLKPEDTAVYYCAVPVALESRADDSGGYLDYWGQGTQVTVSS

SEQ ID NO: 28093 - protein, 118 aa, Artificial Sequence
  Chemically Synthesized
QVQLQESGGGLVQAGGSLRLSCAASGTISANYIMGWYRQAPGKERELVAAIGIGGITYYADSVKGRFTISRDNAKNTVYLQMNSLKPEDTAVYYCAVDSYLYWAHPYWGQGTQVTVSS

SEQ ID NO: 28094 - protein, 118 aa, Artificial Sequence
  Chemically Synthesized
QVQLQESGGGLVQAGGSLRLSCAASGTIFNRRTMGWYRQAPGKEREFVASINWGTSTYYADSVKGRFTISRDNAKNTVYLQMNSLKPEDTAVYYCAAYWRYGARYYYWGQGTQVTVSS

SEQ ID NO: 28095 - protein, 118 aa, Artificial Sequence
  Chemically Synthesized
QVQLQESGGGLVQAGGSLRLSCAASGSIFLYETMGWYRQAPGKEREFVAGITPGSNTYYADSVKGRFTISRDNAKNTVYLQMNSLKPEDTAVYYCAVFPGTDWYHDYWGQGTQVTVSS

SEQ ID NO: 28096 - protein, 118 aa, Artificial Sequence
  Chemically Synthesized
QVQLQESGGGLVQAGGSLRLSCAASGTIFPYYRMGWYRQAPGKEREFVAAIGYGGSTNYADSVKGRFTISRDNAKNTVYLQMNSLKPEDTAVYYCAAGFIRFAKLGYWGQGTQVTVSS

SEQ ID NO: 28097 - protein, 118 aa, Artificial Sequence
  Chemically Synthesized
QVQLQESGGGLVQAGGSLRLSCAASGSISRWRAMGWYRQAPGKERELVAGITVGASTNYADSVKGRFTISRDNAKNTVYLQMNSLKPEDTAVYYCAVWRTWGGGHIYWGQGTQVTVSS

SEQ ID NO: 28098 - protein, 122 aa, Artificial Sequence
  Chemically Synthesized
QVQLQESGGGLVQAGGSLRLSCAASGSIFRPSSMGWYRQAPGKERELVAAISDGTTTNYADSVKGRFTISRDNAKNTVYLQMNSLKPEDTAVYYCAVEPIPWAHIAYHLHYWGQGTQVTVSS

SEQ ID NO: 28099 - protein, 118 aa, Artificial Sequence
  Chemically Synthesized
QVQLQESGGGLVQAGGSLRLSCAASGYIFSHPYMGWYRQAPGKEREFVATITYGATTNYADSVKGRFTISRDNAKNTVYLQMNSLKPEDTAVYYCAVVDYEYRYHTYWGQGTQVTVSS

SEQ ID NO: 28100 - protein, 122 aa, Artificial Sequence
  Chemically Synthesized
QVQLQESGGGLVQAGGSLRLSCAASGNISRTYRMGWYRQAPGKEREFVASINYGTITYYADSVKGRFTISRDNAKNTVYLQMNSLKPEDTAVYYCAVGSYAGVAYLRRHAYWGQGTQVTVSS

SEQ ID NO: 28101 - protein, 118 aa, Artificial Sequence
  Chemically Synthesized
QVQLQESGGGLVQAGGSLRLSCAASGTISFGPYMGWYRQAPGKEREFVAAISRGGSTYYADSVKGRFTISRDNAKNTVYLQMNSLKPEDTAVYYCAVIRKYRHGHGYWGQGTQVTVSS

SEQ ID NO: 28102 - protein, 122 aa, Artificial Sequence
  Chemically Synthesized
QVQLQESGGGLVQAGGSLRLSCAASGNISRVQYMGWYRQAPGKERELVAGIGRGTSTNYADSVKGRFTISRDNAKNTVYLQMNSLKPEDTAVYYCAAQYWYRFFISKIFYYWGQGTQVTVSS

SEQ ID NO: 28103 - protein, 121 aa, Artificial Sequence
  Chemically Synthesized
QVQLQESGGGLVQAGGSLRLSCAASGNIFRWWWMGWYRQAPGKERELVAAIAYGTNTYYADSVKGRFTISRDNAKNTVYLQMNSLKPEDTAVYYCAVIAGFWSPTRYHVYWGQGTQVTVSS

SEQ ID NO: 28104 - protein, 120 aa, Artificial Sequence
  Chemically Synthesized
QVQLQESGGGLVQAGGSLRLSCAASGTISPYKEMGWYRQAPGKEREFVIDVGANTNYADSVKGRFTISRDNAKNTVYLQMNSLKPEDTAVYYCAAPDFGTRPLHSQHWYWGQGTQVTVSS

SEQ ID NO: 28105 - protein, 118 aa, Artificial Sequence
  Chemically Synthesized
QVQLQESGGGLVQAGGSLRLSCAASGTIFRVTYMGWYRQAPGKERELVAAIDFGTNTYYADSVKGRFTISRDNAKNTVYLQMNSLKPEDTAVYYCAATTRDSGYFIYWGQGTQVTVSS

SEQ ID NO: 28106 - protein, 118 aa, Artificial Sequence
  Chemically Synthesized
QVQLQESGGGLVQAGGSLRLSCAASGNISVPPAMGWYRQAPGKERELVAGINTGGTTNYADSVKGRFTISRDNAKNTVYLQMNSLKPEDTAVYYCAVVLGASASYSYWGQGTQVTVSS

SEQ ID NO: 28107 - protein, 122 aa, Artificial Sequence
  Chemically Synthesized
QVQLQESGGGLVQAGGSLRLSCAASGSISARGTMGWYRQAPGKERELVASINGGGSTYYADSVKGRFTISRDNAKNTVYLQMNSLKPEDTAVYYCAAQYWTWYDLDDEHPYWGQGTQVTVSS

SEQ ID NO: 28108 - protein, 122 aa, Artificial Sequence
  Chemically Synthesized
QVQLQESGGGLVQAGGSLRLSCAASGSIFWSYTMGWYRQAPGKEREFVAAISFGASTNYADSVKGRFTISRDNAKNTVYLQMNSLKPEDTAVYYCAVPNYTRRYADETHNYWGQGTQVTVSS

SEQ ID NO: 28109 - protein, 121 aa, Artificial Sequence
  Chemically Synthesized
QVQLQESGGGLVQAGGSLRLSCAASGTISLTYVMGWYRQAPGKEREFVATIDDGAITYYADSVKGRFTISRDNAKNTVYLQMNSLKPEDTAVYYCAARYYDRGHYIILGYWGQGTQVTVSS

SEQ ID NO: 28110 - protein, 121 aa, Artificial Sequence
  Chemically Synthesized
QVQLQESGGGLVQAGGSLRLSCAASGNISQYWYMGWYRQAPGKEREFVAGIDVVVIPYADSVKGRFTISRDNAKNTVYLQMNSLKPEDTAVYYCAVDVSGDSSGGTTILYWGQGTQVTVSS

SEQ ID NO: 28111 - protein, 118 aa, Artificial Sequence
  Chemically Synthesized
QVQLQESGGGLVQAGGSLRLSCAASGYISVIRAMGWYRQAPGKEREFVAGITAGGNTYYADSVKGRFTISRDNAKNTVYLQMNSLKPEDTAVYYCAAYRKLQGFHGYWGQGTQVTVSS

SEQ ID NO: 28112 - protein, 126 aa, Artificial Sequence
  Chemically Synthesized
QVQLQESGGGLVQAGGSLRLSCAASGSISGNSFMGWYRQAPGKEREFVATINLGGNTYYADSVKGRFTISRDNAKNTVYLQMNSLKPEDTAVYYCAAYVRYRRWYQLYRIDTHTYWGQGTQVTVSS

SEQ ID NO: 28113 - protein, 118 aa, Artificial Sequence
  Chemically Synthesized
QVQLQESGGGLVQAGGSLRLSCAASGYISLARAMGWYRQAPGKERELVAGIAVGGTTYYADSVKGRFTISRDNAKNTVYLQMNSLKPEDTAVYYCAAKGKWRYYHAYWGQGTQVTVSS

SEQ ID NO: 28114 - protein, 118 aa, Artificial Sequence
  Chemically Synthesized
QVQLQESGGGLVQAGGSLRLSCAASGYISIIAIMGWYRQAPGKEREFVATITTGGNTNYADSVKGRFTISRDNAKNTVYLQMNSLKPEDTAVYYCAAYPIRSLGFPYWGQGTQVTVSS

SEQ ID NO: 28115 - protein, 124 aa, Artificial Sequence
  Chemically Synthesized
QVQLQESGGGLVQAGGSLRLSCAASGSISGYDEMGWYRQAPGKERELVASITGGTTTYYADSVKGRFTISRDNAKNTVYLQMNSLKPEDTAVYYCAAQDQAGDSYLSVVRSMYWGQGTQVTVSS

SEQ ID NO: 28116 - protein, 118 aa, Artificial Sequence
  Chemically Synthesized
QVQLQESGGGLVQAGGSLRLSCAASGTIFDWGTMGWYRQAPGKEREFVAGIGHGGNTYYADSVKGRFTISRDNAKNTVYLQMNSLKPEDTAVYYCAVDGNEPTDFSYWGQGTQVTVSS

SEQ ID NO: 28117 - protein, 126 aa, Artificial Sequence
  Chemically Synthesized
QVQLQESGGGLVQAGGSLRLSCAASGYISIPIWMGWYRQAPGKEREFVATIGWGGSTNYADSVKGRFTISRDNAKNTVYLQMNSLKPEDTAVYYCAAAPRYYRPFYYRGSLRHDYWGQGTQVTVSS

SEQ ID NO: 28118 - protein, 118 aa, Artificial Sequence
  Chemically Synthesized
QVQLQESGGGLVQAGGSLRLSCAASGYIFKPTYMGWYRQAPGKEREFVAAINYGTNTYYADSVKGRFTISRDNAKNTVYLQMNSLKPEDTAVYYCAARYRTYRGFHYWGQGTQVTVSS

SEQ ID NO: 28119 - protein, 118 aa, Artificial Sequence
  Chemically Synthesized
QVQLQESGGGLVQAGGSLRLSCAASGTIFYFVFMGWYRQAPGKERELVAAIAGGASTNYADSVKGRFTISRDNAKNTVYLQMNSLKPEDTAVYYCAVTSPGSGEHPYWGQGTQVTVSS

SEQ ID NO: 28120 - protein, 118 aa, Artificial Sequence
  Chemically Synthesized
QVQLQESGGGLVQAGGSLRLSCAASGYISVGDTMGWYRQAPGKERELVATINYGGNTNYADSVKGRFTISRDNAKNTVYLQMNSLKPEDTAVYYCAAYTWWDDTYSYWGQGTQVTVSS

SEQ ID NO: 28121 - protein, 126 aa, Artificial Sequence
  Chemically Synthesized
QVQLQESGGGLVQAGGSLRLSCAASGYISGGVAMGWYRQAPGKERELVATISRGASTNYADSVKGRFTISRDNAKNTVYLQMNSLKPEDTAVYYCAALRYSRFGYTIYRAHWHEYWGQGTQVTVSS

SEQ ID NO: 28122 - protein, 122 aa, Artificial Sequence
  Chemically Synthesized
QVQLQESGGGLVQAGGSLRLSCAASGTIFRHWYMGWYRQAPGKEREFVAGIDHGTNTNYADSVKGRFTISRDNAKNTVYLQMNSLKPEDTAVYYCAAATYYYHYRVYGLTYWGQGTQVTVSS

SEQ ID NO: 28123 - protein, 118 aa, Artificial Sequence
  Chemically Synthesized
QVQLQESGGGLVQAGGSLRLSCAASGNIFQAYRMGWYRQAPGKEREFVAGINFGGNTYYADSVKGRFTISRDNAKNTVYLQMNSLKPEDTAVYYCAARRWRFAYLAYWGQGTQVTVSS

SEQ ID NO: 28124 - protein, 126 aa, Artificial Sequence
  Chemically Synthesized
QVQLQESGGGLVQAGGSLRLSCAASGTIFIWLPMGWYRQAPGKERELVATITWGSTTNYADSVKGRFTISRDNAKNTVYLQMNSLKPEDTAVYYCAVWYHLLGYDLAYGGPRHRYWGQGTQVTVSS

SEQ ID NO: 28125 - protein, 125 aa, Artificial Sequence
  Chemically Synthesized
QVQLQESGGGLVQAGGSLRLSCAASGTIFGRYYMGWYRQAPGKEREFVAAIAYGSNTYYADSVKGRFTISRDNAKNTVYLQMNSLKPEDTAVYYCAVHGGYDSAVWYYWKKHLYWGQGTQVTVSS

SEQ ID NO: 28126 - protein, 122 aa, Artificial Sequence
  Chemically Synthesized
QVQLQESGGGLVQAGGSLRLSCAASGSISNWQEMGWYRQAPGKEREFVAGINLGASTNYADSVKGRFTISRDNAKNTVYLQMNSLKPEDTAVYYCAVVRWGYSAPITLLVYWGQGTQVTVSS

SEQ ID NO: 28127 - protein, 118 aa, Artificial Sequence
  Chemically Synthesized
QVQLQESGGGLVQAGGSLRLSCAASGSIFPELYMGWYRQAPGKERELVASIAAGGITYYADSVKGRFTISRDNAKNTVYLQMNSLKPEDTAVYYCAVGYDVLGYFDYWGQGTQVTVSS

SEQ ID NO: 28128 - protein, 122 aa, Artificial Sequence
  Chemically Synthesized
QVQLQESGGGLVQAGGSLRLSCAASGTISPTDYMGWYRQAPGKEREFVAGIASGSITNYADSVKGRFTISRDNAKNTVYLQMNSLKPEDTAVYYCAASAYIQAQADDLYQYWGQGTQVTVSS

SEQ ID NO: 28129 - protein, 126 aa, Artificial Sequence
  Chemically Synthesized
QVQLQESGGGLVQAGGSLRLSCAASGNISYYIYMGWYRQAPGKEREFVATISSGANTNYADSVKGRFTISRDNAKNTVYLQMNSLKPEDTAVYYCAVIRIRYIYGTGLARRYFWYWGQGTQVTVSS

SEQ ID NO: 28130 - protein, 126 aa, Artificial Sequence
  Chemically Synthesized
QVQLQESGGGLVQAGGSLRLSCAASGTISGYNDMGWYRQAPGKERELVAGIAGGATTNYADSVKGRFTISRDNAKNTVYLQMNSLKPEDTAVYYCAVRDTDVPRKLRRYDSHLPYWGQGTQVTVSS

SEQ ID NO: 28131 - protein, 118 aa, Artificial Sequence
  Chemically Synthesized
QVQLQESGGGLVQAGGSLRLSCAASGSIFWAGRMGWYRQAPGKEREFVAGIGWGGITNYADSVKGRFTISRDNAKNTVYLQMNSLKPEDTAVYYCAARRVAYVFHVYWGQGTQVTVSS

SEQ ID NO: 28132 - protein, 122 aa, Artificial Sequence
  Chemically Synthesized
QVQLQESGGGLVQAGGSLRLSCAASGTIFWGVYMGWYRQAPGKEREFVAAIARGAITYYADSVKGRFTISRDNAKNTVYLQMNSLKPEDTAVYYCAVRPRRNPTYDRGHYYWGQGTQVTVSS

SEQ ID NO: 28133 - protein, 126 aa, Artificial Sequence
  Chemically Synthesized
QVQLQESGGGLVQAGGSLRLSCAASGYISRPYDMGWYRQAPGKERELVATISGGGTTNYADSVKGRFTISRDNAKNTVYLQMNSLKPEDTAVYYCAAPARNLLRVREVSGAAFRYWGQGTQVTVSS

SEQ ID NO: 28134 - protein, 118 aa, Artificial Sequence
  Chemically Synthesized
QVQLQESGGGLVQAGGSLRLSCAASGTIFYLYLMGWYRQAPGKERELVAAISFGTTTYYADSVKGRFTISRDNAKNTVYLQMNSLKPEDTAVYYCAVPYVQILSFAYWGQGTQVTVSS

SEQ ID NO: 28135 - protein, 118 aa, Artificial Sequence
  Chemically Synthesized
QVQLQESGGGLVQAGGSLRLSCAASGYISYILYMGWYRQAPGKERELVAAIDYGASTNYADSVKGRFTISRDNAKNTVYLQMNSLKPEDTAVYYCAAYLPWLGPYSYWGQGTQVTVSS

SEQ ID NO: 28136 - protein, 118 aa, Artificial Sequence
  Chemically Synthesized
QVQLQESGGGLVQAGGSLRLSCAASGNIFSKNVMGWYRQAPGKEREFVAAIGNGASTNYADSVKGRFTISRDNAKNTVYLQMNSLKPEDTAVYYCAVLDPHQSTLYYWGQGTQVTVSS

SEQ ID NO: 28137 - protein, 118 aa, Artificial Sequence
  Chemically Synthesized
QVQLQESGGGLVQAGGSLRLSCAASGYIFSSDVMGWYRQAPGKERELVASITRGTNTNYADSVKGRFTISRDNAKNTVYLQMNSLKPEDTAVYYCAVGDRGPFVFIYWGQGTQVTVSS

SEQ ID NO: 28138 - protein, 118 aa, Artificial Sequence
  Chemically Synthesized
QVQLQESGGGLVQAGGSLRLSCAASGNIFDGLYMGWYRQAPGKEREFVAGINAGGTTYYADSVKGRFTISRDNAKNTVYLQMNSLKPEDTAVYYCAVSAYRRDDFPYWGQGTQVTVSS

SEQ ID NO: 28139 - protein, 115 aa, Artificial Sequence
  Chemically Synthesized
QVQLQESGGGLVQAGGSLRLSCAASGNWLTMGWYRQAPGKERELVASITYGGNTYYADSVKGRFTISRDNAKNTVYLQMNSLKPEDTAVYYCAAGYVLFNAHYYWGQGTQVTVSS

SEQ ID NO: 28140 - protein, 118 aa, Artificial Sequence
  Chemically Synthesized
QVQLQESGGGLVQAGGSLRLSCAASGTISTYTPMGWYRQAPGKEREFVAAIADGASTYYADSVKGRFTISRDNAKNTVYLQMNSLKPEDTAVYYCAVASIYYPYLDYWGQGTQVTVSS

SEQ ID NO: 28141 - protein, 122 aa, Artificial Sequence
  Chemically Synthesized
QVQLQESGGGLVQAGGSLRLSCAASGYISYPYYMGWYRQAPGKEREFVAAISDGASTYYADSVKGRFTISRDNAKNTVYLQMNSLKPEDTAVYYCAVDDTYTVGRTGDHRYWGQGTQVTVSS

SEQ ID NO: 28142 - protein, 117 aa, Artificial Sequence
  Chemically Synthesized
QVQLQESGGGLVQAGGSLRLSCAASGTIFQPWPMGWYRQAPGKERELVAGITSVLLPYADSVKGRFTISRDNAKNTVYLQMNSLKPEDTAVYYCAAHDDYGVGYPYWGQGTQVTVSS

SEQ ID NO: 28143 - protein, 118 aa, Artificial Sequence
  Chemically Synthesized
QVQLQESGGGLVQAGGSLRLSCAASGYISDQGQMGWYRQAPGKERELVATIAAGSTTNYADSVKGRFTISRDNAKNTVYLQMNSLKPEDTAVYYCAAGTEYGLPFDYWGQGTQVTVSS

SEQ ID NO: 28144 - protein, 118 aa, Artificial Sequence
  Chemically Synthesized
QVQLQESGGGLVQAGGSLRLSCAASGTISKVVYMGWYRQAPGKEREFVASITKGASTNYADSVKGRFTISRDNAKNTVYLQMNSLKPEDTAVYYCAAEWYPDGYHTYWGQGTQVTVSS

SEQ ID NO: 28145 - protein, 118 aa, Artificial Sequence
  Chemically Synthesized
QVQLQESGGGLVQAGGSLRLSCAASGNIFVINLMGWYRQAPGKERELVAAIGGGSITYYADSVKGRFTISRDNAKNTVYLQMNSLKPEDTAVYYCAVWGYDNDPFFYWGQGTQVTVSS

SEQ ID NO: 28146 - protein, 121 aa, Artificial Sequence
  Chemically Synthesized
QVQLQESGGGLVQAGGSLRLSCAASGYIFGTLMGWYRQAPGKERELVAGIATGATTYYADSVKGRFTISRDNAKNTVYLQMNSLKPEDTAVYYCAAGDRVGYDFGTAYWYWGQGTQVTVSS

SEQ ID NO: 28147 - protein, 122 aa, Artificial Sequence
  Chemically Synthesized
QVQLQESGGGLVQAGGSLRLSCAASGYIFPIIDMGWYRQAPGKEREFVASIGNGASTYYADSVKGRFTISRDNAKNTVYLQMNSLKPEDTAVYYCAADYGERTPAFTTHGYWGQGTQVTVSS

SEQ ID NO: 28148 - protein, 122 aa, Artificial Sequence
  Chemically Synthesized
QVQLQESGGGLVQAGGSLRLSCAASGNISDYADMGWYRQAPGKEREFVASIASGASTYYADSVKGRFTISRDNAKNTVYLQMNSLKPEDTAVYYCAALDQYQYRQDGDYLYWGQGTQVTVSS

SEQ ID NO: 28149 - protein, 118 aa, Artificial Sequence
  Chemically Synthesized
QVQLQESGGGLVQAGGSLRLSCAASGSISDPVVMGWYRQAPGKERELVAAIARGSITYYADSVKGRFTISRDNAKNTVYLQMNSLKPEDTAVYYCAVWYQHVQPLFYWGQGTQVTVSS

SEQ ID NO: 28150 - protein, 120 aa, Artificial Sequence
  Chemically Synthesized
QVQLQESGGGLVQAGGSLRLSCAASGTIFLDDYMGWYRQAPGKERELVASITNGGTTNYADSVKGRFTISRDNAKNTVYLQMNSLKPEDTAVYYCAVDSLRRLRIHSCYWGQGTQVTVSS

SEQ ID NO: 28151 - protein, 118 aa, Artificial Sequence
  Chemically Synthesized
QVQLQESGGGLVQAGGSLRLSCAASGTISYQRYMGWYRQAPGKEREFVATISYGGSTNYADSVKGRFTISRDNAKNTVYLQMNSLKPEDTAVYYCAAYHDIVYYHAYWGQGTQVTVSS

SEQ ID NO: 28152 - protein, 122 aa, Artificial Sequence
  Chemically Synthesized
QVQLQESGGGLVQAGGSLRLSCAASGYIFGGDGMGWYRQAPGKERELVATIAGGANTYYADSVKGRFTISRDNAKNTVYLQMNSLKPEDTAVYYCAAHDYPWGAYPAEFTYWGQGTQVTVSS

SEQ ID NO: 28153 - protein, 127 aa, Artificial Sequence
  Chemically Synthesized
QVQLQESGGGLVQAGGSLRLSCAASGTIFAGDYMGWYRQAPGKERELVAGIATGTSTNYADSVKGRFTISRDNAKNTVYLQMNSLKPEDTAVYYCAAGPPGDRITPSSAPDVRHYYWGQGTQVTVSS

SEQ ID NO: 28154 - protein, 121 aa, Artificial Sequence
  Chemically Synthesized
QVQLQESGGGLVQAGGSLRLSCAASGYIFRAKMGWYRQAPGKERELVASIGIGGITNYADSVKGRFTISRDNAKNTVYLQMNSLKPEDTAVYYCAADYDGFGYKFVRYDYWGQGTQVTVSS

SEQ ID NO: 28155 - protein, 122 aa, Artificial Sequence
  Chemically Synthesized
QVQLQESGGGLVQAGGSLRLSCAASGNIFRYSYMGWYRQAPGKERELVAGIGNGTSTNYADSVKGRFTISRDNAKNTVYLQMNSLKPEDTAVYYCAVLTFGYRIGYDVHRYWGQGTQVTVSS

SEQ ID NO: 28156 - protein, 117 aa, Artificial Sequence
  Chemically Synthesized
QVQLQESGGGLVQAGGSLRLSCAASGTILTSSMGWYRQAPGKEREFVATIGPGGITNYADSVKGRFTISRDNAKNTVYLQMNSLKPEDTAVYYCAAYDPYDYGYDYWGQGTQVTVSS

SEQ ID NO: 28157 - protein, 122 aa, Artificial Sequence
  Chemically Synthesized
QVQLQESGGGLVQAGGSLRLSCAASGTISYDYYMGWYRQAPGKEREFVAAIASGGSTYYADSVKGRFTISRDNAKNTVYLQMNSLKPEDTAVYYCAASLLIYYGHRYTYRYWGQGTQVTVSS

SEQ ID NO: 28158 - protein, 116 aa, Artificial Sequence
  Chemically Synthesized
QVQLQESGGGLVQAGGSLRLSCAASGSIFGYYMGWYRQAPGKEREFVASIGPGGNTNYADSVKGRFTISRDNAKNTVYLQMNSLKPEDTAVYYCAVWGDLSTTIYWGQGTQVTVSS

SEQ ID NO: 28159 - protein, 126 aa, Artificial Sequence
  Chemically Synthesized
QVQLQESGGGLVQAGGSLRLSCAASGYISYYSLMGWYRQAPGKEREFVATISIGTTTYYADSVKGRFTISRDNAKNTVYLQMNSLKPEDTAVYYCAARRVVHSLGPGIWFDWHDYWGQGTQVTVSS

SEQ ID NO: 28160 - protein, 118 aa, Artificial Sequence
  Chemically Synthesized
QVQLQESGGGLVQAGGSLRLSCAASGSIFGLGDMGWYRQAPGKERELVASIAYGTTTYYADSVKGRFTISRDNAKNTVYLQMNSLKPEDTAVYYCAAKTQTGYTYPYWGQGTQVTVSS

SEQ ID NO: 28161 - protein, 122 aa, Artificial Sequence
  Chemically Synthesized
QVQLQESGGGLVQAGGSLRLSCAASGTIFFEYSMGWYRQAPGKEREFVASITTGSSTNYADSVKGRFTISRDNAKNTVYLQMNSLKPEDTAVYYCAAIDRAYAADDLDYYYWGQGTQVTVSS

SEQ ID NO: 28162 - protein, 126 aa, Artificial Sequence
  Chemically Synthesized
QVQLQESGGGLVQAGGSLRLSCAASGSISYTRSMGWYRQAPGKEREFVAGISGGTNTYYADSVKGRFTISRDNAKNTVYLQMNSLKPEDTAVYYCAAYLVLRKLGDGNYHVAHPYWGQGTQVTVSS

SEQ ID NO: 28163 - protein, 122 aa, Artificial Sequence
  Chemically Synthesized
QVQLQESGGGLVQAGGSLRLSCAASGTIFYYYAMGWYRQAPGKERELVATIDLGGNTNYADSVKGRFTISRDNAKNTVYLQMNSLKPEDTAVYYCAAHYHAYSWPPYPYAYWGQGTQVTVSS

SEQ ID NO: 28164 - protein, 126 aa, Artificial Sequence
  Chemically Synthesized
QVQLQESGGGLVQAGGSLRLSCAASGTISDDDPMGWYRQAPGKEREFVAGINHGTNTNYADSVKGRFTISRDNAKNTVYLQMNSLKPEDTAVYYCAVLVYFDSYSQSYYSYYLTYWGQGTQVTVSS

SEQ ID NO: 28165 - protein, 122 aa, Artificial Sequence
  Chemically Synthesized
QVQLQESGGGLVQAGGSLRLSCAASGNIFDPQVMGWYRQAPGKEREFVASIDQGSNTYYADSVKGRFTISRDNAKNTVYLQMNSLKPEDTAVYYCAADAYPGGDAAGRHHYWGQGTQVTVSS

SEQ ID NO: 28166 - protein, 122 aa, Artificial Sequence
  Chemically Synthesized
QVQLQESGGGLVQAGGSLRLSCAASGSIFAYVSMGWYRQAPGKEREFVAGITTGANTYYADSVKGRFTISRDNAKNTVYLQMNSLKPEDTAVYYCAVVTKSRQYLLSYHRYWGQGTQVTVSS

SEQ ID NO: 28167 - protein, 118 aa, Artificial Sequence
  Chemically Synthesized
QVQLQESGGGLVQAGGSLRLSCAASGNISRDQDMGWYRQAPGKERELVAGITYGSSTYYADSVKGRFTISRDNAKNTVYLQMNSLKPEDTAVYYCAVALSYQRYYYYWGQGTQVTVSS

SEQ ID NO: 28168 - protein, 121 aa, Artificial Sequence
  Chemically Synthesized
QVQLQESGGGLVQAGGSLRLSCAASGNISRGNDMGWYRQAPGKERELVAAINSVVIPYADSVKGRFTISRDNAKNTVYLQMNSLKPEDTAVYYCAVGYVNRYRFALDHGYWGQGTQVTVSS

SEQ ID NO: 28169 - protein, 126 aa, Artificial Sequence
  Chemically Synthesized
QVQLQESGGGLVQAGGSLRLSCAASGYIFHVLLMGWYRQAPGKERELVASIDYGASTYYADSVKGRFTISRDNAKNTVYLQMNSLKPEDTAVYYCAVWVLEGPDDGHNYWEIHRYWGQGTQVTVSS

SEQ ID NO: 28170 - protein, 117 aa, Artificial Sequence
  Chemically Synthesized
QVQLQESGGGLVQAGGSLRLSCAASGYIFPVLMGWYRQAPGKEREFVATISVGSITYYADSVKGRFTISRDNAKNTVYLQMNSLKPEDTAVYYCAVYRKTRYTFGYWGQGTQVTVSS

SEQ ID NO: 28171 - protein, 118 aa, Artificial Sequence
  Chemically Synthesized
QVQLQESGGGLVQAGGSLRLSCAASGNISVITHMGWYRQAPGKEREFVAGIAPGGSTYYADSVKGRFTISRDNAKNTVYLQMNSLKPEDTAVYYCAAYYYSDLVHDYWGQGTQVTVSS

SEQ ID NO: 28172 - protein, 121 aa, Artificial Sequence
  Chemically Synthesized
QVQLQESGGGLVQAGGSLRLSCAASGNIFRVPAMGWYRQAPGKEREFVAGITVGGITYYADSVKGRFTISRDNAKNTVYLQMNSLKPEDTAVYYCAAVEARYPLREDHLYWGQGTQVTVSS

SEQ ID NO: 28173 - protein, 122 aa, Artificial Sequence
  Chemically Synthesized
QVQLQESGGGLVQAGGSLRLSCAASGYIFFYPRMGWYRQAPGKEREFVAAITYGATTYYADSVKGRFTISRDNAKNTVYLQMNSLKPEDTAVYYCAAVRIWAWVYNVKHLYWGQGTQVTVSS

SEQ ID NO: 28174 - protein, 122 aa, Artificial Sequence
  Chemically Synthesized
QVQLQESGGGLVQAGGSLRLSCAASGNISWEQSMGWYRQAPGKEREFVASITYGGNTNYADSVKGRFTISRDNAKNTVYLQMNSLKPEDTAVYYCAVYDYVRYYEVGRYRYWGQGTQVTVSS

SEQ ID NO: 28175 - protein, 122 aa, Artificial Sequence
  Chemically Synthesized
QVQLQESGGGLVQAGGSLRLSCAASGTISIYDVMGWYRQAPGKEREFVAGIDDGTTTNYADSVKGRFTISRDNAKNTVYLQMNSLKPEDTAVYYCAALLVGDNWADDWYVYWGQGTQVTVSS

SEQ ID NO: 28176 - protein, 118 aa, Artificial Sequence
  Chemically Synthesized
QVQLQESGGGLVQAGGSLRLSCAASGTIFSPYIMGWYRQAPGKERELVAAISYGSNTYYADSVKGRFTISRDNAKNTVYLQMNSLKPEDTAVYYCAAGAAVYLTYYYWGQGTQVTVSS

SEQ ID NO: 28177 - protein, 119 aa, Artificial Sequence
  Chemically Synthesized
QVQLQESGGGLVQAGGSLRLSCAASGYISNLWLMGWYRQAPGKEREFVAGIGYGANTYYADSVKGRFTISRDNAKNTVYLQMNSLKPEDTAVYYCAAYLYLNTNTSDYWGQGTQVTVSS

SEQ ID NO: 28178 - protein, 125 aa, Artificial Sequence
  Chemically Synthesized
QVQLQESGGGLVQAGGSLRLSCAASGYISTRALMGWYRQAPGKERELVALLVRVLIPYADSVKGRFTISRDNAKNTVYLQMNSLKPEDTAVYYCAVTRPYSLYPIDASLIRLDYWGQGTQVTVSS

SEQ ID NO: 28179 - protein, 122 aa, Artificial Sequence
  Chemically Synthesized
QVQLQESGGGLVQAGGSLRLSCAASGNIFFRAPMGWYRQAPGKERELVATIDGGGNTYYADSVKGRFTISRDNAKNTVYLQMNSLKPEDTAVYYCAAGHAARESYVAPYDYWGQGTQVTVSS

SEQ ID NO: 28180 - protein, 118 aa, Artificial Sequence
  Chemically Synthesized
QVQLQESGGGLVQAGGSLRLSCAASGYISAVRTMGWYRQAPGKEREFVAAIAHGSTTNYADSVKGRFTISRDNAKNTVYLQMNSLKPEDTAVYYCAADAPYAGEYQYWGQGTQVTVSS

SEQ ID NO: 28181 - protein, 118 aa, Artificial Sequence
  Chemically Synthesized
QVQLQESGGGLVQAGGSLRLSCAASGTIFDKGDMGWYRQAPGKERELVAAIGAGSITNYADSVKGRFTISRDNAKNTVYLQMNSLKPEDTAVYYCAARLSRSYYFIYWGQGTQVTVSS

SEQ ID NO: 28182 - protein, 118 aa, Artificial Sequence
  Chemically Synthesized
QVQLQESGGGLVQAGGSLRLSCAASGSIFNGGGMGWYRQAPGKEREFVAAISSGSITYYADSVKGRFTISRDNAKNTVYLQMNSLKPEDTAVYYCAAGTGSGRALEYWGQGTQVTVSS

SEQ ID NO: 28183 - protein, 122 aa, Artificial Sequence
  Chemically Synthesized
QVQLQESGGGLVQAGGSLRLSCAASGTIFGGVDMGWYRQAPGKERELVAAINDGSTTYYADSVKGRFTISRDNAKNTVYLQMNSLKPEDTAVYYCAVGYADHADGNYGLDYWGQGTQVTVSS

SEQ ID NO: 28184 - protein, 122 aa, Artificial Sequence
  Chemically Synthesized
QVQLQESGGGLVQAGGSLRLSCAASGNIFFFIGMGWYRQAPGKERELVAGISLGASTNYADSVKGRFTISRDNAKNTVYLQMNSLKPEDTAVYYCAAFFYSQDLDEDVFKYWGQGTQVTVSS

SEQ ID NO: 28185 - protein, 118 aa, Artificial Sequence
  Chemically Synthesized
QVQLQESGGGLVQAGGSLRLSCAASGNISSDLIMGWYRQAPGKERELVAAINYGANTYYADSVKGRFTISRDNAKNTVYLQMNSLKPEDTAVYYCAAYKSTPYGFSYWGQGTQVTVSS

SEQ ID NO: 28186 - protein, 122 aa, Artificial Sequence
  Chemically Synthesized
QVQLQESGGGLVQAGGSLRLSCAASGTISDPTYMGWYRQAPGKERELVAGIGDGTSTNYADSVKGRFTISRDNAKNTVYLQMNSLKPEDTAVYYCAADQSIDIPTNRAHQYWGQGTQVTVSS

SEQ ID NO: 28187 - protein, 118 aa, Artificial Sequence
  Chemically Synthesized
QVQLQESGGGLVQAGGSLRLSCAASGTIFGPQYMGWYRQAPGKEREFVATIGAGSSTNYADSVKGRFTISRDNAKNTVYLQMNSLKPEDTAVYYCAVPPDHDGGYSYWGQGTQVTVSS

SEQ ID NO: 28188 - protein, 118 aa, Artificial Sequence
  Chemically Synthesized
QVQLQESGGGLVQAGGSLRLSCAASGTISPYRKMGWYRQAPGKEREFVASISSGSNTYYADSVKGRFTISRDNAKNTVYLQMNSLKPEDTAVYYCAVYAYALSWLFYWGQGTQVTVSS

SEQ ID NO: 28189 - protein, 115 aa, Artificial Sequence
  Chemically Synthesized
QVQLQESGGGLVQAGGSLRLSCAASGYIFVLGGMGWYRQAPGKERELVATIGQGSSTYYADSVKGRFTISRDNAKNTVYLQMNSLKPEDTAVYYCAQGYYYHLYWGQGTQVTVSS

SEQ ID NO: 28190 - protein, 121 aa, Artificial Sequence
  Chemically Synthesized
QVQLQESGGGLVQAGGSLRLSCAASGNISYSPGMGWYRQAPGKERELVAGIAIGATNYADSVKGRFTISRDNAKNTVYLQMNSLKPEDTAVYYCAADWYVPQQAWSTHQYWGQGTQVTVSS

SEQ ID NO: 28191 - protein, 121 aa, Artificial Sequence
  Chemically Synthesized
QVQLQESGGGLVQAGGSLRLSCAASGTISGAWVMGWYRQAPGKERELVASINAGTTTYYADSVKGRFTISRDNAKNTVYLQMNSLKPEDTAVYYCAADVASVITLVRTIYWGQGTQVTVSS

SEQ ID NO: 28192 - protein, 117 aa, Artificial Sequence
  Chemically Synthesized
QVQLQESGGGLVQAGGSLRLSCAASGNISLATMGWYRQAPGKERELVAAIDEGTNTNYADSVKGRFTISRDNAKNTVYLQMNSLKPEDTAVYYCAATYVTQTLHSYWGQGTQVTVSS

SEQ ID NO: 28193 - protein, 125 aa, Artificial Sequence
  Chemically Synthesized
QVQLQESGGGLVQAGGSLRLSCAASGSISSVDDMGWYRQAPGKERELVASIDSGAITYYADSVKGRFTISRDNAKNTVYLQMNSLKPEDTAVYYCAATNSVTCTTLLTLTRSIYWGQGTQVTVSS

SEQ ID NO: 28194 - protein, 126 aa, Artificial Sequence
  Chemically Synthesized
QVQLQESGGGLVQAGGSLRLSCAASGNIFVAVFMGWYRQAPGKEREFVAGIGVGSITYYADSVKGRFTISRDNAKNTVYLQMNSLKPEDTAVYYCAALGDAADYVVYDAYDDFPYWGQGTQVTVSS

SEQ ID NO: 28195 - protein, 118 aa, Artificial Sequence
  Chemically Synthesized
QVQLQESGGGLVQAGGSLRLSCAASGYIFRWTGMGWYRQAPGKERELVATIARGTSTNYADSVKGRFTISRDNAKNTVYLQMNSLKPEDTAVYYCAAVRILGRQHPYWGQGTQVTVSS

SEQ ID NO: 28196 - protein, 122 aa, Artificial Sequence
  Chemically Synthesized
QVQLQESGGGLVQAGGSLRLSCAASGTISVYRYMGWYRQAPGKERELVAGIASGGTTYYADSVKGRFTISRDNAKNTVYLQMNSLKPEDTAVYYCAVYQQQYGDYTPDHLYWGQGTQVTVSS

SEQ ID NO: 28197 - protein, 118 aa, Artificial Sequence
  Chemically Synthesized
QVQLQESGGGLVQAGGSLRLSCAASGNIFYVSYMGWYRQAPGKEREFVAAITGGSTTYYADSVKGRFTISRDNAKNTVYLQMNSLKPEDTAVYYCAVTHSRTFWLAYWGQGTQVTVSS

SEQ ID NO: 28198 - protein, 118 aa, Artificial Sequence
  Chemically Synthesized
QVQLQESGGGLVQAGGSLRLSCAASGTISYPRNMGWYRQAPGKERELVAGIGTGTTTNYADSVKGRFTISRDNAKNTVYLQMNSLKPEDTAVYYCAAKYKWYFPHYYWGQGTQVTVSS

SEQ ID NO: 28199 - protein, 111 aa, Artificial Sequence
  Chemically Synthesized
QVQLQESGGGLVQAGGSLRLSCAASGSISGTSAMGWYRQAPGKERELVAAIDYGSNTNYADSVKGRFTISRDNAKNTVYLQMNSLKPEDTAVYYCAATIYWGQGTQVTVSS

SEQ ID NO: 28200 - protein, 118 aa, Artificial Sequence
  Chemically Synthesized
QVQLQESGGGLVQAGGSLRLSCAASGNISAIYYMGWYRQAPGKERELVAAIDPGGSTNYADSVKGRFTISRDNAKNTVYLQMNSLKPEDTAVYYCAVYTYSHPAHVYWGQGTQVTVSS

SEQ ID NO: 28201 - protein, 118 aa, Artificial Sequence
  Chemically Synthesized
QVQLQESGGGLVQAGGSLRLSCAASGSISGSQVMGWYRQAPGKEREFVASISSVVVPYADSVKGRFTISRDNAKNTVYLQMNSLKPEDTAVYYCAQRDHDYLAGGHYWGQGTQVTVSS

SEQ ID NO: 28202 - protein, 122 aa, Artificial Sequence
  Chemically Synthesized
QVQLQESGGGLVQAGGSLRLSCAASGTIFGFGYMGWYRQAPGKERELVASISPGANTNYADSVKGRFTISRDNAKNTVYLQMNSLKPEDTAVYYCAARWYPRGVHYTSYRYWGQGTQVTVSS

SEQ ID NO: 28203 - protein, 122 aa, Artificial Sequence
  Chemically Synthesized
QVQLQESGGGLVQAGGSLRLSCAASGTIFLAILMGWYRQAPGKEREFVASIGLGTSTYYADSVKGRFTISRDNAKNTVYLQMNSLKPEDTAVYYCAAWIDTGNNGIYDFYYWGQGTQVTVSS

SEQ ID NO: 28204 - protein, 122 aa, Artificial Sequence
  Chemically Synthesized
QVQLQESGGGLVQAGGSLRLSCAASGSIFHPHYMGWYRQAPGKEREFVAAISTGANTYYADSVKGRFTISRDNAKNTVYLQMNSLKPEDTAVYYCAAYAIDRGTIQTYLGYWGQGTQVTVSS

SEQ ID NO: 28205 - protein, 117 aa, Artificial Sequence
  Chemically Synthesized
QVQLQESGGGLVQAGGSLRLSCAASGYIFGTIYMGWYRQAPGKEREFVASINDGSITYYADSVKGRFTISRDNAKNTVYLQMNSLKPEDTAVYYCAAGRYVMTVSYWGQGTQVTVSS

SEQ ID NO: 28206 - protein, 118 aa, Artificial Sequence
  Chemically Synthesized
QVQLQESGGGLVQAGGSLRLSCAASGTISTTIPMGWYRQAPGKERELVASISGGTITNYADSVKGRFTISRDNAKNTVYLQMNSLKPEDTAVYYCAAYPNQNPNHVYWGQGTQVTVSS

SEQ ID NO: 28207 - protein, 120 aa, Artificial Sequence
  Chemically Synthesized
QVQLQESGGGLVQAGGSLRLSCAASGNISRPYDMGWYRQAPGKEREFVAGIADGGTYADSVKGRFTISRDNAKNTVYLQMNSLKPEDTAVYYCAVYWDVFPDGQRDHAYWGQGTQVTVSS

SEQ ID NO: 28208 - protein, 110 aa, Artificial Sequence
  Chemically Synthesized
QVQLQESGGGLVQAGGSLRLSCAASGTIFGDEGMGWYRQAPGKERELVAGISVGTNTYYADSVKGRFTISRDNAKNTVYLQMNSLKPEDTAVYYCAALYWGQGTQVTVSS

SEQ ID NO: 28209 - protein, 117 aa, Artificial Sequence
  Chemically Synthesized
QVQLQESGGGLVQAGGSLRLSCAASGTISWAYGMGWYRQAPGKEREFVATITSGTSTNYADSVKGRFTISRDNAKNTVYLQMNSLKPEDTAVYYCAVLDVPDADFYWGQGTQVTVSS

SEQ ID NO: 28210 - protein, 122 aa, Artificial Sequence
  Chemically Synthesized
QVQLQESGGGLVQAGGSLRLSCAASGSIFDGSYMGWYRQAPGKERELVATINRGGTTNYADSVKGRFTISRDNAKNTVYLQMNSLKPEDTAVYYCAVRERKLWSGDSSHGYWGQGTQVTVSS

SEQ ID NO: 28211 - protein, 121 aa, Artificial Sequence
  Chemically Synthesized
QVQLQESGGGLVQAGGSLRLSCAASGNISDVLFMGWYRQAPGKEREFVASIDPGTNTNYADSVKGRFTISRDNAKNTVYLQMNSLKPEDTAVYYCAVYSYSSDDASLTMYWGQGTQVTVSS

SEQ ID NO: 28212 - protein, 126 aa, Artificial Sequence
  Chemically Synthesized
QVQLQESGGGLVQAGGSLRLSCAASGYISRAAVMGWYRQAPGKERELVAAITGGASTYYADSVKGRFTISRDNAKNTVYLQMNSLKPEDTAVYYCAVKGYPRKYPAYGSYRYHYYWGQGTQVTVSS

SEQ ID NO: 28213 - protein, 117 aa, Artificial Sequence
  Chemically Synthesized
QVQLQESGGGLVQAGGSLRLSCAASGYIFTDGQMGWYRQAPGKEREFVAGIADGGSTYYADSVKGRFTISRDNAKNTVYLQMNSLKPEDTAVYYCAVIYDDHNHYYWGQGTQVTVSS

SEQ ID NO: 28214 - protein, 122 aa, Artificial Sequence
  Chemically Synthesized
QVQLQESGGGLVQAGGSLRLSCAASGNIFRPRYMGWYRQAPGKERELVATINAGTTTNYADSVKGRFTISRDNAKNTVYLQMNSLKPEDTAVYYCAVWNYRRYYFNRIFDYWGQGTQVTVSS

SEQ ID NO: 28215 - protein, 118 aa, Artificial Sequence
  Chemically Synthesized
QVQLQESGGGLVQAGGSLRLSCAASGTIFYYTEMGWYRQAPGKEREFVAGIGAGTITNYADSVKGRFTISRDNAKNTVYLQMNSLKPEDTAVYYCAADDWSYERLAYWGQGTQVTVSS

SEQ ID NO: 28216 - protein, 118 aa, Artificial Sequence
  Chemically Synthesized
QVQLQESGGGLVQAGGSLRLSCAASGNISSYRRMGWYRQAPGKERELVASIAGGASTNYADSVKGRFTISRDNAKNTVYLQMNSLKPEDTAVYYCAVYIHDYDLLYYWGQGTQVTVSS

SEQ ID NO: 28217 - protein, 118 aa, Artificial Sequence
  Chemically Synthesized
QVQLQESGGGLVQAGGSLRLSCAASGTISVYTAMGWYRQAPGKERELVAGIGYGSNTYYADSVKGRFTISRDNAKNTVYLQMNSLKPEDTAVYYCAVPYSYISYHPYWGQGTQVTVSS

SEQ ID NO: 28218 - protein, 118 aa, Artificial Sequence
  Chemically Synthesized
QVQLQESGGGLVQAGGSLRLSCAASGTISRRGTMGWYRQAPGKERELVATIARGGTTYYADSVKGRFTISRDNAKNTVYLQMNSLKPEDTAVYYCAVHYRRYDYLLYWGQGTQVTVSS

SEQ ID NO: 28219 - protein, 118 aa, Artificial Sequence
  Chemically Synthesized
QVQLQESGGGLVQAGGSLRLSCAASGTIFRTTSMGWYRQAPGKERELVAAISLGTITNYADSVKGRFTISRDNAKNTVYLQMNSLKPEDTAVYYCAAYYVDVDSFVYWGQGTQVTVSS

SEQ ID NO: 28220 - protein, 118 aa, Artificial Sequence
  Chemically Synthesized
QVQLQESGGGLVQAGGSLRLSCAASGYIFPRHGMGWYRQAPGKERELVAAITYGTNTYYADSVKGRFTISRDNAKNTVYLQMNSLKPEDTAVYYCAAGGRYWTAFRYWGQGTQVTVSS

SEQ ID NO: 28221 - protein, 117 aa, Artificial Sequence
  Chemically Synthesized
QVQLQESGGGLVQAGGSLRLSCAASGTILVVVMGWYRQAPGKERELVATIGTGGNTNYADSVKGRFTISRDNAKNTVYLQMNSLKPEDTAVYYCAAWDWSHYRLDYWGQGTQVTVSS

SEQ ID NO: 28222 - protein, 118 aa, Artificial Sequence
  Chemically Synthesized
QVQLQESGGGLVQAGGSLRLSCAASGTIFESYTMGWYRQAPGKEREFVAGIAPGAITYYADSVKGRFTISRDNAKNTVYLQMNSLKPEDTAVYYCAVSYYDGQDHYYWGQGTQVTVSS

SEQ ID NO: 28223 - protein, 122 aa, Artificial Sequence
  Chemically Synthesized
QVQLQESGGGLVQAGGSLRLSCAASGNISAHRYMGWYRQAPGKEREFVATITDGATTNYADSVKGRFTISRDNAKNTVYLQMNSLKPEDTAVYYCAALDLHRYFKRIDLSYWGQGTQVTVSS

SEQ ID NO: 28224 - protein, 126 aa, Artificial Sequence
  Chemically Synthesized
QVQLQESGGGLVQAGGSLRLSCAASGTIFRAYGMGWYRQAPGKERELVATIAHGSTTYYADSVKGRFTISRDNAKNTVYLQMNSLKPEDTAVYYCAVGFIRWGYLYDRDRTYYRYWGQGTQVTVSS

SEQ ID NO: 28225 - protein, 118 aa, Artificial Sequence
  Chemically Synthesized
QVQLQESGGGLVQAGGSLRLSCAASGYISDAPLMGWYRQAPGKERELVATIDDGTNTNYADSVKGRFTISRDNAKNTVYLQMNSLKPEDTAVYYCAVRNIWATALPYWGQGTQVTVSS

SEQ ID NO: 28226 - protein, 118 aa, Artificial Sequence
  Chemically Synthesized
QVQLQESGGGLVQAGGSLRLSCAASGTISRTGYMGWYRQAPGKEREFVATIDYGGSTYYADSVKGRFTISRDNAKNTVYLQMNSLKPEDTAVYYCAVNRAWGGKYYYWGQGTQVTVSS

SEQ ID NO: 28227 - protein, 117 aa, Artificial Sequence
  Chemically Synthesized
QVQLQESGGGLVQAGGSLRLSCAASGNISRRHIMGWYRQAPGKERELVAGITYGAITYADSVKGRFTISRDNAKNTVYLQMNSLKPEDTAVYYCAVNVSDWDDHRYWGQGTQVTVSS

SEQ ID NO: 28228 - protein, 117 aa, Artificial Sequence
  Chemically Synthesized
QVQLQESGGGLVQAGGSLRLSCAASGYISDRTDMGWYRQAPGKERELVATITRGSSTNYADSVKGRFTISRDNAKNTVYLQMNSLKPEDTAVYYCAVHGRDYGSHYWGQGTQVTVSS

SEQ ID NO: 28229 - protein, 126 aa, Artificial Sequence
  Chemically Synthesized
QVQLQESGGGLVQAGGSLRLSCAASGTISSLNYMGWYRQAPGKEREFVASISYGGNTYYADSVKGRFTISRDNAKNTVYLQMNSLKPEDTAVYYCAAWDSELIVDYDLYTVQLDYWGQGTQVTVSS

SEQ ID NO: 28230 - protein, 114 aa, Artificial Sequence
  Chemically Synthesized
QVQLQESGGGLVQAGGSLRLSCAASGTISRSGNMGWYRQAPGKERELVAAIAFGYADSVKGRFTISRDNAKNTVYLQMNSLKPEDTAVYYCAALLFVQSDHDYWGQGTQVTVSS

SEQ ID NO: 28231 - protein, 122 aa, Artificial Sequence
  Chemically Synthesized
QVQLQESGGGLVQAGGSLRLSCAASGTIFYLVHMGWYRQAPGKERELVATISRGASTNYADSVKGRFTISRDNAKNTVYLQMNSLKPEDTAVYYCAAGYYLYSRILGYHAYWGQGTQVTVSS

SEQ ID NO: 28232 - protein, 117 aa, Artificial Sequence
  Chemically Synthesized
QVQLQESGGGLVQAGGSLRLSCAASGYIFSYPYMGWYRQAPGKEREFVAGITAGGTTYYADSVKGRFTISRDNAKNTVYLQMNSLKPEDTAVYYCAAAYDVDGTIYWGQGTQVTVSS

SEQ ID NO: 28233 - protein, 118 aa, Artificial Sequence
  Chemically Synthesized
QVQLQESGGGLVQAGGSLRLSCAASGYISPSDAMGWYRQAPGKERELVASISTGASTYYADSVKGRFTISRDNAKNTVYLQMNSLKPEDTAVYYCAAITHYSSYHTYWGQGTQVTVSS

SEQ ID NO: 28234 - protein, 122 aa, Artificial Sequence
  Chemically Synthesized
QVQLQESGGGLVQAGGSLRLSCAASGSISPKTYMGWYRQAPGKERELVATITYGTITYYADSVKGRFTISRDNAKNTVYLQMNSLKPEDTAVYYCAVIYPGDYILNDNFFYWGQGTQVTVSS

SEQ ID NO: 28235 - protein, 122 aa, Artificial Sequence
  Chemically Synthesized
QVQLQESGGGLVQAGGSLRLSCAASGNISDQPYMGWYRQAPGKERELVASIDDGGTTNYADSVKGRFTISRDNAKNTVYLQMNSLKPEDTAVYYCAVVGDIYVTWHHYYYYWGQGTQVTVSS

SEQ ID NO: 28236 - protein, 122 aa, Artificial Sequence
  Chemically Synthesized
QVQLQESGGGLVQAGGSLRLSCAASGNISGSDHMGWYRQAPGKERELVAGIGVGGSTNYADSVKGRFTISRDNAKNTVYLQMNSLKPEDTAVYYCAVSLYYAIGYYDGHDYWGQGTQVTVSS

SEQ ID NO: 28237 - protein, 122 aa, Artificial Sequence
  Chemically Synthesized
QVQLQESGGGLVQAGGSLRLSCAASGYISRWLRMGWYRQAPGKERELVASITTGGTTYYADSVKGRFTISRDNAKNTVYLQMNSLKPEDTAVYYCAVGLISWRPYVLRHSYWGQGTQVTVSS

SEQ ID NO: 28238 - protein, 126 aa, Artificial Sequence
  Chemically Synthesized
QVQLQESGGGLVQAGGSLRLSCAASGSISTDLVMGWYRQAPGKEREFVAAITDGTSTYYADSVKGRFTISRDNAKNTVYLQMNSLKPEDTAVYYCAANDLDLEYLTYHRWTLLPYWGQGTQVTVSS

SEQ ID NO: 28239 - protein, 118 aa, Artificial Sequence
  Chemically Synthesized
QVQLQESGGGLVQAGGSLRLSCAASGTIFYSRVMGWYRQAPGKEREFVAAIGTGSNTYYADSVKGRFTISRDNAKNTVYLQMNSLKPEDTAVYYCAVYRSKHSHLRYWGQGTQVTVSS

SEQ ID NO: 28240 - protein, 118 aa, Artificial Sequence
  Chemically Synthesized
QVQLQESGGGLVQAGGSLRLSCAASGSIFYRTYMGWYRQAPGKEREFVASITTGATTYYADSVKGRFTISRDNAKNTVYLQMNSLKPEDTAVYYCAAHRWWYYRHAYWGQGTQVTVSS

SEQ ID NO: 28241 - protein, 118 aa, Artificial Sequence
  Chemically Synthesized
QVQLQESGGGLVQAGGSLRLSCAASGNISFPTYMGWYRQAPGKERELVAAISEGGITYYADSVKGRFTISRDNAKNTVYLQMNSLKPEDTAVYYCAAEYYHYDYHWYWGQGTQVTVSS

SEQ ID NO: 28242 - protein, 118 aa, Artificial Sequence
  Chemically Synthesized
QVQLQESGGGLVQAGGSLRLSCAASGTIFYSWSMGWYRQAPGKERELVASIGRGATTYYADSVKGRFTISRDNAKNTVYLQMNSLKPEDTAVYYCAAGYVGTSAYSYWGQGTQVTVSS

SEQ ID NO: 28243 - protein, 118 aa, Artificial Sequence
  Chemically Synthesized
QVQLQESGGGLVQAGGSLRLSCAASGTIFGYGYMGWYRQAPGKEREFVAAISRGTSTNYADSVKGRFTISRDNAKNTVYLQMNSLKPEDTAVYYCAARFRWGLYYRYWGQGTQVTVSS

SEQ ID NO: 28244 - protein, 118 aa, Artificial Sequence
  Chemically Synthesized
QVQLQESGGGLVQAGGSLRLSCAASGTISPRRWMGWYRQAPGKERELVASIGYGASTNYADSVKGRFTISRDNAKNTVYLQMNSLKPEDTAVYYCAVRALLYRYHGYWGQGTQVTVSS

SEQ ID NO: 28245 - protein, 118 aa, Artificial Sequence
  Chemically Synthesized
QVQLQESGGGLVQAGGSLRLSCAASGTIFGRQLMGWYRQAPGKERELVAAISNGATTYYADSVKGRFTISRDNAKNTVYLQMNSLKPEDTAVYYCAVTWYGYYYHNYWGQGTQVTVSS

SEQ ID NO: 28246 - protein, 118 aa, Artificial Sequence
  Chemically Synthesized
QVQLQESGGGLVQAGGSLRLSCAASGTIFTKRIMGWYRQAPGKERELVASISYGTNTYYADSVKGRFTISRDNAKNTVYLQMNSLKPEDTAVYYCAVGYQWRRWHWYWGQGTQVTVSS

SEQ ID NO: 28247 - protein, 122 aa, Artificial Sequence
  Chemically Synthesized
QVQLQESGGGLVQAGGSLRLSCAASGTISNVYYMGWYRQAPGKERELVAGITPGTTTYYADSVKGRFTISRDNAKNTVYLQMNSLKPEDTAVYYCAATYDDSPRASQSHWYWGQGTQVTVSS

SEQ ID NO: 28248 - protein, 122 aa, Artificial Sequence
  Chemically Synthesized
QVQLQESGGGLVQAGGSLRLSCAASGNISGSGVMGWYRQAPGKERELVATIGPGGTTYYADSVKGRFTISRDNAKNTVYLQMNSLKPEDTAVYYCAAYNSRSAADYYYHTYWGQGTQVTVSS

SEQ ID NO: 28249 - protein, 118 aa, Artificial Sequence
  Chemically Synthesized
QVQLQESGGGLVQAGGSLRLSCAASGSIFAAPVMGWYRQAPGKERELVASINWGSITYYADSVKGRFTISRDNAKNTVYLQMNSLKPEDTAVYYCAATYEDRDVLVYWGQGTQVTVSS

SEQ ID NO: 28250 - protein, 126 aa, Artificial Sequence
  Chemically Synthesized
QVQLQESGGGLVQAGGSLRLSCAASGYISWYSVMGWYRQAPGKERELVATIGKGGSTYYADSVKGRFTISRDNAKNTVYLQMNSLKPEDTAVYYCAVLYHGDVWGDPYNVLLYDYWGQGTQVTVSS

SEQ ID NO: 28251 - protein, 126 aa, Artificial Sequence
  Chemically Synthesized
QVQLQESGGGLVQAGGSLRLSCAASGNISRFRTMGWYRQAPGKEREFVAAINAGTSTNYADSVKGRFTISRDNAKNTVYLQMNSLKPEDTAVYYCAAYKQYKYQLYRDRLYPFWYWGQGTQVTVSS

SEQ ID NO: 28252 - protein, 112 aa, Artificial Sequence
  Chemically Synthesized
QVQLQESGGGLVQAGGSLRLSCAASGTIFSLEPMGWYRQAPGKEREFVATIAHGSTTNYADSVKGRFTISRDNAKNTVYLQMNSLKPEDTAVYYCAGWLDYWGQGTQVTVSS

SEQ ID NO: 28253 - protein, 118 aa, Artificial Sequence
  Chemically Synthesized
QVQLQESGGGLVQAGGSLRLSCAASGYISRWSGMGWYRQAPGKERELVAAISYGTITYYADSVKGRFTISRDNAKNTVYLQMNSLKPEDTAVYYCAVRGYIWHAFTYWGQGTQVTVSS

SEQ ID NO: 28254 - protein, 122 aa, Artificial Sequence
  Chemically Synthesized
QVQLQESGGGLVQAGGSLRLSCAASGYISYALYMGWYRQAPGKEREFVAGIGVGTSTYYADSVKGRFTISRDNAKNTVYLQMNSLKPEDTAVYYCAAIGGILRLYSGFYDYWGQGTQVTVSS

SEQ ID NO: 28255 - protein, 118 aa, Artificial Sequence
  Chemically Synthesized
QVQLQESGGGLVQAGGSLRLSCAASGSISHPRSMGWYRQAPGKERELVASIGRGSSTNYADSVKGRFTISRDNAKNTVYLQMNSLKPEDTAVYYCAVAGRYYSLYRYWGQGTQVTVSS

SEQ ID NO: 28256 - protein, 122 aa, Artificial Sequence
  Chemically Synthesized
QVQLQESGGGLVQAGGSLRLSCAASGTISDPYYMGWYRQAPGKERELVATITLGTSTNYADSVKGRFTISRDNAKNTVYLQMNSLKPEDTAVYYCAVAHGWPHGRSRTLEYWGQGTQVTVSS

SEQ ID NO: 28257 - protein, 118 aa, Artificial Sequence
  Chemically Synthesized
QVQLQESGGGLVQAGGSLRLSCAASGNIFNRWAMGWYRQAPGKERELVASITRGTTTNYADSVKGRFTISRDNAKNTVYLQMNSLKPEDTAVYYCAATVLRRWYHSYWGQGTQVTVSS

SEQ ID NO: 28258 - protein, 118 aa, Artificial Sequence
  Chemically Synthesized
QVQLQESGGGLVQAGGSLRLSCAASGYISYVTYMGWYRQAPGKEREFVASIGFGSSTYYADSVKGRFTISRDNAKNTVYLQMNSLKPEDTAVYYCAAFTWNGLLLYYWGQGTQVTVSS

SEQ ID NO: 28259 - protein, 118 aa, Artificial Sequence
  Chemically Synthesized
QVQLQESGGGLVQAGGSLRLSCAASGTIFRRKIMGWYRQAPGKERELVASITQGSSTYYADSVKGRFTISRDNAKNTVYLQMNSLKPEDTAVYYCAVLIRYPSGHLYWGQGTQVTVSS

SEQ ID NO: 28260 - protein, 126 aa, Artificial Sequence
  Chemically Synthesized
QVQLQESGGGLVQAGGSLRLSCAASGTISAAYEMGWYRQAPGKEREFVAGITRGANTYYADSVKGRFTISRDNAKNTVYLQMNSLKPEDTAVYYCAAPNDWVGTQWGDYVYLHAYWGQGTQVTVSS

SEQ ID NO: 28261 - protein, 118 aa, Artificial Sequence
  Chemically Synthesized
QVQLQESGGGLVQAGGSLRLSCAASGSISYVYLMGWYRQAPGKEREFVASIAYGTNTNYADSVKGRFTISRDNAKNTVYLQMNSLKPEDTAVYYCAAGAQRDGGYAYWGQGTQVTVSS

SEQ ID NO: 28262 - protein, 118 aa, Artificial Sequence
  Chemically Synthesized
QVQLQESGGGLVQAGGSLRLSCAASGYISYRRTMGWYRQAPGKERELVAGIGYGTNTNYADSVKGRFTISRDNAKNTVYLQMNSLKPEDTAVYYCAAYPRPLGRHSYWGQGTQVTVSS

SEQ ID NO: 28263 - protein, 121 aa, Artificial Sequence
  Chemically Synthesized
QVQLQESGGGLVQAGGSLRLSCAASGNISDSLYMGWYRQAPGKEREFVAAIDVGSTNLYADSVKGRFTISRDNAKNTVYLQMNSLKPEDTAVYYCAVQVVNSNHYDWSIYWGQGTQVTVSS

SEQ ID NO: 28264 - protein, 118 aa, Artificial Sequence
  Chemically Synthesized
QVQLQESGGGLVQAGGSLRLSCAASGNISRDRYMGWYRQAPGKERELVASITHGSSTNYADSVKGRFTISRDNAKNTVYLQMNSLKPEDTAVYYCAAPRYDGDYLDYWGQGTQVTVSS

SEQ ID NO: 28265 - protein, 122 aa, Artificial Sequence
  Chemically Synthesized
QVQLQESGGGLVQAGGSLRLSCAASGSISTAAPMGWYRQAPGKERELVAGINLGSSTNYADSVKGRFTISRDNAKNTVYLQMNSLKPEDTAVYYCAVVSGDGLDVDGRLRYWGQGTQVTVSS

SEQ ID NO: 28266 - protein, 118 aa, Artificial Sequence
  Chemically Synthesized
QVQLQESGGGLVQAGGSLRLSCAASGSISSIYYMGWYRQAPGKERELVAAIGSGANTYYADSVKGRFTISRDNAKNTVYLQMNSLKPEDTAVYYCAVGFDYDPRLYYWGQGTQVTVSS

SEQ ID NO: 28267 - protein, 117 aa, Artificial Sequence
  Chemically Synthesized
QVQLQESGGGLVQAGGSLRLSCAASGNISGARLMGWYRQAPGKEREFVAGIGYGTNTYYADSVKGRFTISRDNAKNTVYLQMNSLKPEDTAVYYCAVKRYGWRHYYWGQGTQVTVSS

SEQ ID NO: 28268 - protein, 125 aa, Artificial Sequence
  Chemically Synthesized
QVQLQESGGGLVQAGGSLRLSCAASGTIFYSLMGWYRQAPGKEREFVATIGAGGNTYYADSVKGRFTISRDNAKNTVYLQMNSLKPEDTAVYYCAAYQQYGDTYGTFNLALFDYWGQGTQVTVSS

SEQ ID NO: 28269 - protein, 122 aa, Artificial Sequence
  Chemically Synthesized
QVQLQESGGGLVQAGGSLRLSCAASGTISTYLRMGWYRQAPGKERELVAGIGDGGSTNYADSVKGRFTISRDNAKNTVYLQMNSLKPEDTAVYYCAVTTVVWSGGPFYFLYWGQGTQVTVSS

SEQ ID NO: 28270 - protein, 122 aa, Artificial Sequence
  Chemically Synthesized
QVQLQESGGGLVQAGGSLRLSCAASGYIFRHSYMGWYRQAPGKEREFVATIGAGGITYYADSVKGRFTISRDNAKNTVYLQMNSLKPEDTAVYYCAAFYALKRDRKRFLWYWGQGTQVTVSS

SEQ ID NO: 28271 - protein, 122 aa, Artificial Sequence
  Chemically Synthesized
QVQLQESGGGLVQAGGSLRLSCAASGYIFTQRYMGWYRQAPGKERELVAGITRGANTYYADSVKGRFTISRDNAKNTVYLQMNSLKPEDTAVYYCAVSRYRSDYTYHPYKYWGQGTQVTVSS

SEQ ID NO: 28272 - protein, 118 aa, Artificial Sequence
  Chemically Synthesized
QVQLQESGGGLVQAGGSLRLSCAASGYISYYRYMGWYRQAPGKEREFVATIDRGSTTNYADSVKGRFTISRDNAKNTVYLQMNSLKPEDTAVYYCAVLATRKGRFPYWGQGTQVTVSS

SEQ ID NO: 28273 - protein, 119 aa, Artificial Sequence
  Chemically Synthesized
QVQLQESGGGLVQAGGSLRLSCAASGTISGRRYMGWYRQAPGKEREFVATINRNGATTNYADSVKGRFTISRDNAKNTVYLQMNSLKPEDTAVYYCAATRYPWGFYRYWGQGTQVTVSS

SEQ ID NO: 28274 - protein, 118 aa, Artificial Sequence
  Chemically Synthesized
QVQLQESGGGLVQAGGSLRLSCAASGTIFSRYYMGWYRQAPGKEREFVATIGIGGNTYYADSVKGRFTISRDNAKNTVYLQMNSLKPEDTAVYYCAVIKGWRRNFYYWGQGTQVTVSS

SEQ ID NO: 28275 - protein, 119 aa, Artificial Sequence
  Chemically Synthesized
QVQLQESGGGLVQAGGSLRLSCAASGSIFPSVAMGWYRQAPGKEREFVAAITWGANTYYADSVKGRFTISRDNAKNTVYLQMNSLKPEDTAVYYCAAIRLRRLRLPSYWGQGTQVTVSS

SEQ ID NO: 28276 - protein, 126 aa, Artificial Sequence
  Chemically Synthesized
QVQLQESGGGLVQAGGSLRLSCAASGYIFTTRYMGWYRQAPGKEREFVAGITYGGNTNYADSVKGRFTISRDNAKNTVYLQMNSLKPEDTAVYYCAVTYQYDIRWKTYRPYYHYYWGQGTQVTVSS

SEQ ID NO: 28277 - protein, 114 aa, Artificial Sequence
  Chemically Synthesized
QVQLQESGGGLVQAGGSLRLSCAASGTISLTSGMGWYRQAPGKERELVARVLLPYADSVKGRFTISRDNAKNTVYLQMNSLKPEDTAVYYCAVIYVDSLGYGYWGQGTQVTVSS

SEQ ID NO: 28278 - protein, 126 aa, Artificial Sequence
  Chemically Synthesized
QVQLQESGGGLVQAGGSLRLSCAASGNIFPYYRMGWYRQAPGKEREFVAGIDGGAITNYADSVKGRFTISRDNAKNTVYLQMNSLKPEDTAVYYCAVLRTYGRLWYAPSSRQFRYWGQGTQVTVSS

SEQ ID NO: 28279 - protein, 121 aa, Artificial Sequence
  Chemically Synthesized
QVQLQESGGGLVQAGGSLRLSCAASGSISTSLMGWYRQAPGKERELVATIDDGSSTYYADSVKGRFTISRDNAKNTVYLQMNSLKPEDTAVYYCAVLRTYFSAEYYYHDYWGQGTQVTVSS

SEQ ID NO: 28280 - protein, 118 aa, Artificial Sequence
  Chemically Synthesized
QVQLQESGGGLVQAGGSLRLSCAASGTISWRRYMGWYRQAPGKERELVASISAGSNTYYADSVKGRFTISRDNAKNTVYLQMNSLKPEDTAVYYCAATGYPRRQFYYWGQGTQVTVSS

SEQ ID NO: 28281 - protein, 120 aa, Artificial Sequence
  Chemically Synthesized
QVQLQESGGGLVQAGGSLRLSCAASGNISGYVFMGWYRQAPGKERELVAGINTGANTYYADSVKGRFTISRDNAKNTVYLQMNSLKPEDTAVYYCAVYYISGWYKDHYYWGQGTQVTVSS

SEQ ID NO: 28282 - protein, 122 aa, Artificial Sequence
  Chemically Synthesized
QVQLQESGGGLVQAGGSLRLSCAASGTISAITAMGWYRQAPGKERELVASISYGASTNYADSVKGRFTISRDNAKNTVYLQMNSLKPEDTAVYYCAVYYSPDTGPDARYDYWGQGTQVTVSS

SEQ ID NO: 28283 - protein, 122 aa, Artificial Sequence
  Chemically Synthesized
QVQLQESGGGLVQAGGSLRLSCAASGNISWNGRMGWYRQAPGKEREFVAAINRGGNTYYADSVKGRFTISRDNAKNTVYLQMNSLKPEDTAVYYCAARRYRTWPGYHTYYYWGQGTQVTVSS

SEQ ID NO: 28284 - protein, 118 aa, Artificial Sequence
  Chemically Synthesized
QVQLQESGGGLVQAGGSLRLSCAASGTISLGISMGWYRQAPGKEREFVAAISVGTTTYYADSVKGRFTISRDNAKNTVYLQMNSLKPEDTAVYYCAAKGYYAWYYRYWGQGTQVTVSS

SEQ ID NO: 28285 - protein, 122 aa, Artificial Sequence
  Chemically Synthesized
QVQLQESGGGLVQAGGSLRLSCAASGNIFWQFYMGWYRQAPGKERELVAAIDYGTTTYYADSVKGRFTISRDNAKNTVYLQMNSLKPEDTAVYYCAVYYPSYYATSDPFGYWGQGTQVTVSS

SEQ ID NO: 28286 - protein, 118 aa, Artificial Sequence
  Chemically Synthesized
QVQLQESGGGLVQAGGSLRLSCAASGSIFLYPTMGWYRQAPGKEREFVAGINYGGTTYYADSVKGRFTISRDNAKNTVYLQMNSLKPEDTAVYYCAVVPIYRPRYLYWGQGTQVTVSS

SEQ ID NO: 28287 - protein, 118 aa, Artificial Sequence
  Chemically Synthesized
QVQLQESGGGLVQAGGSLRLSCAASGTISSRTVMGWYRQAPGKEREFVATIGPGSITYYADSVKGRFTISRDNAKNTVYLQMNSLKPEDTAVYYCAVARVSWFHHRYWGQGTQVTVSS

SEQ ID NO: 28288 - protein, 118 aa, Artificial Sequence
  Chemically Synthesized
QVQLQESGGGLVQAGGSLRLSCAASGYISWHDYMGWYRQAPGKERELVATISYGSSTNYADSVKGRFTISRDNAKNTVYLQMNSLKPEDTAVYYCAVYRQYRVRHRYWGQGTQVTVSS

SEQ ID NO: 28289 - protein, 122 aa, Artificial Sequence
  Chemically Synthesized
QVQLQESGGGLVQAGGSLRLSCAASGYIFAPTYMGWYRQAPGKERELVASISRGTTTYYADSVKGRFTISRDNAKNTVYLQMNSLKPEDTAVYYCAALRYSRYFQHRDHWYWGQGTQVTVSS

SEQ ID NO: 28290 - protein, 118 aa, Artificial Sequence
  Chemically Synthesized
QVQLQESGGGLVQAGGSLRLSCAASGTIFWVFYMGWYRQAPGKERELVATIGTGSSTYYADSVKGRFTISRDNAKNTVYLQMNSLKPEDTAVYYCAAGRRRHSFHYYWGQGTQVTVSS

SEQ ID NO: 28291 - protein, 118 aa, Artificial Sequence
  Chemically Synthesized
QVQLQESGGGLVQAGGSLRLSCAASGTIFSRYYMGWYRQAPGKEREFVAAISRGGNTNYADSVKGRFTISRDNAKNTVYLQMNSLKPEDTAVYYCAVNRYYSKYLPYWGQGTQVTVSS

SEQ ID NO: 28292 - protein, 122 aa, Artificial Sequence
  Chemically Synthesized
QVQLQESGGGLVQAGGSLRLSCAASGSIFRPYRMGWYRQAPGKEREFVASIGKGGNTYYADSVKGRFTISRDNAKNTVYLQMNSLKPEDTAVYYCAVGYARYAIATYSFGYWGQGTQVTVSS

SEQ ID NO: 28293 - protein, 126 aa, Artificial Sequence
  Chemically Synthesized
QVQLQESGGGLVQAGGSLRLSCAASGYISKNDVMGWYRQAPGKERELVAGISNGSSTYYADSVKGRFTISRDNAKNTVYLQMNSLKPEDTAVYYCAAYDLPDVYYPVPNYIAYYYWGQGTQVTVSS

SEQ ID NO: 28294 - protein, 122 aa, Artificial Sequence
  Chemically Synthesized
QVQLQESGGGLVQAGGSLRLSCAASGYIFHARIMGWYRQAPGKEREFVASISRGGTTYYADSVKGRFTISRDNAKNTVYLQMNSLKPEDTAVYYCAATSYYDRYVNRWYRYWGQGTQVTVSS

SEQ ID NO: 28295 - protein, 126 aa, Artificial Sequence
  Chemically Synthesized
QVQLQESGGGLVQAGGSLRLSCAASGSIFGVSWMGWYRQAPGKEREFVASIGDGAITYYADSVKGRFTISRDNAKNTVYLQMNSLKPEDTAVYYCAAFFTDDLSRIDRWSLGHNYWGQGTQVTVSS

SEQ ID NO: 28296 - protein, 122 aa, Artificial Sequence
  Chemically Synthesized
QVQLQESGGGLVQAGGSLRLSCAASGTIFSRVRMGWYRQAPGKERELVATIAYGTSTNYADSVKGRFTISRDNAKNTVYLQMNSLKPEDTAVYYCAAKPRYYHDRGLLFWYWGQGTQVTVSS

SEQ ID NO: 28297 - protein, 117 aa, Artificial Sequence
  Chemically Synthesized
QVQLQESGGGLVQAGGSLRLSCAASGTISPANMGWYRQAPGKERELVATIALGSNTNYADSVKGRFTISRDNAKNTVYLQMNSLKPEDTAVYYCAARQDDDGVYDYWGQGTQVTVSS

SEQ ID NO: 28298 - protein, 126 aa, Artificial Sequence
  Chemically Synthesized
QVQLQESGGGLVQAGGSLRLSCAASGTISYWRYMGWYRQAPGKERELVAGIGRGTITYYADSVKGRFTISRDNAKNTVYLQMNSLKPEDTAVYYCAARYIGYHGSQDRPLRYHGYWGQGTQVTVSS

SEQ ID NO: 28299 - protein, 122 aa, Artificial Sequence
  Chemically Synthesized
QVQLQESGGGLVQAGGSLRLSCAASGSIFWGRVMGWYRQAPGKEREFVASISIGASTYYADSVKGRFTISRDNAKNTVYLQMNSLKPEDTAVYYCAATPRYVAATYALYRYWGQGTQVTVSS

SEQ ID NO: 28300 - protein, 117 aa, Artificial Sequence
  Chemically Synthesized
QVQLQESGGGLVQAGGSLRLSCAASGNISNNDWMGWYRQAPGKERELVASISVGGTTYYADSVKGRFTISRDNAKNTVYLQMNSLKPEDTAVYYCAVSLYQGSHDYWGQGTQVTVSS

SEQ ID NO: 28301 - protein, 118 aa, Artificial Sequence
  Chemically Synthesized
QVQLQESGGGLVQAGGSLRLSCAASGSISGPLVMGWYRQAPGKERELVASITTGAITNYADSVKGRFTISRDNAKNTVYLQMNSLKPEDTAVYYCAAGASDVYDFTYWGQGTQVTVSS

SEQ ID NO: 28302 - protein, 122 aa, Artificial Sequence
  Chemically Synthesized
QVQLQESGGGLVQAGGSLRLSCAASGNIFGTAFMGWYRQAPGKERELVASISHGSSTYYADSVKGRFTISRDNAKNTVYLQMNSLKPEDTAVYYCAATKRYNYFIYRRHFYWGQGTQVTVSS

SEQ ID NO: 28303 - protein, 122 aa, Artificial Sequence
  Chemically Synthesized
QVQLQESGGGLVQAGGSLRLSCAASGSISWDYYMGWYRQAPGKERELVASISYGTTTNYADSVKGRFTISRDNAKNTVYLQMNSLKPEDTAVYYCAAGHYLTDDLQIQLDYWGQGTQVTVSS

SEQ ID NO: 28304 - protein, 118 aa, Artificial Sequence
  Chemically Synthesized
QVQLQESGGGLVQAGGSLRLSCAASGTISYNRQMGWYRQAPGKERELVAGISDGGTTYYADSVKGRFTISRDNAKNTVYLQMNSLKPEDTAVYYCAADVRLKVLFDYWGQGTQVTVSS

SEQ ID NO: 28305 - protein, 118 aa, Artificial Sequence
  Chemically Synthesized
QVQLQESGGGLVQAGGSLRLSCAASGSIFRPRAMGWYRQAPGKEREFVATIGRGTITNYADSVKGRFTISRDNAKNTVYLQMNSLKPEDTAVYYCAADVTWYDHHIYWGQGTQVTVSS

SEQ ID NO: 28306 - protein, 126 aa, Artificial Sequence
  Chemically Synthesized
QVQLQESGGGLVQAGGSLRLSCAASGNISWGRAMGWYRQAPGKEREFVAAIGWGTITYYADSVKGRFTISRDNAKNTVYLQMNSLKPEDTAVYYCAAAPYGWGLRSRYREPDYRYWGQGTQVTVSS

SEQ ID NO: 28307 - protein, 123 aa, Artificial Sequence
  Chemically Synthesized
QVQLQESGGGLVQAGGSLRLSCAASGNIFYSDRMGWYRQAPGKERELVASINYGTTTYYADSVKGRFTISRDNAKNTVYLQMNSLKPEDTAVYYCAARRNYTYITKYSRLQYWGQGTQVTVSS

SEQ ID NO: 28308 - protein, 126 aa, Artificial Sequence
  Chemically Synthesized
QVQLQESGGGLVQAGGSLRLSCAASGTISDDVVMGWYRQAPGKEREFVAGIGNGATTNYADSVKGRFTISRDNAKNTVYLQMNSLKPEDTAVYYCAAARWVYHDSDNLQLIYLLYWGQGTQVTVSS

SEQ ID NO: 28309 - protein, 117 aa, Artificial Sequence
  Chemically Synthesized
QVQLQESGGGLVQAGGSLRLSCAASGSIFKVQVMGWYRQAPGKERELVATINRASTNYADSVKGRFTISRDNAKNTVYLQMNSLKPEDTAVYYCAARGRYVYWHSYWGQGTQVTVSS

SEQ ID NO: 28310 - protein, 118 aa, Artificial Sequence
  Chemically Synthesized
QVQLQESGGGLVQAGGSLRLSCAASGNISRWSGMGWYRQAPGKEREFVAAINNGGTTYYADSVKGRFTISRDNAKNTVYLQMNSLKPEDTAVYYCAAGTRYGRYFGYWGQGTQVTVSS

SEQ ID NO: 28311 - protein, 118 aa, Artificial Sequence
  Chemically Synthesized
QVQLQESGGGLVQAGGSLRLSCAASGYIFVTDVMGWYRQAPGKERELVAGIAKGASTYYADSVKGRFTISRDNAKNTVYLQMNSLKPEDTAVYYCAVDNAYRRRFRYWGQGTQVTVSS

SEQ ID NO: 28312 - protein, 122 aa, Artificial Sequence
  Chemically Synthesized
QVQLQESGGGLVQAGGSLRLSCAASGTIFSSHVMGWYRQAPGKEREFVASIGWGTNTNYADSVKGRFTISRDNAKNTVYLQMNSLKPEDTAVYYCAVRSDQLTITVDDLEYWGQGTQVTVSS

SEQ ID NO: 28313 - protein, 118 aa, Artificial Sequence
  Chemically Synthesized
QVQLQESGGGLVQAGGSLRLSCAASGNIFRPRKMGWYRQAPGKEREFVASISYGGSTYYADSVKGRFTISRDNAKNTVYLQMNSLKPEDTAVYYCAAIYYFRPDHHYWGQGTQVTVSS

SEQ ID NO: 28314 - protein, 118 aa, Artificial Sequence
  Chemically Synthesized
QVQLQESGGGLVQAGGSLRLSCAASGYIFWIRGMGWYRQAPGKEREFVASINWGTSTNYADSVKGRFTISRDNAKNTVYLQMNSLKPEDTAVYYCAANSLGFRSYRYWGQGTQVTVSS

SEQ ID NO: 28315 - protein, 117 aa, Artificial Sequence
  Chemically Synthesized
QVQLQESGGGLVQAGGSLRLSCAASGNIFTRTMGWYRQAPGKERELVAGINRGGTTNYADSVKGRFTISRDNAKNTVYLQMNSLKPEDTAVYYCAANDAIKDLHSYWGQGTQVTVSS

SEQ ID NO: 28316 - protein, 120 aa, Artificial Sequence
  Chemically Synthesized
QVQLQESGGGLVQAGGSLRLSCAASGTIFVVIDMGWYRQAPGKEREFVATIDYGTSTYYADSVKGRFTISRDNAKNTVYLQMNSLKPEDTAVYYCAANIYYYYAAYHQYWGQGTQVTVSS

SEQ ID NO: 28317 - protein, 126 aa, Artificial Sequence
  Chemically Synthesized
QVQLQESGGGLVQAGGSLRLSCAASGYISYVKLMGWYRQAPGKERELVASITRGANTNYADSVKGRFTISRDNAKNTVYLQMNSLKPEDTAVYYCAVGGRDAWFYLWAWQRIHYYWGQGTQVTVSS

SEQ ID NO: 28318 - protein, 118 aa, Artificial Sequence
  Chemically Synthesized
QVQLQESGGGLVQAGGSLRLSCAASGYIFGPSTMGWYRQAPGKEREFVASITNGATTYYADSVKGRFTISRDNAKNTVYLQMNSLKPEDTAVYYCAVTYVANLRFPYWGQGTQVTVSS

SEQ ID NO: 28319 - protein, 121 aa, Artificial Sequence
  Chemically Synthesized
QVQLQESGGGLVQAGGSLRLSCAASGSIFDKLDMGWYRQAPGKEREFVATIDVGTNTYADSVKGRFTISRDNAKNTVYLQMNSLKPEDTAVYYCAAYYWLYHPNPAYLEYWGQGTQVTVSS

SEQ ID NO: 28320 - protein, 118 aa, Artificial Sequence
  Chemically Synthesized
QVQLQESGGGLVQAGGSLRLSCAASGYIFPVRYMGWYRQAPGKERELVAAIDGGGSTNYADSVKGRFTISRDNAKNTVYLQMNSLKPEDTAVYYCAVYVRWRRQLVYWGQGTQVTVSS

SEQ ID NO: 28321 - protein, 122 aa, Artificial Sequence
  Chemically Synthesized
QVQLQESGGGLVQAGGSLRLSCAASGSISRFYRMGWYRQAPGKERELVATIALGSNTYYADSVKGRFTISRDNAKNTVYLQMNSLKPEDTAVYYCAVAPYGVRWSGRYYQYWGQGTQVTVSS

SEQ ID NO: 28322 - protein, 122 aa, Artificial Sequence
  Chemically Synthesized
QVQLQESGGGLVQAGGSLRLSCAASGYIFYYGPMGWYRQAPGKEREFVAGIAFGGTTYYADSVKGRFTISRDNAKNTVYLQMNSLKPEDTAVYYCAAWSRGLHGRAIYHGYWGQGTQVTVSS

SEQ ID NO: 28323 - protein, 117 aa, Artificial Sequence
  Chemically Synthesized
QVQLQESGGGLVQAGGSLRLSCAASGSISYGYMGWYRQAPGKERELVASINDGSNTNYADSVKGRFTISRDNAKNTVYLQMNSLKPEDTAVYYCAVPFRYDAYLGYWGQGTQVTVSS

SEQ ID NO: 28324 - protein, 122 aa, Artificial Sequence
  Chemically Synthesized
QVQLQESGGGLVQAGGSLRLSCAASGNIFVLDVMGWYRQAPGKEREFVASIGLGATTYYADSVKGRFTISRDNAKNTVYLQMNSLKPEDTAVYYCAVTQGRGLYVDVEFTYWGQGTQVTVSS

SEQ ID NO: 28325 - protein, 122 aa, Artificial Sequence
  Chemically Synthesized
QVQLQESGGGLVQAGGSLRLSCAASGYISARNYMGWYRQAPGKEREFVASITSGASTNYADSVKGRFTISRDNAKNTVYLQMNSLKPEDTAVYYCAAWYRVVQWWPYRHAYWGQGTQVTVSS

SEQ ID NO: 28326 - protein, 126 aa, Artificial Sequence
  Chemically Synthesized
QVQLQESGGGLVQAGGSLRLSCAASGYISIWRYMGWYRQAPGKERELVATITGGGSTNYADSVKGRFTISRDNAKNTVYLQMNSLKPEDTAVYYCAAPPSKGQPAANYQDVPHDYWGQGTQVTVSS

SEQ ID NO: 28327 - protein, 118 aa, Artificial Sequence
  Chemically Synthesized
QVQLQESGGGLVQAGGSLRLSCAASGSIFRSYIMGWYRQAPGKEREFVAAIDKGASTYYADSVKGRFTISRDNAKNTVYLQMNSLKPEDTAVYYCAVSRRYGWGHDYWGQGTQVTVSS

SEQ ID NO: 28328 - protein, 118 aa, Artificial Sequence
  Chemically Synthesized
QVQLQESGGGLVQAGGSLRLSCAASGYIFWLKDMGWYRQAPGKEREFVAAIAGGASTNYADSVKGRFTISRDNAKNTVYLQMNSLKPEDTAVYYCAARYSPVRYLYYWGQGTQVTVSS

SEQ ID NO: 28329 - protein, 118 aa, Artificial Sequence
  Chemically Synthesized
QVQLQESGGGLVQAGGSLRLSCAASGSIFGSPYMGWYRQAPGKEREFVAAISRGATTYYADSVKGRFTISRDNAKNTVYLQMNSLKPEDTAVYYCAADEYRRGYHRYWGQGTQVTVSS

SEQ ID NO: 28330 - protein, 118 aa, Artificial Sequence
  Chemically Synthesized
QVQLQESGGGLVQAGGSLRLSCAASGYIFGRRSMGWYRQAPGKEREFVAAINRGSITYYADSVKGRFTISRDNAKNTVYLQMNSLKPEDTAVYYCAARPSNTWGHLYWGQGTQVTVSS

SEQ ID NO: 28331 - protein, 126 aa, Artificial Sequence
  Chemically Synthesized
QVQLQESGGGLVQAGGSLRLSCAASGNIFRYRAMGWYRQAPGKERELVAAIADGANTNYADSVKGRFTISRDNAKNTVYLQMNSLKPEDTAVYYCAVRVVTYGTYRAIRTDVLVYWGQGTQVTVSS

SEQ ID NO: 28332 - protein, 122 aa, Artificial Sequence
  Chemically Synthesized
QVQLQESGGGLVQAGGSLRLSCAASGTIFVLGAMGWYRQAPGKEREFVAAIGTGASTNYADSVKGRFTISRDNAKNTVYLQMNSLKPEDTAVYYCAATTWYYTRGSLYHYYWGQGTQVTVSS

SEQ ID NO: 28333 - protein, 118 aa, Artificial Sequence
  Chemically Synthesized
QVQLQESGGGLVQAGGSLRLSCAASGNISSRRAMGWYRQAPGKEREFVAAITRGAITYYADSVKGRFTISRDNAKNTVYLQMNSLKPEDTAVYYCAVDRHVIQGHVYWGQGTQVTVSS

SEQ ID NO: 28334 - protein, 111 aa, Artificial Sequence
  Chemically Synthesized
QVQLQESGGGLVQAGGSLRLSCAASGYIFGASEMGWYRQAPGKERELVASISTGGITYYADSVKGRFTISRDNAKNTVYLQMNSLKPEDTAVYYCAAQGYWGQGTQVTVSS

SEQ ID NO: 28335 - protein, 126 aa, Artificial Sequence
  Chemically Synthesized
QVQLQESGGGLVQAGGSLRLSCAASGTIFPKGYMGWYRQAPGKEREFVAAISYGGSTNYADSVKGRFTISRDNAKNTVYLQMNSLKPEDTAVYYCAVRPATYVGKDGRYYRQLRYWGQGTQVTVSS

SEQ ID NO: 28336 - protein, 117 aa, Artificial Sequence
  Chemically Synthesized
QVQLQESGGGLVQAGGSLRLSCAASGTIFTTSMGWYRQAPGKERELVASISRGGITYYADSVKGRFTISRDNAKNTVYLQMNSLKPEDTAVYYCAVNPYTKRGHEYWGQGTQVTVSS

SEQ ID NO: 28337 - protein, 125 aa, Artificial Sequence
  Chemically Synthesized
QVQLQESGGGLVQAGGSLRLSCAASGSISSYSMGWYRQAPGKEREFVAGIDYGSITNYADSVKGRFTISRDNAKNTVYLQMNSLKPEDTAVYYCAVDYTSDIVGDRDPGDRHDYWGQGTQVTVSS

SEQ ID NO: 28338 - protein, 126 aa, Artificial Sequence
  Chemically Synthesized
QVQLQESGGGLVQAGGSLRLSCAASGNIFRAPLMGWYRQAPGKEREFVASIGWGSNTYYADSVKGRFTISRDNAKNTVYLQMNSLKPEDTAVYYCAAERAFWQRLDSYRHGYHGYWGQGTQVTVSS

SEQ ID NO: 28339 - protein, 118 aa, Artificial Sequence
  Chemically Synthesized
QVQLQESGGGLVQAGGSLRLSCAASGSISPPKLMGWYRQAPGKEREFVAGITGGASTYYADSVKGRFTISRDNAKNTVYLQMNSLKPEDTAVYYCAVHDAYQADLDYWGQGTQVTVSS

SEQ ID NO: 28340 - protein, 126 aa, Artificial Sequence
  Chemically Synthesized
QVQLQESGGGLVQAGGSLRLSCAASGYIFGTVDMGWYRQAPGKEREFVASINVGANTYYADSVKGRFTISRDNAKNTVYLQMNSLKPEDTAVYYCAVGPWALSYTNVSRSPPLNYWGQGTQVTVSS

SEQ ID NO: 28341 - protein, 125 aa, Artificial Sequence
  Chemically Synthesized
QVQLQESGGGLVQAGGSLRLSCAASGSISRRYLMGWYRQAPGKEREFVAAIAYGTNTNYADSVKGRFTISRDNAKNTVYLQMNSLKPEDTAVYYCAVYAGRNQYGQTHRYYHRYWGQGTQVTVSS

SEQ ID NO: 28342 - protein, 118 aa, Artificial Sequence
  Chemically Synthesized
QVQLQESGGGLVQAGGSLRLSCAASGSIFGTVAMGWYRQAPGKERELVAAITYGSNTYYADSVKGRFTISRDNAKNTVYLQMNSLKPEDTAVYYCAASHYYRAHHTYWGQGTQVTVSS

SEQ ID NO: 28343 - protein, 126 aa, Artificial Sequence
  Chemically Synthesized
QVQLQESGGGLVQAGGSLRLSCAASGSISDVSIMGWYRQAPGKEREFVAAISFGTNTYYADSVKGRFTISRDNAKNTVYLQMNSLKPEDTAVYYCAVLDLRGQLDSGGGTTYHYYWGQGTQVTVSS

SEQ ID NO: 28344 - protein, 117 aa, Artificial Sequence
  Chemically Synthesized
QVQLQESGGGLVQAGGSLRLSCAASGNISTWTMGWYRQAPGKEREFVAGISGGASTNYADSVKGRFTISRDNAKNTVYLQMNSLKPEDTAVYYCAVREPTNRYYSYWGQGTQVTVSS

SEQ ID NO: 28345 - protein, 122 aa, Artificial Sequence
  Chemically Synthesized
QVQLQESGGGLVQAGGSLRLSCAASGNISYIRRMGWYRQAPGKEREFVAAIGPGTSTYYADSVKGRFTISRDNAKNTVYLQMNSLKPEDTAVYYCAVRPWPGHSYRQGYPYWGQGTQVTVSS

SEQ ID NO: 28346 - protein, 122 aa, Artificial Sequence
  Chemically Synthesized
QVQLQESGGGLVQAGGSLRLSCAASGTISDIFGMGWYRQAPGKEREFVAGITSGGITNYADSVKGRFTISRDNAKNTVYLQMNSLKPEDTAVYYCAAYGVAKYDYTQSYTYWGQGTQVTVSS

SEQ ID NO: 28347 - protein, 126 aa, Artificial Sequence
  Chemically Synthesized
QVQLQESGGGLVQAGGSLRLSCAASGNISVDYFMGWYRQAPGKEREFVAGIDLGANTNYADSVKGRFTISRDNAKNTVYLQMNSLKPEDTAVYYCAVNTDRAYLDKQQPGKYFVYWGQGTQVTVSS

SEQ ID NO: 28348 - protein, 122 aa, Artificial Sequence
  Chemically Synthesized
QVQLQESGGGLVQAGGSLRLSCAASGTIFDWLGMGWYRQAPGKEREFVAAITYGTSTNYADSVKGRFTISRDNAKNTVYLQMNSLKPEDTAVYYCAAPLLLVGERSYYHGYWGQGTQVTVSS

SEQ ID NO: 28349 - protein, 118 aa, Artificial Sequence
  Chemically Synthesized
QVQLQESGGGLVQAGGSLRLSCAASGNIFSTRVMGWYRQAPGKERELVAAITWGASTNYADSVKGRFTISRDNAKNTVYLQMNSLKPEDTAVYYCAAYRRSYWRYTYWGQGTQVTVSS

SEQ ID NO: 28350 - protein, 126 aa, Artificial Sequence
  Chemically Synthesized
QVQLQESGGGLVQAGGSLRLSCAASGSIFRLGYMGWYRQAPGKERELVASITRGTSTYYADSVKGRFTISRDNAKNTVYLQMNSLKPEDTAVYYCAVWARDQRRGPPGWLRRLGYWGQGTQVTVSS

SEQ ID NO: 28351 - protein, 114 aa, Artificial Sequence
  Chemically Synthesized
QVQLQESGGGLVQAGGSLRLSCAASGTISKTNEMGWYRQAPGKERELVASIAYGATTYYADSVKGRFTISRDNAKNTVYLQMNSLKPEDTAVYYCAVLVTTMYWGQGTQVTVSS

SEQ ID NO: 28352 - protein, 122 aa, Artificial Sequence
  Chemically Synthesized
QVQLQESGGGLVQAGGSLRLSCAASGTIFLSSGMGWYRQAPGKEREFVAAIDYGSSTYYADSVKGRFTISRDNAKNTVYLQMNSLKPEDTAVYYCAAPRSDRRRYSRYLLYWGQGTQVTVSS

SEQ ID NO: 28353 - protein, 118 aa, Artificial Sequence
  Chemically Synthesized
QVQLQESGGGLVQAGGSLRLSCAASGNISYWQKMGWYRQAPGKERELVAGITVGGNTYYADSVKGRFTISRDNAKNTVYLQMNSLKPEDTAVYYCAAYPYYLRRFGYWGQGTQVTVSS

SEQ ID NO: 28354 - protein, 125 aa, Artificial Sequence
  Chemically Synthesized
QVQLQESGGGLVQAGGSLRLSCAASGYISRHPRMGWYRQAPGKEREFVASIAWGSNTYYADSVKGRFTISRDNAKNTVYLQMNSLKPEDTAVYYCAAYYYGRFGDHRRGYIHRYWGQGTQVTVSS

SEQ ID NO: 28355 - protein, 126 aa, Artificial Sequence
  Chemically Synthesized
QVQLQESGGGLVQAGGSLRLSCAASGYISADDGMGWYRQAPGKERELVATITQGGTTNYADSVKGRFTISRDNAKNTVYLQMNSLKPEDTAVYYCAAQWGHSDDEYFADGKWLGYWGQGTQVTVSS

SEQ ID NO: 28356 - protein, 122 aa, Artificial Sequence
  Chemically Synthesized
QVQLQESGGGLVQAGGSLRLSCAASGTIFRYWYMGWYRQAPGKEREFVAGIARGSNTNYADSVKGRFTISRDNAKNTVYLQMNSLKPEDTAVYYCAVRLRGTNTHYFVYSYWGQGTQVTVSS

SEQ ID NO: 28357 - protein, 118 aa, Artificial Sequence
  Chemically Synthesized
QVQLQESGGGLVQAGGSLRLSCAASGNIFGSRLMGWYRQAPGKEREFVAAINRGAITYYADSVKGRFTISRDNAKNTVYLQMNSLKPEDTAVYYCAVRYFTRYWHPYWGQGTQVTVSS

SEQ ID NO: 28358 - protein, 117 aa, Artificial Sequence
  Chemically Synthesized
QVQLQESGGGLVQAGGSLRLSCAASGSIFWYHRMGWYRQAPGKERELVAGIALGGNTYYADSVKGRFTISRDNAKNTVYLQMNSLKPEDTAVYYCAVSTLRRSPHYWGQGTQVTVSS

SEQ ID NO: 28359 - protein, 118 aa, Artificial Sequence
  Chemically Synthesized
QVQLQESGGGLVQAGGSLRLSCAASGYISYWYSMGWYRQAPGKEREFVAGITVGSSTYYADSVKGRFTISRDNAKNTVYLQMNSLKPEDTAVYYCAALHPIVASYDYWGQGTQVTVSS

SEQ ID NO: 28360 - protein, 115 aa, Artificial Sequence
  Chemically Synthesized
QVQLQESGGGLVQAGGSLRLSCAASGYIFILPYMGWYRQAPGKERELVAAINVGGTTYYADSVKGRFTISRDNAKNTVYLQMNSLKPEDTAVYYCAYWPVDSHYWGQGTQVTVSS

SEQ ID NO: 28361 - protein, 116 aa, Artificial Sequence
  Chemically Synthesized
QVQLQESGGGLVQAGGSLRLSCAASGYISTVTMGWYRQAPGKERELVAAIDRVVIPYADSVKGRFTISRDNAKNTVYLQMNSLKPEDTAVYYCAAIYTATVEYRYWGQGTQVTVSS

SEQ ID NO: 28362 - protein, 115 aa, Artificial Sequence
  Chemically Synthesized
QVQLQESGGGLVQAGGSLRLSCAASGYIFTPQAMGWYRQAPGKEREFVAGIARGSTTYYADSVKGRFTISRDNAKNTVYLQMNSLKPEDTAVYYCAVLIRRLRYWGQGTQVTVSS

SEQ ID NO: 28363 - protein, 122 aa, Artificial Sequence
  Chemically Synthesized
QVQLQESGGGLVQAGGSLRLSCAASGSISRYFFMGWYRQAPGKEREFVAGIAKGGNTYYADSVKGRFTISRDNAKNTVYLQMNSLKPEDTAVYYCAVKAAYVYYYRAYHRYWGQGTQVTVSS

SEQ ID NO: 28364 - protein, 118 aa, Artificial Sequence
  Chemically Synthesized
QVQLQESGGGLVQAGGSLRLSCAASGNIFHFRFMGWYRQAPGKEREFVATITWGGITYYADSVKGRFTISRDNAKNTVYLQMNSLKPEDTAVYYCAAYRYRENRYHYWGQGTQVTVSS

SEQ ID NO: 28365 - protein, 121 aa, Artificial Sequence
  Chemically Synthesized
QVQLQESGGGLVQAGGSLRLSCAASGTIFSSILMGWYRQAPGKEREFVAAITSGSTTYYADSVKGRFTISRDNAKNTVYLQMNSLKPEDTAVYYCAAYNTWRIRYVNLRYWGQGTQVTVSS

SEQ ID NO: 28366 - protein, 122 aa, Artificial Sequence
  Chemically Synthesized
QVQLQESGGGLVQAGGSLRLSCAASGYIFSRPDMGWYRQAPGKEREFVAAIGDGGITNYADSVKGRFTISRDNAKNTVYLQMNSLKPEDTAVYYCAVAGYYYWDNYYYHYYWGQGTQVTVSS

SEQ ID NO: 28367 - protein, 118 aa, Artificial Sequence
  Chemically Synthesized
QVQLQESGGGLVQAGGSLRLSCAASGSISHYRSMGWYRQAPGKEREFVATISRGTNTNYADSVKGRFTISRDNAKNTVYLQMNSLKPEDTAVYYCAAFPYYLSFHYYWGQGTQVTVSS

SEQ ID NO: 28368 - protein, 118 aa, Artificial Sequence
  Chemically Synthesized
QVQLQESGGGLVQAGGSLRLSCAASGNIFFVRQMGWYRQAPGKEREFVATIGFGSITNYADSVKGRFTISRDNAKNTVYLQMNSLKPEDTAVYYCAAGYVRLFPHYYWGQGTQVTVSS

SEQ ID NO: 28369 - protein, 117 aa, Artificial Sequence
  Chemically Synthesized
QVQLQESGGGLVQAGGSLRLSCAASGNIFTTTMGWYRQAPGKERELVAGINYGTITYYADSVKGRFTISRDNAKNTVYLQMNSLKPEDTAVYYCAAEYAYADNFQYWGQGTQVTVSS

SEQ ID NO: 28370 - protein, 118 aa, Artificial Sequence
  Chemically Synthesized
QVQLQESGGGLVQAGGSLRLSCAASGTISSFTPMGWYRQAPGKERELVAAISVGSSTNYADSVKGRFTISRDNAKNTVYLQMNSLKPEDTAVYYCAAYAAGYVIFRYWGQGTQVTVSS

SEQ ID NO: 28371 - protein, 119 aa, Artificial Sequence
  Chemically Synthesized
QVQLQESGGGLVQAGGSLRLSCAASGTISHRYRMGWYRQAPGKERELVAGISWGGTSTYYADSVKGRFTISRDNAKNTVYLQMNSLKPEDTAVYYCAVWYWYNAGHPYWGQGTQVTVSS

SEQ ID NO: 28372 - protein, 119 aa, Artificial Sequence
  Chemically Synthesized
QVQLQESGGGLVQAGGSLRLSCAASGSFLFWVMGWYRQAPGKEREFVAGINYGTITNYADSVKGRFTISRDNAKNTVYLQMNSLKPEDTAVYYCAVTLTGLLLGWLLYWGQGTQVTVSS

SEQ ID NO: 28373 - protein, 121 aa, Artificial Sequence
  Chemically Synthesized
QVQLQESGGGLVQAGGSLRLSCAASGTISSVSMGWYRQAPGKEREFVAGIAPGGNTYYADSVKGRFTISRDNAKNTVYLQMNSLKPEDTAVYYCAAYVAYGIWDYRAYDYWGQGTQVTVSS

SEQ ID NO: 28374 - protein, 118 aa, Artificial Sequence
  Chemically Synthesized
QVQLQESGGGLVQAGGSLRLSCAASGNISIRGTMGWYRQAPGKEREFVAGITLGGTTYYADSVKGRFTISRDNAKNTVYLQMNSLKPEDTAVYYCAAYNRYRWRFRYWGQGTQVTVSS

SEQ ID NO: 28375 - protein, 118 aa, Artificial Sequence
  Chemically Synthesized
QVQLQESGGGLVQAGGSLRLSCAASGSISPRVTMGWYRQAPGKEREFVAGISRGTSTYYADSVKGRFTISRDNAKNTVYLQMNSLKPEDTAVYYCAAGTRRYRWLSYWGQGTQVTVSS

SEQ ID NO: 28376 - protein, 122 aa, Artificial Sequence
  Chemically Synthesized
QVQLQESGGGLVQAGGSLRLSCAASGYISKRTSMGWYRQAPGKEREFVAAISAGASTYYADSVKGRFTISRDNAKNTVYLQMNSLKPEDTAVYYCAAGKYSLYYAQYRYHYWGQGTQVTVSS

SEQ ID NO: 28377 - protein, 115 aa, Artificial Sequence
  Chemically Synthesized
QVQLQESGGGLVQAGGSLRLSCAASGSIFRTSTMGWYRQAPGKERELVAGISYGSILYADSVKGRFTISRDNAKNTVYLQMNSLKPEDTAVYYCAVGDDGSHPYWGQGTQVTVSS

SEQ ID NO: 28378 - protein, 118 aa, Artificial Sequence
  Chemically Synthesized
QVQLQESGGGLVQAGGSLRLSCAASGYISFVWTMGWYRQAPGKERELVASINFGASTYYADSVKGRFTISRDNAKNTVYLQMNSLKPEDTAVYYCAVVWRYVPYLRYWGQGTQVTVSS

SEQ ID NO: 28379 - protein, 118 aa, Artificial Sequence
  Chemically Synthesized
QVQLQESGGGLVQAGGSLRLSCAASGSIFHFSKMGWYRQAPGKERELVATIAYGGITYYADSVKGRFTISRDNAKNTVYLQMNSLKPEDTAVYYCAAWSRFRRPHYYWGQGTQVTVSS

SEQ ID NO: 28380 - protein, 118 aa, Artificial Sequence
  Chemically Synthesized
QVQLQESGGGLVQAGGSLRLSCAASGSISSNRAMGWYRQAPGKEREFVAAISWGGITYYADSVKGRFTISRDNAKNTVYLQMNSLKPEDTAVYYCAARRLWRTSYRYWGQGTQVTVSS

SEQ ID NO: 28381 - protein, 126 aa, Artificial Sequence
  Chemically Synthesized
QVQLQESGGGLVQAGGSLRLSCAASGYISTRRVMGWYRQAPGKERELVAGIGRGSSTYYADSVKGRFTISRDNAKNTVYLQMNSLKPEDTAVYYCAVYWARYVQRWDDTRGQLGYWGQGTQVTVSS

SEQ ID NO: 28382 - protein, 126 aa, Artificial Sequence
  Chemically Synthesized
QVQLQESGGGLVQAGGSLRLSCAASGTISRYRSMGWYRQAPGKERELVAAIARGGNTYYADSVKGRFTISRDNAKNTVYLQMNSLKPEDTAVYYCAARDGYTYWDTTGYWRRHLYWGQGTQVTVSS

SEQ ID NO: 28383 - protein, 118 aa, Artificial Sequence
  Chemically Synthesized
QVQLQESGGGLVQAGGSLRLSCAASGTIFQWLLMGWYRQAPGKERELVAGINRGGNTNYADSVKGRFTISRDNAKNTVYLQMNSLKPEDTAVYYCAAYARWLRHHNYWGQGTQVTVSS

SEQ ID NO: 28384 - protein, 118 aa, Artificial Sequence
  Chemically Synthesized
QVQLQESGGGLVQAGGSLRLSCAASGSISYRRTMGWYRQAPGKEREFVAAISRGGNTYYADSVKGRFTISRDNAKNTVYLQMNSLKPEDTAVYYCAVAYQRISPHFYWGQGTQVTVSS

SEQ ID NO: 28385 - protein, 118 aa, Artificial Sequence
  Chemically Synthesized
QVQLQESGGGLVQAGGSLRLSCAASGNIFQRRWMGWYRQAPGKERELVAAINWGASTNYADSVKGRFTISRDNAKNTVYLQMNSLKPEDTAVYYCAVAWVRYRGHYYWGQGTQVTVSS

SEQ ID NO: 28386 - protein, 118 aa, Artificial Sequence
  Chemically Synthesized
QVQLQESGGGLVQAGGSLRLSCAASGSIFRTPTMGWYRQAPGKEREFVAAIAPGSNTNYADSVKGRFTISRDNAKNTVYLQMNSLKPEDTAVYYCAAINWGARPHGYWGQGTQVTVSS

SEQ ID NO: 28387 - protein, 122 aa, Artificial Sequence
  Chemically Synthesized
QVQLQESGGGLVQAGGSLRLSCAASGTISQAAVMGWYRQAPGKEREFVAGIGRGAITNYADSVKGRFTISRDNAKNTVYLQMNSLKPEDTAVYYCAAIYYHDNWSGAYYYYWGQGTQVTVSS

SEQ ID NO: 28388 - protein, 118 aa, Artificial Sequence
  Chemically Synthesized
QVQLQESGGGLVQAGGSLRLSCAASGNIFNTGYMGWYRQAPGKERELVAAISTGASTNYADSVKGRFTISRDNAKNTVYLQMNSLKPEDTAVYYCAARYIDYYNHYYWGQGTQVTVSS

SEQ ID NO: 28389 - protein, 118 aa, Artificial Sequence
  Chemically Synthesized
QVQLQESGGGLVQAGGSLRLSCAASGYISLRPYMGWYRQAPGKEREFVAAINYGATTNYADSVKGRFTISRDNAKNTVYLQMNSLKPEDTAVYYCAAWYVYLYWFLYWGQGTQVTVSS

SEQ ID NO: 28390 - protein, 126 aa, Artificial Sequence
  Chemically Synthesized
QVQLQESGGGLVQAGGSLRLSCAASGSIFDDQRMGWYRQAPGKEREFVAAIAYGASTNYADSVKGRFTISRDNAKNTVYLQMNSLKPEDTAVYYCAVALGPPVRNPAYRLYDYGYWGQGTQVTVSS

SEQ ID NO: 28391 - protein, 118 aa, Artificial Sequence
  Chemically Synthesized
QVQLQESGGGLVQAGGSLRLSCAASGNISYYDTMGWYRQAPGKEREFVAAIDQGTSTNYADSVKGRFTISRDNAKNTVYLQMNSLKPEDTAVYYCAVLKPDTTYFDYWGQGTQVTVSS

SEQ ID NO: 28392 - protein, 116 aa, Artificial Sequence
  Chemically Synthesized
QVQLQESGGGLVQAGGSLRLSCAASGYISGYDMGWYRQAPGKEREFVASITTGATTNYADSVKGRFTISRDNAKNTVYLQMNSLKPEDTAVYYCAVEPTVYHTSYWGQGTQVTVSS

SEQ ID NO: 28393 - protein, 118 aa, Artificial Sequence
  Chemically Synthesized
QVQLQESGGGLVQAGGSLRLSCAASGNIFLPGQMGWYRQAPGKEREFVAAIAGGGTTNYADSVKGRFTISRDNAKNTVYLQMNSLKPEDTAVYYCAVREITYDDLYYWGQGTQVTVSS

SEQ ID NO: 28394 - protein, 118 aa, Artificial Sequence
  Chemically Synthesized
QVQLQESGGGLVQAGGSLRLSCAASGNISYTREMGWYRQAPGKEREFVAAIGGGTTTYYADSVKGRFTISRDNAKNTVYLQMNSLKPEDTAVYYCAVWGLFRHYHTYWGQGTQVTVSS

SEQ ID NO: 28395 - protein, 120 aa, Artificial Sequence
  Chemically Synthesized
QVQLQESGGGLVQAGGSLRLSCAASGNIFLGDWMGWYRQAPGKERELVASIALGNQYADSVKGRFTISRDNAKNTVYLQMNSLKPEDTAVYYCAARDDEILEQYDSLGYWGQGTQVTVSS

SEQ ID NO: 28396 - protein, 126 aa, Artificial Sequence
  Chemically Synthesized
QVQLQESGGGLVQAGGSLRLSCAASGYISDPQYMGWYRQAPGKEREFVATITGGATTNYADSVKGRFTISRDNAKNTVYLQMNSLKPEDTAVYYCAVDGIYFDTIYGHVPALHSYWGQGTQVTVSS

SEQ ID NO: 28397 - protein, 126 aa, Artificial Sequence
  Chemically Synthesized
QVQLQESGGGLVQAGGSLRLSCAASGTISGDIVMGWYRQAPGKERELVATIGPGGTTYYADSVKGRFTISRDNAKNTVYLQMNSLKPEDTAVYYCAVAPGNTAHRILYTYSYYYYWGQGTQVTVSS

SEQ ID NO: 28398 - protein, 118 aa, Artificial Sequence
  Chemically Synthesized
QVQLQESGGGLVQAGGSLRLSCAASGTISPRDAMGWYRQAPGKEREFVAAIDRGANTNYADSVKGRFTISRDNAKNTVYLQMNSLKPEDTAVYYCAAIVWYTGYHAYWGQGTQVTVSS

SEQ ID NO: 28399 - protein, 118 aa, Artificial Sequence
  Chemically Synthesized
QVQLQESGGGLVQAGGSLRLSCAASGSISRVGQMGWYRQAPGKEREFVATIAYGTNTNYADSVKGRFTISRDNAKNTVYLQMNSLKPEDTAVYYCAVYHYSEGAHGYWGQGTQVTVSS

SEQ ID NO: 28400 - protein, 122 aa, Artificial Sequence
  Chemically Synthesized
QVQLQESGGGLVQAGGSLRLSCAASGTIFYPPKMGWYRQAPGKERELVAGIGNGTNTYYADSVKGRFTISRDNAKNTVYLQMNSLKPEDTAVYYCAVRFRLYHWHGAYYPYWGQGTQVTVSS

SEQ ID NO: 28401 - protein, 125 aa, Artificial Sequence
  Chemically Synthesized
QVQLQESGGGLVQAGGSLRLSCAASGNIFSCSMGWYRQAPGKERELVASIDTGTNTNYADSVKGRFTISRDNAKNTVYLQMNSLKPEDTAVYYCAAGYNPLGWDVYDTVYVYAYWGQGTQVTVSS

SEQ ID NO: 28402 - protein, 118 aa, Artificial Sequence
  Chemically Synthesized
QVQLQESGGGLVQAGGSLRLSCAASGYISGSYIMGWYRQAPGKERELVAAIDRGGSTYYADSVKGRFTISRDNAKNTVYLQMNSLKPEDTAVYYCAAYDTLLRYHQYWGQGTQVTVSS

SEQ ID NO: 28403 - protein, 118 aa, Artificial Sequence
  Chemically Synthesized
QVQLQESGGGLVQAGGSLRLSCAASGSIFRRPWMGWYRQAPGKEREFVAAITFGASTNYADSVKGRFTISRDNAKNTVYLQMNSLKPEDTAVYYCAVYRYARPRHYYWGQGTQVTVSS

SEQ ID NO: 28404 - protein, 118 aa, Artificial Sequence
  Chemically Synthesized
QVQLQESGGGLVQAGGSLRLSCAASGSISLYVYMGWYRQAPGKEREFVASISDGSITNYADSVKGRFTISRDNAKNTVYLQMNSLKPEDTAVYYCAAVTYSPTQLLYWGQGTQVTVSS

SEQ ID NO: 28405 - protein, 116 aa, Artificial Sequence
  Chemically Synthesized
QVQLQESGGGLVQAGGSLRLSCAASGTIFDSSMGWYRQAPGKERELVAAIGYGGITNYADSVKGRFTISRDNAKNTVYLQMNSLKPEDTAVYYCAAYQLVYYLSYWGQGTQVTVSS

SEQ ID NO: 28406 - protein, 121 aa, Artificial Sequence
  Chemically Synthesized
QVQLQESGGGLVQAGGSLRLSCAASGTIFTLLMGWYRQAPGKERELVASITAGSTTNYADSVKGRFTISRDNAKNTVYLQMNSLKPEDTAVYYCAVGRWYYYYGGRRHWYWGQGTQVTVSS

SEQ ID NO: 28407 - protein, 118 aa, Artificial Sequence
  Chemically Synthesized
QVQLQESGGGLVQAGGSLRLSCAASGTISDDGAMGWYRQAPGKEREFVAGIGYGGTTNYADSVKGRFTISRDNAKNTVYLQMNSLKPEDTAVYYCAAYAYLRGHHYYWGQGTQVTVSS

SEQ ID NO: 28408 - protein, 126 aa, Artificial Sequence
  Chemically Synthesized
QVQLQESGGGLVQAGGSLRLSCAASGTISYIRIMGWYRQAPGKERELVAAISGGSTTYYADSVKGRFTISRDNAKNTVYLQMNSLKPEDTAVYYCAVTDVGPSGYVRWATWDHSYWGQGTQVTVSS

SEQ ID NO: 28409 - protein, 112 aa, Artificial Sequence
  Chemically Synthesized
QVQLQESGGGLVQAGGSLRLSCAASGNMGWYRQAPGKERELVAGIAKGSTTNYADSVKGRFTISRDNAKNTVYLQMNSLKPEDTAVYYCAAYSGGRRLHTYWGQGTQVTVSS

SEQ ID NO: 28410 - protein, 118 aa, Artificial Sequence
  Chemically Synthesized
QVQLQESGGGLVQAGGSLRLSCAASGYISVLLGMGWYRQAPGKEREFVATIGQGASTNYADSVKGRFTISRDNAKNTVYLQMNSLKPEDTAVYYCAVYLFAAVTLNYWGQGTQVTVSS

SEQ ID NO: 28411 - protein, 118 aa, Artificial Sequence
  Chemically Synthesized
QVQLQESGGGLVQAGGSLRLSCAASGYISDPATMGWYRQAPGKEREFVAGIAIGGTTYYADSVKGRFTISRDNAKNTVYLQMNSLKPEDTAVYYCAVTYYDHRWYYYWGQGTQVTVSS

SEQ ID NO: 28412 - protein, 122 aa, Artificial Sequence
  Chemically Synthesized
QVQLQESGGGLVQAGGSLRLSCAASGYISVAYIMGWYRQAPGKERELVAAIDAGGSTNYADSVKGRFTISRDNAKNTVYLQMNSLKPEDTAVYYCAADWRERIGYDTYHPYWGQGTQVTVSS

SEQ ID NO: 28413 - protein, 122 aa, Artificial Sequence
  Chemically Synthesized
QVQLQESGGGLVQAGGSLRLSCAASGNISDWDNMGWYRQAPGKERELVASIDYGAITNYADSVKGRFTISRDNAKNTVYLQMNSLKPEDTAVYYCAAYYTHYYKANPYHRYWGQGTQVTVSS

SEQ ID NO: 28414 - protein, 114 aa, Artificial Sequence
  Chemically Synthesized
QVQLQESGGGLVQAGGSLRLSCAASGNIFNVYRMGWYRQAPGKERELVATIDYGAITYYADSVKGRFTISRDNAKNTVYLQMNSLKPEDTAVYYCAVTVTRIYWGQGTQVTVSS

SEQ ID NO: 28415 - protein, 118 aa, Artificial Sequence
  Chemically Synthesized
QVQLQESGGGLVQAGGSLRLSCAASGYISDTISMGWYRQAPGKEREFVAAINRGSTTNYADSVKGRFTISRDNAKNTVYLQMNSLKPEDTAVYYCAVRYDYSDAFWYWGQGTQVTVSS

SEQ ID NO: 28416 - protein, 118 aa, Artificial Sequence
  Chemically Synthesized
QVQLQESGGGLVQAGGSLRLSCAASGNISALAYMGWYRQAPGKEREFVAAIAHGGNTNYADSVKGRFTISRDNAKNTVYLQMNSLKPEDTAVYYCAAVWADDGYHGYWGQGTQVTVSS

SEQ ID NO: 28417 - protein, 118 aa, Artificial Sequence
  Chemically Synthesized
QVQLQESGGGLVQAGGSLRLSCAASGNIFRVPVMGWYRQAPGKERELVASITRGSITNYADSVKGRFTISRDNAKNTVYLQMNSLKPEDTAVYYCAANHWYRNRLVYWGQGTQVTVSS

SEQ ID NO: 28418 - protein, 118 aa, Artificial Sequence
  Chemically Synthesized
QVQLQESGGGLVQAGGSLRLSCAASGNIFVDASMGWYRQAPGKEREFVAGIATGTTTYYADSVKGRFTISRDNAKNTVYLQMNSLKPEDTAVYYCAVSRYYNGSLGYWGQGTQVTVSS

SEQ ID NO: 28419 - protein, 122 aa, Artificial Sequence
  Chemically Synthesized
QVQLQESGGGLVQAGGSLRLSCAASGTIFGRDIMGWYRQAPGKERELVAGIGYGSTTYYADSVKGRFTISRDNAKNTVYLQMNSLKPEDTAVYYCAVGAHYWRQFLGLYDYWGQGTQVTVSS

SEQ ID NO: 28420 - protein, 121 aa, Artificial Sequence
  Chemically Synthesized
QVQLQESGGGLVQAGGSLRLSCAASGSISARNFMGWYRQAPGKEREFVASIGQGSSTNYADSVKGRFTISRDNAKNTVYLQMNSLKPEDTAVYYCAAIFYHTGATDYLHYWGQGTQVTVSS

SEQ ID NO: 28421 - protein, 111 aa, Artificial Sequence
  Chemically Synthesized
QVQLQESGGGLVQAGGSLRLSCAASGYISLDYDMGWYRQAPGKEREFVASIGYGGNTNYADSVKGRFTISRDNAKNTVYLQMNSLKPEDTAVYYCAVVIYWGQGTQVTVSS

SEQ ID NO: 28422 - protein, 118 aa, Artificial Sequence
  Chemically Synthesized
QVQLQESGGGLVQAGGSLRLSCAASGYISYVVAMGWYRQAPGKERELVAAITTGATTNYADSVKGRFTISRDNAKNTVYLQMNSLKPEDTAVYYCAALTNDGHYHYYWGQGTQVTVSS

SEQ ID NO: 28423 - protein, 118 aa, Artificial Sequence
  Chemically Synthesized
QVQLQESGGGLVQAGGSLRLSCAASGTISASDVMGWYRQAPGKEREFVAGIAFGSITYYADSVKGRFTISRDNAKNTVYLQMNSLKPEDTAVYYCAVVTYRVPYYYYWGQGTQVTVSS

SEQ ID NO: 28424 - protein, 122 aa, Artificial Sequence
  Chemically Synthesized
QVQLQESGGGLVQAGGSLRLSCAASGSISYAWAMGWYRQAPGKEREFVATIDIGANTNYADSVKGRFTISRDNAKNTVYLQMNSLKPEDTAVYYCAVSDYIFVPVHRRHGYWGQGTQVTVSS

SEQ ID NO: 28425 - protein, 118 aa, Artificial Sequence
  Chemically Synthesized
QVQLQESGGGLVQAGGSLRLSCAASGSIFSTVAMGWYRQAPGKEREFVAGIGRGTTTNYADSVKGRFTISRDNAKNTVYLQMNSLKPEDTAVYYCAVNVYASPYLGYWGQGTQVTVSS

SEQ ID NO: 28426 - protein, 120 aa, Artificial Sequence
  Chemically Synthesized
QVQLQESGGGLVQAGGSLRLSCAASGTISQWYGMGWYRQAPGKEREFVAGIDFGGTTYYADSVKGRFTISRDNAKNTVYLQMNSLKPEDTAVYYCAVDFDVFYDADRFYWGQGTQVTVSS

SEQ ID NO: 28427 - protein, 122 aa, Artificial Sequence
  Chemically Synthesized
QVQLQESGGGLVQAGGSLRLSCAASGNIFTRVGMGWYRQAPGKEREFVATIDNGASTNYADSVKGRFTISRDNAKNTVYLQMNSLKPEDTAVYYCAAWANEIDIDYDGFDYWGQGTQVTVSS

SEQ ID NO: 28428 - protein, 120 aa, Artificial Sequence
  Chemically Synthesized
QVQLQESGGGLVQAGGSLRLSCAASGSISPSLMGWYRQAPGKERELVAAIDGGGNTNYADSVKGRFTISRDNAKNTVYLQMNSLKPEDTAVYYCAASVSTTVLVFVIIYWGQGTQVTVSS

SEQ ID NO: 28429 - protein, 123 aa, Artificial Sequence
  Chemically Synthesized
QVQLQESGGGLVQAGGSLRLSCAASGTISGTSSYMGWYRQAPGKERELVATIDYGTSTNYADSVKGRFTISRDNAKNTVYLQMNSLKPEDTAVYYCAVHGSSAPRARYRLNYWGQGTQVTVSS

SEQ ID NO: 28430 - protein, 117 aa, Artificial Sequence
  Chemically Synthesized
QVQLQESGGGLVQAGGSLRLSCAASGNISAAEIMGWYRQAPGKERELVAGISKGSNTNYADSVKGRFTISRDNAKNTVYLQMNSLKPEDTAVYYCAANDYRGHLCYWGQGTQVTVSS

SEQ ID NO: 28431 - protein, 118 aa, Artificial Sequence
  Chemically Synthesized
QVQLQESGGGLVQAGGSLRLSCAASGSIFWTYDMGWYRQAPGKERELVAGISGGGITNYADSVKGRFTISRDNAKNTVYLQMNSLKPEDTAVYYCAVTAAFLPNFGYWGQGTQVTVSS

SEQ ID NO: 28432 - protein, 122 aa, Artificial Sequence
  Chemically Synthesized
QVQLQESGGGLVQAGGSLRLSCAASGYIFYLYYMGWYRQAPGKEREFVATIAWGGSTYYADSVKGRFTISRDNAKNTVYLQMNSLKPEDTAVYYCAAYNNERHRHGQRHLYWGQGTQVTVSS

SEQ ID NO: 28433 - protein, 117 aa, Artificial Sequence
  Chemically Synthesized
QVQLQESGGGLVQAGGSLRLSCAASGNIFQYRGMGWYRQAPGKEREFVAAIASGSSTNYADSVKGRFTISRDNAKNTVYLQMNSLKPEDTAVYYCAVDPTVTRLMYWGQGTQVTVSS

SEQ ID NO: 28434 - protein, 126 aa, Artificial Sequence
  Chemically Synthesized
QVQLQESGGGLVQAGGSLRLSCAASGYIFSVLLMGWYRQAPGKERELVATITPGGITYYADSVKGRFTISRDNAKNTVYLQMNSLKPEDTAVYYCAVPKGDATRVADYTTPSHPYWGQGTQVTVSS

SEQ ID NO: 28435 - protein, 122 aa, Artificial Sequence
  Chemically Synthesized
QVQLQESGGGLVQAGGSLRLSCAASGTISFDVAMGWYRQAPGKEREFVAAITSGANTYYADSVKGRFTISRDNAKNTVYLQMNSLKPEDTAVYYCAAGRYARRRTYARFLYWGQGTQVTVSS

SEQ ID NO: 28436 - protein, 126 aa, Artificial Sequence
  Chemically Synthesized
QVQLQESGGGLVQAGGSLRLSCAASGSISRWGYMGWYRQAPGKERELVAAIADGGTTYYADSVKGRFTISRDNAKNTVYLQMNSLKPEDTAVYYCAVKYYLSYYLYFQGRQDLQYWGQGTQVTVSS

SEQ ID NO: 28437 - protein, 118 aa, Artificial Sequence
  Chemically Synthesized
QVQLQESGGGLVQAGGSLRLSCAASGYISYSFTMGWYRQAPGKEREFVASISYGSKYQYADSVKGRFTISRDNAKNTVYLQMNSLKPEDTAVYYCAVPHLYYVYHYYWGQGTQVTVSS

SEQ ID NO: 28438 - protein, 118 aa, Artificial Sequence
  Chemically Synthesized
QVQLQESGGGLVQAGGSLRLSCAASGSIFDGDFMGWYRQAPGKEREFVAAIGNGASTYYADSVKGRFTISRDNAKNTVYLQMNSLKPEDTAVYYCAVWYASDYRLAYWGQGTQVTVSS

SEQ ID NO: 28439 - protein, 118 aa, Artificial Sequence
  Chemically Synthesized
QVQLQESGGGLVQAGGSLRLSCAASGYIFLSGYMGWYRQAPGKEREFVAGIGRGASTNYADSVKGRFTISRDNAKNTVYLQMNSLKPEDTAVYYCAAVDHAKFYHGYWGQGTQVTVSS

SEQ ID NO: 28440 - protein, 126 aa, Artificial Sequence
  Chemically Synthesized
QVQLQESGGGLVQAGGSLRLSCAASGTIFPAIFMGWYRQAPGKEREFVAAISIGTSTYYADSVKGRFTISRDNAKNTVYLQMNSLKPEDTAVYYCAAYVDVYSLSALDKLGGLVYWGQGTQVTVSS

SEQ ID NO: 28441 - protein, 122 aa, Artificial Sequence
  Chemically Synthesized
QVQLQESGGGLVQAGGSLRLSCAASGSIFLPYYMGWYRQAPGKERELVASIDIGGITNYADSVKGRFTISRDNAKNTVYLQMNSLKPEDTAVYYCAAGDYHRGPLPGYHSYWGQGTQVTVSS

SEQ ID NO: 28442 - protein, 118 aa, Artificial Sequence
  Chemically Synthesized
QVQLQESGGGLVQAGGSLRLSCAASGYISDPPAMGWYRQAPGKERELVAAIDLGTSTYYADSVKGRFTISRDNAKNTVYLQMNSLKPEDTAVYYCAAFGSYLDKYAYWGQGTQVTVSS

SEQ ID NO: 28443 - protein, 117 aa, Artificial Sequence
  Chemically Synthesized
QVQLQESGGGLVQAGGSLRLSCAASGSIFLDRSMGWYRQAPGKEREFVAAISGGGTTYYADSVKGRFTISRDNAKNTVYLQMNSLKPEDTAVYYCAVASTPSTSIYWGQGTQVTVSS

SEQ ID NO: 28444 - protein, 116 aa, Artificial Sequence
  Chemically Synthesized
QVQLQESGGGLVQAGGSLRLSCAASGSIFTFAMGWYRQAPGKERELVATIGIGGTTYYADSVKGRFTISRDNAKNTVYLQMNSLKPEDTAVYYCAVTTTRSTSIYWGQGTQVTVSS

SEQ ID NO: 28445 - protein, 116 aa, Artificial Sequence
  Chemically Synthesized
QVQLQESGGGLVQAGGSLRLSCAASGTISYVRAMGWYRQAPGKEREFVASIGAGSSTYYADSVKGRFTISRDNAKNTVYLQMNSLKPEDTAVYYCAAVYIARHYYWGQGTQVTVSS

SEQ ID NO: 28446 - protein, 114 aa, Artificial Sequence
  Chemically Synthesized
QVQLQESGGGLVQAGGSLRLSCAASGRIFMGWYRQAPGKERELVAAISPGTITNYADSVKGRFTISRDNAKNTVYLQMNSLKPEDTAVYYCAAREISITAFAYWGQGTQVTVSS

SEQ ID NO: 28447 - protein, 122 aa, Artificial Sequence
  Chemically Synthesized
QVQLQESGGGLVQAGGSLRLSCAASGSISRDDVMGWYRQAPGKEREFVATINGGAITYYADSVKGRFTISRDNAKNTVYLQMNSLKPEDTAVYYCAADDYYAADRVNYYPYWGQGTQVTVSS

SEQ ID NO: 28448 - protein, 125 aa, Artificial Sequence
  Chemically Synthesized
QVQLQESGGGLVQAGGSLRLSCAASGSISPKYQMGWYRQAPGKERELVAAITYGTTTNYADSVKGRFTISRDNAKNTVYLQMNSLKPEDTAVYYCAAPAYVVIDGWDADGVVHYWGQGTQVTVSS

SEQ ID NO: 28449 - protein, 118 aa, Artificial Sequence
  Chemically Synthesized
QVQLQESGGGLVQAGGSLRLSCAASGTIFAPGYMGWYRQAPGKERELVASINVGSITYYADSVKGRFTISRDNAKNTVYLQMNSLKPEDTAVYYCAVGIYQYDTFYYWGQGTQVTVSS

SEQ ID NO: 28450 - protein, 122 aa, Artificial Sequence
  Chemically Synthesized
QVQLQESGGGLVQAGGSLRLSCAASGTIFGFPGMGWYRQAPGKERELVATIARGGTTYYADSVKGRFTISRDNAKNTVYLQMNSLKPEDTAVYYCAVEPRYTYFTGNAYAYWGQGTQVTVSS

SEQ ID NO: 28451 - protein, 122 aa, Artificial Sequence
  Chemically Synthesized
QVQLQESGGGLVQAGGSLRLSCAASGSISYLQGMGWYRQAPGKERELVASIAYGSITYYADSVKGRFTISRDNAKNTVYLQMNSLKPEDTAVYYCAVTAYVDEAFKRIFYYWGQGTQVTVSS

SEQ ID NO: 28452 - protein, 118 aa, Artificial Sequence
  Chemically Synthesized
QVQLQESGGGLVQAGGSLRLSCAASGYIFWRTYMGWYRQAPGKERELVAGIGTGTTTNYADSVKGRFTISRDNAKNTVYLQMNSLKPEDTAVYYCAVLYRGPHRFAYWGQGTQVTVSS

SEQ ID NO: 28453 - protein, 122 aa, Artificial Sequence
  Chemically Synthesized
QVQLQESGGGLVQAGGSLRLSCAASGYISTRTIMGWYRQAPGKERELVASIGDGGITNYADSVKGRFTISRDNAKNTVYLQMNSLKPEDTAVYYCAVLPEQSDFGRQYYDYWGQGTQVTVSS

SEQ ID NO: 28454 - protein, 118 aa, Artificial Sequence
  Chemically Synthesized
QVQLQESGGGLVQAGGSLRLSCAASGSIFFPRHMGWYRQAPGKEREFVASIAYGSITNYADSVKGRFTISRDNAKNTVYLQMNSLKPEDTAVYYCAAYHWSYYGHYYWGQGTQVTVSS

SEQ ID NO: 28455 - protein, 122 aa, Artificial Sequence
  Chemically Synthesized
QVQLQESGGGLVQAGGSLRLSCAASGNIFQYGDMGWYRQAPGKEREFVAGIDYGANTYYADSVKGRFTISRDNAKNTVYLQMNSLKPEDTAVYYCAVRWPVYYDYTARHLYWGQGTQVTVSS

SEQ ID NO: 28456 - protein, 118 aa, Artificial Sequence
  Chemically Synthesized
QVQLQESGGGLVQAGGSLRLSCAASGSISEGYVMGWYRQAPGKEREFVATITYGGNTYYADSVKGRFTISRDNAKNTVYLQMNSLKPEDTAVYYCAAFYYDDSPLSYWGQGTQVTVSS

SEQ ID NO: 28457 - protein, 122 aa, Artificial Sequence
  Chemically Synthesized
QVQLQESGGGLVQAGGSLRLSCAASGTIFPNDWMGWYRQAPGKERELVATITRGGTTNYADSVKGRFTISRDNAKNTVYLQMNSLKPEDTAVYYCAAGDGNDEYGYSPHPYWGQGTQVTVSS

SEQ ID NO: 28458 - protein, 125 aa, Artificial Sequence
  Chemically Synthesized
QVQLQESGGGLVQAGGSLRLSCAASGTIFDSAMGWYRQAPGKERELVAGINVGTNTYYADSVKGRFTISRDNAKNTVYLQMNSLKPEDTAVYYCAAVPYAASPPNAGEYYRFTYWGQGTQVTVSS

SEQ ID NO: 28459 - protein, 115 aa, Artificial Sequence
  Chemically Synthesized
QVQLQESGGGLVQAGGSLRLSCAASGTISSLTMGWYRQAPGKERELVASITTGTITNYADSVKGRFTISRDNAKNTVYLQMNSLKPEDTAVYYCAVYYFGRWSYWGQGTQVTVSS

SEQ ID NO: 28460 - protein, 126 aa, Artificial Sequence
  Chemically Synthesized
QVQLQESGGGLVQAGGSLRLSCAASGTISEVGGMGWYRQAPGKEREFVASISDGSTTYYADSVKGRFTISRDNAKNTVYLQMNSLKPEDTAVYYCAVYYFDDQDEYGYHFYVHAYWGQGTQVTVSS

SEQ ID NO: 28461 - protein, 118 aa, Artificial Sequence
  Chemically Synthesized
QVQLQESGGGLVQAGGSLRLSCAASGNIFTRTYMGWYRQAPGKEREFVAGIAFGSNTYYADSVKGRFTISRDNAKNTVYLQMNSLKPEDTAVYYCAVPYPYFWSHYYWGQGTQVTVSS

SEQ ID NO: 28462 - protein, 112 aa, Artificial Sequence
  Chemically Synthesized
QVQLQESGGGLVQAGGSLRLSCAASGNISDYRHMGWYRQAPGKEREFVATIAYGGTTNYADSVKGRFTISRDNAKNTVYLQMNSLKPEDTAVYYCAAFTYYWGQGTQVTVSS

SEQ ID NO: 28463 - protein, 121 aa, Artificial Sequence
  Chemically Synthesized
QVQLQESGGGLVQAGGSLRLSCAASGSISRPDYMGWYRQAPGKEREFVATIGFGGSTNYADSVKGRFTISRDNAKNTVYLQMNSLKPEDTAVYYCAVGGPHGVYGDGTMYWGQGTQVTVSS

SEQ ID NO: 28464 - protein, 117 aa, Artificial Sequence
  Chemically Synthesized
QVQLQESGGGLVQAGGSLRLSCAASGNILVVTMGWYRQAPGKEREFVATISDGAITNYADSVKGRFTISRDNAKNTVYLQMNSLKPEDTAVYYCAAGGDDQTNYQYWGQGTQVTVSS

SEQ ID NO: 28465 - protein, 121 aa, Artificial Sequence
  Chemically Synthesized
QVQLQESGGGLVQAGGSLRLSCAASGTISADDYMGWYRQAPGKEREFVAAISKVVLPYADSVKGRFTISRDNAKNTVYLQMNSLKPEDTAVYYCAVWSPYSGDVVAYFGYWGQGTQVTVSS

SEQ ID NO: 28466 - protein, 122 aa, Artificial Sequence
  Chemically Synthesized
QVQLQESGGGLVQAGGSLRLSCAASGNISVVRAMGWYRQAPGKERELVAAIDYGATTYYADSVKGRFTISRDNAKNTVYLQMNSLKPEDTAVYYCAVIRQDQAGVSTLFIYWGQGTQVTVSS

SEQ ID NO: 28467 - protein, 122 aa, Artificial Sequence
  Chemically Synthesized
QVQLQESGGGLVQAGGSLRLSCAASGSIFDPYIMGWYRQAPGKEREFVAAIGTGSSTNYADSVKGRFTISRDNAKNTVYLQMNSLKPEDTAVYYCAVPRDHSHTDTAGLYYWGQGTQVTVSS

SEQ ID NO: 28468 - protein, 118 aa, Artificial Sequence
  Chemically Synthesized
QVQLQESGGGLVQAGGSLRLSCAASGTISELQLMGWYRQAPGKEREFVAAINAGGNTNYADSVKGRFTISRDNAKNTVYLQMNSLKPEDTAVYYCAAYYAIPTWHGYWGQGTQVTVSS

SEQ ID NO: 28469 - protein, 121 aa, Artificial Sequence
  Chemically Synthesized
QVQLQESGGGLVQAGGSLRLSCAASGNISTAQAMGWYRQAPGKEREFVAGIGPGTITNYADSVKGRFTISRDNAKNTVYLQMNSLKPEDTAVYYCAVDAEQGHYNWGAHYWGQGTQVTVSS

SEQ ID NO: 28470 - protein, 120 aa, Artificial Sequence
  Chemically Synthesized
QVQLQESGGGLVQAGGSLRLSCAASGNIFRYGFMGWYRQAPGKERELVASIGGLLPYADSVKGRFTISRDNAKNTVYLQMNSLKPEDTAVYYCAVNQLQVWPPIDGYAYWGQGTQVTVSS

SEQ ID NO: 28471 - protein, 122 aa, Artificial Sequence
  Chemically Synthesized
QVQLQESGGGLVQAGGSLRLSCAASGTISAAYTMGWYRQAPGKERELVATINWGSTTYYADSVKGRFTISRDNAKNTVYLQMNSLKPEDTAVYYCAAVGASVPYESWTYRYWGQGTQVTVSS

SEQ ID NO: 28472 - protein, 125 aa, Artificial Sequence
  Chemically Synthesized
QVQLQESGGGLVQAGGSLRLSCAASGYIFRGRYMGWYRQAPGKEREFVAGIGDGSTTYYADSVKGRFTISRDNAKNTVYLQMNSLKPEDTAVYYCAAYRYSGWGRATPRAWYRYWGQGTQVTVSS

SEQ ID NO: 28473 - protein, 118 aa, Artificial Sequence
  Chemically Synthesized
QVQLQESGGGLVQAGGSLRLSCAASGSIFWQRYMGWYRQAPGKEREFVAGITFGTSTYYADSVKGRFTISRDNAKNTVYLQMNSLKPEDTAVYYCAVSRGAFPYYGYWGQGTQVTVSS

SEQ ID NO: 28474 - protein, 118 aa, Artificial Sequence
  Chemically Synthesized
QVQLQESGGGLVQAGGSLRLSCAASGSIFPTTGMGWYRQAPGKEREFVASITWGGTTYYADSVKGRFTISRDNAKNTVYLQMNSLKPEDTAVYYCAVDAGYFGVHDYWGQGTQVTVSS

SEQ ID NO: 28475 - protein, 117 aa, Artificial Sequence
  Chemically Synthesized
QVQLQESGGGLVQAGGSLRLSCAASGSISRRPYMGWYRQAPGKEREFVASISPGATTNYADSVKGRFTISRDNAKNTVYLQMNSLKPEDTAVYYCAVYYNTLDDFYWGQGTQVTVSS

SEQ ID NO: 28476 - protein, 117 aa, Artificial Sequence
  Chemically Synthesized
QVQLQESGGGLVQAGGSLRLSCAASGSISVKPGMGWYRQAPGKERELVASINTGATTYYADSVKGRFTISRDNAKNTVYLQMNSLKPEDTAVYYCAAATGLTSTIYWGQGTQVTVSS

SEQ ID NO: 28477 - protein, 118 aa, Artificial Sequence
  Chemically Synthesized
QVQLQESGGGLVQAGGSLRLSCAASGYIFSQRYMGWYRQAPGKERELVAAIDRGGNTYYADSVKGRFTISRDNAKNTVYLQMNSLKPEDTAVYYCAADLNYPVSYRYWGQGTQVTVSS

SEQ ID NO: 28478 - protein, 126 aa, Artificial Sequence
  Chemically Synthesized
QVQLQESGGGLVQAGGSLRLSCAASGSISYNPQMGWYRQAPGKERELVATIGYGANTYYADSVKGRFTISRDNAKNTVYLQMNSLKPEDTAVYYCAARDQYGTAYDVAGRAWLAYWGQGTQVTVSS

SEQ ID NO: 28479 - protein, 118 aa, Artificial Sequence
  Chemically Synthesized
QVQLQESGGGLVQAGGSLRLSCAASGNISPQRLMGWYRQAPGKERELVAAIANGTTTYYADSVKGRFTISRDNAKNTVYLQMNSLKPEDTAVYYCAAEAWRDYGYDYWGQGTQVTVSS

SEQ ID NO: 28480 - protein, 117 aa, Artificial Sequence
  Chemically Synthesized
QVQLQESGGGLVQAGGSLRLSCAASGNISWDDGMGWYRQAPGKEREFVATITVVLVPYADSVKGRFTISRDNAKNTVYLQMNSLKPEDTAVYYCAAQDPDDAVLYYWGQGTQVTVSS

SEQ ID NO: 28481 - protein, 125 aa, Artificial Sequence
  Chemically Synthesized
QVQLQESGGGLVQAGGSLRLSCAASGNIFQGGLMGWYRQAPGKERELVATINIGASTNYADSVKGRFTISRDNAKNTVYLQMNSLKPEDTAVYYCAADPVRTDAGAYKLVKSMYWGQGTQVTVSS

SEQ ID NO: 28482 - protein, 121 aa, Artificial Sequence
  Chemically Synthesized
QVQLQESGGGLVQAGGSLRLSCAASGTIFYYYVMGWYRQAPGKEREFVAGIATGASTNYADSVKGRFTISRDNAKNTVYLQMNSLKPEDTAVYYCAADATDSSSISGLAYWGQGTQVTVSS

SEQ ID NO: 28483 - protein, 127 aa, Artificial Sequence
  Chemically Synthesized
QVQLQESGGGLVQAGGSLRLSCAASGTISYSSDDMGWYRQAPGKERELVAGITAGATTNYADSVKGRFTISRDNAKNTVYLQMNSLKPEDTAVYYCAADYRIPHDRFTHWFDGLEYWGQGTQVTVSS

SEQ ID NO: 28484 - protein, 121 aa, Artificial Sequence
  Chemically Synthesized
QVQLQESGGGLVQAGGSLRLSCAASGSISDLDHMGWYRQAPGKEREFVAGIDQGSSTNYADSVKGRFTISRDNAKNTVYLQMNSLKPEDTAVYYCAAYLWEWAWLYPYLYWGQGTQVTVSS

SEQ ID NO: 28485 - protein, 118 aa, Artificial Sequence
  Chemically Synthesized
QVQLQESGGGLVQAGGSLRLSCAASGTISLQPRMGWYRQAPGKERELVAGIARGGTTNYADSVKGRFTISRDNAKNTVYLQMNSLKPEDTAVYYCAAEATYDRLYPYWGQGTQVTVSS

SEQ ID NO: 28486 - protein, 118 aa, Artificial Sequence
  Chemically Synthesized
QVQLQESGGGLVQAGGSLRLSCAASGSISNYPTMGWYRQAPGKERELVAAINGGSTTNYADSVKGRFTISRDNAKNTVYLQMNSLKPEDTAVYYCAANSSDAADYTYWGQGTQVTVSS

SEQ ID NO: 28487 - protein, 118 aa, Artificial Sequence
  Chemically Synthesized
QVQLQESGGGLVQAGGSLRLSCAASGNISSFDLMGWYRQAPGKEREFVAAIGYGGSTYYADSVKGRFTISRDNAKNTVYLQMNSLKPEDTAVYYCAVIEARRQDHDYWGQGTQVTVSS

SEQ ID NO: 28488 - protein, 118 aa, Artificial Sequence
  Chemically Synthesized
QVQLQESGGGLVQAGGSLRLSCAASGTIFYDTYMGWYRQAPGKERELVAAIAIGGTTYYADSVKGRFTISRDNAKNTVYLQMNSLKPEDTAVYYCAAHHYDQPWFRYWGQGTQVTVSS

SEQ ID NO: 28489 - protein, 118 aa, Artificial Sequence
  Chemically Synthesized
QVQLQESGGGLVQAGGSLRLSCAASGNIFAAGGMGWYRQAPGKERELVASIGSGASTNYADSVKGRFTISRDNAKNTVYLQMNSLKPEDTAVYYCAVYYDFPYPHSYWGQGTQVTVSS

SEQ ID NO: 28490 - protein, 118 aa, Artificial Sequence
  Chemically Synthesized
QVQLQESGGGLVQAGGSLRLSCAASGYISYIGPMGWYRQAPGKEREFVAAITVGSITYYADSVKGRFTISRDNAKNTVYLQMNSLKPEDTAVYYCAAIGYYGAQYNYWGQGTQVTVSS

SEQ ID NO: 28491 - protein, 126 aa, Artificial Sequence
  Chemically Synthesized
QVQLQESGGGLVQAGGSLRLSCAASGTISYDYGMGWYRQAPGKERELVAAIDGGGSTYYADSVKGRFTISRDNAKNTVYLQMNSLKPEDTAVYYCAAWTTTYYTWDYDYPWTLAYWGQGTQVTVSS

SEQ ID NO: 28492 - protein, 117 aa, Artificial Sequence
  Chemically Synthesized
QVQLQESGGGLVQAGGSLRLSCAASGNIFKYHFMGWYRQAPGKERELVATITHGATTNYADSVKGRFTISRDNAKNTVYLQMNSLKPEDTAVYYCAVKDESYSDFYWGQGTQVTVSS

SEQ ID NO: 28493 - protein, 122 aa, Artificial Sequence
  Chemically Synthesized
QVQLQESGGGLVQAGGSLRLSCAASGTIFTTGSMGWYRQAPGKEREFVASIAVGSSTYYADSVKGRFTISRDNAKNTVYLQMNSLKPEDTAVYYCAADYRYSGVYTDTLAYWGQGTQVTVSS

SEQ ID NO: 28494 - protein, 125 aa, Artificial Sequence
  Chemically Synthesized
QVQLQESGGGLVQAGGSLRLSCAASGTIFVGKMGWYRQAPGKERELVATIDEGANTNYADSVKGRFTISRDNAKNTVYLQMNSLKPEDTAVYYCAVYGNILYRYDSRTWYDFHYWGQGTQVTVSS

SEQ ID NO: 28495 - protein, 118 aa, Artificial Sequence
  Chemically Synthesized
QVQLQESGGGLVQAGGSLRLSCAASGYIFYESDMGWYRQAPGKEREFVAAIGLGTITNYADSVKGRFTISRDNAKNTVYLQMNSLKPEDTAVYYCAADGGPGYPLDYWGQGTQVTVSS

SEQ ID NO: 28496 - protein, 118 aa, Artificial Sequence
  Chemically Synthesized
QVQLQESGGGLVQAGGSLRLSCAASGTIFTAHYMGWYRQAPGKERELVASIAVGSNTYYADSVKGRFTISRDNAKNTVYLQMNSLKPEDTAVYYCAVRDVATRGYVYWGQGTQVTVSS

SEQ ID NO: 28497 - protein, 121 aa, Artificial Sequence
  Chemically Synthesized
QVQLQESGGGLVQAGGSLRLSCAASGYIFDILDMGWYRQAPGKERELVASIGTGGSTYYADSVKGRFTISRDNAKNTVYLQMNSLKPEDTAVYYCAADSTRLLPLTHHRYWGQGTQVTVSS

SEQ ID NO: 28498 - protein, 122 aa, Artificial Sequence
  Chemically Synthesized
QVQLQESGGGLVQAGGSLRLSCAASGNISHYQQMGWYRQAPGKEREFVASISGGGNTYYADSVKGRFTISRDNAKNTVYLQMNSLKPEDTAVYYCAAYYGDYAVAWNVHYYWGQGTQVTVSS

SEQ ID NO: 28499 - protein, 122 aa, Artificial Sequence
  Chemically Synthesized
QVQLQESGGGLVQAGGSLRLSCAASGNISRDHDMGWYRQAPGKERELVAAISLGANTYYADSVKGRFTISRDNAKNTVYLQMNSLKPEDTAVYYCAVKHYDYTAITGGYGYWGQGTQVTVSS

SEQ ID NO: 28500 - protein, 121 aa, Artificial Sequence
  Chemically Synthesized
QVQLQESGGGLVQAGGSLRLSCAASGYISYELIMGWYRQAPGKERELVASISGASTNYADSVKGRFTISRDNAKNTVYLQMNSLKPEDTAVYYCAVTDPEQYTGDDGHVYWGQGTQVTVSS

SEQ ID NO: 28501 - protein, 122 aa, Artificial Sequence
  Chemically Synthesized
QVQLQESGGGLVQAGGSLRLSCAASGYIFVGYDMGWYRQAPGKERELVAGIADGTNTYYADSVKGRFTISRDNAKNTVYLQMNSLKPEDTAVYYCAVRYLYRLLVLYYFQYWGQGTQVTVSS

SEQ ID NO: 28502 - protein, 121 aa, Artificial Sequence
  Chemically Synthesized
QVQLQESGGGLVQAGGSLRLSCAASGSISILYTMGWYRQAPGKEREFVATIARGASTYYADSVKGRFTISRDNAKNTVYLQMNSLKPEDTAVYYCAVKGQSRWYAHYHFYWGQGTQVTVSS

SEQ ID NO: 28503 - protein, 118 aa, Artificial Sequence
  Chemically Synthesized
QVQLQESGGGLVQAGGSLRLSCAASGNIFGTVTMGWYRQAPGKEREFVAAIGWGSNTYYADSVKGRFTISRDNAKNTVYLQMNSLKPEDTAVYYCAVRGYFSYDHAYWGQGTQVTVSS

SEQ ID NO: 28504 - protein, 122 aa, Artificial Sequence
  Chemically Synthesized
QVQLQESGGGLVQAGGSLRLSCAASGTISTYHYMGWYRQAPGKEREFVASITYGSSTYYADSVKGRFTISRDNAKNTVYLQMNSLKPEDTAVYYCAAGEFTPYTALYALQYWGQGTQVTVSS

SEQ ID NO: 28505 - protein, 122 aa, Artificial Sequence
  Chemically Synthesized
QVQLQESGGGLVQAGGSLRLSCAASGTIFWDAWMGWYRQAPGKERELVAAIGGGASTYYADSVKGRFTISRDNAKNTVYLQMNSLKPEDTAVYYCAVYYYRTRQAYGSHAYWGQGTQVTVSS

SEQ ID NO: 28506 - protein, 126 aa, Artificial Sequence
  Chemically Synthesized
QVQLQESGGGLVQAGGSLRLSCAASGTIFYPNTMGWYRQAPGKERELVAAIAQGWYYLYADSVKGRFTISRDNAKNTVYLQMNSLKPEDTAVYYCAADRVTGRGNITPYRPRLGYWGQGTQVTVSS

SEQ ID NO: 28507 - protein, 122 aa, Artificial Sequence
  Chemically Synthesized
QVQLQESGGGLVQAGGSLRLSCAASGSIFQTTGMGWYRQAPGKERELVAGINPGTSTYYADSVKGRFTISRDNAKNTVYLQMNSLKPEDTAVYYCAVLTSPLARYYGVHEYWGQGTQVTVSS

SEQ ID NO: 28508 - protein, 117 aa, Artificial Sequence
  Chemically Synthesized
QVQLQESGGGLVQAGGSLRLSCAASGSISLLRTMGWYRQAPGKERELLPLLISVVVPYADSVKGRFTISRDNAKNTVYLQMNSLKPEDTAVYYCAAPRSGADELGYWGQGTQVTVSS

SEQ ID NO: 28509 - protein, 118 aa, Artificial Sequence
  Chemically Synthesized
QVQLQESGGGLVQAGGSLRLSCAASGTISGGNNMGWYRQAPGKEREFVAAIDAGTTTNYADSVKGRFTISRDNAKNTVYLQMNSLKPEDTAVYYCAVQNTTYDYFDYWGQGTQVTVSS

SEQ ID NO: 28510 - protein, 122 aa, Artificial Sequence
  Chemically Synthesized
QVQLQESGGGLVQAGGSLRLSCAASGYISDPYNMGWYRQAPGKERELVAGITDGTITYYADSVKGRFTISRDNAKNTVYLQMNSLKPEDTAVYYCAVDGDQREPSDVIFKYWGQGTQVTVSS

SEQ ID NO: 28511 - protein, 126 aa, Artificial Sequence
  Chemically Synthesized
QVQLQESGGGLVQAGGSLRLSCAASGNIFAGGYMGWYRQAPGKERELVASIGYGAITYYADSVKGRFTISRDNAKNTVYLQMNSLKPEDTAVYYCAVFADGKDVEDGDYPSSLNYWGQGTQVTVSS

SEQ ID NO: 28512 - protein, 121 aa, Artificial Sequence
  Chemically Synthesized
QVQLQESGGGLVQAGGSLRLSCAASGSIFDEGLMGWYRQAPGKEREFVASIDSGSTTYYADSVKGRFTISRDNAKNTVYLQMNSLKPEDTAVYYCAFTLLTLLTSTTTMYWGQGTQVTVSS

SEQ ID NO: 28513 - protein, 121 aa, Artificial Sequence
  Chemically Synthesized
QVQLQESGGGLVQAGGSLRLSCAASGSISADDRMGWYRQAPGKEREFVAAIGKGTNTNYADSVKGRFTISRDNAKNTVYLQMNSLKPEDTAVYYCAAGYGGEYLIESLMYWGQGTQVTVSS

SEQ ID NO: 28514 - protein, 122 aa, Artificial Sequence
  Chemically Synthesized
QVQLQESGGGLVQAGGSLRLSCAASGNISGTDIMGWYRQAPGKERELVASITDGGTTYYADSVKGRFTISRDNAKNTVYLQMNSLKPEDTAVYYCAVVAWVWRNPGVTYGYWGQGTQVTVSS

SEQ ID NO: 28515 - protein, 122 aa, Artificial Sequence
  Chemically Synthesized
QVQLQESGGGLVQAGGSLRLSCAASGNIFRYGAMGWYRQAPGKERELVAGIAYGSNTYYADSVKGRFTISRDNAKNTVYLQMNSLKPEDTAVYYCAAYRGHDDPIYEQHHYWGQGTQVTVSS

SEQ ID NO: 28516 - protein, 111 aa, Artificial Sequence
  Chemically Synthesized
QVQLQESGGGLVQAGGSLRLSCAASGSISVRGYMGWYRQAPGKEREFVATINDGTTTNYADSVKGRFTISRDNAKNTVYLQMNSLKPEDTAVYYCAARIYWGQGTQVTVSS

SEQ ID NO: 28517 - protein, 117 aa, Artificial Sequence
  Chemically Synthesized
QVQLQESGGGLVQAGGSLRLSCAASGTISDFEVMGWYRQAPGKEREFVAGIDYGTSTYYADSVKGRFTISRDNAKNTVYLQMNSLKPEDTAVYYCAALASTTTVIYWGQGTQVTVSS

SEQ ID NO: 28518 - protein, 118 aa, Artificial Sequence
  Chemically Synthesized
QVQLQESGGGLVQAGGSLRLSCAASGNISFLEYMGWYRQAPGKERELVASIDSGTTTYYADSVKGRFTISRDNAKNTVYLQMNSLKPEDTAVYYCAVRDYQDGTYQYWGQGTQVTVSS

SEQ ID NO: 28519 - protein, 126 aa, Artificial Sequence
  Chemically Synthesized
QVQLQESGGGLVQAGGSLRLSCAASGTISSAVVMGWYRQAPGKERELVATIGTGTITYYADSVKGRFTISRDNAKNTVYLQMNSLKPEDTAVYYCAADNELDSYSSRDDAHAYDYWGQGTQVTVSS

SEQ ID NO: 28520 - protein, 122 aa, Artificial Sequence
  Chemically Synthesized
QVQLQESGGGLVQAGGSLRLSCAASGTISPSSVMGWYRQAPGKEREFVASIGAGTTTYYADSVKGRFTISRDNAKNTVYLQMNSLKPEDTAVYYCAVNRVPYGAQDVLFIYWGQGTQVTVSS

SEQ ID NO: 28521 - protein, 122 aa, Artificial Sequence
  Chemically Synthesized
QVQLQESGGGLVQAGGSLRLSCAASGSISFPYVMGWYRQAPGKERELVASIGPGGSTNYADSVKGRFTISRDNAKNTVYLQMNSLKPEDTAVYYCAVGGTLNRLDHVYYTYWGQGTQVTVSS

SEQ ID NO: 28522 - protein, 126 aa, Artificial Sequence
  Chemically Synthesized
QVQLQESGGGLVQAGGSLRLSCAASGTIFSYYQMGWYRQAPGKERELVAGIAQGASTNYADSVKGRFTISRDNAKNTVYLQMNSLKPEDTAVYYCAVDRAPLTYVYLGYAEPYLYWGQGTQVTVSS

SEQ ID NO: 28523 - protein, 118 aa, Artificial Sequence
  Chemically Synthesized
QVQLQESGGGLVQAGGSLRLSCAASGTISDTAYMGWYRQAPGKEREFVATIGTGAITYYADSVKGRFTISRDNAKNTVYLQMNSLKPEDTAVYYCAAGGGYQHRHTYWGQGTQVTVSS

SEQ ID NO: 28524 - protein, 118 aa, Artificial Sequence
  Chemically Synthesized
QVQLQESGGGLVQAGGSLRLSCAASGYISRYLYMGWYRQAPGKERELVATISIGGTTYYADSVKGRFTISRDNAKNTVYLQMNSLKPEDTAVYYCAAVTYWIHFYDYWGQGTQVTVSS

SEQ ID NO: 28525 - protein, 117 aa, Artificial Sequence
  Chemically Synthesized
QVQLQESGGGLVQAGGSLRLSCAASGNIFYGPYMGWYRQAPGKERELVASIDRGNTNYADSVKGRFTISRDNAKNTVYLQMNSLKPEDTAVYYCAAYDTYQYQFRYWGQGTQVTVSS

SEQ ID NO: 28526 - protein, 126 aa, Artificial Sequence
  Chemically Synthesized
QVQLQESGGGLVQAGGSLRLSCAASGYISGEHRMGWYRQAPGKEREFVAAIGDGGTTYYADSVKGRFTISRDNAKNTVYLQMNSLKPEDTAVYYCAVPPHKYQYVRRWAPYYFFYWGQGTQVTVSS

SEQ ID NO: 28527 - protein, 117 aa, Artificial Sequence
  Chemically Synthesized
QVQLQESGGGLVQAGGSLRLSCAASGNIFYPSPMGWYRQAPGKERELVATISAGGTTNYADSVKGRFTISRDNAKNTVYLQMNSLKPEDTAVYYCAVNYLPSLTIYWGQGTQVTVSS

SEQ ID NO: 28528 - protein, 118 aa, Artificial Sequence
  Chemically Synthesized
QVQLQESGGGLVQAGGSLRLSCAASGTISPNEYMGWYRQAPGKEREFVAGITRGTNTYYADSVKGRFTISRDNAKNTVYLQMNSLKPEDTAVYYCAAYYYYDGAYSYWGQGTQVTVSS

SEQ ID NO: 28529 - protein, 110 aa, Artificial Sequence
  Chemically Synthesized
QVQLQESGGGLVQAGGSLRLSCAASGTIFQAYQMGWYRQAPGKERELVVAIGYGGITNYADSVKGRFTISRDNAKNTVYLQMNSLKPEDTAVYYCAHFYWGQGTQVTVSS

SEQ ID NO: 28530 - protein, 122 aa, Artificial Sequence
  Chemically Synthesized
QVQLQESGGGLVQAGGSLRLSCAASGSISGASVMGWYRQAPGKEREFVAAIDGGASTYYADSVKGRFTISRDNAKNTVYLQMNSLKPEDTAVYYCAVSYNRYSWRIWRHTYWGQGTQVTVSS

SEQ ID NO: 28531 - protein, 122 aa, Artificial Sequence
  Chemically Synthesized
QVQLQESGGGLVQAGGSLRLSCAASGNIFWPTIMGWYRQAPGKERELVASIALGGNTNYADSVKGRFTISRDNAKNTVYLQMNSLKPEDTAVYYCAAGVRHSTYHTTQYSYWGQGTQVTVSS

SEQ ID NO: 28532 - protein, 122 aa, Artificial Sequence
  Chemically Synthesized
QVQLQESGGGLVQAGGSLRLSCAASGYIFHEGGMGWYRQAPGKERELVAGIGAGTITYYADSVKGRFTISRDNAKNTVYLQMNSLKPEDTAVYYCAVAEIPQSNATQPHTYWGQGTQVTVSS

SEQ ID NO: 28533 - protein, 118 aa, Artificial Sequence
  Chemically Synthesized
QVQLQESGGGLVQAGGSLRLSCAASGYISTYYGMGWYRQAPGKERELVASISLGATTNYADSVKGRFTISRDNAKNTVYLQMNSLKPEDTAVYYCAVEWNVYTTHDYWGQGTQVTVSS

SEQ ID NO: 28534 - protein, 122 aa, Artificial Sequence
  Chemically Synthesized
QVQLQESGGGLVQAGGSLRLSCAASGSISTFDPMGWYRQAPGKERELVAAINDGGSTNYADSVKGRFTISRDNAKNTVYLQMNSLKPEDTAVYYCAADHAYRYTAAVDHTYWGQGTQVTVSS

SEQ ID NO: 28535 - protein, 111 aa, Artificial Sequence
  Chemically Synthesized
QVQLQESGGGLVQAGGSLRLSCAASGSISVADGMGWYRQAPGKEREFVASIGNGGNTNYADSVKGRFTISRDNAKNTVYLQMNSLKPEDTAVYYCAARAYWGQGTQVTVSS

SEQ ID NO: 28536 - protein, 122 aa, Artificial Sequence
  Chemically Synthesized
QVQLQESGGGLVQAGGSLRLSCAASGSISGYYSMGWYRQAPGKERELVAAITVGTTTNYADSVKGRFTISRDNAKNTVYLQMNSLKPEDTAVYYCAAPYAVTGRIFTYHWYWGQGTQVTVSS

SEQ ID NO: 28537 - protein, 118 aa, Artificial Sequence
  Chemically Synthesized
QVQLQESGGGLVQAGGSLRLSCAASGSIFSPPTMGWYRQAPGKERELVATISKGATTNYADSVKGRFTISRDNAKNTVYLQMNSLKPEDTAVYYCAVRWVNVGVYYYWGQGTQVTVSS

SEQ ID NO: 28538 - protein, 118 aa, Artificial Sequence
  Chemically Synthesized
QVQLQESGGGLVQAGGSLRLSCAASGTISYVRAMGWYRQAPGKEREFVAGIADGAITYYADSVKGRFTISRDNAKNTVYLQMNSLKPEDTAVYYCAVTVIYDGFYLYWGQGTQVTVSS

SEQ ID NO: 28539 - protein, 125 aa, Artificial Sequence
  Chemically Synthesized
QVQLQESGGGLVQAGGSLRLSCAASGTISGYDYMGWYRQAPGKEREFVAGITYGANTYYADSVKGRFTISRDNAKNTVYLQMNSLKPEDTAVYYCAVSLLVGVFCTTSTVLFLYWGQGTQVTVSS

SEQ ID NO: 28540 - protein, 121 aa, Artificial Sequence
  Chemically Synthesized
QVQLQESGGGLVQAGGSLRLSCAASGNISGSYDMGWYRQAPGKERELVAGINYGANTNYADSVKGRFTISRDNAKNTVYLQMNSLKPEDTAVYYCAAEPYSSLTFSSIFYWGQGTQVTVSS

SEQ ID NO: 28541 - protein, 127 aa, Artificial Sequence
  Chemically Synthesized
QVQLQESGGGLVQAGGSLRLSCAASGTIFNHTYMGWYRQAPGKEREFVATIDRGSTTNYADSVKGRFTISRDNAKNTVYLQMNSLKPEDTAVYYCAAAYDYIWQIKWPWQAANYYYWGQGTQVTVSS

SEQ ID NO: 28542 - protein, 126 aa, Artificial Sequence
  Chemically Synthesized
QVQLQESGGGLVQAGGSLRLSCAASGSISFEYYMGWYRQAPGKERELVAGIGDGTTTYYADSVKGRFTISRDNAKNTVYLQMNSLKPEDTAVYYCAVSWVGDINVRRDSNFPYDYWGQGTQVTVSS

SEQ ID NO: 28543 - protein, 118 aa, Artificial Sequence
  Chemically Synthesized
QVQLQESGGGLVQAGGSLRLSCAASGTIFGRVYMGWYRQAPGKEREFVAGIDIGASTYYADSVKGRFTISRDNAKNTVYLQMNSLKPEDTAVYYCAVWSYIAGDYPYWGQGTQVTVSS

SEQ ID NO: 28544 - protein, 126 aa, Artificial Sequence
  Chemically Synthesized
QVQLQESGGGLVQAGGSLRLSCAASGTIFLQDTMGWYRQAPGKEREFVASINLGSNTYYADSVKGRFTISRDNAKNTVYLQMNSLKPEDTAVYYCAVTWYDHREQDGYTDAYFAYWGQGTQVTVSS

SEQ ID NO: 28545 - protein, 118 aa, Artificial Sequence
  Chemically Synthesized
QVQLQESGGGLVQAGGSLRLSCAASGTISGLYYMGWYRQAPGKEREFVASISWGTNTYYADSVKGRFTISRDNAKNTVYLQMNSLKPEDTAVYYCAAGLYYGPYPSYWGQGTQVTVSS

SEQ ID NO: 28546 - protein, 126 aa, Artificial Sequence
  Chemically Synthesized
QVQLQESGGGLVQAGGSLRLSCAASGSISYGDVMGWYRQAPGKEREFVASIAYGGNTNYADSVKGRFTISRDNAKNTVYLQMNSLKPEDTAVYYCAVYGDTDDKQYKPRTLFHKYWGQGTQVTVSS

SEQ ID NO: 28547 - protein, 126 aa, Artificial Sequence
  Chemically Synthesized
QVQLQESGGGLVQAGGSLRLSCAASGNIFPTYEMGWYRQAPGKERELVAAISYGTSTNYADSVKGRFTISRDNAKNTVYLQMNSLKPEDTAVYYCAAYLYVWYYPPTIFWVNLGYWGQGTQVTVSS

SEQ ID NO: 28548 - protein, 121 aa, Artificial Sequence
  Chemically Synthesized
QVQLQESGGGLVQAGGSLRLSCAASGYIFPYDPMGWYRQAPGKERELVASIGYGTTTNYADSVKGRFTISRDNAKNTVYLQMNSLKPEDTAVYYCAAYHYWYWQYSLSFYWGQGTQVTVSS

SEQ ID NO: 28549 - protein, 118 aa, Artificial Sequence
  Chemically Synthesized
QVQLQESGGGLVQAGGSLRLSCAASGYISYPRSMGWYRQAPGKERELVAGIDFGTITYYADSVKGRFTISRDNAKNTVYLQMNSLKPEDTAVYYCAAWYYPWHYLGYWGQGTQVTVSS

SEQ ID NO: 28550 - protein, 126 aa, Artificial Sequence
  Chemically Synthesized
QVQLQESGGGLVQAGGSLRLSCAASGSIFDYYNMGWYRQAPGKERELVAAITDGAITNYADSVKGRFTISRDNAKNTVYLQMNSLKPEDTAVYYCAVRQDRHDRDPYTDKGQHQYWGQGTQVTVSS

SEQ ID NO: 28551 - protein, 117 aa, Artificial Sequence
  Chemically Synthesized
QVQLQESGGGLVQAGGSLRLSCAASGSISGPAQMGWYRQAPGKERELVATIATGATTNYADSVKGRFTISRDNAKNTVYLQMNSLKPEDTAVYYCAARTARDLLPYWGQGTQVTVSS

SEQ ID NO: 28552 - protein, 118 aa, Artificial Sequence
  Chemically Synthesized
QVQLQESGGGLVQAGGSLRLSCAASGYIFHGYVMGWYRQAPGKERELLPLLLTVVIPYADSVKGRFTISRDNAKNTVYLQMNSLKPEDTAVYYCAVDRSRDLWDFYYWGQGTQVTVSS

SEQ ID NO: 28553 - protein, 126 aa, Artificial Sequence
  Chemically Synthesized
QVQLQESGGGLVQAGGSLRLSCAASGTIFDGHYMGWYRQAPGKERELVASITQGGITYYADSVKGRFTISRDNAKNTVYLQMNSLKPEDTAVYYCAVGGQDSDYYGVAEQPTYSYWGQGTQVTVSS

SEQ ID NO: 28554 - protein, 118 aa, Artificial Sequence
  Chemically Synthesized
QVQLQESGGGLVQAGGSLRLSCAASGTISWLDYMGWYRQAPGKERELVATITAGANTNYADSVKGRFTISRDNAKNTVYLQMNSLKPEDTAVYYCAAQWWEYAYLLYWGQGTQVTVSS

SEQ ID NO: 28555 - protein, 116 aa, Artificial Sequence
  Chemically Synthesized
QVQLQESGGGLVQAGGSLRLSCAASGNISTYLYMGWYRQAPGKERELVAAITYGGTTNYADSVKGRFTISRDNAKNTVYLQMNSLKPEDTAVYYCAVTYTATLGYWGQGTQVTVSS

SEQ ID NO: 28556 - protein, 119 aa, Artificial Sequence
  Chemically Synthesized
QVQLQESGGGLVQAGGSLRLSCAASGSIFRSYKYMGWYRQAPGKEREFVAAIDHGTNTYYADSVKGRFTISRDNAKNTVYLQMNSLKPEDTAVYYCAADYSDVYLYLYWGQGTQVTVSS

SEQ ID NO: 28557 - protein, 126 aa, Artificial Sequence
  Chemically Synthesized
QVQLQESGGGLVQAGGSLRLSCAASGNISQQYFMGWYRQAPGKEREFVAAISAGANTYYADSVKGRFTISRDNAKNTVYLQMNSLKPEDTAVYYCAVRWHSGRYRGDALTFPFYYWGQGTQVTVSS

SEQ ID NO: 28558 - protein, 117 aa, Artificial Sequence
  Chemically Synthesized
QVQLQESGGGLVQAGGSLRLSCAASGSIMGWYRQAPGKERELVASIDDGTNTNYADSVKGRFTISRDNAKNTVYLQMNSLKPEDTAVYYCAVYDKTYGYETYYYVYWGQGTQVTVSS

SEQ ID NO: 28559 - protein, 117 aa, Artificial Sequence
  Chemically Synthesized
QVQLQESGGGLVQAGGSLRLSCAASGTIFRPYYMGWYRQAPGKEREFVAGIGFGSTTNYADSVKGRFTISRDNAKNTVYLQMNSLKPEDTAVYYCAVPNPSLFRLYWGQGTQVTVSS

SEQ ID NO: 28560 - protein, 118 aa, Artificial Sequence
  Chemically Synthesized
QVQLQESGGGLVQAGGSLRLSCAASGNIFDHHVMGWYRQAPGKEREFVAAISAGAITNYADSVKGRFTISRDNAKNTVYLQMNSLKPEDTAVYYCAVNTQYLEDLRYWGQGTQVTVSS

SEQ ID NO: 28561 - protein, 122 aa, Artificial Sequence
  Chemically Synthesized
QVQLQESGGGLVQAGGSLRLSCAASGTISGDYDMGWYRQAPGKEREFVAAINQGSNTYYADSVKGRFTISRDNAKNTVYLQMNSLKPEDTAVYYCAAGRQDARQDQDTHGYWGQGTQVTVSS

SEQ ID NO: 28562 - protein, 122 aa, Artificial Sequence
  Chemically Synthesized
QVQLQESGGGLVQAGGSLRLSCAASGTISRLRSMGWYRQAPGKEREFVATISNGATTYYADSVKGRFTISRDNAKNTVYLQMNSLKPEDTAVYYCAVLYYKDTYPPYAHLYWGQGTQVTVSS

SEQ ID NO: 28563 - protein, 126 aa, Artificial Sequence
  Chemically Synthesized
QVQLQESGGGLVQAGGSLRLSCAASGTIFQFLFMGWYRQAPGKERELVAAITRGASTYYADSVKGRFTISRDNAKNTVYLQMNSLKPEDTAVYYCAANQLSAAWRWSYISEFHRYWGQGTQVTVSS

SEQ ID NO: 28564 - protein, 123 aa, Artificial Sequence
  Chemically Synthesized
QVQLQESGGGLVQAGGSLRLSCAASGTIFGSSGMGWYRQAPGKEREFVAAIAGGTNTNYADSVKGRFTISRDNAKNTVYLQMNSLKPEDTAVYYCAADPINYQYFDWVGFDYWGQGTQVTVSS

SEQ ID NO: 28565 - protein, 118 aa, Artificial Sequence
  Chemically Synthesized
QVQLQESGGGLVQAGGSLRLSCAASGYISRRYSMGWYRQAPGKERELVAAIGWGAITYYADSVKGRFTISRDNAKNTVYLQMNSLKPEDTAVYYCAAYFRQTRAFRYWGQGTQVTVSS

SEQ ID NO: 28566 - protein, 118 aa, Artificial Sequence
  Chemically Synthesized
QVQLQESGGGLVQAGGSLRLSCAASGSISPDYEMGWYRQAPGKEREFVATINAGTSTNYADSVKGRFTISRDNAKNTVYLQMNSLKPEDTAVYYCAVYGYRSSPLYYWGQGTQVTVSS

SEQ ID NO: 28567 - protein, 126 aa, Artificial Sequence
  Chemically Synthesized
QVQLQESGGGLVQAGGSLRLSCAASGNIFYPVNMGWYRQAPGKEREFVASINDGATTNYADSVKGRFTISRDNAKNTVYLQMNSLKPEDTAVYYCAAKNWRRYAPTWVPYWWLYYWGQGTQVTVSS

SEQ ID NO: 28568 - protein, 112 aa, Artificial Sequence
  Chemically Synthesized
QVQLQESGGGLVQAGGSLRLSCAASGSISYAWSMGWYRQAPGKEREFVASIDAGGNTNYADSVKGRFTISRDNAKNTVYLQMNSLKPEDTAVYYCAVGWLYWGQGTQVTVSS

SEQ ID NO: 28569 - protein, 126 aa, Artificial Sequence
  Chemically Synthesized
QVQLQESGGGLVQAGGSLRLSCAASGTISPSHGMGWYRQAPGKERELVAGISDGGSTYYADSVKGRFTISRDNAKNTVYLQMNSLKPEDTAVYYCAVGFTYVYLGRFRILYQYRYWGQGTQVTVSS

SEQ ID NO: 28570 - protein, 122 aa, Artificial Sequence
  Chemically Synthesized
QVQLQESGGGLVQAGGSLRLSCAASGSISYTLYMGWYRQAPGKERELVAAIGYGGITYYADSVKGRFTISRDNAKNTVYLQMNSLKPEDTAVYYCAVAYYHGPSDVYIHRYWGQGTQVTVSS

SEQ ID NO: 28571 - protein, 118 aa, Artificial Sequence
  Chemically Synthesized
QVQLQESGGGLVQAGGSLRLSCAASGSISALQIMGWYRQAPGKEREFVATIGRGSNTNYADSVKGRFTISRDNAKNTVYLQMNSLKPEDTAVYYCAVDQSIRNDLRYWGQGTQVTVSS

SEQ ID NO: 28572 - protein, 122 aa, Artificial Sequence
  Chemically Synthesized
QVQLQESGGGLVQAGGSLRLSCAASGNISRDHAMGWYRQAPGKERELVAAISIGGSTYYADSVKGRFTISRDNAKNTVYLQMNSLKPEDTAVYYCAAPSYGGVVRGDRHYYWGQGTQVTVSS

SEQ ID NO: 28573 - protein, 117 aa, Artificial Sequence
  Chemically Synthesized
QVQLQESGGGLVQAGGSLRLSCAASGTIFATTMGWYRQAPGKEREFVATIALGATTYYADSVKGRFTISRDNAKNTVYLQMNSLKPEDTAVYYCAVIWPRIHDFGYWGQGTQVTVSS

SEQ ID NO: 28574 - protein, 121 aa, Artificial Sequence
  Chemically Synthesized
QVQLQESGGGLVQAGGSLRLSCAASGSIFRVYAMGWYRQAPGKERELVAGIDFGATTNYADSVKGRFTISRDNAKNTVYLQMNSLKPEDTAVYYCAVVDAGTDVLWTRIYWGQGTQVTVSS

SEQ ID NO: 28575 - protein, 121 aa, Artificial Sequence
  Chemically Synthesized
QVQLQESGGGLVQAGGSLRLSCAASGSIFRYADMGWYRQAPGKERELVATIDYGSNTYYADSVKGRFTISRDNAKNTVYLQMNSLKPEDTAVYYCAAPPSYTAESLVTFYWGQGTQVTVSS

SEQ ID NO: 28576 - protein, 118 aa, Artificial Sequence
  Chemically Synthesized
QVQLQESGGGLVQAGGSLRLSCAASGTIFPLYSMGWYRQAPGKERELVASIDTGGSTYYADSVKGRFTISRDNAKNTVYLQMNSLKPEDTAVYYCAAEYYNTIVYRYWGQGTQVTVSS

SEQ ID NO: 28577 - protein, 126 aa, Artificial Sequence
  Chemically Synthesized
QVQLQESGGGLVQAGGSLRLSCAASGNISDFLWMGWYRQAPGKEREFVASINSGATTNYADSVKGRFTISRDNAKNTVYLQMNSLKPEDTAVYYCAVIADSVVDYIVPWLRYLDYWGQGTQVTVSS

SEQ ID NO: 28578 - protein, 118 aa, Artificial Sequence
  Chemically Synthesized
QVQLQESGGGLVQAGGSLRLSCAASGTIFTDISMGWYRQAPGKEREFVAAISNGGNTNYADSVKGRFTISRDNAKNTVYLQMNSLKPEDTAVYYCAAIIYIDSYYYYWGQGTQVTVSS

SEQ ID NO: 28579 - protein, 118 aa, Artificial Sequence
  Chemically Synthesized
QVQLQESGGGLVQAGGSLRLSCAASGNISGQYDMGWYRQAPGKERELVATITGGANTNYADSVKGRFTISRDNAKNTVYLQMNSLKPEDTAVYYCAVGDIEADYYDYWGQGTQVTVSS

SEQ ID NO: 28580 - protein, 117 aa, Artificial Sequence
  Chemically Synthesized
QVQLQESGGGLVQAGGSLRLSCAASGYIFDSRMGWYRQAPGKEREFVASIATGATTYYADSVKGRFTISRDNAKNTVYLQMNSLKPEDTAVYYCAVSANHLYDLTYWGQGTQVTVSS

SEQ ID NO: 28581 - protein, 118 aa, Artificial Sequence
  Chemically Synthesized
QVQLQESGGGLVQAGGSLRLSCAASGYISALWYMGWYRQAPGKERELVASIGPCSTTYYADSVKGRFTISRDNAKNTVYLQMNSLKPEDTAVYYCAVDADWQGGHYYWGQGTQVTVSS

SEQ ID NO: 28582 - protein, 117 aa, Artificial Sequence
  Chemically Synthesized
QVQLQESGGGLVQAGGSLRLSCAASGTISGSTSMGWYRQAPGKERELVATILTVLVPYADSVKGRFTISRDNAKNTVYLQMNSLKPEDTAVYYCAAAHDDTYDYGYWGQGTQVTVSS

SEQ ID NO: 28583 - protein, 126 aa, Artificial Sequence
  Chemically Synthesized
QVQLQESGGGLVQAGGSLRLSCAASGTISYDTAMGWYRQAPGKEREFVAGISIGTSTYYADSVKGRFTISRDNAKNTVYLQMNSLKPEDTAVYYCAATDLRYSEVGDYQWEDHRYWGQGTQVTVSS

SEQ ID NO: 28584 - protein, 125 aa, Artificial Sequence
  Chemically Synthesized
QVQLQESGGGLVQAGGSLRLSCAASGTISAISWMGWYRQAPGKEREFVAGIGSGTNTNYADSVKGRFTISRDNAKNTVYLQMNSLKPEDTAVYYCAADSLVTTSFSVLTNTTIYWGQGTQVTVSS

SEQ ID NO: 28585 - protein, 118 aa, Artificial Sequence
  Chemically Synthesized
QVQLQESGGGLVQAGGSLRLSCAASGSISTQTIMGWYRQAPGKEREFVAAISTGSSTNYADSVKGRFTISRDNAKNTVYLQMNSLKPEDTAVYYCAARHVTETFHYYWGQGTQVTVSS

SEQ ID NO: 28586 - protein, 122 aa, Artificial Sequence
  Chemically Synthesized
QVQLQESGGGLVQAGGSLRLSCAASGTISNLPYMGWYRQAPGKEREFVATIGYGTTTYYADSVKGRFTISRDNAKNTVYLQMNSLKPEDTAVYYCAANRDGPGYDRRYYSYWGQGTQVTVSS

SEQ ID NO: 28587 - protein, 122 aa, Artificial Sequence
  Chemically Synthesized
QVQLQESGGGLVQAGGSLRLSCAASGTIFALRSMGWYRQAPGKERELVASIALGGTTYYADSVKGRFTISRDNAKNTVYLQMNSLKPEDTAVYYCAADFWTYYSYIGSYRYWGQGTQVTVSS

SEQ ID NO: 28588 - protein, 126 aa, Artificial Sequence
  Chemically Synthesized
QVQLQESGGGLVQAGGSLRLSCAASGYISASRRMGWYRQAPGKEREFVAGIGGGSSTYYADSVKGRFTISRDNAKNTVYLQMNSLKPEDTAVYYCAVDYTIYDDGDYEQTDDHDYWGQGTQVTVSS

SEQ ID NO: 28589 - protein, 123 aa, Artificial Sequence
  Chemically Synthesized
QVQLQESGGGLVQAGGSLRLSCAASGYIFTGTFMGWYRQAPGKERELVAAIGYGGITYYADSVKGRFTISRDNAKNTVYLQMNSLKPEDTAVYYCAVYGYDVDGYYVSYVVYWGQGTQVTVSS

SEQ ID NO: 28590 - protein, 125 aa, Artificial Sequence
  Chemically Synthesized
QVQLQESGGGLVQAGGSLRLSCAASGNISNGGGMGWYRQAPGKEREFVAAITDGTNTNYADSVKGRFTISRDNAKNTVYLQMNSLKPEDTAVYYCAATYSDEYRYDGYSYGLGYWGQGTQVTVSS

SEQ ID NO: 28591 - protein, 118 aa, Artificial Sequence
  Chemically Synthesized
QVQLQESGGGLVQAGGSLRLSCAASGSIFFLAGMGWYRQAPGKEREFVAGIGDGSNTYYADSVKGRFTISRDNAKNTVYLQMNSLKPEDTAVYYCAARPWYRPYYWYWGQGTQVTVSS

SEQ ID NO: 28592 - protein, 121 aa, Artificial Sequence
  Chemically Synthesized
QVQLQESGGGLVQAGGSLRLSCAASGNISGDEMGWYRQAPGKEREFVASIAKGSTTNYADSVKGRFTISRDNAKNTVYLQMNSLKPEDTAVYYCAATRDTVSSVLGGHDYWGQGTQVTVSS

SEQ ID NO: 28593 - protein, 115 aa, Artificial Sequence
  Chemically Synthesized
QVQLQESGGGLVQAGGSLRLSCAASGSIFGRLFMGWYRQAPGKEREFVASINDVLLPYADSVKGRFTISRDNAKNTVYLQMNSLKPEDTAVYYCATLFRLRITYWGQGTQVTVSS

SEQ ID NO: 28594 - protein, 122 aa, Artificial Sequence
  Chemically Synthesized
QVQLQESGGGLVQAGGSLRLSCAASGNIFYVTEMGWYRQAPGKEREFVAGIAYGSITNYADSVKGRFTISRDNAKNTVYLQMNSLKPEDTAVYYCAVWFSRVAPINWVLDYWGQGTQVTVSS

SEQ ID NO: 28595 - protein, 118 aa, Artificial Sequence
  Chemically Synthesized
QVQLQESGGGLVQAGGSLRLSCAASGNIFSYDPMGWYRQAPGKEREFVASITYGSTTYYADSVKGRFTISRDNAKNTVYLQMNSLKPEDTAVYYCAAATGGGAYHLYWGQGTQVTVSS

SEQ ID NO: 28596 - protein, 122 aa, Artificial Sequence
  Chemically Synthesized
QVQLQESGGGLVQAGGSLRLSCAASGTISWADLMGWYRQAPGKEREFVAGITYGTNTNYADSVKGRFTISRDNAKNTVYLQMNSLKPEDTAVYYCAVDSATNRYESDELGYWGQGTQVTVSS

SEQ ID NO: 28597 - protein, 118 aa, Artificial Sequence
  Chemically Synthesized
QVQLQESGGGLVQAGGSLRLSCAASGYIFRYRGMGWYRQAPGKEREFVAAITTGGTTNYADSVKGRFTISRDNAKNTVYLQMNSLKPEDTAVYYCAVYVGRGRFYGYWGQGTQVTVSS

SEQ ID NO: 28598 - protein, 118 aa, Artificial Sequence
  Chemically Synthesized
QVQLQESGGGLVQAGGSLRLSCAASGNISLGGGMGWYRQAPGKEREFVAGINYGTSTYYADSVKGRFTISRDNAKNTVYLQMNSLKPEDTAVYYCAVDYGEINGHGYWGQGTQVTVSS

SEQ ID NO: 28599 - protein, 117 aa, Artificial Sequence
  Chemically Synthesized
QVQLQESGGGLVQAGGSLRLSCAASGTIFFVLSMGWYRQAPGKEREFVAGISDGGSTYYADSVKGRFTISRDNAKNTVYLQMNSLKPEDTAVYYCAAPYADARHGYWGQGTQVTVSS

SEQ ID NO: 28600 - protein, 122 aa, Artificial Sequence
  Chemically Synthesized
QVQLQESGGGLVQAGGSLRLSCAASGNIFVGDYMGWYRQAPGKERELVAAIGYGGNTNYADSVKGRFTISRDNAKNTVYLQMNSLKPEDTAVYYCAALTTSPYYSYQWFDYWGQGTQVTVSS

SEQ ID NO: 28601 - protein, 126 aa, Artificial Sequence
  Chemically Synthesized
QVQLQESGGGLVQAGGSLRLSCAASGNISPWDTMGWYRQAPGKERELVAAIAAGATTYYADSVKGRFTISRDNAKNTVYLQMNSLKPEDTAVYYCAVIDWYIPYFVYPYDLTYVYWGQGTQVTVSS

SEQ ID NO: 28602 - protein, 122 aa, Artificial Sequence
  Chemically Synthesized
QVQLQESGGGLVQAGGSLRLSCAASGYISRYPIMGWYRQAPGKEREFVASIAYGSSTYYADSVKGRFTISRDNAKNTVYLQMNSLKPEDTAVYYCAAGRRYGSQSYIRHRYWGQGTQVTVSS

SEQ ID NO: 28603 - protein, 118 aa, Artificial Sequence
  Chemically Synthesized
QVQLQESGGGLVQAGGSLRLSCAASGNISRHHIMGWYRQAPGKEREFVAAITPGATTYYADSVKGRFTISRDNAKNTVYLQMNSLKPEDTAVYYCAAARRRWDSFTYWGQGTQVTVSS

SEQ ID NO: 28604 - protein, 118 aa, Artificial Sequence
  Chemically Synthesized
QVQLQESGGGLVQAGGSLRLSCAASGYISHLNQMGWYRQAPGKERELVASIGRGGNTYYADSVKGRFTISRDNAKNTVYLQMNSLKPEDTAVYYCAASASDPTLHDYWGQGTQVTVSS

SEQ ID NO: 28605 - protein, 118 aa, Artificial Sequence
  Chemically Synthesized
QVQLQESGGGLVQAGGSLRLSCAASGYIFYTYTMGWYRQAPGKERELVATINGGANTYYADSVKGRFTISRDNAKNTVYLQMNSLKPEDTAVYYCAAYVDLVTAFAYWGQGTQVTVSS

SEQ ID NO: 28606 - protein, 118 aa, Artificial Sequence
  Chemically Synthesized
QVQLQESGGGLVQAGGSLRLSCAASGNIFALVYMGWYRQAPGKEREFVAGISYGAITNYADSVKGRFTISRDNAKNTVYLQMNSLKPEDTAVYYCAVYTNFLFYHLYWGQGTQVTVSS

SEQ ID NO: 28607 - protein, 121 aa, Artificial Sequence
  Chemically Synthesized
QVQLQESGGGLVQAGGSLRLSCAASGNIFDPSMGWYRQAPGKEREFVAAIDYGANTNYADSVKGRFTISRDNAKNTVYLQMNSLKPEDTAVYYCAVPYGFSYSNYWFYNYWGQGTQVTVSS

SEQ ID NO: 28608 - protein, 118 aa, Artificial Sequence
  Chemically Synthesized
QVQLQESGGGLVQAGGSLRLSCAASGTISYYWYMGWYRQAPGKERELVASIGGGGTTYYADSVKGRFTISRDNAKNTVYLQMNSLKPEDTAVYYCAVEPRYYSGHYYWGQGTQVTVSS

SEQ ID NO: 28609 - protein, 112 aa, Artificial Sequence
  Chemically Synthesized
QVQLQESGGGLVQAGGSLRLSCAASGTISQRVVMGWYRQAPGKERELVAGITVGANTYYADSVKGRFTISRDNAKNTVYLQMNSLKPEDTAVYYCAVDLDYWGQGTQVTVSS

SEQ ID NO: 28610 - protein, 119 aa, Artificial Sequence
  Chemically Synthesized
QVQLQESGGGLVQAGGSLRLSCAASGSISGVLPMGWYRQAPGKEREFVAAIDAGSITNYADSVKGRFTISRDNAKNTVYLQMNSLKPEDTAVYYCAVPFGYDITGHYYWGQGTQVTVSS

SEQ ID NO: 28611 - protein, 117 aa, Artificial Sequence
  Chemically Synthesized
QVQLQESGGGLVQAGGSLRLSCAASGYIFWLTNMGWYRQAPGKERELVASIGDGASTYYADSVKGRFTISRDNAKNTVYLQMNSLKPEDTAVYYCAAVDSLTLVIYWGQGTQVTVSS

SEQ ID NO: 28612 - protein, 112 aa, Artificial Sequence
  Chemically Synthesized
QVQLQESGGGLVQAGGSLRLSCAASGYIFHYIVMGWYRQAPGKERELVASIGVGGNTYYADSVKGRFTISRDNAKNTVYLQMNSLKPEDTAVYYCAAWQLYWGQGTQVTVSS

SEQ ID NO: 28613 - protein, 118 aa, Artificial Sequence
  Chemically Synthesized
QVQLQESGGGLVQAGGSLRLSCAASGTISDWYGMGWYRQAPGKERELVAGINYGTSTNYADSVKGRFTISRDNAKNTVYLQMNSLKPEDTAVYYCAVRYDNRLEYWYWGQGTQVTVSS

SEQ ID NO: 28614 - protein, 125 aa, Artificial Sequence
  Chemically Synthesized
QVQLQESGGGLVQAGGSLRLSCAASGNIFVSGPMGWYRQAPGKEREFVATINAGAITYYADSVKGRFTISRDNAKNTVYLQMNSLKPEDTAVYYCAAFQQYRRGSYSNITDYAYWGQGTQVTVSS

SEQ ID NO: 28615 - protein, 122 aa, Artificial Sequence
  Chemically Synthesized
QVQLQESGGGLVQAGGSLRLSCAASGTIFDYIYMGWYRQAPGKERELVATITRGTSTYYADSVKGRFTISRDNAKNTVYLQMNSLKPEDTAVYYCAVQSPFRWSFLRDLQYWGQGTQVTVSS

SEQ ID NO: 28616 - protein, 118 aa, Artificial Sequence
  Chemically Synthesized
QVQLQESGGGLVQAGGSLRLSCAASGTIFGGYQMGWYRQAPGKERELVAGIAGGTITNYADSVKGRFTISRDNAKNTVYLQMNSLKPEDTAVYYCAAYRYAYQYHPYWGQGTQVTVSS

SEQ ID NO: 28617 - protein, 118 aa, Artificial Sequence
  Chemically Synthesized
QVQLQESGGGLVQAGGSLRLSCAASGNIFYAWRMGWYRQAPGKERELVASIDLGSNTYYADSVKGRFTISRDNAKNTVYLQMNSLKPEDTAVYYCAVRLLPSFIFYYWGQGTQVTVSS

SEQ ID NO: 28618 - protein, 124 aa, Artificial Sequence
  Chemically Synthesized
QVQLQESGGGLVQAGGSLRLSCAASGTIFGGTYMGWYRQAPGKEREFVATITTVVIPYADSVKGRFTISRDNAKNTVYLQMNSLKPEDTAVYYCAVTLRTTVTLRLNVSTIMYWGQGTQVTVSS

SEQ ID NO: 28619 - protein, 118 aa, Artificial Sequence
  Chemically Synthesized
QVQLQESGGGLVQAGGSLRLSCAASGNISAWVVMGWYRQAPGKERELVATIAAGGITNYADSVKGRFTISRDNAKNTVYLQMNSLKPEDTAVYYCAAITYYTPWHLYWGQGTQVTVSS

SEQ ID NO: 28620 - protein, 115 aa, Artificial Sequence
  Chemically Synthesized
QVQLQESGGGLVQAGGSLRLSCAASGSISTYGTMGWYRQAPGKEREPIAYGTSTNYADSVKGRFTISRDNAKNTVYLQMNSLKPEDTAVYYCAVHDVVAWILDYWGQGTQVTVSS

SEQ ID NO: 28621 - protein, 122 aa, Artificial Sequence
  Chemically Synthesized
QVQLQESGGGLVQAGGSLRLSCAASGYISLSYNMGWYRQAPGKERELVAGISYGGNTNYADSVKGRFTISRDNAKNTVYLQMNSLKPEDTAVYYCAVFRRVWPWWVRRYDYWGQGTQVTVSS

SEQ ID NO: 28622 - protein, 126 aa, Artificial Sequence
  Chemically Synthesized
QVQLQESGGGLVQAGGSLRLSCAASGTIFRAYYMGWYRQAPGKEREFVATISRGGITYYADSVKGRFTISRDNAKNTVYLQMNSLKPEDTAVYYCAAGRAAYLPTWRQSPGLHRYWGQGTQVTVSS

SEQ ID NO: 28623 - protein, 117 aa, Artificial Sequence
  Chemically Synthesized
QVQLQESGGGLVQAGGSLRLSCAASGNIFESLMGWYRQAPGKEREFVATITYGGTTYYADSVKGRFTISRDNAKNTVYLQMNSLKPEDTAVYYCAADAYVTWDLDYWGQGTQVTVSS

SEQ ID NO: 28624 - protein, 115 aa, Artificial Sequence
  Chemically Synthesized
QVQLQESGGGLVQAGGSLRLSCAASGTISYRGNMGWYRQAPGKEREFVAAIGGGTTTYYADSVKGRFTISRDNAKNTVYLQMNSLKPEDTAVYYCAVIDYDFPYWGQGTQVTVSS

SEQ ID NO: 28625 - protein, 122 aa, Artificial Sequence
  Chemically Synthesized
QVQLQESGGGLVQAGGSLRLSCAASGNIFWFQDMGWYRQAPGKERELVASIGTGTSTYYADSVKGRFTISRDNAKNTVYLQMNSLKPEDTAVYYCAVGWAEFPDYSDPHSYWGQGTQVTVSS

SEQ ID NO: 28626 - protein, 116 aa, Artificial Sequence
  Chemically Synthesized
QVQLQESGGGLVQAGGSLRLSCAASGSISSIPSMGWYRQAPGKEREFVASIDVGGITYYADSVKGRFTISRDNAKNTVYLQMNSLKPEDTAVYYCAAWGGDGDFYWGQGTQVTVSS

SEQ ID NO: 28627 - protein, 125 aa, Artificial Sequence
  Chemically Synthesized
QVQLQESGGGLVQAGGSLRLSCAASGYISRDGYMGWYRQAPGKERELVAGITLGGITNYADSVKGRFTISRDNAKNTVYLQMNSLKPEDTAVYYCAATRYGFIAQADDRVDLYYWGQGTQVTVSS

SEQ ID NO: 28628 - protein, 117 aa, Artificial Sequence
  Chemically Synthesized
QVQLQESGGGLVQAGGSLRLSCAASGSIFRLANMGWYRQAPGKEREFVAGISYGSTYYADSVKGRFTISRDNAKNTVYLQMNSLKPEDTAVYYCAAARATSRYYRYWGQGTQVTVSS

SEQ ID NO: 28629 - protein, 112 aa, Artificial Sequence
  Chemically Synthesized
QVQLQESGGGLVQAGGSLRLSCAASGLMGWYRQAPGKEREFVASIGQGGITNYADSVKGRFTISRDNAKNTVYLQMNSLKPEDTAVYYCAALPIYVTGLEYWGQGTQVTVSS

SEQ ID NO: 28630 - protein, 119 aa, Artificial Sequence
  Chemically Synthesized
QVQLQESGGGLVQAGGSLRLSCAASGNIFWPYGMGWYRQAPGKEREFVAAIAIGGTSTYYADSVKGRFTISRDNAKNTVYLQMNSLKPEDTAVYYCAAKRWYIYRHIYWGQGTQVTVSS

SEQ ID NO: 28631 - protein, 111 aa, Artificial Sequence
  Chemically Synthesized
QVQLQESGGGLVQAGGSLRLSCAASGTISYYDGMGWYRQAPGKERELVASIDLGGSTNYADSVKGRFTISRDNAKNTVYLQMNSLKPEDTAVYYCAAHSYWGQGTQVTVSS

SEQ ID NO: 28632 - protein, 119 aa, Artificial Sequence
  Chemically Synthesized
QVQLQESGGGLVQAGGSLRLSCAASGSIFRRRAIMGWYRQAPGKEREFVAAIGSGANTNYADSVKGRFTISRDNAKNTVYLQMNSLKPEDTAVYYCAAVHVTRATLPYWGQGTQVTVSS

SEQ ID NO: 28633 - protein, 118 aa, Artificial Sequence
  Chemically Synthesized
QVQLQESGGGLVQAGGSLRLSCAASGNIFPYPNMGWYRQAPGKERELVASISDGRIPYADSVKGRFTISRDNAKNTVYLQMNSLKPEDTAVYYCAAPFKGDWSLHPYWGQGTQVTVSS

SEQ ID NO: 28634 - protein, 118 aa, Artificial Sequence
  Chemically Synthesized
QVQLQESGGGLVQAGGSLRLSCAASGYISAYYFMGWYRQAPGKEREFVATIAIGGSTNYADSVKGRFTISRDNAKNTVYLQMNSLKPEDTAVYYCAATIAYLRSLYYWGQGTQVTVSS

SEQ ID NO: 28635 - protein, 118 aa, Artificial Sequence
  Chemically Synthesized
QVQLQESGGGLVQAGGSLRLSCAASGSIFDEGDMGWYRQAPGKERELVAAISRGTITYYADSVKGRFTISRDNAKNTVYLQMNSLKPEDTAVYYCAAYERRLAYHPYWGQGTQVTVSS

SEQ ID NO: 28636 - protein, 117 aa, Artificial Sequence
  Chemically Synthesized
QVQLQESGGGLVQAGGSLRLSCAASGTIFNAARMGWYRQAPGKEREFVASISRGTTYYADSVKGRFTISRDNAKNTVYLQMNSLKPEDTAVYYCAARVHWQYRHRYWGQGTQVTVSS

SEQ ID NO: 28637 - protein, 122 aa, Artificial Sequence
  Chemically Synthesized
QVQLQESGGGLVQAGGSLRLSCAASGTIFYRWRMGWYRQAPGKERELVAAIGAGGNTYYADSVKGRFTISRDNAKNTVYLQMNSLKPEDTAVYYCAAPPWGKGPYRPYFRYWGQGTQVTVSS

SEQ ID NO: 28638 - protein, 117 aa, Artificial Sequence
  Chemically Synthesized
QVQLQESGGGLVQAGGSLRLSCAASGSIFYTSDMGWYRQAPGKEREFVASITLGSSTYADSVKGRFTISRDNAKNTVYLQMNSLKPEDTAVYYCAAREKYGPLLYYWGQGTQVTVSS

SEQ ID NO: 28639 - protein, 118 aa, Artificial Sequence
  Chemically Synthesized
QVQLQESGGGLVQAGGSLRLSCAASGTIFNVDIMGWYRQAPGKEREFVAGIDGGGNTYYADSVKGRFTISRDNAKNTVYLQMNSLKPEDTAVYYCAVVNTDAPQYYYWGQGTQVTVSS

SEQ ID NO: 28640 - protein, 126 aa, Artificial Sequence
  Chemically Synthesized
QVQLQESGGGLVQAGGSLRLSCAASGNIFPNARMGWYRQAPGKERELVAAIDRGGSTYYADSVKGRFTISRDNAKNTVYLQMNSLKPEDTAVYYCAVFWKRRTQTGDRTQGRHTYWGQGTQVTVSS

SEQ ID NO: 28641 - protein, 118 aa, Artificial Sequence
  Chemically Synthesized
QVQLQESGGGLVQAGGSLRLSCAASGYISKSSYMGWYRQAPGKEREFVAAINVGGTTYYADSVKGRFTISRDNAKNTVYLQMNSLKPEDTAVYYCAVSLALADLYYYWGQGTQVTVSS

SEQ ID NO: 28642 - protein, 116 aa, Artificial Sequence
  Chemically Synthesized
QVQLQESGGGLVQAGGSLRLSCAASGTIFLTMGWYRQAPGKERELVAAIDEGTSTYYADSVKGRFTISRDNAKNTVYLQMNSLKPEDTAVYYCAAAGNDNRDHYYWGQGTQVTVSS

SEQ ID NO: 28643 - protein, 122 aa, Artificial Sequence
  Chemically Synthesized
QVQLQESGGGLVQAGGSLRLSCAASGNIFSFYPMGWYRQAPGKERELVASITPGGSTNYADSVKGRFTISRDNAKNTVYLQMNSLKPEDTAVYYCAVRYGPSTGYVYDHYYWGQGTQVTVSS

SEQ ID NO: 28644 - protein, 118 aa, Artificial Sequence
  Chemically Synthesized
QVQLQESGGGLVQAGGSLRLSCAASGSIFLYLYMGWYRQAPGKERELVAGITYGANTYYADSVKGRFTISRDNAKNTVYLQMNSLKPEDTAVYYCAADQPYVPILVYWGQGTQVTVSS

SEQ ID NO: 28645 - protein, 122 aa, Artificial Sequence
  Chemically Synthesized
QVQLQESGGGLVQAGGSLRLSCAASGSISWRSRMGWYRQAPGKEREFVAGISTGTSTYYADSVKGRFTISRDNAKNTVYLQMNSLKPEDTAVYYCAVGSIRYAYYTRIYWYWGQGTQVTVSS

SEQ ID NO: 28646 - protein, 118 aa, Artificial Sequence
  Chemically Synthesized
QVQLQESGGGLVQAGGSLRLSCAASGTISHTAVMGWYRQAPGKEREFVAGINHGGTTNYADSVKGRFTISRDNAKNTVYLQMNSLKPEDTAVYYCAVYRPDRDDHGYWGQGTQVTVSS

SEQ ID NO: 28647 - protein, 119 aa, Artificial Sequence
  Chemically Synthesized
QVQLQESGGGLVQAGGSLRLSCAASGTIFRVRLMGWYRQAPGKERELVASIAYGANTNYADSVKGRFTISRDNAKNTVYLQMNSLKPEDTAVYYCAASRRTDRLYHRYWGQGTQVTVSS

SEQ ID NO: 28648 - protein, 118 aa, Artificial Sequence
  Chemically Synthesized
QVQLQESGGGLVQAGGSLRLSCAASGNIFRKRYMGWYRQAPGKERELVAGIALGATTYYADSVKGRFTISRDNAKNTVYLQMNSLKPEDTAVYYCAVLHHRYVSYRYWGQGTQVTVSS

SEQ ID NO: 28649 - protein, 122 aa, Artificial Sequence
  Chemically Synthesized
QVQLQESGGGLVQAGGSLRLSCAASGTISSSPYMGWYRQAPGKEREFVAGIDDGANTYYADSVKGRFTISRDNAKNTVYLQMNSLKPEDTAVYYCAARIPRIADDVRDHTYWGQGTQVTVSS

SEQ ID NO: 28650 - protein, 118 aa, Artificial Sequence
  Chemically Synthesized
QVQLQESGGGLVQAGGSLRLSCAASGYIFTGVTMGWYRQAPGKERELVASIAPGSTTNYADSVKGRFTISRDNAKNTVYLQMNSLKPEDTAVYYCAAWDTVDVIHRYWGQGTQVTVSS

SEQ ID NO: 28651 - protein, 117 aa, Artificial Sequence
  Chemically Synthesized
QVQLQESGGGLVQAGGSLRLSCAASGTIFYPSYMGWYRQAPGKERELVAAIGNGANTYYADSVKGRFTISRDNAKNTVYLQMNSLKPEDTAVYYCAATLRFRYHVYWGQGTQVTVSS

SEQ ID NO: 28652 - protein, 121 aa, Artificial Sequence
  Chemically Synthesized
QVQLQESGGGLVQAGGSLRLSCAASGYISDKSMGWYRQAPGKERELVATISLGAITNYADSVKGRFTISRDNAKNTVYLQMNSLKPEDTAVYYCAVQGREYGNQYDAYTYWGQGTQVTVSS

SEQ ID NO: 28653 - protein, 118 aa, Artificial Sequence
  Chemically Synthesized
QVQLQESGGGLVQAGGSLRLSCAASGYIFWYYRMGWYRQAPGKERELVAGISHGASTYYADSVKGRFTISRDNAKNTVYLQMNSLKPEDTAVYYCAVYYDVFRKLGYWGQGTQVTVSS

SEQ ID NO: 28654 - protein, 121 aa, Artificial Sequence
  Chemically Synthesized
QVQLQESGGGLVQAGGSLRLSCAASGLFLTVTMGWYRQAPGKEREFVASIGVGGSTNYADSVKGRFTISRDNAKNTVYLQMNSLKPEDTAVYYCAADYVADGIALVLFDYWGQGTQVTVSS

SEQ ID NO: 28655 - protein, 122 aa, Artificial Sequence
  Chemically Synthesized
QVQLQESGGGLVQAGGSLRLSCAASGTISGDWQMGWYRQAPGKERELVASIGYGASTYYADSVKGRFTISRDNAKNTVYLQMNSLKPEDTAVYYCAATGYKYGKDKSYFDYWGQGTQVTVSS

SEQ ID NO: 28656 - protein, 122 aa, Artificial Sequence
  Chemically Synthesized
QVQLQESGGGLVQAGGSLRLSCAASGNISPEYVMGWYRQAPGKERELVAAIGDGANTNYADSVKGRFTISRDNAKNTVYLQMNSLKPEDTAVYYCAALKGSANYVRTHYYYWGQGTQVTVSS

SEQ ID NO: 28657 - protein, 118 aa, Artificial Sequence
  Chemically Synthesized
QVQLQESGGGLVQAGGSLRLSCAASGSISTRNDMGWYRQAPGKERELVAGINSGGTTYYADSVKGRFTISRDNAKNTVYLQMNSLKPEDTAVYYCAVDYVAGWQLFYWGQGTQVTVSS

SEQ ID NO: 28658 - protein, 122 aa, Artificial Sequence
  Chemically Synthesized
QVQLQESGGGLVQAGGSLRLSCAASGSISLPSQMGWYRQAPGKERELVAGITGGTTTYYADSVKGRFTISRDNAKNTVYLQMNSLKPEDTAVYYCAALPIGGGGIDYTHIYWGQGTQVTVSS

SEQ ID NO: 28659 - protein, 118 aa, Artificial Sequence
  Chemically Synthesized
QVQLQESGGGLVQAGGSLRLSCAASGNIFPRGYMGWYRQAPGKERELVATISYGGSTYYADSVKGRFTISRDNAKNTVYLQMNSLKPEDTAVYYCAVYTWYRSRHAYWGQGTQVTVSS

SEQ ID NO: 28660 - protein, 118 aa, Artificial Sequence
  Chemically Synthesized
QVQLQESGGGLVQAGGSLRLSCAASGNISGYGFMGWYRQAPGKERELVAAISYGTNTYYADSVKGRFTISRDNAKNTVYLQMNSLKPEDTAVYYCAAIQDLYSLLPYWGQGTQVTVSS

SEQ ID NO: 28661 - protein, 122 aa, Artificial Sequence
  Chemically Synthesized
QVQLQESGGGLVQAGGSLRLSCAASGTISSSYYMGWYRQAPGKEREFVAAINSGTTTNYADSVKGRFTISRDNAKNTVYLQMNSLKPEDTAVYYCAASYVRYTDTVPVHKYWGQGTQVTVSS

SEQ ID NO: 28662 - protein, 118 aa, Artificial Sequence
  Chemically Synthesized
QVQLQESGGGLVQAGGSLRLSCAASGSIFWARTMGWYRQAPGKERELVAAISPGANTYYADSVKGRFTISRDNAKNTVYLQMNSLKPEDTAVYYCAARSPLYRNYAYWGQGTQVTVSS

SEQ ID NO: 28663 - protein, 121 aa, Artificial Sequence
  Chemically Synthesized
QVQLQESGGGLVQAGGSLRLSCAASGTISYGRYMGWYRQAPGKERELVAGISSVVLPYADSVKGRFTISRDNAKNTVYLQMNSLKPEDTAVYYCAVDYTRVVTWYDTYSYWGQGTQVTVSS

SEQ ID NO: 28664 - protein, 126 aa, Artificial Sequence
  Chemically Synthesized
QVQLQESGGGLVQAGGSLRLSCAASGYIFRTPSMGWYRQAPGKEREFVASINAGATTYYADSVKGRFTISRDNAKNTVYLQMNSLKPEDTAVYYCAVRLTRYIYVSPSKGGWHNYWGQGTQVTVSS

SEQ ID NO: 28665 - protein, 122 aa, Artificial Sequence
  Chemically Synthesized
QVQLQESGGGLVQAGGSLRLSCAASGSIFGEQTMGWYRQAPGKERELVATIAYGSNTNYADSVKGRFTISRDNAKNTVYLQMNSLKPEDTAVYYCAVVVDYTADPSYWHGYWGQGTQVTVSS

SEQ ID NO: 28666 - protein, 117 aa, Artificial Sequence
  Chemically Synthesized
QVQLQESGGGLVQAGGSLRLSCAASGNISKYGRMGWYRQAPGKEREFVASISGGTNTNYADSVKGRFTISRDNAKNTVYLQMNSLKPEDTAVYYCAVYDDGYADIYWGQGTQVTVSS

SEQ ID NO: 28667 - protein, 118 aa, Artificial Sequence
  Chemically Synthesized
QVQLQESGGGLVQAGGSLRLSCAASGNIFAHTRMGWYRQAPGKERELVAAITWGAITNYADSVKGRFTISRDNAKNTVYLQMNSLKPEDTAVYYCAARVYYGYLYSYWGQGTQVTVSS

SEQ ID NO: 28668 - protein, 118 aa, Artificial Sequence
  Chemically Synthesized
QVQLQESGGGLVQAGGSLRLSCAASGNIFDTLSMGWYRQAPGKEREFVASIAGGAITYYADSVKGRFTISRDNAKNTVYLQMNSLKPEDTAVYYCAVQTRDPGAYYYWGQGTQVTVSS

SEQ ID NO: 28669 - protein, 122 aa, Artificial Sequence
  Chemically Synthesized
QVQLQESGGGLVQAGGSLRLSCAASGTIFLQWFMGWYRQAPGKEREFVAGISRGTITNYADSVKGRFTISRDNAKNTVYLQMNSLKPEDTAVYYCAATHSGADRDFAWHYYWGQGTQVTVSS

SEQ ID NO: 28670 - protein, 117 aa, Artificial Sequence
  Chemically Synthesized
QVQLQESGGGLVQAGGSLRLSCAASGNIFSYDMGWYRQAPGKERELVAGIADGGSTYYADSVKGRFTISRDNAKNTVYLQMNSLKPEDTAVYYCAVNRTVARRYEYWGQGTQVTVSS

SEQ ID NO: 28671 - protein, 112 aa, Artificial Sequence
  Chemically Synthesized
QVQLQESGGGLVQAGGSLRLSCAASGNIFASPYMGWYRQAPGKEREFVASIGGGSSTNYADSVKGRFTISRDNAKNTVYLQMNSLKPEDTAVYYCAAAYAYWGQGTQVTVSS

SEQ ID NO: 28672 - protein, 126 aa, Artificial Sequence
  Chemically Synthesized
QVQLQESGGGLVQAGGSLRLSCAASGSISYVSPMGWYRQAPGKERELVASISGGTNTNYADSVKGRFTISRDNAKNTVYLQMNSLKPEDTAVYYCAAGYKYGNYVAYYYDDQLTYWGQGTQVTVSS

SEQ ID NO: 28673 - protein, 121 aa, Artificial Sequence
  Chemically Synthesized
QVQLQESGGGLVQAGGSLRLSCAASGYILLLTMGWYRQAPGKERELVAAISPGGSTNYADSVKGRFTISRDNAKNTVYLQMNSLKPEDTAVYYCAAYVYTDYNVSSYLNYWGQGTQVTVSS

SEQ ID NO: 28674 - protein, 121 aa, Artificial Sequence
  Chemically Synthesized
QVQLQESGGGLVQAGGSLRLSCAASGTIFPSTLMGWYRQAPGKEREFVAAINTGATTNYADSVKGRFTISRDNAKNTVYLQMNSLKPEDTAVYYCAVDDSCTKTVLTLLYWGQGTQVTVSS

SEQ ID NO: 28675 - protein, 122 aa, Artificial Sequence
  Chemically Synthesized
QVQLQESGGGLVQAGGSLRLSCAASGTIFTDYGMGWYRQAPGKERELVAGITGGASTNYADSVKGRFTISRDNAKNTVYLQMNSLKPEDTAVYYCAVTDYSHDHGPWVYGYWGQGTQVTVSS

SEQ ID NO: 28676 - protein, 118 aa, Artificial Sequence
  Chemically Synthesized
QVQLQESGGGLVQAGGSLRLSCAASGNISYSRTMGWYRQAPGKERELVAGIDAGSITNYADSVKGRFTISRDNAKNTVYLQMNSLKPEDTAVYYCAVDYGGGGAFVYWGQGTQVTVSS

SEQ ID NO: 28677 - protein, 118 aa, Artificial Sequence
  Chemically Synthesized
QVQLQESGGGLVQAGGSLRLSCAASGYIFYDRVMGWYRQAPGKEREFVASITGGANTYYADSVKGRFTISRDNAKNTVYLQMNSLKPEDTAVYYCAAVVPWSWLYRYWGQGTQVTVSS

SEQ ID NO: 28678 - protein, 117 aa, Artificial Sequence
  Chemically Synthesized
QVQLQESGGGLVQAGGSLRLSCAASGSISPFGQMGWYRQAPGKEREFVASITSGTTTNYADSVKGRFTISRDNAKNTVYLQMNSLKPEDTAVYYCAVTTLSSTRMYWGQGTQVTVSS

SEQ ID NO: 28679 - protein, 122 aa, Artificial Sequence
  Chemically Synthesized
QVQLQESGGGLVQAGGSLRLSCAASGYISDVRFMGWYRQAPGKEREFVASIDLGASTNYADSVKGRFTISRDNAKNTVYLQMNSLKPEDTAVYYCAVDEDAFRRQGTPHVYWGQGTQVTVSS

SEQ ID NO: 28680 - protein, 121 aa, Artificial Sequence
  Chemically Synthesized
QVQLQESGGGLVQAGGSLRLSCAASGYIFYYSMGWYRQAPGKEREFVATITSGSTTNYADSVKGRFTISRDNAKNTVYLQMNSLKPEDTAVYYCAVTTYYLVLHVAIHYYWGQGTQVTVSS

SEQ ID NO: 28681 - protein, 118 aa, Artificial Sequence
  Chemically Synthesized
QVQLQESGGGLVQAGGSLRLSCAASGYISDGLSMGWYRQAPGKERELVAAISQGAITNYADSVKGRFTISRDNAKNTVYLQMNSLKPEDTAVYYCAVTNHTYQEHSYWGQGTQVTVSS

SEQ ID NO: 28682 - protein, 122 aa, Artificial Sequence
  Chemically Synthesized
QVQLQESGGGLVQAGGSLRLSCAASGTISYYYYMGWYRQAPGKEREFVASIADGTITYYADSVKGRFTISRDNAKNTVYLQMNSLKPEDTAVYYCAVYYAYDDAGVWYLSYWGQGTQVTVSS

SEQ ID NO: 28683 - protein, 117 aa, Artificial Sequence
  Chemically Synthesized
QVQLQESGGGLVQAGGSLRLSCAASGTISLDFAMGWYRQAPGKERELVASIDGGTNTNYADSVKGRFTISRDNAKNTVYLQMNSLKPEDTAVYYCAADSTTTTLLYWGQGTQVTVSS

SEQ ID NO: 28684 - protein, 121 aa, Artificial Sequence
  Chemically Synthesized
QVQLQESGGGLVQAGGSLRLSCAASGTIFKQLGMGWYRQAPGKERELVATISYGTTTYYADSVKGRFTISRDNAKNTVYLQMNSLKPEDTAVYYCAVPNPAQTESVTTMYWGQGTQVTVSS

SEQ ID NO: 28685 - protein, 118 aa, Artificial Sequence
  Chemically Synthesized
QVQLQESGGGLVQAGGSLRLSCAASGYIFYGYLMGWYRQAPGKERELVAAITRGANTYYADSVKGRFTISRDNAKNTVYLQMNSLKPEDTAVYYCAAIVYRHRAHYYWGQGTQVTVSS

SEQ ID NO: 28686 - protein, 122 aa, Artificial Sequence
  Chemically Synthesized
QVQLQESGGGLVQAGGSLRLSCAASGNISDVTQMGWYRQAPGKEREFVATITAGGTTYYADSVKGRFTISRDNAKNTVYLQMNSLKPEDTAVYYCAATDRSAEGSWIYYIYWGQGTQVTVSS

SEQ ID NO: 28687 - protein, 118 aa, Artificial Sequence
  Chemically Synthesized
QVQLQESGGGLVQAGGSLRLSCAASGSIFYGWYMGWYRQAPGKEREFVAAIGLGGSTNYADSVKGRFTISRDNAKNTVYLQMNSLKPEDTAVYYCAVHPYNFGQYAYWGQGTQVTVSS

SEQ ID NO: 28688 - protein, 118 aa, Artificial Sequence
  Chemically Synthesized
QVQLQESGGGLVQAGGSLRLSCAASGTIFFYRVMGWYRQAPGKERELVAGISLGGTTYYADSVKGRFTISRDNAKNTVYLQMNSLKPEDTAVYYCAAHRAPFTRHWYWGQGTQVTVSS

SEQ ID NO: 28689 - protein, 114 aa, Artificial Sequence
  Chemically Synthesized
QVQLQESGGGLVQAGGSLRLSCAASGTIFVRNGMGWYRQAPGKERELVASIGDGANTYYADSVKGRFTISRDNAKNTVYLQMNSLKPEDTAVYYCAAYAYHWYWGQGTQVTVSS

SEQ ID NO: 28690 - protein, 118 aa, Artificial Sequence
  Chemically Synthesized
QVQLQESGGGLVQAGGSLRLSCAASGNIFKRANMGWYRQAPGKEREFVATISRGTNTYYADSVKGRFTISRDNAKNTVYLQMNSLKPEDTAVYYCAVRYRWYGTHFYWGQGTQVTVSS

SEQ ID NO: 28691 - protein, 118 aa, Artificial Sequence
  Chemically Synthesized
QVQLQESGGGLVQAGGSLRLSCAASGYISADYDMGWYRQAPGKERELVAAINIGGSTYYADSVKGRFTISRDNAKNTVYLQMNSLKPEDTAVYYCAAYQVNGDDHAYWGQGTQVTVSS

SEQ ID NO: 28692 - protein, 118 aa, Artificial Sequence
  Chemically Synthesized
QVQLQESGGGLVQAGGSLRLSCAASGNIFWQYTMGWYRQAPGKEREFVAGITIGAITNYADSVKGRFTISRDNAKNTVYLQMNSLKPEDTAVYYCAAGTLFYNSLRYWGQGTQVTVSS

SEQ ID NO: 28693 - protein, 122 aa, Artificial Sequence
  Chemically Synthesized
QVQLQESGGGLVQAGGSLRLSCAASGTIFGRWWMGWYRQAPGKERELVAAINHGGITNYADSVKGRFTISRDNAKNTVYLQMNSLKPEDTAVYYCAVRAYTYYWRFSAYYYWGQGTQVTVSS

SEQ ID NO: 28694 - protein, 121 aa, Artificial Sequence
  Chemically Synthesized
QVQLQESGGGLVQAGGSLRLSCAASGYISRRTYMGWYRQAPGKERELVASITYGTSTNYADSVKGRFTISRDNAKNTVYLQMNSLKPEDTAVYYCAAAARWKYGYKPHYYWGQGTQVTVSS

SEQ ID NO: 28695 - protein, 118 aa, Artificial Sequence
  Chemically Synthesized
QVQLQESGGGLVQAGGSLRLSCAASGYISDWPFMGWYRQAPGKEREFVAAIDDGTITNYADSVKGRFTISRDNAKNTVYLQMNSLKPEDTAVYYCAVSLFTGGWFFYWGQGTQVTVSS

SEQ ID NO: 28696 - protein, 122 aa, Artificial Sequence
  Chemically Synthesized
QVQLQESGGGLVQAGGSLRLSCAASGNIFGGYAMGWYRQAPGKEREFVASITTGATTNYADSVKGRFTISRDNAKNTVYLQMNSLKPEDTAVYYCAVVYVPLYSWFRRHSYWGQGTQVTVSS

SEQ ID NO: 28697 - protein, 118 aa, Artificial Sequence
  Chemically Synthesized
QVQLQESGGGLVQAGGSLRLSCAASGYIFTDAYMGWYRQAPGKERELVAGITQGTNTNYADSVKGRFTISRDNAKNTVYLQMNSLKPEDTAVYYCAASPPYDYYHFYWGQGTQVTVSS

SEQ ID NO: 28698 - protein, 126 aa, Artificial Sequence
  Chemically Synthesized
QVQLQESGGGLVQAGGSLRLSCAASGYIFQGQIMGWYRQAPGKERELVAAIGDGTSTYYADSVKGRFTISRDNAKNTVYLQMNSLKPEDTAVYYCAVGTLRGYQTTPYVLNTHGYWGQGTQVTVSS

SEQ ID NO: 28699 - protein, 125 aa, Artificial Sequence
  Chemically Synthesized
QVQLQESGGGLVQAGGSLRLSCAASGTISWPDDMGWYRQAPGKERELVASINGGTTTYYADSVKGRFTISRDNAKNTVYLQMNSLKPEDTAVYYCAVYIRDRLYSTVSLTLVFYWGQGTQVTVSS

SEQ ID NO: 28700 - protein, 117 aa, Artificial Sequence
  Chemically Synthesized
QVQLQESGGGLVQAGGSLRLSCAASGSIFAVTMGWYRQAPGKEREFVATIGGGGSTNYADSVKGRFTISRDNAKNTVYLQMNSLKPEDTAVYYCAAYIEPYDSYDYWGQGTQVTVSS

SEQ ID NO: 28701 - protein, 118 aa, Artificial Sequence
  Chemically Synthesized
QVQLQESGGGLVQAGGSLRLSCAASGYISFWYDMGWYRQAPGKERELVAGITLGATTNYADSVKGRFTISRDNAKNTVYLQMNSLKPEDTAVYYCAANRYAYNEYPYWGQGTQVTVSS

SEQ ID NO: 28702 - protein, 122 aa, Artificial Sequence
  Chemically Synthesized
QVQLQESGGGLVQAGGSLRLSCAASGYISWHYTMGWYRQAPGKEREFVATIGRGTSTYYADSVKGRFTISRDNAKNTVYLQMNSLKPEDTAVYYCAVWRRQYSYTYRFYYYWGQGTQVTVSS

SEQ ID NO: 28703 - protein, 118 aa, Artificial Sequence
  Chemically Synthesized
QVQLQESGGGLVQAGGSLRLSCAASGYISSTYSMGWYRQAPGKERELVASIDSGAITYYADSVKGRFTISRDNAKNTVYLQMNSLKPEDTAVYYCAVYLYTSTSHDYWGQGTQVTVSS

SEQ ID NO: 28704 - protein, 118 aa, Artificial Sequence
  Chemically Synthesized
QVQLQESGGGLVQAGGSLRLSCAASGTIFLDYAMGWYRQAPGKERELVATIDYGGTTNYADSVKGRFTISRDNAKNTVYLQMNSLKPEDTAVYYCAVTQRYENDYGYWGQGTQVTVSS

SEQ ID NO: 28705 - protein, 110 aa, Artificial Sequence
  Chemically Synthesized
QVQLQESGGGLVQAGGSLRLSCAASGTISLASYMGWYRQAPGKEREFVAAITTGSSTYYADSVKGRFTISRDNAKNTVYLQMNSLKPEDTAVYYCATIYWGQGTQVTVSS

SEQ ID NO: 28706 - protein, 117 aa, Artificial Sequence
  Chemically Synthesized
QVQLQESGGGLVQAGGSLRLSCAASGYISGYNTMGWYRQAPGKERELVAGITFGSSTYYADSVKGRFTISRDNAKNTVYLQMNSLKPEDTAVYYCAATRVNQTVLYWGQGTQVTVSS

SEQ ID NO: 28707 - protein, 121 aa, Artificial Sequence
  Chemically Synthesized
QVQLQESGGGLVQAGGSLRLSCAASGSISERSYMGWYRQAPGKERELVATINEVLLPYADSVKGRFTISRDNAKNTVYLQMNSLKPEDTAVYYCAVPHWHSYVDTLVPYYWGQGTQVTVSS

SEQ ID NO: 28708 - protein, 118 aa, Artificial Sequence
  Chemically Synthesized
QVQLQESGGGLVQAGGSLRLSCAASGYIFLYSKMGWYRQAPGKERELVATIGAGANTNYADSVKGRFTISRDNAKNTVYLQMNSLKPEDTAVYYCAVRTWLGYGFQYWGQGTQVTVSS

SEQ ID NO: 28709 - protein, 118 aa, Artificial Sequence
  Chemically Synthesized
QVQLQESGGGLVQAGGSLRLSCAASGTIFGAVYMGWYRQAPGKERELVAAIAFGGITNYADSVKGRFTISRDNAKNTVYLQMNSLKPEDTAVYYCAVRQIWLTTFAYWGQGTQVTVSS

SEQ ID NO: 28710 - protein, 118 aa, Artificial Sequence
  Chemically Synthesized
QVQLQESGGGLVQAGGSLRLSCAASGYISRSRSMGWYRQAPGKERELVAGIGYGGTTYYADSVKGRFTISRDNAKNTVYLQMNSLKPEDTAVYYCAAYRYTQRAFTYWGQGTQVTVSS

SEQ ID NO: 28711 - protein, 118 aa, Artificial Sequence
  Chemically Synthesized
QVQLQESGGGLVQAGGSLRLSCAASGNISEDRVMGWYRQAPGKERELVAAIADGTTTNYADSVKGRFTISRDNAKNTVYLQMNSLKPEDTAVYYCAVYVARGTGHVYWGQGTQVTVSS

SEQ ID NO: 28712 - protein, 126 aa, Artificial Sequence
  Chemically Synthesized
QVQLQESGGGLVQAGGSLRLSCAASGNISSRFTMGWYRQAPGKERELVASISWGGNTNYADSVKGRFTISRDNAKNTVYLQMNSLKPEDTAVYYCAVRVLRSQNYRDGSYYRHPYWGQGTQVTVSS

SEQ ID NO: 28713 - protein, 117 aa, Artificial Sequence
  Chemically Synthesized
QVQLQESGGGLVQAGGSLRLSCAASGSISYYYMGWYRQAPGKEREFVAAIAEGTTTYYADSVKGRFTISRDNAKNTVYLQMNSLKPEDTAVYYCAAVPYANDPYAYWGQGTQVTVSS

SEQ ID NO: 28714 - protein, 117 aa, Artificial Sequence
  Chemically Synthesized
QVQLQESGGGLVQAGGSLRLSCAASGSIFRTGTMGWYRQAPGKEREFVAGITKVLLPYADSVKGRFTISRDNAKNTVYLQMNSLKPEDTAVYYCAVGPFEWSPFPYWGQGTQVTVSS

SEQ ID NO: 28715 - protein, 120 aa, Artificial Sequence
  Chemically Synthesized
QVQLQESGGGLVQAGGSLRLSCAASGNIFVVVMGWYRQAPGKEREFVAAIATGSSTYYADSVKGRFTISRDNAKNTVYLQMNSLKPEDTAVYYCAADALRPKYDISFWYWGQGTQVTVSS

SEQ ID NO: 28716 - protein, 126 aa, Artificial Sequence
  Chemically Synthesized
QVQLQESGGGLVQAGGSLRLSCAASGYISSTIGMGWYRQAPGKEREFVAGIDPGGTTNYADSVKGRFTISRDNAKNTVYLQMNSLKPEDTAVYYCAADLYDVTIRGDVPIPYFVYWGQGTQVTVSS

SEQ ID NO: 28717 - protein, 126 aa, Artificial Sequence
  Chemically Synthesized
QVQLQESGGGLVQAGGSLRLSCAASGTIFLSYLMGWYRQAPGKERELVASISLGGITYYADSVKGRFTISRDNAKNTVYLQMNSLKPEDTAVYYCAVQHVDPGWQRYYVYWVHEYWGQGTQVTVSS

SEQ ID NO: 28718 - protein, 118 aa, Artificial Sequence
  Chemically Synthesized
QVQLQESGGGLVQAGGSLRLSCAASGSISSRYNMGWYRQAPGKERELVAAINDGTTTNYADSVKGRFTISRDNAKNTVYLQMNSLKPEDTAVYYCAARRRISWHHTYWGQGTQVTVSS

SEQ ID NO: 28719 - protein, 118 aa, Artificial Sequence
  Chemically Synthesized
QVQLQESGGGLVQAGGSLRLSCAASGSIFGYWYMGWYRQAPGKEREFVASISLGSNTYYADSVKGRFTISRDNAKNTVYLQMNSLKPEDTAVYYCAVLPYVTTWHAYWGQGTQVTVSS

SEQ ID NO: 28720 - protein, 122 aa, Artificial Sequence
  Chemically Synthesized
QVQLQESGGGLVQAGGSLRLSCAASGYISYTKYMGWYRQAPGKERELVATISAGGITNYADSVKGRFTISRDNAKNTVYLQMNSLKPEDTAVYYCAVGDPEYILGARALQYWGQGTQVTVSS

SEQ ID NO: 28721 - protein, 121 aa, Artificial Sequence
  Chemically Synthesized
QVQLQESGGGLVQAGGSLRLSCAASGYIFTIGTMGWYRQAPGKERELVAAIDGGTSTYYADSVKGRFTISRDNAKNTVYLQMNSLKPEDTAVYYCAASTFVLTTTKLVMYWGQGTQVTVSS

SEQ ID NO: 28722 - protein, 126 aa, Artificial Sequence
  Chemically Synthesized
QVQLQESGGGLVQAGGSLRLSCAASGSIFDPTAMGWYRQAPGKEREFVAAITYGGSTNYADSVKGRFTISRDNAKNTVYLQMNSLKPEDTAVYYCAATYIGGLPKGLLSLRPYDYWGQGTQVTVSS

SEQ ID NO: 28723 - protein, 118 aa, Artificial Sequence
  Chemically Synthesized
QVQLQESGGGLVQAGGSLRLSCAASGSIFRYVQMGWYRQAPGKERELVASITKGANTYYADSVKGRFTISRDNAKNTVYLQMNSLKPEDTAVYYCAAGHLRYSPLYYWGQGTQVTVSS

SEQ ID NO: 28724 - protein, 118 aa, Artificial Sequence
  Chemically Synthesized
QVQLQESGGGLVQAGGSLRLSCAASGYIFLAVFMGWYRQAPGKEREFVAAITSGGITNYADSVKGRFTISRDNAKNTVYLQMNSLKPEDTAVYYCAAGSATQDDHYYWGQGTQVTVSS

SEQ ID NO: 28725 - protein, 118 aa, Artificial Sequence
  Chemically Synthesized
QVQLQESGGGLVQAGGSLRLSCAASGSIFSRRSMGWYRQAPGKERELVATIGKGGTTNYADSVKGRFTISRDNAKNTVYLQMNSLKPEDTAVYYCAAKVYWKYGHSYWGQGTQVTVSS

SEQ ID NO: 28726 - protein, 126 aa, Artificial Sequence
  Chemically Synthesized
QVQLQESGGGLVQAGGSLRLSCAASGYISLKYPMGWYRQAPGKERELVATITAGSNTNYADSVKGRFTISRDNAKNTVYLQMNSLKPEDTAVYYCAAPILARNYTGYYYYFHYTYWGQGTQVTVSS

SEQ ID NO: 28727 - protein, 122 aa, Artificial Sequence
  Chemically Synthesized
QVQLQESGGGLVQAGGSLRLSCAASGSIFDWRLMGWYRQAPGKERELVASIAYGGNTNYADSVKGRFTISRDNAKNTVYLQMNSLKPEDTAVYYCAASDVVDDDPYNDYQYWGQGTQVTVSS

SEQ ID NO: 28728 - protein, 118 aa, Artificial Sequence
  Chemically Synthesized
QVQLQESGGGLVQAGGSLRLSCAASGNISRFRYMGWYRQAPGKERELVAGIATGSTTYYADSVKGRFTISRDNAKNTVYLQMNSLKPEDTAVYYCAVWYTRLRYYGYWGQGTQVTVSS

SEQ ID NO: 28729 - protein, 122 aa, Artificial Sequence
  Chemically Synthesized
QVQLQESGGGLVQAGGSLRLSCAASGNIFGRVYMGWYRQAPGKEREFVAAIGGGTNTNYADSVKGRFTISRDNAKNTVYLQMNSLKPEDTAVYYCAAARRYWSGYQYHHTYWGQGTQVTVSS

SEQ ID NO: 28730 - protein, 118 aa, Artificial Sequence
  Chemically Synthesized
QVQLQESGGGLVQAGGSLRLSCAASGNISAPYSMGWYRQAPGKEREFVATINYGGNTYYADSVKGRFTISRDNAKNTVYLQMNSLKPEDTAVYYCAASASGNYGFRYWGQGTQVTVSS

SEQ ID NO: 28731 - protein, 118 aa, Artificial Sequence
  Chemically Synthesized
QVQLQESGGGLVQAGGSLRLSCAASGYISAYSSMGWYRQAPGKEREFVATIAYGANTYYADSVKGRFTISRDNAKNTVYLQMNSLKPEDTAVYYCAAKYNRYYRHAYWGQGTQVTVSS

SEQ ID NO: 28732 - protein, 110 aa, Artificial Sequence
  Chemically Synthesized
QVQLQESGGGLVQAGGSLRLSCAASGYISTFVFMGWYRQAPGKERELVATIADGGTTNYADSVKGRFTISRDNAKNTVYLQMNSLKPEDTAVYYCAAYYWGQGTQVTVSS

SEQ ID NO: 28733 - protein, 112 aa, Artificial Sequence
  Chemically Synthesized
QVQLQESGGGLVQAGGSLRLSCAASGNISGVAGMGWYRQAPGKERELVAGITDGGTTNYADSVKGRFTISRDNAKNTVYLQMNSLKPEDTAVYYCAVREKYWGQGTQVTVSS

SEQ ID NO: 28734 - protein, 126 aa, Artificial Sequence
  Chemically Synthesized
QVQLQESGGGLVQAGGSLRLSCAASGTIFLVTSMGWYRQAPGKERELVAAINYGASTYYADSVKGRFTISRDNAKNTVYLQMNSLKPEDTAVYYCAAVAQYHDWRWGRYRRPYAYWGQGTQVTVSS

SEQ ID NO: 28735 - protein, 126 aa, Artificial Sequence
  Chemically Synthesized
QVQLQESGGGLVQAGGSLRLSCAASGSIFGLPYMGWYRQAPGKERELVATIGGGANTYYADSVKGRFTISRDNAKNTVYLQMNSLKPEDTAVYYCAVNATASLYAITWHPGDYWYWGQGTQVTVSS

SEQ ID NO: 28736 - protein, 126 aa, Artificial Sequence
  Chemically Synthesized
QVQLQESGGGLVQAGGSLRLSCAASGNISVYGNMGWYRQAPGKEREFVASITVGGITNYADSVKGRFTISRDNAKNTVYLQMNSLKPEDTAVYYCAVDLNWVIPGKKVGLNRFGYWGQGTQVTVSS

SEQ ID NO: 28737 - protein, 122 aa, Artificial Sequence
  Chemically Synthesized
QVQLQESGGGLVQAGGSLRLSCAASGSIFGYRRMGWYRQAPGKEREFVATITAGANTYYADSVKGRFTISRDNAKNTVYLQMNSLKPEDTAVYYCAAVYNTYPWWVTYYRYWGQGTQVTVSS

SEQ ID NO: 28738 - protein, 122 aa, Artificial Sequence
  Chemically Synthesized
QVQLQESGGGLVQAGGSLRLSCAASGSISQDDAMGWYRQAPGKERELVAGIAAGGTTYYADSVKGRFTISRDNAKNTVYLQMNSLKPEDTAVYYCAVVYGLSDVKPATFPYWGQGTQVTVSS

SEQ ID NO: 28739 - protein, 126 aa, Artificial Sequence
  Chemically Synthesized
QVQLQESGGGLVQAGGSLRLSCAASGTISPLRYMGWYRQAPGKERELVAGITGGGITNYADSVKGRFTISRDNAKNTVYLQMNSLKPEDTAVYYCAADVTDGGQYWADDVYYYPYWGQGTQVTVSS

SEQ ID NO: 28740 - protein, 124 aa, Artificial Sequence
  Chemically Synthesized
QVQLQESGGGLVQAGGSLRLSCAASGTIFANFIMGWYRQAPGKERELVATISFGTNTYYADSVKGRFTISRDNAKNTVYLQMNSLKPEDTAVYYCAAQVYWRSPWDQYYWHLYWGQGTQVTVSS

SEQ ID NO: 28741 - protein, 118 aa, Artificial Sequence
  Chemically Synthesized
QVQLQESGGGLVQAGGSLRLSCAASGTIFVYYYMGWYRQAPGKERELVATISHGATTYYADSVKGRFTISRDNAKNTVYLQMNSLKPEDTAVYYCAVLYPYSIDHNYWGQGTQVTVSS

SEQ ID NO: 28742 - protein, 118 aa, Artificial Sequence
  Chemically Synthesized
QVQLQESGGGLVQAGGSLRLSCAASGNIFTYTAMGWYRQAPGKEREFVAGIAYGGTTNYADSVKGRFTISRDNAKNTVYLQMNSLKPEDTAVYYCAAVIRSRVYYYYWGQGTQVTVSS

SEQ ID NO: 28743 - protein, 126 aa, Artificial Sequence
  Chemically Synthesized
QVQLQESGGGLVQAGGSLRLSCAASGTIFSYDFMGWYRQAPGKERELVATISDGGNTYYADSVKGRFTISRDNAKNTVYLQMNSLKPEDTAVYYCAVRRDDHSERPDGVYVPFDYWGQGTQVTVSS

SEQ ID NO: 28744 - protein, 106 aa, Artificial Sequence
  Chemically Synthesized
QVQLQESGGGLVQAGGSLRLSCAASGNISILYYMGWYRQAPGKEREFYADSVKGRFTISRDNAKNTVYLQMNSLKPEDTAVYYCAVQLYLLITIYWGQGTQVTVSS

SEQ ID NO: 28745 - protein, 118 aa, Artificial Sequence
  Chemically Synthesized
QVQLQESGGGLVQAGGSLRLSCAASGTISYIGYMGWYRQAPGKERELVATINYGAITNYADSVKGRFTISRDNAKNTVYLQMNSLKPEDTAVYYCAAYPSQYVHHTYWGQGTQVTVSS

SEQ ID NO: 28746 - protein, 119 aa, Artificial Sequence
  Chemically Synthesized
QVQLQESGGGLVQAGGSLRLSCAASGSTADLYMGWYRQAPGKERELLPVLLTVLLPYADSVKGRFTISRDNAKNTVYLQMNSLKPEDTAVYYCAVSTADGGWSDQYHYWGQGTQVTVSS

SEQ ID NO: 28747 - protein, 118 aa, Artificial Sequence
  Chemically Synthesized
QVQLQESGGGLVQAGGSLRLSCAASGTISRSDTMGWYRQAPGKEREFVAAIDTGGNTNYADSVKGRFTISRDNAKNTVYLQMNSLKPEDTAVYYCAVLKYVKSYLWYWGQGTQVTVSS

SEQ ID NO: 28748 - protein, 121 aa, Artificial Sequence
  Chemically Synthesized
QVQLQESGGGLVQAGGSLRLSCAASGNISAVYVMGWYRQAPGKEREFVAGISSGGTTNYADSVKGRFTISRDNAKNTVYLQMNSLKPEDTAVYYCAVVGAVDDYVRYYWYWGQGTQVTVSS

SEQ ID NO: 28749 - protein, 118 aa, Artificial Sequence
  Chemically Synthesized
QVQLQESGGGLVQAGGSLRLSCAASGTIFGFRIMGWYRQAPGKERELVATINWGASTNYADSVKGRFTISRDNAKNTVYLQMNSLKPEDTAVYYCAVDKYISPGHGYWGQGTQVTVSS

SEQ ID NO: 28750 - protein, 117 aa, Artificial Sequence
  Chemically Synthesized
QVQLQESGGGLVQAGGSLRLSCAASGTISTFLRMGWYRQAPGKERELVAAISYGTNTNYADSVKGRFTISRDNAKNTVYLQMNSLKPEDTAVYYCAAGGPGDTVLYWGQGTQVTVSS

SEQ ID NO: 28751 - protein, 118 aa, Artificial Sequence
  Chemically Synthesized
QVQLQESGGGLVQAGGSLRLSCAASGNISSYRYMGWYRQAPGKERELVAAITGGTTTYYADSVKGRFTISRDNAKNTVYLQMNSLKPEDTAVYYCAVGGEVYRVHLYWGQGTQVTVSS

SEQ ID NO: 28752 - protein, 121 aa, Artificial Sequence
  Chemically Synthesized
QVQLQESGGGLVQAGGSLRLSCAASGTIFYYYGMGWYRQAPGKEREFVAGISRGTTTNYADSVKGRFTISRDNAKNTVYLQMNSLKPEDTAVYYCAVPSVISVDLDLSMYWGQGTQVTVSS

SEQ ID NO: 28753 - protein, 118 aa, Artificial Sequence
  Chemically Synthesized
QVQLQESGGGLVQAGGSLRLSCAASGTISTTYSMGWYRQAPGKEREFVASIGLGGTTYYADSVKGRFTISRDNAKNTVYLQMNSLKPEDTAVYYCAALTYSRHYHYYWGQGTQVTVSS

SEQ ID NO: 28754 - protein, 118 aa, Artificial Sequence
  Chemically Synthesized
QVQLQESGGGLVQAGGSLRLSCAASGSISDFDAMGWYRQAPGKERELVAAISLGAITNYADSVKGRFTISRDNAKNTVYLQMNSLKPEDTAVYYCAAEDDDDHRFGYWGQGTQVTVSS

SEQ ID NO: 28755 - protein, 122 aa, Artificial Sequence
  Chemically Synthesized
QVQLQESGGGLVQAGGSLRLSCAASGYIFYVDPMGWYRQAPGKEREFVAGISPGGNTNYADSVKGRFTISRDNAKNTVYLQMNSLKPEDTAVYYCAAVHKNAGYKGRHLPYWGQGTQVTVSS

SEQ ID NO: 28756 - protein, 117 aa, Artificial Sequence
  Chemically Synthesized
QVQLQESGGGLVQAGGSLRLSCAASGTILVNRMGWYRQAPGKERELVATINGGGITYYADSVKGRFTISRDNAKNTVYLQMNSLKPEDTAVYYCAAPYAVSAYYYYWGQGTQVTVSS

SEQ ID NO: 28757 - protein, 121 aa, Artificial Sequence
  Chemically Synthesized
QVQLQESGGGLVQAGGSLRLSCAASGNIFDLQDMGWYRQAPGKEREFVATIGYGATTYYADSVKGRFTISRDNAKNTVYLQMNSLKPEDTAVYYCAVDRFPTSGPQSVIYWGQGTQVTVSS

SEQ ID NO: 28758 - protein, 118 aa, Artificial Sequence
  Chemically Synthesized
QVQLQESGGGLVQAGGSLRLSCAASGNISRQGNMGWYRQAPGKEREFVAGITYGASTNYADSVKGRFTISRDNAKNTVYLQMNSLKPEDTAVYYCAAIYRGHSYLVYWGQGTQVTVSS

SEQ ID NO: 28759 - protein, 117 aa, Artificial Sequence
  Chemically Synthesized
QVQLQESGGGLVQAGGSLRLSCAASGNIFAPTRMGWYRQAPGKERELVAGIAYGTSTNYADSVKGRFTISRDNAKNTVYLQMNSLKPEDTAVYYCAANGPDIIFGYWGQGTQVTVSS

SEQ ID NO: 28760 - protein, 122 aa, Artificial Sequence
  Chemically Synthesized
QVQLQESGGGLVQAGGSLRLSCAASGSISPGRVMGWYRQAPGKEREFVASIAYGATTNYADSVKGRFTISRDNAKNTVYLQMNSLKPEDTAVYYCAVLDRGDRSKLGYLWYWGQGTQVTVSS

SEQ ID NO: 28761 - protein, 118 aa, Artificial Sequence
  Chemically Synthesized
QVQLQESGGGLVQAGGSLRLSCAASGSISVPISMGWYRQAPGKEREFVASISWGSTTYYADSVKGRFTISRDNAKNTVYLQMNSLKPEDTAVYYCAAVKKSVRYFAYWGQGTQVTVSS

SEQ ID NO: 28762 - protein, 126 aa, Artificial Sequence
  Chemically Synthesized
QVQLQESGGGLVQAGGSLRLSCAASGYISKWSMGWYRQAPGKERELVATIDGGTTTNYADSVKGRFTISRDNAKNTVYLQMNSLKPEDTAVYYCAAWYKLSSGQYWYDLYEIYGYWGQGTQVTVSS

SEQ ID NO: 28763 - protein, 118 aa, Artificial Sequence
  Chemically Synthesized
QVQLQESGGGLVQAGGSLRLSCAASGYISGSWYMGWYRQAPGKEREFVASISSGSITNYADSVKGRFTISRDNAKNTVYLQMNSLKPEDTAVYYCAVVLYARYYHHYWGQGTQVTVSS

SEQ ID NO: 28764 - protein, 118 aa, Artificial Sequence
  Chemically Synthesized
QVQLQESGGGLVQAGGSLRLSCAASGNIFSFDVMGWYRQAPGKEREFVATIGPGSTTNYADSVKGRFTISRDNAKNTVYLQMNSLKPEDTAVYYCAVTYRDDKHYRYWGQGTQVTVSS

SEQ ID NO: 28765 - protein, 118 aa, Artificial Sequence
  Chemically Synthesized
QVQLQESGGGLVQAGGSLRLSCAASGNIFYWYAMGWYRQAPGKERELVAAIATGGITYYADSVKGRFTISRDNAKNTVYLQMNSLKPEDTAVYYCAVRVRTLTGHGYWGQGTQVTVSS

SEQ ID NO: 28766 - protein, 122 aa, Artificial Sequence
  Chemically Synthesized
QVQLQESGGGLVQAGGSLRLSCAASGNISVGKPMGWYRQAPGKEREFVATITDGSTTYYADSVKGRFTISRDNAKNTVYLQMNSLKPEDTAVYYCAVDYGSDGGYYHFLGYWGQGTQVTVSS

SEQ ID NO: 28767 - protein, 112 aa, Artificial Sequence
  Chemically Synthesized
QVQLQESGGGLVQAGGSLRLSCAASGSISPILDMGWYRQAPGKERELVAYYLYADSVKGRFTISRDNAKNTVYLQMNSLKPEDTAVYYCAVPDGHDTGYPYWGQGTQVTVSS

SEQ ID NO: 28768 - protein, 117 aa, Artificial Sequence
  Chemically Synthesized
QVQLQESGGGLVQAGGSLRLSCAASGYISSTSRMGWYRQAPGKERELVAGIGDGGNTNYADSVKGRFTISRDNAKNTVYLQMNSLKPEDTAVYYCAAVHPYPAVLYWGQGTQVTVSS

SEQ ID NO: 28769 - protein, 118 aa, Artificial Sequence
  Chemically Synthesized
QVQLQESGGGLVQAGGSLRLSCAASGSISDAGYMGWYRQAPGKEREFVAGIAPGGNTNYADSVKGRFTISRDNAKNTVYLQMNSLKPEDTAVYYCAAVVYIYGYHYYWGQGTQVTVSS

SEQ ID NO: 28770 - protein, 125 aa, Artificial Sequence
  Chemically Synthesized
QVQLQESGGGLVQAGGSLRLSCAASGNISSVKSMGWYRQAPGKERELVAGIADGSITYYADSVKGRFTISRDNAKNTVYLQMNSLKPEDTAVYYCAADQADAYQESNYTSLTLYWGQGTQVTVSS

SEQ ID NO: 28771 - protein, 118 aa, Artificial Sequence
  Chemically Synthesized
QVQLQESGGGLVQAGGSLRLSCAASGTIFDYYNMGWYRQAPGKEREFVAGIGDGTTTYYADSVKGRFTISRDNAKNTVYLQMNSLKPEDTAVYYCAVVHRDGGRYFYWGQGTQVTVSS

SEQ ID NO: 28772 - protein, 123 aa, Artificial Sequence
  Chemically Synthesized
QVQLQESGGGLVQAGGSLRLSCAASGSISYDPYMGWYRQAPGKERELVATIALVPYADSVKGRFTISRDNAKNTVYLQMNSLKPEDTAVYYCAAQYQKAATWANIHIYWYYYWGQGTQVTVSS

SEQ ID NO: 28773 - protein, 117 aa, Artificial Sequence
  Chemically Synthesized
QVQLQESGGGLVQAGGSLRLSCAASGTIFTYTDMGWYRQAPGKEREFVAGISQGANTYYADSVKGRFTISRDNAKNTVYLQMNSLKPEDTAVYYCAVDSRFAIGFYWGQGTQVTVSS

SEQ ID NO: 28774 - protein, 125 aa, Artificial Sequence
  Chemically Synthesized
QVQLQESGGGLVQAGGSLRLSCAASGYISAHYNMGWYRQAPGKEREFVATITDGTNTYADSVKGRFTISRDNAKNTVYLQMNSLKPEDTAVYYCAVDVDLYDAATYLYIVNYYYWGQGTQVTVSS

SEQ ID NO: 28775 - protein, 122 aa, Artificial Sequence
  Chemically Synthesized
QVQLQESGGGLVQAGGSLRLSCAASGSISDVYSMGWYRQAPGKERELVASITRGTTTYYADSVKGRFTISRDNAKNTVYLQMNSLKPEDTAVYYCAVLYYKAAREWDTHYYWGQGTQVTVSS

SEQ ID NO: 28776 - protein, 118 aa, Artificial Sequence
  Chemically Synthesized
QVQLQESGGGLVQAGGSLRLSCAASGTISNWSYMGWYRQAPGKERELVASINGGGTTNYADSVKGRFTISRDNAKNTVYLQMNSLKPEDTAVYYCAALFFFTHWHGYWGQGTQVTVSS

SEQ ID NO: 28777 - protein, 118 aa, Artificial Sequence
  Chemically Synthesized
QVQLQESGGGLVQAGGSLRLSCAASGTISFAVDMGWYRQAPGKEREFVASITRGSTTYYADSVKGRFTISRDNAKNTVYLQMNSLKPEDTAVYYCAVVGVRSYFHSYWGQGTQVTVSS

SEQ ID NO: 28778 - protein, 125 aa, Artificial Sequence
  Chemically Synthesized
QVQLQESGGGLVQAGGSLRLSCAASGTILTLNMGWYRQAPGKERELVATITYGTNTNYADSVKGRFTISRDNAKNTVYLQMNSLKPEDTAVYYCAANDGAQGGYADPRQTAHPYWGQGTQVTVSS

SEQ ID NO: 28779 - protein, 118 aa, Artificial Sequence
  Chemically Synthesized
QVQLQESGGGLVQAGGSLRLSCAASGNIFLYWSMGWYRQAPGKERELVASIARGSSTNYADSVKGRFTISRDNAKNTVYLQMNSLKPEDTAVYYCAVQDADNAQYSYWGQGTQVTVSS

SEQ ID NO: 28780 - protein, 118 aa, Artificial Sequence
  Chemically Synthesized
QVQLQESGGGLVQAGGSLRLSCAASGTISTLDVMGWYRQAPGKEREFVAAISYGATTYYADSVKGRFTISRDNAKNTVYLQMNSLKPEDTAVYYCAAARWAYTTLRYWGQGTQVTVSS

SEQ ID NO: 28781 - protein, 121 aa, Artificial Sequence
  Chemically Synthesized
QVQLQESGGGLVQAGGSLRLSCAASGSIFSLTDMGWYRQAPGKERELVASIAFGTTTNYADSVKGRFTISRDNAKNTVYLQMNSLKPEDTAVYYCAVDALLIESFYYHYYWGQGTQVTVSS

SEQ ID NO: 28782 - protein, 122 aa, Artificial Sequence
  Chemically Synthesized
QVQLQESGGGLVQAGGSLRLSCAASGTIFTDGPMGWYRQAPGKEREFVASISGGGITNYADSVKGRFTISRDNAKNTVYLQMNSLKPEDTAVYYCAAITTVLRDVKAYHAYWGQGTQVTVSS

SEQ ID NO: 28783 - protein, 121 aa, Artificial Sequence
  Chemically Synthesized
QVQLQESGGGLVQAGGSLRLSCAASGTIFNGSAMGWYRQAPGKEREFVATIDSGTNTNYADSVKGRFTISRDNAKNTVYLQMNSLKPEDTAVYYCAAVNTGSGTGGYHYYWGQGTQVTVSS

SEQ ID NO: 28784 - protein, 112 aa, Artificial Sequence
  Chemically Synthesized
QVQLQESGGGLVQAGGSLRLSCAASGTISYIWYMGWYRQAPGKERELVATIADGTNTYYADSVKGRFTISRDNAKNTVYLQMNSLKPEDTAVYYCAAGHTYWGQGTQVTVSS

SEQ ID NO: 28785 - protein, 122 aa, Artificial Sequence
  Chemically Synthesized
QVQLQESGGGLVQAGGSLRLSCAASGNIFGGSAMGWYRQAPGKEREFVAAINGGSITNYADSVKGRFTISRDNAKNTVYLQMNSLKPEDTAVYYCAAYYPRDWDTDFDLTYWGQGTQVTVSS

SEQ ID NO: 28786 - protein, 119 aa, Artificial Sequence
  Chemically Synthesized
QVQLQESGGGLVQAGGSLRLSCAASGTISERGRMGWYRQAPGKERELVATITFGGTTYYADSVKGRFTISRDNAKNTVYLQMNSLKPEDTAVYYCAADDYYEGASHIYWGQGTQVTVSS

SEQ ID NO: 28787 - protein, 118 aa, Artificial Sequence
  Chemically Synthesized
QVQLQESGGGLVQAGGSLRLSCAASGNISGGAVMGWYRQAPGKEREFVASITSGTITNYADSVKGRFTISRDNAKNTVYLQMNSLKPEDTAVYYCAAVLYQDGYHWYWGQGTQVTVSS

SEQ ID NO: 28788 - protein, 122 aa, Artificial Sequence
  Chemically Synthesized
QVQLQESGGGLVQAGGSLRLSCAASGNIFQAGGMGWYRQAPGKEREFVAGIGYGGTTNYADSVKGRFTISRDNAKNTVYLQMNSLKPEDTAVYYCAAVTSQTPQKLVYHYYWGQGTQVTVSS

SEQ ID NO: 28789 - protein, 117 aa, Artificial Sequence
  Chemically Synthesized
QVQLQESGGGLVQAGGSLRLSCAASGTISTTLMGWYRQAPGKEREFVASIDGGTNTNYADSVKGRFTISRDNAKNTVYLQMNSLKPEDTAVYYCAVDYDRSGVFSYWGQGTQVTVSS

SEQ ID NO: 28790 - protein, 118 aa, Artificial Sequence
  Chemically Synthesized
QVQLQESGGGLVQAGGSLRLSCAASGTISKFYVMGWYRQAPGKERELVAAITGGTNTNYADSVKGRFTISRDNAKNTVYLQMNSLKPEDTAVYYCAVRYSRTSYYSYWGQGTQVTVSS

SEQ ID NO: 28791 - protein, 118 aa, Artificial Sequence
  Chemically Synthesized
QVQLQESGGGLVQAGGSLRLSCAASGSIFTFDGMGWYRQAPGKEREFVAGIGYGGTTYYADSVKGRFTISRDNAKNTVYLQMNSLKPEDTAVYYCAVRYSSTHAHDYWGQGTQVTVSS

SEQ ID NO: 28792 - protein, 121 aa, Artificial Sequence
  Chemically Synthesized
QVQLQESGGGLVQAGGSLRLSCAASGNIFVWYDMGWYRQAPGKEREFVAGIGYGGSTNYADSVKGRFTISRDNAKNTVYLQMNSLKPEDTAVYYCAVEPYDSISTSCTMYWGQGTQVTVSS

SEQ ID NO: 28793 - protein, 118 aa, Artificial Sequence
  Chemically Synthesized
QVQLQESGGGLVQAGGSLRLSCAASGYIFPAYVMGWYRQAPGKEREFVAAIGDGTSTNYADSVKGRFTISRDNAKNTVYLQMNSLKPEDTAVYYCAVLSYDQHYHWYWGQGTQVTVSS

SEQ ID NO: 28794 - protein, 118 aa, Artificial Sequence
  Chemically Synthesized
QVQLQESGGGLVQAGGSLRLSCAASGSISQLAVMGWYRQAPGKERELVAAIGRGSITNYADSVKGRFTISRDNAKNTVYLQMNSLKPEDTAVYYCAAVQESDGWHGYWGQGTQVTVSS

SEQ ID NO: 28795 - protein, 125 aa, Artificial Sequence
  Chemically Synthesized
QVQLQESGGGLVQAGGSLRLSCAASGNISDYYSMGWYRQAPGKERELVAGITNGGNTNYADSVKGRFTISRDNAKNTVYLQMNSLKPEDTAVYYCAVRYYYYGSLTRTTVLFFYWGQGTQVTVSS

SEQ ID NO: 28796 - protein, 118 aa, Artificial Sequence
  Chemically Synthesized
QVQLQESGGGLVQAGGSLRLSCAASGSIFRDYIMGWYRQAPGKEREFVAAINGGSTTYYADSVKGRFTISRDNAKNTVYLQMNSLKPEDTAVYYCAVVTYRQRWHFYWGQGTQVTVSS

SEQ ID NO: 28797 - protein, 123 aa, Artificial Sequence
  Chemically Synthesized
QVQLQESGGGLVQAGGSLRLSCAASGTISSQLYMGWYRQAPGKEREFVASIGRGGNTNYADSVKGRFTISRDNAKNTVYLQMNSLKPEDTAVYYCAAVQLDQSDAYRQYYYYWGQGTQVTVSS

SEQ ID NO: 28798 - protein, 118 aa, Artificial Sequence
  Chemically Synthesized
QVQLQESGGGLVQAGGSLRLSCAASGNIFSIHGMGWYRQAPGKERELVATINNGSNTNYADSVKGRFTISRDNAKNTVYLQMNSLKPEDTAVYYCAATGYYRGWHGYWGQGTQVTVSS

SEQ ID NO: 28799 - protein, 115 aa, Artificial Sequence
  Chemically Synthesized
QVQLQESGGGLVQAGGSLRLSCAASGSISYGPSMGWYRQAPGKEREFVAAINGGASTNYADSVKGRFTISRDNAKNTVYLQMNSLKPEDTAVYYCAAVAYPLYYWGQGTQVTVSS

SEQ ID NO: 28800 - protein, 118 aa, Artificial Sequence
  Chemically Synthesized
QVQLQESGGGLVQAGGSLRLSCAASGSISSASYMGWYRQAPGKEREFVAGISDGASTNYADSVKGRFTISRDNAKNTVYLQMNSLKPEDTAVYYCAAVQYDRRYFYYWGQGTQVTVSS

SEQ ID NO: 28801 - protein, 118 aa, Artificial Sequence
  Chemically Synthesized
QVQLQESGGGLVQAGGSLRLSCAASGSISTHNIMGWYRQAPGKEREFVASITAGGSTNYADSVKGRFTISRDNAKNTVYLQMNSLKPEDTAVYYCAAYIWSFGHHYYWGQGTQVTVSS

SEQ ID NO: 28802 - protein, 118 aa, Artificial Sequence
  Chemically Synthesized
QVQLQESGGGLVQAGGSLRLSCAASGTIFYTYVMGWYRQAPGKEREFVAAIDVGGNTNYADSVKGRFTISRDNAKNTVYLQMNSLKPEDTAVYYCAAVYYATRYHYYWGQGTQVTVSS

SEQ ID NO: 28803 - protein, 118 aa, Artificial Sequence
  Chemically Synthesized
QVQLQESGGGLVQAGGSLRLSCAASGNISVDYSMGWYRQAPGKEREFVAAIANGTTTNYADSVKGRFTISRDNAKNTVYLQMNSLKPEDTAVYYCAAVYYDQQYFWYWGQGTQVTVSS

SEQ ID NO: 28804 - protein, 122 aa, Artificial Sequence
  Chemically Synthesized
QVQLQESGGGLVQAGGSLRLSCAASGSIFSFVPMGWYRQAPGKERELVATIDAGGSTYYADSVKGRFTISRDNAKNTVYLQMNSLKPEDTAVYYCAVYTQNIQISQYDHSYWGQGTQVTVSS

SEQ ID NO: 28805 - protein, 118 aa, Artificial Sequence
  Chemically Synthesized
QVQLQESGGGLVQAGGSLRLSCAASGNISSRPYMGWYRQAPGKERELVASIDTGGNTNYADSVKGRFTISRDNAKNTVYLQMNSLKPEDTAVYYCAVVVYGAGWYGYWGQGTQVTVSS

SEQ ID NO: 28806 - protein, 126 aa, Artificial Sequence
  Chemically Synthesized
QVQLQESGGGLVQAGGSLRLSCAASGSISTADGMGWYRQAPGKEREFVAAISVGSITYYADSVKGRFTISRDNAKNTVYLQMNSLKPEDTAVYYCAAHARPESSPDWVEAYPYAYWGQGTQVTVSS

SEQ ID NO: 28807 - protein, 122 aa, Artificial Sequence
  Chemically Synthesized
QVQLQESGGGLVQAGGSLRLSCAASGYISSGGNMGWYRQAPGKERELVASISDGTSTYYADSVKGRFTISRDNAKNTVYLQMNSLKPEDTAVYYCAVYYTPYSDYVPPYTYWGQGTQVTVSS

SEQ ID NO: 28808 - protein, 119 aa, Artificial Sequence
  Chemically Synthesized
QVQLQESGGGLVQAGGSLRLSCAASGNIFGRYYMGWYRQAPGKEREFVASINSGTTTNYADSVKGRFTISRDNAKNTVYLQMNSLKPEDTAVYYCAALLYVDTHYHYYWGQGTQVTVSS

SEQ ID NO: 28809 - protein, 118 aa, Artificial Sequence
  Chemically Synthesized
QVQLQESGGGLVQAGGSLRLSCAASGNIFRYDEMGWYRQAPGKEREFVAAITTGANTYYADSVKGRFTISRDNAKNTVYLQMNSLKPEDTAVYYCAVGYATPRDHIYWGQGTQVTVSS

SEQ ID NO: 28810 - protein, 125 aa, Artificial Sequence
  Chemically Synthesized
QVQLQESGGGLVQAGGSLRLSCAASGYISIGGYMGWYRQAPGKERELVAAIGGGSSTYYADSVKGRFTISRDNAKNTVYLQMNSLKPEDTAVYYCAAYVEKSYAQQQYDAIFGYWGQGTQVTVSS

SEQ ID NO: 28811 - protein, 116 aa, Artificial Sequence
  Chemically Synthesized
QVQLQESGGGLVQAGGSLRLSCAASGSISGYQYMGWYRQAPGKERELVASIAFGTNTYYADSVKGRFTISRDNAKNTVYLQMNSLKPEDTAVYYCAVGYDIAYEYWGQGTQVTVSS

SEQ ID NO: 28812 - protein, 119 aa, Artificial Sequence
  Chemically Synthesized
QVQLQESGGGLVQAGGSLRLSCAASGYISYYWLMGWYRQAPGKEREFVAGINYGTTTNYADSVKGRFTISRDNAKNTVYLQMNSLKPEDTAVYYCAALGGGGGSYYYYWGQGTQVTVSS

SEQ ID NO: 28813 - protein, 119 aa, Artificial Sequence
  Chemically Synthesized
QVQLQESGGGLVQAGGSLRLSCAASGTISLMGWYRQAPGKEREFVAGIAQGTITNYADSVKGRFTISRDNAKNTVYLQMNSLKPEDTAVYYCAVPYYDTGYAVPLHVYWGQGTQVTVSS

SEQ ID NO: 28814 - protein, 122 aa, Artificial Sequence
  Chemically Synthesized
QVQLQESGGGLVQAGGSLRLSCAASGYDDMGWYRQAPGKERELVAAIDGGGNTYYADSVKGRFTISRDNAKNTVYLQMNSLKPEDTAVYYCAAYRYVASDQTPLVSDYYAYWGQGTQVTVSS

SEQ ID NO: 28815 - protein, 115 aa, Artificial Sequence
  Chemically Synthesized
QVQLQESGGGLVQAGGSLRLSCAASGYIFDVLDMGWYRQAPGKERELVASIGRGGTTYADSVKGRFTISRDNAKNTVYLQMNSLKPEDTAVYYCAVPIVFTPFYWGQGTQVTVSS

SEQ ID NO: 28816 - protein, 118 aa, Artificial Sequence
  Chemically Synthesized
QVQLQESGGGLVQAGGSLRLSCAASGNISSQPIMGWYRQAPGKEREFVAGIDPGSNTNYADSVKGRFTISRDNAKNTVYLQMNSLKPEDTAVYYCAALYNDRQFHAYWGQGTQVTVSS

SEQ ID NO: 28817 - protein, 122 aa, Artificial Sequence
  Chemically Synthesized
QVQLQESGGGLVQAGGSLRLSCAASGSISDRALMGWYRQAPGKERELVAAITDGSNTYYADSVKGRFTISRDNAKNTVYLQMNSLKPEDTAVYYCAAQDDNEEYYYFYYLYWGQGTQVTVSS

SEQ ID NO: 28818 - protein, 117 aa, Artificial Sequence
  Chemically Synthesized
QVQLQESGGGLVQAGGSLRLSCAASGNISKDPVMGWYRQAPGKEREFVAGIAIGGNTNYADSVKGRFTISRDNAKNTVYLQMNSLKPEDTAVYYCAVLTYHDRHWYWGQGTQVTVSS

SEQ ID NO: 28819 - protein, 122 aa, Artificial Sequence
  Chemically Synthesized
QVQLQESGGGLVQAGGSLRLSCAASGTISYGPYMGWYRQAPGKEREFVASISPGANTNYADSVKGRFTISRDNAKNTVYLQMNSLKPEDTAVYYCAAVLVNRGRPSYRHYYWGQGTQVTVSS

SEQ ID NO: 28820 - protein, 122 aa, Artificial Sequence
  Chemically Synthesized
QVQLQESGGGLVQAGGSLRLSCAASGYIFRQQYMGWYRQAPGKERELVAGITRGANTYYADSVKGRFTISRDNAKNTVYLQMNSLKPEDTAVYYCAVFNARLGYHVGRFRYWGQGTQVTVSS

SEQ ID NO: 28821 - protein, 122 aa, Artificial Sequence
  Chemically Synthesized
QVQLQESGGGLVQAGGSLRLSCAASGTISRHLLMGWYRQAPGKEREFVAGIAAGSITNYADSVKGRFTISRDNAKNTVYLQMNSLKPEDTAVYYCAAVTSSNRDYGVRHWYWGQGTQVTVSS

SEQ ID NO: 28822 - protein, 118 aa, Artificial Sequence
  Chemically Synthesized
QVQLQESGGGLVQAGGSLRLSCAASGNIFNYYRMGWYRQAPGKEREFVAGIDYGSSTNYADSVKGRFTISRDNAKNTVYLQMNSLKPEDTAVYYCAAITRLGPYLGYWGQGTQVTVSS

SEQ ID NO: 28823 - protein, 118 aa, Artificial Sequence
  Chemically Synthesized
QVQLQESGGGLVQAGGSLRLSCAASGTISVIFYMGWYRQAPGKEREFVATISYGASTNYADSVKGRFTISRDNAKNTVYLQMNSLKPEDTAVYYCAASGDHLYSFRYWGQGTQVTVSS

SEQ ID NO: 28824 - protein, 118 aa, Artificial Sequence
  Chemically Synthesized
QVQLQESGGGLVQAGGSLRLSCAASGNIFQRYAMGWYRQAPGKEREFVAAIAYGGSTNYADSVKGRFTISRDNAKNTVYLQMNSLKPEDTAVYYCAAVGYDRAYFYYWGQGTQVTVSS

SEQ ID NO: 28825 - protein, 118 aa, Artificial Sequence
  Chemically Synthesized
QVQLQESGGGLVQAGGSLRLSCAASGSISYYADMGWYRQAPGKERELVATITGGGNTYYADSVKGRFTISRDNAKNTVYLQMNSLKPEDTAVYYCAVNDVETTAFPYWGQGTQVTVSS

SEQ ID NO: 28826 - protein, 118 aa, Artificial Sequence
  Chemically Synthesized
QVQLQESGGGLVQAGGSLRLSCAASGSISGAYFMGWYRQAPGKERELVAAISVGTTTNYADSVKGRFTISRDNAKNTVYLQMNSLKPEDTAVYYCAVVDARSGRLGYWGQGTQVTVSS

SEQ ID NO: 28827 - protein, 118 aa, Artificial Sequence
  Chemically Synthesized
QVQLQESGGGLVQAGGSLRLSCAASGTIFYAGLMGWYRQAPGKEREFVAAIDDGGTTNYADSVKGRFTISRDNAKNTVYLQMNSLKPEDTAVYYCAANYRRDPRYYYWGQGTQVTVSS

SEQ ID NO: 28828 - protein, 117 aa, Artificial Sequence
  Chemically Synthesized
QVQLQESGGGLVQAGGSLRLSCAASGNIFADYVMGWYRQAPGKERELVAAIDPGANTNYADSVKGRFTISRDNAKNTVYLQMNSLKPEDTAVYYCAAVRRRDRQYYWGQGTQVTVSS

SEQ ID NO: 28829 - protein, 113 aa, Artificial Sequence
  Chemically Synthesized
QVQLQESGGGLVQAGGSLRLSCAASGTISSRAPMGWYRQAPGKERELVASIGDGGITYYADSVKGRFTISRDNAKNTVYLQMNSLKPEDTAVYYCAARDYSYWGQGTQVTVSS

SEQ ID NO: 28830 - protein, 117 aa, Artificial Sequence
  Chemically Synthesized
QVQLQESGGGLVQAGGSLRLSCAASGTISYFAVMGWYRQAPGKEREFVASINAGSTTNYADSVKGRFTISRDNAKNTVYLQMNSLKPEDTAVYYCAVVTRSPYHGYWGQGTQVTVSS

SEQ ID NO: 28831 - protein, 126 aa, Artificial Sequence
  Chemically Synthesized
QVQLQESGGGLVQAGGSLRLSCAASGSISHERRMGWYRQAPGKERELVAGINGGASTYYADSVKGRFTISRDNAKNTVYLQMNSLKPEDTAVYYCAAKRGPNFYFPIWDRIAHWYWGQGTQVTVSS

SEQ ID NO: 28832 - protein, 118 aa, Artificial Sequence
  Chemically Synthesized
QVQLQESGGGLVQAGGSLRLSCAASGTISNLYSMGWYRQAPGKEREFVAAISQGGNTNYADSVKGRFTISRDNAKNTVYLQMNSLKPEDTAVYYCAVLYRDSSWYGYWGQGTQVTVSS

SEQ ID NO: 28833 - protein, 126 aa, Artificial Sequence
  Chemically Synthesized
QVQLQESGGGLVQAGGSLRLSCAASGSIFYDADMGWYRQAPGKERELVAAINVGGTTNYADSVKGRFTISRDNAKNTVYLQMNSLKPEDTAVYYCAVLYNDDYYDIISNTWQHDYWGQGTQVTVSS

SEQ ID NO: 28834 - protein, 118 aa, Artificial Sequence
  Chemically Synthesized
QVQLQESGGGLVQAGGSLRLSCAASGTISGGGTMGWYRQAPGKEREFVASINGGTNTNYADSVKGRFTISRDNAKNTVYLQMNSLKPEDTAVYYCAALTRRGYWHSYWGQGTQVTVSS

SEQ ID NO: 28835 - protein, 115 aa, Artificial Sequence
  Chemically Synthesized
QVQLQESGGGLVQAGGSLRLSCAASGTISGPLTMGWYRQAPGKEREFVASISHGTNTYYADSVKGRFTISRDNAKNTVYLQMNSLKPEDTAVYYCAAVDYPYYYWGQGTQVTVSS

SEQ ID NO: 28836 - protein, 117 aa, Artificial Sequence
  Chemically Synthesized
QVQLQESGGGLVQAGGSLRLSCAASGNIFYYINMGWYRQAPGKERELVAAITAGATTNYADSVKGRFTISRDNAKNTVYLQMNSLKPEDTAVYYCAAELLTNVFMYWGQGTQVTVSS

SEQ ID NO: 28837 - protein, 116 aa, Artificial Sequence
  Chemically Synthesized
QVQLQESGGGLVQAGGSLRLSCAASGNIFPLRAMGWYRQAPGKERELVAAIAYGGNTNYADSVKGRFTISRDNAKNTVYLQMNSLKPEDTAVYYCAVPAVFNHDYWGQGTQVTVSS

SEQ ID NO: 28838 - protein, 118 aa, Artificial Sequence
  Chemically Synthesized
QVQLQESGGGLVQAGGSLRLSCAASGSISFLFPMGWYRQAPGKEREFVAGIDGGATTNYADSVKGRFTISRDNAKNTVYLQMNSLKPEDTAVYYCAVYGWIYTLLCYWGQGTQVTVSS

SEQ ID NO: 28839 - protein, 122 aa, Artificial Sequence
  Chemically Synthesized
QVQLQESGGGLVQAGGSLRLSCAASGSISSVPTMGWYRQAPGKEREFVATITVGTNTNYADSVKGRFTISRDNAKNTVYLQMNSLKPEDTAVYYCAVDLFAWYGRYILLSYWGQGTQVTVSS

SEQ ID NO: 28840 - protein, 125 aa, Artificial Sequence
  Chemically Synthesized
QVQLQESGGGLVQAGGSLRLSCAASGTIFGSYMGWYRQAPGKEREFVATIGDGTNTNYADSVKGRFTISRDNAKNTVYLQMNSLKPEDTAVYYCAVDYLDLSYLGGWYSTDLIYWGQGTQVTVSS

SEQ ID NO: 28841 - protein, 118 aa, Artificial Sequence
  Chemically Synthesized
QVQLQESGGGLVQAGGSLRLSCAASGSISTYSGMGWYRQAPGKEREFVAGIATGGITNYADSVKGRFTISRDNAKNTVYLQMNSLKPEDTAVYYCAVIAYNGGWFSYWGQGTQVTVSS

SEQ ID NO: 28842 - protein, 122 aa, Artificial Sequence
  Chemically Synthesized
QVQLQESGGGLVQAGGSLRLSCAASGSISYSLLMGWYRQAPGKEREFVAAINLGASTNYADSVKGRFTISRDNAKNTVYLQMNSLKPEDTAVYYCAAIRTNTERVPPYYGYWGQGTQVTVSS

SEQ ID NO: 28843 - protein, 118 aa, Artificial Sequence
  Chemically Synthesized
QVQLQESGGGLVQAGGSLRLSCAASGNIFTRYTMGWYRQAPGKEREFVAAIAQGGTTNYADSVKGRFTISRDNAKNTVYLQMNSLKPEDTAVYYCAAVYRRYQTHYYWGQGTQVTVSS

SEQ ID NO: 28844 - protein, 118 aa, Artificial Sequence
  Chemically Synthesized
QVQLQESGGGLVQAGGSLRLSCAASGTIFQRYTMGWYRQAPGKEREFVAGIAQGGSTYYADSVKGRFTISRDNAKNTVYLQMNSLKPEDTAVYYCAALWYDDNWHYYWGQGTQVTVSS

SEQ ID NO: 28845 - protein, 120 aa, Artificial Sequence
  Chemically Synthesized
QVQLQESGGGLVQAGGSLRLSCAASGYISDNFAMGWYRQAPGKERELVAAIGPGSTTYYADSVKGRFTISRDNAKNTVYLQMNSLKPEDTAVYYCAVALDVPPYYYLLYWGQGTQVTVSS

SEQ ID NO: 28846 - protein, 118 aa, Artificial Sequence
  Chemically Synthesized
QVQLQESGGGLVQAGGSLRLSCAASGSIFSYSVMGWYRQAPGKEREFVAAIGVGSNTNYADSVKGRFTISRDNAKNTVYLQMNSLKPEDTAVYYCAAIDLQTKSHYYWGQGTQVTVSS

SEQ ID NO: 28847 - protein, 117 aa, Artificial Sequence
  Chemically Synthesized
QVQLQESGGGLVQAGGSLRLSCAASGSISPLFRMGWYRQAPGKERELVATINIVVLPYADSVKGRFTISRDNAKNTVYLQMNSLKPEDTAVYYCAVSSDITESYDYWGQGTQVTVSS

SEQ ID NO: 28848 - protein, 118 aa, Artificial Sequence
  Chemically Synthesized
QVQLQESGGGLVQAGGSLRLSCAASGNISYDRRMGWYRQAPGKEREFVAGIATGTTTNYADSVKGRFTISRDNAKNTVYLQMNSLKPEDTAVYYCAAVWYQRRWLAYWGQGTQVTVSS

SEQ ID NO: 28849 - protein, 117 aa, Artificial Sequence
  Chemically Synthesized
QVQLQESGGGLVQAGGSLRLSCAASGNILTLVMGWYRQAPGKERELVASINVGGNTNYADSVKGRFTISRDNAKNTVYLQMNSLKPEDTAVYYCAVLPYWDYDYNYWGQGTQVTVSS

SEQ ID NO: 28850 - protein, 118 aa, Artificial Sequence
  Chemically Synthesized
QVQLQESGGGLVQAGGSLRLSCAASGTISDLFIMGWYRQAPGKEREFVAAIGIGSNTNYADSVKGRFTISRDNAKNTVYLQMNSLKPEDTAVYYCAALLTTAGVHYYWGQGTQVTVSS

SEQ ID NO: 28851 - protein, 118 aa, Artificial Sequence
  Chemically Synthesized
QVQLQESGGGLVQAGGSLRLSCAASGNIFAHDIMGWYRQAPGKEREFVAGINVGGSTNYADSVKGRFTISRDNAKNTVYLQMNSLKPEDTAVYYCAVLVYSTSWLGYWGQGTQVTVSS

SEQ ID NO: 28852 - protein, 126 aa, Artificial Sequence
  Chemically Synthesized
QVQLQESGGGLVQAGGSLRLSCAASGNISVPDYMGWYRQAPGKEREFVATINRGGSTNYADSVKGRFTISRDNAKNTVYLQMNSLKPEDTAVYYCAVLYRVTDDKSWSIVQFLHYWGQGTQVTVSS

SEQ ID NO: 28853 - protein, 122 aa, Artificial Sequence
  Chemically Synthesized
QVQLQESGGGLVQAGGSLRLSCAASGNIFWDGRMGWYRQAPGKERELVAGINYGTITYYADSVKGRFTISRDNAKNTVYLQMNSLKPEDTAVYYCAVQQSTSYAYYYLFEYWGQGTQVTVSS

SEQ ID NO: 28854 - protein, 122 aa, Artificial Sequence
  Chemically Synthesized
QVQLQESGGGLVQAGGSLRLSCAASGTISAYSSMGWYRQAPGKEREFVAGISVGGSTNYADSVKGRFTISRDNAKNTVYLQMNSLKPEDTAVYYCAALRYDFSGLKRWLGYWGQGTQVTVSS

SEQ ID NO: 28855 - protein, 126 aa, Artificial Sequence
  Chemically Synthesized
QVQLQESGGGLVQAGGSLRLSCAASGTISSTAYMGWYRQAPGKERELVAAIAAGTSTYYADSVKGRFTISRDNAKNTVYLQMNSLKPEDTAVYYCAVDVLASTRDRNDPSAWYGYWGQGTQVTVSS

SEQ ID NO: 28856 - protein, 118 aa, Artificial Sequence
  Chemically Synthesized
QVQLQESGGGLVQAGGSLRLSCAASGTISVYLVMGWYRQAPGKEREFVASINEGATTNYADSVKGRFTISRDNAKNTVYLQMNSLKPEDTAVYYCAAVYHDKYYHYYWGQGTQVTVSS

SEQ ID NO: 28857 - protein, 122 aa, Artificial Sequence
  Chemically Synthesized
QVQLQESGGGLVQAGGSLRLSCAASGNISAGSYMGWYRQAPGKEREFVAAIDYGSNTNYADSVKGRFTISRDNAKNTVYLQMNSLKPEDTAVYYCAVIYHVGIGSSRRHWYWGQGTQVTVSS

SEQ ID NO: 28858 - protein, 122 aa, Artificial Sequence
  Chemically Synthesized
QVQLQESGGGLVQAGGSLRLSCAASGTISDVRVMGWYRQAPGKEREFVAGIGYGGSTNYADSVKGRFTISRDNAKNTVYLQMNSLKPEDTAVYYCAVIYTTPLNGKRRYYYWGQGTQVTVSS

SEQ ID NO: 28859 - protein, 117 aa, Artificial Sequence
  Chemically Synthesized
QVQLQESGGGLVQAGGSLRLSCAASGTISTRRVMGWYRQAPGKEREFVAAINNGSITNYADSVKGRFTISRDNAKNTVYLQMNSLKPEDTAVYYCAVERSLLVTIYWGQGTQVTVSS

SEQ ID NO: 28860 - protein, 118 aa, Artificial Sequence
  Chemically Synthesized
QVQLQESGGGLVQAGGSLRLSCAASGNISDAGGMGWYRQAPGKEREFVAAIGPGASTNYADSVKGRFTISRDNAKNTVYLQMNSLKPEDTAVYYCAVLYGGRRYLYYWGQGTQVTVSS

SEQ ID NO: 28861 - protein, 118 aa, Artificial Sequence
  Chemically Synthesized
QVQLQESGGGLVQAGGSLRLSCAASGYISFDVYMGWYRQAPGKEREFVATIAYGGNTYYADSVKGRFTISRDNAKNTVYLQMNSLKPEDTAVYYCAVGVSYRWGHIYWGQGTQVTVSS

SEQ ID NO: 28862 - protein, 122 aa, Artificial Sequence
  Chemically Synthesized
QVQLQESGGGLVQAGGSLRLSCAASGTISRPGPMGWYRQAPGKEREFVAGIAQGGSTNYADSVKGRFTISRDNAKNTVYLQMNSLKPEDTAVYYCAAYWRKERGNTTYHYYWGQGTQVTVSS

SEQ ID NO: 28863 - protein, 126 aa, Artificial Sequence
  Chemically Synthesized
QVQLQESGGGLVQAGGSLRLSCAASGNIFDILLMGWYRQAPGKEREFVAGINYGSTTNYADSVKGRFTISRDNAKNTVYLQMNSLKPEDTAVYYCAVDYDELDVYYYVNYDLLDYWGQGTQVTVSS

SEQ ID NO: 28864 - protein, 118 aa, Artificial Sequence
  Chemically Synthesized
QVQLQESGGGLVQAGGSLRLSCAASGSISGRLTMGWYRQAPGKEREFVATIAYGSNTYYADSVKGRFTISRDNAKNTVYLQMNSLKPEDTAVYYCAALQYSRTYYYYWGQGTQVTVSS

SEQ ID NO: 28865 - protein, 118 aa, Artificial Sequence
  Chemically Synthesized
QVQLQESGGGLVQAGGSLRLSCAASGTISSNTPMGWYRQAPGKERELVAAIADGATTNYADSVKGRFTISRDNAKNTVYLQMNSLKPEDTAVYYCAAAGLYLNNLRYWGQGTQVTVSS

SEQ ID NO: 28866 - protein, 119 aa, Artificial Sequence
  Chemically Synthesized
QVQLQESGGGLVQAGGSLRLSCAASGNISHVLYMGWYRQAPGKEREFVASIDGGSITNYADSVKGRFTISRDNAKNTVYLQMNSLKPEDTAVYYCAAIQIYNGRAYGYWGQGTQVTVSS

SEQ ID NO: 28867 - protein, 126 aa, Artificial Sequence
  Chemically Synthesized
QVQLQESGGGLVQAGGSLRLSCAASGNISAYVYMGWYRQAPGKERELVASIGLGTSTYYADSVKGRFTISRDNAKNTVYLQMNSLKPEDTAVYYCAVVRRDRRYVDDWYDQGHSYWGQGTQVTVSS

SEQ ID NO: 28868 - protein, 122 aa, Artificial Sequence
  Chemically Synthesized
QVQLQESGGGLVQAGGSLRLSCAASGYISYYIRMGWYRQAPGKEREFVAAISNGSNTYYADSVKGRFTISRDNAKNTVYLQMNSLKPEDTAVYYCAVYVDERTTYTGTLDYWGQGTQVTVSS

SEQ ID NO: 28869 - protein, 118 aa, Artificial Sequence
  Chemically Synthesized
QVQLQESGGGLVQAGGSLRLSCAASGTIFYTYRMGWYRQAPGKEREFVASIDEGSNTNYADSVKGRFTISRDNAKNTVYLQMNSLKPEDTAVYYCAAYYHTTYHHYYWGQGTQVTVSS

SEQ ID NO: 28870 - protein, 122 aa, Artificial Sequence
  Chemically Synthesized
QVQLQESGGGLVQAGGSLRLSCAASGYIFLYHGMGWYRQAPGKEREFVAAINPGGSTNYADSVKGRFTISRDNAKNTVYLQMNSLKPEDTAVYYCAVVVSLEGLRRKYHYYWGQGTQVTVSS

SEQ ID NO: 28871 - protein, 118 aa, Artificial Sequence
  Chemically Synthesized
QVQLQESGGGLVQAGGSLRLSCAASGNISSQITMGWYRQAPGKEREFVASITQGGTTNYADSVKGRFTISRDNAKNTVYLQMNSLKPEDTAVYYCAALTRRTPRHAYWGQGTQVTVSS

SEQ ID NO: 28872 - protein, 126 aa, Artificial Sequence
  Chemically Synthesized
QVQLQESGGGLVQAGGSLRLSCAASGNISYPDYMGWYRQAPGKERELVATITVGGSTYYADSVKGRFTISRDNAKNTVYLQMNSLKPEDTAVYYCAAYTGAHYINWFYQHISHTYWGQGTQVTVSS

SEQ ID NO: 28873 - protein, 126 aa, Artificial Sequence
  Chemically Synthesized
QVQLQESGGGLVQAGGSLRLSCAASGSISYSTYMGWYRQAPGKERELVAAIGHGGITNYADSVKGRFTISRDNAKNTVYLQMNSLKPEDTAVYYCAVYPYYSYWFPPRHYGRYDYWGQGTQVTVSS

SEQ ID NO: 28874 - protein, 117 aa, Artificial Sequence
  Chemically Synthesized
QVQLQESGGGLVQAGGSLRLSCAASGTIFTLRMGWYRQAPGKERELVAAIDRGGITNYADSVKGRFTISRDNAKNTVYLQMNSLKPEDTAVYYCAADYALGDPYGYWGQGTQVTVSS

SEQ ID NO: 28875 - protein, 122 aa, Artificial Sequence
  Chemically Synthesized
QVQLQESGGGLVQAGGSLRLSCAASGYISSVHYMGWYRQAPGKERELVAAIAWGTNTNYADSVKGRFTISRDNAKNTVYLQMNSLKPEDTAVYYCAAWRRWRNEVESKFDYWGQGTQVTVSS

SEQ ID NO: 28876 - protein, 118 aa, Artificial Sequence
  Chemically Synthesized
QVQLQESGGGLVQAGGSLRLSCAASGSIFRPGGMGWYRQAPGKEREFVASIGAGTNTNYADSVKGRFTISRDNAKNTVYLQMNSLKPEDTAVYYCAVLYVYDTYHFYWGQGTQVTVSS

SEQ ID NO: 28877 - protein, 122 aa, Artificial Sequence
  Chemically Synthesized
QVQLQESGGGLVQAGGSLRLSCAASGTISGDIYMGWYRQAPGKEREFVAAITAGTSTNYADSVKGRFTISRDNAKNTVYLQMNSLKPEDTAVYYCAAVQVARGRRWAYLGYWGQGTQVTVSS

SEQ ID NO: 28878 - protein, 118 aa, Artificial Sequence
  Chemically Synthesized
QVQLQESGGGLVQAGGSLRLSCAASGTIFSPSAMGWYRQAPGKEREFVAGISQGASTYYADSVKGRFTISRDNAKNTVYLQMNSLKPEDTAVYYCAAIVVRDGYHAYWGQGTQVTVSS

SEQ ID NO: 28879 - protein, 118 aa, Artificial Sequence
  Chemically Synthesized
QVQLQESGGGLVQAGGSLRLSCAASGTISRRFHMGWYRQAPGKEREFVASINGGGITNYADSVKGRFTISRDNAKNTVYLQMNSLKPEDTAVYYCAALYAHPFYHYYWGQGTQVTVSS

SEQ ID NO: 28880 - protein, 120 aa, Artificial Sequence
  Chemically Synthesized
QVQLQESGGGLVQAGGSLRLSCAASGTIFTTTMGWYRQAPGKERELVATISYGGSTNYADSVKGRFTISRDNAKNTVYLQMNSLKPEDTAVYYCAADWRVYTTVVEYHYWGQGTQVTVSS

SEQ ID NO: 28881 - protein, 126 aa, Artificial Sequence
  Chemically Synthesized
QVQLQESGGGLVQAGGSLRLSCAASGNISPWLYMGWYRQAPGKEREFVATISLGSITNYADSVKGRFTISRDNAKNTVYLQMNSLKPEDTAVYYCAAHYNGEQPFYSLNYYVHRYWGQGTQVTVSS

SEQ ID NO: 28882 - protein, 118 aa, Artificial Sequence
  Chemically Synthesized
QVQLQESGGGLVQAGGSLRLSCAASGSISFYRQMGWYRQAPGKEREFVAAITSGGTTNYADSVKGRFTISRDNAKNTVYLQMNSLKPEDTAVYYCAVYLSYVGGFSYWGQGTQVTVSS

SEQ ID NO: 28883 - protein, 116 aa, Artificial Sequence
  Chemically Synthesized
QVQLQESGGGLVQAGGSLRLSCAASGTIFWVMGWYRQAPGKERELVATITYGATTYYADSVKGRFTISRDNAKNTVYLQMNSLKPEDTAVYYCAANPDQDSILAYWGQGTQVTVSS

SEQ ID NO: 28884 - protein, 118 aa, Artificial Sequence
  Chemically Synthesized
QVQLQESGGGLVQAGGSLRLSCAASGTISVRAYMGWYRQAPGKEREFVAAIAPGSITNYADSVKGRFTISRDNAKNTVYLQMNSLKPEDTAVYYCAAADYRQYYHYYWGQGTQVTVSS

SEQ ID NO: 28885 - protein, 118 aa, Artificial Sequence
  Chemically Synthesized
QVQLQESGGGLVQAGGSLRLSCAASGYISFGQAMGWYRQAPGKERELVATIAYGSTTYYADSVKGRFTISRDNAKNTVYLQMNSLKPEDTAVYYCAVSLGGDSTFAYWGQGTQVTVSS

SEQ ID NO: 28886 - protein, 118 aa, Artificial Sequence
  Chemically Synthesized
QVQLQESGGGLVQAGGSLRLSCAASGTIFADYYMGWYRQAPGKEREFVAAIDVGANTNYADSVKGRFTISRDNAKNTVYLQMNSLKPEDTAVYYCAALRYAQFTYYYWGQGTQVTVSS

SEQ ID NO: 28887 - protein, 122 aa, Artificial Sequence
  Chemically Synthesized
QVQLQESGGGLVQAGGSLRLSCAASGSIFTGGTMGWYRQAPGKEREFVASIAIGSNTNYADSVKGRFTISRDNAKNTVYLQMNSLKPEDTAVYYCAAIELPNVYDTKYHYYWGQGTQVTVSS

SEQ ID NO: 28888 - protein, 118 aa, Artificial Sequence
  Chemically Synthesized
QVQLQESGGGLVQAGGSLRLSCAASGNISPTWVMGWYRQAPGKEREFVAGIGPGASTNYADSVKGRFTISRDNAKNTVYLQMNSLKPEDTAVYYCAALFTNGSRHYYWGQGTQVTVSS

SEQ ID NO: 28889 - protein, 118 aa, Artificial Sequence
  Chemically Synthesized
QVQLQESGGGLVQAGGSLRLSCAASGYISPRGPMGWYRQAPGKEREFVATIAVGTNTNYADSVKGRFTISRDNAKNTVYLQMNSLKPEDTAVYYCAALLDYKYGHYYWGQGTQVTVSS

SEQ ID NO: 28890 - protein, 118 aa, Artificial Sequence
  Chemically Synthesized
QVQLQESGGGLVQAGGSLRLSCAASGYISDEYIMGWYRQAPGKERELVAGITYGTSTYYADSVKGRFTISRDNAKNTVYLQMNSLKPEDTAVYYCAAVIRWQRWLHYWGQGTQVTVSS

SEQ ID NO: 28891 - protein, 126 aa, Artificial Sequence
  Chemically Synthesized
QVQLQESGGGLVQAGGSLRLSCAASGYISSRRSMGWYRQAPGKEREFVAGIAYGATTYYADSVKGRFTISRDNAKNTVYLQMNSLKPEDTAVYYCAVPTRRGYGADQRYGWVHHYWGQGTQVTVSS

SEQ ID NO: 28892 - protein, 121 aa, Artificial Sequence
  Chemically Synthesized
QVQLQESGGGLVQAGGSLRLSCAASGSISDLYMGWYRQAPGKEREFVATIGNGTTTNYADSVKGRFTISRDNAKNTVYLQMNSLKPEDTAVYYCAADDGIYWYEGIDYEYWGQGTQVTVSS

SEQ ID NO: 28893 - protein, 121 aa, Artificial Sequence
  Chemically Synthesized
QVQLQESGGGLVQAGGSLRLSCAASGTISGDYVMGWYRQAPGKEREFVAGINGGTTNYADSVKGRFTISRDNAKNTVYLQMNSLKPEDTAVYYCAAIYRDYAYPVTYFYYWGQGTQVTVSS

SEQ ID NO: 28894 - protein, 118 aa, Artificial Sequence
  Chemically Synthesized
QVQLQESGGGLVQAGGSLRLSCAASGYISWYGYMGWYRQAPGKEREFVAAIGSGANTNYADSVKGRFTISRDNAKNTVYLQMNSLKPEDTAVYYCAAVVYTSRYHGYWGQGTQVTVSS

SEQ ID NO: 28895 - protein, 118 aa, Artificial Sequence
  Chemically Synthesized
QVQLQESGGGLVQAGGSLRLSCAASGSISAASWMGWYRQAPGKEREFVATIGAGGITYYADSVKGRFTISRDNAKNTVYLQMNSLKPEDTAVYYCAVARHLGSDHVYWGQGTQVTVSS

SEQ ID NO: 28896 - protein, 118 aa, Artificial Sequence
  Chemically Synthesized
QVQLQESGGGLVQAGGSLRLSCAASGYISHWEDMGWYRQAPGKEREFVAGIGRGSITNYADSVKGRFTISRDNAKNTVYLQMNSLKPEDTAVYYCAAVGTRTPYHYYWGQGTQVTVSS

SEQ ID NO: 28897 - protein, 120 aa, Artificial Sequence
  Chemically Synthesized
QVQLQESGGGLVQAGGSLRLSCAASGYISTLANMGWYRQAPGKEREFVAAISLGGSTNYADSVKGRFTISRDNAKNTVYLQMNSLKPEDTAVYYCAVVYYREKGGWYNYWGQGTQVTVSS

SEQ ID NO: 28898 - protein, 122 aa, Artificial Sequence
  Chemically Synthesized
QVQLQESGGGLVQAGGSLRLSCAASGYIFVLLYMGWYRQAPGKERELVAAIGSGATTYYADSVKGRFTISRDNAKNTVYLQMNSLKPEDTAVYYCAAAYWYDLLTITYHSYWGQGTQVTVSS

SEQ ID NO: 28899 - protein, 122 aa, Artificial Sequence
  Chemically Synthesized
QVQLQESGGGLVQAGGSLRLSCAASGTISVFTLMGWYRQAPGKEREFVAGIGIGASTNYADSVKGRFTISRDNAKNTVYLQMNSLKPEDTAVYYCAAVQDRVGTYARYHGYWGQGTQVTVSS

SEQ ID NO: 28900 - protein, 120 aa, Artificial Sequence
  Chemically Synthesized
QVQLQESGGGLVQAGGSLRLSCAASGTISGRMGWYRQAPGKERELVAAISLGAITYYADSVKGRFTISRDNAKNTVYLQMNSLKPEDTAVYYCAAITFNQRRDDRPLGYWGQGTQVTVSS

SEQ ID NO: 28901 - protein, 118 aa, Artificial Sequence
  Chemically Synthesized
QVQLQESGGGLVQAGGSLRLSCAASGSISYYTSMGWYRQAPGKEREFVAAIGRGGITNYADSVKGRFTISRDNAKNTVYLQMNSLKPEDTAVYYCAAVYTTPSIHGYWGQGTQVTVSS

SEQ ID NO: 28902 - protein, 122 aa, Artificial Sequence
  Chemically Synthesized
QVQLQESGGGLVQAGGSLRLSCAASGNISLIRYMGWYRQAPGKERELVASIDQGSSTNYADSVKGRFTISRDNAKNTVYLQMNSLKPEDTAVYYCAVDWSQNYWTDLGHYYWGQGTQVTVSS

SEQ ID NO: 28903 - protein, 113 aa, Artificial Sequence
  Chemically Synthesized
QVQLQESGGGLVQAGGSLRLSCAASGTIFRYSSMGWYRQAPGKERELVAGIAGGTSTNYADSVKGRFTISRDNAKNTVYLQMNSLKPEDTAVYYCAERLHTYWGQGTQVTVSS

SEQ ID NO: 28904 - protein, 118 aa, Artificial Sequence
  Chemically Synthesized
QVQLQESGGGLVQAGGSLRLSCAASGSIFFLLSMGWYRQAPGKEREFVAGITLGTTTNYADSVKGRFTISRDNAKNTVYLQMNSLKPEDTAVYYCAARTAVPFLFQYWGQGTQVTVSS

SEQ ID NO: 28905 - protein, 121 aa, Artificial Sequence
  Chemically Synthesized
QVQLQESGGGLVQAGGSLRLSCAASGTISVDDVMGWYRQAPGKEREFVAGIGPGTTTNYADSVKGRFTISRDNAKNTVYLQMNSLKPEDTAVYYCAVRLDRERQYESGMYWGQGTQVTVSS

SEQ ID NO: 28906 - protein, 122 aa, Artificial Sequence
  Chemically Synthesized
QVQLQESGGGLVQAGGSLRLSCAASGTISRDDTMGWYRQAPGKERELVASIGAGANTNYADSVKGRFTISRDNAKNTVYLQMNSLKPEDTAVYYCAADGYTASNGHVAHGYWGQGTQVTVSS

SEQ ID NO: 28907 - protein, 126 aa, Artificial Sequence
  Chemically Synthesized
QVQLQESGGGLVQAGGSLRLSCAASGTISHWSVMGWYRQAPGKERELVASIAYGTTTNYADSVKGRFTISRDNAKNTVYLQMNSLKPEDTAVYYCAVYASTSVIYYIGTPGYHGYWGQGTQVTVSS

SEQ ID NO: 28908 - protein, 122 aa, Artificial Sequence
  Chemically Synthesized
QVQLQESGGGLVQAGGSLRLSCAASGTIFYGTTMGWYRQAPGKERELVAAIGTGTTTYYADSVKGRFTISRDNAKNTVYLQMNSLKPEDTAVYYCAVTTDFDNLYKFELGYWGQGTQVTVSS

SEQ ID NO: 28909 - protein, 126 aa, Artificial Sequence
  Chemically Synthesized
QVQLQESGGGLVQAGGSLRLSCAASGNIFGYTYMGWYRQAPGKEREFVATIGGGASTNYADSVKGRFTISRDNAKNTVYLQMNSLKPEDTAVYYCAARAASHYVIGRQWAPDLDYWGQGTQVTVSS

SEQ ID NO: 28910 - protein, 113 aa, Artificial Sequence
  Chemically Synthesized
QVQLQESGGGLVQAGGSLRLSCAASGSIFAKRRMGWYRQAPGKEREFVAAINAGGITYYADSVKGRFTISRDNAKNTVYLQMNSLKPEDTAVYYCARVRHDYWGQGTQVTVSS

SEQ ID NO: 28911 - protein, 117 aa, Artificial Sequence
  Chemically Synthesized
QVQLQESGGGLVQAGGSLRLSCAASGSIFGPGAMGWYRQAPGKEREFVASINRGSSTNYADSVKGRFTISRDNAKNTVYLQMNSLKPEDTAVYYCAVRYYYHRYGYWGQGTQVTVSS

SEQ ID NO: 28912 - protein, 121 aa, Artificial Sequence
  Chemically Synthesized
QVQLQESGGGLVQAGGSLRLSCAASGNISSNYFMGWYRQAPGKERELVAAIDRGTTTNYADSVKGRFTISRDNAKNTVYLQMNSLKPEDTAVYYCAAVYTSTLTLSTRFYWGQGTQVTVSS

SEQ ID NO: 28913 - protein, 122 aa, Artificial Sequence
  Chemically Synthesized
QVQLQESGGGLVQAGGSLRLSCAASGNIFDYHTMGWYRQAPGKERELVATISDGTSTNYADSVKGRFTISRDNAKNTVYLQMNSLKPEDTAVYYCAASYRVPDRESYNYSYWGQGTQVTVSS

SEQ ID NO: 28914 - protein, 126 aa, Artificial Sequence
  Chemically Synthesized
QVQLQESGGGLVQAGGSLRLSCAASGSIFYLTTMGWYRQAPGKEREFVAAINFGGNTNYADSVKGRFTISRDNAKNTVYLQMNSLKPEDTAVYYCAAPYYYVPFYYYVSDYYFHYWGQGTQVTVSS

SEQ ID NO: 28915 - protein, 118 aa, Artificial Sequence
  Chemically Synthesized
QVQLQESGGGLVQAGGSLRLSCAASGTISDSWAMGWYRQAPGKEREFVATIAYGGNTNYADSVKGRFTISRDNAKNTVYLQMNSLKPEDTAVYYCAVNTDEYAAFFYWGQGTQVTVSS

SEQ ID NO: 28916 - protein, 118 aa, Artificial Sequence
  Chemically Synthesized
QVQLQESGGGLVQAGGSLRLSCAASGTISHGPHMGWYRQAPGKERELVASINYGTSTYYADSVKGRFTISRDNAKNTVYLQMNSLKPEDTAVYYCAVLAANVRAHSYWGQGTQVTVSS

SEQ ID NO: 28917 - protein, 126 aa, Artificial Sequence
  Chemically Synthesized
QVQLQESGGGLVQAGGSLRLSCAASGNIFLYGIMGWYRQAPGKEREFVATIAVGSNTNYADSVKGRFTISRDNAKNTVYLQMNSLKPEDTAVYYCAAPLVYTYVYVSPAFDGHYYWGQGTQVTVSS

SEQ ID NO: 28918 - protein, 122 aa, Artificial Sequence
  Chemically Synthesized
QVQLQESGGGLVQAGGSLRLSCAASGYIFYPSYMGWYRQAPGKEREFVAAITPGGTTYYADSVKGRFTISRDNAKNTVYLQMNSLKPEDTAVYYCAVQYDYSAYTTRDFYYWGQGTQVTVSS

SEQ ID NO: 28919 - protein, 126 aa, Artificial Sequence
  Chemically Synthesized
QVQLQESGGGLVQAGGSLRLSCAASGSIFPARVMGWYRQAPGKERELVASIGSGTSTYYADSVKGRFTISRDNAKNTVYLQMNSLKPEDTAVYYCAAFGGGRFSSRELIATNHYYWGQGTQVTVSS

SEQ ID NO: 28920 - protein, 122 aa, Artificial Sequence
  Chemically Synthesized
QVQLQESGGGLVQAGGSLRLSCAASGNIFDIDIMGWYRQAPGKERELVASISEGANTYYADSVKGRFTISRDNAKNTVYLQMNSLKPEDTAVYYCAVLRQPTYIAYPLLGYWGQGTQVTVSS

SEQ ID NO: 28921 - protein, 122 aa, Artificial Sequence
  Chemically Synthesized
QVQLQESGGGLVQAGGSLRLSCAASGNISYYHTMGWYRQAPGKERELVASIGGGTSTYYADSVKGRFTISRDNAKNTVYLQMNSLKPEDTAVYYCAVGPYYLLVTSSDFRYWGQGTQVTVSS

SEQ ID NO: 28922 - protein, 122 aa, Artificial Sequence
  Chemically Synthesized
QVQLQESGGGLVQAGGSLRLSCAASGYISPSYAMGWYRQAPGKEREFVAAISYGAITNYADSVKGRFTISRDNAKNTVYLQMNSLKPEDTAVYYCAVRLDDGYTVDLTHPYWGQGTQVTVSS

SEQ ID NO: 28923 - protein, 121 aa, Artificial Sequence
  Chemically Synthesized
QVQLQESGGGLVQAGGSLRLSCAASGTIFQFNYMGWYRQAPGKEREFVATIADGANTYYADSVKGRFTISRDNAKNTVYLQMNSLKPEDTAVYYCAASRNTTRRTNTLLYWGQGTQVTVSS

SEQ ID NO: 28924 - protein, 118 aa, Artificial Sequence
  Chemically Synthesized
QVQLQESGGGLVQAGGSLRLSCAASGNISFILYMGWYRQAPGKEREFVATIGLGTTTYYADSVKGRFTISRDNAKNTVYLQMNSLKPEDTAVYYCAVYATNSLLFYYWGQGTQVTVSS

SEQ ID NO: 28925 - protein, 117 aa, Artificial Sequence
  Chemically Synthesized
QVQLQESGGGLVQAGGSLRLSCAASGSISFGSMGWYRQAPGKERELVAAINRGTSTYYADSVKGRFTISRDNAKNTVYLQMNSLKPEDTAVYYCAVHDAISAHHYYWGQGTQVTVSS

SEQ ID NO: 28926 - protein, 119 aa, Artificial Sequence
  Chemically Synthesized
QVQLQESGGGLVQAGGSLRLSCAASGYISGSLIMGWYRQAPGKEREFVASINRGTTTNYADSVKGRFTISRDNAKNTVYLQMNSLKPEDTAVYYCAVRTYYFVWNYAYWGQGTQVTVSS

SEQ ID NO: 28927 - protein, 114 aa, Artificial Sequence
  Chemically Synthesized
QVQLQESGGGLVQAGGSLRLSCAASGYISRDLLMGWYRQAPGKEREFVATISYGSTTNYADSVKGRFTISRDNAKNTVYLQMNSLKPEDTAVYYCAVGYWLQYWGQGTQVTVSS

SEQ ID NO: 28928 - protein, 117 aa, Artificial Sequence
  Chemically Synthesized
QVQLQESGGGLVQAGGSLRLSCAASGSISYAQYMGWYRQAPGKERELLPLLVLVLLPYADSVKGRFTISRDNAKNTVYLQMNSLKPEDTAVYYCAVRDATGAVHLYWGQGTQVTVSS

SEQ ID NO: 28929 - protein, 126 aa, Artificial Sequence
  Chemically Synthesized
QVQLQESGGGLVQAGGSLRLSCAASGYISPQAWMGWYRQAPGKERELVAGINGGSSTNYADSVKGRFTISRDNAKNTVYLQMNSLKPEDTAVYYCAAYYSQYYPYYRAYSGYHTYWGQGTQVTVSS

SEQ ID NO: 28930 - protein, 112 aa, Artificial Sequence
  Chemically Synthesized
QVQLQESGGGLVQAGGSLRLSCAASGNIFEGRVMGWYRQAPGKEREIPYADSVKGRFTISRDNAKNTVYLQMNSLKPEDTAVYYCAVIYTEEPEYYDDHVYWGQGTQVTVSS

SEQ ID NO: 28931 - protein, 117 aa, Artificial Sequence
  Chemically Synthesized
QVQLQESGGGLVQAGGSLRLSCAASGTISDPWYYMGWYRQAPGKEREFVATIGGGGQYADSVKGRFTISRDNAKNTVYLQMNSLKPEDTAVYYCAAQRYIYDDHRYWGQGTQVTVSS

SEQ ID NO: 28932 - protein, 126 aa, Artificial Sequence
  Chemically Synthesized
QVQLQESGGGLVQAGGSLRLSCAASGSIFATVYMGWYRQAPGKERELVAGIGAGTNTYYADSVKGRFTISRDNAKNTVYLQMNSLKPEDTAVYYCAALIPNDYPEIDSYILWLDYWGQGTQVTVSS

SEQ ID NO: 28933 - protein, 122 aa, Artificial Sequence
  Chemically Synthesized
QVQLQESGGGLVQAGGSLRLSCAASGYIFLVPRMGWYRQAPGKEREFVAAISAGTTTYYADSVKGRFTISRDNAKNTVYLQMNSLKPEDTAVYYCAAYWYIPSVSLTYFAYWGQGTQVTVSS

SEQ ID NO: 28934 - protein, 118 aa, Artificial Sequence
  Chemically Synthesized
QVQLQESGGGLVQAGGSLRLSCAASGSIFDPSYMGWYRQAPGKERELVAAINYGTITYYADSVKGRFTISRDNAKNTVYLQMNSLKPEDTAVYYCAVIGGYYSGHYYWGQGTQVTVSS

SEQ ID NO: 28935 - protein, 122 aa, Artificial Sequence
  Chemically Synthesized
QVQLQESGGGLVQAGGSLRLSCAASGSIFQSSYMGWYRQAPGKEREFVAAIAHGTSTYYADSVKGRFTISRDNAKNTVYLQMNSLKPEDTAVYYCAAYWYTQGYWWLRHGYWGQGTQVTVSS

SEQ ID NO: 28936 - protein, 117 aa, Artificial Sequence
  Chemically Synthesized
QVQLQESGGGLVQAGGSLRLSCAASGTIFLSWEMGWYRQAPGKERELVAAIDYGGIPYADSVKGRFTISRDNAKNTVYLQMNSLKPEDTAVYYCAVGDYVLSYLVYWGQGTQVTVSS

SEQ ID NO: 28937 - protein, 111 aa, Artificial Sequence
  Chemically Synthesized
QVQLQESGGGLVQAGGSLRLSCAASGYISTFGVMGWYRQAPGKERELVATITVGANTYYADSVKGRFTISRDNAKNTVYLQMNSLKPEDTAVYYCAAVMYWGQGTQVTVSS

SEQ ID NO: 28938 - protein, 126 aa, Artificial Sequence
  Chemically Synthesized
QVQLQESGGGLVQAGGSLRLSCAASGYIFAYKDMGWYRQAPGKERELVATITNGAITYYADSVKGRFTISRDNAKNTVYLQMNSLKPEDTAVYYCAAVQYILEHLRGPDWSDHYYWGQGTQVTVSS

SEQ ID NO: 28939 - protein, 125 aa, Artificial Sequence
  Chemically Synthesized
QVQLQESGGGLVQAGGSLRLSCAASGTISDIGSMGWYRQAPGKERELVAAIGYGGNTNYADSVKGRFTISRDNAKNTVYLQMNSLKPEDTAVYYCAVVTLRTLLTGTRLVWFMYWGQGTQVTVSS

SEQ ID NO: 28940 - protein, 117 aa, Artificial Sequence
  Chemically Synthesized
QVQLQESGGGLVQAGGSLRLSCAASGSIFSSTMGWYRQAPGKERELVATINDGGTTYYADSVKGRFTISRDNAKNTVYLQMNSLKPEDTAVYYCAVYYVAYLIHTYWGQGTQVTVSS

SEQ ID NO: 28941 - protein, 117 aa, Artificial Sequence
  Chemically Synthesized
QVQLQESGGGLVQAGGSLRLSCAASGYIFYRYMGWYRQAPGKERELVAAIAAGGITYYADSVKGRFTISRDNAKNTVYLQMNSLKPEDTAVYYCAAKRYRLSLHHYWGQGTQVTVSS

SEQ ID NO: 28942 - protein, 122 aa, Artificial Sequence
  Chemically Synthesized
QVQLQESGGGLVQAGGSLRLSCAASGNIFLDANMGWYRQAPGKEREFVAAITEGSTTYYADSVKGRFTISRDNAKNTVYLQMNSLKPEDTAVYYCAVDPDSINFNVRYHAYWGQGTQVTVSS

SEQ ID NO: 28943 - protein, 117 aa, Artificial Sequence
  Chemically Synthesized
QVQLQESGGGLVQAGGSLRLSCAASGNIFVDNVMGWYRQAPGKERELVAGIGWGGNTNYADSVKGRFTISRDNAKNTVYLQMNSLKPEDTAVYYCAVIGGYASSLYWGQGTQVTVSS

SEQ ID NO: 28944 - protein, 117 aa, Artificial Sequence
  Chemically Synthesized
QVQLQESGGGLVQAGGSLRLSCAASGTIFTATMGWYRQAPGKERELVAGINAGTSTYYADSVKGRFTISRDNAKNTVYLQMNSLKPEDTAVYYCAVVSLYRTYLQYWGQGTQVTVSS

SEQ ID NO: 28945 - protein, 118 aa, Artificial Sequence
  Chemically Synthesized
QVQLQESGGGLVQAGGSLRLSCAASGYISYWYKMGWYRQAPGKERELVAAISRGSNTYYADSVKGRFTISRDNAKNTVYLQMNSLKPEDTAVYYCAVAYRRSFPFAYWGQGTQVTVSS

SEQ ID NO: 28946 - protein, 126 aa, Artificial Sequence
  Chemically Synthesized
QVQLQESGGGLVQAGGSLRLSCAASGYIFGLNKMGWYRQAPGKERELVASINDGGITYYADSVKGRFTISRDNAKNTVYLQMNSLKPEDTAVYYCAADTYPLPYYYTYWKAGYKYWGQGTQVTVSS

SEQ ID NO: 28947 - protein, 117 aa, Artificial Sequence
  Chemically Synthesized
QVQLQESGGGLVQAGGSLRLSCAASGNIFDDSFMGWYRQAPGKERELVASIVTVLLPYADSVKGRFTISRDNAKNTVYLQMNSLKPEDTAVYYCAVTPVDVYNFQYWGQGTQVTVSS

SEQ ID NO: 28948 - protein, 121 aa, Artificial Sequence
  Chemically Synthesized
QVQLQESGGGLVQAGGSLRLSCAASGNIFLDWYMGWYRQAPGKERELVAAISDGGSTNYADSVKGRFTISRDNAKNTVYLQMNSLKPEDTAVYYCAVPTTTGDGDRDYYYWGQGTQVTVSS

SEQ ID NO: 28949 - protein, 122 aa, Artificial Sequence
  Chemically Synthesized
QVQLQESGGGLVQAGGSLRLSCAASGNISRSAFMGWYRQAPGKERELVASIAYGSTTNYADSVKGRFTISRDNAKNTVYLQMNSLKPEDTAVYYCAVDITIYGYWVIEYDYWGQGTQVTVSS

SEQ ID NO: 28950 - protein, 118 aa, Artificial Sequence
  Chemically Synthesized
QVQLQESGGGLVQAGGSLRLSCAASGYISAASTMGWYRQAPGKERELVATIGYGTNTNYADSVKGRFTISRDNAKNTVYLQMNSLKPEDTAVYYCAARAYAYFWHTYWGQGTQVTVSS

SEQ ID NO: 28951 - protein, 114 aa, Artificial Sequence
  Chemically Synthesized
QVQLQESGGGLVQAGGSLRLSCAASGSISYVHGMGWYRQAPGKERELVAGITDGTTTYYADSVKGRFTISRDNAKNTVYLQMNSLKPEDTAVYYCAADDPSLYWGQGTQVTVSS

SEQ ID NO: 28952 - protein, 122 aa, Artificial Sequence
  Chemically Synthesized
QVQLQESGGGLVQAGGSLRLSCAASGTISPRHYMGWYRQAPGKERELVATIAAGGNTYYADSVKGRFTISRDNAKNTVYLQMNSLKPEDTAVYYCAAVSAARYTWRAYHSYWGQGTQVTVSS

SEQ ID NO: 28953 - protein, 125 aa, Artificial Sequence
  Chemically Synthesized
QVQLQESGGGLVQAGGSLRLSCAASGTISGGYTMGWYRQAPGKERELVAGIAYGGTTYYADSVKGRFTISRDNAKNTVYLQMNSLKPEDTAVYYCAALHDRASRGNYLIRFHYYWGQGTQVTVSS

SEQ ID NO: 28954 - protein, 118 aa, Artificial Sequence
  Chemically Synthesized
QVQLQESGGGLVQAGGSLRLSCAASGNIFAYPSMGWYRQAPGKEREFVAAINDGGNTNYADSVKGRFTISRDNAKNTVYLQMNSLKPEDTAVYYCAATDLEAYYLWYWGQGTQVTVSS

SEQ ID NO: 28955 - protein, 121 aa, Artificial Sequence
  Chemically Synthesized
QVQLQESGGGLVQAGGSLRLSCAASGSISPATRMGWYRQAPGKERELLPVLMTVLVPYADSVKGRFTISRDNAKNTVYLQMNSLKPEDTAVYYCAVLTTFTWLDDQLLTYWGQGTQVTVSS

SEQ ID NO: 28956 - protein, 121 aa, Artificial Sequence
  Chemically Synthesized
QVQLQESGGGLVQAGGSLRLSCAASGNIFDNVLMGWYRQAPGKEREFVAGIAVGATTYYADSVKGRFTISRDNAKNTVYLQMNSLKPEDTAVYYCAVYTYARESPERHGYWGQGTQVTVSS

SEQ ID NO: 28957 - protein, 118 aa, Artificial Sequence
  Chemically Synthesized
QVQLQESGGGLVQAGGSLRLSCAASGSISLYAYMGWYRQAPGKERELVAAITSGTSTNYADSVKGRFTISRDNAKNTVYLQMNSLKPEDTAVYYCAATGSPTGGFGYWGQGTQVTVSS

SEQ ID NO: 28958 - protein, 120 aa, Artificial Sequence
  Chemically Synthesized
QVQLQESGGGLVQAGGSLRLSCAASGTIFYPGGMGWYRQAPGKERELVASITYGANTYYADSVKGRFTISRDNAKNTVYLQMNSLKPEDTAVYYCAVTGYFGYYSWHYYWGQGTQVTVSS

SEQ ID NO: 28959 - protein, 117 aa, Artificial Sequence
  Chemically Synthesized
QVQLQESGGGLVQAGGSLRLSCAASGSISHLRAMGWYRQAPGKEREFVAAISVGGTTYYADSVKGRFTISRDNAKNTVYLQMNSLKPEDTAVYYCAAYNPYWDYTYWGQGTQVTVSS

SEQ ID NO: 28960 - protein, 118 aa, Artificial Sequence
  Chemically Synthesized
QVQLQESGGGLVQAGGSLRLSCAASGTIFHVRYMGWYRQAPGKERELVAAIAYGGSTYYADSVKGRFTISRDNAKNTVYLQMNSLKPEDTAVYYCAARYPGGAQFRYWGQGTQVTVSS

SEQ ID NO: 28961 - protein, 121 aa, Artificial Sequence
  Chemically Synthesized
QVQLQESGGGLVQAGGSLRLSCAASGSISVPNRMGWYRQAPGKERELVASITAGAITYYADSVKGRFTISRDNAKNTVYLQMNSLKPEDTAVYYCAATTVCTTWTTTVIYWGQGTQVTVSS

SEQ ID NO: 28962 - protein, 118 aa, Artificial Sequence
  Chemically Synthesized
QVQLQESGGGLVQAGGSLRLSCAASGTISNRDFMGWYRQAPGKERELVAGISYGSNTNYADSVKGRFTISRDNAKNTVYLQMNSLKPEDTAVYYCAAPEGTVGAHYYWGQGTQVTVSS

SEQ ID NO: 28963 - protein, 118 aa, Artificial Sequence
  Chemically Synthesized
QVQLQESGGGLVQAGGSLRLSCAASGTISYYGGMGWYRQAPGKERELVAGIDYGGSTNYADSVKGRFTISRDNAKNTVYLQMNSLKPEDTAVYYCAAYPYNYVHHRYWGQGTQVTVSS

SEQ ID NO: 28964 - protein, 121 aa, Artificial Sequence
  Chemically Synthesized
QVQLQESGGGLVQAGGSLRLSCAASGSISDRNYMGWYRQAPGKEREFVPVLIMVVVPYADSVKGRFTISRDNAKNTVYLQMNSLKPEDTAVYYCAAYQLGDTLYRYALGYWGQGTQVTVSS

SEQ ID NO: 28965 - protein, 113 aa, Artificial Sequence
  Chemically Synthesized
QVQLQESGGGLVQAGGSLRLSCAASGSIFYFDYMGWYRQAPGKERELVAAIASGTNTNYADSVKGRFTISRDNAKNTVYLQMNSLKPEDTAVYYCAVTLLMYWGQGTQVTVSS

SEQ ID NO: 28966 - protein, 117 aa, Artificial Sequence
  Chemically Synthesized
QVQLQESGGGLVQAGGSLRLSCAASGYISPSLNMGWYRQAPGKEREFVASIGNGATTYYADSVKGRFTISRDNAKNTVYLQMNSLKPEDTAVYYCAADVELTIGLYWGQGTQVTVSS

SEQ ID NO: 28967 - protein, 121 aa, Artificial Sequence
  Chemically Synthesized
QVQLQESGGGLVQAGGSLRLSCAASGTISVILMGWYRQAPGKEREFVASISTGATTYYADSVKGRFTISRDNAKNTVYLQMNSLKPEDTAVYYCAVDNDQRGYGLAYHDYWGQGTQVTVSS

SEQ ID NO: 28968 - protein, 111 aa, Artificial Sequence
  Chemically Synthesized
QVQLQESGGGLVQAGGSLRLSCAASGYISFVDRMGWYRQAPGKEREPYADSVKGRFTISRDNAKNTVYLQMNSLKPEDTAVYYCAVDIALYANNVVVHDYWGQGTQVTVSS

SEQ ID NO: 28969 - protein, 118 aa, Artificial Sequence
  Chemically Synthesized
QVQLQESGGGLVQAGGSLRLSCAASGNISFDYYMGWYRQAPGKERELVASIDDGASTYYADSVKGRFTISRDNAKNTVYLQMNSLKPEDTAVYYCAADEWKTLYLPYWGQGTQVTVSS

SEQ ID NO: 28970 - protein, 122 aa, Artificial Sequence
  Chemically Synthesized
QVQLQESGGGLVQAGGSLRLSCAASGSISNCSVMGWYRQAPGKERELVASIDTGSITYYADSVKGRFTISRDNAKNTVYLQMNSLKPEDTAVYYCAVYKLSSALGDYGHAYWGQGTQVTVSS

SEQ ID NO: 28971 - protein, 110 aa, Artificial Sequence
  Chemically Synthesized
QVQLQESGGGLVQAGGSLRLSCAASGTISIGTYMGWYRQAPGKEREFVASITGGGTTNYADSVKGRFTISRDNAKNTVYLQMNSLKPEDTAVYYCASSYWGQGTQVTVSS

SEQ ID NO: 28972 - protein, 110 aa, Artificial Sequence
  Chemically Synthesized
QVQLQESGGGLVQAGGSLRLSCAASGTIFGSYRMGWYRQAPGKERELVAAIDEGTTTNYADSVKGRFTISRDNAKNTVYLQMNSLKPEDTAVYYCAARYWGQGTQVTVSS

SEQ ID NO: 28973 - protein, 118 aa, Artificial Sequence
  Chemically Synthesized
QVQLQESGGGLVQAGGSLRLSCAASGTIFYEARMGWYRQAPGKERELVATIANGGNTYYADSVKGRFTISRDNAKNTVYLQMNSLKPEDTAVYYCAAYIYNRVYHSYWGQGTQVTVSS

SEQ ID NO: 28974 - protein, 118 aa, Artificial Sequence
  Chemically Synthesized
QVQLQESGGGLVQAGGSLRLSCAASGTISLARSMGWYRQAPGKERELVATITNGGTTNYADSVKGRFTISRDNAKNTVYLQMNSLKPEDTAVYYCAASPDTDVQYAYWGQGTQVTVSS

SEQ ID NO: 28975 - protein, 122 aa, Artificial Sequence
  Chemically Synthesized
QVQLQESGGGLVQAGGSLRLSCAASGNIFLLSFMGWYRQAPGKERELVAGIGDGSTTNYADSVKGRFTISRDNAKNTVYLQMNSLKPEDTAVYYCAVQKRLYPIYWIAHEYWGQGTQVTVSS

SEQ ID NO: 28976 - protein, 122 aa, Artificial Sequence
  Chemically Synthesized
QVQLQESGGGLVQAGGSLRLSCAASGYISPYGSMGWYRQAPGKERELVATIAHGSTTYYADSVKGRFTISRDNAKNTVYLQMNSLKPEDTAVYYCAVTWAHVYWQSARHDYWGQGTQVTVSS

SEQ ID NO: 28977 - protein, 116 aa, Artificial Sequence
  Chemically Synthesized
QVQLQESGGGLVQAGGSLRLSCAASGNIFGTDYMGWYRQAPGKERELVASIALGTNTNYADSVKGRFTISRDNAKNTVYLQMNSLKPEDTAVYYCAVVYRYNFSYWGQGTQVTVSS

SEQ ID NO: 28978 - protein, 122 aa, Artificial Sequence
  Chemically Synthesized
QVQLQESGGGLVQAGGSLRLSCAASGTISSVYNMGWYRQAPGKERELVAAIAFGAITNYADSVKGRFTISRDNAKNTVYLQMNSLKPEDTAVYYCAVWDRWYLYYLRWHQYWGQGTQVTVSS

SEQ ID NO: 28979 - protein, 118 aa, Artificial Sequence
  Chemically Synthesized
QVQLQESGGGLVQAGGSLRLSCAASGSISPLSHMGWYRQAPGKERELVASIDIGGITYYADSVKGRFTISRDNAKNTVYLQMNSLKPEDTAVYYCAVYLYYPYVLRYWGQGTQVTVSS

SEQ ID NO: 28980 - protein, 118 aa, Artificial Sequence
  Chemically Synthesized
QVQLQESGGGLVQAGGSLRLSCAASGYISKYRVMGWYRQAPGKERELVATISYGSNTNYADSVKGRFTISRDNAKNTVYLQMNSLKPEDTAVYYCAVNYQGDSSLDYWGQGTQVTVSS

SEQ ID NO: 28981 - protein, 118 aa, Artificial Sequence
  Chemically Synthesized
QVQLQESGGGLVQAGGSLRLSCAASGNISGPPGMGWYRQAPGKEREFVAAIASGATTNYADSVKGRFTISRDNAKNTVYLQMNSLKPEDTAVYYCAADVLRTRPLRYWGQGTQVTVSS

SEQ ID NO: 28982 - protein, 116 aa, Artificial Sequence
  Chemically Synthesized
QVQLQESGGGLVQAGGSLRLSCAASGSISGITMGWYRQAPGKEREFVASIDYGGNTNYADSVKGRFTISRDNAKNTVYLQMNSLKPEDTAVYYCAVETGSTGLMYWGQGTQVTVSS

SEQ ID NO: 28983 - protein, 126 aa, Artificial Sequence
  Chemically Synthesized
QVQLQESGGGLVQAGGSLRLSCAASGSIFPVHNMGWYRQAPGKEREFVAGISDGTNTNYADSVKGRFTISRDNAKNTVYLQMNSLKPEDTAVYYCAAHNVSLYYDWPYQYYTHNYWGQGTQVTVSS

SEQ ID NO: 28984 - protein, 118 aa, Artificial Sequence
  Chemically Synthesized
QVQLQESGGGLVQAGGSLRLSCAASGNISDGNPMGWYRQAPGKERELVAAINSGGITNYADSVKGRFTISRDNAKNTVYLQMNSLKPEDTAVYYCAVQDGRDDTFYYWGQGTQVTVSS

SEQ ID NO: 28985 - protein, 116 aa, Artificial Sequence
  Chemically Synthesized
QVQLQESGGGLVQAGGSLRLSCAASGTISAWNGMGWYRQAPGKERELLPVLVLVVPYADSVKGRFTISRDNAKNTVYLQMNSLKPEDTAVYYCAVWYVYTPEHYYWGQGTQVTVSS

SEQ ID NO: 28986 - protein, 116 aa, Artificial Sequence
  Chemically Synthesized
QVQLQESGGGLVQAGGSLRLSCAASGTIFDAYWMGWYRQAPGKEREFVAAITVLLPYADSVKGRFTISRDNAKNTVYLQMNSLKPEDTAVYYCAVYVQGPTNHAYWGQGTQVTVSS

SEQ ID NO: 28987 - protein, 118 aa, Artificial Sequence
  Chemically Synthesized
QVQLQESGGGLVQAGGSLRLSCAASGNISNSVRMGWYRQAPGKEREFVAGIDPGSSTYYADSVKGRFTISRDNAKNTVYLQMNSLKPEDTAVYYCAAVATSYWTLRYWGQGTQVTVSS

SEQ ID NO: 28988 - protein, 121 aa, Artificial Sequence
  Chemically Synthesized
QVQLQESGGGLVQAGGSLRLSCAASGNIFYDGDMGWYRQAPGKEREFVAGIANGANTNYADSVKGRFTISRDNAKNTVYLQMNSLKPEDTAVYYCAAYVIDHTRPSTVFYWGQGTQVTVSS

SEQ ID NO: 28989 - protein, 119 aa, Artificial Sequence
  Chemically Synthesized
QVQLQESGGGLVQAGGSLRLSCAASGYISPFPGMGWYRQAPGKERELVAAIGDGGSNTNYADSVKGRFTISRDNAKNTVYLQMNSLKPEDTAVYYCAAYTRYWYGHKYWGQGTQVTVSS

SEQ ID NO: 28990 - protein, 117 aa, Artificial Sequence
  Chemically Synthesized
QVQLQESGGGLVQAGGSLRLSCAASGTISSDDFMGWYRQAPGKERELVASIGYGTITYADSVKGRFTISRDNAKNTVYLQMNSLKPEDTAVYYCAANLETNYPYTYWGQGTQVTVSS

SEQ ID NO: 28991 - protein, 122 aa, Artificial Sequence
  Chemically Synthesized
QVQLQESGGGLVQAGGSLRLSCAASGNISSVYWMGWYRQAPGKEREFVAAIAYGGITYYADSVKGRFTISRDNAKNTVYLQMNSLKPEDTAVYYCAADDNQYDTYTGLYYYWGQGTQVTVSS

SEQ ID NO: 28992 - protein, 117 aa, Artificial Sequence
  Chemically Synthesized
QVQLQESGGGLVQAGGSLRLSCAASGTISTPSYMGWYRQAPGKERELVASITRGSTNYADSVKGRFTISRDNAKNTVYLQMNSLKPEDTAVYYCAVGGLQDGGHGYWGQGTQVTVSS

SEQ ID NO: 28993 - protein, 115 aa, Artificial Sequence
  Chemically Synthesized
QVQLQESGGGLVQAGGSLRLSCAASGTIFQSPYMGWYRQAPGKERELPLLISVLVPYADSVKGRFTISRDNAKNTVYLQMNSLKPEDTAVYYCAASPHEPAHHYWGQGTQVTVSS

SEQ ID NO: 28994 - protein, 109 aa, Artificial Sequence
  Chemically Synthesized
QVQLQESGGGLVQAGGSLRLSCAASGNISASGAMGWYRQAPGKERELVAGITSGANTNYADSVKGRFTISRDNAKNTVYLQMNSLKPEDTAVYYCAAYWGQGTQVTVSS

SEQ ID NO: 28995 - protein, 125 aa, Artificial Sequence
  Chemically Synthesized
QVQLQESGGGLVQAGGSLRLSCAASGTIFSLLMGWYRQAPGKERELVASITQGGNTNYADSVKGRFTISRDNAKNTVYLQMNSLKPEDTAVYYCAAVPTLETYYTNFLDGFFSYWGQGTQVTVSS

SEQ ID NO: 28996 - protein, 118 aa, Artificial Sequence
  Chemically Synthesized
QVQLQESGGGLVQAGGSLRLSCAASGTIFRRTYMGWYRQAPGKERELVATIDSGGNTYYADSVKGRFTISRDNAKNTVYLQMNSLKPEDTAVYYCAVYYWSYQYFSYWGQGTQVTVSS

SEQ ID NO: 28997 - protein, 122 aa, Artificial Sequence
  Chemically Synthesized
QVQLQESGGGLVQAGGSLRLSCAASGSISPWLDMGWYRQAPGKEREFVATIDIRYYYLYADSVKGRFTISRDNAKNTVYLQMNSLKPEDTAVYYCAADRPDRISAGDLHYYWGQGTQVTVSS

SEQ ID NO: 28998 - protein, 126 aa, Artificial Sequence
  Chemically Synthesized
QVQLQESGGGLVQAGGSLRLSCAASGNIFHRYSMGWYRQAPGKEREFVAGINGGSNTYYADSVKGRFTISRDNAKNTVYLQMNSLKPEDTAVYYCAVYHRRSRWYYYAGYFPYGYWGQGTQVTVSS

SEQ ID NO: 28999 - protein, 117 aa, Artificial Sequence
  Chemically Synthesized
QVQLQESGGGLVQAGGSLRLSCAASGNISGGAMGWYRQAPGKERELVAGISFGSSTNYADSVKGRFTISRDNAKNTVYLQMNSLKPEDTAVYYCAAWWKRYLTHGYWGQGTQVTVSS

SEQ ID NO: 29000 - protein, 117 aa, Artificial Sequence
  Chemically Synthesized
QVQLQESGGGLVQAGGSLRLSCAASGNIFGEQIMGWYRQAPGKERELVASIGDGSITNYADSVKGRFTISRDNAKNTVYLQMNSLKPEDTAVYYCAVYYSHYGSMYWGQGTQVTVSS

SEQ ID NO: 29001 - protein, 126 aa, Artificial Sequence
  Chemically Synthesized
QVQLQESGGGLVQAGGSLRLSCAASGTIFRPRVMGWYRQAPGKERELVAGIGHGANTNYADSVKGRFTISRDNAKNTVYLQMNSLKPEDTAVYYCAVRSSRYLADISDSIGWFIYWGQGTQVTVSS

SEQ ID NO: 29002 - protein, 122 aa, Artificial Sequence
  Chemically Synthesized
QVQLQESGGGLVQAGGSLRLSCAASGTIFDYSGMGWYRQAPGKERELVAGITNGGITYYADSVKGRFTISRDNAKNTVYLQMNSLKPEDTAVYYCAAGSAASAAGYGVFPYWGQGTQVTVSS

SEQ ID NO: 29003 - protein, 118 aa, Artificial Sequence
  Chemically Synthesized
QVQLQESGGGLVQAGGSLRLSCAASGNISVVDDMGWYRQAPGKEREFVASISSGGITYYADSVKGRFTISRDNAKNTVYLQMNSLKPEDTAVYYCAVVTYYGYGLTYWGQGTQVTVSS

SEQ ID NO: 29004 - protein, 122 aa, Artificial Sequence
  Chemically Synthesized
QVQLQESGGGLVQAGGSLRLSCAASGYISLGDVMGWYRQAPGKERELVASITPGTITYYADSVKGRFTISRDNAKNTVYLQMNSLKPEDTAVYYCAAWKRDAFVPLEGHDYWGQGTQVTVSS

SEQ ID NO: 29005 - protein, 117 aa, Artificial Sequence
  Chemically Synthesized
QVQLQESGGGLVQAGGSLRLSCAASGSISAADDMGWYRQAPGKEREFVAAITDGGITNYADSVKGRFTISRDNAKNTVYLQMNSLKPEDTAVYYCAVRFSNTSLMYWGQGTQVTVSS

SEQ ID NO: 29006 - protein, 118 aa, Artificial Sequence
  Chemically Synthesized
QVQLQESGGGLVQAGGSLRLSCAASGSIFYDDSMGWYRQAPGKERELVATINIGGITNYADSVKGRFTISRDNAKNTVYLQMNSLKPEDTAVYYCAAPGEQVRSHRYWGQGTQVTVSS

SEQ ID NO: 29007 - protein, 122 aa, Artificial Sequence
  Chemically Synthesized
QVQLQESGGGLVQAGGSLRLSCAASGTISGPYYMGWYRQAPGKEREFVAAIAYGGTTNYADSVKGRFTISRDNAKNTVYLQMNSLKPEDTAVYYCAAEGFSYSQPYHRHTYWGQGTQVTVSS

SEQ ID NO: 29008 - protein, 121 aa, Artificial Sequence
  Chemically Synthesized
QVQLQESGGGLVQAGGSLRLSCAASGTISYRDGMGWYRQAPGKERELLPVLLRVLVPYADSVKGRFTISRDNAKNTVYLQMNSLKPEDTAVYYCAVYILTRTPYIDQHKYWGQGTQVTVSS

SEQ ID NO: 29009 - protein, 118 aa, Artificial Sequence
  Chemically Synthesized
QVQLQESGGGLVQAGGSLRLSCAASGYISGADPMGWYRQAPGKERELVAAIGAGASTNYADSVKGRFTISRDNAKNTVYLQMNSLKPEDTAVYYCAVDAGRAAALSYWGQGTQVTVSS

SEQ ID NO: 29010 - protein, 118 aa, Artificial Sequence
  Chemically Synthesized
QVQLQESGGGLVQAGGSLRLSCAASGNIFVSYHMGWYRQAPGKERELVASINLGTSTNYADSVKGRFTISRDNAKNTVYLQMNSLKPEDTAVYYCAADSLYITAYAYWGQGTQVTVSS

SEQ ID NO: 29011 - protein, 122 aa, Artificial Sequence
  Chemically Synthesized
QVQLQESGGGLVQAGGSLRLSCAASGNISRAYDMGWYRQAPGKEREFVAAIAYGTTTNYADSVKGRFTISRDNAKNTVYLQMNSLKPEDTAVYYCAAYGWFLSPYVYSLGYWGQGTQVTVSS

SEQ ID NO: 29012 - protein, 118 aa, Artificial Sequence
  Chemically Synthesized
QVQLQESGGGLVQAGGSLRLSCAASGSIFPSNRMGWYRQAPGKERELVAAITYGGTTYYADSVKGRFTISRDNAKNTVYLQMNSLKPEDTAVYYCAVTAYSWRYHAYWGQGTQVTVSS

SEQ ID NO: 29013 - protein, 124 aa, Artificial Sequence
  Chemically Synthesized
QVQLQESGGGLVQAGGSLRLSCAASGTIFWLLMGWYRQAPGKEREFVATISVGGNTYYADSVKGRFTISRDNAKNTVYLQMNSLKPEDTAVYYCAVRGYAGQTISTVQVNSMYWGQGTQVTVSS

SEQ ID NO: 29014 - protein, 122 aa, Artificial Sequence
  Chemically Synthesized
QVQLQESGGGLVQAGGSLRLSCAASGTIFLGIYMGWYRQAPGKERELVAGISDGGITNYADSVKGRFTISRDNAKNTVYLQMNSLKPEDTAVYYCAADPTYGHDDTQFLDYWGQGTQVTVSS

SEQ ID NO: 29015 - protein, 116 aa, Artificial Sequence
  Chemically Synthesized
QVQLQESGGGLVQAGGSLRLSCAASGTIFQPSNMGWYRQAPGKEREFVATISSVVLPYADSVKGRFTISRDNAKNTVYLQMNSLKPEDTAVYYCAAFQYTDTHDYWGQGTQVTVSS

SEQ ID NO: 29016 - protein, 116 aa, Artificial Sequence
  Chemically Synthesized
QVQLQESGGGLVQAGGSLRLSCAASGYISYYARMGWYRQAPGKERELVAGIARGTITYYADSVKGRFTISRDNAKNTVYLQMNSLKPEDTAVYYCAAYPYYRHYYWGQGTQVTVSS

SEQ ID NO: 29017 - protein, 127 aa, Artificial Sequence
  Chemically Synthesized
QVQLQESGGGLVQAGGSLRLSCAASGSIFYDVDMGWYRQAPGKERELVAGINQGTTTNYADSVKGRFTISRDNAKNTVYLQMNSLKPEDTAVYYCAAYVVRTQYESHYTYNVAHYYWGQGTQVTVSS

SEQ ID NO: 29018 - protein, 122 aa, Artificial Sequence
  Chemically Synthesized
QVQLQESGGGLVQAGGSLRLSCAASGYIFFVEQMGWYRQAPGKERELVATISWGGTTNYADSVKGRFTISRDNAKNTVYLQMNSLKPEDTAVYYCAAQDHVDATGYRYYDYWGQGTQVTVSS

SEQ ID NO: 29019 - protein, 117 aa, Artificial Sequence
  Chemically Synthesized
QVQLQESGGGLVQAGGSLRLSCAASGYISGGLIMGWYRQAPGKERELVATIDYGSTTYYADSVKGRFTISRDNAKNTVYLQMNSLKPEDTAVYYCAAYQDDYRELYWGQGTQVTVSS

SEQ ID NO: 29020 - protein, 121 aa, Artificial Sequence
  Chemically Synthesized
QVQLQESGGGLVQAGGSLRLSCAASGYIFDGGSMGWYRQAPGKEREFVASIGDGGSTNYADSVKGRFTISRDNAKNTVYLQMNSLKPEDTAVYYCAVDYFGFYDPLSLLYWGQGTQVTVSS

SEQ ID NO: 29021 - protein, 118 aa, Artificial Sequence
  Chemically Synthesized
QVQLQESGGGLVQAGGSLRLSCAASGYISAFADMGWYRQAPGKEREFVAAIDVGTITNYADSVKGRFTISRDNAKNTVYLQMNSLKPEDTAVYYCAAYYSDYSLHNYWGQGTQVTVSS

SEQ ID NO: 29022 - protein, 118 aa, Artificial Sequence
  Chemically Synthesized
QVQLQESGGGLVQAGGSLRLSCAASGSIFGTSAMGWYRQAPGKEREFVAAINLGASTNYADSVKGRFTISRDNAKNTVYLQMNSLKPEDTAVYYCAVRPPDNRPYDYWGQGTQVTVSS

SEQ ID NO: 29023 - protein, 121 aa, Artificial Sequence
  Chemically Synthesized
QVQLQESGGGLVQAGGSLRLSCAASGTIFLYSNMGWYRQAPGKEREFVASISAGASTNYADSVKGRFTISRDNAKNTVYLQMNSLKPEDTAVYYCAVDPYTDPSSYGYYYWGQGTQVTVSS

SEQ ID NO: 29024 - protein, 118 aa, Artificial Sequence
  Chemically Synthesized
QVQLQESGGGLVQAGGSLRLSCAASGSISNWYEMGWYRQAPGKERELVATIGPGSTTNYADSVKGRFTISRDNAKNTVYLQMNSLKPEDTAVYYCAAQGADNIFFEYWGQGTQVTVSS

SEQ ID NO: 29025 - protein, 109 aa, Artificial Sequence
  Chemically Synthesized
QVQLQESGGGLVQAGGSLRLSCAASGYIFPPYPMGWYRQAPGKEREFVAAISTGSITYYADSVKGRFTISRDNAKNTVYLQMNSLKPEDTAVYYCASYWGQGTQVTVSS

SEQ ID NO: 29026 - protein, 118 aa, Artificial Sequence
  Chemically Synthesized
QVQLQESGGGLVQAGGSLRLSCAASGNIFRPTLMGWYRQAPGKEREFVAAISRGSNTNYADSVKGRFTISRDNAKNTVYLQMNSLKPEDTAVYYCAVKYRREGSHQYWGQGTQVTVSS

SEQ ID NO: 29027 - protein, 115 aa, Artificial Sequence
  Chemically Synthesized
QVQLQESGGGLVQAGGSLRLSCAASGTIFFSAEMGWYRQAPGKERELVATINTGTSTYYADSVKGRFTISRDNAKNTVYLQMNSLKPEDTAVYYCAAYYNGYPYWGQGTQVTVSS

SEQ ID NO: 29028 - protein, 118 aa, Artificial Sequence
  Chemically Synthesized
QVQLQESGGGLVQAGGSLRLSCAASGSISGAYLMGWYRQAPGKERELVAAISYGGTTYYADSVKGRFTISRDNAKNTVYLQMNSLKPEDTAVYYCAALYYDAPRFTYWGQGTQVTVSS

SEQ ID NO: 29029 - protein, 118 aa, Artificial Sequence
  Chemically Synthesized
QVQLQESGGGLVQAGGSLRLSCAASGTISPVPNMGWYRQAPGKEREFVAAINSGGSTNYADSVKGRFTISRDNAKNTVYLQMNSLKPEDTAVYYCAAVTPTRTYHYYWGQGTQVTVSS

SEQ ID NO: 29030 - protein, 118 aa, Artificial Sequence
  Chemically Synthesized
QVQLQESGGGLVQAGGSLRLSCAASGYISRRPYMGWYRQAPGKEREFVASIGSGSNTNYADSVKGRFTISRDNAKNTVYLQMNSLKPEDTAVYYCAVVTRSRVYYYYWGQGTQVTVSS

SEQ ID NO: 29031 - protein, 122 aa, Artificial Sequence
  Chemically Synthesized
QVQLQESGGGLVQAGGSLRLSCAASGNISDGSTMGWYRQAPGKERELVASIATGGTTNYADSVKGRFTISRDNAKNTVYLQMNSLKPEDTAVYYCAARTYLYDAGYLSFYYWGQGTQVTVSS

SEQ ID NO: 29032 - protein, 122 aa, Artificial Sequence
  Chemically Synthesized
QVQLQESGGGLVQAGGSLRLSCAASGTISRLYPMGWYRQAPGKEREFVAAISSGTNTNYADSVKGRFTISRDNAKNTVYLQMNSLKPEDTAVYYCAALNRKAGSEDGWHSYWGQGTQVTVSS

SEQ ID NO: 29033 - protein, 113 aa, Artificial Sequence
  Chemically Synthesized
QVQLQESGGGLVQAGGSLRLSCAASGTISILSFMGWYRQAPGKEREFVPYADSVKGRFTISRDNAKNTVYLQMNSLKPEDTAVYYCAAGANTYIPSDAYLTYWGQGTQVTVSS

SEQ ID NO: 29034 - protein, 118 aa, Artificial Sequence
  Chemically Synthesized
QVQLQESGGGLVQAGGSLRLSCAASGNISTRDYMGWYRQAPGKEREFVAGISYGTTTNYADSVKGRFTISRDNAKNTVYLQMNSLKPEDTAVYYCAVTYYGVTPHKYWGQGTQVTVSS

SEQ ID NO: 29035 - protein, 116 aa, Artificial Sequence
  Chemically Synthesized
QVQLQESGGGLVQAGGSLRLSCAASGSIFRYYLMGWYRQAPGKERELVAIGVLLPYADSVKGRFTISRDNAKNTVYLQMNSLKPEDTAVYYCAVSGIDATVLHAYWGQGTQVTVSS

SEQ ID NO: 29036 - protein, 118 aa, Artificial Sequence
  Chemically Synthesized
QVQLQESGGGLVQAGGSLRLSCAASGTIFAWTAMGWYRQAPGKEREFVATIAHGANTYYADSVKGRFTISRDNAKNTVYLQMNSLKPEDTAVYYCAAVRYFVPYHYYWGQGTQVTVSS

SEQ ID NO: 29037 - protein, 118 aa, Artificial Sequence
  Chemically Synthesized
QVQLQESGGGLVQAGGSLRLSCAASGYIFAIINMGWYRQAPGKERELVATIDWGATTNYADSVKGRFTISRDNAKNTVYLQMNSLKPEDTAVYYCAAYVYVRQSHTYWGQGTQVTVSS

SEQ ID NO: 29038 - protein, 118 aa, Artificial Sequence
  Chemically Synthesized
QVQLQESGGGLVQAGGSLRLSCAASGYISYYRNMGWYRQAPGKEREFVAGIADGAITNYADSVKGRFTISRDNAKNTVYLQMNSLKPEDTAVYYCAAWLYYPSDFYYWGQGTQVTVSS

SEQ ID NO: 29039 - protein, 117 aa, Artificial Sequence
  Chemically Synthesized
QVQLQESGGGLVQAGGSLRLSCAASGSIFAESPMGWYRQAPGKEREFVAGIDGGASTNYADSVKGRFTISRDNAKNTVYLQMNSLKPEDTAVYYCAVAAGYSLILYWGQGTQVTVSS

SEQ ID NO: 29040 - protein, 118 aa, Artificial Sequence
  Chemically Synthesized
QVQLQESGGGLVQAGGSLRLSCAASGNIFNYTRMGWYRQAPGKERELVAGIGYGTITNYADSVKGRFTISRDNAKNTVYLQMNSLKPEDTAVYYCAAGLLYYPPYIYWGQGTQVTVSS

SEQ ID NO: 29041 - protein, 118 aa, Artificial Sequence
  Chemically Synthesized
QVQLQESGGGLVQAGGSLRLSCAASGYIFHSAMGWYRQAPGKERELVAGIGTGTNTNYADSVKGRFTISRDNAKNTVYLQMNSLKPEDTAVYYCAVDIQYDTHPHAYWGQGTQVTVSS

SEQ ID NO: 29042 - protein, 118 aa, Artificial Sequence
  Chemically Synthesized
QVQLQESGGGLVQAGGSLRLSCAASGTISTYSNMGWYRQAPGKEREFVAGINDGATTNYADSVKGRFTISRDNAKNTVYLQMNSLKPEDTAVYYCAVLYRVGRYYGYWGQGTQVTVSS

SEQ ID NO: 29043 - protein, 109 aa, Artificial Sequence
  Chemically Synthesized
QVQLQESGGGLVQAGGSLRLSCAASGSIFLADRMGWYRQAPGKERELVAGINYGGSTNYADSVKGRFTISRDNAKNTVYLQMNSLKPEDTAVYYCAAYWGQGTQVTVSS

SEQ ID NO: 29044 - protein, 122 aa, Artificial Sequence
  Chemically Synthesized
QVQLQESGGGLVQAGGSLRLSCAASGTIFDQSRMGWYRQAPGKERELVASIDYGGTTYYADSVKGRFTISRDNAKNTVYLQMNSLKPEDTAVYYCAALQHRVAYTYTPHEYWGQGTQVTVSS

SEQ ID NO: 29045 - protein, 126 aa, Artificial Sequence
  Chemically Synthesized
QVQLQESGGGLVQAGGSLRLSCAASGNISDPYSMGWYRQAPGKERELVATIAYGGNTYYADSVKGRFTISRDNAKNTVYLQMNSLKPEDTAVYYCAVDDALVTVDQYSYGDAYAYWGQGTQVTVSS

SEQ ID NO: 29046 - protein, 119 aa, Artificial Sequence
  Chemically Synthesized
QVQLQESGGGLVQAGGSLRLSCAASGYIFRPLTMGWYRQAPGKEREFVAAIDGGANTNYADSVKGRFTISRDNAKNTVYLQMNSLKPEDTAVYYCAAIARQDSGPHGYWGQGTQVTVSS

SEQ ID NO: 29047 - protein, 111 aa, Artificial Sequence
  Chemically Synthesized
QVQLQESGGGLVQAGGSLRLSCAASGTIFLHRYMGWYRQAPGKEREFVASITSVVVPYADSVKGRFTISRDNAKNTVYLQMNSLKPEDTAVYYCAARISYWGQGTQVTVSS

SEQ ID NO: 29048 - protein, 118 aa, Artificial Sequence
  Chemically Synthesized
QVQLQESGGGLVQAGGSLRLSCAASGNISGDDFMGWYRQAPGKERELVATISSGGTTNYADSVKGRFTISRDNAKNTVYLQMNSLKPEDTAVYYCAAADVDSRVTIYWGQGTQVTVSS

SEQ ID NO: 29049 - protein, 117 aa, Artificial Sequence
  Chemically Synthesized
QVQLQESGGGLVQAGGSLRLSCAASGNISNVRSMGWYRQAPGKEREFVASIDSGSTTYYADSVKGRFTISRDNAKNTVYLQMNSLKPEDTAVYYCASIYYPAWHYYWGQGTQVTVSS

SEQ ID NO: 29050 - protein, 118 aa, Artificial Sequence
  Chemically Synthesized
QVQLQESGGGLVQAGGSLRLSCAASGTIFRVRAMGWYRQAPGKEREFVAGINRGANTNYADSVKGRFTISRDNAKNTVYLQMNSLKPEDTAVYYCAVVGTSDRYYWYWGQGTQVTVSS

SEQ ID NO: 29051 - protein, 118 aa, Artificial Sequence
  Chemically Synthesized
QVQLQESGGGLVQAGGSLRLSCAASGTISARSVMGWYRQAPGKEREFVAGISRGSITYYADSVKGRFTISRDNAKNTVYLQMNSLKPEDTAVYYCAARIWRWQYHAYWGQGTQVTVSS

SEQ ID NO: 29052 - protein, 117 aa, Artificial Sequence
  Chemically Synthesized
QVQLQESGGGLVQAGGSLRLSCAASGTIFDVSMGWYRQAPGKEREFVATITSGASTNYADSVKGRFTISRDNAKNTVYLQMNSLKPEDTAVYYCAVHEDVDRSHGYWGQGTQVTVSS

SEQ ID NO: 29053 - protein, 122 aa, Artificial Sequence
  Chemically Synthesized
QVQLQESGGGLVQAGGSLRLSCAASGTIFADDFMGWYRQAPGKEREFVAAIDEGGSTYYADSVKGRFTISRDNAKNTVYLQMNSLKPEDTAVYYCAAYVYSLGYDTIPYRYWGQGTQVTVSS

SEQ ID NO: 29054 - protein, 117 aa, Artificial Sequence
  Chemically Synthesized
QVQLQESGGGLVQAGGSLRLSCAASGTISSAIMGWYRQAPGKEREFVASIDTGSITNYADSVKGRFTISRDNAKNTVYLQMNSLKPEDTAVYYCAAVGQGRRHYYYWGQGTQVTVSS

SEQ ID NO: 29055 - protein, 122 aa, Artificial Sequence
  Chemically Synthesized
QVQLQESGGGLVQAGGSLRLSCAASGYISVPYDMGWYRQAPGKERELVASIGGGTTTYYADSVKGRFTISRDNAKNTVYLQMNSLKPEDTAVYYCAVVSYLQRHAQYYHPYWGQGTQVTVSS

SEQ ID NO: 29056 - protein, 126 aa, Artificial Sequence
  Chemically Synthesized
QVQLQESGGGLVQAGGSLRLSCAASGNISPYSSMGWYRQAPGKEREFVAGITVGGSTNYADSVKGRFTISRDNAKNTVYLQMNSLKPEDTAVYYCAAVNTWANSRVDVRRRIHWYWGQGTQVTVSS

SEQ ID NO: 29057 - protein, 118 aa, Artificial Sequence
  Chemically Synthesized
QVQLQESGGGLVQAGGSLRLSCAASGTISLGKDMGWYRQAPGKERELVAGISDGSITNYADSVKGRFTISRDNAKNTVYLQMNSLKPEDTAVYYCAAYRAPSKDLWYWGQGTQVTVSS

SEQ ID NO: 29058 - protein, 118 aa, Artificial Sequence
  Chemically Synthesized
QVQLQESGGGLVQAGGSLRLSCAASGTIFRRYVMGWYRQAPGKEREFVAAITEGGSTNYADSVKGRFTISRDNAKNTVYLQMNSLKPEDTAVYYCAVIWYADYYYWYWGQGTQVTVSS

SEQ ID NO: 29059 - protein, 118 aa, Artificial Sequence
  Chemically Synthesized
QVQLQESGGGLVQAGGSLRLSCAASGSISRPFAMGWYRQAPGKERELVAAIAYGGTTYYADSVKGRFTISRDNAKNTVYLQMNSLKPEDTAVYYCAVLYLDGRYHYYWGQGTQVTVSS

SEQ ID NO: 29060 - protein, 119 aa, Artificial Sequence
  Chemically Synthesized
QVQLQESGGGLVQAGGSLRLSCAASGTIFWRDWMGWYRQAPGKERETCCRYCYWCYYLYADSVKGRFTISRDNAKNTVYLQMNSLKPEDTAVYYCAVPVAYLGGPDIYWGQGTQVTVSS

SEQ ID NO: 29061 - protein, 117 aa, Artificial Sequence
  Chemically Synthesized
QVQLQESGGGLVQAGGSLRLSCAASGSISNESMGWYRQAPGKEREFVATIDSGATTNYADSVKGRFTISRDNAKNTVYLQMNSLKPEDTAVYYCAAYSGYGLYFGYWGQGTQVTVSS

SEQ ID NO: 29062 - protein, 118 aa, Artificial Sequence
  Chemically Synthesized
QVQLQESGGGLVQAGGSLRLSCAASGNISTYPYMGWYRQAPGKEREFVATINHGGSTNYADSVKGRFTISRDNAKNTVYLQMNSLKPEDTAVYYCAAWSLGVTDFAYWGQGTQVTVSS

SEQ ID NO: 29063 - protein, 109 aa, Artificial Sequence
  Chemically Synthesized
QVQLQESGGGLVQAGGSLRLSCAASGNISISTMGWYRQAPGKERELVAGIDQGGNTYYADSVKGRFTISRDNAKNTVYLQMNSLKPEDTAVYYCALCYWGQGTQVTVSS

SEQ ID NO: 29064 - protein, 118 aa, Artificial Sequence
  Chemically Synthesized
QVQLQESGGGLVQAGGSLRLSCAASGNIFGDYVMGWYRQAPGKERELVAAISIGGITNYADSVKGRFTISRDNAKNTVYLQMNSLKPEDTAVYYCAAYYYDDAPFYYWGQGTQVTVSS

SEQ ID NO: 29065 - protein, 109 aa, Artificial Sequence
  Chemically Synthesized
QVQLQESGGGLVQAGGSLRLSCAASGNIFNWGNMGWYRQAPGKEREFVAAIDEGGNTYYADSVKGRFTISRDNAKNTVYLQMNSLKPEDTAVYYCASYWGQGTQVTVSS

SEQ ID NO: 29066 - protein, 118 aa, Artificial Sequence
  Chemically Synthesized
QVQLQESGGGLVQAGGSLRLSCAASGNIFPQDVMGWYRQAPGKEREFVAAIGPGTTTNYADSVKGRFTISRDNAKNTVYLQMNSLKPEDTAVYYCAVLSDTRPYLWYWGQGTQVTVSS

SEQ ID NO: 29067 - protein, 126 aa, Artificial Sequence
  Chemically Synthesized
QVQLQESGGGLVQAGGSLRLSCAASGSISRSPAMGWYRQAPGKERELVAGITWGGNTYYADSVKGRFTISRDNAKNTVYLQMNSLKPEDTAVYYCAVLGRRSLDDNTDRVHYYYYWGQGTQVTVSS

SEQ ID NO: 29068 - protein, 118 aa, Artificial Sequence
  Chemically Synthesized
QVQLQESGGGLVQAGGSLRLSCAASGYISIPTYMGWYRQAPGKEREFVATIGYGSSTNYADSVKGRFTISRDNAKNTVYLQMNSLKPEDTAVYYCAVLVYYHVYHYYWGQGTQVTVSS

SEQ ID NO: 29069 - protein, 118 aa, Artificial Sequence
  Chemically Synthesized
QVQLQESGGGLVQAGGSLRLSCAASGYIFSLDTMGWYRQAPGKEREFVASIGAGTITNYADSVKGRFTISRDNAKNTVYLQMNSLKPEDTAVYYCAALAYSERYFWYWGQGTQVTVSS

SEQ ID NO: 29070 - protein, 118 aa, Artificial Sequence
  Chemically Synthesized
QVQLQESGGGLVQAGGSLRLSCAASGTISYSPAMGWYRQAPGKEREFVAAIGYGGITYYADSVKGRFTISRDNAKNTVYLQMNSLKPEDTAVYYCAALGPPTGQFPYWGQGTQVTVSS

SEQ ID NO: 29071 - protein, 118 aa, Artificial Sequence
  Chemically Synthesized
QVQLQESGGGLVQAGGSLRLSCAASGSISYTRPMGWYRQAPGKEREFVAGISGGTNTNYADSVKGRFTISRDNAKNTVYLQMNSLKPEDTAVYYCAAGSKYDVPFYYWGQGTQVTVSS

SEQ ID NO: 29072 - protein, 111 aa, Artificial Sequence
  Chemically Synthesized
QVQLQESGGGLVQAGGSLRLSCAASGNIFTTVMGWYRQAPGKEREFVATINYGTITNYADSVKGRFTISRDNAKNTVYLQMNSLKPEDTAVYYCAATTFYWGQGTQVTVSS

SEQ ID NO: 29073 - protein, 125 aa, Artificial Sequence
  Chemically Synthesized
QVQLQESGGGLVQAGGSLRLSCAASGSIFEGTYMGWYRQAPGKEREFVATIGNGTTTYYADSVKGRFTISRDNAKNTVYLQMNSLKPEDTAVYYCAALYAYSEVYSLTLGSTIYWGQGTQVTVSS

SEQ ID NO: 29074 - protein, 121 aa, Artificial Sequence
  Chemically Synthesized
QVQLQESGGGLVQAGGSLRLSCAASGSIFVRPMGWYRQAPGKERELVATINDGASTNYADSVKGRFTISRDNAKNTVYLQMNSLKPEDTAVYYCAVTVKTYFYSYPIHGYWGQGTQVTVSS

SEQ ID NO: 29075 - protein, 118 aa, Artificial Sequence
  Chemically Synthesized
QVQLQESGGGLVQAGGSLRLSCAASGNISPVRAMGWYRQAPGKERELVASISGGTNTNYADSVKGRFTISRDNAKNTVYLQMNSLKPEDTAVYYCAVNEGRYATYDYWGQGTQVTVSS

SEQ ID NO: 29076 - protein, 118 aa, Artificial Sequence
  Chemically Synthesized
QVQLQESGGGLVQAGGSLRLSCAASGSIFHLAWMGWYRQAPGKERELVASITHGTITNYADSVKGRFTISRDNAKNTVYLQMNSLKPEDTAVYYCAASDYWYDSFLYWGQGTQVTVSS

SEQ ID NO: 29077 - protein, 125 aa, Artificial Sequence
  Chemically Synthesized
QVQLQESGGGLVQAGGSLRLSCAASGTIFVTQDMGWYRQAPGKERELVASISYGGNTNYADSVKGRFTISRDNAKNTVYLQMNSLKPEDTAVYYCAVAYSVGVVNVVTLSTTMYWGQGTQVTVSS

SEQ ID NO: 29078 - protein, 118 aa, Artificial Sequence
  Chemically Synthesized
QVQLQESGGGLVQAGGSLRLSCAASGNISNAPDMGWYRQAPGKERELVATISTWYYYLYADSVKGRFTISRDNAKNTVYLQMNSLKPEDTAVYYCAVRDSIIAYLKYWGQGTQVTVSS

SEQ ID NO: 29079 - protein, 118 aa, Artificial Sequence
  Chemically Synthesized
QVQLQESGGGLVQAGGSLRLSCAASGTIFDGTIMGWYRQAPGKERELVASIASGASTYYADSVKGRFTISRDNAKNTVYLQMNSLKPEDTAVYYCAVKDGYGYSYSYWGQGTQVTVSS

SEQ ID NO: 29080 - protein, 122 aa, Artificial Sequence
  Chemically Synthesized
QVQLQESGGGLVQAGGSLRLSCAASGTISYDAYMGWYRQAPGKERELVASIGPGTNTNYADSVKGRFTISRDNAKNTVYLQMNSLKPEDTAVYYCAADGTSVHQDLYLHPYWGQGTQVTVSS

SEQ ID NO: 29081 - protein, 110 aa, Artificial Sequence
  Chemically Synthesized
QVQLQESGGGLVQAGGSLRLSCAASGTISRGSMGWYRQAPGKEREFVAGINGGGTTNYADSVKGRFTISRDNAKNTVYLQMNSLKPEDTAVYYCAYLSYWGQGTQVTVSS

SEQ ID NO: 29082 - protein, 121 aa, Artificial Sequence
  Chemically Synthesized
QVQLQESGGGLVQAGGSLRLSCAASGSIFGTTMGWYRQAPGKERELVAGINAGATTYYADSVKGRFTISRDNAKNTVYLQMNSLKPEDTAVYYCAAPRQGRTDFNDDFYYWGQGTQVTVSS

SEQ ID NO: 29083 - protein, 118 aa, Artificial Sequence
  Chemically Synthesized
QVQLQESGGGLVQAGGSLRLSCAASGSISGNDYMGWYRQAPGKERELVAGIDNGTITNYADSVKGRFTISRDNAKNTVYLQMNSLKPEDTAVYYCAADVFETYGHVYWGQGTQVTVSS

SEQ ID NO: 29084 - protein, 117 aa, Artificial Sequence
  Chemically Synthesized
QVQLQESGGGLVQAGGSLRLSCAASGSIMGWYRQAPGKERELVAGIAQGGTTNYADSVKGRFTISRDNAKNTVYLQMNSLKPEDTAVYYCAVHVAIVLLAAILHYYWGQGTQVTVSS

SEQ ID NO: 29085 - protein, 121 aa, Artificial Sequence
  Chemically Synthesized
QVQLQESGGGLVQAGGSLRLSCAASGTISPSVMGWYRQAPGKEREFVAAISAGTNTYYADSVKGRFTISRDNAKNTVYLQMNSLKPEDTAVYYCAVRVWYQYLNGYLFQYWGQGTQVTVSS

SEQ ID NO: 29086 - protein, 122 aa, Artificial Sequence
  Chemically Synthesized
QVQLQESGGGLVQAGGSLRLSCAASGNISGRAIMGWYRQAPGKEREFVAGISYGASTNYADSVKGRFTISRDNAKNTVYLQMNSLKPEDTAVYYCAAWDDSYGGSWSVHQYWGQGTQVTVSS

SEQ ID NO: 29087 - protein, 118 aa, Artificial Sequence
  Chemically Synthesized
QVQLQESGGGLVQAGGSLRLSCAASGTISVGRDMGWYRQAPGKERELVATITYGTSTYYADSVKGRFTISRDNAKNTVYLQMNSLKPEDTAVYYCAAGYDAYDVLSYWGQGTQVTVSS

SEQ ID NO: 29088 - protein, 126 aa, Artificial Sequence
  Chemically Synthesized
QVQLQESGGGLVQAGGSLRLSCAASGNISGAYRMGWYRQAPGKERELVAAIAGGASTNYADSVKGRFTISRDNAKNTVYLQMNSLKPEDTAVYYCAAYDSVTTRGVRTTVTSVIYWGQGTQVTVSS

SEQ ID NO: 29089 - protein, 118 aa, Artificial Sequence
  Chemically Synthesized
QVQLQESGGGLVQAGGSLRLSCAASGSISYSYSMGWYRQAPGKERELVAAITYGASTYYADSVKGRFTISRDNAKNTVYLQMNSLKPEDTAVYYCAVTPPLRIRSWYWGQGTQVTVSS

SEQ ID NO: 29090 - protein, 122 aa, Artificial Sequence
  Chemically Synthesized
QVQLQESGGGLVQAGGSLRLSCAASGTISRVWRMGWYRQAPGKERELVAGINSGGNTNYADSVKGRFTISRDNAKNTVYLQMNSLKPEDTAVYYCAAAVLGYQDDTSELDYWGQGTQVTVSS

SEQ ID NO: 29091 - protein, 117 aa, Artificial Sequence
  Chemically Synthesized
QVQLQESGGGLVQAGGSLRLSCAASGNISDTRHMGWYRQAPGKEREFVATIASGTTTNYADSVKGRFTISRDNAKNTVYLQMNSLKPEDTAVYYCAAKYYYLGTSYWGQGTQVTVSS

SEQ ID NO: 29092 - protein, 122 aa, Artificial Sequence
  Chemically Synthesized
QVQLQESGGGLVQAGGSLRLSCAASGTIFGPYYMGWYRQAPGKEREFVASIDSGGTTNYADSVKGRFTISRDNAKNTVYLQMNSLKPEDTAVYYCAAEPILGGIATAYYTYWGQGTQVTVSS

SEQ ID NO: 29093 - protein, 118 aa, Artificial Sequence
  Chemically Synthesized
QVQLQESGGGLVQAGGSLRLSCAASGNIFFVAYMGWYRQAPGKERELVASIGRGTTTNYADSVKGRFTISRDNAKNTVYLQMNSLKPEDTAVYYCAAGKYVPPSLRYWGQGTQVTVSS

SEQ ID NO: 29094 - protein, 117 aa, Artificial Sequence
  Chemically Synthesized
QVQLQESGGGLVQAGGSLRLSCAASGTIFDIGKMGWYRQAPGKERELVASILVVVVPYADSVKGRFTISRDNAKNTVYLQMNSLKPEDTAVYYCAAGYFYLAYYGYWGQGTQVTVSS

SEQ ID NO: 29095 - protein, 110 aa, Artificial Sequence
  Chemically Synthesized
QVQLQESGGGLVQAGGSLRLSCAASGYISYYYDMGWYRQAPGKEREFVAAIDYGSSTNYADSVKGRFTISRDNAKNTVYLQMNSLKPEDTAVYYCAFMYWGQGTQVTVSS

SEQ ID NO: 29096 - protein, 118 aa, Artificial Sequence
  Chemically Synthesized
QVQLQESGGGLVQAGGSLRLSCAASGTIFDAYHMGWYRQAPGKEREFVASIDDGGSTNYADSVKGRFTISRDNAKNTVYLQMNSLKPEDTAVYYCAAVPNDGLSLGYWGQGTQVTVSS

SEQ ID NO: 29097 - protein, 118 aa, Artificial Sequence
  Chemically Synthesized
QVQLQESGGGLVQAGGSLRLSCAASGYISDAGVMGWYRQAPGKERELVATIAYGGSTYYADSVKGRFTISRDNAKNTVYLQMNSLKPEDTAVYYCAADYFPTDILYYWGQGTQVTVSS

SEQ ID NO: 29098 - protein, 118 aa, Artificial Sequence
  Chemically Synthesized
QVQLQESGGGLVQAGGSLRLSCAASGNISDYIPMGWYRQAPGKEREFVATIDVGGSTNYADSVKGRFTISRDNAKNTVYLQMNSLKPEDTAVYYCAVYNGTVYDLVYWGQGTQVTVSS

SEQ ID NO: 29099 - protein, 126 aa, Artificial Sequence
  Chemically Synthesized
QVQLQESGGGLVQAGGSLRLSCAASGTIFTQISMGWYRQAPGKERELVATIARGTSTNYADSVKGRFTISRDNAKNTVYLQMNSLKPEDTAVYYCAADAAPSDLDEYPYYDGFDYWGQGTQVTVSS

SEQ ID NO: 29100 - protein, 118 aa, Artificial Sequence
  Chemically Synthesized
QVQLQESGGGLVQAGGSLRLSCAASGTISYPYNMGWYRQAPGKEREFVAGINYGANTYYADSVKGRFTISRDNAKNTVYLQMNSLKPEDTAVYYCAAIYNYYYAHWYWGQGTQVTVSS

SEQ ID NO: 29101 - protein, 114 aa, Artificial Sequence
  Chemically Synthesized
QVQLQESGGGLVQAGGSLRLSCAASGSISPAYNMGWYRQAPGKEREFVAGIDQGSNTYYADSVKGRFTISRDNAKNTVYLQMNSLKPEDTAVYYCAVGPGLAYWGQGTQVTVSS

SEQ ID NO: 29102 - protein, 117 aa, Artificial Sequence
  Chemically Synthesized
QVQLQESGGGLVQAGGSLRLSCAASGTILLLTMGWYRQAPGKERELVASINYGGITYYADSVKGRFTISRDNAKNTVYLQMNSLKPEDTAVYYCAARHYDDRPHSYWGQGTQVTVSS

SEQ ID NO: 29103 - protein, 125 aa, Artificial Sequence
  Chemically Synthesized
QVQLQESGGGLVQAGGSLRLSCAASGNIFVDDYMGWYRQAPGKERELATIDYGGSTNYADSVKGRFTISRDNAKNTVYLQMNSLKPEDTAVYYCAVDNVDIDYNIVFPADGHDYWGQGTQVTVSS

SEQ ID NO: 29104 - protein, 122 aa, Artificial Sequence
  Chemically Synthesized
QVQLQESGGGLVQAGGSLRLSCAASGYIFPPPFMGWYRQAPGKERELVAGIASGTTTNYADSVKGRFTISRDNAKNTVYLQMNSLKPEDTAVYYCAVDAYGDIGPYDGYQYWGQGTQVTVSS

SEQ ID NO: 29105 - protein, 122 aa, Artificial Sequence
  Chemically Synthesized
QVQLQESGGGLVQAGGSLRLSCAASGNIFITDVMGWYRQAPGKEREFVASIDHGGTTNYADSVKGRFTISRDNAKNTVYLQMNSLKPEDTAVYYCAVYADDSDTSGYSHFYWGQGTQVTVSS

SEQ ID NO: 29106 - protein, 122 aa, Artificial Sequence
  Chemically Synthesized
QVQLQESGGGLVQAGGSLRLSCAASGSISRPALMGWYRQAPGKEREFVAAIGYGSNTNYADSVKGRFTISRDNAKNTVYLQMNSLKPEDTAVYYCAVLGWVFPYYARRHAYWGQGTQVTVSS

SEQ ID NO: 29107 - protein, 116 aa, Artificial Sequence
  Chemically Synthesized
QVQLQESGGGLVQAGGSLRLSCAASGNIFSAPMGWYRQAPGKERELVAGIGDGTSTNYADSVKGRFTISRDNAKNTVYLQMNSLKPEDTAVYYCAASTVLLTVIYWGQGTQVTVSS

SEQ ID NO: 29108 - protein, 118 aa, Artificial Sequence
  Chemically Synthesized
QVQLQESGGGLVQAGGSLRLSCAASGSISVNYDMGWYRQAPGKEREFVATIDGGSSTNYADSVKGRFTISRDNAKNTVYLQMNSLKPEDTAVYYCAVVIIYPDTHPYWGQGTQVTVSS

SEQ ID NO: 29109 - protein, 122 aa, Artificial Sequence
  Chemically Synthesized
QVQLQESGGGLVQAGGSLRLSCAASGTIFLIAYMGWYRQAPGKERELVAGITRGANTYYADSVKGRFTISRDNAKNTVYLQMNSLKPEDTAVYYCAVVEPIPRRVVYPHPYWGQGTQVTVSS

SEQ ID NO: 29110 - protein, 121 aa, Artificial Sequence
  Chemically Synthesized
QVQLQESGGGLVQAGGSLRLSCAASGTISWSVMGWYRQAPGKEREFVATIDLGSITNYADSVKGRFTISRDNAKNTVYLQMNSLKPEDTAVYYCAVTYHHDVYTRILFAYWGQGTQVTVSS

SEQ ID NO: 29111 - protein, 122 aa, Artificial Sequence
  Chemically Synthesized
QVQLQESGGGLVQAGGSLRLSCAASGSIFIVLSMGWYRQAPGKERELVAGITNGSSTYYADSVKGRFTISRDNAKNTVYLQMNSLKPEDTAVYYCAAESYDYVRGTSVYTYWGQGTQVTVSS

SEQ ID NO: 29112 - protein, 118 aa, Artificial Sequence
  Chemically Synthesized
QVQLQESGGGLVQAGGSLRLSCAASGTISVNTRMGWYRQAPGKERELVAGIGWGGNTYYADSVKGRFTISRDNAKNTVYLQMNSLKPEDTAVYYCAVGNVTGTGLIYWGQGTQVTVSS

SEQ ID NO: 29113 - protein, 118 aa, Artificial Sequence
  Chemically Synthesized
QVQLQESGGGLVQAGGSLRLSCAASGYISAFRDMGWYRQAPGKERELVASIDRGGITYYADSVKGRFTISRDNAKNTVYLQMNSLKPEDTAVYYCAVGTVVDPIHYYWGQGTQVTVSS

SEQ ID NO: 29114 - protein, 122 aa, Artificial Sequence
  Chemically Synthesized
QVQLQESGGGLVQAGGSLRLSCAASGSISSEVYMGWYRQAPGKERELVAAISWGGNTYYADSVKGRFTISRDNAKNTVYLQMNSLKPEDTAVYYCAVEQHDIRLRGYTYGYWGQGTQVTVSS

SEQ ID NO: 29115 - protein, 118 aa, Artificial Sequence
  Chemically Synthesized
QVQLQESGGGLVQAGGSLRLSCAASGYIFIAWRMGWYRQAPGKEREFVAAIGPGATTNYADSVKGRFTISRDNAKNTVYLQMNSLKPEDTAVYYCAVTAPYWEYLHYWGQGTQVTVSS

SEQ ID NO: 29116 - protein, 118 aa, Artificial Sequence
  Chemically Synthesized
QVQLQESGGGLVQAGGSLRLSCAASGNISPYDYMGWYRQAPGKERELVATIATGSSTNYADSVKGRFTISRDNAKNTVYLQMNSLKPEDTAVYYCAVAYDLLLYLSYWGQGTQVTVSS

SEQ ID NO: 29117 - protein, 118 aa, Artificial Sequence
  Chemically Synthesized
QVQLQESGGGLVQAGGSLRLSCAASGTIFSNVWMGWYRQAPGKERELVATIGIGAITYYADSVKGRFTISRDNAKNTVYLQMNSLKPEDTAVYYCAAVADTVYAHEYWGQGTQVTVSS

SEQ ID NO: 29118 - protein, 118 aa, Artificial Sequence
  Chemically Synthesized
QVQLQESGGGLVQAGGSLRLSCAASGYISDIDDMGWYRQAPGKERELVAAIAPGTITNYADSVKGRFTISRDNAKNTVYLQMNSLKPEDTAVYYCAAYNEIDLKHFYWGQGTQVTVSS

SEQ ID NO: 29119 - protein, 126 aa, Artificial Sequence
  Chemically Synthesized
QVQLQESGGGLVQAGGSLRLSCAASGNISDATAMGWYRQAPGKERELVATINRGATTYYADSVKGRFTISRDNAKNTVYLQMNSLKPEDTAVYYCAVLRKLAHDGSRGLDYYHRYWGQGTQVTVSS

SEQ ID NO: 29120 - protein, 122 aa, Artificial Sequence
  Chemically Synthesized
QVQLQESGGGLVQAGGSLRLSCAASGSISNTNSMGWYRQAPGKERELVASISWGGITYYADSVKGRFTISRDNAKNTVYLQMNSLKPEDTAVYYCAAGDEYTIGTIVGYDYWGQGTQVTVSS

SEQ ID NO: 29121 - protein, 118 aa, Artificial Sequence
  Chemically Synthesized
QVQLQESGGGLVQAGGSLRLSCAASGTISNGGYMGWYRQAPGKERELVAAITDGTTTNYADSVKGRFTISRDNAKNTVYLQMNSLKPEDTAVYYCAAHVHDVKAHTYWGQGTQVTVSS

SEQ ID NO: 29122 - protein, 116 aa, Artificial Sequence
  Chemically Synthesized
QVQLQESGGGLVQAGGSLRLSCAASGYIFGDPMGWYRQAPGKEREFVAGIASVVLPYADSVKGRFTISRDNAKNTVYLQMNSLKPEDTAVYYCAADPSGTYVYDYWGQGTQVTVSS

SEQ ID NO: 29123 - protein, 120 aa, Artificial Sequence
  Chemically Synthesized
QVQLQESGGGLVQAGGSLRLSCAASGSISAAQYMGWYRQAPGKERELVASIAFGTTTNYADSVKGRFTISRDNAKNTVYLQMNSLKPEDTAVYYCAVGSTLVTTTCVMYWGQGTQVTVSS

SEQ ID NO: 29124 - protein, 118 aa, Artificial Sequence
  Chemically Synthesized
QVQLQESGGGLVQAGGSLRLSCAASGYIFYDSDMGWYRQAPGKEREFVAAIDYGGITYYADSVKGRFTISRDNAKNTVYLQMNSLKPEDTAVYYCAAGDDRYYQHGYWGQGTQVTVSS

SEQ ID NO: 29125 - protein, 118 aa, Artificial Sequence
  Chemically Synthesized
QVQLQESGGGLVQAGGSLRLSCAASGYISRYAYMGWYRQAPGKERELVASISRGSSTYYADSVKGRFTISRDNAKNTVYLQMNSLKPEDTAVYYCAAVVYTDDLLDYWGQGTQVTVSS

SEQ ID NO: 29126 - protein, 126 aa, Artificial Sequence
  Chemically Synthesized
QVQLQESGGGLVQAGGSLRLSCAASGTIFPDTDMGWYRQAPGKEREFVATIGVGGSTNYADSVKGRFTISRDNAKNTVYLQMNSLKPEDTAVYYCAAWYLYYDRYSNRESSVHAYWGQGTQVTVSS

SEQ ID NO: 29127 - protein, 118 aa, Artificial Sequence
  Chemically Synthesized
QVQLQESGGGLVQAGGSLRLSCAASGTISDLAGMGWYRQAPGKEREFVAAIGAGSSTYYADSVKGRFTISRDNAKNTVYLQMNSLKPEDTAVYYCAAKRNVKDGYAYWGQGTQVTVSS

SEQ ID NO: 29128 - protein, 118 aa, Artificial Sequence
  Chemically Synthesized
QVQLQESGGGLVQAGGSLRLSCAASGSISAWEAMGWYRQAPGKEREFVATITDGANTYYADSVKGRFTISRDNAKNTVYLQMNSLKPEDTAVYYCAVTGDDAGYLGYWGQGTQVTVSS

SEQ ID NO: 29129 - protein, 117 aa, Artificial Sequence
  Chemically Synthesized
QVQLQESGGGLVQAGGSLRLSCAASGNISRYYDMGWYRQAPGKERELVAGIDGGGITYYADSVKGRFTISRDNAKNTVYLQMNSLKPEDTAVYYCAVRSDATLRIYWGQGTQVTVSS

SEQ ID NO: 29130 - protein, 125 aa, Artificial Sequence
  Chemically Synthesized
QVQLQESGGGLVQAGGSLRLSCAASGTISSDNIMGWYRQAPGKEREFVATINHGANTYYADSVKGRFTISRDNAKNTVYLQMNSLKPEDTAVYYCAVGHERYGYAKAPGYSGFYWGQGTQVTVSS

SEQ ID NO: 29131 - protein, 122 aa, Artificial Sequence
  Chemically Synthesized
QVQLQESGGGLVQAGGSLRLSCAASGNTFVPPYMGWYRQAPGKERELVAAITYGASTYYADSVKGRFTISRDNAKNTVYLQMNSLKPEDTAVYYCAVRARDYTYYGEKYVYWGQGTQVTVSS

SEQ ID NO: 29132 - protein, 118 aa, Artificial Sequence
  Chemically Synthesized
QVQLQESGGGLVQAGGSLRLSCAASGNIFDLTTMGWYRQAPGKEREFVAAIGIGTITYYADSVKGRFTISRDNAKNTVYLQMNSLKPEDTAVYYCAVYSFDDADHQYWGQGTQVTVSS

SEQ ID NO: 29133 - protein, 112 aa, Artificial Sequence
  Chemically Synthesized
QVQLQESGGGLVQAGGSLRLSCAASGYISYPWYMGWYRQAPGKEREFVASISAGSTTNYADSVKGRFTISRDNAKNTVYLQMNSLKPEDTAVYYCASYYAYWGQGTQVTVSS

SEQ ID NO: 29134 - protein, 118 aa, Artificial Sequence
  Chemically Synthesized
QVQLQESGGGLVQAGGSLRLSCAASGTISHRSDMGWYRQAPGKERELVAAITYGTSTYYADSVKGRFTISRDNAKNTVYLQMNSLKPEDTAVYYCAAHTYGQDTHDYWGQGTQVTVSS

SEQ ID NO: 29135 - protein, 118 aa, Artificial Sequence
  Chemically Synthesized
QVQLQESGGGLVQAGGSLRLSCAASGYISAPTNMGWYRQAPGKERELVAGIGYGGSTYYADSVKGRFTISRDNAKNTVYLQMNSLKPEDTAVYYCAVWWRALLTHVYWGQGTQVTVSS

SEQ ID NO: 29136 - protein, 118 aa, Artificial Sequence
  Chemically Synthesized
QVQLQESGGGLVQAGGSLRLSCAASGTISLAPIMGWYRQAPGKERELVAAISIGSNTYYADSVKGRFTISRDNAKNTVYLQMNSLKPEDTAVYYCAVLYPFDYNLGYWGQGTQVTVSS

SEQ ID NO: 29137 - protein, 118 aa, Artificial Sequence
  Chemically Synthesized
QVQLQESGGGLVQAGGSLRLSCAASGNISLDGYMGWYRQAPGKEREFVAGINIGASTYYADSVKGRFTISRDNAKNTVYLQMNSLKPEDTAVYYCAVYGAYAGVLQYWGQGTQVTVSS

SEQ ID NO: 29138 - protein, 122 aa, Artificial Sequence
  Chemically Synthesized
QVQLQESGGGLVQAGGSLRLSCAASGTISYSDYMGWYRQAPGKERELVAAIGSGGITYYADSVKGRFTISRDNAKNTVYLQMNSLKPEDTAVYYCAVVGLYDKPVRGSLAYWGQGTQVTVSS

SEQ ID NO: 29139 - protein, 122 aa, Artificial Sequence
  Chemically Synthesized
QVQLQESGGGLVQAGGSLRLSCAASGYISDDWDMGWYRQAPGKEREFVAGITSGANTNYADSVKGRFTISRDNAKNTVYLQMNSLKPEDTAVYYCAVWHYGGYLEQTVHRYWGQGTQVTVSS

SEQ ID NO: 29140 - protein, 118 aa, Artificial Sequence
  Chemically Synthesized
QVQLQESGGGLVQAGGSLRLSCAASGSISPRTVMGWYRQAPGKERELVAGIGAGGTTYYADSVKGRFTISRDNAKNTVYLQMNSLKPEDTAVYYCAAQGPDEYDFYYWGQGTQVTVSS

SEQ ID NO: 29141 - protein, 117 aa, Artificial Sequence
  Chemically Synthesized
QVQLQESGGGLVQAGGSLRLSCAASGNISLGLYMGWYRQAPGKEREFVASISRGGITNYADSVKGRFTISRDNAKNTVYLQMNSLKPEDTAVYYCAAYYAWLSYNYWGQGTQVTVSS

SEQ ID NO: 29142 - protein, 118 aa, Artificial Sequence
  Chemically Synthesized
QVQLQESGGGLVQAGGSLRLSCAASGTIFEPWYMGWYRQAPGKERELVAGIAQGGITNYADSVKGRFTISRDNAKNTVYLQMNSLKPEDTAVYYCAVIYPPQHILPYWGQGTQVTVSS

SEQ ID NO: 29143 - protein, 125 aa, Artificial Sequence
  Chemically Synthesized
QVQLQESGGGLVQAGGSLRLSCAASGYISDTYYMGWYRQAPGKEREFVATIGYGGITNYADSVKGRFTISRDNAKNTVYLQMNSLKPEDTAVYYCAVGVGPVEDFPYTKPWSHYWGQGTQVTVSS

SEQ ID NO: 29144 - protein, 118 aa, Artificial Sequence
  Chemically Synthesized
QVQLQESGGGLVQAGGSLRLSCAASGTISTKWDMGWYRQAPGKEREFVATIGSGSNTNYADSVKGRFTISRDNAKNTVYLQMNSLKPEDTAVYYCAAVAGFIHSYYYWGQGTQVTVSS

SEQ ID NO: 29145 - protein, 117 aa, Artificial Sequence
  Chemically Synthesized
QVQLQESGGGLVQAGGSLRLSCAASGSIFDDLDMGWYRQAPGKERELVPVLVRVVLPYADSVKGRFTISRDNAKNTVYLQMNSLKPEDTAVYYCAATQGTSVYHAYWGQGTQVTVSS

SEQ ID NO: 29146 - protein, 118 aa, Artificial Sequence
  Chemically Synthesized
QVQLQESGGGLVQAGGSLRLSCAASGNIFRDTLMGWYRQAPGKERELVASIGRGGNTYYADSVKGRFTISRDNAKNTVYLQMNSLKPEDTAVYYCAVYYYPTYYLRYWGQGTQVTVSS

SEQ ID NO: 29147 - protein, 125 aa, Artificial Sequence
  Chemically Synthesized
QVQLQESGGGLVQAGGSLRLSCAASGSIFYRYHMGWYRQAPGKERELVAAIGAGANTYADSVKGRFTISRDNAKNTVYLQMNSLKPEDTAVYYCAADHGDFRYWYSRYWYLFYYWGQGTQVTVSS

SEQ ID NO: 29148 - protein, 118 aa, Artificial Sequence
  Chemically Synthesized
QVQLQESGGGLVQAGGSLRLSCAASGYISGFVSMGWYRQAPGKEREFVAAITDGGSTYYADSVKGRFTISRDNAKNTVYLQMNSLKPEDTAVYYCAAHGGSHGGFYYWGQGTQVTVSS

SEQ ID NO: 29149 - protein, 115 aa, Artificial Sequence
  Chemically Synthesized
QVQLQESGGGLVQAGGSLRLSCAASGNISAAFFMGWYRQAPGKEREFVATISGGASTNYADSVKGRFTISRDNAKNTVYLQMNSLKPEDTAVYYCAVYAYQHDYWGQGTQVTVSS

SEQ ID NO: 29150 - protein, 122 aa, Artificial Sequence
  Chemically Synthesized
QVQLQESGGGLVQAGGSLRLSCAASGTIFTHANMGWYRQAPGKERELVATIAVGTTTNYADSVKGRFTISRDNAKNTVYLQMNSLKPEDTAVYYCAVDVDVQSRLPIEYWYWGQGTQVTVSS

SEQ ID NO: 29151 - protein, 118 aa, Artificial Sequence
  Chemically Synthesized
QVQLQESGGGLVQAGGSLRLSCAASGNISRYEYMGWYRQAPGKERELVAAINVGGTTYYADSVKGRFTISRDNAKNTVYLQMNSLKPEDTAVYYCAADYNVVWNYAYWGQGTQVTVSS

SEQ ID NO: 29152 - protein, 122 aa, Artificial Sequence
  Chemically Synthesized
QVQLQESGGGLVQAGGSLRLSCAASGTIFRWYYMGWYRQAPGKEREFVASITDGGTTYYADSVKGRFTISRDNAKNTVYLQMNSLKPEDTAVYYCAVYIYDGYLVTYLHYYWGQGTQVTVSS

SEQ ID NO: 29153 - protein, 118 aa, Artificial Sequence
  Chemically Synthesized
QVQLQESGGGLVQAGGSLRLSCAASGTISNDTSMGWYRQAPGKERELVAAINGGSNTNYADSVKGRFTISRDNAKNTVYLQMNSLKPEDTAVYYCAAWKVSVGQHPYWGQGTQVTVSS

SEQ ID NO: 29154 - protein, 115 aa, Artificial Sequence
  Chemically Synthesized
QVQLQESGGGLVQAGGSLRLSCAASGSIFYRVYMGWYRQAPGKERELVASIAVGGNTYYADSVKGRFTISRDNAKNTVYLQMNSLKPEDTAVYYCALVTLLVIYWGQGTQVTVSS

SEQ ID NO: 29155 - protein, 122 aa, Artificial Sequence
  Chemically Synthesized
QVQLQESGGGLVQAGGSLRLSCAASGNISNGHSMGWYRQAPGKERELVATIGYGSTTYYADSVKGRFTISRDNAKNTVYLQMNSLKPEDTAVYYCAAGRAYYDQAHYYLSYWGQGTQVTVSS

SEQ ID NO: 29156 - protein, 118 aa, Artificial Sequence
  Chemically Synthesized
QVQLQESGGGLVQAGGSLRLSCAASGTISTGSGMGWYRQAPGKERELVAAITSGTNTNYADSVKGRFTISRDNAKNTVYLQMNSLKPEDTAVYYCAVHEPRNNPHAYWGQGTQVTVSS

SEQ ID NO: 29157 - protein, 116 aa, Artificial Sequence
  Chemically Synthesized
QVQLQESGGGLVQAGGSLRLSCAASGTILTTSMGWYRQAPGKERELVASITNGGITYYADSVKGRFTISRDNAKNTVYLQMNSLKPEDTAVYYCAVTYGYIYSIYWGQGTQVTVSS

SEQ ID NO: 29158 - protein, 121 aa, Artificial Sequence
  Chemically Synthesized
QVQLQESGGGLVQAGGSLRLSCAASGNIFYIYYMGWYRQAPGKEREFVAGIDTGTSTNYADSVKGRFTISRDNAKNTVYLQMNSLKPEDTAVYYCAARARVYELDDYYWYWGQGTQVTVSS

SEQ ID NO: 29159 - protein, 121 aa, Artificial Sequence
  Chemically Synthesized
QVQLQESGGGLVQAGGSLRLSCAASGYIFSYADMGWYRQAPGKERELVAAINSGGTTNYADSVKGRFTISRDNAKNTVYLQMNSLKPEDTAVYYCAVRPAAYYDTGHYLYWGQGTQVTVSS

SEQ ID NO: 29160 - protein, 118 aa, Artificial Sequence
  Chemically Synthesized
QVQLQESGGGLVQAGGSLRLSCAASGNISTVPYMGWYRQAPGKEREFVAAIDPGASTYYADSVKGRFTISRDNAKNTVYLQMNSLKPEDTAVYYCAVYQPYRSAFNYWGQGTQVTVSS

SEQ ID NO: 29161 - protein, 118 aa, Artificial Sequence
  Chemically Synthesized
QVQLQESGGGLVQAGGSLRLSCAASGNISSTEQMGWYRQAPGKERELVAAIGSGGTTYYADSVKGRFTISRDNAKNTVYLQMNSLKPEDTAVYYCAVIAQYYPGHGYWGQGTQVTVSS

SEQ ID NO: 29162 - protein, 119 aa, Artificial Sequence
  Chemically Synthesized
QVQLQESGGGLVQAGGSLRLSCAASGYISAVGAMGWYRQAPGKERELVAAIASGAITNYADSVKGRFTISRDNAKNTVYLQMNSLKPEDTAVYYCAAGRDDYPNSFGYWGQGTQVTVSS

SEQ ID NO: 29163 - protein, 117 aa, Artificial Sequence
  Chemically Synthesized
QVQLQESGGGLVQAGGSLRLSCAASGSIFPTGYMGWYRQAPGKEREFVAGISYGSTTYYADSVKGRFTISRDNAKNTVYLQMNSLKPEDTAVYYCAVERSVTRYTYWGQGTQVTVSS

SEQ ID NO: 29164 - protein, 112 aa, Artificial Sequence
  Chemically Synthesized
QVQLQESGGGLVQAGGSLRLSCAASGSISRYDYMGWYRQAPGKEREFGANTNYADSVKGRFTISRDNAKNTVYLQMNSLKPEDTAVYYCAARQVTNTRYIYWGQGTQVTVSS

SEQ ID NO: 29165 - protein, 118 aa, Artificial Sequence
  Chemically Synthesized
QVQLQESGGGLVQAGGSLRLSCAASGTISYHIDMGWYRQAPGKEREFVAAIDNGSSTYYADSVKGRFTISRDNAKNTVYLQMNSLKPEDTAVYYCAANYVLYLVHIYWGQGTQVTVSS

SEQ ID NO: 29166 - protein, 125 aa, Artificial Sequence
  Chemically Synthesized
QVQLQESGGGLVQAGGSLRLSCAASGNISNGLDMGWYRQAPGKERELVATIGSGTSTNYADSVKGRFTISRDNAKNTVYLQMNSLKPEDTAVYYCAVIVGGYWGYDRSNAGYQYWGQGTQVTVSS

SEQ ID NO: 29167 - protein, 126 aa, Artificial Sequence
  Chemically Synthesized
QVQLQESGGGLVQAGGSLRLSCAASGTISNGDEMGWYRQAPGKEREFVAGIDGGAITYYADSVKGRFTISRDNAKNTVYLQMNSLKPEDTAVYYCAATGIWDYAKQWNGNTRHQYWGQGTQVTVSS

SEQ ID NO: 29168 - protein, 118 aa, Artificial Sequence
  Chemically Synthesized
QVQLQESGGGLVQAGGSLRLSCAASGNIFGSVSMGWYRQAPGKEREFVATISHGTSTNYADSVKGRFTISRDNAKNTVYLQMNSLKPEDTAVYYCAAYYYVDDLYIYWGQGTQVTVSS

SEQ ID NO: 29169 - protein, 126 aa, Artificial Sequence
  Chemically Synthesized
QVQLQESGGGLVQAGGSLRLSCAASGYISYGVYMGWYRQAPGKERELVAGIAYGSSTNYADSVKGRFTISRDNAKNTVYLQMNSLKPEDTAVYYCAADDDRYVAYRSTHYPDLSYWGQGTQVTVSS

SEQ ID NO: 29170 - protein, 122 aa, Artificial Sequence
  Chemically Synthesized
QVQLQESGGGLVQAGGSLRLSCAASGTISPSYYMGWYRQAPGKERELVATISYGGITYYADSVKGRFTISRDNAKNTVYLQMNSLKPEDTAVYYCAVDYYYDLDYDVIHPYWGQGTQVTVSS

SEQ ID NO: 29171 - protein, 115 aa, Artificial Sequence
  Chemically Synthesized
QVQLQESGGGLVQAGGSLRLSCAASGYISLPYYMGWYRQAPGKEREFVASIGVGASTYYADSVKGRFTISRDNAKNTVYLQMNSLKPEDTAVYYCAVYDDRHTYWGQGTQVTVSS

SEQ ID NO: 29172 - protein, 118 aa, Artificial Sequence
  Chemically Synthesized
QVQLQESGGGLVQAGGSLRLSCAASGYIFLGLNMGWYRQAPGKERELVAAITYGTSTYYADSVKGRFTISRDNAKNTVYLQMNSLKPEDTAVYYCAVWSPVSGAYEYWGQGTQVTVSS

SEQ ID NO: 29173 - protein, 117 aa, Artificial Sequence
  Chemically Synthesized
QVQLQESGGGLVQAGGSLRLSCAASGYIFVTLYMGWYRQAPGKEREFVASMLSVVLPYADSVKGRFTISRDNAKNTVYLQMNSLKPEDTAVYYCAAHSDRPSYLLYWGQGTQVTVSS

SEQ ID NO: 29174 - protein, 122 aa, Artificial Sequence
  Chemically Synthesized
QVQLQESGGGLVQAGGSLRLSCAASGSISDIDYMGWYRQAPGKEREFVATIDAGGITNYADSVKGRFTISRDNAKNTVYLQMNSLKPEDTAVYYCAVYYSANTNIRYGHHYWGQGTQVTVSS

SEQ ID NO: 29175 - protein, 121 aa, Artificial Sequence
  Chemically Synthesized
QVQLQESGGGLVQAGGSLRLSCAASGSIFYYRYMGWYRQAPGKERELVALLLLVVIPYADSVKGRFTISRDNAKNTVYLQMNSLKPEDTAVYYCAAWYDSAYPRGVWYYYWGQGTQVTVSS

SEQ ID NO: 29176 - protein, 118 aa, Artificial Sequence
  Chemically Synthesized
QVQLQESGGGLVQAGGSLRLSCAASGSIFDRDVMGWYRQAPGKERELVATINPGTTTYYADSVKGRFTISRDNAKNTVYLQMNSLKPEDTAVYYCAVDRGRWRQFYYWGQGTQVTVSS

SEQ ID NO: 29177 - protein, 121 aa, Artificial Sequence
  Chemically Synthesized
QVQLQESGGGLVQAGGSLRLSCAASGSISDSVMGWYRQAPGKEREFVATIAWGTITYYADSVKGRFTISRDNAKNTVYLQMNSLKPEDTAVYYCAAAATTYRYPVGYHLYWGQGTQVTVSS

SEQ ID NO: 29178 - protein, 115 aa, Artificial Sequence
  Chemically Synthesized
QVQLQESGGGLVQAGGSLRLSCAASGTISSVTMGWYRQAPGKERELVAAIDTGTNTNYADSVKGRFTISRDNAKNTVYLQMNSLKPEDTAVYYCAVDRGGSDQYWGQGTQVTVSS

SEQ ID NO: 29179 - protein, 115 aa, Artificial Sequence
  Chemically Synthesized
QVQLQESGGGLVQAGGSLRLSCAASGTISPNAVMGWYRQAPGKERELVAGINSGTVPYADSVKGRFTISRDNAKNTVYLQMNSLKPEDTAVYYCAVYGIYSHHYWGQGTQVTVSS

SEQ ID NO: 29180 - protein, 118 aa, Artificial Sequence
  Chemically Synthesized
QVQLQESGGGLVQAGGSLRLSCAASGTISDGDDMGWYRQAPGKEREFVATIGGGSITNYADSVKGRFTISRDNAKNTVYLQMNSLKPEDTAVYYCAAGYKYTDWFYYWGQGTQVTVSS

SEQ ID NO: 29181 - protein, 116 aa, Artificial Sequence
  Chemically Synthesized
QVQLQESGGGLVQAGGSLRLSCAASGTIFHVPYMGWYRQAPGKERELVAAISRGTSTNYADSVKGRFTISRDNAKNTVYLQMNSLKPEDTAVYYCAVFGYVDSFYWGQGTQVTVSS

SEQ ID NO: 29182 - protein, 118 aa, Artificial Sequence
  Chemically Synthesized
QVQLQESGGGLVQAGGSLRLSCAASGTIFYDVSMGWYRQAPGKERELVATITTGGSTNYADSVKGRFTISRDNAKNTVYLQMNSLKPEDTAVYYCAVRDDIRGYYLYWGQGTQVTVSS

SEQ ID NO: 29183 - protein, 122 aa, Artificial Sequence
  Chemically Synthesized
QVQLQESGGGLVQAGGSLRLSCAASGTISEGDGMGWYRQAPGKERELVATIGGGSTTNYADSVKGRFTISRDNAKNTVYLQMNSLKPEDTAVYYCAAGIAGYAQTSGDHVYWGQGTQVTVSS

SEQ ID NO: 29184 - protein, 116 aa, Artificial Sequence
  Chemically Synthesized
QVQLQESGGGLVQAGGSLRLSCAASGYIFGAGDMGWYRQAPGKERELVASIAVGGNTNYADSVKGRFTISRDNAKNTVYLQMNSLKPEDTAVYYCAFRPYDYHVYWGQGTQVTVSS

SEQ ID NO: 29185 - protein, 122 aa, Artificial Sequence
  Chemically Synthesized
QVQLQESGGGLVQAGGSLRLSCAASGYISRTGYMGWYRQAPGKEREFVAAINYGTTTNYADSVKGRFTISRDNAKNTVYLQMNSLKPEDTAVYYCAAFLTGNLTSYGQHYYWGQGTQVTVSS

SEQ ID NO: 29186 - protein, 118 aa, Artificial Sequence
  Chemically Synthesized
QVQLQESGGGLVQAGGSLRLSCAASGSIFAYRYMGWYRQAPGKERELVASISLGGITNYADSVKGRFTISRDNAKNTVYLQMNSLKPEDTAVYYCAVGRGGGPSFQYWGQGTQVTVSS

SEQ ID NO: 29187 - protein, 118 aa, Artificial Sequence
  Chemically Synthesized
QVQLQESGGGLVQAGGSLRLSCAASGTISYRFDMGWYRQAPGKERELVAAITSGGITYYADSVKGRFTISRDNAKNTVYLQMNSLKPEDTAVYYCAAYQARYNNFRYWGQGTQVTVSS

SEQ ID NO: 29188 - protein, 115 aa, Artificial Sequence
  Chemically Synthesized
QVQLQESGGGLVQAGGSLRLSCAASGTFLVVLMGWYRQAPGKERELLPVLLTVVPYADSVKGRFTISRDNAKNTVYLQMNSLKPEDTAVYYCAAYSYYNLTHDYWGQGTQVTVSS

SEQ ID NO: 29189 - protein, 126 aa, Artificial Sequence
  Chemically Synthesized
QVQLQESGGGLVQAGGSLRLSCAASGSIFLLYAMGWYRQAPGKERELVATIARGSNTNYADSVKGRFTISRDNAKNTVYLQMNSLKPEDTAVYYCAVYPGFFYVPYLSYQDAHDYWGQGTQVTVSS

SEQ ID NO: 29190 - protein, 118 aa, Artificial Sequence
  Chemically Synthesized
QVQLQESGGGLVQAGGSLRLSCAASGSIFWYYYMGWYRQAPGKERELVASIAYGTTTNYADSVKGRFTISRDNAKNTVYLQMNSLKPEDTAVYYCAVVIRQLAPYYYWGQGTQVTVSS

SEQ ID NO: 29191 - protein, 118 aa, Artificial Sequence
  Chemically Synthesized
QVQLQESGGGLVQAGGSLRLSCAASGSIFGDWEMGWYRQAPGKERELVAAIGHGTNTNYADSVKGRFTISRDNAKNTVYLQMNSLKPEDTAVYYCAVDIHAADQFRYWGQGTQVTVSS

SEQ ID NO: 29192 - protein, 118 aa, Artificial Sequence
  Chemically Synthesized
QVQLQESGGGLVQAGGSLRLSCAASGNISHARYMGWYRQAPGKEREFVAAIGWGTTTNYADSVKGRFTISRDNAKNTVYLQMNSLKPEDTAVYYCAAPVHYLQQHLYWGQGTQVTVSS

SEQ ID NO: 29193 - protein, 117 aa, Artificial Sequence
  Chemically Synthesized
QVQLQESGGGLVQAGGSLRLSCAASGNILTVVMGWYRQAPGKEREFVASISFGSTTNYADSVKGRFTISRDNAKNTVYLQMNSLKPEDTAVYYCAVRHYQPTIHRYWGQGTQVTVSS

SEQ ID NO: 29194 - protein, 117 aa, Artificial Sequence
  Chemically Synthesized
QVQLQESGGGLVQAGGSLRLSCAASGTIFISDTMGWYRQAPGKEREFVATISTVLVPYADSVKGRFTISRDNAKNTVYLQMNSLKPEDTAVYYCAGLRSVPCWSSYWGQGTQVTVSS

SEQ ID NO: 29195 - protein, 122 aa, Artificial Sequence
  Chemically Synthesized
QVQLQESGGGLVQAGGSLRLSCAASGTISYGFWMGWYRQAPGKERELVATIALGSTTNYADSVKGRFTISRDNAKNTVYLQMNSLKPEDTAVYYCAAQRNPTDYVQSKHDYWGQGTQVTVSS

SEQ ID NO: 29196 - protein, 126 aa, Artificial Sequence
  Chemically Synthesized
QVQLQESGGGLVQAGGSLRLSCAASGYIFYAQYMGWYRQAPGKEREFVAAIGVGAITNYADSVKGRFTISRDNAKNTVYLQMNSLKPEDTAVYYCAARSITTDDGPRYGGDTHEYWGQGTQVTVSS

SEQ ID NO: 29197 - protein, 118 aa, Artificial Sequence
  Chemically Synthesized
QVQLQESGGGLVQAGGSLRLSCAASGNIFFVRQMGWYRQAPGKEREFVASITGGGTTYYADSVKGRFTISRDNAKNTVYLQMNSLKPEDTAVYYCAVWFYPYAHLAYWGQGTQVTVSS

SEQ ID NO: 29198 - protein, 122 aa, Artificial Sequence
  Chemically Synthesized
QVQLQESGGGLVQAGGSLRLSCAASGYISPSPYMGWYRQAPGKEREFVASITFGGITNYADSVKGRFTISRDNAKNTVYLQMNSLKPEDTAVYYCAVGRRRQYDTAYLLDYWGQGTQVTVSS

SEQ ID NO: 29199 - protein, 118 aa, Artificial Sequence
  Chemically Synthesized
QVQLQESGGGLVQAGGSLRLSCAASGTISYYWTMGWYRQAPGKERELVASIAFGGTTYYADSVKGRFTISRDNAKNTVYLQMNSLKPEDTAVYYCAANYRVKAQYGYWGQGTQVTVSS

SEQ ID NO: 29200 - protein, 111 aa, Artificial Sequence
  Chemically Synthesized
QVQLQESGGGLVQAGGSLRLSCAASGTISGWESMGWYRQAPGKEREFVAGITDGTSTNYADSVKGRFTISRDNAKNTVYLQMNSLKPEDTAVYYCAVGLYWGQGTQVTVSS

SEQ ID NO: 29201 - protein, 122 aa, Artificial Sequence
  Chemically Synthesized
QVQLQESGGGLVQAGGSLRLSCAASGTIFGGNGMGWYRQAPGKERELVAAINFGGNTNYADSVKGRFTISRDNAKNTVYLQMNSLKPEDTAVYYCAVRTYLYWRTDNGFQYWGQGTQVTVSS

SEQ ID NO: 29202 - protein, 122 aa, Artificial Sequence
  Chemically Synthesized
QVQLQESGGGLVQAGGSLRLSCAASGSIFRYYVMGWYRQAPGKERELVASIAYGGNTYYADSVKGRFTISRDNAKNTVYLQMNSLKPEDTAVYYCAAKTTLGVFGIYQHAYWGQGTQVTVSS

SEQ ID NO: 29203 - protein, 122 aa, Artificial Sequence
  Chemically Synthesized
QVQLQESGGGLVQAGGSLRLSCAASGNISWSYGMGWYRQAPGKERELVASISYGGNTYYADSVKGRFTISRDNAKNTVYLQMNSLKPEDTAVYYCAAYAYANHYPFWVHYYWGQGTQVTVSS

SEQ ID NO: 29204 - protein, 117 aa, Artificial Sequence
  Chemically Synthesized
QVQLQESGGGLVQAGGSLRLSCAASGTIFTNRYMGWYRQAPGKEREFVASINDGTITNYADSVKGRFTISRDNAKNTVYLQMNSLKPEDTAVYYCAASSGLVLTIYWGQGTQVTVSS

SEQ ID NO: 29205 - protein, 112 aa, Artificial Sequence
  Chemically Synthesized
QVQLQESGGGLVQAGGSLRLSCAASGSISTLSYMGWYRQAPGKEREFVATIGSVVIPYADSVKGRFTISRDNAKNTVYLQMNSLKPEDTAVYYCAVQPNEYWGQGTQVTVSS

SEQ ID NO: 29206 - protein, 118 aa, Artificial Sequence
  Chemically Synthesized
QVQLQESGGGLVQAGGSLRLSCAASGTIFVPYAMGWYRQAPGKEREFVASITSGGSTYYADSVKGRFTISRDNAKNTVYLQMNSLKPEDTAVYYCAVHLGYDGDYSYWGQGTQVTVSS

SEQ ID NO: 29207 - protein, 114 aa, Artificial Sequence
  Chemically Synthesized
QVQLQESGGGLVQAGGSLRLSCAASGNIFLVTWMGWYRQAPGKEREFVAGIASGANTNYADSVKGRFTISRDNAKNTVYLQMNSLKPEDTAVYYCAVTRVNMYWGQGTQVTVSS

SEQ ID NO: 29208 - protein, 118 aa, Artificial Sequence
  Chemically Synthesized
QVQLQESGGGLVQAGGSLRLSCAASGYISYSSDMGWYRQAPGKEREFVASIARGSTNQYADSVKGRFTISRDNAKNTVYLQMNSLKPEDTAVYYCAAYSVALLELPYWGQGTQVTVSS

SEQ ID NO: 29209 - protein, 117 aa, Artificial Sequence
  Chemically Synthesized
QVQLQESGGGLVQAGGSLRLSCAASGNISGTDYMGWYRQAPGKERELVASIDVGSNTNYADSVKGRFTISRDNAKNTVYLQMNSLKPEDTAVYYCAANSPRATTMYWGQGTQVTVSS

SEQ ID NO: 29210 - protein, 117 aa, Artificial Sequence
  Chemically Synthesized
QVQLQESGGGLVQAGGSLRLSCAASGTISVLTYMGWYRQAPGKEREFVATIATGGSTNYADSVKGRFTISRDNAKNTVYLQMNSLKPEDTAVYYCAVPSTLKLCMYWGQGTQVTVSS

SEQ ID NO: 29211 - protein, 121 aa, Artificial Sequence
  Chemically Synthesized
QVQLQESGGGLVQAGGSLRLSCAASGSISRAGYMGWYRQAPGKEREFVASIDRGSNTYYADSVKGRFTISRDNAKNTVYLQMNSLKPEDTAVYYCAVDFLIERNLLELMYWGQGTQVTVSS

SEQ ID NO: 29212 - protein, 118 aa, Artificial Sequence
  Chemically Synthesized
QVQLQESGGGLVQAGGSLRLSCAASGTIFRGNYMGWYRQAPGKEREFVASISDGTSTYYADSVKGRFTISRDNAKNTVYLQMNSLKPEDTAVYYCAVDPRQSSYHLYWGQGTQVTVSS

SEQ ID NO: 29213 - protein, 125 aa, Artificial Sequence
  Chemically Synthesized
QVQLQESGGGLVQAGGSLRLSCAASGYISEWTVMGWYRQAPGKERELVATINSVVLPYADSVKGRFTISRDNAKNTVYLQMNSLKPEDTAVYYCAVTVVQTFPDWTAYVTSYGYWGQGTQVTVSS

SEQ ID NO: 29214 - protein, 117 aa, Artificial Sequence
  Chemically Synthesized
QVQLQESGGGLVQAGGSLRLSCAASGNISSTTMGWYRQAPGKEREFVATISPGTNTYYADSVKGRFTISRDNAKNTVYLQMNSLKPEDTAVYYCAAEDLDSTLLCYWGQGTQVTVSS

SEQ ID NO: 29215 - protein, 121 aa, Artificial Sequence
  Chemically Synthesized
QVQLQESGGGLVQAGGSLRLSCAASGTISFPGMGWYRQAPGKEREFVATIGYGTSTNYADSVKGRFTISRDNAKNTVYLQMNSLKPEDTAVYYCAADYTRSKDVSSWHFYWGQGTQVTVSS

SEQ ID NO: 29216 - protein, 117 aa, Artificial Sequence
  Chemically Synthesized
QVQLQESGGGLVQAGGSLRLSCAASGTISYVRYMGWYRQAPGKERELVATISRATTYYADSVKGRFTISRDNAKNTVYLQMNSLKPEDTAVYYCAVEDDGYNDFPYWGQGTQVTVSS

SEQ ID NO: 29217 - protein, 118 aa, Artificial Sequence
  Chemically Synthesized
QVQLQESGGGLVQAGGSLRLSCAASGNIFVRYSMGWYRQAPGKEREFVASINTGTTTNYADSVKGRFTISRDNAKNTVYLQMNSLKPEDTAVYYCAAGYLNDNQFYYWGQGTQVTVSS

SEQ ID NO: 29218 - protein, 122 aa, Artificial Sequence
  Chemically Synthesized
QVQLQESGGGLVQAGGSLRLSCAASGTISVVYTMGWYRQAPGKEREFVAAISSGAITNYADSVKGRFTISRDNAKNTVYLQMNSLKPEDTAVYYCAVYDYLLYGSVGDFQYWGQGTQVTVSS

SEQ ID NO: 29219 - protein, 117 aa, Artificial Sequence
  Chemically Synthesized
QVQLQESGGGLVQAGGSLRLSCAASGTIFPSYYMGWYRQAPGKEREFVATIAHGTNTYYADSVKGRFTISRDNAKNTVYLQMNSLKPEDTAVYYCAVFDAYFYHVYWGQGTQVTVSS

SEQ ID NO: 29220 - protein, 110 aa, Artificial Sequence
  Chemically Synthesized
QVQLQESGGGLVQAGGSLRLSCAASGSISHPDYMGWYRQAPGKERELVATINYGGTTNYADSVKGRFTISRDNAKNTVYLQMNSLKPEDTAVYYCAVMYWGQGTQVTVSS

SEQ ID NO: 29221 - protein, 121 aa, Artificial Sequence
  Chemically Synthesized
QVQLQESGGGLVQAGGSLRLSCAASGTISWPYNMGWYRQAPGKEREFVAGIDKGTITYYADSVKGRFTISRDNAKNTVYLQMNSLKPEDTAVYYCAAGFHYPYWTRDGHYWGQGTQVTVSS

SEQ ID NO: 29222 - protein, 126 aa, Artificial Sequence
  Chemically Synthesized
QVQLQESGGGLVQAGGSLRLSCAASGTIFRGGMGWYRQAPGKERELVAGIDPGTITYYADSVKGRFTISRDNAKNTVYLQMNSLKPEDTAVYYCAVLEVYDSDWVGNYYYGDHVYWGQGTQVTVSS

SEQ ID NO: 29223 - protein, 120 aa, Artificial Sequence
  Chemically Synthesized
QVQLQESGGGLVQAGGSLRLSCAASGSIFPTIPMGWYRQAPGKEREFVATIGAGAITYYADSVKGRFTISRDNAKNTVYLQMNSLKPEDTAVYYCARDYRAGGYVGHPYWGQGTQVTVSS

SEQ ID NO: 29224 - protein, 118 aa, Artificial Sequence
  Chemically Synthesized
QVQLQESGGGLVQAGGSLRLSCAASGSISYDSSMGWYRQAPGKEREFVATIATGASTNYADSVKGRFTISRDNAKNTVYLQMNSLKPEDTAVYYCAAYGSAWYEHDYWGQGTQVTVSS

SEQ ID NO: 29225 - protein, 122 aa, Artificial Sequence
  Chemically Synthesized
QVQLQESGGGLVQAGGSLRLSCAASGNISYDVLMGWYRQAPGKEREFVAAIDIGTTTYYADSVKGRFTISRDNAKNTVYLQMNSLKPEDTAVYYCAAWVNVANYYVTRFVYWGQGTQVTVSS

SEQ ID NO: 29226 - protein, 118 aa, Artificial Sequence
  Chemically Synthesized
QVQLQESGGGLVQAGGSLRLSCAASGSISGRRVMGWYRQAPGKERELVASIGQGGTTNYADSVKGRFTISRDNAKNTVYLQMNSLKPEDTAVYYCAVADAIGVGYDYWGQGTQVTVSS

SEQ ID NO: 29227 - protein, 117 aa, Artificial Sequence
  Chemically Synthesized
QVQLQESGGGLVQAGGSLRLSCAASGSIFPGDEMGWYRQAPGKEREFVASIDAGTSTYYADSVKGRFTISRDNAKNTVYLQMNSLKPEDTAVYYCAVGHTPYIHYYWGQGTQVTVSS

SEQ ID NO: 29228 - protein, 118 aa, Artificial Sequence
  Chemically Synthesized
QVQLQESGGGLVQAGGSLRLSCAASGTIFRRTYMGWYRQAPGKERELVAGIDNGGNTYYADSVKGRFTISRDNAKNTVYLQMNSLKPEDTAVYYCAADRGLYRRHVYWGQGTQVTVSS

SEQ ID NO: 29229 - protein, 108 aa, Artificial Sequence
  Chemically Synthesized
QVQLQESGGGLVQAGGSLRLSCAASGNISAPSIMGWYRQAPGKERELVVLPYADSVKGRFTISRDNAKNTVYLQMNSLKPEDTAVYYCAVRNVVLGYWGQGTQVTVSS

SEQ ID NO: 29230 - protein, 118 aa, Artificial Sequence
  Chemically Synthesized
QVQLQESGGGLVQAGGSLRLSCAASGTIFVVIYMGWYRQAPGKERELVASIGYGATTNYADSVKGRFTISRDNAKNTVYLQMNSLKPEDTAVYYCAVVEWDTDVHAYWGQGTQVTVSS

SEQ ID NO: 29231 - protein, 122 aa, Artificial Sequence
  Chemically Synthesized
QVQLQESGGGLVQAGGSLRLSCAASGYIFPSEIMGWYRQAPGKERELVAGIAAGGTTYYADSVKGRFTISRDNAKNTVYLQMNSLKPEDTAVYYCAVDVFDYPNFRRDLYYWGQGTQVTVSS

SEQ ID NO: 29232 - protein, 118 aa, Artificial Sequence
  Chemically Synthesized
QVQLQESGGGLVQAGGSLRLSCAASGTISYYDGMGWYRQAPGKERELVAGISRGGTTNYADSVKGRFTISRDNAKNTVYLQMNSLKPEDTAVYYCAVATTRVSSLQYWGQGTQVTVSS

SEQ ID NO: 29233 - protein, 126 aa, Artificial Sequence
  Chemically Synthesized
QVQLQESGGGLVQAGGSLRLSCAASGYIFRDFYMGWYRQAPGKEREFVAGIGIGGSTNYADSVKGRFTISRDNAKNTVYLQMNSLKPEDTAVYYCAAQYWRFSPWIGKPTVTLDYWGQGTQVTVSS

SEQ ID NO: 29234 - protein, 118 aa, Artificial Sequence
  Chemically Synthesized
QVQLQESGGGLVQAGGSLRLSCAASGTISQRRVMGWYRQAPGKERELVAGIDGGGTTNYADSVKGRFTISRDNAKNTVYLQMNSLKPEDTAVYYCAVGSTGASDYDYWGQGTQVTVSS

SEQ ID NO: 29235 - protein, 118 aa, Artificial Sequence
  Chemically Synthesized
QVQLQESGGGLVQAGGSLRLSCAASGTIFIDWYMGWYRQAPGKEREFVAAISGGSTTNYADSVKGRFTISRDNAKNTVYLQMNSLKPEDTAVYYCAVWSYPNDDYWYWGQGTQVTVSS

SEQ ID NO: 29236 - protein, 118 aa, Artificial Sequence
  Chemically Synthesized
QVQLQESGGGLVQAGGSLRLSCAASGSISATHAMGWYRQAPGKEREFVAGIANGTITYYADSVKGRFTISRDNAKNTVYLQMNSLKPEDTAVYYCAAYVDPKGVHQYWGQGTQVTVSS

SEQ ID NO: 29237 - protein, 112 aa, Artificial Sequence
  Chemically Synthesized
QVQLQESGGGLVQAGGSLRLSCAASGNIFPAWRMGWYRQAPGKEREFVAAINSVVLPYADSVKGRFTISRDNAKNTVYLQMNSLKPEDTAVYYCALRLPFYWGQGTQVTVSS

SEQ ID NO: 29238 - protein, 117 aa, Artificial Sequence
  Chemically Synthesized
QVQLQESGGGLVQAGGSLRLSCAASGSIFTSVMGWYRQAPGKERELVASIAYGATTNYADSVKGRFTISRDNAKNTVYLQMNSLKPEDTAVYYCAVAPWYSSWHPYWGQGTQVTVSS

SEQ ID NO: 29239 - protein, 118 aa, Artificial Sequence
  Chemically Synthesized
QVQLQESGGGLVQAGGSLRLSCAASGYISTYYYMGWYRQAPGKERELVAGIDIGGITYYADSVKGRFTISRDNAKNTVYLQMNSLKPEDTAVYYCAVRDRDLLEYSYWGQGTQVTVSS

SEQ ID NO: 29240 - protein, 120 aa, Artificial Sequence
  Chemically Synthesized
QVQLQESGGGLVQAGGSLRLSCAASGSIFSPYLMGWYRQAPGKEREFVASINYGLPYADSVKGRFTISRDNAKNTVYLQMNSLKPEDTAVYYCAVPSAGTGDDYYDLYYWGQGTQVTVSS

SEQ ID NO: 29241 - protein, 118 aa, Artificial Sequence
  Chemically Synthesized
QVQLQESGGGLVQAGGSLRLSCAASGTIFDVDHMGWYRQAPGKERELVATIAAGGTTNYADSVKGRFTISRDNAKNTVYLQMNSLKPEDTAVYYCAVADYRSGYHGYWGQGTQVTVSS

SEQ ID NO: 29242 - protein, 124 aa, Artificial Sequence
  Chemically Synthesized
QVQLQESGGGLVQAGGSLRLSCAASGNIFSSVMGWYRQAPGKEREFVAGINYGSTTNYADSVKGRFTISRDNAKNTVYLQMNSLKPEDTAVYYCAVRFQGHSTCTSVTVTLLYWGQGTQVTVSS

SEQ ID NO: 29243 - protein, 125 aa, Artificial Sequence
  Chemically Synthesized
QVQLQESGGGLVQAGGSLRLSCAASGNISRLLMGWYRQAPGKEREFVAAIADGTSTYYADSVKGRFTISRDNAKNTVYLQMNSLKPEDTAVYYCAAAAWLKPDVVNAYARYHNYWGQGTQVTVSS

SEQ ID NO: 29244 - protein, 122 aa, Artificial Sequence
  Chemically Synthesized
QVQLQESGGGLVQAGGSLRLSCAASGTIFYDTDMGWYRQAPGKERELVATIAVGGTTYYADSVKGRFTISRDNAKNTVYLQMNSLKPEDTAVYYCAAYGADGEQVYDYHSYWGQGTQVTVSS

SEQ ID NO: 29245 - protein, 115 aa, Artificial Sequence
  Chemically Synthesized
QVQLQESGGGLVQAGGSLRLSCAASGTIFQRDPMGWYRQAPGKERELVASIDYGTITNYADSVKGRFTISRDNAKNTVYLQMNSLKPEDTAVYYCAAWTTTLDYWGQGTQVTVSS

SEQ ID NO: 29246 - protein, 114 aa, Artificial Sequence
  Chemically Synthesized
QVQLQESGGGLVQAGGSLRLSCAASGYIFTTLMGWYRQAPGKEREFVVAIGSNTYYADSVKGRFTISRDNAKNTVYLQMNSLKPEDTAVYYCAVYALTVRGFYWGQGTQVTVSS

SEQ ID NO: 29247 - protein, 118 aa, Artificial Sequence
  Chemically Synthesized
QVQLQESGGGLVQAGGSLRLSCAASGYISLLSYMGWYRQAPGKERELVAGIDVGGSTYYADSVKGRFTISRDNAKNTVYLQMNSLKPEDTAVYYCAVQAWLHIVYLYWGQGTQVTVSS

SEQ ID NO: 29248 - protein, 122 aa, Artificial Sequence
  Chemically Synthesized
QVQLQESGGGLVQAGGSLRLSCAASGYIFGYTAMGWYRQAPGKEREFVATIGQGTITYYADSVKGRFTISRDNAKNTVYLQMNSLKPEDTAVYYCAVYVRGYVDYGSYHAYWGQGTQVTVSS

SEQ ID NO: 29249 - protein, 122 aa, Artificial Sequence
  Chemically Synthesized
QVQLQESGGGLVQAGGSLRLSCAASGTISYDYYMGWYRQAPGKERELVATISYGGTTYYADSVKGRFTISRDNAKNTVYLQMNSLKPEDTAVYYCAAQIGSQRESAFPYEYWGQGTQVTVSS

SEQ ID NO: 29250 - protein, 118 aa, Artificial Sequence
  Chemically Synthesized
QVQLQESGGGLVQAGGSLRLSCAASGNISFLGSMGWYRQAPGKERELVASIAYGTSTNYADSVKGRFTISRDNAKNTVYLQMNSLKPEDTAVYYCAVLARDGSGFQYWGQGTQVTVSS

SEQ ID NO: 29251 - protein, 126 aa, Artificial Sequence
  Chemically Synthesized
QVQLQESGGGLVQAGGSLRLSCAASGTISRGQVMGWYRQAPGKEREFVAGITGGANTNYADSVKGRFTISRDNAKNTVYLQMNSLKPEDTAVYYCAVNPLLAYRYYLPYEPLHWYWGQGTQVTVSS

SEQ ID NO: 29252 - protein, 122 aa, Artificial Sequence
  Chemically Synthesized
QVQLQESGGGLVQAGGSLRLSCAASGTISTYVLMGWYRQAPGKERELVATIGDGATTNYADSVKGRFTISRDNAKNTVYLQMNSLKPEDTAVYYCAADGYRGHYDSAYLTYWGQGTQVTVSS

SEQ ID NO: 29253 - protein, 118 aa, Artificial Sequence
  Chemically Synthesized
QVQLQESGGGLVQAGGSLRLSCAASGNISGIYSMGWYRQAPGKERELVASISHGGTTYYADSVKGRFTISRDNAKNTVYLQMNSLKPEDTAVYYCAALSNPPYVHYYWGQGTQVTVSS

SEQ ID NO: 29254 - protein, 118 aa, Artificial Sequence
  Chemically Synthesized
QVQLQESGGGLVQAGGSLRLSCAASGTIFRRRTMGWYRQAPGKEREFVASITSGGITYYADSVKGRFTISRDNAKNTVYLQMNSLKPEDTAVYYCAAAADAYYYHYYWGQGTQVTVSS

SEQ ID NO: 29255 - protein, 118 aa, Artificial Sequence
  Chemically Synthesized
QVQLQESGGGLVQAGGSLRLSCAASGNISPSRYMGWYRQAPGKEREFVASIDYGSTTYYADSVKGRFTISRDNAKNTVYLQMNSLKPEDTAVYYCAAQPFQANDLDYWGQGTQVTVSS

SEQ ID NO: 29256 - protein, 122 aa, Artificial Sequence
  Chemically Synthesized
QVQLQESGGGLVQAGGSLRLSCAASGYISYPYRMGWYRQAPGKERELVAGIGDGATTNYADSVKGRFTISRDNAKNTVYLQMNSLKPEDTAVYYCAAGDYGYVGGRIELGYWGQGTQVTVSS

SEQ ID NO: 29257 - protein, 122 aa, Artificial Sequence
  Chemically Synthesized
QVQLQESGGGLVQAGGSLRLSCAASGSIFNPVGMGWYRQAPGKERELVAAIDLGTTTYYADSVKGRFTISRDNAKNTVYLQMNSLKPEDTAVYYCAVYDKGYAYLYYVLNYWGQGTQVTVSS

SEQ ID NO: 29258 - protein, 119 aa, Artificial Sequence
  Chemically Synthesized
QVQLQESGGGLVQAGGSLRLSCAASGTISQAGLMGWYRQAPGKERELVAGIGTGGITNYADSVKGRFTISRDNAKNTVYLQMNSLKPEDTAVYYCAVFIGFDYDAYWYWGQGTQVTVSS

SEQ ID NO: 29259 - protein, 117 aa, Artificial Sequence
  Chemically Synthesized
QVQLQESGGGLVQAGGSLRLSCAASGTIFYAAIMGWYRQAPGKERELVASITYGTNTYYADSVKGRFTISRDNAKNTVYLQMNSLKPEDTAVYYCAADSLVRYHVYWGQGTQVTVSS

SEQ ID NO: 29260 - protein, 107 aa, Artificial Sequence
  Chemically Synthesized
QVQLQESGGGLVQAGGSLRLSCAASGTIFATYDMGWYRQAPGKERELVAYLYADSVKGRFTISRDNAKNTVYLQMNSLKPEDTAVYYCAYWDGHRYWGQGTQVTVSS

SEQ ID NO: 29261 - protein, 122 aa, Artificial Sequence
  Chemically Synthesized
QVQLQESGGGLVQAGGSLRLSCAASGTIFTPGYMGWYRQAPGKERELVAAIDSGGSTNYADSVKGRFTISRDNAKNTVYLQMNSLKPEDTAVYYCAAWPTFGVVAYTYLGYWGQGTQVTVSS

SEQ ID NO: 29262 - protein, 121 aa, Artificial Sequence
  Chemically Synthesized
QVQLQESGGGLVQAGGSLRLSCAASGNIFGATSMGWYRQAPGKERELVATITSVVVPYADSVKGRFTISRDNAKNTVYLQMNSLKPEDTAVYYCAVRVTDTRYPWANLYYWGQGTQVTVSS

SEQ ID NO: 29263 - protein, 118 aa, Artificial Sequence
  Chemically Synthesized
QVQLQESGGGLVQAGGSLRLSCAASGNIFLRDVMGWYRQAPGKEREFVAAISLGGITYYADSVKGRFTISRDNAKNTVYLQMNSLKPEDTAVYYCAVYDPAYDAHYYWGQGTQVTVSS

SEQ ID NO: 29264 - protein, 125 aa, Artificial Sequence
  Chemically Synthesized
QVQLQESGGGLVQAGGSLRLSCAASGTIFRTPTMGWYRQAPGKEREFVAAIAAGSNTNYADSVKGRFTISRDNAKNTVYLQMNSLKPEDTAVYYCAVDFAYHLDDQYYRYNLDYWGQGTQVTVSS

SEQ ID NO: 29265 - protein, 112 aa, Artificial Sequence
  Chemically Synthesized
QVQLQESGGGLVQAGGSLRLSCAASGTISETAYMGWYRQAPGKEREFVAGIDSVLVPYADSVKGRFTISRDNAKNTVYLQMNSLKPEDTAVYYCAVFSHDYWGQGTQVTVSS

SEQ ID NO: 29266 - protein, 117 aa, Artificial Sequence
  Chemically Synthesized
QVQLQESGGGLVQAGGSLRLSCAASGNISPDTDMGWYRQAPGKERELVAAIGWGGSTYYADSVKGRFTISRDNAKNTVYLQMNSLKPEDTAVYYCAAGYAYYTSLYWGQGTQVTVSS

SEQ ID NO: 29267 - protein, 121 aa, Artificial Sequence
  Chemically Synthesized
QVQLQESGGGLVQAGGSLRLSCAASGYISSYHDMGWYRQAPGKERELVAAINSGGNTYYADSVKGRFTISRDNAKNTVYLQMNSLKPEDTAVYYCAADDDYYHSASTLMYWGQGTQVTVSS

SEQ ID NO: 29268 - protein, 126 aa, Artificial Sequence
  Chemically Synthesized
QVQLQESGGGLVQAGGSLRLSCAASGNIFQDIYMGWYRQAPGKERELVAGIDWGSSTYYADSVKGRFTISRDNAKNTVYLQMNSLKPEDTAVYYCAAQRYPYTQYRNIADANLSYWGQGTQVTVSS

SEQ ID NO: 29269 - protein, 116 aa, Artificial Sequence
  Chemically Synthesized
QVQLQESGGGLVQAGGSLRLSCAASGSISPYVMGWYRQAPGKERELVAAINYGSIPYADSVKGRFTISRDNAKNTVYLQMNSLKPEDTAVYYCAAIARGDRYFLYWGQGTQVTVSS

SEQ ID NO: 29270 - protein, 117 aa, Artificial Sequence
  Chemically Synthesized
QVQLQESGGGLVQAGGSLRLSCAASGYIFVRYWMGWYRQAPGKERELVAVLMKVLLPYADSVKGRFTISRDNAKNTVYLQMNSLKPEDTAVYYCAVYYIFDYQYLYWGQGTQVTVSS

SEQ ID NO: 29271 - protein, 118 aa, Artificial Sequence
  Chemically Synthesized
QVQLQESGGGLVQAGGSLRLSCAASGNIFGDEDMGWYRQAPGKEREFVASIGAGATTNYADSVKGRFTISRDNAKNTVYLQMNSLKPEDTAVYYCAADGPWYYWHTYWGQGTQVTVSS

SEQ ID NO: 29272 - protein, 117 aa, Artificial Sequence
  Chemically Synthesized
QVQLQESGGGLVQAGGSLRLSCAASGSISSTKYMGWYRQAPGKERELVAAISYGATTYYADSVKGRFTISRDNAKNTVYLQMNSLKPEDTAVYYCAVRPWSRVVMYWGQGTQVTVSS

SEQ ID NO: 29273 - protein, 126 aa, Artificial Sequence
  Chemically Synthesized
QVQLQESGGGLVQAGGSLRLSCAASGTISYQVPMGWYRQAPGKERELVAGISSGTSTYYADSVKGRFTISRDNAKNTVYLQMNSLKPEDTAVYYCAAGLTFAGYDHPNYGHTYVYWGQGTQVTVSS

SEQ ID NO: 29274 - protein, 118 aa, Artificial Sequence
  Chemically Synthesized
QVQLQESGGGLVQAGGSLRLSCAASGSIFPLAIMGWYRQAPGKEREFVAAITGGANTYYADSVKGRFTISRDNAKNTVYLQMNSLKPEDTAVYYCAAWRWLRQSYGYWGQGTQVTVSS

SEQ ID NO: 29275 - protein, 118 aa, Artificial Sequence
  Chemically Synthesized
QVQLQESGGGLVQAGGSLRLSCAASGSISPSGRMGWYRQAPGKERELVAGIGDGTNTNYADSVKGRFTISRDNAKNTVYLQMNSLKPEDTAVYYCAVTTTRHVGHYYWGQGTQVTVSS

SEQ ID NO: 29276 - protein, 117 aa, Artificial Sequence
  Chemically Synthesized
QVQLQESGGGLVQAGGSLRLSCAASGTISDRYIMGWYRQAPGKERELVASITPGSSTYYADSVKGRFTISRDNAKNTVYLQMNSLKPEDTAVYYCAASTTVPVLLYWGQGTQVTVSS

SEQ ID NO: 29277 - protein, 115 aa, Artificial Sequence
  Chemically Synthesized
QVQLQESGGGLVQAGGSLRLSCAASGTIFSGFMGWYRQAPGKERELAVLLSVVVPYADSVKGRFTISRDNAKNTVYLQMNSLKPEDTAVYYCAAYTTHLHSHIYWGQGTQVTVSS

SEQ ID NO: 29278 - protein, 122 aa, Artificial Sequence
  Chemically Synthesized
QVQLQESGGGLVQAGGSLRLSCAASGSISLDYDMGWYRQAPGKEREFVAAIGYGAITYYADSVKGRFTISRDNAKNTVYLQMNSLKPEDTAVYYCAVRTYVTPDDYRVYPYWGQGTQVTVSS

SEQ ID NO: 29279 - protein, 118 aa, Artificial Sequence
  Chemically Synthesized
QVQLQESGGGLVQAGGSLRLSCAASGNIFYLDQMGWYRQAPGKERELVASIDFGGSTNYADSVKGRFTISRDNAKNTVYLQMNSLKPEDTAVYYCAAYQADLSDPCYWGQGTQVTVSS

SEQ ID NO: 29280 - protein, 118 aa, Artificial Sequence
  Chemically Synthesized
QVQLQESGGGLVQAGGSLRLSCAASGTIFRPIYMGWYRQAPGKERELVAAITPGTTTYYADSVKGRFTISRDNAKNTVYLQMNSLKPEDTAVYYCAVYTYTTWYLYYWGQGTQVTVSS

SEQ ID NO: 29281 - protein, 121 aa, Artificial Sequence
  Chemically Synthesized
QVQLQESGGGLVQAGGSLRLSCAASGNISYSSYMGWYRQAPGKEREFVAAIGPGSITYYADSVKGRFTISRDNAKNTVYLQMNSLKPEDTAVYYCAVKDGRKDVDPADMYWGQGTQVTVSS

SEQ ID NO: 29282 - protein, 113 aa, Artificial Sequence
  Chemically Synthesized
QVQLQESGGGLVQAGGSLRLSCAASGSIFAYDTMGWYRQAPGKEREFVAAITHGAITYYADSVKGRFTISRDNAKNTVYLQMNSLKPEDTAVYYCAAGRLGYWGQGTQVTVSS

SEQ ID NO: 29283 - protein, 116 aa, Artificial Sequence
  Chemically Synthesized
QVQLQESGGGLVQAGGSLRLSCAASGTIFEYSMGWYRQAPGKEREFVAAINVGGTTNYADSVKGRFTISRDNAKNTVYLQMNSLKPEDTAVYYCAADWLSQSTIYWGQGTQVTVSS

SEQ ID NO: 29284 - protein, 118 aa, Artificial Sequence
  Chemically Synthesized
QVQLQESGGGLVQAGGSLRLSCAASGTIFRDDFMGWYRQAPGKERELVAGITYGSTTNYADSVKGRFTISRDNAKNTVYLQMNSLKPEDTAVYYCAAPAGGLSAYRYWGQGTQVTVSS

SEQ ID NO: 29285 - protein, 118 aa, Artificial Sequence
  Chemically Synthesized
QVQLQESGGGLVQAGGSLRLSCAASGYISSRYYMGWYRQAPGKERELVATITNGATTYYADSVKGRFTISRDNAKNTVYLQMNSLKPEDTAVYYCAADVPSDLYFGYWGQGTQVTVSS

SEQ ID NO: 29286 - protein, 121 aa, Artificial Sequence
  Chemically Synthesized
QVQLQESGGGLVQAGGSLRLSCAASGNIFPRDKMGWYRQAPGKEREFVAAINRGTTTNYADSVKGRFTISRDNAKNTVYLQMNSLKPEDTAVYYCAARGDPGYAPYNYGYWGQGTQVTVSS

SEQ ID NO: 29287 - protein, 110 aa, Artificial Sequence
  Chemically Synthesized
QVQLQESGGGLVQAGGSLRLSCAASGTIFSVQHMGWYRQAPGKERELVATIDTGTTTNYADSVKGRFTISRDNAKNTVYLQMNSLKPEDTAVYYCAVLYWGQGTQVTVSS

SEQ ID NO: 29288 - protein, 122 aa, Artificial Sequence
  Chemically Synthesized
QVQLQESGGGLVQAGGSLRLSCAASGTISPSTYMGWYRQAPGKEREFVATIGLGTSTYYADSVKGRFTISRDNAKNTVYLQMNSLKPEDTAVYYCAVGKPNPYVQYSQLFYWGQGTQVTVSS

SEQ ID NO: 29289 - protein, 122 aa, Artificial Sequence
  Chemically Synthesized
QVQLQESGGGLVQAGGSLRLSCAASGNISAGFLMGWYRQAPGKERELVAGIAFGSSTNYADSVKGRFTISRDNAKNTVYLQMNSLKPEDTAVYYCAVLRYGEALYAYYFDYWGQGTQVTVSS

SEQ ID NO: 29290 - protein, 118 aa, Artificial Sequence
  Chemically Synthesized
QVQLQESGGGLVQAGGSLRLSCAASGNIFSYDYMGWYRQAPGKERELVATIDYGTNTNYADSVKGRFTISRDNAKNTVYLQMNSLKPEDTAVYYCAVQTDDNNDHPYWGQGTQVTVSS

SEQ ID NO: 29291 - protein, 122 aa, Artificial Sequence
  Chemically Synthesized
QVQLQESGGGLVQAGGSLRLSCAASGNISRVYPMGWYRQAPGKEREFVASIGLGGNTYYADSVKGRFTISRDNAKNTVYLQMNSLKPEDTAVYYCAVYDEATDVFGAPHYYWGQGTQVTVSS

SEQ ID NO: 29292 - protein, 123 aa, Artificial Sequence
  Chemically Synthesized
QVQLQESGGGLVQAGGSLRLSCAASGNFFTTSMGWYRQAPGKEREFVASINLGSSTYYADSVKGRFTISRDNAKNTVYLQMNSLKPEDTAVYYCAVNYNTESNSIYYDEHTYWGQGTQVTVSS

SEQ ID NO: 29293 - protein, 118 aa, Artificial Sequence
  Chemically Synthesized
QVQLQESGGGLVQAGGSLRLSCAASGNISPTYTMGWYRQAPGKERELVASIDVGTTTNYADSVKGRFTISRDNAKNTVYLQMNSLKPEDTAVYYCAATAVHERDHIYWGQGTQVTVSS

SEQ ID NO: 29294 - protein, 118 aa, Artificial Sequence
  Chemically Synthesized
QVQLQESGGGLVQAGGSLRLSCAASGYISYRNVMGWYRQAPGKERELVAGISRGGSTNYADSVKGRFTISRDNAKNTVYLQMNSLKPEDTAVYYCAADAVYWLIHGYWGQGTQVTVSS

SEQ ID NO: 29295 - protein, 125 aa, Artificial Sequence
  Chemically Synthesized
QVQLQESGGGLVQAGGSLRLSCAASGNIFYLSYMGWYRQAPGKERELVATIGGGTNTYYADSVKGRFTISRDNAKNTVYLQMNSLKPEDTAVYYCAAYQYAWKYGWASSFTRFYWGQGTQVTVSS

SEQ ID NO: 29296 - protein, 122 aa, Artificial Sequence
  Chemically Synthesized
QVQLQESGGGLVQAGGSLRLSCAASGTIFRRRPMGWYRQAPGKERELVASIGTGGNTYYADSVKGRFTISRDNAKNTVYLQMNSLKPEDTAVYYCAAWHLPYLYGSAGLDYWGQGTQVTVSS

SEQ ID NO: 29297 - protein, 122 aa, Artificial Sequence
  Chemically Synthesized
QVQLQESGGGLVQAGGSLRLSCAASGYISDDTMGWYRQAPGKEREFVATIGYGTNTYYADSVKGRFTISRDNAKNTVYLQMNSLKPEDTAVYYCAVGDWGNDDFVTGVFYYWGQGTQVTVSS

SEQ ID NO: 29298 - protein, 117 aa, Artificial Sequence
  Chemically Synthesized
QVQLQESGGGLVQAGGSLRLSCAASGNISAYGYMGWYRQAPGKEREFVASIADGTSTNYADSVKGRFTISRDNAKNTVYLQMNSLKPEDTAVYYCAANAVKPSLVYWGQGTQVTVSS

SEQ ID NO: 29299 - protein, 122 aa, Artificial Sequence
  Chemically Synthesized
QVQLQESGGGLVQAGGSLRLSCAASGNIFLSQYMGWYRQAPGKERELVAGISSGATTNYADSVKGRFTISRDNAKNTVYLQMNSLKPEDTAVYYCAVPYYAFVGGSRGFRYWGQGTQVTVSS

SEQ ID NO: 29300 - protein, 126 aa, Artificial Sequence
  Chemically Synthesized
QVQLQESGGGLVQAGGSLRLSCAASGYIFGSAYMGWYRQAPGKERELVAAIGYGSTTYYADSVKGRFTISRDNAKNTVYLQMNSLKPEDTAVYYCAVSLPSIVYGDDLDNGGYYYWGQGTQVTVSS

SEQ ID NO: 29301 - protein, 118 aa, Artificial Sequence
  Chemically Synthesized
QVQLQESGGGLVQAGGSLRLSCAASGTISADYYMGWYRQAPGKEREFVAAIDPGAITYYADSVKGRFTISRDNAKNTVYLQMNSLKPEDTAVYYCAAIPYAYPVLQYWGQGTQVTVSS

SEQ ID NO: 29302 - protein, 122 aa, Artificial Sequence
  Chemically Synthesized
QVQLQESGGGLVQAGGSLRLSCAASGNISQDYDMGWYRQAPGKEREFVATIGYGSTTNYADSVKGRFTISRDNAKNTVYLQMNSLKPEDTAVYYCAVGFDYYYYDESTHYYWGQGTQVTVSS

SEQ ID NO: 29303 - protein, 126 aa, Artificial Sequence
  Chemically Synthesized
QVQLQESGGGLVQAGGSLRLSCAASGNISASRYMGWYRQAPGKERELVAGIAEGGNTNYADSVKGRFTISRDNAKNTVYLQMNSLKPEDTAVYYCAAVDYTDAEREDYYQTPHNYWGQGTQVTVSS

SEQ ID NO: 29304 - protein, 121 aa, Artificial Sequence
  Chemically Synthesized
QVQLQESGGGLVQAGGSLRLSCAASGTISLGDSMGWYRQAPGKERELVASIGTGANTYYADSVKGRFTISRDNAKNTVYLQMNSLKPEDTAVYYCAVYNRSGTRTLLNIYWGQGTQVTVSS

SEQ ID NO: 29305 - protein, 118 aa, Artificial Sequence
  Chemically Synthesized
QVQLQESGGGLVQAGGSLRLSCAASGYISDGPYMGWYRQAPGKEREFVAAIGYGTTTNYADSVKGRFTISRDNAKNTVYLQMNSLKPEDTAVYYCAVESYARDGLYYWGQGTQVTVSS

SEQ ID NO: 29306 - protein, 121 aa, Artificial Sequence
  Chemically Synthesized
QVQLQESGGGLVQAGGSLRLSCAASGNISPKAVMGWYRQAPGKEREFVAAIADGANTNYADSVKGRFTISRDNAKNTVYLQMNSLKPEDTAVYYCAVAQPFRDVTLTLLYWGQGTQVTVSS

SEQ ID NO: 29307 - protein, 117 aa, Artificial Sequence
  Chemically Synthesized
QVQLQESGGGLVQAGGSLRLSCAASGYISAVDNMGWYRQAPGKEREFVAAITYGGITNYADSVKGRFTISRDNAKNTVYLQMNSLKPEDTAVYYCAALVYKSSTMYWGQGTQVTVSS

SEQ ID NO: 29308 - protein, 122 aa, Artificial Sequence
  Chemically Synthesized
QVQLQESGGGLVQAGGSLRLSCAASGTISHRYWMGWYRQAPGKERELVATITYGSSTNYADSVKGRFTISRDNAKNTVYLQMNSLKPEDTAVYYCAVVILDPSRYEDSFGYWGQGTQVTVSS

SEQ ID NO: 29309 - protein, 117 aa, Artificial Sequence
  Chemically Synthesized
QVQLQESGGGLVQAGGSLRLSCAASGNIFEYYRMGWYRQAPGKEREFVAAIDVGTSTNYADSVKGRFTISRDNAKNTVYLQMNSLKPEDTAVYYCAALTTTLVAWYWGQGTQVTVSS

SEQ ID NO: 29310 - protein, 112 aa, Artificial Sequence
  Chemically Synthesized
QVQLQESGGGLVQAGGSLRLSCAASGTIFDDPPMGWYRQAPGKERELVATINDGGTTNYADSVKGRFTISRDNAKNTVYLQMNSLKPEDTAVYYCATTTMYWGQGTQVTVSS

SEQ ID NO: 29311 - protein, 118 aa, Artificial Sequence
  Chemically Synthesized
QVQLQESGGGLVQAGGSLRLSCAASGSIFASRPMGWYRQAPGKERELVATISYGSITYYADSVKGRFTISRDNAKNTVYLQMNSLKPEDTAVYYCAVLDWQRDVHVYWGQGTQVTVSS

SEQ ID NO: 29312 - protein, 126 aa, Artificial Sequence
  Chemically Synthesized
QVQLQESGGGLVQAGGSLRLSCAASGTIFGQYGMGWYRQAPGKERELVAGISFGTITNYADSVKGRFTISRDNAKNTVYLQMNSLKPEDTAVYYCAAGDPVGIPELYDYATLFGYWGQGTQVTVSS

SEQ ID NO: 29313 - protein, 109 aa, Artificial Sequence
  Chemically Synthesized
QVQLQESGGGLVQAGGSLRLSCAASGSIFIGSMGWYRQAPGKEREFVAAIGQGASTNYADSVKGRFTISRDNAKNTVYLQMNSLKPEDTAVYYCAFEYWGQGTQVTVSS

SEQ ID NO: 29314 - protein, 117 aa, Artificial Sequence
  Chemically Synthesized
QVQLQESGGGLVQAGGSLRLSCAASGYIFNSDPMGWYRQAPGKEREFVAAIAQGGSTNYADSVKGRFTISRDNAKNTVYLQMNSLKPEDTAVYYCAADYVPFIRFYWGQGTQVTVSS

SEQ ID NO: 29315 - protein, 126 aa, Artificial Sequence
  Chemically Synthesized
QVQLQESGGGLVQAGGSLRLSCAASGNISSGVPMGWYRQAPGKEREFVASISAGATTYYADSVKGRFTISRDNAKNTVYLQMNSLKPEDTAVYYCAADAYGYDDYVKLTSGHHRYWGQGTQVTVSS

SEQ ID NO: 29316 - protein, 118 aa, Artificial Sequence
  Chemically Synthesized
QVQLQESGGGLVQAGGSLRLSCAASGSISGTTYMGWYRQAPGKEREFVASIAYGSITYYADSVKGRFTISRDNAKNTVYLQMNSLKPEDTAVYYCAVYADYLDYLGYWGQGTQVTVSS

SEQ ID NO: 29317 - protein, 118 aa, Artificial Sequence
  Chemically Synthesized
QVQLQESGGGLVQAGGSLRLSCAASGNIFDQRKMGWYRQAPGKEREFVAAIAYGSNTYYADSVKGRFTISRDNAKNTVYLQMNSLKPEDTAVYYCAAWDGDWGHFWYWGQGTQVTVSS

SEQ ID NO: 29318 - protein, 118 aa, Artificial Sequence
  Chemically Synthesized
QVQLQESGGGLVQAGGSLRLSCAASGNISYYSYMGWYRQAPGKERELVASIGGGANTNYADSVKGRFTISRDNAKNTVYLQMNSLKPEDTAVYYCAAAYYDQAYYIYWGQGTQVTVSS

SEQ ID NO: 29319 - protein, 121 aa, Artificial Sequence
  Chemically Synthesized
QVQLQESGGGLVQAGGSLRLSCAASGTISYYSYMGWYRQAPGKERELVASINDGGYLYADSVKGRFTISRDNAKNTVYLQMNSLKPEDTAVYYCAVRGTNYGADFRVLAYWGQGTQVTVSS

SEQ ID NO: 29320 - protein, 125 aa, Artificial Sequence
  Chemically Synthesized
QVQLQESGGGLVQAGGSLRLSCAASGNISPWYAMGWYRQAPGKERELLPLLILVVLPYADSVKGRFTISRDNAKNTVYLQMNSLKPEDTAVYYCAVVLPTGGETEYLDTNGHYYWGQGTQVTVSS

SEQ ID NO: 29321 - protein, 118 aa, Artificial Sequence
  Chemically Synthesized
QVQLQESGGGLVQAGGSLRLSCAASGTISQTLGMGWYRQAPGKERELVAAIAYGATTYYADSVKGRFTISRDNAKNTVYLQMNSLKPEDTAVYYCAANVFEWPYYYYWGQGTQVTVSS

SEQ ID NO: 29322 - protein, 118 aa, Artificial Sequence
  Chemically Synthesized
QVQLQESGGGLVQAGGSLRLSCAASGNISDLVRMGWYRQAPGKEREFVAAINRGTNTYYADSVKGRFTISRDNAKNTVYLQMNSLKPEDTAVYYCAVFDYGADEPLYWGQGTQVTVSS

SEQ ID NO: 29323 - protein, 117 aa, Artificial Sequence
  Chemically Synthesized
QVQLQESGGGLVQAGGSLRLSCAASGNIFPTLTMGWYRQAPGKEREFVAAITSVLIPYADSVKGRFTISRDNAKNTVYLQMNSLKPEDTAVYYCAAYPYPYNIYSYWGQGTQVTVSS

SEQ ID NO: 29324 - protein, 118 aa, Artificial Sequence
  Chemically Synthesized
QVQLQESGGGLVQAGGSLRLSCAASGTISYYDYMGWYRQAPGKERELVAAINRGTITNYADSVKGRFTISRDNAKNTVYLQMNSLKPEDTAVYYCAAYDRFRDYHGYWGQGTQVTVSS

SEQ ID NO: 29325 - protein, 121 aa, Artificial Sequence
  Chemically Synthesized
QVQLQESGGGLVQAGGSLRLSCAASGTISVYDNMGWYRQAPGKERELVATIMTVLLPYADSVKGRFTISRDNAKNTVYLQMNSLKPEDTAVYYCAALRGIDTDGQYLFIYWGQGTQVTVSS

SEQ ID NO: 29326 - protein, 118 aa, Artificial Sequence
  Chemically Synthesized
QVQLQESGGGLVQAGGSLRLSCAASGNISQDNDMGWYRQAPGKEREFVATIGRGAITNYADSVKGRFTISRDNAKNTVYLQMNSLKPEDTAVYYCAVIYDDGYRLKYWGQGTQVTVSS

SEQ ID NO: 29327 - protein, 117 aa, Artificial Sequence
  Chemically Synthesized
QVQLQESGGGLVQAGGSLRLSCAASGSISTPQIMGWYRQAPGKERELVAAIDDGSTTYYADSVKGRFTISRDNAKNTVYLQMNSLKPEDTAVYYCALLTCTTTRIYWGQGTQVTVSS

SEQ ID NO: 29328 - protein, 111 aa, Artificial Sequence
  Chemically Synthesized
QVQLQESGGGLVQAGGSLRLSCAASGNIFDYAHMGWYRQAPGKEREFVEYQYADSVKGRFTISRDNAKNTVYLQMNSLKPEDTAVYYCAVGADIRVSYTYWGQGTQVTVSS

SEQ ID NO: 29329 - protein, 122 aa, Artificial Sequence
  Chemically Synthesized
QVQLQESGGGLVQAGGSLRLSCAASGTISRDAYMGWYRQAPGKERELVAAIAYGGITYYADSVKGRFTISRDNAKNTVYLQMNSLKPEDTAVYYCAVVPSRRYFDYSRHVYWGQGTQVTVSS

SEQ ID NO: 29330 - protein, 118 aa, Artificial Sequence
  Chemically Synthesized
QVQLQESGGGLVQAGGSLRLSCAASGTIFPNTVMGWYRQAPGKEREFVASITNGGNTYYADSVKGRFTISRDNAKNTVYLQMNSLKPEDTAVYYCAVIYLYLLYYPYWGQGTQVTVSS

SEQ ID NO: 29331 - protein, 126 aa, Artificial Sequence
  Chemically Synthesized
QVQLQESGGGLVQAGGSLRLSCAASGNISASYIMGWYRQAPGKEREFVAAISDGASTNYADSVKGRFTISRDNAKNTVYLQMNSLKPEDTAVYYCAADNPRNVYDGYPAKYYLRYWGQGTQVTVSS

SEQ ID NO: 29332 - protein, 118 aa, Artificial Sequence
  Chemically Synthesized
QVQLQESGGGLVQAGGSLRLSCAASGTIFGDDPMGWYRQAPGKERELVATISDGTSTNYADSVKGRFTISRDNAKNTVYLQMNSLKPEDTAVYYCAAQYDGTPDFDYWGQGTQVTVSS

SEQ ID NO: 29333 - protein, 117 aa, Artificial Sequence
  Chemically Synthesized
QVQLQESGGGLVQAGGSLRLSCAASGNIFLDLAMGWYRQAPGKEREFVPVLVKVVVPYADSVKGRFTISRDNAKNTVYLQMNSLKPEDTAVYYCAAPYEYPYDHVYWGQGTQVTVSS

SEQ ID NO: 29334 - protein, 118 aa, Artificial Sequence
  Chemically Synthesized
QVQLQESGGGLVQAGGSLRLSCAASGSIFTGWRMGWYRQAPGKERELVATIGYGGNTYYADSVKGRFTISRDNAKNTVYLQMNSLKPEDTAVYYCAVDNDTDEPFIYWGQGTQVTVSS

SEQ ID NO: 29335 - protein, 118 aa, Artificial Sequence
  Chemically Synthesized
QVQLQESGGGLVQAGGSLRLSCAASGTIFSVGTMGWYRQAPGKEREFVATIDRGTTTYYADSVKGRFTISRDNAKNTVYLQMNSLKPEDTAVYYCAVDRVDDVTHVYWGQGTQVTVSS

SEQ ID NO: 29336 - protein, 122 aa, Artificial Sequence
  Chemically Synthesized
QVQLQESGGGLVQAGGSLRLSCAASGSIFNGSSMGWYRQAPGKERELVAAISDGGITNYADSVKGRFTISRDNAKNTVYLQMNSLKPEDTAVYYCAVPGRYYLQYGIDHFYWGQGTQVTVSS

SEQ ID NO: 29337 - protein, 125 aa, Artificial Sequence
  Chemically Synthesized
QVQLQESGGGLVQAGGSLRLSCAASGYISVNLMGWYRQAPGKEREFVASITGGSITNYADSVKGRFTISRDNAKNTVYLQMNSLKPEDTAVYYCAVVPDALSRTRQYAIRPYDYWGQGTQVTVSS

SEQ ID NO: 29338 - protein, 122 aa, Artificial Sequence
  Chemically Synthesized
QVQLQESGGGLVQAGGSLRLSCAASGYIFVTQIMGWYRQAPGKERELVATIGLGASTNYADSVKGRFTISRDNAKNTVYLQMNSLKPEDTAVYYCAVAQAWHRRSLTNYRYWGQGTQVTVSS

SEQ ID NO: 29339 - protein, 122 aa, Artificial Sequence
  Chemically Synthesized
QVQLQESGGGLVQAGGSLRLSCAASGSISVGPIMGWYRQAPGKERELVASITGGTSTNYADSVKGRFTISRDNAKNTVYLQMNSLKPEDTAVYYCAVDSYNYDQHHLAYRYWGQGTQVTVSS

SEQ ID NO: 29340 - protein, 118 aa, Artificial Sequence
  Chemically Synthesized
QVQLQESGGGLVQAGGSLRLSCAASGNISAQNYMGWYRQAPGKERELVAAITRGANTYYADSVKGRFTISRDNAKNTVYLQMNSLKPEDTAVYYCAATGADEGYLVYWGQGTQVTVSS

SEQ ID NO: 29341 - protein, 117 aa, Artificial Sequence
  Chemically Synthesized
QVQLQESGGGLVQAGGSLRLSCAASGSIFIIGGMGWYRQAPGKEREFVAGIAPGGNTYYADSVKGRFTISRDNAKNTVYLQMNSLKPEDTAVYYCAATYLSLVLIYWGQGTQVTVSS

SEQ ID NO: 29342 - protein, 118 aa, Artificial Sequence
  Chemically Synthesized
QVQLQESGGGLVQAGGSLRLSCAASGNIFALTYMGWYRQAPGKEREFVAAIDYGASTYYADSVKGRFTISRDNAKNTVYLQMNSLKPEDTAVYYCAAGVHLRSDYSYWGQGTQVTVSS

SEQ ID NO: 29343 - protein, 105 aa, Artificial Sequence
  Chemically Synthesized
QVQLQESGGGLVQAGGSLRLSCAASGSISRDYEMGWYRQAPGKERELVASIAVPYADSVKGRFTISRDNAKNTVYLQMNSLKPEDTAVYYCAAYWGQGTQVTVSS

SEQ ID NO: 29344 - protein, 122 aa, Artificial Sequence
  Chemically Synthesized
QVQLQESGGGLVQAGGSLRLSCAASGYISHDGAMGWYRQAPGKEREFVAAIDAGSNTYYADSVKGRFTISRDNAKNTVYLQMNSLKPEDTAVYYCAALYVYGSYLPRGHYYWGQGTQVTVSS

SEQ ID NO: 29345 - protein, 118 aa, Artificial Sequence
  Chemically Synthesized
QVQLQESGGGLVQAGGSLRLSCAASGTISNVYGMGWYRQAPGKEREFVAGINSGTSTNYADSVKGRFTISRDNAKNTVYLQMNSLKPEDTAVYYCAALWRYPQYHAYWGQGTQVTVSS

SEQ ID NO: 29346 - protein, 117 aa, Artificial Sequence
  Chemically Synthesized
QVQLQESGGGLVQAGGSLRLSCAASGSISRYDDMGWYRQAPGKERELLPLLMTVLLPYADSVKGRFTISRDNAKNTVYLQMNSLKPEDTAVYYCAVRSGIYKYLVYWGQGTQVTVSS

SEQ ID NO: 29347 - protein, 121 aa, Artificial Sequence
  Chemically Synthesized
QVQLQESGGGLVQAGGSLRLSCAASGNIFSPYRMGWYRQAPGKERELVAAIDWGSTNYADSVKGRFTISRDNAKNTVYLQMNSLKPEDTAVYYCAVSDTRDDQLTDYHAYWGQGTQVTVSS

SEQ ID NO: 29348 - protein, 114 aa, Artificial Sequence
  Chemically Synthesized
QVQLQESGGGLVQAGGSLRLSCAASGNISQVYKMGWYRQAPGKEREVLLLVLVPYADSVKGRFTISRDNAKNTVYLQMNSLKPEDTAVYYCAVHDKDATGLNYWGQGTQVTVSS

SEQ ID NO: 29349 - protein, 126 aa, Artificial Sequence
  Chemically Synthesized
QVQLQESGGGLVQAGGSLRLSCAASGSIFNWTSMGWYRQAPGKEREFVAAITVGSTTNYADSVKGRFTISRDNAKNTVYLQMNSLKPEDTAVYYCAVRWYDYEYTDTVQTYVHPYWGQGTQVTVSS

SEQ ID NO: 29350 - protein, 122 aa, Artificial Sequence
  Chemically Synthesized
QVQLQESGGGLVQAGGSLRLSCAASGNISDRSAMGWYRQAPGKEREFVASIGHGANTNYADSVKGRFTISRDNAKNTVYLQMNSLKPEDTAVYYCAAVGDTVYYPQRRYYYWGQGTQVTVSS

SEQ ID NO: 29351 - protein, 121 aa, Artificial Sequence
  Chemically Synthesized
QVQLQESGGGLVQAGGSLRLSCAASGTIFYLRDMGWYRQAPGKERELVAAITSGGSTYYADSVKGRFTISRDNAKNTVYLQMNSLKPEDTAVYYCAVGNVWARARRDSIYWGQGTQVTVSS

SEQ ID NO: 29352 - protein, 116 aa, Artificial Sequence
  Chemically Synthesized
QVQLQESGGGLVQAGGSLRLSCAASGTISSQNAMGWYRQAPGKERELVASIAYGSSTYYADSVKGRFTISRDNAKNTVYLQMNSLKPEDTAVYYCAVVTAGPYRYWGQGTQVTVSS

SEQ ID NO: 29353 - protein, 122 aa, Artificial Sequence
  Chemically Synthesized
QVQLQESGGGLVQAGGSLRLSCAASGNISYYLYMGWYRQAPGKERELVASITRGGNTYYADSVKGRFTISRDNAKNTVYLQMNSLKPEDTAVYYCAVRSTGRISSLWYHRYWGQGTQVTVSS

SEQ ID NO: 29354 - protein, 118 aa, Artificial Sequence
  Chemically Synthesized
QVQLQESGGGLVQAGGSLRLSCAASGTISRFYVMGWYRQAPGKEREFVASITDGSTTYYADSVKGRFTISRDNAKNTVYLQMNSLKPEDTAVYYCAAGDAGDTYHYYWGQGTQVTVSS

SEQ ID NO: 29355 - protein, 115 aa, Artificial Sequence
  Chemically Synthesized
QVQLQESGGGLVQAGGSLRLSCAASGSISYATPMGWYRQAPGKEREFVAGIGPGTSTNYADSVKGRFTISRDNAKNTVYLQMNSLKPEDTAVYYCAAHDEIHDYWGQGTQVTVSS

SEQ ID NO: 29356 - protein, 126 aa, Artificial Sequence
  Chemically Synthesized
QVQLQESGGGLVQAGGSLRLSCAASGNIFPTYGMGWYRQAPGKERELVAAISGGGSTYYADSVKGRFTISRDNAKNTVYLQMNSLKPEDTAVYYCAVWYSTQEGHDTDDYILYPYWGQGTQVTVSS

SEQ ID NO: 29357 - protein, 122 aa, Artificial Sequence
  Chemically Synthesized
QVQLQESGGGLVQAGGSLRLSCAASGYISGRKYMGWYRQAPGKEREFVASINIGGSTNYADSVKGRFTISRDNAKNTVYLQMNSLKPEDTAVYYCAVVTPGLSGRGRYHGYWGQGTQVTVSS

SEQ ID NO: 29358 - protein, 122 aa, Artificial Sequence
  Chemically Synthesized
QVQLQESGGGLVQAGGSLRLSCAASGTISLTSSMGWYRQAPGKEREFVAAINYGATTYYADSVKGRFTISRDNAKNTVYLQMNSLKPEDTAVYYCAVYAPWYNENYVRLYYWGQGTQVTVSS

SEQ ID NO: 29359 - protein, 118 aa, Artificial Sequence
  Chemically Synthesized
QVQLQESGGGLVQAGGSLRLSCAASGTISDLKDMGWYRQAPGKEREFVAAITYGSSTNYADSVKGRFTISRDNAKNTVYLQMNSLKPEDTAVYYCAADNGGYSAYRYWGQGTQVTVSS

SEQ ID NO: 29360 - protein, 114 aa, Artificial Sequence
  Chemically Synthesized
QVQLQESGGGLVQAGGSLRLSCAASGIFLVLTMGWYRQAPGKEREFVAAIGDGSNTYYADSVKGRFTISRDNAKNTVYLQMNSLKPEDTAVYYCAAYYYFLYYWGQGTQVTVSS

SEQ ID NO: 29361 - protein, 118 aa, Artificial Sequence
  Chemically Synthesized
QVQLQESGGGLVQAGGSLRLSCAASGTISWWYYMGWYRQAPGKERELVASITSGSNTYYADSVKGRFTISRDNAKNTVYLQMNSLKPEDTAVYYCAVQYGGPFLFPYWGQGTQVTVSS

SEQ ID NO: 29362 - protein, 118 aa, Artificial Sequence
  Chemically Synthesized
QVQLQESGGGLVQAGGSLRLSCAASGTISPTNPMGWYRQAPGKEREFVASINYGASTYYADSVKGRFTISRDNAKNTVYLQMNSLKPEDTAVYYCAVIIPDSTNFNYWGQGTQVTVSS

SEQ ID NO: 29363 - protein, 112 aa, Artificial Sequence
  Chemically Synthesized
QVQLQESGGGLVQAGGSLRLSCAASGNIFRERDMGWYRQAPGKEREFVATIANGSTTYYADSVKGRFTISRDNAKNTVYLQMNSLKPEDTAVYYCAVVDRYWGQGTQVTVSS

SEQ ID NO: 29364 - protein, 118 aa, Artificial Sequence
  Chemically Synthesized
QVQLQESGGGLVQAGGSLRLSCAASGSISAPSAMGWYRQAPGKEREFVAAINKGAITNYADSVKGRFTISRDNAKNTVYLQMNSLKPEDTAVYYCAAYYYRDDYYGYWGQGTQVTVSS

SEQ ID NO: 29365 - protein, 118 aa, Artificial Sequence
  Chemically Synthesized
QVQLQESGGGLVQAGGSLRLSCAASGNISNYAGMGWYRQAPGKEREFVASIDNGGITNYADSVKGRFTISRDNAKNTVYLQMNSLKPEDTAVYYCAVVWYASGVHYYWGQGTQVTVSS

SEQ ID NO: 29366 - protein, 118 aa, Artificial Sequence
  Chemically Synthesized
QVQLQESGGGLVQAGGSLRLSCAASGSISPVGSMGWYRQAPGKEREFVAAIAYGSSTNYADSVKGRFTISRDNAKNTVYLQMNSLKPEDTAVYYCAAVIGRGPYFGYWGQGTQVTVSS

SEQ ID NO: 29367 - protein, 118 aa, Artificial Sequence
  Chemically Synthesized
QVQLQESGGGLVQAGGSLRLSCAASGSISRYFDMGWYRQAPGKERELVATISAGTSTYYADSVKGRFTISRDNAKNTVYLQMNSLKPEDTAVYYCAAKRFPWDDYWYWGQGTQVTVSS

SEQ ID NO: 29368 - protein, 122 aa, Artificial Sequence
  Chemically Synthesized
QVQLQESGGGLVQAGGSLRLSCAASGNISYDWPMGWYRQAPGKERELVATIDFGANTYYADSVKGRFTISRDNAKNTVYLQMNSLKPEDTAVYYCAVTRSVETALLPYFRYWGQGTQVTVSS

SEQ ID NO: 29369 - protein, 122 aa, Artificial Sequence
  Chemically Synthesized
QVQLQESGGGLVQAGGSLRLSCAASGNISAASNMGWYRQAPGKERELVAAIGAGGSTNYADSVKGRFTISRDNAKNTVYLQMNSLKPEDTAVYYCAALAQGNRAGPRYFYYWGQGTQVTVSS

SEQ ID NO: 29370 - protein, 118 aa, Artificial Sequence
  Chemically Synthesized
QVQLQESGGGLVQAGGSLRLSCAASGSISSLTYMGWYRQAPGKEREFVASIATGTITNYADSVKGRFTISRDNAKNTVYLQMNSLKPEDTAVYYCAAVLVTYKHFYYWGQGTQVTVSS

SEQ ID NO: 29371 - protein, 126 aa, Artificial Sequence
  Chemically Synthesized
QVQLQESGGGLVQAGGSLRLSCAASGTISLLYFMGWYRQAPGKERELVAAITLGGSTNYADSVKGRFTISRDNAKNTVYLQMNSLKPEDTAVYYCAVEGIGVGILAVQYSQNHLYWGQGTQVTVSS

SEQ ID NO: 29372 - protein, 122 aa, Artificial Sequence
  Chemically Synthesized
QVQLQESGGGLVQAGGSLRLSCAASGTISDWTVMGWYRQAPGKEREFVAAIGDGANTNYADSVKGRFTISRDNAKNTVYLQMNSLKPEDTAVYYCAVYRKYGARYVAGHYYWGQGTQVTVSS

SEQ ID NO: 29373 - protein, 118 aa, Artificial Sequence
  Chemically Synthesized
QVQLQESGGGLVQAGGSLRLSCAASGNISRFYSMGWYRQAPGKEREFVAGIAWGTTTYYADSVKGRFTISRDNAKNTVYLQMNSLKPEDTAVYYCAALNRGHGFHAYWGQGTQVTVSS

SEQ ID NO: 29374 - protein, 121 aa, Artificial Sequence
  Chemically Synthesized
QVQLQESGGGLVQAGGSLRLSCAASGSIFYRDDMGWYRQAPGKERELVASIGTGGSTYYADSVKGRFTISRDNAKNTVYLQMNSLKPEDTAVYYCAVDGPDPYWNAVSYYWGQGTQVTVSS

SEQ ID NO: 29375 - protein, 122 aa, Artificial Sequence
  Chemically Synthesized
QVQLQESGGGLVQAGGSLRLSCAASGYIFAYYVMGWYRQAPGKEREFVAAIAYGSSTNYADSVKGRFTISRDNAKNTVYLQMNSLKPEDTAVYYCAVLYYSAWWGQNYHSYWGQGTQVTVSS

SEQ ID NO: 29376 - protein, 118 aa, Artificial Sequence
  Chemically Synthesized
QVQLQESGGGLVQAGGSLRLSCAASGNISRFRYMGWYRQAPGKERELVAAINSGGITYYADSVKGRFTISRDNAKNTVYLQMNSLKPEDTAVYYCAALWVPYRRHGYWGQGTQVTVSS

SEQ ID NO: 29377 - protein, 118 aa, Artificial Sequence
  Chemically Synthesized
QVQLQESGGGLVQAGGSLRLSCAASGTISYSYTMGWYRQAPGKEREFVAGISTGSTTNYADSVKGRFTISRDNAKNTVYLQMNSLKPEDTAVYYCAALARAYSRHFYWGQGTQVTVSS

SEQ ID NO: 29378 - protein, 118 aa, Artificial Sequence
  Chemically Synthesized
QVQLQESGGGLVQAGGSLRLSCAASGTISARTHMGWYRQAPGKERELVAGISIGTNTNYADSVKGRFTISRDNAKNTVYLQMNSLKPEDTAVYYCAVPQSGGWNHRYWGQGTQVTVSS

SEQ ID NO: 29379 - protein, 118 aa, Artificial Sequence
  Chemically Synthesized
QVQLQESGGGLVQAGGSLRLSCAASGYISGPRWMGWYRQAPGKEREFVATIDIGTSTNYADSVKGRFTISRDNAKNTVYLQMNSLKPEDTAVYYCAVLDLAKSYFYYWGQGTQVTVSS

SEQ ID NO: 29380 - protein, 118 aa, Artificial Sequence
  Chemically Synthesized
QVQLQESGGGLVQAGGSLRLSCAASGNIFQRDSMGWYRQAPGKEREFVATINYGGNTYYADSVKGRFTISRDNAKNTVYLQMNSLKPEDTAVYYCAVYFYSPIGHRYWGQGTQVTVSS

SEQ ID NO: 29381 - protein, 118 aa, Artificial Sequence
  Chemically Synthesized
QVQLQESGGGLVQAGGSLRLSCAASGSISDRYTMGWYRQAPGKEREFVASITWGANTYYADSVKGRFTISRDNAKNTVYLQMNSLKPEDTAVYYCAAVRQDRAHFYYWGQGTQVTVSS

SEQ ID NO: 29382 - protein, 118 aa, Artificial Sequence
  Chemically Synthesized
QVQLQESGGGLVQAGGSLRLSCAASGTIFHPYAMGWYRQAPGKERELVAAIGYGSITNYADSVKGRFTISRDNAKNTVYLQMNSLKPEDTAVYYCAADTAYYYALDYWGQGTQVTVSS

SEQ ID NO: 29383 - protein, 118 aa, Artificial Sequence
  Chemically Synthesized
QVQLQESGGGLVQAGGSLRLSCAASGSISRTHDMGWYRQAPGKERELVASISDGATTYYADSVKGRFTISRDNAKNTVYLQMNSLKPEDTAVYYCAVRREDEVAHSYWGQGTQVTVSS

SEQ ID NO: 29384 - protein, 118 aa, Artificial Sequence
  Chemically Synthesized
QVQLQESGGGLVQAGGSLRLSCAASGNISDQYSMGWYRQAPGKEREFVAGIAWGTTTNYADSVKGRFTISRDNAKNTVYLQMNSLKPEDTAVYYCAAIYYYAGHHYYWGQGTQVTVSS

SEQ ID NO: 29385 - protein, 117 aa, Artificial Sequence
  Chemically Synthesized
QVQLQESGGGLVQAGGSLRLSCAASGNISDLGAMGWYRQAPGKEREFVAGISKGATTNYADSVKGRFTISRDNAKNTVYLQMNSLKPEDTAVYYCAAIWQGTWHAYWGQGTQVTVSS

SEQ ID NO: 29386 - protein, 122 aa, Artificial Sequence
  Chemically Synthesized
QVQLQESGGGLVQAGGSLRLSCAASGTISRSYPMGWYRQAPGKEREFVAGIARGGITNYADSVKGRFTISRDNAKNTVYLQMNSLKPEDTAVYYCAATFPAYRYWWLYHYYWGQGTQVTVSS

SEQ ID NO: 29387 - protein, 126 aa, Artificial Sequence
  Chemically Synthesized
QVQLQESGGGLVQAGGSLRLSCAASGYIFRWYQMGWYRQAPGKERELVAAIGSGTITNYADSVKGRFTISRDNAKNTVYLQMNSLKPEDTAVYYCAVAPLDSDALGREDDLYHGYWGQGTQVTVSS

SEQ ID NO: 29388 - protein, 117 aa, Artificial Sequence
  Chemically Synthesized
QVQLQESGGGLVQAGGSLRLSCAASGNIFVTSMGWYRQAPGKERELVAGITWGSNTNYADSVKGRFTISRDNAKNTVYLQMNSLKPEDTAVYYCAAWAGTFVLHRYWGQGTQVTVSS

SEQ ID NO: 29389 - protein, 118 aa, Artificial Sequence
  Chemically Synthesized
QVQLQESGGGLVQAGGSLRLSCAASGNISTYFYMGWYRQAPGKERELVAAIGRGGTTNYADSVKGRFTISRDNAKNTVYLQMNSLKPEDTAVYYCAVRPYWFLYYQYWGQGTQVTVSS

SEQ ID NO: 29390 - protein, 122 aa, Artificial Sequence
  Chemically Synthesized
QVQLQESGGGLVQAGGSLRLSCAASGTISINQHMGWYRQAPGKEREFVATISYGGSTNYADSVKGRFTISRDNAKNTVYLQMNSLKPEDTAVYYCAARQLGQLYREQDLPYWGQGTQVTVSS

SEQ ID NO: 29391 - protein, 121 aa, Artificial Sequence
  Chemically Synthesized
QVQLQESGGGLVQAGGSLRLSCAASGNIFVGVDMGWYRQAPGKERELVASITPGSTTNYADSVKGRFTISRDNAKNTVYLQMNSLKPEDTAVYYCAADLRTVTLNGTTFYWGQGTQVTVSS

SEQ ID NO: 29392 - protein, 118 aa, Artificial Sequence
  Chemically Synthesized
QVQLQESGGGLVQAGGSLRLSCAASGNIFWGTYMGWYRQAPGKERELVAAINYGTTTNYADSVKGRFTISRDNAKNTVYLQMNSLKPEDTAVYYCAVIHTDDYQFIYWGQGTQVTVSS

SEQ ID NO: 29393 - protein, 117 aa, Artificial Sequence
  Chemically Synthesized
QVQLQESGGGLVQAGGSLRLSCAASGYISAGGDMGWYRQAPGKERELVATISAGATTNYADSVKGRFTISRDNAKNTVYLQMNSLKPEDTAVYYCAAQMDRTLPFYWGQGTQVTVSS

SEQ ID NO: 29394 - protein, 126 aa, Artificial Sequence
  Chemically Synthesized
QVQLQESGGGLVQAGGSLRLSCAASGNISRLIAMGWYRQAPGKEREFVATISVGGSTNYADSVKGRFTISRDNAKNTVYLQMNSLKPEDTAVYYCAALIVYTGSRDVGGYLYHPYWGQGTQVTVSS

SEQ ID NO: 29395 - protein, 118 aa, Artificial Sequence
  Chemically Synthesized
QVQLQESGGGLVQAGGSLRLSCAASGNISTWPYMGWYRQAPGKERELVAAIGHGGITNYADSVKGRFTISRDNAKNTVYLQMNSLKPEDTAVYYCAALIRTHTWLYYWGQGTQVTVSS

SEQ ID NO: 29396 - protein, 118 aa, Artificial Sequence
  Chemically Synthesized
QVQLQESGGGLVQAGGSLRLSCAASGNIFTQTNMGWYRQAPGKEREFVAGITRGTTTNYADSVKGRFTISRDNAKNTVYLQMNSLKPEDTAVYYCAVASNYPAWFYYWGQGTQVTVSS

SEQ ID NO: 29397 - protein, 117 aa, Artificial Sequence
  Chemically Synthesized
QVQLQESGGGLVQAGGSLRLSCAASGNISGGYMGWYRQAPGKERELVAGISDGANTNYADSVKGRFTISRDNAKNTVYLQMNSLKPEDTAVYYCAVYVYYWSGYPYWGQGTQVTVSS

SEQ ID NO: 29398 - protein, 118 aa, Artificial Sequence
  Chemically Synthesized
QVQLQESGGGLVQAGGSLRLSCAASGNISVQFYMGWYRQAPGKEREFVATIDHGSNTNYADSVKGRFTISRDNAKNTVYLQMNSLKPEDTAVYYCAAYQYPNRAYSYWGQGTQVTVSS

SEQ ID NO: 29399 - protein, 121 aa, Artificial Sequence
  Chemically Synthesized
QVQLQESGGGLVQAGGSLRLSCAASGSIFSANMGWYRQAPGKEREFVASITRGGNTNYADSVKGRFTISRDNAKNTVYLQMNSLKPEDTAVYYCAVIDQAAYSSIYGLYYWGQGTQVTVSS

SEQ ID NO: 29400 - protein, 118 aa, Artificial Sequence
  Chemically Synthesized
QVQLQESGGGLVQAGGSLRLSCAASGNIFQTFGMGWYRQAPGKEREFVASINRGTTTNYADSVKGRFTISRDNAKNTVYLQMNSLKPEDTAVYYCAVVWYNRQYHSYWGQGTQVTVSS

SEQ ID NO: 29401 - protein, 121 aa, Artificial Sequence
  Chemically Synthesized
QVQLQESGGGLVQAGGSLRLSCAASGTISHRVYMGWYRQAPGKERELVASIGLGGTTNYADSVKGRFTISRDNAKNTVYLQMNSLKPEDTAVYYCAARGLLRWFGQPFDYWGQGTQVTVSS

SEQ ID NO: 29402 - protein, 125 aa, Artificial Sequence
  Chemically Synthesized
QVQLQESGGGLVQAGGSLRLSCAASGYISTDYYMGWYRQAPGKERELVAAISFGSTTNYADSVKGRFTISRDNAKNTVYLQMNSLKPEDTAVYYCAVQRPSESTTMFVTTLNMYWGQGTQVTVSS

SEQ ID NO: 29403 - protein, 118 aa, Artificial Sequence
  Chemically Synthesized
QVQLQESGGGLVQAGGSLRLSCAASGNISRPSGMGWYRQAPGKERELVAGISDGGTTNYADSVKGRFTISRDNAKNTVYLQMNSLKPEDTAVYYCAVLYWGDGWHYYWGQGTQVTVSS

SEQ ID NO: 29404 - protein, 118 aa, Artificial Sequence
  Chemically Synthesized
QVQLQESGGGLVQAGGSLRLSCAASGSISTANIMGWYRQAPGKERELVAGISGGSNTNYADSVKGRFTISRDNAKNTVYLQMNSLKPEDTAVYYCAVYYFKWPEFAYWGQGTQVTVSS

SEQ ID NO: 29405 - protein, 118 aa, Artificial Sequence
  Chemically Synthesized
QVQLQESGGGLVQAGGSLRLSCAASGSISIPWSMGWYRQAPGKERELVAGITGGTTTNYADSVKGRFTISRDNAKNTVYLQMNSLKPEDTAVYYCAVIWYEQAYYYYWGQGTQVTVSS

SEQ ID NO: 29406 - protein, 118 aa, Artificial Sequence
  Chemically Synthesized
QVQLQESGGGLVQAGGSLRLSCAASGNISYTNYMGWYRQAPGKERELVATISRGGNTNYADSVKGRFTISRDNAKNTVYLQMNSLKPEDTAVYYCAVQDYYTYDFTYWGQGTQVTVSS

SEQ ID NO: 29407 - protein, 118 aa, Artificial Sequence
  Chemically Synthesized
QVQLQESGGGLVQAGGSLRLSCAASGNISIVTNMGWYRQAPGKEREFVATIGHGTITNYADSVKGRFTISRDNAKNTVYLQMNSLKPEDTAVYYCAAVYRTSQWHAYWGQGTQVTVSS

SEQ ID NO: 29408 - protein, 118 aa, Artificial Sequence
  Chemically Synthesized
QVQLQESGGGLVQAGGSLRLSCAASGYISFPYNMGWYRQAPGKEREFVAAISIGTSTNYADSVKGRFTISRDNAKNTVYLQMNSLKPEDTAVYYCAALYRDSRYYVYWGQGTQVTVSS

SEQ ID NO: 29409 - protein, 125 aa, Artificial Sequence
  Chemically Synthesized
QVQLQESGGGLVQAGGSLRLSCAASGNISSRGGMGWYRQAPGKERELVATIDYGSSTYADSVKGRFTISRDNAKNTVYLQMNSLKPEDTAVYYCAAGLADGVDGGVPSDIAHAYWGQGTQVTVSS

SEQ ID NO: 29410 - protein, 119 aa, Artificial Sequence
  Chemically Synthesized
QVQLQESGGGLVQAGGSLRLSCAASGNIFTNLGMGWYRQAPGKEREFVATINLGGTTYYADSVKGRFTISRDNAKNTVYLQMNSLKPEDTAVYYCAVDLGADYFDFTYWGQGTQVTVSS

SEQ ID NO: 29411 - protein, 122 aa, Artificial Sequence
  Chemically Synthesized
QVQLQESGGGLVQAGGSLRLSCAASGTISPLAYMGWYRQAPGKEREFVAGINLGTSTNYADSVKGRFTISRDNAKNTVYLQMNSLKPEDTAVYYCAAVHEDGYDPGVRHGYWGQGTQVTVSS

SEQ ID NO: 29412 - protein, 118 aa, Artificial Sequence
  Chemically Synthesized
QVQLQESGGGLVQAGGSLRLSCAASGNIFPQYPMGWYRQAPGKERELVAGIAYGGSTYYADSVKGRFTISRDNAKNTVYLQMNSLKPEDTAVYYCAVYEYVYELYEYWGQGTQVTVSS

SEQ ID NO: 29413 - protein, 121 aa, Artificial Sequence
  Chemically Synthesized
QVQLQESGGGLVQAGGSLRLSCAASGSIFQPEMGWYRQAPGKEREFVAAIAWGSTTNYADSVKGRFTISRDNAKNTVYLQMNSLKPEDTAVYYCAADFNYTERYAYQYVYWGQGTQVTVSS

SEQ ID NO: 29414 - protein, 125 aa, Artificial Sequence
  Chemically Synthesized
QVQLQESGGGLVQAGGSLRLSCAASGTISDGYYMGWYRQAPGKEREFVASIGYGSNTNYADSVKGRFTISRDNAKNTVYLQMNSLKPEDTAVYYCAVFISIYTLWDVAIGDLYYWGQGTQVTVSS

SEQ ID NO: 29415 - protein, 118 aa, Artificial Sequence
  Chemically Synthesized
QVQLQESGGGLVQAGGSLRLSCAASGSISTGSGMGWYRQAPGKEREFVASINGGSNTNYADSVKGRFTISRDNAKNTVYLQMNSLKPEDTAVYYCAARPYKYSPFNYWGQGTQVTVSS

SEQ ID NO: 29416 - protein, 121 aa, Artificial Sequence
  Chemically Synthesized
QVQLQESGGGLVQAGGSLRLSCAASGSISSRELMGWYRQAPGKERELVASITSGTTTYYADSVKGRFTISRDNAKNTVYLQMNSLKPEDTAVYYCAVDGAPWDHSWKVLYWGQGTQVTVSS

SEQ ID NO: 29417 - protein, 111 aa, Artificial Sequence
  Chemically Synthesized
QVQLQESGGGLVQAGGSLRLSCAASGSISFPGYMGWYRQAPGKEREFVAGIAYGASTYYADSVKGRFTISRDNAKNTVYLQMNSLKPEDTAVYYCAAGMYWGQGTQVTVSS

SEQ ID NO: 29418 - protein, 118 aa, Artificial Sequence
  Chemically Synthesized
QVQLQESGGGLVQAGGSLRLSCAASGNISSTYPMGWYRQAPGKERELVAAIAVGGTTYYADSVKGRFTISRDNAKNTVYLQMNSLKPEDTAVYYCAVSSYTSLPLWYWGQGTQVTVSS

SEQ ID NO: 29419 - protein, 123 aa, Artificial Sequence
  Chemically Synthesized
QVQLQESGGGLVQAGGSLRLSCAASGNISGTMGWYRQAPGKEREFVATINTGSTTNYADSVKGRFTISRDNAKNTVYLQMNSLKPEDTAVYYCAADQYQVYVWYSTRGSHLYWGQGTQVTVSS

SEQ ID NO: 29420 - protein, 122 aa, Artificial Sequence
  Chemically Synthesized
QVQLQESGGGLVQAGGSLRLSCAASGTIFPITYMGWYRQAPGKEREFVAGIAVGATTNYADSVKGRFTISRDNAKNTVYLQMNSLKPEDTAVYYCAVGGRATQHGARGYVYWGQGTQVTVSS

SEQ ID NO: 29421 - protein, 121 aa, Artificial Sequence
  Chemically Synthesized
QVQLQESGGGLVQAGGSLRLSCAASGTIFVSLDMGWYRQAPGKERELVATITYGASTYYADSVKGRFTISRDNAKNTVYLQMNSLKPEDTAVYYCAVYAFDDRRTLLYRYWGQGTQVTVSS

SEQ ID NO: 29422 - protein, 121 aa, Artificial Sequence
  Chemically Synthesized
QVQLQESGGGLVQAGGSLRLSCAASGSISATSMGWYRQAPGKERELVAAITAGTTTYYADSVKGRFTISRDNAKNTVYLQMNSLKPEDTAVYYCAVELLDWRTRFVDFDYWGQGTQVTVSS

SEQ ID NO: 29423 - protein, 125 aa, Artificial Sequence
  Chemically Synthesized
QVQLQESGGGLVQAGGSLRLSCAASGTISYLSYMGWYRQAPGKERELVASIDSVLVPYADSVKGRFTISRDNAKNTVYLQMNSLKPEDTAVYYCAVQDDRYYLWSKFAYFEHNYWGQGTQVTVSS

SEQ ID NO: 29424 - protein, 118 aa, Artificial Sequence
  Chemically Synthesized
QVQLQESGGGLVQAGGSLRLSCAASGNISITVFMGWYRQAPGKERELVAAISLGTNTNYADSVKGRFTISRDNAKNTVYLQMNSLKPEDTAVYYCAAYNVRVGGHGYWGQGTQVTVSS

SEQ ID NO: 29425 - protein, 125 aa, Artificial Sequence
  Chemically Synthesized
QVQLQESGGGLVQAGGSLRLSCAASGSIFDDSMGWYRQAPGKEREFVAGINYGASTYYADSVKGRFTISRDNAKNTVYLQMNSLKPEDTAVYYCAAYNGKYGSSYDFTWWGYAYWGQGTQVTVSS

SEQ ID NO: 29426 - protein, 121 aa, Artificial Sequence
  Chemically Synthesized
QVQLQESGGGLVQAGGSLRLSCAASGTIFSNADMGWYRQAPGKEREFVAVNLGGTTYYADSVKGRFTISRDNAKNTVYLQMNSLKPEDTAVYYCAAHYVRDGNNRKWLIYWGQGTQVTVSS

SEQ ID NO: 29427 - protein, 118 aa, Artificial Sequence
  Chemically Synthesized
QVQLQESGGGLVQAGGSLRLSCAASGTIFAGVPMGWYRQAPGKEREFVATIAVGTSTNYADSVKGRFTISRDNAKNTVYLQMNSLKPEDTAVYYCAVRVRADLLHPYWGQGTQVTVSS

SEQ ID NO: 29428 - protein, 118 aa, Artificial Sequence
  Chemically Synthesized
QVQLQESGGGLVQAGGSLRLSCAASGSIFHVSAMGWYRQAPGKEREFVATISNGSSTNYADSVKGRFTISRDNAKNTVYLQMNSLKPEDTAVYYCAAGLRFADIHRYWGQGTQVTVSS

SEQ ID NO: 29429 - protein, 120 aa, Artificial Sequence
  Chemically Synthesized
QVQLQESGGGLVQAGGSLRLSCAASGNISAVYEMGWYRQAPGKERELVASIAVGTTTYYADSVKGRFTISRDNAKNTVYLQMNSLKPEDTAVYYCAVQDAYLLDYPHIYWGQGTQVTVSS

SEQ ID NO: 29430 - protein, 118 aa, Artificial Sequence
  Chemically Synthesized
QVQLQESGGGLVQAGGSLRLSCAASGTIFTARYMGWYRQAPGKEREFVATIGGGTSTNYADSVKGRFTISRDNAKNTVYLQMNSLKPEDTAVYYCAVRHTVYQQLLYWGQGTQVTVSS

SEQ ID NO: 29431 - protein, 118 aa, Artificial Sequence
  Chemically Synthesized
QVQLQESGGGLVQAGGSLRLSCAASGNISVTDQMGWYRQAPGKEREFVASINYGGTTYYADSVKGRFTISRDNAKNTVYLQMNSLKPEDTAVYYCAARVVPYDVYAYWGQGTQVTVSS

SEQ ID NO: 29432 - protein, 122 aa, Artificial Sequence
  Chemically Synthesized
QVQLQESGGGLVQAGGSLRLSCAASGSIFIPGKMGWYRQAPGKERELVAGITAGGTTNYADSVKGRFTISRDNAKNTVYLQMNSLKPEDTAVYYCAVDDVVGDYELRDYDYWGQGTQVTVSS

SEQ ID NO: 29433 - protein, 110 aa, Artificial Sequence
  Chemically Synthesized
QVQLQESGGGLVQAGGSLRLSCAASGTISQGSEMGWYRQAPGKERELVATITYGTNTNYADSVKGRFTISRDNAKNTVYLQMNSLKPEDTAVYYCAVSYWGQGTQVTVSS

SEQ ID NO: 29434 - protein, 118 aa, Artificial Sequence
  Chemically Synthesized
QVQLQESGGGLVQAGGSLRLSCAASGYISTSRYMGWYRQAPGKEREFVASIGPGGSTNYADSVKGRFTISRDNAKNTVYLQMNSLKPEDTAVYYCAARAAYFRSYPYWGQGTQVTVSS

SEQ ID NO: 29435 - protein, 117 aa, Artificial Sequence
  Chemically Synthesized
QVQLQESGGGLVQAGGSLRLSCAASGNIFPWRYMGWYRQAPGKEREFVAAITPGTTTNYADSVKGRFTISRDNAKNTVYLQMNSLKPEDTAVYYCAVYPIYGAWHYWGQGTQVTVSS

SEQ ID NO: 29436 - protein, 122 aa, Artificial Sequence
  Chemically Synthesized
QVQLQESGGGLVQAGGSLRLSCAASGTIFRPPGMGWYRQAPGKEREFVAAIAIGANTYYADSVKGRFTISRDNAKNTVYLQMNSLKPEDTAVYYCAAPAYDPAFRLRGHTYWGQGTQVTVSS

SEQ ID NO: 29437 - protein, 122 aa, Artificial Sequence
  Chemically Synthesized
QVQLQESGGGLVQAGGSLRLSCAASGTIFQRYGMGWYRQAPGKERELVAGITYGSTTNYADSVKGRFTISRDNAKNTVYLQMNSLKPEDTAVYYCAADKLAAYTLTAEHPYWGQGTQVTVSS

SEQ ID NO: 29438 - protein, 115 aa, Artificial Sequence
  Chemically Synthesized
QVQLQESGGGLVQAGGSLRLSCAASGTIFLSVTMGWYRQAPGKEREFVAGISYGGTTYYADSVKGRFTISRDNAKNTVYLQMNSLKPEDTAVYYCAASPYDLTYWGQGTQVTVSS

SEQ ID NO: 29439 - protein, 115 aa, Artificial Sequence
  Chemically Synthesized
QVQLQESGGGLVQAGGSLRLSCAASGNIFAPWRMGWYRQAPGKEREFVASIDDGANTNYADSVKGRFTISRDNAKNTVYLQMNSLKPEDTAVYYCAVNGGGHRYWGQGTQVTVSS

SEQ ID NO: 29440 - protein, 122 aa, Artificial Sequence
  Chemically Synthesized
QVQLQESGGGLVQAGGSLRLSCAASGYISDFPYMGWYRQAPGKERELVAAIAFGGNTYYADSVKGRFTISRDNAKNTVYLQMNSLKPEDTAVYYCAVRDLRGAPGNYSYHYWGQGTQVTVSS

SEQ ID NO: 29441 - protein, 112 aa, Artificial Sequence
  Chemically Synthesized
QVQLQESGGGLVQAGGSLRLSCAASGYMGWYRQAPGKERELVATIDYGGSTYYADSVKGRFTISRDNAKNTVYLQMNSLKPEDTAVYYCAADPLDVGRYRYWGQGTQVTVSS

SEQ ID NO: 29442 - protein, 126 aa, Artificial Sequence
  Chemically Synthesized
QVQLQESGGGLVQAGGSLRLSCAASGNISTFYTMGWYRQAPGKEREFVAAIAYGGTTNYADSVKGRFTISRDNAKNTVYLQMNSLKPEDTAVYYCAVFGPYDSPGPYFRYGPYAYWGQGTQVTVSS

SEQ ID NO: 29443 - protein, 118 aa, Artificial Sequence
  Chemically Synthesized
QVQLQESGGGLVQAGGSLRLSCAASGNISAGSDMGWYRQAPGKERELVAGISGGTTTNYADSVKGRFTISRDNAKNTVYLQMNSLKPEDTAVYYCAADVYDYGEYTYWGQGTQVTVSS

SEQ ID NO: 29444 - protein, 125 aa, Artificial Sequence
  Chemically Synthesized
QVQLQESGGGLVQAGGSLRLSCAASGTISWVPTMGWYRQAPGKERELLPLLIRVVLPYADSVKGRFTISRDNAKNTVYLQMNSLKPEDTAVYYCAAGDLQSIRYYWDHPVEHGYWGQGTQVTVSS

SEQ ID NO: 29445 - protein, 118 aa, Artificial Sequence
  Chemically Synthesized
QVQLQESGGGLVQAGGSLRLSCAASGSIFPTFWMGWYRQAPGKEREFVAAIAWGGSTNYADSVKGRFTISRDNAKNTVYLQMNSLKPEDTAVYYCAARHSYGQIYPYWGQGTQVTVSS

SEQ ID NO: 29446 - protein, 126 aa, Artificial Sequence
  Chemically Synthesized
QVQLQESGGGLVQAGGSLRLSCAASGTISPWYYMGWYRQAPGKEREFVAGIDTGSNTNYADSVKGRFTISRDNAKNTVYLQMNSLKPEDTAVYYCAVDAGKGPSYRETLDPSHGYWGQGTQVTVSS

SEQ ID NO: 29447 - protein, 126 aa, Artificial Sequence
  Chemically Synthesized
QVQLQESGGGLVQAGGSLRLSCAASGNISVSFRMGWYRQAPGKEREFVAAIDNGSSTYYADSVKGRFTISRDNAKNTVYLQMNSLKPEDTAVYYCAAKDQTYAGYQDRDWTRHEYWGQGTQVTVSS

SEQ ID NO: 29448 - protein, 122 aa, Artificial Sequence
  Chemically Synthesized
QVQLQESGGGLVQAGGSLRLSCAASGSIFQNLEMGWYRQAPGKERELVAAITPGGTTYYADSVKGRFTISRDNAKNTVYLQMNSLKPEDTAVYYCAAGFRYIYLHDYYLGYWGQGTQVTVSS

SEQ ID NO: 29449 - protein, 113 aa, Artificial Sequence
  Chemically Synthesized
QVQLQESGGGLVQAGGSLRLSCAASGTISYQIYMGWYRQAPGKERELVAAITWGSSTYYADSVKGRFTISRDNAKNTVYLQMNSLKPEDTAVYYCAAFRSMYWGQGTQVTVSS

SEQ ID NO: 29450 - protein, 122 aa, Artificial Sequence
  Chemically Synthesized
QVQLQESGGGLVQAGGSLRLSCAASGSISYVGPMGWYRQAPGKERELVATITYGGTTYYADSVKGRFTISRDNAKNTVYLQMNSLKPEDTAVYYCAVGSAHGGNGYADHLYWGQGTQVTVSS

SEQ ID NO: 29451 - protein, 118 aa, Artificial Sequence
  Chemically Synthesized
QVQLQESGGGLVQAGGSLRLSCAASGNIFYYHLMGWYRQAPGKEREFVAAISIGGTTYYADSVKGRFTISRDNAKNTVYLQMNSLKPEDTAVYYCAVLPLSYYDHAYWGQGTQVTVSS

SEQ ID NO: 29452 - protein, 126 aa, Artificial Sequence
  Chemically Synthesized
QVQLQESGGGLVQAGGSLRLSCAASGNISGRSTMGWYRQAPGKEREFVASIARGTTTNYADSVKGRFTISRDNAKNTVYLQMNSLKPEDTAVYYCAVDVRYIAFRGLDGVGGHSYWGQGTQVTVSS

SEQ ID NO: 29453 - protein, 122 aa, Artificial Sequence
  Chemically Synthesized
QVQLQESGGGLVQAGGSLRLSCAASGSISPSHVMGWYRQAPGKERELVASIGEGGITNYADSVKGRFTISRDNAKNTVYLQMNSLKPEDTAVYYCAAYASPRFDQANSHGYWGQGTQVTVSS

SEQ ID NO: 29454 - protein, 117 aa, Artificial Sequence
  Chemically Synthesized
QVQLQESGGGLVQAGGSLRLSCAASGYIFDLSDMGWYRQAPGKEREFVAGIGYGGNTYYADSVKGRFTISRDNAKNTVYLQMNSLKPEDTAVYYCAVKRYYSSNLYWGQGTQVTVSS

SEQ ID NO: 29455 - protein, 117 aa, Artificial Sequence
  Chemically Synthesized
QVQLQESGGGLVQAGGSLRLSCAASGTISLDDVMGWYRQAPGKERELVAGISNGATTNYADSVKGRFTISRDNAKNTVYLQMNSLKPEDTAVYYCAVGSLVLTTIYWGQGTQVTVSS

SEQ ID NO: 29456 - protein, 118 aa, Artificial Sequence
  Chemically Synthesized
QVQLQESGGGLVQAGGSLRLSCAASGYISDDAGMGWYRQAPGKERELVAAISDGSSTNYADSVKGRFTISRDNAKNTVYLQMNSLKPEDTAVYYCAVTLSADKSHDYWGQGTQVTVSS

SEQ ID NO: 29457 - protein, 126 aa, Artificial Sequence
  Chemically Synthesized
QVQLQESGGGLVQAGGSLRLSCAASGNISSIYVMGWYRQAPGKERELVAGINWGGITYYADSVKGRFTISRDNAKNTVYLQMNSLKPEDTAVYYCAVNGQFTWDAPERYVQTYGYWGQGTQVTVSS

SEQ ID NO: 29458 - protein, 117 aa, Artificial Sequence
  Chemically Synthesized
QVQLQESGGGLVQAGGSLRLSCAASGNISVYTYMGWYRQAPGKEREFVATINHGASTNYADSVKGRFTISRDNAKNTVYLQMNSLKPEDTAVYYCAVVFLSLTLLYWGQGTQVTVSS

SEQ ID NO: 29459 - protein, 118 aa, Artificial Sequence
  Chemically Synthesized
QVQLQESGGGLVQAGGSLRLSCAASGYIFDLYYMGWYRQAPGKEREFVATINYGTSTYYADSVKGRFTISRDNAKNTVYLQMNSLKPEDTAVYYCAVNLRKIFAFQYWGQGTQVTVSS

SEQ ID NO: 29460 - protein, 119 aa, Artificial Sequence
  Chemically Synthesized
QVQLQESGGGLVQAGGSLRLSCAASGNIFSTKMGWYRQAPGKERESSISVGSSTNYADSVKGRFTISRDNAKNTVYLQMNSLKPEDTAVYYCAARSADHYEYYQPFIYWGQGTQVTVSS

SEQ ID NO: 29461 - protein, 116 aa, Artificial Sequence
  Chemically Synthesized
QVQLQESGGGLVQAGGSLRLSCAASGTISLTTMGWYRQAPGKERELVAAIGPGGNTYYADSVKGRFTISRDNAKNTVYLQMNSLKPEDTAVYYCAVWSVTTTSIYWGQGTQVTVSS

SEQ ID NO: 29462 - protein, 126 aa, Artificial Sequence
  Chemically Synthesized
QVQLQESGGGLVQAGGSLRLSCAASGNISGTIKMGWYRQAPGKERELVAGISTGSSTNYADSVKGRFTISRDNAKNTVYLQMNSLKPEDTAVYYCAADNGQSTGYVPFYGYRHGYWGQGTQVTVSS

SEQ ID NO: 29463 - protein, 118 aa, Artificial Sequence
  Chemically Synthesized
QVQLQESGGGLVQAGGSLRLSCAASGYISYVPLMGWYRQAPGKERELVAAIDGGGNTNYADSVKGRFTISRDNAKNTVYLQMNSLKPEDTAVYYCAAHDYDTGRFEYWGQGTQVTVSS

SEQ ID NO: 29464 - protein, 118 aa, Artificial Sequence
  Chemically Synthesized
QVQLQESGGGLVQAGGSLRLSCAASGNISGYRYMGWYRQAPGKERELVAGIADGATTYYADSVKGRFTISRDNAKNTVYLQMNSLKPEDTAVYYCAVIDFNGYRHVYWGQGTQVTVSS

SEQ ID NO: 29465 - protein, 125 aa, Artificial Sequence
  Chemically Synthesized
QVQLQESGGGLVQAGGSLRLSCAASGSIFYGGSMGWYRQAPGKEREFVAAITVGGSTYYADSVKGRFTISRDNAKNTVYLQMNSLKPEDTAVYYCAWYHSSDAPLSEYPDRHYYWGQGTQVTVSS

SEQ ID NO: 29466 - protein, 118 aa, Artificial Sequence
  Chemically Synthesized
QVQLQESGGGLVQAGGSLRLSCAASGTISVTEVMGWYRQAPGKEREFVAAIDPGGNTNYADSVKGRFTISRDNAKNTVYLQMNSLKPEDTAVYYCAAGSYVQDYFWYWGQGTQVTVSS

SEQ ID NO: 29467 - protein, 117 aa, Artificial Sequence
  Chemically Synthesized
QVQLQESGGGLVQAGGSLRLSCAASGYIFSVDAMGWYRQAPGKERELVASIDGGGSTYYADSVKGRFTISRDNAKNTVYLQMNSLKPEDTAVYYCAVTSWRDPSIYWGQGTQVTVSS

SEQ ID NO: 29468 - protein, 122 aa, Artificial Sequence
  Chemically Synthesized
QVQLQESGGGLVQAGGSLRLSCAASGTISDAGWMGWYRQAPGKEREFVATINYGSSTNYADSVKGRFTISRDNAKNTVYLQMNSLKPEDTAVYYCAVDAYQYIWDDLGFVYWGQGTQVTVSS

SEQ ID NO: 29469 - protein, 117 aa, Artificial Sequence
  Chemically Synthesized
QVQLQESGGGLVQAGGSLRLSCAASGTIFSLLMGWYRQAPGKERELVAAISPGGSTYYADSVKGRFTISRDNAKNTVYLQMNSLKPEDTAVYYCAVHYGELRHYKYWGQGTQVTVSS

SEQ ID NO: 29470 - protein, 118 aa, Artificial Sequence
  Chemically Synthesized
QVQLQESGGGLVQAGGSLRLSCAASGTISSYVAMGWYRQAPGKERELVAGINVGGTTNYADSVKGRFTISRDNAKNTVYLQMNSLKPEDTAVYYCAAYDGGLVEHGYWGQGTQVTVSS

SEQ ID NO: 29471 - protein, 121 aa, Artificial Sequence
  Chemically Synthesized
QVQLQESGGGLVQAGGSLRLSCAASGTISALVIMGWYRQAPGKEREFVAGISNGAITNYADSVKGRFTISRDNAKNTVYLQMNSLKPEDTAVYYCAAIVIAVYVGTSLIYWGQGTQVTVSS

SEQ ID NO: 29472 - protein, 118 aa, Artificial Sequence
  Chemically Synthesized
QVQLQESGGGLVQAGGSLRLSCAASGNISTGGYMGWYRQAPGKEREFVAGISYGTITNYADSVKGRFTISRDNAKNTVYLQMNSLKPEDTAVYYCAAVYPADPKLAYWGQGTQVTVSS

SEQ ID NO: 29473 - protein, 118 aa, Artificial Sequence
  Chemically Synthesized
QVQLQESGGGLVQAGGSLRLSCAASGTISRFLHMGWYRQAPGKEREFVAAITDGASTYYADSVKGRFTISRDNAKNTVYLQMNSLKPEDTAVYYCAVWDDETNLLDYWGQGTQVTVSS

SEQ ID NO: 29474 - protein, 118 aa, Artificial Sequence
  Chemically Synthesized
QVQLQESGGGLVQAGGSLRLSCAASGTIFNVLRMGWYRQAPGKERELVATISVGANTYYADSVKGRFTISRDNAKNTVYLQMNSLKPEDTAVYYCAATYQYYGGHDYWGQGTQVTVSS

SEQ ID NO: 29475 - protein, 117 aa, Artificial Sequence
  Chemically Synthesized
QVQLQESGGGLVQAGGSLRLSCAASGTISFLLIMGWYRQAPGKEREFVASINYGSITNYADSVKGRFTISRDNAKNTVYLQMNSLKPEDTAVYYCAVYDTDAVHVYWGQGTQVTVSS

SEQ ID NO: 29476 - protein, 118 aa, Artificial Sequence
  Chemically Synthesized
QVQLQESGGGLVQAGGSLRLSCAASGTIFSRPGMGWYRQAPGKEREFVAAINRGGTTNYADSVKGRFTISRDNAKNTVYLQMNSLKPEDTAVYYCAVRYWYRAWYDYWGQGTQVTVSS

SEQ ID NO: 29477 - protein, 117 aa, Artificial Sequence
  Chemically Synthesized
QVQLQESGGGLVQAGGSLRLSCAASGTISLLTYMGWYRQAPGKEREFVASISSGASTYYADSVKGRFTISRDNAKNTVYLQMNSLKPEDTAVYYCAVDSTTNSLLYWGQGTQVTVSS

SEQ ID NO: 29478 - protein, 115 aa, Artificial Sequence
  Chemically Synthesized
QVQLQESGGGLVQAGGSLRLSCAASGNIFWEASMGWYRQAPGKERELVASIGNGATTNYADSVKGRFTISRDNAKNTVYLQMNSLKPEDTAVYYCAAGPLGHYYWGQGTQVTVSS

SEQ ID NO: 29479 - protein, 120 aa, Artificial Sequence
  Chemically Synthesized
QVQLQESGGGLVQAGGSLRLSCAASGTIFGLVMGWYRQAPGKEREFVAAITRGTTNYADSVKGRFTISRDNAKNTVYLQMNSLKPEDTAVYYCAVRGYYSDGDYGTLLYWGQGTQVTVSS

SEQ ID NO: 29480 - protein, 116 aa, Artificial Sequence
  Chemically Synthesized
QVQLQESGGGLVQAGGSLRLSCAASGNIFDVIRMGWYRQAPGKERELVATITGGSSTNYADSVKGRFTISRDNAKNTVYLQMNSLKPEDTAVYYCAAYIFTGHEYWGQGTQVTVSS

SEQ ID NO: 29481 - protein, 122 aa, Artificial Sequence
  Chemically Synthesized
QVQLQESGGGLVQAGGSLRLSCAASGSISAGYGMGWYRQAPGKEREFVAGIAYGTNTYYADSVKGRFTISRDNAKNTVYLQMNSLKPEDTAVYYCAADGQIDANVGFQHSYWGQGTQVTVSS

SEQ ID NO: 29482 - protein, 126 aa, Artificial Sequence
  Chemically Synthesized
QVQLQESGGGLVQAGGSLRLSCAASGYISQVVSMGWYRQAPGKERELVAGIDQGTSTNYADSVKGRFTISRDNAKNTVYLQMNSLKPEDTAVYYCAVTGHSYRVDGYGRETSLTYWGQGTQVTVSS

SEQ ID NO: 29483 - protein, 122 aa, Artificial Sequence
  Chemically Synthesized
QVQLQESGGGLVQAGGSLRLSCAASGYISAYDYMGWYRQAPGKEREFVATITDGATTYYADSVKGRFTISRDNAKNTVYLQMNSLKPEDTAVYYCAVEYQVHPHYSVDLHYWGQGTQVTVSS

SEQ ID NO: 29484 - protein, 122 aa, Artificial Sequence
  Chemically Synthesized
QVQLQESGGGLVQAGGSLRLSCAASGNIFGYYWMGWYRQAPGKERELVAAIGGGGTTNYADSVKGRFTISRDNAKNTVYLQMNSLKPEDTAVYYCAVTYRNDYGGSRVFLYWGQGTQVTVSS

SEQ ID NO: 29485 - protein, 108 aa, Artificial Sequence
  Chemically Synthesized
QVQLQESGGGLVQAGGSLRLSCAASGTISTYTDMGWYRQAPGKERELVASIGSVVVPYADSVKGRFTISRDNAKNTVYLQMNSLKPEDTAVYYCAVYWGQGTQVTVSS

SEQ ID NO: 29486 - protein, 115 aa, Artificial Sequence
  Chemically Synthesized
QVQLQESGGGLVQAGGSLRLSCAASGNISLLFIMGWYRQAPGKEREFVASITWGGNTNYADSVKGRFTISRDNAKNTVYLQMNSLKPEDTAVYYCAVVKWYHSYWGQGTQVTVSS

SEQ ID NO: 29487 - protein, 114 aa, Artificial Sequence
  Chemically Synthesized
QVQLQESGGGLVQAGGSLRLSCAASGYISDPDGMGWYRQAPGKEREFVAAIGVGSTTYYADSVKGRFTISRDNAKNTVYLQMNSLKPEDTAVYYCAADARHVYWGQGTQVTVSS

SEQ ID NO: 29488 - protein, 111 aa, Artificial Sequence
  Chemically Synthesized
QVQLQESGGGLVQAGGSLRLSCAASGNIFEGSTMGWYRQAPGKEREFVAAIGDGGSTYYADSVKGRFTISRDNAKNTVYLQMNSLKPEDTAVYYCAATIYWGQGTQVTVSS

SEQ ID NO: 29489 - protein, 117 aa, Artificial Sequence
  Chemically Synthesized
QVQLQESGGGLVQAGGSLRLSCAASGNISYPRYMGWYRQAPGKERELVATIGRGASTYYADSVKGRFTISRDNAKNTVYLQMNSLKPEDTAVYYCAVYYLEYTHLYWGQGTQVTVSS

SEQ ID NO: 29490 - protein, 118 aa, Artificial Sequence
  Chemically Synthesized
QVQLQESGGGLVQAGGSLRLSCAASGYISGLTYMGWYRQAPGKERELVASINSGTSTYYADSVKGRFTISRDNAKNTVYLQMNSLKPEDTAVYYCAADDYRVRRHDYWGQGTQVTVSS

SEQ ID NO: 29491 - protein, 118 aa, Artificial Sequence
  Chemically Synthesized
QVQLQESGGGLVQAGGSLRLSCAASGSISLYLIMGWYRQAPGKEREFVASITVGGTTNYADSVKGRFTISRDNAKNTVYLQMNSLKPEDTAVYYCAVYSQHIASHDYWGQGTQVTVSS

SEQ ID NO: 29492 - protein, 117 aa, Artificial Sequence
  Chemically Synthesized
QVQLQESGGGLVQAGGSLRLSCAASGTISSRTMGWYRQAPGKERELVATINWGGITYYADSVKGRFTISRDNAKNTVYLQMNSLKPEDTAVYYCAAVWRRYRYHDYWGQGTQVTVSS

SEQ ID NO: 29493 - protein, 126 aa, Artificial Sequence
  Chemically Synthesized
QVQLQESGGGLVQAGGSLRLSCAASGTISYRSKMGWYRQAPGKERELVAAINIGANTYYADSVKGRFTISRDNAKNTVYLQMNSLKPEDTAVYYCAANYPVQADRLYYGLYDYWYWGQGTQVTVSS

SEQ ID NO: 29494 - protein, 115 aa, Artificial Sequence
  Chemically Synthesized
QVQLQESGGGLVQAGGSLRLSCAASGNIFGPYTMGWYRQAPGKERELVATMYYYQYADSVKGRFTISRDNAKNTVYLQMNSLKPEDTAVYYCAATAYDSYYYTYWGQGTQVTVSS

SEQ ID NO: 29495 - protein, 117 aa, Artificial Sequence
  Chemically Synthesized
QVQLQESGGGLVQAGGSLRLSCAASGNISYRYGMGWYRQAPGKEREFVAGIVLVVLPYADSVKGRFTISRDNAKNTVYLQMNSLKPEDTAVYYCAVAHGQSYTLVYWGQGTQVTVSS

SEQ ID NO: 29496 - protein, 122 aa, Artificial Sequence
  Chemically Synthesized
QVQLQESGGGLVQAGGSLRLSCAASGNISGPAVMGWYRQAPGKERELVAGISVGTNTNYADSVKGRFTISRDNAKNTVYLQMNSLKPEDTAVYYCAATRVPDKWRKRSFIYWGQGTQVTVSS

SEQ ID NO: 29497 - protein, 122 aa, Artificial Sequence
  Chemically Synthesized
QVQLQESGGGLVQAGGSLRLSCAASGSISDDYVMGWYRQAPGKERELVATIGTGANTYYADSVKGRFTISRDNAKNTVYLQMNSLKPEDTAVYYCAVRVYRYQASRTELIYWGQGTQVTVSS

SEQ ID NO: 29498 - protein, 118 aa, Artificial Sequence
  Chemically Synthesized
QVQLQESGGGLVQAGGSLRLSCAASGSISRERAMGWYRQAPGKERELVATIDYGGNTYYADSVKGRFTISRDNAKNTVYLQMNSLKPEDTAVYYCAVGWWGYGGHIYWGQGTQVTVSS

SEQ ID NO: 29499 - protein, 121 aa, Artificial Sequence
  Chemically Synthesized
QVQLQESGGGLVQAGGSLRLSCAASGTISSVEAMGWYRQAPGKEREFVATIDSGAITNYADSVKGRFTISRDNAKNTVYLQMNSLKPEDTAVYYCAVKYDLHFIYYWYEYWGQGTQVTVSS

SEQ ID NO: 29500 - protein, 117 aa, Artificial Sequence
  Chemically Synthesized
QVQLQESGGGLVQAGGSLRLSCAASGNISLKSMGWYRQAPGKEREFVATINKGSNTYYADSVKGRFTISRDNAKNTVYLQMNSLKPEDTAVYYCAASNSARDPFQYWGQGTQVTVSS

SEQ ID NO: 29501 - protein, 110 aa, Artificial Sequence
  Chemically Synthesized
QVQLQESGGGLVQAGGSLRLSCAASGYISALTQMGWYRQAPGKEREFVASIGWGGTTYYADSVKGRFTISRDNAKNTVYLQMNSLKPEDTAVYYCAAMYWGQGTQVTVSS

SEQ ID NO: 29502 - protein, 117 aa, Artificial Sequence
  Chemically Synthesized
QVQLQESGGGLVQAGGSLRLSCAASGYISYPYGMGWYRQAPGKERELVATINAGASTNYADSVKGRFTISRDNAKNTVYLQMNSLKPEDTAVYYCAANYTKVPSLYWGQGTQVTVSS

SEQ ID NO: 29503 - protein, 125 aa, Artificial Sequence
  Chemically Synthesized
QVQLQESGGGLVQAGGSLRLSCAASGTISVSFDMGWYRQAPGKERELVAAITPGGTTNYADSVKGRFTISRDNAKNTVYLQMNSLKPEDTAVYYCAAGYDLSLLTLTRTTVTIYWGQGTQVTVSS

SEQ ID NO: 29504 - protein, 122 aa, Artificial Sequence
  Chemically Synthesized
QVQLQESGGGLVQAGGSLRLSCAASGTISRQPDMGWYRQAPGKERELVASISTGGNYLYADSVKGRFTISRDNAKNTVYLQMNSLKPEDTAVYYCAVDGEDNQNDYEPFRYWGQGTQVTVSS

SEQ ID NO: 29505 - protein, 112 aa, Artificial Sequence
  Chemically Synthesized
QVQLQESGGGLVQAGGSLRLSCAASGNMGWYRQAPGKEREFVATIGPGASTYYADSVKGRFTISRDNAKNTVYLQMNSLKPEDTAVYYCAVGYDALVAHEYWGQGTQVTVSS

SEQ ID NO: 29506 - protein, 122 aa, Artificial Sequence
  Chemically Synthesized
QVQLQESGGGLVQAGGSLRLSCAASGSISADATMGWYRQAPGKERELVATIGRGGNTYYADSVKGRFTISRDNAKNTVYLQMNSLKPEDTAVYYCAVVGHRAGTYYRHHRYWGQGTQVTVSS

SEQ ID NO: 29507 - protein, 118 aa, Artificial Sequence
  Chemically Synthesized
QVQLQESGGGLVQAGGSLRLSCAASGNISELGPMGWYRQAPGKERELVASIAYGSITYYADSVKGRFTISRDNAKNTVYLQMNSLKPEDTAVYYCAVTNWDHRGLYYWGQGTQVTVSS

SEQ ID NO: 29508 - protein, 118 aa, Artificial Sequence
  Chemically Synthesized
QVQLQESGGGLVQAGGSLRLSCAASGSISWPPDMGWYRQAPGKERELVATITSGTITYYADSVKGRFTISRDNAKNTVYLQMNSLKPEDTAVYYCAVEGPAERPFVYWGQGTQVTVSS

SEQ ID NO: 29509 - protein, 118 aa, Artificial Sequence
  Chemically Synthesized
QVQLQESGGGLVQAGGSLRLSCAASGNIFPQDDMGWYRQAPGKEREFVASIDKGGNTNYADSVKGRFTISRDNAKNTVYLQMNSLKPEDTAVYYCAAAIAIYYGLTYWGQGTQVTVSS

SEQ ID NO: 29510 - protein, 118 aa, Artificial Sequence
  Chemically Synthesized
QVQLQESGGGLVQAGGSLRLSCAASGTISSNYAMGWYRQAPGKERELVATINRGTTTYYADSVKGRFTISRDNAKNTVYLQMNSLKPEDTAVYYCAVVGGRYRFHSYWGQGTQVTVSS

SEQ ID NO: 29511 - protein, 118 aa, Artificial Sequence
  Chemically Synthesized
QVQLQESGGGLVQAGGSLRLSCAASGYIFSLDYMGWYRQAPGKEREFVAAISGGGSTYYADSVKGRFTISRDNAKNTVYLQMNSLKPEDTAVYYCAVGGGYDYGHGYWGQGTQVTVSS

SEQ ID NO: 29512 - protein, 118 aa, Artificial Sequence
  Chemically Synthesized
QVQLQESGGGLVQAGGSLRLSCAASGNISYWQRMGWYRQAPGKEREFVATIANGASTNYADSVKGRFTISRDNAKNTVYLQMNSLKPEDTAVYYCAVGRSDYDTLYYWGQGTQVTVSS

SEQ ID NO: 29513 - protein, 122 aa, Artificial Sequence
  Chemically Synthesized
QVQLQESGGGLVQAGGSLRLSCAASGTISWTGKMGWYRQAPGKEREFVATISYGTSTYYADSVKGRFTISRDNAKNTVYLQMNSLKPEDTAVYYCAAYDTGFNLVYDPLDYWGQGTQVTVSS

SEQ ID NO: 29514 - protein, 125 aa, Artificial Sequence
  Chemically Synthesized
QVQLQESGGGLVQAGGSLRLSCAASGTISYGDMGWYRQAPGKEREFVAAITYGASTNYADSVKGRFTISRDNAKNTVYLQMNSLKPEDTAVYYCAVYYLLYLIIVTYEGYILGYWGQGTQVTVSS

SEQ ID NO: 29515 - protein, 120 aa, Artificial Sequence
  Chemically Synthesized
QVQLQESGGGLVQAGGSLRLSCAASGNISAVMGWYRQAPGKEREFVASIGGGGSTNYADSVKGRFTISRDNAKNTVYLQMNSLKPEDTAVYYCAADFSTDILYHPNYPYWGQGTQVTVSS

SEQ ID NO: 29516 - protein, 118 aa, Artificial Sequence
  Chemically Synthesized
QVQLQESGGGLVQAGGSLRLSCAASGTIFPYYVMGWYRQAPGKERELVAAISQGASTYYADSVKGRFTISRDNAKNTVYLQMNSLKPEDTAVYYCAAATSWDRYHVYWGQGTQVTVSS

SEQ ID NO: 29517 - protein, 122 aa, Artificial Sequence
  Chemically Synthesized
QVQLQESGGGLVQAGGSLRLSCAASGYISTQVDMGWYRQAPGKERELVATITDGATTYYADSVKGRFTISRDNAKNTVYLQMNSLKPEDTAVYYCAAQAYGSSRGATDHVYWGQGTQVTVSS

SEQ ID NO: 29518 - protein, 121 aa, Artificial Sequence
  Chemically Synthesized
QVQLQESGGGLVQAGGSLRLSCAASGYISVSVYMGWYRQAPGKERELVASISSVLIPYADSVKGRFTISRDNAKNTVYLQMNSLKPEDTAVYYCAVGDWLYHNRYDTLGYWGQGTQVTVSS

SEQ ID NO: 29519 - protein, 116 aa, Artificial Sequence
  Chemically Synthesized
QVQLQESGGGLVQAGGSLRLSCAASGSISFSGAMGWYRQAPGKERELVAGIAYGGSTYYADSVKGRFTISRDNAKNTVYLQMNSLKPEDTAVYYCAAIFHRWLSYWGQGTQVTVSS

SEQ ID NO: 29520 - protein, 118 aa, Artificial Sequence
  Chemically Synthesized
QVQLQESGGGLVQAGGSLRLSCAASGNIFDQQYMGWYRQAPGKERELVAAISRGAITYYADSVKGRFTISRDNAKNTVYLQMNSLKPEDTAVYYCAVNYYPYGSHRYWGQGTQVTVSS

SEQ ID NO: 29521 - protein, 117 aa, Artificial Sequence
  Chemically Synthesized
QVQLQESGGGLVQAGGSLRLSCAASGSISGQLGMGWYRQAPGKEREFVATIDDGANTNYADSVKGRFTISRDNAKNTVYLQMNSLKPEDTAVYYCAVYTAPRAYCYWGQGTQVTVSS

SEQ ID NO: 29522 - protein, 121 aa, Artificial Sequence
  Chemically Synthesized
QVQLQESGGGLVQAGGSLRLSCAASGSIFYRSVMGWYRQAPGKERELVAGIAVGGNTNYADSVKGRFTISRDNAKNTVYLQMNSLKPEDTAVYYCAAYYPYYATTLILMYWGQGTQVTVSS

SEQ ID NO: 29523 - protein, 118 aa, Artificial Sequence
  Chemically Synthesized
QVQLQESGGGLVQAGGSLRLSCAASGNISARSQMGWYRQAPGKERELVAGIDHGATTYYADSVKGRFTISRDNAKNTVYLQMNSLKPEDTAVYYCAVGQRYDEYHYYWGQGTQVTVSS

SEQ ID NO: 29524 - protein, 117 aa, Artificial Sequence
  Chemically Synthesized
QVQLQESGGGLVQAGGSLRLSCAASGNIFPYYSMGWYRQAPGKERELVATIGWGAITNYADSVKGRFTISRDNAKNTVYLQMNSLKPEDTAVYYCAAQSTVCTLIYWGQGTQVTVSS

SEQ ID NO: 29525 - protein, 118 aa, Artificial Sequence
  Chemically Synthesized
QVQLQESGGGLVQAGGSLRLSCAASGNISTDDYMGWYRQAPGKERELVAAIAVGSITYYADSVKGRFTISRDNAKNTVYLQMNSLKPEDTAVYYCAVEPYLVHHHRYWGQGTQVTVSS

SEQ ID NO: 29526 - protein, 118 aa, Artificial Sequence
  Chemically Synthesized
QVQLQESGGGLVQAGGSLRLSCAASGYIFLLVYMGWYRQAPGKERELVASITYGGSTNYADSVKGRFTISRDNAKNTVYLQMNSLKPEDTAVYYCAARDELPGSYQYWGQGTQVTVSS

SEQ ID NO: 29527 - protein, 116 aa, Artificial Sequence
  Chemically Synthesized
QVQLQESGGGLVQAGGSLRLSCAASGTIFYTYTMGWYRQAPGKEREFVATISTGSNTNYADSVKGRFTISRDNAKNTVYLQMNSLKPEDTAVYYCAVPYTYYLEYWGQGTQVTVSS

SEQ ID NO: 29528 - protein, 117 aa, Artificial Sequence
  Chemically Synthesized
QVQLQESGGGLVQAGGSLRLSCAASGNISKYRVMGWYRQAPGKEREFVAGINSVLIPYADSVKGRFTISRDNAKNTVYLQMNSLKPEDTAVYYCAVYTVVATDLGYWGQGTQVTVSS

SEQ ID NO: 29529 - protein, 126 aa, Artificial Sequence
  Chemically Synthesized
QVQLQESGGGLVQAGGSLRLSCAASGSIFDIRWMGWYRQAPGKEREFVASIANGTSTNYADSVKGRFTISRDNAKNTVYLQMNSLKPEDTAVYYCAASNLYHDDQLDWYGLYYGYWGQGTQVTVSS

SEQ ID NO: 29530 - protein, 122 aa, Artificial Sequence
  Chemically Synthesized
QVQLQESGGGLVQAGGSLRLSCAASGNISSRSGMGWYRQAPGKERELVAAISFGATTYYADSVKGRFTISRDNAKNTVYLQMNSLKPEDTAVYYCAVQYVTSSAVPAGLWYWGQGTQVTVSS

SEQ ID NO: 29531 - protein, 117 aa, Artificial Sequence
  Chemically Synthesized
QVQLQESGGGLVQAGGSLRLSCAASGSISSIRAMGWYRQAPGKEREFVAAISDGTTTYYADSVKGRFTISRDNAKNTVYLQMNSLKPEDTAVYYCAVLGYDGYHYYWGQGTQVTVSS

SEQ ID NO: 29532 - protein, 118 aa, Artificial Sequence
  Chemically Synthesized
QVQLQESGGGLVQAGGSLRLSCAASGTIFTFVDMGWYRQAPGKEREFVASIDQGTSTYYADSVKGRFTISRDNAKNTVYLQMNSLKPEDTAVYYCAAYVWYTQDLYYWGQGTQVTVSS

SEQ ID NO: 29533 - protein, 117 aa, Artificial Sequence
  Chemically Synthesized
QVQLQESGGGLVQAGGSLRLSCAASGYIFATTSMGWYRQAPGKERELVASIADGVLPYADSVKGRFTISRDNAKNTVYLQMNSLKPEDTAVYYCAAYRPAYTDLWYWGQGTQVTVSS

SEQ ID NO: 29534 - protein, 114 aa, Artificial Sequence
  Chemically Synthesized
QVQLQESGGGLVQAGGSLRLSCAASGSISSGDYMGWYRQAPGKERERYYQYADSVKGRFTISRDNAKNTVYLQMNSLKPEDTAVYYCAALDIHSQGYYDAFTYWGQGTQVTVSS

SEQ ID NO: 29535 - protein, 118 aa, Artificial Sequence
  Chemically Synthesized
QVQLQESGGGLVQAGGSLRLSCAASGTIFTAWNMGWYRQAPGKERELVAAIAVGSITYYADSVKGRFTISRDNAKNTVYLQMNSLKPEDTAVYYCAVYLSDALVSWYWGQGTQVTVSS

SEQ ID NO: 29536 - protein, 118 aa, Artificial Sequence
  Chemically Synthesized
QVQLQESGGGLVQAGGSLRLSCAASGTISASPDMGWYRQAPGKERELVATIGGGSNTNYADSVKGRFTISRDNAKNTVYLQMNSLKPEDTAVYYCAVDLHSQYLLGYWGQGTQVTVSS

SEQ ID NO: 29537 - protein, 122 aa, Artificial Sequence
  Chemically Synthesized
QVQLQESGGGLVQAGGSLRLSCAASGTISAATQMGWYRQAPGKERELVAGIGAGGNTYYADSVKGRFTISRDNAKNTVYLQMNSLKPEDTAVYYCAADDVGASADYNSLYYWGQGTQVTVSS

SEQ ID NO: 29538 - protein, 117 aa, Artificial Sequence
  Chemically Synthesized
QVQLQESGGGLVQAGGSLRLSCAASGTISTVRGMGWYRQAPGKEREFVASISYGGNTYYADSVKGRFTISRDNAKNTVYLQMNSLKPEDTAVYYCAANANRYVTFYWGQGTQVTVSS

SEQ ID NO: 29539 - protein, 112 aa, Artificial Sequence
  Chemically Synthesized
QVQLQESGGGLVQAGGSLRLSCAASGTMGWYRQAPGKERELVAAITTGGSTNYADSVKGRFTISRDNAKNTVYLQMNSLKPEDTAVYYCAVDYPNPGTLGYWGQGTQVTVSS

SEQ ID NO: 29540 - protein, 121 aa, Artificial Sequence
  Chemically Synthesized
QVQLQESGGGLVQAGGSLRLSCAASGYIFDYYGMGWYRQAPGKERELVATISYGSNTYYADSVKGRFTISRDNAKNTVYLQMNSLKPEDTAVYYCAADPSVTLSTVTTIYWGQGTQVTVSS

SEQ ID NO: 29541 - protein, 118 aa, Artificial Sequence
  Chemically Synthesized
QVQLQESGGGLVQAGGSLRLSCAASGTISGDDVMGWYRQAPGKEREFVASIDYGTITYYADSVKGRFTISRDNAKNTVYLQMNSLKPEDTAVYYCAVGTARDTDHVYWGQGTQVTVSS

SEQ ID NO: 29542 - protein, 122 aa, Artificial Sequence
  Chemically Synthesized
QVQLQESGGGLVQAGGSLRLSCAASGNISGDNVMGWYRQAPGKERELVAAINEGSNTNYADSVKGRFTISRDNAKNTVYLQMNSLKPEDTAVYYCAADQILDFLYLRRHSYWGQGTQVTVSS

SEQ ID NO: 29543 - protein, 118 aa, Artificial Sequence
  Chemically Synthesized
QVQLQESGGGLVQAGGSLRLSCAASGSISIVNYMGWYRQAPGKERELVAAIDSGANTNYADSVKGRFTISRDNAKNTVYLQMNSLKPEDTAVYYCAAEEVISSELPYWGQGTQVTVSS

SEQ ID NO: 29544 - protein, 122 aa, Artificial Sequence
  Chemically Synthesized
QVQLQESGGGLVQAGGSLRLSCAASGTIFAADLMGWYRQAPGKERELVATIDTGGITNYADSVKGRFTISRDNAKNTVYLQMNSLKPEDTAVYYCAVTLRTVQALLGYHVYWGQGTQVTVSS

SEQ ID NO: 29545 - protein, 125 aa, Artificial Sequence
  Chemically Synthesized
QVQLQESGGGLVQAGGSLRLSCAASGTISLDRMGWYRQAPGKERELVATIAYGSSTNYADSVKGRFTISRDNAKNTVYLQMNSLKPEDTAVYYCAVSLGYINKGYRDGFGDHGYWGQGTQVTVSS

SEQ ID NO: 29546 - protein, 118 aa, Artificial Sequence
  Chemically Synthesized
QVQLQESGGGLVQAGGSLRLSCAASGNISQLDAMGWYRQAPGKEREFVAGITDGGITYYADSVKGRFTISRDNAKNTVYLQMNSLKPEDTAVYYCAVGYFQGHWHYYWGQGTQVTVSS

SEQ ID NO: 29547 - protein, 112 aa, Artificial Sequence
  Chemically Synthesized
QVQLQESGGGLVQAGGSLRLSCAASGSISTLLMGWYRQAPGKEREFVAAIGYGTSTYYADSVKGRFTISRDNAKNTVYLQMNSLKPEDTAVYYCAVLGHDYWGQGTQVTVSS

SEQ ID NO: 29548 - protein, 126 aa, Artificial Sequence
  Chemically Synthesized
QVQLQESGGGLVQAGGSLRLSCAASGTISWIYYMGWYRQAPGKEREFVASIDQGTSTNYADSVKGRFTISRDNAKNTVYLQMNSLKPEDTAVYYCAASLWEPSAWDIYGYYGHDYWGQGTQVTVSS

SEQ ID NO: 29549 - protein, 121 aa, Artificial Sequence
  Chemically Synthesized
QVQLQESGGGLVQAGGSLRLSCAASGYIMGWYRQAPGKERELVATINNGGNTNYADSVKGRFTISRDNAKNTVYLQMNSLKPEDTAVYYCAVYGGYYRDDYQVTEYDHYYWGQGTQVTVSS

SEQ ID NO: 29550 - protein, 118 aa, Artificial Sequence
  Chemically Synthesized
QVQLQESGGGLVQAGGSLRLSCAASGSISRNTSMGWYRQAPGKEREFVAGITVGGSTNYADSVKGRFTISRDNAKNTVYLQMNSLKPEDTAVYYCAAVITAVRVHGYWGQGTQVTVSS

SEQ ID NO: 29551 - protein, 118 aa, Artificial Sequence
  Chemically Synthesized
QVQLQESGGGLVQAGGSLRLSCAASGNISPTGNMGWYRQAPGKEREFVAGINVGSSTNYADSVKGRFTISRDNAKNTVYLQMNSLKPEDTAVYYCAVVQRNTIVHYYWGQGTQVTVSS

SEQ ID NO: 29552 - protein, 118 aa, Artificial Sequence
  Chemically Synthesized
QVQLQESGGGLVQAGGSLRLSCAASGSISPHTKMGWYRQAPGKERELVAGIAYGSNTNYADSVKGRFTISRDNAKNTVYLQMNSLKPEDTAVYYCAAYQIYDIYFIYWGQGTQVTVSS

SEQ ID NO: 29553 - protein, 121 aa, Artificial Sequence
  Chemically Synthesized
QVQLQESGGGLVQAGGSLRLSCAASGTIFEDFGMGWYRQAPGKEREFVAAIGYGTITNYADSVKGRFTISRDNAKNTVYLQMNSLKPEDTAVYYCAVTLYGAYYSVKTMYWGQGTQVTVSS

SEQ ID NO: 29554 - protein, 117 aa, Artificial Sequence
  Chemically Synthesized
QVQLQESGGGLVQAGGSLRLSCAASGSIFVRTMGWYRQAPGKEREFVAAIDYGAITNYADSVKGRFTISRDNAKNTVYLQMNSLKPEDTAVYYCAVPGDEELAHSYWGQGTQVTVSS

SEQ ID NO: 29555 - protein, 122 aa, Artificial Sequence
  Chemically Synthesized
QVQLQESGGGLVQAGGSLRLSCAASGNISAGDQMGWYRQAPGKERELVAAITDGSITNYADSVKGRFTISRDNAKNTVYLQMNSLKPEDTAVYYCAVIFHEDRSYSVRHDYWGQGTQVTVSS

SEQ ID NO: 29556 - protein, 118 aa, Artificial Sequence
  Chemically Synthesized
QVQLQESGGGLVQAGGSLRLSCAASGTIFIGQYMGWYRQAPGKERELVAGITTGTTTNYADSVKGRFTISRDNAKNTVYLQMNSLKPEDTAVYYCAVRYNYYYGHGYWGQGTQVTVSS

SEQ ID NO: 29557 - protein, 117 aa, Artificial Sequence
  Chemically Synthesized
QVQLQESGGGLVQAGGSLRLSCAASGSIFSLHMGWYRQAPGKEREFVASIGDGSNTNYADSVKGRFTISRDNAKNTVYLQMNSLKPEDTAVYYCAAYYIPDSTYGYWGQGTQVTVSS

SEQ ID NO: 29558 - protein, 126 aa, Artificial Sequence
  Chemically Synthesized
QVQLQESGGGLVQAGGSLRLSCAASGNIFQPGDMGWYRQAPGKEREFVAAISDGTTTYYADSVKGRFTISRDNAKNTVYLQMNSLKPEDTAVYYCAVGVPPLDNLTIHSQGEHRYWGQGTQVTVSS

SEQ ID NO: 29559 - protein, 116 aa, Artificial Sequence
  Chemically Synthesized
QVQLQESGGGLVQAGGSLRLSCAASGSISSASMGWYRQAPGKEREFVAGISYGTITYYADSVKGRFTISRDNAKNTVYLQMNSLKPEDTAVYYCAASVRYLQHYYWGQGTQVTVSS

SEQ ID NO: 29560 - protein, 118 aa, Artificial Sequence
  Chemically Synthesized
QVQLQESGGGLVQAGGSLRLSCAASGNIFQSSGMGWYRQAPGKERELVATITRGATTYYADSVKGRFTISRDNAKNTVYLQMNSLKPEDTAVYYCAADQPTGRKLEYWGQGTQVTVSS

SEQ ID NO: 29561 - protein, 121 aa, Artificial Sequence
  Chemically Synthesized
QVQLQESGGGLVQAGGSLRLSCAASGTIFLAGDMGWYRQAPGKERELVASIAYGATTNYADSVKGRFTISRDNAKNTVYLQMNSLKPEDTAVYYCAAGDVYRSGDESTFYWGQGTQVTVSS

SEQ ID NO: 29562 - protein, 109 aa, Artificial Sequence
  Chemically Synthesized
QVQLQESGGGLVQAGGSLRLSCAASGTIFLGDWMGWYRQAPGKEREFVAAIGPGGSTNYADSVKGRFTISRDNAKNTVYLQMNSLKPEDTAVYYCAVYWGQGTQVTVSS

SEQ ID NO: 29563 - protein, 118 aa, Artificial Sequence
  Chemically Synthesized
QVQLQESGGGLVQAGGSLRLSCAASGTISGYVYMGWYRQAPGKEREFVASIGRGSTTNYADSVKGRFTISRDNAKNTVYLQMNSLKPEDTAVYYCAAIEGEPWIHYYWGQGTQVTVSS

SEQ ID NO: 29564 - protein, 117 aa, Artificial Sequence
  Chemically Synthesized
QVQLQESGGGLVQAGGSLRLSCAASGSISQDYYMGWYRQAPGKEREFVAAIGQGSTTYYADSVKGRFTISRDNAKNTVYLQMNSLKPEDTAVYYCAVEQESVTTIYWGQGTQVTVSS

SEQ ID NO: 29565 - protein, 118 aa, Artificial Sequence
  Chemically Synthesized
QVQLQESGGGLVQAGGSLRLSCAASGNISVSSYMGWYRQAPGKEREFVASIGAGGTTNYADSVKGRFTISRDNAKNTVYLQMNSLKPEDTAVYYCAVVYYEARYYGYWGQGTQVTVSS

SEQ ID NO: 29566 - protein, 122 aa, Artificial Sequence
  Chemically Synthesized
QVQLQESGGGLVQAGGSLRLSCAASGTISTILAMGWYRQAPGKEREFVAGINTGTNTNYADSVKGRFTISRDNAKNTVYLQMNSLKPEDTAVYYCAAIYQRKHYAAHLYYYWGQGTQVTVSS

SEQ ID NO: 29567 - protein, 126 aa, Artificial Sequence
  Chemically Synthesized
QVQLQESGGGLVQAGGSLRLSCAASGNISTNYAMGWYRQAPGKEREFVASISQGGNTNYADSVKGRFTISRDNAKNTVYLQMNSLKPEDTAVYYCAALAYTTPAGSADGGHWFSYWGQGTQVTVSS

SEQ ID NO: 29568 - protein, 117 aa, Artificial Sequence
  Chemically Synthesized
QVQLQESGGGLVQAGGSLRLSCAASGNISYDNAMGWYRQAPGKERELVASIGLVVLPYADSVKGRFTISRDNAKNTVYLQMNSLKPEDTAVYYCAAVYRDLTQLRYWGQGTQVTVSS

SEQ ID NO: 29569 - protein, 122 aa, Artificial Sequence
  Chemically Synthesized
QVQLQESGGGLVQAGGSLRLSCAASGYISWTDAMGWYRQAPGKEREFVASIDNGANTNYADSVKGRFTISRDNAKNTVYLQMNSLKPEDTAVYYCAVDGHTWVDNVGYHGYWGQGTQVTVSS

SEQ ID NO: 29570 - protein, 117 aa, Artificial Sequence
  Chemically Synthesized
QVQLQESGGGLVQAGGSLRLSCAASGTISGWPMGWYRQAPGKEREFVAAITSGAITYYADSVKGRFTISRDNAKNTVYLQMNSLKPEDTAVYYCAVDDTYYGLHPYWGQGTQVTVSS

SEQ ID NO: 29571 - protein, 117 aa, Artificial Sequence
  Chemically Synthesized
QVQLQESGGGLVQAGGSLRLSCAASGTISALTVMGWYRQAPGKERELVAGITDGTITYYADSVKGRFTISRDNAKNTVYLQMNSLKPEDTAVYYCAVLSFGSTTLYWGQGTQVTVSS

SEQ ID NO: 29572 - protein, 114 aa, Artificial Sequence
  Chemically Synthesized
QVQLQESGGGLVQAGGSLRLSCAASGTISYGTQMGWYRQAPGKEREFVAAITYGSTTNYADSVKGRFTISRDNAKNTVYLQMNSLKPEDTAVYYCAADAPPTYWGQGTQVTVSS

SEQ ID NO: 29573 - protein, 122 aa, Artificial Sequence
  Chemically Synthesized
QVQLQESGGGLVQAGGSLRLSCAASGNISRPDYMGWYRQAPGKERELVATIGSGGNTYYADSVKGRFTISRDNAKNTVYLQMNSLKPEDTAVYYCAVYGVANSNYVRPLYYWGQGTQVTVSS

SEQ ID NO: 29574 - protein, 123 aa, Artificial Sequence
  Chemically Synthesized
QVQLQESGGGLVQAGGSLRLSCAASGTIFPYRGMGWYRQAPGKERELVAAINGGGITYYADSVKGRFTISRDNAKNTVYLQMNSLKPEDTAVYYCAVKNTMNSLCWTTNRMYWGQGTQVTVSS

SEQ ID NO: 29575 - protein, 122 aa, Artificial Sequence
  Chemically Synthesized
QVQLQESGGGLVQAGGSLRLSCAASGNISPYLRMGWYRQAPGKEREFVASISRGASTNYADSVKGRFTISRDNAKNTVYLQMNSLKPEDTAVYYCAVRSLAQDTGYAPHAYWGQGTQVTVSS

SEQ ID NO: 29576 - protein, 126 aa, Artificial Sequence
  Chemically Synthesized
QVQLQESGGGLVQAGGSLRLSCAASGTISLTTTMGWYRQAPGKEREFVASINEGSSTYYADSVKGRFTISRDNAKNTVYLQMNSLKPEDTAVYYCAVRWRPYLFKYRPYYVDHQYWGQGTQVTVSS

SEQ ID NO: 29577 - protein, 121 aa, Artificial Sequence
  Chemically Synthesized
QVQLQESGGGLVQAGGSLRLSCAASGTIFVKGDMGWYRQAPGKEREFVAGINVGGTTYYADSVKGRFTISRDNAKNTVYLQMNSLKPEDTAVYYCAADATTEDAWLHHWYWGQGTQVTVSS

SEQ ID NO: 29578 - protein, 121 aa, Artificial Sequence
  Chemically Synthesized
QVQLQESGGGLVQAGGSLRLSCAASGYISFVDGMGWYRQAPGKERELVAAIGNGTNTYYADSVKGRFTISRDNAKNTVYLQMNSLKPEDTAVYYCAVGGTSCRLSRRVFYWGQGTQVTVSS

SEQ ID NO: 29579 - protein, 117 aa, Artificial Sequence
  Chemically Synthesized
QVQLQESGGGLVQAGGSLRLSCAASGNISRPDGMGWYRQAPGKEREFVATIGYGASTNYADSVKGRFTISRDNAKNTVYLQMNSLKPEDTAVYYCALVVRTRTTMYWGQGTQVTVSS

SEQ ID NO: 29580 - protein, 126 aa, Artificial Sequence
  Chemically Synthesized
QVQLQESGGGLVQAGGSLRLSCAASGTIFTYVAMGWYRQAPGKEREFVASISPGSSTNYADSVKGRFTISRDNAKNTVYLQMNSLKPEDTAVYYCAVGYDLVYREGDQVPWDLIYWGQGTQVTVSS

SEQ ID NO: 29581 - protein, 118 aa, Artificial Sequence
  Chemically Synthesized
QVQLQESGGGLVQAGGSLRLSCAASGSISDPSDMGWYRQAPGKEREFVAAINRGSSTYYADSVKGRFTISRDNAKNTVYLQMNSLKPEDTAVYYCAVYTDAEPYLSYWGQGTQVTVSS

SEQ ID NO: 29582 - protein, 118 aa, Artificial Sequence
  Chemically Synthesized
QVQLQESGGGLVQAGGSLRLSCAASGTIFSAGAMGWYRQAPGKERELVAGINTGASTNYADSVKGRFTISRDNAKNTVYLQMNSLKPEDTAVYYCAVYYSLNQSFVYWGQGTQVTVSS

SEQ ID NO: 29583 - protein, 117 aa, Artificial Sequence
  Chemically Synthesized
QVQLQESGGGLVQAGGSLRLSCAASGYIFTTYDMGWYRQAPGKERELVASISQGASTNYADSVKGRFTISRDNAKNTVYLQMNSLKPEDTAVYYCAVVTTKLRTLYWGQGTQVTVSS

SEQ ID NO: 29584 - protein, 125 aa, Artificial Sequence
  Chemically Synthesized
QVQLQESGGGLVQAGGSLRLSCAASGNISLERAMGWYRQAPGKERELVATINYGSIPYADSVKGRFTISRDNAKNTVYLQMNSLKPEDTAVYYCAVPGYYWLDQIQLVSAPYRYWGQGTQVTVSS

SEQ ID NO: 29585 - protein, 122 aa, Artificial Sequence
  Chemically Synthesized
QVQLQESGGGLVQAGGSLRLSCAASGTIFVWWAMGWYRQAPGKERELVATISGGGNTYYADSVKGRFTISRDNAKNTVYLQMNSLKPEDTAVYYCAVGTDDVIGIDNDLDYWGQGTQVTVSS

SEQ ID NO: 29586 - protein, 113 aa, Artificial Sequence
  Chemically Synthesized
QVQLQESGGGLVQAGGSLRLSCAASGIFLLTTMGWYRQAPGKERELVASIADVVIPYADSVKGRFTISRDNAKNTVYLQMNSLKPEDTAVYYCAAVRSVCCYWGQGTQVTVSS

SEQ ID NO: 29587 - protein, 115 aa, Artificial Sequence
  Chemically Synthesized
QVQLQESGGGLVQAGGSLRLSCAASGSISGGVSMGWYRQAPGKERELVAAISRGTITYYADSVKGRFTISRDNAKNTVYLQMNSLKPEDTAVYYCAVHGYPRAYWGQGTQVTVSS

SEQ ID NO: 29588 - protein, 125 aa, Artificial Sequence
  Chemically Synthesized
QVQLQESGGGLVQAGGSLRLSCAASGTISTIAMGWYRQAPGKERELVAGITIGTITYYADSVKGRFTISRDNAKNTVYLQMNSLKPEDTAVYYCAADDYDVRQNYAVDGYWHDYWGQGTQVTVSS

SEQ ID NO: 29589 - protein, 118 aa, Artificial Sequence
  Chemically Synthesized
QVQLQESGGGLVQAGGSLRLSCAASGNISAINGMGWYRQAPGKERELVAAITPGAITYYADSVKGRFTISRDNAKNTVYLQMNSLKPEDTAVYYCAADNSYQLQLDYWGQGTQVTVSS

SEQ ID NO: 29590 - protein, 126 aa, Artificial Sequence
  Chemically Synthesized
QVQLQESGGGLVQAGGSLRLSCAASGSISTGRAMGWYRQAPGKERELVAAISDGGTTYYADSVKGRFTISRDNAKNTVYLQMNSLKPEDTAVYYCAVVITLTNSHDRDFRYEHYYWGQGTQVTVSS

SEQ ID NO: 29591 - protein, 118 aa, Artificial Sequence
  Chemically Synthesized
QVQLQESGGGLVQAGGSLRLSCAASGTIFLDSEMGWYRQAPGKEREFVAGIAYGGNTYYADSVKGRFTISRDNAKNTVYLQMNSLKPEDTAVYYCAVQYPDQSEHHYWGQGTQVTVSS

SEQ ID NO: 29592 - protein, 118 aa, Artificial Sequence
  Chemically Synthesized
QVQLQESGGGLVQAGGSLRLSCAASGNIFRQTRMGWYRQAPGKEREFVAAITAGGITNYADSVKGRFTISRDNAKNTVYLQMNSLKPEDTAVYYCAVPNSTFLYYPYWGQGTQVTVSS

SEQ ID NO: 29593 - protein, 122 aa, Artificial Sequence
  Chemically Synthesized
QVQLQESGGGLVQAGGSLRLSCAASGSISSYDDMGWYRQAPGKEREFVAAIGVGASTNYADSVKGRFTISRDNAKNTVYLQMNSLKPEDTAVYYCAAVYNDLWGQVTRHGYWGQGTQVTVSS

SEQ ID NO: 29594 - protein, 121 aa, Artificial Sequence
  Chemically Synthesized
QVQLQESGGGLVQAGGSLRLSCAASGNISGTSDMGWYRQAPGKEREFVAAIAYGGNTYYADSVKGRFTISRDNAKNTVYLQMNSLKPEDTAVYYCAAGDIGDDDWSLLLYWGQGTQVTVSS

SEQ ID NO: 29595 - protein, 126 aa, Artificial Sequence
  Chemically Synthesized
QVQLQESGGGLVQAGGSLRLSCAASGTIFRRVYMGWYRQAPGKERELVATISDGASTYYADSVKGRFTISRDNAKNTVYLQMNSLKPEDTAVYYCAVTTYHPYWWGRSGPAFHTYWGQGTQVTVSS

SEQ ID NO: 29596 - protein, 126 aa, Artificial Sequence
  Chemically Synthesized
QVQLQESGGGLVQAGGSLRLSCAASGTISFGRDMGWYRQAPGKEREFVAAIADGTITYYADSVKGRFTISRDNAKNTVYLQMNSLKPEDTAVYYCAASRDGYDQQVHYRVGQHNYWGQGTQVTVSS

SEQ ID NO: 29597 - protein, 118 aa, Artificial Sequence
  Chemically Synthesized
QVQLQESGGGLVQAGGSLRLSCAASGNISRTYVMGWYRQAPGKEREFVAAIASGGTTYYADSVKGRFTISRDNAKNTVYLQMNSLKPEDTAVYYCAVSARYRPRLLYWGQGTQVTVSS

SEQ ID NO: 29598 - protein, 118 aa, Artificial Sequence
  Chemically Synthesized
QVQLQESGGGLVQAGGSLRLSCAASGNISAGYVMGWYRQAPGKEREFVAAIGDGTSTNYADSVKGRFTISRDNAKNTVYLQMNSLKPEDTAVYYCAVDYVAYGSFGYWGQGTQVTVSS

SEQ ID NO: 29599 - protein, 126 aa, Artificial Sequence
  Chemically Synthesized
QVQLQESGGGLVQAGGSLRLSCAASGNISYYDTMGWYRQAPGKEREFVASIDGGGTTYYADSVKGRFTISRDNAKNTVYLQMNSLKPEDTAVYYCAVYIVVTYWWDRGYDPGYVYWGQGTQVTVSS

SEQ ID NO: 29600 - protein, 118 aa, Artificial Sequence
  Chemically Synthesized
QVQLQESGGGLVQAGGSLRLSCAASGYIFYSGYMGWYRQAPGKERELVAAITAGASTNYADSVKGRFTISRDNAKNTVYLQMNSLKPEDTAVYYCAAPSPYLYRHQYWGQGTQVTVSS

SEQ ID NO: 29601 - protein, 125 aa, Artificial Sequence
  Chemically Synthesized
QVQLQESGGGLVQAGGSLRLSCAASGYIFSRPYMGWYRQAPGKEREFVAAIDYGTSTYYADSVKGRFTISRDNAKNTVYLQMNSLKPEDTAVYYCAAYRYDQYYNLYWYDQFSYWGQGTQVTVSS

SEQ ID NO: 29602 - protein, 117 aa, Artificial Sequence
  Chemically Synthesized
QVQLQESGGGLVQAGGSLRLSCAASGTISYTDDMGWYRQAPGKERELVAGINAVVIPYADSVKGRFTISRDNAKNTVYLQMNSLKPEDTAVYYCAAPIDDQIGLTYWGQGTQVTVSS

SEQ ID NO: 29603 - protein, 113 aa, Artificial Sequence
  Chemically Synthesized
QVQLQESGGGLVQAGGSLRLSCAASGYISPVASMGWYRQAPGKERELVAAINSVLVPYADSVKGRFTISRDNAKNTVYLQMNSLKPEDTAVYYCAATFRTFYWGQGTQVTVSS

SEQ ID NO: 29604 - protein, 118 aa, Artificial Sequence
  Chemically Synthesized
QVQLQESGGGLVQAGGSLRLSCAASGNIFYWEYMGWYRQAPGKEREFVASIADGSSTYYADSVKGRFTISRDNAKNTVYLQMNSLKPEDTAVYYCAVYELLGYGLAYWGQGTQVTVSS

SEQ ID NO: 29605 - protein, 118 aa, Artificial Sequence
  Chemically Synthesized
QVQLQESGGGLVQAGGSLRLSCAASGNIFYYIYMGWYRQAPGKERELVAAINDGAITYYADSVKGRFTISRDNAKNTVYLQMNSLKPEDTAVYYCAVYYAYSDRHSYWGQGTQVTVSS

SEQ ID NO: 29606 - protein, 122 aa, Artificial Sequence
  Chemically Synthesized
QVQLQESGGGLVQAGGSLRLSCAASGTISAVVLMGWYRQAPGKEREFVASINPGGITNYADSVKGRFTISRDNAKNTVYLQMNSLKPEDTAVYYCAAIAQELKVDRWYHRYWGQGTQVTVSS

SEQ ID NO: 29607 - protein, 126 aa, Artificial Sequence
  Chemically Synthesized
QVQLQESGGGLVQAGGSLRLSCAASGYISQRIAMGWYRQAPGKERELVATIGPGSTTNYADSVKGRFTISRDNAKNTVYLQMNSLKPEDTAVYYCAVPYSGDGSWGYQLYVGHYYWGQGTQVTVSS

SEQ ID NO: 29608 - protein, 123 aa, Artificial Sequence
  Chemically Synthesized
QVQLQESGGGLVQAGGSLRLSCAASGNISLVNAMGWYRQAPGKERELVAAIAHGGTITNYADSVKGRFTISRDNAKNTVYLQMNSLKPEDTAVYYCAARGRPRSYSGTYHYYWGQGTQVTVSS

SEQ ID NO: 29609 - protein, 121 aa, Artificial Sequence
  Chemically Synthesized
QVQLQESGGGLVQAGGSLRLSCAASGSISTTWGMGWYRQAPGKERELVASITVGANTYADSVKGRFTISRDNAKNTVYLQMNSLKPEDTAVYYCAVGAGDNYYGWTQYDYWGQGTQVTVSS

SEQ ID NO: 29610 - protein, 117 aa, Artificial Sequence
  Chemically Synthesized
QVQLQESGGGLVQAGGSLRLSCAASGTIFWSLMGWYRQAPGKERELVATIAYGASTYYADSVKGRFTISRDNAKNTVYLQMNSLKPEDTAVYYCAALTGLITVHDYWGQGTQVTVSS

SEQ ID NO: 29611 - protein, 125 aa, Artificial Sequence
  Chemically Synthesized
QVQLQESGGGLVQAGGSLRLSCAASGNIFWYDPMGWYRQAPGKEREFVAGIGSGATTYYADSVKGRFTISRDNAKNTVYLQMNSLKPEDTAVYYCAVPYGPPVATELRGELFGYWGQGTQVTVSS

SEQ ID NO: 29612 - protein, 126 aa, Artificial Sequence
  Chemically Synthesized
QVQLQESGGGLVQAGGSLRLSCAASGTISDTTTMGWYRQAPGKERELVASISYGTTTYYADSVKGRFTISRDNAKNTVYLQMNSLKPEDTAVYYCAVYYYGGDDVYTGQYYPYQYWGQGTQVTVSS

SEQ ID NO: 29613 - protein, 117 aa, Artificial Sequence
  Chemically Synthesized
QVQLQESGGGLVQAGGSLRLSCAASGSIFWISMGWYRQAPGKERELVAGIGRGANTNYADSVKGRFTISRDNAKNTVYLQMNSLKPEDTAVYYCAADDEDDVALDYWGQGTQVTVSS

SEQ ID NO: 29614 - protein, 126 aa, Artificial Sequence
  Chemically Synthesized
QVQLQESGGGLVQAGGSLRLSCAASGTISTWGDMGWYRQAPGKERELVAGIAYGSNTYYADSVKGRFTISRDNAKNTVYLQMNSLKPEDTAVYYCAAGAGPRSYYWTYEWHPHWYWGQGTQVTVSS

SEQ ID NO: 29615 - protein, 121 aa, Artificial Sequence
  Chemically Synthesized
QVQLQESGGGLVQAGGSLRLSCAASGSILFTVMGWYRQAPGKEREFVASIGDGTNTNYADSVKGRFTISRDNAKNTVYLQMNSLKPEDTAVYYCAVLRSYSTYSRDYFTYWGQGTQVTVSS

SEQ ID NO: 29616 - protein, 118 aa, Artificial Sequence
  Chemically Synthesized
QVQLQESGGGLVQAGGSLRLSCAASGYISVILSMGWYRQAPGKERELVAGITYGGNTYYADSVKGRFTISRDNAKNTVYLQMNSLKPEDTAVYYCAVGRRFATAHAYWGQGTQVTVSS

SEQ ID NO: 29617 - protein, 118 aa, Artificial Sequence
  Chemically Synthesized
QVQLQESGGGLVQAGGSLRLSCAASGNIFEYSAMGWYRQAPGKEREFVAAIGRGGITNYADSVKGRFTISRDNAKNTVYLQMNSLKPEDTAVYYCAANKEADYRHFYWGQGTQVTVSS

SEQ ID NO: 29618 - protein, 122 aa, Artificial Sequence
  Chemically Synthesized
QVQLQESGGGLVQAGGSLRLSCAASGTISYGDYMGWYRQAPGKERELVAGIDGGTTTNYADSVKGRFTISRDNAKNTVYLQMNSLKPEDTAVYYCAVDGYPRDVGNSVLRYWGQGTQVTVSS

SEQ ID NO: 29619 - protein, 118 aa, Artificial Sequence
  Chemically Synthesized
QVQLQESGGGLVQAGGSLRLSCAASGTISDEYLMGWYRQAPGKEREFVAGITRGGTTYYADSVKGRFTISRDNAKNTVYLQMNSLKPEDTAVYYCAARKTDEYVFQYWGQGTQVTVSS

SEQ ID NO: 29620 - protein, 118 aa, Artificial Sequence
  Chemically Synthesized
QVQLQESGGGLVQAGGSLRLSCAASGSIFRPPDMGWYRQAPGKERELVAGIDYGTNTYYADSVKGRFTISRDNAKNTVYLQMNSLKPEDTAVYYCAVDYDYDTRLPYWGQGTQVTVSS

SEQ ID NO: 29621 - protein, 117 aa, Artificial Sequence
  Chemically Synthesized
QVQLQESGGGLVQAGGSLRLSCAASGYIFPARSMGWYRQAPGKEREFVASIAGGNTNYADSVKGRFTISRDNAKNTVYLQMNSLKPEDTAVYYCAVNGKLYVALIYWGQGTQVTVSS

SEQ ID NO: 29622 - protein, 121 aa, Artificial Sequence
  Chemically Synthesized
QVQLQESGGGLVQAGGSLRLSCAASGTIFWYSMGWYRQAPGKEREFVAGIAVGTNTYYADSVKGRFTISRDNAKNTVYLQMNSLKPEDTAVYYCAAYGDFDDYDYPEHAYWGQGTQVTVSS

SEQ ID NO: 29623 - protein, 120 aa, Artificial Sequence
  Chemically Synthesized
QVQLQESGGGLVQAGGSLRLSCAASGSMLWTMGWYRQAPGKERELVASISHGATTYYADSVKGRFTISRDNAKNTVYLQMNSLKPEDTAVYYCAAAGIRYSYDYDELSYWGQGTQVTVSS

SEQ ID NO: 29624 - protein, 122 aa, Artificial Sequence
  Chemically Synthesized
QVQLQESGGGLVQAGGSLRLSCAASGSISDSDPMGWYRQAPGKEREFVAGISAGGSTNYADSVKGRFTISRDNAKNTVYLQMNSLKPEDTAVYYCAVGLWIYRGDQHRFDYWGQGTQVTVSS

SEQ ID NO: 29625 - protein, 117 aa, Artificial Sequence
  Chemically Synthesized
QVQLQESGGGLVQAGGSLRLSCAASGYIFSTRMGWYRQAPGKEREFVATIAAGTTTNYADSVKGRFTISRDNAKNTVYLQMNSLKPEDTAVYYCAVTDVFNQSLVYWGQGTQVTVSS

SEQ ID NO: 29626 - protein, 117 aa, Artificial Sequence
  Chemically Synthesized
QVQLQESGGGLVQAGGSLRLSCAASGSISTTWGMGWYRQAPGKERELVAAISYGAITYYADSVKGRFTISRDNAKNTVYLQMNSLKPEDTAVYYCAAYLFGTQYAYWGQGTQVTVSS

SEQ ID NO: 29627 - protein, 118 aa, Artificial Sequence
  Chemically Synthesized
QVQLQESGGGLVQAGGSLRLSCAASGSISVIGDMGWYRQAPGKERELVASISDGGNTNYADSVKGRFTISRDNAKNTVYLQMNSLKPEDTAVYYCAAEDFYVHYHIYWGQGTQVTVSS

SEQ ID NO: 29628 - protein, 122 aa, Artificial Sequence
  Chemically Synthesized
QVQLQESGGGLVQAGGSLRLSCAASGTIFYYHYMGWYRQAPGKERELVASITRGGITYYADSVKGRFTISRDNAKNTVYLQMNSLKPEDTAVYYCAVGGRQVLRLWGRHIYWGQGTQVTVSS

SEQ ID NO: 29629 - protein, 117 aa, Artificial Sequence
  Chemically Synthesized
QVQLQESGGGLVQAGGSLRLSCAASGNISGLWMGWYRQAPGKERELVAAINTGTTTNYADSVKGRFTISRDNAKNTVYLQMNSLKPEDTAVYYCAVYHYPYRSLAYWGQGTQVTVSS

SEQ ID NO: 29630 - protein, 121 aa, Artificial Sequence
  Chemically Synthesized
QVQLQESGGGLVQAGGSLRLSCAASGNISYSDGMGWYRQAPGKEREFVATIDSVLLPYADSVKGRFTISRDNAKNTVYLQMNSLKPEDTAVYYCAVNAFGYLLGRPTHPYWGQGTQVTVSS

SEQ ID NO: 29631 - protein, 118 aa, Artificial Sequence
  Chemically Synthesized
QVQLQESGGGLVQAGGSLRLSCAASGYISGSPDMGWYRQAPGKEREFVATINSGATTYYADSVKGRFTISRDNAKNTVYLQMNSLKPEDTAVYYCAVVSYYPRAYDYWGQGTQVTVSS

SEQ ID NO: 29632 - protein, 118 aa, Artificial Sequence
  Chemically Synthesized
QVQLQESGGGLVQAGGSLRLSCAASGTISSIVIMGWYRQAPGKEREFVAAISYGATTNYADSVKGRFTISRDNAKNTVYLQMNSLKPEDTAVYYCAAWYTWSYVLKYWGQGTQVTVSS

SEQ ID NO: 29633 - protein, 122 aa, Artificial Sequence
  Chemically Synthesized
QVQLQESGGGLVQAGGSLRLSCAASGNISTGFSMGWYRQAPGKEREFVAGINNGGTTNYADSVKGRFTISRDNAKNTVYLQMNSLKPEDTAVYYCAVLIRSRDHNYRYHYYWGQGTQVTVSS

SEQ ID NO: 29634 - protein, 118 aa, Artificial Sequence
  Chemically Synthesized
QVQLQESGGGLVQAGGSLRLSCAASGTIFPQGAMGWYRQAPGKERELVAGIGYGGNTYYADSVKGRFTISRDNAKNTVYLQMNSLKPEDTAVYYCAVGWRDHISHVYWGQGTQVTVSS

SEQ ID NO: 29635 - protein, 122 aa, Artificial Sequence
  Chemically Synthesized
QVQLQESGGGLVQAGGSLRLSCAASGNISTRPDMGWYRQAPGKEREFVAGINNGGSTYYADSVKGRFTISRDNAKNTVYLQMNSLKPEDTAVYYCAAYVKYVAVRNTYHSYWGQGTQVTVSS

SEQ ID NO: 29636 - protein, 126 aa, Artificial Sequence
  Chemically Synthesized
QVQLQESGGGLVQAGGSLRLSCAASGYISHTVYMGWYRQAPGKEREFVAAIAVGTSTYYADSVKGRFTISRDNAKNTVYLQMNSLKPEDTAVYYCAVWGDAYVDRRDGLSRAHFYWGQGTQVTVSS

SEQ ID NO: 29637 - protein, 126 aa, Artificial Sequence
  Chemically Synthesized
QVQLQESGGGLVQAGGSLRLSCAASGYISGIIAMGWYRQAPGKERELVATIAAGANTNYADSVKGRFTISRDNAKNTVYLQMNSLKPEDTAVYYCAVWYRKVTPTTATPSATYYYWGQGTQVTVSS

SEQ ID NO: 29638 - protein, 111 aa, Artificial Sequence
  Chemically Synthesized
QVQLQESGGGLVQAGGSLRLSCAASGTIFDRASMGWYRQAPGKEREFVAGIDDGTTTNYADSVKGRFTISRDNAKNTVYLQMNSLKPEDTAVYYCAATIYWGQGTQVTVSS

SEQ ID NO: 29639 - protein, 122 aa, Artificial Sequence
  Chemically Synthesized
QVQLQESGGGLVQAGGSLRLSCAASGNISILYYMGWYRQAPGKERELVAGIGSGAITYYADSVKGRFTISRDNAKNTVYLQMNSLKPEDTAVYYCAAYGYGPKQYRVYYRYWGQGTQVTVSS

SEQ ID NO: 29640 - protein, 110 aa, Artificial Sequence
  Chemically Synthesized
QVQLQESGGGLVQAGGSLRLSCAASGSIFTTTMGWYRQAPGKEREFVAGIAPGANTNYADSVKGRFTISRDNAKNTVYLQMNSLKPEDTAVYYCAAAFYWGQGTQVTVSS

SEQ ID NO: 29641 - protein, 122 aa, Artificial Sequence
  Chemically Synthesized
QVQLQESGGGLVQAGGSLRLSCAASGSISGLYGMGWYRQAPGKEREFVAGISYGASTYYADSVKGRFTISRDNAKNTVYLQMNSLKPEDTAVYYCAATVPGPYRTGAVLLYWGQGTQVTVSS

SEQ ID NO: 29642 - protein, 122 aa, Artificial Sequence
  Chemically Synthesized
QVQLQESGGGLVQAGGSLRLSCAASGNISNYDSMGWYRQAPGKEREFVASIGYGANTNYADSVKGRFTISRDNAKNTVYLQMNSLKPEDTAVYYCAVQYYTPGPDVPSHDYWGQGTQVTVSS

SEQ ID NO: 29643 - protein, 122 aa, Artificial Sequence
  Chemically Synthesized
QVQLQESGGGLVQAGGSLRLSCAASGSISDLTDMGWYRQAPGKERELVAGISVGATTYYADSVKGRFTISRDNAKNTVYLQMNSLKPEDTAVYYCAAQLSAIYYRYYRLTYWGQGTQVTVSS

SEQ ID NO: 29644 - protein, 117 aa, Artificial Sequence
  Chemically Synthesized
QVQLQESGGGLVQAGGSLRLSCAASGTIFGKTRMGWYRQAPGKERELVATISTVLIPYADSVKGRFTISRDNAKNTVYLQMNSLKPEDTAVYYCAVIGNFGSDLDYWGQGTQVTVSS

SEQ ID NO: 29645 - protein, 123 aa, Artificial Sequence
  Chemically Synthesized
QVQLQESGGGLVQAGGSLRLSCAASGNISGSYGMGWYRQAPGKERELVAGIGQGGTSTYYADSVKGRFTISRDNAKNTVYLQMNSLKPEDTAVYYCAAPVPSAYVAYGFFWYWGQGTQVTVSS

SEQ ID NO: 29646 - protein, 117 aa, Artificial Sequence
  Chemically Synthesized
QVQLQESGGGLVQAGGSLRLSCAASGTISSYYDMGWYRQAPGKERELVAAITAGASTNYADSVKGRFTISRDNAKNTVYLQMNSLKPEDTAVYYCAVTHTTRSAYYWGQGTQVTVSS

SEQ ID NO: 29647 - protein, 122 aa, Artificial Sequence
  Chemically Synthesized
QVQLQESGGGLVQAGGSLRLSCAASGSISLYQSMGWYRQAPGKERELVASISYGTITYYADSVKGRFTISRDNAKNTVYLQMNSLKPEDTAVYYCAAYDHTDWPYNYGFPYWGQGTQVTVSS

SEQ ID NO: 29648 - protein, 122 aa, Artificial Sequence
  Chemically Synthesized
QVQLQESGGGLVQAGGSLRLSCAASGNISQAFDMGWYRQAPGKERELVAGINGGANTYYADSVKGRFTISRDNAKNTVYLQMNSLKPEDTAVYYCAAAYRPRPYEYKIYLYWGQGTQVTVSS

SEQ ID NO: 29649 - protein, 117 aa, Artificial Sequence
  Chemically Synthesized
QVQLQESGGGLVQAGGSLRLSCAASGNISPIEAMGWYRQAPGKERELVAAIDDGGSTNYADSVKGRFTISRDNAKNTVYLQMNSLKPEDTAVYYCAAGYTALLLTYWGQGTQVTVSS

SEQ ID NO: 29650 - protein, 118 aa, Artificial Sequence
  Chemically Synthesized
QVQLQESGGGLVQAGGSLRLSCAASGSISRVTVMGWYRQAPGKERELVAGIDYGASTNYADSVKGRFTISRDNAKNTVYLQMNSLKPEDTAVYYCAAAYWIKELYLYWGQGTQVTVSS

SEQ ID NO: 29651 - protein, 121 aa, Artificial Sequence
  Chemically Synthesized
QVQLQESGGGLVQAGGSLRLSCAASGTIFYGDYMGWYRQAPGKEREFVALLVVVVLPYADSVKGRFTISRDNAKNTVYLQMNSLKPEDTAVYYCAAYAWQYDKLVPTHSYWGQGTQVTVSS

SEQ ID NO: 29652 - protein, 125 aa, Artificial Sequence
  Chemically Synthesized
QVQLQESGGGLVQAGGSLRLSCAASGNISEGQGMGWYRQAPGKERELVASIDYGTSTNYADSVKGRFTISRDNAKNTVYLQMNSLKPEDTAVYYCAAGGDGGGQYWADEGRDMYWGQGTQVTVSS

SEQ ID NO: 29653 - protein, 122 aa, Artificial Sequence
  Chemically Synthesized
QVQLQESGGGLVQAGGSLRLSCAASGNISYEPTMGWYRQAPGKERELVAGIGAGSITYYADSVKGRFTISRDNAKNTVYLQMNSLKPEDTAVYYCAVVRRASYPDFSYFYYWGQGTQVTVSS

SEQ ID NO: 29654 - protein, 126 aa, Artificial Sequence
  Chemically Synthesized
QVQLQESGGGLVQAGGSLRLSCAASGTISAVYGMGWYRQAPGKEREFVAGISAGSTTNYADSVKGRFTISRDNAKNTVYLQMNSLKPEDTAVYYCAAYIARHGDDHDGYSVLFKYWGQGTQVTVSS

SEQ ID NO: 29655 - protein, 118 aa, Artificial Sequence
  Chemically Synthesized
QVQLQESGGGLVQAGGSLRLSCAASGYIFFRAPMGWYRQAPGKEREFVAGITQGGSTNYADSVKGRFTISRDNAKNTVYLQMNSLKPEDTAVYYCAVAVGRYRYYGYWGQGTQVTVSS

SEQ ID NO: 29656 - protein, 118 aa, Artificial Sequence
  Chemically Synthesized
QVQLQESGGGLVQAGGSLRLSCAASGYISTATYMGWYRQAPGKEREFVAAINRGTSTNYADSVKGRFTISRDNAKNTVYLQMNSLKPEDTAVYYCAALYRYTRGHGYWGQGTQVTVSS

SEQ ID NO: 29657 - protein, 116 aa, Artificial Sequence
  Chemically Synthesized
QVQLQESGGGLVQAGGSLRLSCAASGNIFLWYMGWYRQAPGKEREFVATISYGASTNYADSVKGRFTISRDNAKNTVYLQMNSLKPEDTAVYYCAATSTSTFRIYWGQGTQVTVSS

SEQ ID NO: 29658 - protein, 119 aa, Artificial Sequence
  Chemically Synthesized
QVQLQESGGGLVQAGGSLRLSCAASGNISRFYPMGWYRQAPGKERELVAAIGYGASTNYADSVKGRFTISRDNAKNTVYLQMNSLKPEDTAVYYCAVTYYQDVFGYDYWGQGTQVTVSS

SEQ ID NO: 29659 - protein, 122 aa, Artificial Sequence
  Chemically Synthesized
QVQLQESGGGLVQAGGSLRLSCAASGYISRDDYMGWYRQAPGKEREFVAGIAAGSITYYADSVKGRFTISRDNAKNTVYLQMNSLKPEDTAVYYCAVDYAFLFGLQPLYAYWGQGTQVTVSS

SEQ ID NO: 29660 - protein, 107 aa, Artificial Sequence
  Chemically Synthesized
QVQLQESGGGLVQAGGSLRLSCAASGSISRQYQMGWYRQAPGKERELVAGINYQYADSVKGRFTISRDNAKNTVYLQMNSLKPEDTAVYYCAGHDYWGQGTQVTVSS

SEQ ID NO: 29661 - protein, 121 aa, Artificial Sequence
  Chemically Synthesized
QVQLQESGGGLVQAGGSLRLSCAASGSIFPVLMGWYRQAPGKERELVASISGGGTTYYADSVKGRFTISRDNAKNTVYLQMNSLKPEDTAVYYCAARPDPYGYYGSDHVYWGQGTQVTVSS

SEQ ID NO: 29662 - protein, 118 aa, Artificial Sequence
  Chemically Synthesized
QVQLQESGGGLVQAGGSLRLSCAASGYIFYRDYMGWYRQAPGKEREFVASINHGTNTYYADSVKGRFTISRDNAKNTVYLQMNSLKPEDTAVYYCAAGPPYYDDLDYWGQGTQVTVSS

SEQ ID NO: 29663 - protein, 118 aa, Artificial Sequence
  Chemically Synthesized
QVQLQESGGGLVQAGGSLRLSCAASGTIFGSRYMGWYRQAPGKERELVAAIDHGSNTNYADSVKGRFTISRDNAKNTVYLQMNSLKPEDTAVYYCAAYVYQTGRYPYWGQGTQVTVSS

SEQ ID NO: 29664 - protein, 126 aa, Artificial Sequence
  Chemically Synthesized
QVQLQESGGGLVQAGGSLRLSCAASGYIFLRDTMGWYRQAPGKERELVAGINLGTTTYYADSVKGRFTISRDNAKNTVYLQMNSLKPEDTAVYYCAVRRLFQDYTRPTRAGPYWYWGQGTQVTVSS

SEQ ID NO: 29665 - protein, 118 aa, Artificial Sequence
  Chemically Synthesized
QVQLQESGGGLVQAGGSLRLSCAASGTIFPNGAMGWYRQAPGKERELVAAISTGTSTNYADSVKGRFTISRDNAKNTVYLQMNSLKPEDTAVYYCAVTTTVRTRTMYWGQGTQVTVSS

SEQ ID NO: 29666 - protein, 117 aa, Artificial Sequence
  Chemically Synthesized
QVQLQESGGGLVQAGGSLRLSCAASGTISTDDYMGWYRQAPGKERELVASIDVGTITNYADSVKGRFTISRDNAKNTVYLQMNSLKPEDTAVYYCAAWFVSSGFLYWGQGTQVTVSS

SEQ ID NO: 29667 - protein, 126 aa, Artificial Sequence
  Chemically Synthesized
QVQLQESGGGLVQAGGSLRLSCAASGYISAHASMGWYRQAPGKEREFVAGISRGGITYYADSVKGRFTISRDNAKNTVYLQMNSLKPEDTAVYYCAVDWYRDDWAGATAVYWLDYWGQGTQVTVSS

SEQ ID NO: 29668 - protein, 118 aa, Artificial Sequence
  Chemically Synthesized
QVQLQESGGGLVQAGGSLRLSCAASGSIFYRTRMGWYRQAPGKERELVATIGHGSTTYYADSVKGRFTISRDNAKNTVYLQMNSLKPEDTAVYYCAAARYYRPQYYYWGQGTQVTVSS

SEQ ID NO: 29669 - protein, 118 aa, Artificial Sequence
  Chemically Synthesized
QVQLQESGGGLVQAGGSLRLSCAASGNISPYALMGWYRQAPGKERELVATIDVGGSTNYADSVKGRFTISRDNAKNTVYLQMNSLKPEDTAVYYCAVGDRLGRGHIYWGQGTQVTVSS

SEQ ID NO: 29670 - protein, 122 aa, Artificial Sequence
  Chemically Synthesized
QVQLQESGGGLVQAGGSLRLSCAASGNIFSWYRMGWYRQAPGKEREFVAAITTGGNTYYADSVKGRFTISRDNAKNTVYLQMNSLKPEDTAVYYCAADYLIGPHYRSAHPYWGQGTQVTVSS

SEQ ID NO: 29671 - protein, 118 aa, Artificial Sequence
  Chemically Synthesized
QVQLQESGGGLVQAGGSLRLSCAASGTIFYSGAMGWYRQAPGKEREFVAAIAYGTTTYYADSVKGRFTISRDNAKNTVYLQMNSLKPEDTAVYYCAVSSGHGHGHDYWGQGTQVTVSS

SEQ ID NO: 29672 - protein, 122 aa, Artificial Sequence
  Chemically Synthesized
QVQLQESGGGLVQAGGSLRLSCAASGSIFEVRRMGWYRQAPGKEREFVAGITAGTNTNYADSVKGRFTISRDNAKNTVYLQMNSLKPEDTAVYYCAAYVRHLAYYRYGHYYWGQGTQVTVSS

SEQ ID NO: 29673 - protein, 121 aa, Artificial Sequence
  Chemically Synthesized
QVQLQESGGGLVQAGGSLRLSCAASGNISSGDDMGWYRQAPGKERELVATITTGATTYYADSVKGRFTISRDNAKNTVYLQMNSLKPEDTAVYYCAVPYNTSAYGWSNIYWGQGTQVTVSS

SEQ ID NO: 29674 - protein, 118 aa, Artificial Sequence
  Chemically Synthesized
QVQLQESGGGLVQAGGSLRLSCAASGTISESTYMGWYRQAPGKEREFVAGIAWGSITNYADSVKGRFTISRDNAKNTVYLQMNSLKPEDTAVYYCAAGYTRNYDLAYWGQGTQVTVSS

SEQ ID NO: 29675 - protein, 122 aa, Artificial Sequence
  Chemically Synthesized
QVQLQESGGGLVQAGGSLRLSCAASGTISVQRDMGWYRQAPGKEREFVAGISSGGNTYYADSVKGRFTISRDNAKNTVYLQMNSLKPEDTAVYYCAVTSTIRHNPYRLHAYWGQGTQVTVSS

SEQ ID NO: 29676 - protein, 120 aa, Artificial Sequence
  Chemically Synthesized
QVQLQESGGGLVQAGGSLRLSCAASGSISCSTMGWYRQAPGKEREFVATINRGGNTYYADSVKGRFTISRDNAKNTVYLQMNSLKPEDTAVYYCAWADPFGSYYIEHYYWGQGTQVTVSS

SEQ ID NO: 29677 - protein, 117 aa, Artificial Sequence
  Chemically Synthesized
QVQLQESGGGLVQAGGSLRLSCAASGSISRPAIMGWYRQAPGKERELVASIASVLIPYADSVKGRFTISRDNAKNTVYLQMNSLKPEDTAVYYCAATVQYYAEHDYWGQGTQVTVSS

SEQ ID NO: 29678 - protein, 118 aa, Artificial Sequence
  Chemically Synthesized
QVQLQESGGGLVQAGGSLRLSCAASGSISDGPYMGWYRQAPGKEREFVAGISSGASTYYADSVKGRFTISRDNAKNTVYLQMNSLKPEDTAVYYCAAVPADRYPYSYWGQGTQVTVSS

SEQ ID NO: 29679 - protein, 118 aa, Artificial Sequence
  Chemically Synthesized
QVQLQESGGGLVQAGGSLRLSCAASGTISYTASMGWYRQAPGKEREFVATINFGGTTYYADSVKGRFTISRDNAKNTVYLQMNSLKPEDTAVYYCAVDAYYDVDLEYWGQGTQVTVSS

SEQ ID NO: 29680 - protein, 118 aa, Artificial Sequence
  Chemically Synthesized
QVQLQESGGGLVQAGGSLRLSCAASGNIFAFWYMGWYRQAPGKERELVATIALGGNTYYADSVKGRFTISRDNAKNTVYLQMNSLKPEDTAVYYCAVIGSYGRDHGYWGQGTQVTVSS

SEQ ID NO: 29681 - protein, 122 aa, Artificial Sequence
  Chemically Synthesized
QVQLQESGGGLVQAGGSLRLSCAASGSISGYYYMGWYRQAPGKEREFVASINYGGTTYYADSVKGRFTISRDNAKNTVYLQMNSLKPEDTAVYYCAAGDINSAGGPYLHDYWGQGTQVTVSS

SEQ ID NO: 29682 - protein, 111 aa, Artificial Sequence
  Chemically Synthesized
QVQLQESGGGLVQAGGSLRLSCAASGNIFRQLGMGWYRQAPGKERELVANLYADSVKGRFTISRDNAKNTVYLQMNSLKPEDTAVYYCAVNFADGDGYGYWGQGTQVTVSS

SEQ ID NO: 29683 - protein, 118 aa, Artificial Sequence
  Chemically Synthesized
QVQLQESGGGLVQAGGSLRLSCAASGNISDYFYMGWYRQAPGKERELVATIAIGANTYYADSVKGRFTISRDNAKNTVYLQMNSLKPEDTAVYYCAVYREGQRYLWYWGQGTQVTVSS

SEQ ID NO: 29684 - protein, 118 aa, Artificial Sequence
  Chemically Synthesized
QVQLQESGGGLVQAGGSLRLSCAASGTIFVIGYMGWYRQAPGKEREFVAAINVGTNTYYADSVKGRFTISRDNAKNTVYLQMNSLKPEDTAVYYCAVTLFNIRQFWYWGQGTQVTVSS

SEQ ID NO: 29685 - protein, 111 aa, Artificial Sequence
  Chemically Synthesized
QVQLQESGGGLVQAGGSLRLSCAASGTIFAEGSMGWYRQAPGKERELVAGIATGGITNYADSVKGRFTISRDNAKNTVYLQMNSLKPEDTAVYYCAASCYWGQGTQVTVSS

SEQ ID NO: 29686 - protein, 118 aa, Artificial Sequence
  Chemically Synthesized
QVQLQESGGGLVQAGGSLRLSCAASGSISDEHAMGWYRQAPGKEREFVASISYGASTYYADSVKGRFTISRDNAKNTVYLQMNSLKPEDTAVYYCAAKELRIYGHQYWGQGTQVTVSS

SEQ ID NO: 29687 - protein, 125 aa, Artificial Sequence
  Chemically Synthesized
QVQLQESGGGLVQAGGSLRLSCAASGTISYGGFMGWYRQAPGKERELVAGIAWGSNTYYADSVKGRFTISRDNAKNTVYLQMNSLKPEDTAVYYCAVRGYVGLYSSSGKVLTMYWGQGTQVTVSS

SEQ ID NO: 29688 - protein, 126 aa, Artificial Sequence
  Chemically Synthesized
QVQLQESGGGLVQAGGSLRLSCAASGSISIWTGMGWYRQAPGKEREFVAAITTGAITNYADSVKGRFTISRDNAKNTVYLQMNSLKPEDTAVYYCAADHNYDAYLYYWSYHPHYYWGQGTQVTVSS

SEQ ID NO: 29689 - protein, 108 aa, Artificial Sequence
  Chemically Synthesized
QVQLQESGGGLVQAGGSLRLSCAASGYIFTLDDMGWYRQAPGKERELVAVPYADSVKGRFTISRDNAKNTVYLQMNSLKPEDTAVYYCAAFVPTYYYWGQGTQVTVSS

SEQ ID NO: 29690 - protein, 118 aa, Artificial Sequence
  Chemically Synthesized
QVQLQESGGGLVQAGGSLRLSCAASGYISINAGMGWYRQAPGKEREFVASIGYGGITYYADSVKGRFTISRDNAKNTVYLQMNSLKPEDTAVYYCAAYRYYYLPHEYWGQGTQVTVSS

SEQ ID NO: 29691 - protein, 118 aa, Artificial Sequence
  Chemically Synthesized
QVQLQESGGGLVQAGGSLRLSCAASGYIFGGSIMGWYRQAPGKERELVATIGAGGITNYADSVKGRFTISRDNAKNTVYLQMNSLKPEDTAVYYCAVVDPGHPVYRYWGQGTQVTVSS

SEQ ID NO: 29692 - protein, 110 aa, Artificial Sequence
  Chemically Synthesized
QVQLQESGGGLVQAGGSLRLSCAASGYISQGYVMGWYRQAPGKERELVAAIAYGGTTNYADSVKGRFTISRDNAKNTVYLQMNSLKPEDTAVYYCASGYWGQGTQVTVSS

SEQ ID NO: 29693 - protein, 122 aa, Artificial Sequence
  Chemically Synthesized
QVQLQESGGGLVQAGGSLRLSCAASGNISRALGMGWYRQAPGKEREFVAGIAFGANTYYADSVKGRFTISRDNAKNTVYLQMNSLKPEDTAVYYCAAQTDGYTFSWGGHNYWGQGTQVTVSS

SEQ ID NO: 29694 - protein, 124 aa, Artificial Sequence
  Chemically Synthesized
QVQLQESGGGLVQAGGSLRLSCAASGTIFSTYGMGWYRQAPGKEREFVATIKVLLPYADSVKGRFTISRDNAKNTVYLQMNSLKPEDTAVYYCAAESANRRYIYSRDGTLHEYWGQGTQVTVSS

SEQ ID NO: 29695 - protein, 121 aa, Artificial Sequence
  Chemically Synthesized
QVQLQESGGGLVQAGGSLRLSCAASGSISVSVDMGWYRQAPGKERELVASIAYGANTYADSVKGRFTISRDNAKNTVYLQMNSLKPEDTAVYYCAVYYLADDYSGVSLTYWGQGTQVTVSS

SEQ ID NO: 29696 - protein, 118 aa, Artificial Sequence
  Chemically Synthesized
QVQLQESGGGLVQAGGSLRLSCAASGNISSYYYMGWYRQAPGKERELVASIGVGTITNYADSVKGRFTISRDNAKNTVYLQMNSLKPEDTAVYYCAVSPLVLPGYGYWGQGTQVTVSS

SEQ ID NO: 29697 - protein, 117 aa, Artificial Sequence
  Chemically Synthesized
QVQLQESGGGLVQAGGSLRLSCAASGSIFYWDGMGWYRQAPGKERELVATMVSVVLPYADSVKGRFTISRDNAKNTVYLQMNSLKPEDTAVYYCAAHGVLYTRYGYWGQGTQVTVSS

SEQ ID NO: 29698 - protein, 122 aa, Artificial Sequence
  Chemically Synthesized
QVQLQESGGGLVQAGGSLRLSCAASGTISGDYEMGWYRQAPGKEREFVATIAGGASTYYADSVKGRFTISRDNAKNTVYLQMNSLKPEDTAVYYCAAWSGDDQDDAHWHAYWGQGTQVTVSS

SEQ ID NO: 29699 - protein, 122 aa, Artificial Sequence
  Chemically Synthesized
QVQLQESGGGLVQAGGSLRLSCAASGSISYPAYMGWYRQAPGKEREFVASISIGGSTNYADSVKGRFTISRDNAKNTVYLQMNSLKPEDTAVYYCAAYTGLGEDPGWYYGYWGQGTQVTVSS

SEQ ID NO: 29700 - protein, 118 aa, Artificial Sequence
  Chemically Synthesized
QVQLQESGGGLVQAGGSLRLSCAASGSIFDYAGMGWYRQAPGKERELVATIGNGSNTYYADSVKGRFTISRDNAKNTVYLQMNSLKPEDTAVYYCAATYGWRSTLWYWGQGTQVTVSS

SEQ ID NO: 29701 - protein, 118 aa, Artificial Sequence
  Chemically Synthesized
QVQLQESGGGLVQAGGSLRLSCAASGNIFPYVAMGWYRQAPGKERELVAAIGYGTTTYYADSVKGRFTISRDNAKNTVYLQMNSLKPEDTAVYYCAAELAAGYYLYYWGQGTQVTVSS

SEQ ID NO: 29702 - protein, 122 aa, Artificial Sequence
  Chemically Synthesized
QVQLQESGGGLVQAGGSLRLSCAASGSISKQEHMGWYRQAPGKERELVAGINQGGITNYADSVKGRFTISRDNAKNTVYLQMNSLKPEDTAVYYCAAKKGVAPTPWRAYDYWGQGTQVTVSS

SEQ ID NO: 29703 - protein, 118 aa, Artificial Sequence
  Chemically Synthesized
QVQLQESGGGLVQAGGSLRLSCAASGNIFGTRAMGWYRQAPGKEREFVASINVGANTNYADSVKGRFTISRDNAKNTVYLQMNSLKPEDTAVYYCAVDHKAYDSFPYWGQGTQVTVSS

SEQ ID NO: 29704 - protein, 110 aa, Artificial Sequence
  Chemically Synthesized
QVQLQESGGGLVQAGGSLRLSCAASGTISLGDSMGWYRQAPGKERELVAAIARGANTNYADSVKGRFTISRDNAKNTVYLQMNSLKPEDTAVYYCAFLYWGQGTQVTVSS

SEQ ID NO: 29705 - protein, 115 aa, Artificial Sequence
  Chemically Synthesized
QVQLQESGGGLVQAGGSLRLSCAASGYIFARLYMGWYRQAPGKERELVAGIGRGTSTNYADSVKGRFTISRDNAKNTVYLQMNSLKPEDTAVYYCAYEYYGHDYWGQGTQVTVSS

SEQ ID NO: 29706 - protein, 122 aa, Artificial Sequence
  Chemically Synthesized
QVQLQESGGGLVQAGGSLRLSCAASGYISPVIPMGWYRQAPGKEREFVAAIAGGATTNYADSVKGRFTISRDNAKNTVYLQMNSLKPEDTAVYYCAADYDHPLTDRSYLPYWGQGTQVTVSS

SEQ ID NO: 29707 - protein, 110 aa, Artificial Sequence
  Chemically Synthesized
QVQLQESGGGLVQAGGSLRLSCAASGNISQGGYMGWYRQAPGKERELVASIGLGTITNYADSVKGRFTISRDNAKNTVYLQMNSLKPEDTAVYYCATFYWGQGTQVTVSS

SEQ ID NO: 29708 - protein, 117 aa, Artificial Sequence
  Chemically Synthesized
QVQLQESGGGLVQAGGSLRLSCAASGSILVRGMGWYRQAPGKERELVAGIGVGTTTYYADSVKGRFTISRDNAKNTVYLQMNSLKPEDTAVYYCAVSNYYVDRHYYWGQGTQVTVSS

SEQ ID NO: 29709 - protein, 122 aa, Artificial Sequence
  Chemically Synthesized
QVQLQESGGGLVQAGGSLRLSCAASGSISALIEMGWYRQAPGKERELVAAIGDGSNTYYADSVKGRFTISRDNAKNTVYLQMNSLKPEDTAVYYCAARDSGRTIYPDDFQYWGQGTQVTVSS

SEQ ID NO: 29710 - protein, 118 aa, Artificial Sequence
  Chemically Synthesized
QVQLQESGGGLVQAGGSLRLSCAASGNIFTIGKMGWYRQAPGKERELVAAISYGSTTYYADSVKGRFTISRDNAKNTVYLQMNSLKPEDTAVYYCAALIPIGPYYGYWGQGTQVTVSS

SEQ ID NO: 29711 - protein, 118 aa, Artificial Sequence
  Chemically Synthesized
QVQLQESGGGLVQAGGSLRLSCAASGYISFYYNMGWYRQAPGKERELVAAIALGTSTNYADSVKGRFTISRDNAKNTVYLQMNSLKPEDTAVYYCAVYYPWNEQYYYWGQGTQVTVSS

SEQ ID NO: 29712 - protein, 118 aa, Artificial Sequence
  Chemically Synthesized
QVQLQESGGGLVQAGGSLRLSCAASGSIFDRTSMGWYRQAPGKEREFVATIDYGATTNYADSVKGRFTISRDNAKNTVYLQMNSLKPEDTAVYYCAAWKPFYVYLQYWGQGTQVTVSS

SEQ ID NO: 29713 - protein, 122 aa, Artificial Sequence
  Chemically Synthesized
QVQLQESGGGLVQAGGSLRLSCAASGYISLSTAMGWYRQAPGKERELVASIGHGGSTYYADSVKGRFTISRDNAKNTVYLQMNSLKPEDTAVYYCAVWTNETDPWSSDLEYWGQGTQVTVSS

SEQ ID NO: 29714 - protein, 122 aa, Artificial Sequence
  Chemically Synthesized
QVQLQESGGGLVQAGGSLRLSCAASGNISNDTGMGWYRQAPGKEREFVASISSGTSTNYADSVKGRFTISRDNAKNTVYLQMNSLKPEDTAVYYCAAYTAQQDEDQWYLAYWGQGTQVTVSS

SEQ ID NO: 29715 - protein, 118 aa, Artificial Sequence
  Chemically Synthesized
QVQLQESGGGLVQAGGSLRLSCAASGNISYYIFMGWYRQAPGKERELVATIGVGTNTYYADSVKGRFTISRDNAKNTVYLQMNSLKPEDTAVYYCAVFGGYPDVHSYWGQGTQVTVSS

SEQ ID NO: 29716 - protein, 118 aa, Artificial Sequence
  Chemically Synthesized
QVQLQESGGGLVQAGGSLRLSCAASGYIFAPSVMGWYRQAPGKEREFVAGIGGGGNTYYADSVKGRFTISRDNAKNTVYLQMNSLKPEDTAVYYCAVSLVKYWSHSYWGQGTQVTVSS

SEQ ID NO: 29717 - protein, 118 aa, Artificial Sequence
  Chemically Synthesized
QVQLQESGGGLVQAGGSLRLSCAASGYIFDWGDMGWYRQAPGKERELVAAINEGSSTNYADSVKGRFTISRDNAKNTVYLQMNSLKPEDTAVYYCAAYSKRGLYHFYWGQGTQVTVSS

SEQ ID NO: 29718 - protein, 122 aa, Artificial Sequence
  Chemically Synthesized
QVQLQESGGGLVQAGGSLRLSCAASGNISFGYHMGWYRQAPGKERELVAGITWGTTTYYADSVKGRFTISRDNAKNTVYLQMNSLKPEDTAVYYCAVSNYQGWATGAGHGYWGQGTQVTVSS

SEQ ID NO: 29719 - protein, 118 aa, Artificial Sequence
  Chemically Synthesized
QVQLQESGGGLVQAGGSLRLSCAASGTISARINMGWYRQAPGKEREFVAAIDPGASTNYADSVKGRFTISRDNAKNTVYLQMNSLKPEDTAVYYCAVPALDARNLPYWGQGTQVTVSS

SEQ ID NO: 29720 - protein, 121 aa, Artificial Sequence
  Chemically Synthesized
QVQLQESGGGLVQAGGSLRLSCAASGSISDTDGMGWYRQAPGKERELVAGMVSVLLPYADSVKGRFTISRDNAKNTVYLQMNSLKPEDTAVYYCAVYYADYTWSWVTFSYWGQGTQVTVSS

SEQ ID NO: 29721 - protein, 112 aa, Artificial Sequence
  Chemically Synthesized
QVQLQESGGGLVQAGGSLRLSCAASGYIFSDYYMGWYRQAPGKEREFVASISYGASTNYADSVKGRFTISRDNAKNTVYLQMNSLKPEDTAVYYCAGWSCYWGQGTQVTVSS

SEQ ID NO: 29722 - protein, 125 aa, Artificial Sequence
  Chemically Synthesized
QVQLQESGGGLVQAGGSLRLSCAASGTISQANAMGWYRQAPGKEREFVAGINYGGSTNYADSVKGRFTISRDNAKNTVYLQMNSLKPEDTAVYYCAVYDGDAEQAEIDPYSSIYWGQGTQVTVSS

SEQ ID NO: 29723 - protein, 125 aa, Artificial Sequence
  Chemically Synthesized
QVQLQESGGGLVQAGGSLRLSCAASGNISSGGYMGWYRQAPGKERELVATISVGGSTYYADSVKGRFTISRDNAKNTVYLQMNSLKPEDTAVYYCAAYYTDDGYAGNLRRVYLYWGQGTQVTVSS

SEQ ID NO: 29724 - protein, 112 aa, Artificial Sequence
  Chemically Synthesized
QVQLQESGGGLVQAGGSLRLSCAASGNISTVPFMGWYRQAPGKEREFVAGIGRGTSTYYADSVKGRFTISRDNAKNTVYLQMNSLKPEDTAVYYCAATVFYWGQGTQVTVSS

SEQ ID NO: 29725 - protein, 124 aa, Artificial Sequence
  Chemically Synthesized
QVQLQESGGGLVQAGGSLRLSCAASGSIFWSMGWYRQAPGKERELVAAINYGSSTYYADSVKGRFTISRDNAKNTVYLQMNSLKPEDTAVYYCAARRYSGSRRRVDDGDTHRYWGQGTQVTVSS

SEQ ID NO: 29726 - protein, 118 aa, Artificial Sequence
  Chemically Synthesized
QVQLQESGGGLVQAGGSLRLSCAASGNIFVGARMGWYRQAPGKERELVAAIDRGGNTYYADSVKGRFTISRDNAKNTVYLQMNSLKPEDTAVYYCAANYAGFPLYPYWGQGTQVTVSS

SEQ ID NO: 29727 - protein, 121 aa, Artificial Sequence
  Chemically Synthesized
QVQLQESGGGLVQAGGSLRLSCAASGNISPCLRMGWYRQAPGKERELVASIGKGATTYYADSVKGRFTISRDNAKNTVYLQMNSLKPEDTAVYYCAATLADQDSYSLGLYWGQGTQVTVSS

SEQ ID NO: 29728 - protein, 126 aa, Artificial Sequence
  Chemically Synthesized
QVQLQESGGGLVQAGGSLRLSCAASGTISANSGMGWYRQAPGKERELVASIARGANTNYADSVKGRFTISRDNAKNTVYLQMNSLKPEDTAVYYCAVYVSYVDGTPDGATRLLWYWGQGTQVTVSS

SEQ ID NO: 29729 - protein, 112 aa, Artificial Sequence
  Chemically Synthesized
QVQLQESGGGLVQAGGSLRLSCAASGSIFDSLVMGWYRQAPGKERELVAAIADGGITYYADSVKGRFTISRDNAKNTVYLQMNSLKPEDTAVYYCATLTIYWGQGTQVTVSS

SEQ ID NO: 29730 - protein, 118 aa, Artificial Sequence
  Chemically Synthesized
QVQLQESGGGLVQAGGSLRLSCAASGTISDPYAMGWYRQAPGKERELVATIDRGANTYYADSVKGRFTISRDNAKNTVYLQMNSLKPEDTAVYYCAVRYDSYAVFIYWGQGTQVTVSS

SEQ ID NO: 29731 - protein, 118 aa, Artificial Sequence
  Chemically Synthesized
QVQLQESGGGLVQAGGSLRLSCAASGTISFYRPMGWYRQAPGKERELVAGITIGGSTYYADSVKGRFTISRDNAKNTVYLQMNSLKPEDTAVYYCAVPIYQRVRHQYWGQGTQVTVSS

SEQ ID NO: 29732 - protein, 118 aa, Artificial Sequence
  Chemically Synthesized
QVQLQESGGGLVQAGGSLRLSCAASGSISALWFMGWYRQAPGKERELVASIGIGANTNYADSVKGRFTISRDNAKNTVYLQMNSLKPEDTAVYYCAVGYDDDRNLAYWGQGTQVTVSS

SEQ ID NO: 29733 - protein, 118 aa, Artificial Sequence
  Chemically Synthesized
QVQLQESGGGLVQAGGSLRLSCAASGTISPYYGMGWYRQAPGKEREFVASISLGASTYYADSVKGRFTISRDNAKNTVYLQMNSLKPEDTAVYYCAVDPHYGPYHAYWGQGTQVTVSS

SEQ ID NO: 29734 - protein, 121 aa, Artificial Sequence
  Chemically Synthesized
QVQLQESGGGLVQAGGSLRLSCAASGNISEDNYMGWYRQAPGKERELVAVLLLVVIPYADSVKGRFTISRDNAKNTVYLQMNSLKPEDTAVYYCAAYYAPYYQYPYYYYYWGQGTQVTVSS

SEQ ID NO: 29735 - protein, 118 aa, Artificial Sequence
  Chemically Synthesized
QVQLQESGGGLVQAGGSLRLSCAASGSIFDYSVMGWYRQAPGKEREFVAGIAPGGITYYADSVKGRFTISRDNAKNTVYLQMNSLKPEDTAVYYCAVLQHVNVLHFYWGQGTQVTVSS

SEQ ID NO: 29736 - protein, 118 aa, Artificial Sequence
  Chemically Synthesized
QVQLQESGGGLVQAGGSLRLSCAASGNIFDGYVMGWYRQAPGKEREFVASIGDGATTYYADSVKGRFTISRDNAKNTVYLQMNSLKPEDTAVYYCAAYNVDYPAHYYWGQGTQVTVSS

SEQ ID NO: 29737 - protein, 122 aa, Artificial Sequence
  Chemically Synthesized
QVQLQESGGGLVQAGGSLRLSCAASGNIFLSLSMGWYRQAPGKERELVATITFGGNTYYADSVKGRFTISRDNAKNTVYLQMNSLKPEDTAVYYCAAKSLPYAYPRVRHRYWGQGTQVTVSS

SEQ ID NO: 29738 - protein, 118 aa, Artificial Sequence
  Chemically Synthesized
QVQLQESGGGLVQAGGSLRLSCAASGSISSEYTMGWYRQAPGKERELVATIAVGTITKYADSVKGRFTISRDNAKNTVYLQMNSLKPEDTAVYYCAVGSWDFAYHNYWGQGTQVTVSS

SEQ ID NO: 29739 - protein, 113 aa, Artificial Sequence
  Chemically Synthesized
QVQLQESGGGLVQAGGSLRLSCAASGYIFYQYMGWYRQAPGKEREFVATIAQGGITNYADSVKGRFTISRDNAKNTVYLQMNSLKPEDTAVYYCAAYAPLSYWGQGTQVTVSS

SEQ ID NO: 29740 - protein, 118 aa, Artificial Sequence
  Chemically Synthesized
QVQLQESGGGLVQAGGSLRLSCAASGNIFFASYMGWYRQAPGKERELVATINTGGTTYYADSVKGRFTISRDNAKNTVYLQMNSLKPEDTAVYYCAANYVRVKAHGYWGQGTQVTVSS

SEQ ID NO: 29741 - protein, 111 aa, Artificial Sequence
  Chemically Synthesized
QVQLQESGGGLVQAGGSLRLSCAASGTIFYWESMGWYRQAPGKERELVAAIDLGSNTNYADSVKGRFTISRDNAKNTVYLQMNSLKPEDTAVYYCAAHQYWGQGTQVTVSS

SEQ ID NO: 29742 - protein, 118 aa, Artificial Sequence
  Chemically Synthesized
QVQLQESGGGLVQAGGSLRLSCAASGTISPYRRMGWYRQAPGKEREFVAAIADGTTTYYADSVKGRFTISRDNAKNTVYLQMNSLKPEDTAVYYCAAEESDYGVHYYWGQGTQVTVSS

SEQ ID NO: 29743 - protein, 122 aa, Artificial Sequence
  Chemically Synthesized
QVQLQESGGGLVQAGGSLRLSCAASGTISWGTIMGWYRQAPGKEREFVAGINAGATTNYADSVKGRFTISRDNAKNTVYLQMNSLKPEDTAVYYCAAYGDGAYQVSKRHYYWGQGTQVTVSS

SEQ ID NO: 29744 - protein, 118 aa, Artificial Sequence
  Chemically Synthesized
QVQLQESGGGLVQAGGSLRLSCAASGYISGYRYMGWYRQAPGKERELVAGIGYGASTYYADSVKGRFTISRDNAKNTVYLQMNSLKPEDTAVYYCAAQSGRYWRHRYWGQGTQVTVSS

SEQ ID NO: 29745 - protein, 125 aa, Artificial Sequence
  Chemically Synthesized
QVQLQESGGGLVQAGGSLRLSCAASGYISYQWYMGWYRQAPGKEREFVASITPGGTTNYADSVKGRFTISRDNAKNTVYLQMNSLKPEDTAVYYCAVTISAGPHATPYDIYFRYWGQGTQVTVSS

SEQ ID NO: 29746 - protein, 122 aa, Artificial Sequence
  Chemically Synthesized
QVQLQESGGGLVQAGGSLRLSCAASGTISADTKMGWYRQAPGKERELVASIGWGAITNYADSVKGRFTISRDNAKNTVYLQMNSLKPEDTAVYYCAAYVGAWRRGVRWHYYWGQGTQVTVSS

SEQ ID NO: 29747 - protein, 122 aa, Artificial Sequence
  Chemically Synthesized
QVQLQESGGGLVQAGGSLRLSCAASGSISNVTHMGWYRQAPGKEREFVASISFGATTYYADSVKGRFTISRDNAKNTVYLQMNSLKPEDTAVYYCAVLQNAQGWFDLYYAYWGQGTQVTVSS

SEQ ID NO: 29748 - protein, 117 aa, Artificial Sequence
  Chemically Synthesized
QVQLQESGGGLVQAGGSLRLSCAASGTISYRWMGWYRQAPGKERELVAGISTGANTNYADSVKGRFTISRDNAKNTVYLQMNSLKPEDTAVYYCAAPSYSDYEFGYWGQGTQVTVSS

SEQ ID NO: 29749 - protein, 116 aa, Artificial Sequence
  Chemically Synthesized
QVQLQESGGGLVQAGGSLRLSCAASGNIFFYDMGWYRQAPGKEREFVAAIASVVLPYADSVKGRFTISRDNAKNTVYLQMNSLKPEDTAVYYCAADDGGYHDLQYWGQGTQVTVSS

SEQ ID NO: 29750 - protein, 112 aa, Artificial Sequence
  Chemically Synthesized
QVQLQESGGGLVQAGGSLRLSCAASGNIFLLGMGWYRQAPGKERELVASINDGATTYYADSVKGRFTISRDNAKNTVYLQMNSLKPEDTAVYYCALVLSFYWGQGTQVTVSS

SEQ ID NO: 29751 - protein, 126 aa, Artificial Sequence
  Chemically Synthesized
QVQLQESGGGLVQAGGSLRLSCAASGNIFPYSVMGWYRQAPGKERELVAAIGPGANTYYADSVKGRFTISRDNAKNTVYLQMNSLKPEDTAVYYCAAGYAATSDYADGWTVALFYWGQGTQVTVSS

SEQ ID NO: 29752 - protein, 122 aa, Artificial Sequence
  Chemically Synthesized
QVQLQESGGGLVQAGGSLRLSCAASGNIFYYSFMGWYRQAPGKERELVATIGLGGITYYADSVKGRFTISRDNAKNTVYLQMNSLKPEDTAVYYCAADEAGYAYAGSYYYYWGQGTQVTVSS

SEQ ID NO: 29753 - protein, 118 aa, Artificial Sequence
  Chemically Synthesized
QVQLQESGGGLVQAGGSLRLSCAASGSIFAYNYMGWYRQAPGKERELVASITAGTNTNYADSVKGRFTISRDNAKNTVYLQMNSLKPEDTAVYYCAALYVYLPAVCYWGQGTQVTVSS

SEQ ID NO: 29754 - protein, 121 aa, Artificial Sequence
  Chemically Synthesized
QVQLQESGGGLVQAGGSLRLSCAASGIFLSTGMGWYRQAPGKERELVATIGTGANTNYADSVKGRFTISRDNAKNTVYLQMNSLKPEDTAVYYCAALYYGRRYPYNYYDYWGQGTQVTVSS

SEQ ID NO: 29755 - protein, 118 aa, Artificial Sequence
  Chemically Synthesized
QVQLQESGGGLVQAGGSLRLSCAASGTISGRRYMGWYRQAPGKERELVAGISRGGITNYADSVKGRFTISRDNAKNTVYLQMNSLKPEDTAVYYCAAYRPLYHPYWYWGQGTQVTVSS

SEQ ID NO: 29756 - protein, 121 aa, Artificial Sequence
  Chemically Synthesized
QVQLQESGGGLVQAGGSLRLSCAASGYISVYVPMGWYRQAPGKEREFVASITYGGNTYYADSVKGRFTISRDNAKNTVYLQMNSLKPEDTAVYYCAAYRYYDHAGYRFAYWGQGTQVTVSS

SEQ ID NO: 29757 - protein, 118 aa, Artificial Sequence
  Chemically Synthesized
QVQLQESGGGLVQAGGSLRLSCAASGNISDGWYMGWYRQAPGKEREFVAGIDYGGTTYYADSVKGRFTISRDNAKNTVYLQMNSLKPEDTAVYYCAVPTLNLSPHDYWGQGTQVTVSS

SEQ ID NO: 29758 - protein, 122 aa, Artificial Sequence
  Chemically Synthesized
QVQLQESGGGLVQAGGSLRLSCAASGNISVYKSMGWYRQAPGKERELVAAIAAGGNTYYADSVKGRFTISRDNAKNTVYLQMNSLKPEDTAVYYCAVYANNYYAKWEGHQYWGQGTQVTVSS

SEQ ID NO: 29759 - protein, 118 aa, Artificial Sequence
  Chemically Synthesized
QVQLQESGGGLVQAGGSLRLSCAASGYIFYGTSMGWYRQAPGKERELVASIDDGATTNYADSVKGRFTISRDNAKNTVYLQMNSLKPEDTAVYYCAANPYFYLYFRYWGQGTQVTVSS

SEQ ID NO: 29760 - protein, 118 aa, Artificial Sequence
  Chemically Synthesized
QVQLQESGGGLVQAGGSLRLSCAASGTIFGFNYMGWYRQAPGKERELVATISTGGSTYYADSVKGRFTISRDNAKNTVYLQMNSLKPEDTAVYYCAAPVASFVYHYYWGQGTQVTVSS

SEQ ID NO: 29761 - protein, 126 aa, Artificial Sequence
  Chemically Synthesized
QVQLQESGGGLVQAGGSLRLSCAASGSIFYGKNMGWYRQAPGKERELVAGIDGGATTYYADSVKGRFTISRDNAKNTVYLQMNSLKPEDTAVYYCAVWRYLYVARYSDDSQYHDYWGQGTQVTVSS

SEQ ID NO: 29762 - protein, 117 aa, Artificial Sequence
  Chemically Synthesized
QVQLQESGGGLVQAGGSLRLSCAASGSIFLSTMGWYRQAPGKEREFVAAIGTGSSTNYADSVKGRFTISRDNAKNTVYLQMNSLKPEDTAVYYCAVDTHRPDGHFYWGQGTQVTVSS

SEQ ID NO: 29763 - protein, 122 aa, Artificial Sequence
  Chemically Synthesized
QVQLQESGGGLVQAGGSLRLSCAASGYIFADGDMGWYRQAPGKEREFVASIDNGAITYYADSVKGRFTISRDNAKNTVYLQMNSLKPEDTAVYYCAAVQGNDVYGPYDYNYWGQGTQVTVSS

SEQ ID NO: 29764 - protein, 121 aa, Artificial Sequence
  Chemically Synthesized
QVQLQESGGGLVQAGGSLRLSCAASGSIFQYATMGWYRQAPGKEREFVAAIDSVVLPYADSVKGRFTISRDNAKNTVYLQMNSLKPEDTAVYYCAASYYQTGYDYVAHQYWGQGTQVTVSS

SEQ ID NO: 29765 - protein, 122 aa, Artificial Sequence
  Chemically Synthesized
QVQLQESGGGLVQAGGSLRLSCAASGYIFFNAPMGWYRQAPGKEREFVATISTGANTNYADSVKGRFTISRDNAKNTVYLQMNSLKPEDTAVYYCAVDEDVLSDSLSGHVYWGQGTQVTVSS

SEQ ID NO: 29766 - protein, 116 aa, Artificial Sequence
  Chemically Synthesized
QVQLQESGGGLVQAGGSLRLSCAASGNIFDYWRMGWYRQAPGKEREFVPVLLMVVLPYADSVKGRFTISRDNAKNTVYLQMNSLKPEDTAVYYCAAATISSLTMYWGQGTQVTVSS

SEQ ID NO: 29767 - protein, 118 aa, Artificial Sequence
  Chemically Synthesized
QVQLQESGGGLVQAGGSLRLSCAASGNIFGQVYMGWYRQAPGKERELVAAINHGGSTYYADSVKGRFTISRDNAKNTVYLQMNSLKPEDTAVYYCAARRYDARYLGYWGQGTQVTVSS

SEQ ID NO: 29768 - protein, 118 aa, Artificial Sequence
  Chemically Synthesized
QVQLQESGGGLVQAGGSLRLSCAASGTISGDTRMGWYRQAPGKERELVAGIGYGGTTYYADSVKGRFTISRDNAKNTVYLQMNSLKPEDTAVYYCAVTYTQELGHAYWGQGTQVTVSS

SEQ ID NO: 29769 - protein, 118 aa, Artificial Sequence
  Chemically Synthesized
QVQLQESGGGLVQAGGSLRLSCAASGTIFSIYAMGWYRQAPGKERELVATITDGGITNYADSVKGRFTISRDNAKNTVYLQMNSLKPEDTAVYYCAVVYRKWHGLTYWGQGTQVTVSS

SEQ ID NO: 29770 - protein, 122 aa, Artificial Sequence
  Chemically Synthesized
QVQLQESGGGLVQAGGSLRLSCAASGTISHTVVMGWYRQAPGKERELVAGIGRGSNTYYADSVKGRFTISRDNAKNTVYLQMNSLKPEDTAVYYCAAAVAQWDNGQGQHYYWGQGTQVTVSS

SEQ ID NO: 29771 - protein, 117 aa, Artificial Sequence
  Chemically Synthesized
QVQLQESGGGLVQAGGSLRLSCAASGTISDRTDMGWYRQAPGKERELVASISQGGSTNYADSVKGRFTISRDNAKNTVYLQMNSLKPEDTAVYYCAAASNDDSTMYWGQGTQVTVSS

SEQ ID NO: 29772 - protein, 121 aa, Artificial Sequence
  Chemically Synthesized
QVQLQESGGGLVQAGGSLRLSCAASGTIFAGLIMGWYRQAPGKERELVATIAGAITNYADSVKGRFTISRDNAKNTVYLQMNSLKPEDTAVYYCAVPRSTLAIPTRYLWYWGQGTQVTVSS

SEQ ID NO: 29773 - protein, 117 aa, Artificial Sequence
  Chemically Synthesized
QVQLQESGGGLVQAGGSLRLSCAASGNISRPDGMGWYRQAPGKEREFVAAITDGGSTYYADSVKGRFTISRDNAKNTVYLQMNSLKPEDTAVYYCALLLVSTTSIYWGQGTQVTVSS

SEQ ID NO: 29774 - protein, 118 aa, Artificial Sequence
  Chemically Synthesized
QVQLQESGGGLVQAGGSLRLSCAASGTISLVIYMGWYRQAPGKERELVAAISAGGSTYYADSVKGRFTISRDNAKNTVYLQMNSLKPEDTAVYYCAVEAVRGKDYKYWGQGTQVTVSS

SEQ ID NO: 29775 - protein, 118 aa, Artificial Sequence
  Chemically Synthesized
QVQLQESGGGLVQAGGSLRLSCAASGTISAYRWMGWYRQAPGKERELVAAIARGTNTYYADSVKGRFTISRDNAKNTVYLQMNSLKPEDTAVYYCAAGLYAYQSHPYWGQGTQVTVSS

SEQ ID NO: 29776 - protein, 118 aa, Artificial Sequence
  Chemically Synthesized
QVQLQESGGGLVQAGGSLRLSCAASGTIFWPYPMGWYRQAPGKEREFVATIGDGGSTNYADSVKGRFTISRDNAKNTVYLQMNSLKPEDTAVYYCAARSTRVTTYPYWGQGTQVTVSS

SEQ ID NO: 29777 - protein, 118 aa, Artificial Sequence
  Chemically Synthesized
QVQLQESGGGLVQAGGSLRLSCAASGYISPDVVMGWYRQAPGKEREFVAAISSGGITYYADSVKGRFTISRDNAKNTVYLQMNSLKPEDTAVYYCAVYGDYEVRFGYWGQGTQVTVSS

SEQ ID NO: 29778 - protein, 122 aa, Artificial Sequence
  Chemically Synthesized
QVQLQESGGGLVQAGGSLRLSCAASGSIFYASVMGWYRQAPGKEREFVAAINAGGTTYYADSVKGRFTISRDNAKNTVYLQMNSLKPEDTAVYYCAVVYTPSRYYKHYHTYWGQGTQVTVSS

SEQ ID NO: 29779 - protein, 125 aa, Artificial Sequence
  Chemically Synthesized
QVQLQESGGGLVQAGGSLRLSCAASGNISTVDAMGWYRQAPGKEREFVAGIDAGTLPYADSVKGRFTISRDNAKNTVYLQMNSLKPEDTAVYYCAVDAPTDYYRYNPYVYDHRYWGQGTQVTVSS

SEQ ID NO: 29780 - protein, 125 aa, Artificial Sequence
  Chemically Synthesized
QVQLQESGGGLVQAGGSLRLSCAASGSIFASYYMGWYRQAPGKEREFVATIAGGTTYYADSVKGRFTISRDNAKNTVYLQMNSLKPEDTAVYYCAVTYSWDRFKWAVTRYPYPYWGQGTQVTVSS

SEQ ID NO: 29781 - protein, 120 aa, Artificial Sequence
  Chemically Synthesized
QVQLQESGGGLVQAGGSLRLSCAASGSIFVYIIMGWYRQAPGKEREFVAGIASGAITYYADSVKGRFTISRDNAKNTVYLQMNSLKPEDTAVYYCAAGHYKYEYYPHTYWGQGTQVTVSS

SEQ ID NO: 29782 - protein, 125 aa, Artificial Sequence
  Chemically Synthesized
QVQLQESGGGLVQAGGSLRLSCAASGSIFYRGMGWYRQAPGKEREFVATINGGSSTNYADSVKGRFTISRDNAKNTVYLQMNSLKPEDTAVYYCAADYASASLELRALQDAYGYWGQGTQVTVSS

SEQ ID NO: 29783 - protein, 110 aa, Artificial Sequence
  Chemically Synthesized
QVQLQESGGGLVQAGGSLRLSCAASGWMGWYRQAPGKERELVAAIGYGASTNYADSVKGRFTISRDNAKNTVYLQMNSLKPEDTAVYYCAATNTSCSIYWGQGTQVTVSS

SEQ ID NO: 29784 - protein, 125 aa, Artificial Sequence
  Chemically Synthesized
QVQLQESGGGLVQAGGSLRLSCAASGNIFPWRSMGWYRQAPGKEREFVAAIDYGGSTYADSVKGRFTISRDNAKNTVYLQMNSLKPEDTAVYYCAVQPVHYPAYLDVYGRDFYYWGQGTQVTVSS

SEQ ID NO: 29785 - protein, 117 aa, Artificial Sequence
  Chemically Synthesized
QVQLQESGGGLVQAGGSLRLSCAASGNISGVWDMGWYRQAPGKEREFVATIGSGTSTYYADSVKGRFTISRDNAKNTVYLQMNSLKPEDTAVYYCAVVYAYSLVMYWGQGTQVTVSS

SEQ ID NO: 29786 - protein, 118 aa, Artificial Sequence
  Chemically Synthesized
QVQLQESGGGLVQAGGSLRLSCAASGTISQVPTMGWYRQAPGKERELVAAIDGGSSTNYADSVKGRFTISRDNAKNTVYLQMNSLKPEDTAVYYCAVYRDDDPAFHYWGQGTQVTVSS

SEQ ID NO: 29787 - protein, 118 aa, Artificial Sequence
  Chemically Synthesized
QVQLQESGGGLVQAGGSLRLSCAASGNISPTAYMGWYRQAPGKEREFVAAIAWGSSTYYADSVKGRFTISRDNAKNTVYLQMNSLKPEDTAVYYCAVTYRNNYSLPYWGQGTQVTVSS

SEQ ID NO: 29788 - protein, 118 aa, Artificial Sequence
  Chemically Synthesized
QVQLQESGGGLVQAGGSLRLSCAASGYIFLYSRMGWYRQAPGKERELVASISRGATTYYADSVKGRFTISRDNAKNTVYLQMNSLKPEDTAVYYCAATAYDRAGYNYWGQGTQVTVSS

SEQ ID NO: 29789 - protein, 122 aa, Artificial Sequence
  Chemically Synthesized
QVQLQESGGGLVQAGGSLRLSCAASGTISPFSVMGWYRQAPGKERELVATIARGGNTNYADSVKGRFTISRDNAKNTVYLQMNSLKPEDTAVYYCAAGQLKAIGNGDILGYWGQGTQVTVSS

SEQ ID NO: 29790 - protein, 118 aa, Artificial Sequence
  Chemically Synthesized
QVQLQESGGGLVQAGGSLRLSCAASGSIFVTEYMGWYRQAPGKERELVATISYGASTNYADSVKGRFTISRDNAKNTVYLQMNSLKPEDTAVYYCAVRNYAGTYLLYWGQGTQVTVSS

SEQ ID NO: 29791 - protein, 126 aa, Artificial Sequence
  Chemically Synthesized
QVQLQESGGGLVQAGGSLRLSCAASGTIFRGLYMGWYRQAPGKERELVASIDEGSTTNYADSVKGRFTISRDNAKNTVYLQMNSLKPEDTAVYYCAAWPVGNAGYGQAWQSYYWYWGQGTQVTVSS

SEQ ID NO: 29792 - protein, 126 aa, Artificial Sequence
  Chemically Synthesized
QVQLQESGGGLVQAGGSLRLSCAASGSISRLDYMGWYRQAPGKERELVATITYGSNTNYADSVKGRFTISRDNAKNTVYLQMNSLKPEDTAVYYCAAGDGYWDGGYDYDTSPYDYWGQGTQVTVSS

SEQ ID NO: 29793 - protein, 124 aa, Artificial Sequence
  Chemically Synthesized
QVQLQESGGGLVQAGGSLRLSCAASGNISTFRMGWYRQAPGKERELVALLVTVVIPYADSVKGRFTISRDNAKNTVYLQMNSLKPEDTAVYYCAVYARTSFRYYDYVHLYHYYWGQGTQVTVSS

SEQ ID NO: 29794 - protein, 126 aa, Artificial Sequence
  Chemically Synthesized
QVQLQESGGGLVQAGGSLRLSCAASGNIFGYDRMGWYRQAPGKEREFVASITAGSITNYADSVKGRFTISRDNAKNTVYLQMNSLKPEDTAVYYCAVYYSGDSDWTWHYASTFYYWGQGTQVTVSS

SEQ ID NO: 29795 - protein, 118 aa, Artificial Sequence
  Chemically Synthesized
QVQLQESGGGLVQAGGSLRLSCAASGTIFLAFDMGWYRQAPGKERELVAGINVGSNTYYADSVKGRFTISRDNAKNTVYLQMNSLKPEDTAVYYCAVYYRPDAYFQYWGQGTQVTVSS

SEQ ID NO: 29796 - protein, 118 aa, Artificial Sequence
  Chemically Synthesized
QVQLQESGGGLVQAGGSLRLSCAASGYIFSLPRMGWYRQAPGKERELVAGIGRGGSTYYADSVKGRFTISRDNAKNTVYLQMNSLKPEDTAVYYCAARLQAYLYYRYWGQGTQVTVSS

SEQ ID NO: 29797 - protein, 118 aa, Artificial Sequence
  Chemically Synthesized
QVQLQESGGGLVQAGGSLRLSCAASGNISILDVMGWYRQAPGKERELVASINFGGTTNYADSVKGRFTISRDNAKNTVYLQMNSLKPEDTAVYYCAARYRPYTTFVYWGQGTQVTVSS

SEQ ID NO: 29798 - protein, 126 aa, Artificial Sequence
  Chemically Synthesized
QVQLQESGGGLVQAGGSLRLSCAASGYIFLYQFMGWYRQAPGKERELVASIDWGANTYYADSVKGRFTISRDNAKNTVYLQMNSLKPEDTAVYYCAARYSSKDRVSYYYNPFLRYWGQGTQVTVSS

SEQ ID NO: 29799 - protein, 117 aa, Artificial Sequence
  Chemically Synthesized
QVQLQESGGGLVQAGGSLRLSCAASGYISRLAFMGWYRQAPGKEREFVAGINSGGTTNYADSVKGRFTISRDNAKNTVYLQMNSLKPEDTAVYYCAARYPYRWHHYWGQGTQVTVSS

SEQ ID NO: 29800 - protein, 118 aa, Artificial Sequence
  Chemically Synthesized
QVQLQESGGGLVQAGGSLRLSCAASGTIFYQSWMGWYRQAPGKEREFVATIGRGGSTNYADSVKGRFTISRDNAKNTVYLQMNSLKPEDTAVYYCAASQWRRFYHGYWGQGTQVTVSS

SEQ ID NO: 29801 - protein, 118 aa, Artificial Sequence
  Chemically Synthesized
QVQLQESGGGLVQAGGSLRLSCAASGTISGYFFMGWYRQAPGKERELVASINSGTITNYADSVKGRFTISRDNAKNTVYLQMNSLKPEDTAVYYCAAKPAPIYPFYYWGQGTQVTVSS

SEQ ID NO: 29802 - protein, 129 aa, Artificial Sequence
  Chemically Synthesized
QVQLQESGGGLVQAGGSLRLSCAASGNISYVWWMGWYRQAPGKERELVAAINSGATTYYADSVKGRFTISRDNAKNTVYLQMNSLKPEDTAVYYCAVSYAGLDRRVADSLINYHPFRYWGQGTQVTVSS

SEQ ID NO: 29803 - protein, 118 aa, Artificial Sequence
  Chemically Synthesized
QVQLQESGGGLVQAGGSLRLSCAASGNISTYGGMGWYRQAPGKEREFVAAIAWGAITNYADSVKGRFTISRDNAKNTVYLQMNSLKPEDTAVYYCAVTKYIYYRFPYWGQGTQVTVSS

SEQ ID NO: 29804 - protein, 118 aa, Artificial Sequence
  Chemically Synthesized
QVQLQESGGGLVQAGGSLRLSCAASGSIFVDQRMGWYRQAPGKERELVATIDNGTSTNYADSVKGRFTISRDNAKNTVYLQMNSLKPEDTAVYYCAAAHDYYISFPYWGQGTQVTVSS

SEQ ID NO: 29805 - protein, 118 aa, Artificial Sequence
  Chemically Synthesized
QVQLQESGGGLVQAGGSLRLSCAASGSIFSFFYMGWYRQAPGKERELVAAITLGTSTYYADSVKGRFTISRDNAKNTVYLQMNSLKPEDTAVYYCAAYRGFDLWHGYWGQGTQVTVSS

SEQ ID NO: 29806 - protein, 118 aa, Artificial Sequence
  Chemically Synthesized
QVQLQESGGGLVQAGGSLRLSCAASGYISYYTRMGWYRQAPGKERELVASIDGGANTNYADSVKGRFTISRDNAKNTVYLQMNSLKPEDTAVYYCAASYGYILRHIYWGQGTQVTVSS

SEQ ID NO: 29807 - protein, 117 aa, Artificial Sequence
  Chemically Synthesized
QVQLQESGGGLVQAGGSLRLSCAASGSIFTVTMGWYRQAPGKERELVATITLGGNTYYADSVKGRFTISRDNAKNTVYLQMNSLKPEDTAVYYCAVAIPPITYFPYWGQGTQVTVSS

SEQ ID NO: 29808 - protein, 126 aa, Artificial Sequence
  Chemically Synthesized
QVQLQESGGGLVQAGGSLRLSCAASGNISRIGWMGWYRQAPGKEREFVATITPGGSTNYADSVKGRFTISRDNAKNTVYLQMNSLKPEDTAVYYCAVRPRSGYRLSDTGYDDYGYWGQGTQVTVSS

SEQ ID NO: 29809 - protein, 122 aa, Artificial Sequence
  Chemically Synthesized
QVQLQESGGGLVQAGGSLRLSCAASGNIFGVERMGWYRQAPGKERELVAGIGQGGNTYYADSVKGRFTISRDNAKNTVYLQMNSLKPEDTAVYYCAVGPDDTYYAVYWHDYWGQGTQVTVSS

SEQ ID NO: 29810 - protein, 117 aa, Artificial Sequence
  Chemically Synthesized
QVQLQESGGGLVQAGGSLRLSCAASGSISYDKPMGWYRQAPGKEREFVASIDNGGITNYADSVKGRFTISRDNAKNTVYLQMNSLKPEDTAVYYCAVTYYYSYHGYWGQGTQVTVSS

SEQ ID NO: 29811 - protein, 117 aa, Artificial Sequence
  Chemically Synthesized
QVQLQESGGGLVQAGGSLRLSCAASGSIFTVLMGWYRQAPGKEREFVASIGWGGSTNYADSVKGRFTISRDNAKNTVYLQMNSLKPEDTAVYYCAAGINPYVYLQYWGQGTQVTVSS

SEQ ID NO: 29812 - protein, 118 aa, Artificial Sequence
  Chemically Synthesized
QVQLQESGGGLVQAGGSLRLSCAASGSISWPEDMGWYRQAPGKERELVATISDGSTTNYADSVKGRFTISRDNAKNTVYLQMNSLKPEDTAVYYCAVYDPTRYIFYYWGQGTQVTVSS

SEQ ID NO: 29813 - protein, 126 aa, Artificial Sequence
  Chemically Synthesized
QVQLQESGGGLVQAGGSLRLSCAASGNISWEWKMGWYRQAPGKERELVAAISAGANTYYADSVKGRFTISRDNAKNTVYLQMNSLKPEDTAVYYCAAQFDVYYDAWNYYQWTLYYWGQGTQVTVSS

SEQ ID NO: 29814 - protein, 122 aa, Artificial Sequence
  Chemically Synthesized
QVQLQESGGGLVQAGGSLRLSCAASGSISYGDFMGWYRQAPGKERELVAGIGYGASTYYADSVKGRFTISRDNAKNTVYLQMNSLKPEDTAVYYCAAEGYLITYDYDQYRYWGQGTQVTVSS

SEQ ID NO: 29815 - protein, 114 aa, Artificial Sequence
  Chemically Synthesized
QVQLQESGGGLVQAGGSLRLSCAASGNISPYRLMGWYRQAPGKEREFVASIGEGSNTNYADSVKGRFTISRDNAKNTVYLQMNSLKPEDTAVYYCAAFAYHRYWGQGTQVTVSS

SEQ ID NO: 29816 - protein, 111 aa, Artificial Sequence
  Chemically Synthesized
QVQLQESGGGLVQAGGSLRLSCAASGSISWYSYMGWYRQAPGKERELVASINGGSITYYADSVKGRFTISRDNAKNTVYLQMNSLKPEDTAVYYCAAHAYWGQGTQVTVSS

SEQ ID NO: 29817 - protein, 117 aa, Artificial Sequence
  Chemically Synthesized
QVQLQESGGGLVQAGGSLRLSCAASGSIFGWYGMGWYRQAPGKERELVATISYGTTTNYADSVKGRFTISRDNAKNTVYLQMNSLKPEDTAVYYCAVKVSSFTRHYWGQGTQVTVSS

SEQ ID NO: 29818 - protein, 118 aa, Artificial Sequence
  Chemically Synthesized
QVQLQESGGGLVQAGGSLRLSCAASGNIFGYTNMGWYRQAPGKERELVASIAYGGNTYYADSVKGRFTISRDNAKNTVYLQMNSLKPEDTAVYYCAAWRDYVLAHVYWGQGTQVTVSS

SEQ ID NO: 29819 - protein, 116 aa, Artificial Sequence
  Chemically Synthesized
QVQLQESGGGLVQAGGSLRLSCAASGNISRYYQMGWYRQAPGKEREFVASIGAGGNTYYADSVKGRFTISRDNAKNTVYLQMNSLKPEDTAVYYCAVAYYREHYYWGQGTQVTVSS

SEQ ID NO: 29820 - protein, 111 aa, Artificial Sequence
  Chemically Synthesized
QVQLQESGGGLVQAGGSLRLSCAASGNISPSEGMGWYRQAPGKERELVATITWGTITNYADSVKGRFTISRDNAKNTVYLQMNSLKPEDTAVYYCAATMYWGQGTQVTVSS

SEQ ID NO: 29821 - protein, 118 aa, Artificial Sequence
  Chemically Synthesized
QVQLQESGGGLVQAGGSLRLSCAASGSISVYFYMGWYRQAPGKERELVAGIANGAITNYADSVKGRFTISRDNAKNTVYLQMNSLKPEDTAVYYCAVSFPDDFGLRYWGQGTQVTVSS

SEQ ID NO: 29822 - protein, 126 aa, Artificial Sequence
  Chemically Synthesized
QVQLQESGGGLVQAGGSLRLSCAASGNISRYDLMGWYRQAPGKERELVAAIGVGTSTYYADSVKGRFTISRDNAKNTVYLQMNSLKPEDTAVYYCAAPRYANPDAYAFNDGELIYWGQGTQVTVSS

SEQ ID NO: 29823 - protein, 118 aa, Artificial Sequence
  Chemically Synthesized
QVQLQESGGGLVQAGGSLRLSCAASGNISSARFMGWYRQAPGKEREFVAAIAHGANTYYADSVKGRFTISRDNAKNTVYLQMNSLKPEDTAVYYCAAIYNAGSEYWYWGQGTQVTVSS

SEQ ID NO: 29824 - protein, 122 aa, Artificial Sequence
  Chemically Synthesized
QVQLQESGGGLVQAGGSLRLSCAASGNISLYSVMGWYRQAPGKEREFVATISYGSSTYYADSVKGRFTISRDNAKNTVYLQMNSLKPEDTAVYYCAARPGGYILYRDGFAYWGQGTQVTVSS

SEQ ID NO: 29825 - protein, 122 aa, Artificial Sequence
  Chemically Synthesized
QVQLQESGGGLVQAGGSLRLSCAASGYIFFATYMGWYRQAPGKERELVATIDYGGNTNYADSVKGRFTISRDNAKNTVYLQMNSLKPEDTAVYYCAAVYVSPYGGYAAHVYWGQGTQVTVSS

SEQ ID NO: 29826 - protein, 121 aa, Artificial Sequence
  Chemically Synthesized
QVQLQESGGGLVQAGGSLRLSCAASGNISYDYDMGWYRQAPGKEREFVASINGGSTTYYADSVKGRFTISRDNAKNTVYLQMNSLKPEDTAVYYCAVKRDSGPYYDNHWYWGQGTQVTVSS

SEQ ID NO: 29827 - protein, 126 aa, Artificial Sequence
  Chemically Synthesized
QVQLQESGGGLVQAGGSLRLSCAASGNIFSRVWMGWYRQAPGKEREFVASISGGGNTNYADSVKGRFTISRDNAKNTVYLQMNSLKPEDTAVYYCAVGFWLDEYTSELTYDILTYWGQGTQVTVSS

SEQ ID NO: 29828 - protein, 126 aa, Artificial Sequence
  Chemically Synthesized
QVQLQESGGGLVQAGGSLRLSCAASGYIFYRVHMGWYRQAPGKERELVAAITTGANTNYADSVKGRFTISRDNAKNTVYLQMNSLKPEDTAVYYCAVADATWDYSREYGVSHHDYWGQGTQVTVSS

SEQ ID NO: 29829 - protein, 118 aa, Artificial Sequence
  Chemically Synthesized
QVQLQESGGGLVQAGGSLRLSCAASGSISARNYMGWYRQAPGKEREFVASITDGGNTYYADSVKGRFTISRDNAKNTVYLQMNSLKPEDTAVYYCAVRSFKKSTFVYWGQGTQVTVSS

SEQ ID NO: 29830 - protein, 118 aa, Artificial Sequence
  Chemically Synthesized
QVQLQESGGGLVQAGGSLRLSCAASGSISRYYYMGWYRQAPGKERELVASIAIGTITYYADSVKGRFTISRDNAKNTVYLQMNSLKPEDTAVYYCAAESIYPVDLYYWGQGTQVTVSS

SEQ ID NO: 29831 - protein, 118 aa, Artificial Sequence
  Chemically Synthesized
QVQLQESGGGLVQAGGSLRLSCAASGSIFHRSPMGWYRQAPGKERELVAAISYGSSTNYADSVKGRFTISRDNAKNTVYLQMNSLKPEDTAVYYCAAKGLPSDSLYYWGQGTQVTVSS

SEQ ID NO: 29832 - protein, 118 aa, Artificial Sequence
  Chemically Synthesized
QVQLQESGGGLVQAGGSLRLSCAASGTISALGVMGWYRQAPGKEREFVATISTGAITNYADSVKGRFTISRDNAKNTVYLQMNSLKPEDTAVYYCAADVYPVQDHGYWGQGTQVTVSS

SEQ ID NO: 29833 - protein, 118 aa, Artificial Sequence
  Chemically Synthesized
QVQLQESGGGLVQAGGSLRLSCAASGTIFTLPAMGWYRQAPGKEREFVAAITTGANTYYADSVKGRFTISRDNAKNTVYLQMNSLKPEDTAVYYCAAFSTDGYVHIYWGQGTQVTVSS

SEQ ID NO: 29834 - protein, 118 aa, Artificial Sequence
  Chemically Synthesized
QVQLQESGGGLVQAGGSLRLSCAASGSIFYGGFMGWYRQAPGKEREFVASIGSGGNTYYADSVKGRFTISRDNAKNTVYLQMNSLKPEDTAVYYCAAQHLLFRIHDYWGQGTQVTVSS

SEQ ID NO: 29835 - protein, 118 aa, Artificial Sequence
  Chemically Synthesized
QVQLQESGGGLVQAGGSLRLSCAASGNIFVYAGMGWYRQAPGKEREFVATINAGSTTNYADSVKGRFTISRDNAKNTVYLQMNSLKPEDTAVYYCAVFGQTGRDHAYWGQGTQVTVSS

SEQ ID NO: 29836 - protein, 118 aa, Artificial Sequence
  Chemically Synthesized
QVQLQESGGGLVQAGGSLRLSCAASGTISRPYRMGWYRQAPGKEREFVASINLGSSTNYADSVKGRFTISRDNAKNTVYLQMNSLKPEDTAVYYCAATGYYGNYLRYWGQGTQVTVSS

SEQ ID NO: 29837 - protein, 120 aa, Artificial Sequence
  Chemically Synthesized
QVQLQESGGGLVQAGGSLRLSCAASGSISDRDPMGWYRQAPGKEREFVASIDNGGNTNYADSVKGRFTISRDNAKNTVYLQMNSLKPEDTAVYYCAANIRGSNTDIHYYWGQGTQVTVSS

SEQ ID NO: 29838 - protein, 126 aa, Artificial Sequence
  Chemically Synthesized
QVQLQESGGGLVQAGGSLRLSCAASGTISRVPYMGWYRQAPGKEREFVASIGTGGSTNYADSVKGRFTISRDNAKNTVYLQMNSLKPEDTAVYYCAVYFGTGDPQDRLEPSRHRYWGQGTQVTVSS

SEQ ID NO: 29839 - protein, 118 aa, Artificial Sequence
  Chemically Synthesized
QVQLQESGGGLVQAGGSLRLSCAASGNISSPIFMGWYRQAPGKERELVAAITYGGITYYADSVKGRFTISRDNAKNTVYLQMNSLKPEDTAVYYCAASGDAYPTHNYWGQGTQVTVSS

SEQ ID NO: 29840 - protein, 122 aa, Artificial Sequence
  Chemically Synthesized
QVQLQESGGGLVQAGGSLRLSCAASGNIFTAVQMGWYRQAPGKEREFVATISAGGTTNYADSVKGRFTISRDNAKNTVYLQMNSLKPEDTAVYYCAARPIGRYFYPRDYIYWGQGTQVTVSS

SEQ ID NO: 29841 - protein, 126 aa, Artificial Sequence
  Chemically Synthesized
QVQLQESGGGLVQAGGSLRLSCAASGSISHSTFMGWYRQAPGKEREFVAGISYGGNTYYADSVKGRFTISRDNAKNTVYLQMNSLKPEDTAVYYCAAADTYQIYQPRVYDDRHPYWGQGTQVTVSS

SEQ ID NO: 29842 - protein, 121 aa, Artificial Sequence
  Chemically Synthesized
QVQLQESGGGLVQAGGSLRLSCAASGTISASLMGWYRQAPGKEREFVAAISDGANTNYADSVKGRFTISRDNAKNTVYLQMNSLKPEDTAVYYCAAYYDDDYVTDSTYSYWGQGTQVTVSS

SEQ ID NO: 29843 - protein, 118 aa, Artificial Sequence
  Chemically Synthesized
QVQLQESGGGLVQAGGSLRLSCAASGTIFGGYGMGWYRQAPGKERELVATIGPGSNTNYADSVKGRFTISRDNAKNTVYLQMNSLKPEDTAVYYCAVALRPGPYFGYWGQGTQVTVSS

SEQ ID NO: 29844 - protein, 118 aa, Artificial Sequence
  Chemically Synthesized
QVQLQESGGGLVQAGGSLRLSCAASGTISYRADMGWYRQAPGKEREFVASINGGANTYYADSVKGRFTISRDNAKNTVYLQMNSLKPEDTAVYYCAAYGPVTLFLDYWGQGTQVTVSS

SEQ ID NO: 29845 - protein, 118 aa, Artificial Sequence
  Chemically Synthesized
QVQLQESGGGLVQAGGSLRLSCAASGNISIPTLMGWYRQAPGKEREFVASINAGTTTYYADSVKGRFTISRDNAKNTVYLQMNSLKPEDTAVYYCAVSYLWDLLHPYWGQGTQVTVSS

SEQ ID NO: 29846 - protein, 122 aa, Artificial Sequence
  Chemically Synthesized
QVQLQESGGGLVQAGGSLRLSCAASGTISALIYMGWYRQAPGKEREFVASITYGSTTNYADSVKGRFTISRDNAKNTVYLQMNSLKPEDTAVYYCAAWYYRLVDGSIQLAYWGQGTQVTVSS

SEQ ID NO: 29847 - protein, 119 aa, Artificial Sequence
  Chemically Synthesized
QVQLQESGGGLVQAGGSLRLSCAASGTIFQDDLMGWYRQAPGKEREFVAGINSGTNTNYADSVKGRFTISRDNAKNTVYLQMNSLKPEDTAVYYCAAEPYFYPAWLDYWGQGTQVTVSS

SEQ ID NO: 29848 - protein, 122 aa, Artificial Sequence
  Chemically Synthesized
QVQLQESGGGLVQAGGSLRLSCAASGYISTRIIMGWYRQAPGKEREFVASISVGSTTNYADSVKGRFTISRDNAKNTVYLQMNSLKPEDTAVYYCAVDRTDGDYTYHPHYYWGQGTQVTVSS

SEQ ID NO: 29849 - protein, 115 aa, Artificial Sequence
  Chemically Synthesized
QVQLQESGGGLVQAGGSLRLSCAASGTISRDRDMGWYRQAPGKEREFVAAIGFGTITNYADSVKGRFTISRDNAKNTVYLQMNSLKPEDTAVYYCAARTYGVLYWGQGTQVTVSS

SEQ ID NO: 29850 - protein, 118 aa, Artificial Sequence
  Chemically Synthesized
QVQLQESGGGLVQAGGSLRLSCAASGNIFYYSYMGWYRQAPGKERELVASIADGSTTNYADSVKGRFTISRDNAKNTVYLQMNSLKPEDTAVYYCAVYYFADPYYYYWGQGTQVTVSS

SEQ ID NO: 29851 - protein, 118 aa, Artificial Sequence
  Chemically Synthesized
QVQLQESGGGLVQAGGSLRLSCAASGTISLRALMGWYRQAPGKEREFVAGITSGGSTYYADSVKGRFTISRDNAKNTVYLQMNSLKPEDTAVYYCAAINVNDYPYGYWGQGTQVTVSS

SEQ ID NO: 29852 - protein, 118 aa, Artificial Sequence
  Chemically Synthesized
QVQLQESGGGLVQAGGSLRLSCAASGNISTYLYMGWYRQAPGKERELVAGIARGSTTYYADSVKGRFTISRDNAKNTVYLQMNSLKPEDTAVYYCAVQIDRYDVHGYWGQGTQVTVSS

SEQ ID NO: 29853 - protein, 122 aa, Artificial Sequence
  Chemically Synthesized
QVQLQESGGGLVQAGGSLRLSCAASGSIFGVRYMGWYRQAPGKEREFVAGITLGTSTNYADSVKGRFTISRDNAKNTVYLQMNSLKPEDTAVYYCAAYYLKRHSYTLEYWYWGQGTQVTVSS

SEQ ID NO: 29854 - protein, 117 aa, Artificial Sequence
  Chemically Synthesized
QVQLQESGGGLVQAGGSLRLSCAASGTIFDYDFMGWYRQAPGKERELVATIARGGNTYYADSVKGRFTISRDNAKNTVYLQMNSLKPEDTAVYYCAVTGYTEDYAYWGQGTQVTVSS

SEQ ID NO: 29855 - protein, 122 aa, Artificial Sequence
  Chemically Synthesized
QVQLQESGGGLVQAGGSLRLSCAASGTISYEVAMGWYRQAPGKERELVASITTGGITYYADSVKGRFTISRDNAKNTVYLQMNSLKPEDTAVYYCAAIRRPSEDSGWGYVYWGQGTQVTVSS

SEQ ID NO: 29856 - protein, 118 aa, Artificial Sequence
  Chemically Synthesized
QVQLQESGGGLVQAGGSLRLSCAASGNISVVAFMGWYRQAPGKERELVAAITTGGSTYYADSVKGRFTISRDNAKNTVYLQMNSLKPEDTAVYYCAANTYYAGVHTYWGQGTQVTVSS

SEQ ID NO: 29857 - protein, 117 aa, Artificial Sequence
  Chemically Synthesized
QVQLQESGGGLVQAGGSLRLSCAASGNIFYDVDMGWYRQAPGKERELVAALLLVLLPYADSVKGRFTISRDNAKNTVYLQMNSLKPEDTAVYYCAVVGADEDPFDYWGQGTQVTVSS

SEQ ID NO: 29858 - protein, 118 aa, Artificial Sequence
  Chemically Synthesized
QVQLQESGGGLVQAGGSLRLSCAASGTISWAYSMGWYRQAPGKEREFVAAIDPGAITYYADSVKGRFTISRDNAKNTVYLQMNSLKPEDTAVYYCAAYTGGGPPLTYWGQGTQVTVSS

SEQ ID NO: 29859 - protein, 121 aa, Artificial Sequence
  Chemically Synthesized
QVQLQESGGGLVQAGGSLRLSCAASGTIFQPTKMGWYRQAPGKERELVASIGSVVVPYADSVKGRFTISRDNAKNTVYLQMNSLKPEDTAVYYCAAWYYAGYDYGHWHTYWGQGTQVTVSS

SEQ ID NO: 29860 - protein, 126 aa, Artificial Sequence
  Chemically Synthesized
QVQLQESGGGLVQAGGSLRLSCAASGNIFQYYLMGWYRQAPGKERELVAAISTGGITYYADSVKGRFTISRDNAKNTVYLQMNSLKPEDTAVYYCAVDPDDSGYVEYRKQALYGYWGQGTQVTVSS

SEQ ID NO: 29861 - protein, 122 aa, Artificial Sequence
  Chemically Synthesized
QVQLQESGGGLVQAGGSLRLSCAASGTIFPAGGMGWYRQAPGKEREFVASISDGTNTNYADSVKGRFTISRDNAKNTVYLQMNSLKPEDTAVYYCAARRYNLNAQLIALYYWGQGTQVTVSS

SEQ ID NO: 29862 - protein, 119 aa, Artificial Sequence
  Chemically Synthesized
QVQLQESGGGLVQAGGSLRLSCAASGTISGSIIMGWYRQAPGKEREFVASIADGTTTYYADSVKGRFTISRDNAKNTVYLQMNSLKPEDTAVYYCAVYFAGRSDSLSYWGQGTQVTVSS

SEQ ID NO: 29863 - protein, 118 aa, Artificial Sequence
  Chemically Synthesized
QVQLQESGGGLVQAGGSLRLSCAASGNISQYYIMGWYRQAPGKERELVAAISYGASTYYADSVKGRFTISRDNAKNTVYLQMNSLKPEDTAVYYCAVPYRWQRNHTYWGQGTQVTVSS

SEQ ID NO: 29864 - protein, 112 aa, Artificial Sequence
  Chemically Synthesized
QVQLQESGGGLVQAGGSLRLSCAASGNISVADFMGWYRQAPGKERELVAAISYGGITNYADSVKGRFTISRDNAKNTVYLQMNSLKPEDTAVYYCAASLMYWGQGTQVTVSS

SEQ ID NO: 29865 - protein, 121 aa, Artificial Sequence
  Chemically Synthesized
QVQLQESGGGLVQAGGSLRLSCAASGNISSSYNMGWYRQAPGKERELVATIDLGGNTYYADSVKGRFTISRDNAKNTVYLQMNSLKPEDTAVYYCAVRLYTSERWYYLGYWGQGTQVTVSS

SEQ ID NO: 29866 - protein, 118 aa, Artificial Sequence
  Chemically Synthesized
QVQLQESGGGLVQAGGSLRLSCAASGSISSHAWMGWYRQAPGKERELVASITPGGSTYYADSVKGRFTISRDNAKNTVYLQMNSLKPEDTAVYYCAAGRYDNDNYEYWGQGTQVTVSS

SEQ ID NO: 29867 - protein, 122 aa, Artificial Sequence
  Chemically Synthesized
QVQLQESGGGLVQAGGSLRLSCAASGTIFAYEVMGWYRQAPGKERELVAGITTGGITNYADSVKGRFTISRDNAKNTVYLQMNSLKPEDTAVYYCAVDRYSRWDYDDVYYYWGQGTQVTVSS

SEQ ID NO: 29868 - protein, 118 aa, Artificial Sequence
  Chemically Synthesized
QVQLQESGGGLVQAGGSLRLSCAASGYISSGILMGWYRQAPGKEREFVAAITYGGTTNYADSVKGRFTISRDNAKNTVYLQMNSLKPEDTAVYYCAVDVDTTVDHYYWGQGTQVTVSS

SEQ ID NO: 29869 - protein, 122 aa, Artificial Sequence
  Chemically Synthesized
QVQLQESGGGLVQAGGSLRLSCAASGTIFDVYYMGWYRQAPGKEREFVASIGTGTSTNYADSVKGRFTISRDNAKNTVYLQMNSLKPEDTAVYYCAVYGETSWQTNRVHGYWGQGTQVTVSS

SEQ ID NO: 29870 - protein, 117 aa, Artificial Sequence
  Chemically Synthesized
QVQLQESGGGLVQAGGSLRLSCAASGTIFDLSMGWYRQAPGKERELVAGIGYGATTNYADSVKGRFTISRDNAKNTVYLQMNSLKPEDTAVYYCAVQLTVRRDYRYWGQGTQVTVSS

SEQ ID NO: 29871 - protein, 118 aa, Artificial Sequence
  Chemically Synthesized
QVQLQESGGGLVQAGGSLRLSCAASGSISRAYYMGWYRQAPGKEREFVASIDGGATTYYADSVKGRFTISRDNAKNTVYLQMNSLKPEDTAVYYCAVSFRAGTLHAYWGQGTQVTVSS

SEQ ID NO: 29872 - protein, 111 aa, Artificial Sequence
  Chemically Synthesized
QVQLQESGGGLVQAGGSLRLSCAASGTISGGYGMGWYRQAPGKERELVAGIVTVVLPYADSVKGRFTISRDNAKNTVYLQMNSLKPEDTAVYYCAAIDLYWGQGTQVTVSS

SEQ ID NO: 29873 - protein, 122 aa, Artificial Sequence
  Chemically Synthesized
QVQLQESGGGLVQAGGSLRLSCAASGTIFEGYGMGWYRQAPGKERELVATISIGSITNYADSVKGRFTISRDNAKNTVYLQMNSLKPEDTAVYYCAADRHYRRGAWPRYRYWGQGTQVTVSS

SEQ ID NO: 29874 - protein, 117 aa, Artificial Sequence
  Chemically Synthesized
QVQLQESGGGLVQAGGSLRLSCAASGTIFNVGYMGWYRQAPGKEREFVAGINSVVIPYADSVKGRFTISRDNAKNTVYLQMNSLKPEDTAVYYCAVDVDYAVQYDYWGQGTQVTVSS

SEQ ID NO: 29875 - protein, 116 aa, Artificial Sequence
  Chemically Synthesized
QVQLQESGGGLVQAGGSLRLSCAASGRMGWYRQAPGKERELVAAITAGASTNYADSVKGRFTISRDNAKNTVYLQMNSLKPEDTAVYYCAAGADPVAGDTSVHGYWGQGTQVTVSS

SEQ ID NO: 29876 - protein, 118 aa, Artificial Sequence
  Chemically Synthesized
QVQLQESGGGLVQAGGSLRLSCAASGYISELDSMGWYRQAPGKEREFVAAIGYGTTTYYADSVKGRFTISRDNAKNTVYLQMNSLKPEDTAVYYCAVPSDYSDPYVYWGQGTQVTVSS

SEQ ID NO: 29877 - protein, 123 aa, Artificial Sequence
  Chemically Synthesized
QVQLQESGGGLVQAGGSLRLSCAASGNISPAYIMGWYRQAPGKERELVASIGSGTNTYYADSVKGRFTISRDNAKNTVYLQMNSLKPEDTAVYYCAAPGAYRELGPIDYGGYWGQGTQVTVSS

SEQ ID NO: 29878 - protein, 118 aa, Artificial Sequence
  Chemically Synthesized
QVQLQESGGGLVQAGGSLRLSCAASGTISEADLMGWYRQAPGKEREFVASITFGANTNYADSVKGRFTISRDNAKNTVYLQMNSLKPEDTAVYYCAAWYDAIRSLYYWGQGTQVTVSS

SEQ ID NO: 29879 - protein, 118 aa, Artificial Sequence
  Chemically Synthesized
QVQLQESGGGLVQAGGSLRLSCAASGTISSADWMGWYRQAPGKERELVASINSGGSTNYADSVKGRFTISRDNAKNTVYLQMNSLKPEDTAVYYCAVNKIDVHDHSYWGQGTQVTVSS

SEQ ID NO: 29880 - protein, 116 aa, Artificial Sequence
  Chemically Synthesized
QVQLQESGGGLVQAGGSLRLSCAASGNIFSTMGWYRQAPGKERELVASITYGTTTNYADSVKGRFTISRDNAKNTVYLQMNSLKPEDTAVYYCAAEQQYFNGHRYWGQGTQVTVSS

SEQ ID NO: 29881 - protein, 121 aa, Artificial Sequence
  Chemically Synthesized
QVQLQESGGGLVQAGGSLRLSCAASGSISNQRYYMGWYRQAPGKERELVAGINSVLLPYADSVKGRFTISRDNAKNTVYLQMNSLKPEDTAVYYCAVQNYFPYYEYYSYYWGQGTQVTVSS

SEQ ID NO: 29882 - protein, 122 aa, Artificial Sequence
  Chemically Synthesized
QVQLQESGGGLVQAGGSLRLSCAASGSIFYGDYMGWYRQAPGKERELVASIGGGGTTYYADSVKGRFTISRDNAKNTVYLQMNSLKPEDTAVYYCAVHWYDGLHDARWYAYWGQGTQVTVSS

SEQ ID NO: 29883 - protein, 122 aa, Artificial Sequence
  Chemically Synthesized
QVQLQESGGGLVQAGGSLRLSCAASGYIFLWYYMGWYRQAPGKEREFVATIGGGAITNYADSVKGRFTISRDNAKNTVYLQMNSLKPEDTAVYYCAARDDAVGYLESYHFYWGQGTQVTVSS

SEQ ID NO: 29884 - protein, 125 aa, Artificial Sequence
  Chemically Synthesized
QVQLQESGGGLVQAGGSLRLSCAASGSISDVSMGWYRQAPGKERELVASITYGSNTNYADSVKGRFTISRDNAKNTVYLQMNSLKPEDTAVYYCAVRYYDTDWGINIGEPYHDYWGQGTQVTVSS

SEQ ID NO: 29885 - protein, 118 aa, Artificial Sequence
  Chemically Synthesized
QVQLQESGGGLVQAGGSLRLSCAASGNIFWVHYMGWYRQAPGKERELVAAIAGGTITNYADSVKGRFTISRDNAKNTVYLQMNSLKPEDTAVYYCAVDKVTGERHVYWGQGTQVTVSS

SEQ ID NO: 29886 - protein, 126 aa, Artificial Sequence
  Chemically Synthesized
QVQLQESGGGLVQAGGSLRLSCAASGYIFDGDGMGWYRQAPGKERELVASIGVGGSTYYADSVKGRFTISRDNAKNTVYLQMNSLKPEDTAVYYCAVDYGVVRRLYDDDAVSHAYWGQGTQVTVSS

SEQ ID NO: 29887 - protein, 117 aa, Artificial Sequence
  Chemically Synthesized
QVQLQESGGGLVQAGGSLRLSCAASGTISNWSDMGWYRQAPGKEREFVAGIGYGGTTNYADSVKGRFTISRDNAKNTVYLQMNSLKPEDTAVYYCALFCLSTWTIYWGQGTQVTVSS

SEQ ID NO: 29888 - protein, 117 aa, Artificial Sequence
  Chemically Synthesized
QVQLQESGGGLVQAGGSLRLSCAASGNISHLYHMGWYRQAPGKERELVAGIGYGGNTNYADSVKGRFTISRDNAKNTVYLQMNSLKPEDTAVYYCAVWTYAYDCIYWGQGTQVTVSS

SEQ ID NO: 29889 - protein, 125 aa, Artificial Sequence
  Chemically Synthesized
QVQLQESGGGLVQAGGSLRLSCAASGTISYADAMGWYRQAPGKEREFVAGISYGGTTNYADSVKGRFTISRDNAKNTVYLQMNSLKPEDTAVYYCAAYGLWLQYHDDNFPGSLYWGQGTQVTVSS

SEQ ID NO: 29890 - protein, 118 aa, Artificial Sequence
  Chemically Synthesized
QVQLQESGGGLVQAGGSLRLSCAASGNIFFRRGMGWYRQAPGKEREFVASIDYGGSTYYADSVKGRFTISRDNAKNTVYLQMNSLKPEDTAVYYCAVRSYLLYDHRYWGQGTQVTVSS

SEQ ID NO: 29891 - protein, 124 aa, Artificial Sequence
  Chemically Synthesized
QVQLQESGGGLVQAGGSLRLSCAASGSISNVYYMGWYRQAPGKEREFVAVLILVLLPYADSVKGRFTISRDNAKNTVYLQMNSLKPEDTAVYYCAVPKPLYGSPGQGYTGRYYWGQGTQVTVSS

SEQ ID NO: 29892 - protein, 122 aa, Artificial Sequence
  Chemically Synthesized
QVQLQESGGGLVQAGGSLRLSCAASGYISGGGTMGWYRQAPGKERELVAGISEGSITNYADSVKGRFTISRDNAKNTVYLQMNSLKPEDTAVYYCAVKWYYRHGQVASHYYWGQGTQVTVSS

SEQ ID NO: 29893 - protein, 120 aa, Artificial Sequence
  Chemically Synthesized
QVQLQESGGGLVQAGGSLRLSCAASGNIFRVTMGWYRQAPGKERELVASIGSGSTTYYADSVKGRFTISRDNAKNTVYLQMNSLKPEDTAVYYCAVEPRTQDQATYQLYWGQGTQVTVSS

SEQ ID NO: 29894 - protein, 122 aa, Artificial Sequence
  Chemically Synthesized
QVQLQESGGGLVQAGGSLRLSCAASGNISSIGRMGWYRQAPGKERELVAAIDAGGTTYYADSVKGRFTISRDNAKNTVYLQMNSLKPEDTAVYYCAVVATALFGYVGGHKYWGQGTQVTVSS

SEQ ID NO: 29895 - protein, 118 aa, Artificial Sequence
  Chemically Synthesized
QVQLQESGGGLVQAGGSLRLSCAASGTIFYRRAMGWYRQAPGKERELVASIDRGGTTYYADSVKGRFTISRDNAKNTVYLQMNSLKPEDTAVYYCAADWVRGSPHYYWGQGTQVTVSS

SEQ ID NO: 29896 - protein, 117 aa, Artificial Sequence
  Chemically Synthesized
QVQLQESGGGLVQAGGSLRLSCAASGTIFSAIDMGWYRQAPGKEREFVASIASVLLPYADSVKGRFTISRDNAKNTVYLQMNSLKPEDTAVYYCAVIGYADSWYPYWGQGTQVTVSS

SEQ ID NO: 29897 - protein, 122 aa, Artificial Sequence
  Chemically Synthesized
QVQLQESGGGLVQAGGSLRLSCAASGTISAHDYMGWYRQAPGKEREFVATINVGSTTNYADSVKGRFTISRDNAKNTVYLQMNSLKPEDTAVYYCAVGRRWDGDYYDWYDYWGQGTQVTVSS

SEQ ID NO: 29898 - protein, 117 aa, Artificial Sequence
  Chemically Synthesized
QVQLQESGGGLVQAGGSLRLSCAASGIFLLSLMGWYRQAPGKEREFVAGIDSGATTYYADSVKGRFTISRDNAKNTVYLQMNSLKPEDTAVYYCAAAYYYPGWHYYWGQGTQVTVSS

SEQ ID NO: 29899 - protein, 124 aa, Artificial Sequence
  Chemically Synthesized
QVQLQESGGGLVQAGGSLRLSCAASGNIFVLTDMGWYRQAPGKERELVAAIAWYYQYADSVKGRFTISRDNAKNTVYLQMNSLKPEDTAVYYCAAEQDTGYWGPSQYSGLHDYWGQGTQVTVSS

SEQ ID NO: 29900 - protein, 121 aa, Artificial Sequence
  Chemically Synthesized
QVQLQESGGGLVQAGGSLRLSCAASGTISYTYMGWYRQAPGKERELVASIDAGATTNYADSVKGRFTISRDNAKNTVYLQMNSLKPEDTAVYYCAVRPPDYGGDRNTLVYWGQGTQVTVSS

SEQ ID NO: 29901 - protein, 126 aa, Artificial Sequence
  Chemically Synthesized
QVQLQESGGGLVQAGGSLRLSCAASGYISSVRYMGWYRQAPGKEREFVASIAIGANTNYADSVKGRFTISRDNAKNTVYLQMNSLKPEDTAVYYCAVWYDAPADYYRRVVDTHYYWGQGTQVTVSS

SEQ ID NO: 29902 - protein, 118 aa, Artificial Sequence
  Chemically Synthesized
QVQLQESGGGLVQAGGSLRLSCAASGNIFYVARMGWYRQAPGKERELVAGIAGGATTYYADSVKGRFTISRDNAKNTVYLQMNSLKPEDTAVYYCAVRTDLYSYYYYWGQGTQVTVSS

SEQ ID NO: 29903 - protein, 118 aa, Artificial Sequence
  Chemically Synthesized
QVQLQESGGGLVQAGGSLRLSCAASGTISYTLAMGWYRQAPGKERELVASISYGAITYYADSVKGRFTISRDNAKNTVYLQMNSLKPEDTAVYYCAVVAYVYTGHTYWGQGTQVTVSS

SEQ ID NO: 29904 - protein, 119 aa, Artificial Sequence
  Chemically Synthesized
QVQLQESGGGLVQAGGSLRLSCAASGTIFVYPDDMGWYRQAPGKERELVAAIAIGTNTNYADSVKGRFTISRDNAKNTVYLQMNSLKPEDTAVYYCAVAYDRYVRHRYWGQGTQVTVSS

SEQ ID NO: 29905 - protein, 122 aa, Artificial Sequence
  Chemically Synthesized
QVQLQESGGGLVQAGGSLRLSCAASGNISLGRRMGWYRQAPGKERELVAGIGYGGSTYYADSVKGRFTISRDNAKNTVYLQMNSLKPEDTAVYYCAVVYAGPHSYYYRHYYWGQGTQVTVSS

SEQ ID NO: 29906 - protein, 119 aa, Artificial Sequence
  Chemically Synthesized
QVQLQESGGGLVQAGGSLRLSCAASGNISISYIMGWYRQAPGKERELVATIAVLIPYADSVKGRFTISRDNAKNTVYLQMNSLKPEDTAVYYCAVYRDAQSSSLLVLYWGQGTQVTVSS

SEQ ID NO: 29907 - protein, 117 aa, Artificial Sequence
  Chemically Synthesized
QVQLQESGGGLVQAGGSLRLSCAASGNIFIRVMGWYRQAPGKERELVAAIAYGGSTNYADSVKGRFTISRDNAKNTVYLQMNSLKPEDTAVYYCAAGVGWYDPHQYWGQGTQVTVSS

SEQ ID NO: 29908 - protein, 126 aa, Artificial Sequence
  Chemically Synthesized
QVQLQESGGGLVQAGGSLRLSCAASGYISDVSLMGWYRQAPGKERELVASITQGASTNYADSVKGRFTISRDNAKNTVYLQMNSLKPEDTAVYYCAVSYDQDQVGRYEYDTTHLYWGQGTQVTVSS

SEQ ID NO: 29909 - protein, 126 aa, Artificial Sequence
  Chemically Synthesized
QVQLQESGGGLVQAGGSLRLSCAASGTISDRDAMGWYRQAPGKERELVASITGGGTTYYADSVKGRFTISRDNAKNTVYLQMNSLKPEDTAVYYCAAKDPAAYRITGPITYDYYYWGQGTQVTVSS

SEQ ID NO: 29910 - protein, 126 aa, Artificial Sequence
  Chemically Synthesized
QVQLQESGGGLVQAGGSLRLSCAASGTIFLYYYMGWYRQAPGKERELVASIDYGGSTYYADSVKGRFTISRDNAKNTVYLQMNSLKPEDTAVYYCAAPLYLPGLFRYDYDYTHSYWGQGTQVTVSS

SEQ ID NO: 29911 - protein, 122 aa, Artificial Sequence
  Chemically Synthesized
QVQLQESGGGLVQAGGSLRLSCAASGNISVTGFMGWYRQAPGKERELVAAINDGSITYYADSVKGRFTISRDNAKNTVYLQMNSLKPEDTAVYYCAADDVRWAFRPDPHYYWGQGTQVTVSS

SEQ ID NO: 29912 - protein, 118 aa, Artificial Sequence
  Chemically Synthesized
QVQLQESGGGLVQAGGSLRLSCAASGTISDTLRMGWYRQAPGKERELVAGITNGSNTNYADSVKGRFTISRDNAKNTVYLQMNSLKPEDTAVYYCAALNPYDRTFPYWGQGTQVTVSS

SEQ ID NO: 29913 - protein, 118 aa, Artificial Sequence
  Chemically Synthesized
QVQLQESGGGLVQAGGSLRLSCAASGTISVYYNMGWYRQAPGKERELVATIAGGGSTNYADSVKGRFTISRDNAKNTVYLQMNSLKPEDTAVYYCAADEDYITDLEYWGQGTQVTVSS

SEQ ID NO: 29914 - protein, 118 aa, Artificial Sequence
  Chemically Synthesized
QVQLQESGGGLVQAGGSLRLSCAASGTIFYDFRMGWYRQAPGKERELVAAITPGGITNYADSVKGRFTISRDNAKNTVYLQMNSLKPEDTAVYYCAVASTTYTYLGYWGQGTQVTVSS

SEQ ID NO: 29915 - protein, 122 aa, Artificial Sequence
  Chemically Synthesized
QVQLQESGGGLVQAGGSLRLSCAASGYISVPGYMGWYRQAPGKEREFVAAITSGSSTNYADSVKGRFTISRDNAKNTVYLQMNSLKPEDTAVYYCAVDYYTPYGGPNFHRYWGQGTQVTVSS

SEQ ID NO: 29916 - protein, 125 aa, Artificial Sequence
  Chemically Synthesized
QVQLQESGGGLVQAGGSLRLSCAASGSISNYRMGWYRQAPGKERELVASIDQGGNTYYADSVKGRFTISRDNAKNTVYLQMNSLKPEDTAVYYCAVVYEYRFDDGRYPYFGHGYWGQGTQVTVSS

SEQ ID NO: 29917 - protein, 118 aa, Artificial Sequence
  Chemically Synthesized
QVQLQESGGGLVQAGGSLRLSCAASGYISRPWYMGWYRQAPGKEREFVASINYGASTNYADSVKGRFTISRDNAKNTVYLQMNSLKPEDTAVYYCAVIDDRGRLHGYWGQGTQVTVSS

SEQ ID NO: 29918 - protein, 117 aa, Artificial Sequence
  Chemically Synthesized
QVQLQESGGGLVQAGGSLRLSCAASGSISYADMGWYRQAPGKERELVASISGGAITYYADSVKGRFTISRDNAKNTVYLQMNSLKPEDTAVYYCAVTYPSETRHRYWGQGTQVTVSS

SEQ ID NO: 29919 - protein, 118 aa, Artificial Sequence
  Chemically Synthesized
QVQLQESGGGLVQAGGSLRLSCAASGNISPVDVMGWYRQAPGKERELVAGINQGAITNYADSVKGRFTISRDNAKNTVYLQMNSLKPEDTAVYYCAVSYGDYVYFSYWGQGTQVTVSS

SEQ ID NO: 29920 - protein, 117 aa, Artificial Sequence
  Chemically Synthesized
QVQLQESGGGLVQAGGSLRLSCAASGSIFHSSMGWYRQAPGKERELVASITTGGITYYADSVKGRFTISRDNAKNTVYLQMNSLKPEDTAVYYCAVYGYYNYTLTYWGQGTQVTVSS

SEQ ID NO: 29921 - protein, 122 aa, Artificial Sequence
  Chemically Synthesized
QVQLQESGGGLVQAGGSLRLSCAASGTISTIYYMGWYRQAPGKEREFVATISYGSSTYYADSVKGRFTISRDNAKNTVYLQMNSLKPEDTAVYYCAATYRLYGPYSDAYYYWGQGTQVTVSS

SEQ ID NO: 29922 - protein, 118 aa, Artificial Sequence
  Chemically Synthesized
QVQLQESGGGLVQAGGSLRLSCAASGNISDVWSMGWYRQAPGKERELVATIGFGATTNYADSVKGRFTISRDNAKNTVYLQMNSLKPEDTAVYYCAVDSSDRQGHDYWGQGTQVTVSS

SEQ ID NO: 29923 - protein, 118 aa, Artificial Sequence
  Chemically Synthesized
QVQLQESGGGLVQAGGSLRLSCAASGTISQRNIMGWYRQAPGKERELVATINDGASTYYADSVKGRFTISRDNAKNTVYLQMNSLKPEDTAVYYCAVGVDRHVYFLYWGQGTQVTVSS

SEQ ID NO: 29924 - protein, 118 aa, Artificial Sequence
  Chemically Synthesized
QVQLQESGGGLVQAGGSLRLSCAASGSISDWGIMGWYRQAPGKEREFVATIGAGATTYYADSVKGRFTISRDNAKNTVYLQMNSLKPEDTAVYYCAAYTYVNRQHTYWGQGTQVTVSS

SEQ ID NO: 29925 - protein, 118 aa, Artificial Sequence
  Chemically Synthesized
QVQLQESGGGLVQAGGSLRLSCAASGNIFQGTPMGWYRQAPGKEREFVAAIAGGATTYYADSVKGRFTISRDNAKNTVYLQMNSLKPEDTAVYYCAVGDRGSGLLVYWGQGTQVTVSS

SEQ ID NO: 29926 - protein, 125 aa, Artificial Sequence
  Chemically Synthesized
QVQLQESGGGLVQAGGSLRLSCAASGNIFTLWMGWYRQAPGKEREFVATIGRGSTTYYADSVKGRFTISRDNAKNTVYLQMNSLKPEDTAVYYCAVRYGNFYNDYPLYVDDLGYWGQGTQVTVSS

SEQ ID NO: 29927 - protein, 117 aa, Artificial Sequence
  Chemically Synthesized
QVQLQESGGGLVQAGGSLRLSCAASGNIFADYAMGWYRQAPGKEREFVAAIGSGGSTNYADSVKGRFTISRDNAKNTVYLQMNSLKPEDTAVYYCAATGQFKRTIYWGQGTQVTVSS

SEQ ID NO: 29928 - protein, 117 aa, Artificial Sequence
  Chemically Synthesized
QVQLQESGGGLVQAGGSLRLSCAASGSIFAWYTMGWYRQAPGKERELVAVLVWVVVPYADSVKGRFTISRDNAKNTVYLQMNSLKPEDTAVYYCAAGDYDYGGHGYWGQGTQVTVSS

SEQ ID NO: 29929 - protein, 122 aa, Artificial Sequence
  Chemically Synthesized
QVQLQESGGGLVQAGGSLRLSCAASGSISDDTAMGWYRQAPGKERELVAGIGTGTTTNYADSVKGRFTISRDNAKNTVYLQMNSLKPEDTAVYYCAVQGDTIPDQGPPHHYWGQGTQVTVSS

SEQ ID NO: 29930 - protein, 118 aa, Artificial Sequence
  Chemically Synthesized
QVQLQESGGGLVQAGGSLRLSCAASGNISYLYGMGWYRQAPGKERELVAAIDQGSTTNYADSVKGRFTISRDNAKNTVYLQMNSLKPEDTAVYYCAATYQSRFHHYYWGQGTQVTVSS

SEQ ID NO: 29931 - protein, 126 aa, Artificial Sequence
  Chemically Synthesized
QVQLQESGGGLVQAGGSLRLSCAASGTISPPIHMGWYRQAPGKERELVASIDSGGITNYADSVKGRFTISRDNAKNTVYLQMNSLKPEDTAVYYCAAWYRLVSDNAYTVGYGYVYWGQGTQVTVSS

SEQ ID NO: 29932 - protein, 118 aa, Artificial Sequence
  Chemically Synthesized
QVQLQESGGGLVQAGGSLRLSCAASGYISPYGPMGWYRQAPGKERELVAGIALGSNTYYADSVKGRFTISRDNAKNTVYLQMNSLKPEDTAVYYCAAVSSYYIWHFYWGQGTQVTVSS

SEQ ID NO: 29933 - protein, 126 aa, Artificial Sequence
  Chemically Synthesized
QVQLQESGGGLVQAGGSLRLSCAASGNISGRAVMGWYRQAPGKERELVAGITFGATTYYADSVKGRFTISRDNAKNTVYLQMNSLKPEDTAVYYCAVGRAPLYNDKIIYTDDYDYWGQGTQVTVSS

SEQ ID NO: 29934 - protein, 126 aa, Artificial Sequence
  Chemically Synthesized
QVQLQESGGGLVQAGGSLRLSCAASGNISRGDVMGWYRQAPGKEREFVAAISYGGSTYYADSVKGRFTISRDNAKNTVYLQMNSLKPEDTAVYYCAAYIQVHYDAYRYSDAYHAYWGQGTQVTVSS

SEQ ID NO: 29935 - protein, 122 aa, Artificial Sequence
  Chemically Synthesized
QVQLQESGGGLVQAGGSLRLSCAASGYISASSYMGWYRQAPGKEREFVAAIAHGTSTYYADSVKGRFTISRDNAKNTVYLQMNSLKPEDTAVYYCAARRDLDQVDRLTHSYWGQGTQVTVSS

SEQ ID NO: 29936 - protein, 122 aa, Artificial Sequence
  Chemically Synthesized
QVQLQESGGGLVQAGGSLRLSCAASGNIFPDYTMGWYRQAPGKERELVASIGDGSSTNYADSVKGRFTISRDNAKNTVYLQMNSLKPEDTAVYYCAVADDNDVGGREIHYYWGQGTQVTVSS

SEQ ID NO: 29937 - protein, 125 aa, Artificial Sequence
  Chemically Synthesized
QVQLQESGGGLVQAGGSLRLSCAASGNIFYDQYMGWYRQAPGKERELVATISSVLLPYADSVKGRFTISRDNAKNTVYLQMNSLKPEDTAVYYCAAYAYETAYSYVTRYQGFYYWGQGTQVTVSS

SEQ ID NO: 29938 - protein, 126 aa, Artificial Sequence
  Chemically Synthesized
QVQLQESGGGLVQAGGSLRLSCAASGTIFVVPYMGWYRQAPGKEREFVATISAGATTNYADSVKGRFTISRDNAKNTVYLQMNSLKPEDTAVYYCAVYASARYTRPQIDASRHYYWGQGTQVTVSS

SEQ ID NO: 29939 - protein, 117 aa, Artificial Sequence
  Chemically Synthesized
QVQLQESGGGLVQAGGSLRLSCAASGYISRTDSMGWYRQAPGKEREFVAGIDSGAITYADSVKGRFTISRDNAKNTVYLQMNSLKPEDTAVYYCAVLDRQYDAYYYWGQGTQVTVSS

SEQ ID NO: 29940 - protein, 126 aa, Artificial Sequence
  Chemically Synthesized
QVQLQESGGGLVQAGGSLRLSCAASGYIFDDGTMGWYRQAPGKEREFVASISEGATTYYADSVKGRFTISRDNAKNTVYLQMNSLKPEDTAVYYCAVGYGGLHDIGNRPQYDLYYWGQGTQVTVSS

SEQ ID NO: 29941 - protein, 125 aa, Artificial Sequence
  Chemically Synthesized
QVQLQESGGGLVQAGGSLRLSCAASGSISAEPMGWYRQAPGKEREFVAGINQGTSTYYADSVKGRFTISRDNAKNTVYLQMNSLKPEDTAVYYCAATYVQENVPYQGDRGELDYWGQGTQVTVSS

SEQ ID NO: 29942 - protein, 122 aa, Artificial Sequence
  Chemically Synthesized
QVQLQESGGGLVQAGGSLRLSCAASGSISYQYIMGWYRQAPGKERELVASIAYGANTNYADSVKGRFTISRDNAKNTVYLQMNSLKPEDTAVYYCAVAGSTDDDRTVFLAYWGQGTQVTVSS

SEQ ID NO: 29943 - protein, 121 aa, Artificial Sequence
  Chemically Synthesized
QVQLQESGGGLVQAGGSLRLSCAASGTISDGDWMGWYRQAPGKERELVATINTGGNTNYADSVKGRFTISRDNAKNTVYLQMNSLKPEDTAVYYCAVDELLRCTTIVLIYWGQGTQVTVSS

SEQ ID NO: 29944 - protein, 117 aa, Artificial Sequence
  Chemically Synthesized
QVQLQESGGGLVQAGGSLRLSCAASGTISQLRFMGWYRQAPGKEREFVATIGDGTNTNYADSVKGRFTISRDNAKNTVYLQMNSLKPEDTAVYYCAADDRYGSLLYWGQGTQVTVSS

SEQ ID NO: 29945 - protein, 122 aa, Artificial Sequence
  Chemically Synthesized
QVQLQESGGGLVQAGGSLRLSCAASGNISRPYIMGWYRQAPGKEREFVAAIALGASTNYADSVKGRFTISRDNAKNTVYLQMNSLKPEDTAVYYCAVTYRDDVGDYYKLYYWGQGTQVTVSS

SEQ ID NO: 29946 - protein, 118 aa, Artificial Sequence
  Chemically Synthesized
QVQLQESGGGLVQAGGSLRLSCAASGTIFAYDLMGWYRQAPGKERELVAAIGPGSSTNYADSVKGRFTISRDNAKNTVYLQMNSLKPEDTAVYYCAVSSLYFAKLRYWGQGTQVTVSS

SEQ ID NO: 29947 - protein, 121 aa, Artificial Sequence
  Chemically Synthesized
QVQLQESGGGLVQAGGSLRLSCAASGSIFRPGHMGWYRQAPGKERELVAGITDGAITNYADSVKGRFTISRDNAKNTVYLQMNSLKPEDTAVYYCAALWTIESAYYASMYWGQGTQVTVSS

SEQ ID NO: 29948 - protein, 115 aa, Artificial Sequence
  Chemically Synthesized
QVQLQESGGGLVQAGGSLRLSCAASGSISPMGWYRQAPGKERELVATIGHGATTYYADSVKGRFTISRDNAKNTVYLQMNSLKPEDTAVYYCAVIRRFPTDLSYWGQGTQVTVSS

SEQ ID NO: 29949 - protein, 109 aa, Artificial Sequence
  Chemically Synthesized
QVQLQESGGGLVQAGGSLRLSCAASGYIFDPVSMGWYRQAPGKERELVAGITYGGTTNYADSVKGRFTISRDNAKNTVYLQMNSLKPEDTAVYYCAAYWGQGTQVTVSS

SEQ ID NO: 29950 - protein, 122 aa, Artificial Sequence
  Chemically Synthesized
QVQLQESGGGLVQAGGSLRLSCAASGTIFVTDAMGWYRQAPGKERELVATINHGTNTYYADSVKGRFTISRDNAKNTVYLQMNSLKPEDTAVYYCAANTGDLSGPYPRFPYWGQGTQVTVSS

SEQ ID NO: 29951 - protein, 117 aa, Artificial Sequence
  Chemically Synthesized
QVQLQESGGGLVQAGGSLRLSCAASGNFFRLLMGWYRQAPGKEREFVATITVGATTNYADSVKGRFTISRDNAKNTVYLQMNSLKPEDTAVYYCAVDAYDTYSYPYWGQGTQVTVSS

SEQ ID NO: 29952 - protein, 122 aa, Artificial Sequence
  Chemically Synthesized
QVQLQESGGGLVQAGGSLRLSCAASGTIFVYPSMGWYRQAPGKERELVAGITRGGSTYYADSVKGRFTISRDNAKNTVYLQMNSLKPEDTAVYYCAAVPYDATGVVYPYVYWGQGTQVTVSS

SEQ ID NO: 29953 - protein, 122 aa, Artificial Sequence
  Chemically Synthesized
QVQLQESGGGLVQAGGSLRLSCAASGTISIRPDMGWYRQAPGKEREFVAAIDVGTSTYYADSVKGRFTISRDNAKNTVYLQMNSLKPEDTAVYYCAVDRVQIIAGVYAYVYWGQGTQVTVSS

SEQ ID NO: 29954 - protein, 118 aa, Artificial Sequence
  Chemically Synthesized
QVQLQESGGGLVQAGGSLRLSCAASGSISPSRRMGWYRQAPGKERELVAAISRGGTTNYADSVKGRFTISRDNAKNTVYLQMNSLKPEDTAVYYCAVDGEPYLWLDYWGQGTQVTVSS

SEQ ID NO: 29955 - protein, 116 aa, Artificial Sequence
  Chemically Synthesized
QVQLQESGGGLVQAGGSLRLSCAASGLFLTRTMGWYRQAPGKERELVASITEGTTTNYADSVKGRFTISRDNAKNTVYLQMNSLKPEDTAVYYCAAGSFDIVYTYWGQGTQVTVSS

SEQ ID NO: 29956 - protein, 122 aa, Artificial Sequence
  Chemically Synthesized
QVQLQESGGGLVQAGGSLRLSCAASGSISFADYMGWYRQAPGKEREFVASIGGGTITNYADSVKGRFTISRDNAKNTVYLQMNSLKPEDTAVYYCAVWHRVYGIPVPGLEYWGQGTQVTVSS

SEQ ID NO: 29957 - protein, 118 aa, Artificial Sequence
  Chemically Synthesized
QVQLQESGGGLVQAGGSLRLSCAASGNISQQNYMGWYRQAPGKEREFVAGINGGTNTYYADSVKGRFTISRDNAKNTVYLQMNSLKPEDTAVYYCAVATPFTGGLYYWGQGTQVTVSS

SEQ ID NO: 29958 - protein, 118 aa, Artificial Sequence
  Chemically Synthesized
QVQLQESGGGLVQAGGSLRLSCAASGTISYHLLMGWYRQAPGKERELVAGIGEGTITLYADSVKGRFTISRDNAKNTVYLQMNSLKPEDTAVYYCAARHHDGASYVYWGQGTQVTVSS

SEQ ID NO: 29959 - protein, 122 aa, Artificial Sequence
  Chemically Synthesized
QVQLQESGGGLVQAGGSLRLSCAASGSISYADYMGWYRQAPGKERELVAGIDGGGNTYYADSVKGRFTISRDNAKNTVYLQMNSLKPEDTAVYYCAVPVEYDIDQYDAHYYWGQGTQVTVSS

SEQ ID NO: 29960 - protein, 112 aa, Artificial Sequence
  Chemically Synthesized
QVQLQESGGGLVQAGGSLRLSCAASGTISDWVWMGWYRQAPGKERELVAGISDGSITYADSVKGRFTISRDNAKNTVYLQMNSLKPEDTAVYYCAYDYHGYWGQGTQVTVSS

SEQ ID NO: 29961 - protein, 117 aa, Artificial Sequence
  Chemically Synthesized
QVQLQESGGGLVQAGGSLRLSCAASGNISVQHIMGWYRQAPGKEREFVAGIDHGGITYYADSVKGRFTISRDNAKNTVYLQMNSLKPEDTAVYYCAVWDGYIGFYYWGQGTQVTVSS

SEQ ID NO: 29962 - protein, 112 aa, Artificial Sequence
  Chemically Synthesized
QVQLQESGGGLVQAGGSLRLSCAASGTIFAVHYMGWYRQAPGKEREFVAGISYGATTYYADSVKGRFTISRDNAKNTVYLQMNSLKPEDTAVYYCAATTIYWGQGTQVTVSS

SEQ ID NO: 29963 - protein, 119 aa, Artificial Sequence
  Chemically Synthesized
QVQLQESGGGLVQAGGSLRLSCAASGYISRVGMGWYRQAPGKEREFVAAISRGDSTNYADSVKGRFTISRDNAKNTVYLQMNSLKPEDTAVYYCAAALLKDTPIEHEYWGQGTQVTVSS

SEQ ID NO: 29964 - protein, 112 aa, Artificial Sequence
  Chemically Synthesized
QVQLQESGGGLVQAGGSLRLSCAASGYISRDAIMGWYRQAPGKERELVASIDIGGNTNYADSVKGRFTISRDNAKNTVYLQMNSLKPEDTAVYYCAVVALYWGQGTQVTVSS

SEQ ID NO: 29965 - protein, 126 aa, Artificial Sequence
  Chemically Synthesized
QVQLQESGGGLVQAGGSLRLSCAASGSISWYYRMGWYRQAPGKERELVASIATGASTNYADSVKGRFTISRDNAKNTVYLQMNSLKPEDTAVYYCAAHYQDVQSDGHTSPYKHFYWGQGTQVTVSS

SEQ ID NO: 29966 - protein, 121 aa, Artificial Sequence
  Chemically Synthesized
QVQLQESGGGLVQAGGSLRLSCAASGSISYYITMGWYRQAPGKEREFVAAIDAGSSTYYADSVKGRFTISRDNAKNTVYLQMNSLKPEDTAVYYCAAYEGYGYDSSSCMYWGQGTQVTVSS

SEQ ID NO: 29967 - protein, 126 aa, Artificial Sequence
  Chemically Synthesized
QVQLQESGGGLVQAGGSLRLSCAASGYIFDLYYMGWYRQAPGKEREFVAGITYGTSTYYADSVKGRFTISRDNAKNTVYLQMNSLKPEDTAVYYCAAYNRIRGIYVADWYDDYPYWGQGTQVTVSS

SEQ ID NO: 29968 - protein, 117 aa, Artificial Sequence
  Chemically Synthesized
QVQLQESGGGLVQAGGSLRLSCAASGYIFRSLSMGWYRQAPGKEREFVATIAYGSNTNYADSVKGRFTISRDNAKNTVYLQMNSLKPEDTAVYYCAVYTEYYDSHYWGQGTQVTVSS

SEQ ID NO: 29969 - protein, 122 aa, Artificial Sequence
  Chemically Synthesized
QVQLQESGGGLVQAGGSLRLSCAASGTISNAYGMGWYRQAPGKERELVATIAIGAITNYADSVKGRFTISRDNAKNTVYLQMNSLKPEDTAVYYCAAELDDSPGAAFDYPYWGQGTQVTVSS

SEQ ID NO: 29970 - protein, 126 aa, Artificial Sequence
  Chemically Synthesized
QVQLQESGGGLVQAGGSLRLSCAASGNIFPRFAMGWYRQAPGKERELVASIDWGGSTYYADSVKGRFTISRDNAKNTVYLQMNSLKPEDTAVYYCAVYVYFDRHADPSGAYRLYYWGQGTQVTVSS

SEQ ID NO: 29971 - protein, 122 aa, Artificial Sequence
  Chemically Synthesized
QVQLQESGGGLVQAGGSLRLSCAASGTISTRAFMGWYRQAPGKERELVAGIGDGTSTNYADSVKGRFTISRDNAKNTVYLQMNSLKPEDTAVYYCAVQGLGDYPGRWQLLYWGQGTQVTVSS

SEQ ID NO: 29972 - protein, 118 aa, Artificial Sequence
  Chemically Synthesized
QVQLQESGGGLVQAGGSLRLSCAASGYIFYPTDMGWYRQAPGKEREFVASIDNGSNTYYADSVKGRFTISRDNAKNTVYLQMNSLKPEDTAVYYCAAYTTGPPSHPYWGQGTQVTVSS

SEQ ID NO: 29973 - protein, 116 aa, Artificial Sequence
  Chemically Synthesized
QVQLQESGGGLVQAGGSLRLSCAASGYISDFYIMGWYRQAPGKERELLPVLLLVLLPYADSVKGRFTISRDNAKNTVYLQMNSLKPEDTAVYYCAAEQIRLRSFYWGQGTQVTVSS

SEQ ID NO: 29974 - protein, 122 aa, Artificial Sequence
  Chemically Synthesized
QVQLQESGGGLVQAGGSLRLSCAASGSIFYIIRMGWYRQAPGKERELVASIAYGTTTYYADSVKGRFTISRDNAKNTVYLQMNSLKPEDTAVYYCAVYYDAYYSYRYRLDYWGQGTQVTVSS

SEQ ID NO: 29975 - protein, 118 aa, Artificial Sequence
  Chemically Synthesized
QVQLQESGGGLVQAGGSLRLSCAASGTIFYGYNMGWYRQAPGKEREFVAAIAYGGITYYADSVKGRFTISRDNAKNTVYLQMNSLKPEDTAVYYCAAKYSDYGWHGYWGQGTQVTVSS

SEQ ID NO: 29976 - protein, 122 aa, Artificial Sequence
  Chemically Synthesized
QVQLQESGGGLVQAGGSLRLSCAASGYISYLIIMGWYRQAPGKERELVAAIDDGGTTNYADSVKGRFTISRDNAKNTVYLQMNSLKPEDTAVYYCAVYQDKDIRVTVDLGYWGQGTQVTVSS

SEQ ID NO: 29977 - protein, 118 aa, Artificial Sequence
  Chemically Synthesized
QVQLQESGGGLVQAGGSLRLSCAASGTIFFNDAMGWYRQAPGKEREFVASIDFGWYYQYADSVKGRFTISRDNAKNTVYLQMNSLKPEDTAVYYCAADVSDDGVHSYWGQGTQVTVSS

SEQ ID NO: 29978 - protein, 118 aa, Artificial Sequence
  Chemically Synthesized
QVQLQESGGGLVQAGGSLRLSCAASGSIFTDRYMGWYRQAPGKEREFVASISRGTTTYYADSVKGRFTISRDNAKNTVYLQMNSLKPEDTAVYYCAVDPPYSVRHFYWGQGTQVTVSS

SEQ ID NO: 29979 - protein, 122 aa, Artificial Sequence
  Chemically Synthesized
QVQLQESGGGLVQAGGSLRLSCAASGTISYDLFMGWYRQAPGKERELVAAINTGGTTNYADSVKGRFTISRDNAKNTVYLQMNSLKPEDTAVYYCAVHTGQTTDWAEDHDYWGQGTQVTVSS

SEQ ID NO: 29980 - protein, 119 aa, Artificial Sequence
  Chemically Synthesized
QVQLQESGGGLVQAGGSLRLSCAASGSISSPYYMGWYRQAPGKERELVASIARGANTYYADSVKGRFTISRDNAKNTVYLQMNSLKPEDTAVYYCAVGIAGVASNLYYWGQGTQVTVSS

SEQ ID NO: 29981 - protein, 122 aa, Artificial Sequence
  Chemically Synthesized
QVQLQESGGGLVQAGGSLRLSCAASGTIFGRLYMGWYRQAPGKEREFVAAIDTGGSTYYADSVKGRFTISRDNAKNTVYLQMNSLKPEDTAVYYCAVRNHRSGTPDYDYPYWGQGTQVTVSS

SEQ ID NO: 29982 - protein, 125 aa, Artificial Sequence
  Chemically Synthesized
QVQLQESGGGLVQAGGSLRLSCAASGNISFLRMGWYRQAPGKEREFVAAITYGTSTYYADSVKGRFTISRDNAKNTVYLQMNSLKPEDTAVYYCAAQAPQYVERIDPSDHTFQYWGQGTQVTVSS

SEQ ID NO: 29983 - protein, 122 aa, Artificial Sequence
  Chemically Synthesized
QVQLQESGGGLVQAGGSLRLSCAASGNIFHAPSMGWYRQAPGKERELVAAITYGSITYYADSVKGRFTISRDNAKNTVYLQMNSLKPEDTAVYYCAADRGHSRYYQGIFRYWGQGTQVTVSS

SEQ ID NO: 29984 - protein, 121 aa, Artificial Sequence
  Chemically Synthesized
QVQLQESGGGLVQAGGSLRLSCAASGTISYEYVMGWYRQAPGKERELVAAINNGSNPYADSVKGRFTISRDNAKNTVYLQMNSLKPEDTAVYYCAVIGYAYDGGEFRYWYWGQGTQVTVSS

SEQ ID NO: 29985 - protein, 116 aa, Artificial Sequence
  Chemically Synthesized
QVQLQESGGGLVQAGGSLRLSCAASGNIFYITMGWYRQAPGKERELVATINYGATTYYADSVKGRFTISRDNAKNTVYLQMNSLKPEDTAVYYCAAYYYDDGYSYWGQGTQVTVSS

SEQ ID NO: 29986 - protein, 118 aa, Artificial Sequence
  Chemically Synthesized
QVQLQESGGGLVQAGGSLRLSCAASGNISQYSFMGWYRQAPGKERELVATITDGGTTYYADSVKGRFTISRDNAKNTVYLQMNSLKPEDTAVYYCAAAGGEAPFFLYWGQGTQVTVSS

SEQ ID NO: 29987 - protein, 114 aa, Artificial Sequence
  Chemically Synthesized
QVQLQESGGGLVQAGGSLRLSCAASGNISMGWYRQAPGKERELVAGIDKGGITYYADSVKGRFTISRDNAKNTVYLQMNSLKPEDTAVYYCAAYHYPPSGYYYWGQGTQVTVSS

SEQ ID NO: 29988 - protein, 122 aa, Artificial Sequence
  Chemically Synthesized
QVQLQESGGGLVQAGGSLRLSCAASGNISERDHMGWYRQAPGKEREFVATITGGGSTYYADSVKGRFTISRDNAKNTVYLQMNSLKPEDTAVYYCAVGATGLYQQTTYLVYWGQGTQVTVSS

SEQ ID NO: 29989 - protein, 118 aa, Artificial Sequence
  Chemically Synthesized
QVQLQESGGGLVQAGGSLRLSCAASGYISGAVNMGWYRQAPGKEREFVASITGGTNTNYADSVKGRFTISRDNAKNTVYLQMNSLKPEDTAVYYCAALQAYSNDFSYWGQGTQVTVSS

SEQ ID NO: 29990 - protein, 118 aa, Artificial Sequence
  Chemically Synthesized
QVQLQESGGGLVQAGGSLRLSCAASGSISRDLYMGWYRQAPGKERELVAGISRGAITYYADSVKGRFTISRDNAKNTVYLQMNSLKPEDTAVYYCAVGPARGHEYLYWGQGTQVTVSS

SEQ ID NO: 29991 - protein, 126 aa, Artificial Sequence
  Chemically Synthesized
QVQLQESGGGLVQAGGSLRLSCAASGTIFRYYGMGWYRQAPGKERELVATITVGGSTNYADSVKGRFTISRDNAKNTVYLQMNSLKPEDTAVYYCAVYRGYSYLFWTFRKDRFTYWGQGTQVTVSS

SEQ ID NO: 29992 - protein, 118 aa, Artificial Sequence
  Chemically Synthesized
QVQLQESGGGLVQAGGSLRLSCAASGNIFGRYNMGWYRQAPGKEREFVAGIAGGANTNYADSVKGRFTISRDNAKNTVYLQMNSLKPEDTAVYYCAAIDPRGRYFAYWGQGTQVTVSS

SEQ ID NO: 29993 - protein, 118 aa, Artificial Sequence
  Chemically Synthesized
QVQLQESGGGLVQAGGSLRLSCAASGTIFDRKYMGWYRQAPGKEREFVAGIDWGGTTNYADSVKGRFTISRDNAKNTVYLQMNSLKPEDTAVYYCAVSARHNSYHEYWGQGTQVTVSS

SEQ ID NO: 29994 - protein, 113 aa, Artificial Sequence
  Chemically Synthesized
QVQLQESGGGLVQAGGSLRLSCAASGNISPYTQMGWYRQAPGKEREFVAGINHGANTYYADSVKGRFTISRDNAKNTVYLQMNSLKPEDTAVYYCAVDYPFYWGQGTQVTVSS

SEQ ID NO: 29995 - protein, 122 aa, Artificial Sequence
  Chemically Synthesized
QVQLQESGGGLVQAGGSLRLSCAASGNIFSGAPMGWYRQAPGKEREFVATISYGGTTNYADSVKGRFTISRDNAKNTVYLQMNSLKPEDTAVYYCAVARYWLYAQVTGHYYWGQGTQVTVSS

SEQ ID NO: 29996 - protein, 123 aa, Artificial Sequence
  Chemically Synthesized
QVQLQESGGGLVQAGGSLRLSCAASGTISHVQVMGWYRQAPGKEREFVAAIGRGGANTYYADSVKGRFTISRDNAKNTVYLQMNSLKPEDTAVYYCAAYYEPLYFIFGLYPYWGQGTQVTVSS

SEQ ID NO: 29997 - protein, 116 aa, Artificial Sequence
  Chemically Synthesized
QVQLQESGGGLVQAGGSLRLSCAASGNIFDTYQMGWYRQAPGKEREFVAAIDGGLPYADSVKGRFTISRDNAKNTVYLQMNSLKPEDTAVYYCAVNYNYEAQHHYWGQGTQVTVSS

SEQ ID NO: 29998 - protein, 126 aa, Artificial Sequence
  Chemically Synthesized
QVQLQESGGGLVQAGGSLRLSCAASGSISDIYSMGWYRQAPGKERELVATIGRGASTNYADSVKGRFTISRDNAKNTVYLQMNSLKPEDTAVYYCAVLYPQGWYTVFYRRETHYYWGQGTQVTVSS

SEQ ID NO: 29999 - protein, 126 aa, Artificial Sequence
  Chemically Synthesized
QVQLQESGGGLVQAGGSLRLSCAASGSISYAYEMGWYRQAPGKEREFVATIGDGGSTNYADSVKGRFTISRDNAKNTVYLQMNSLKPEDTAVYYCAAPGGEAYSGVGHVVLDYWYWGQGTQVTVSS

SEQ ID NO: 30000 - protein, 118 aa, Artificial Sequence
  Chemically Synthesized
QVQLQESGGGLVQAGGSLRLSCAASGTISAYSGMGWYRQAPGKEREFVATIDDGSSTYYADSVKGRFTISRDNAKNTVYLQMNSLKPEDTAVYYCAVTYLIGTILYYWGQGTQVTVSS

SEQ ID NO: 30001 - protein, 118 aa, Artificial Sequence
  Chemically Synthesized
QVQLQESGGGLVQAGGSLRLSCAASGTISQSYPMGWYRQAPGKERELVAAISVGGSTNYADSVKGRFTISRDNAKNTVYLQMNSLKPEDTAVYYCAAIGVKTALHPYWGQGTQVTVSS

SEQ ID NO: 30002 - protein, 118 aa, Artificial Sequence
  Chemically Synthesized
QVQLQESGGGLVQAGGSLRLSCAASGYIFDSPAMGWYRQAPGKEREFVASISGGTTTYYADSVKGRFTISRDNAKNTVYLQMNSLKPEDTAVYYCAAWAYQYGKHTYWGQGTQVTVSS

SEQ ID NO: 30003 - protein, 126 aa, Artificial Sequence
  Chemically Synthesized
QVQLQESGGGLVQAGGSLRLSCAASGNISYVSDMGWYRQAPGKERELVAAIAGGTSTNYADSVKGRFTISRDNAKNTVYLQMNSLKPEDTAVYYCAVYNDSQWGNYTDPSWGHTYWGQGTQVTVSS

SEQ ID NO: 30004 - protein, 118 aa, Artificial Sequence
  Chemically Synthesized
QVQLQESGGGLVQAGGSLRLSCAASGTISYTPYMGWYRQAPGKEREFVATIDNGTSTNYADSVKGRFTISRDNAKNTVYLQMNSLKPEDTAVYYCAAESYGPWKYQYWGQGTQVTVSS

SEQ ID NO: 30005 - protein, 123 aa, Artificial Sequence
  Chemically Synthesized
QVQLQESGGGLVQAGGSLRLSCAASGNIFFIAYMGWYRQAPGKERELVASIAHGGNTNYADSVKGRFTISRDNAKNTVYLQMNSLKPEDTAVYYCAVGTLLVGPFREYLHYYWGQGTQVTVSS

SEQ ID NO: 30006 - protein, 118 aa, Artificial Sequence
  Chemically Synthesized
QVQLQESGGGLVQAGGSLRLSCAASGTISLRTTMGWYRQAPGKERELVASITLGASTNYADSVKGRFTISRDNAKNTVYLQMNSLKPEDTAVYYCAAPPTTVPPLYYWGQGTQVTVSS

SEQ ID NO: 30007 - protein, 118 aa, Artificial Sequence
  Chemically Synthesized
QVQLQESGGGLVQAGGSLRLSCAASGSISDTFGMGWYRQAPGKERELVAAITRGSNTYYADSVKGRFTISRDNAKNTVYLQMNSLKPEDTAVYYCAVESGSFSFPFYWGQGTQVTVSS

SEQ ID NO: 30008 - protein, 126 aa, Artificial Sequence
  Chemically Synthesized
QVQLQESGGGLVQAGGSLRLSCAASGYIFHYTWMGWYRQAPGKEREFVATISNGGSTNYADSVKGRFTISRDNAKNTVYLQMNSLKPEDTAVYYCAADLNRDRNSIPDILYSLGYWGQGTQVTVSS

SEQ ID NO: 30009 - protein, 118 aa, Artificial Sequence
  Chemically Synthesized
QVQLQESGGGLVQAGGSLRLSCAASGNIFGTYGMGWYRQAPGKERELVATIDLGGITNYADSVKGRFTISRDNAKNTVYLQMNSLKPEDTAVYYCAVYRPFVYGHYYWGQGTQVTVSS

SEQ ID NO: 30010 - protein, 118 aa, Artificial Sequence
  Chemically Synthesized
QVQLQESGGGLVQAGGSLRLSCAASGNIFGVTPMGWYRQAPGKERELVAGISHGSSTNYADSVKGRFTISRDNAKNTVYLQMNSLKPEDTAVYYCAVRDINTLRYAYWGQGTQVTVSS

SEQ ID NO: 30011 - protein, 118 aa, Artificial Sequence
  Chemically Synthesized
QVQLQESGGGLVQAGGSLRLSCAASGTIFYRKKMGWYRQAPGKERELVAAINYGGNTYYADSVKGRFTISRDNAKNTVYLQMNSLKPEDTAVYYCAVRRYAHVGFPYWGQGTQVTVSS

SEQ ID NO: 30012 - protein, 116 aa, Artificial Sequence
  Chemically Synthesized
QVQLQESGGGLVQAGGSLRLSCAASGSISTATDMGWYRQAPGKERELVATIGDGTTTNYADSVKGRFTISRDNAKNTVYLQMNSLKPEDTAVYYCAVKADPYLYYWGQGTQVTVSS

SEQ ID NO: 30013 - protein, 117 aa, Artificial Sequence
  Chemically Synthesized
QVQLQESGGGLVQAGGSLRLSCAASGYISDTTMGWYRQAPGKEREFVAAIDYGTTTNYADSVKGRFTISRDNAKNTVYLQMNSLKPEDTAVYYCAVASPYFGTYPYWGQGTQVTVSS

SEQ ID NO: 30014 - protein, 123 aa, Artificial Sequence
  Chemically Synthesized
QVQLQESGGGLVQAGGSLRLSCAASGTIFGDTLMGWYRQAPGKEREFVAAIGRGTYADSVKGRFTISRDNAKNTVYLQMNSLKPEDTAVYYCAVDFPETTIVRAWYRVFHPYWGQGTQVTVSS

SEQ ID NO: 30015 - protein, 118 aa, Artificial Sequence
  Chemically Synthesized
QVQLQESGGGLVQAGGSLRLSCAASGNIFDGQNMGWYRQAPGKEREFVAAITPGSSTYYADSVKGRFTISRDNAKNTVYLQMNSLKPEDTAVYYCAVDPDIHNDHSYWGQGTQVTVSS

SEQ ID NO: 30016 - protein, 117 aa, Artificial Sequence
  Chemically Synthesized
QVQLQESGGGLVQAGGSLRLSCAASGSISRYYMGWYRQAPGKEREFVAAIANGGNTYYADSVKGRFTISRDNAKNTVYLQMNSLKPEDTAVYYCAAYFEAYTAFVYWGQGTQVTVSS

SEQ ID NO: 30017 - protein, 118 aa, Artificial Sequence
  Chemically Synthesized
QVQLQESGGGLVQAGGSLRLSCAASGTISGQLAMGWYRQAPGKEREFVAGIAVGGTTYYADSVKGRFTISRDNAKNTVYLQMNSLKPEDTAVYYCAVSPHSSDIYRYWGQGTQVTVSS

SEQ ID NO: 30018 - protein, 122 aa, Artificial Sequence
  Chemically Synthesized
QVQLQESGGGLVQAGGSLRLSCAASGTISDYLAMGWYRQAPGKERELVATIATGGNTNYADSVKGRFTISRDNAKNTVYLQMNSLKPEDTAVYYCAADDRLGQYYLGLHLYWGQGTQVTVSS

SEQ ID NO: 30019 - protein, 122 aa, Artificial Sequence
  Chemically Synthesized
QVQLQESGGGLVQAGGSLRLSCAASGNIFYLSGMGWYRQAPGKERELVATINRGSNTNYADSVKGRFTISRDNAKNTVYLQMNSLKPEDTAVYYCAVYDNPLQEWYASHYYWGQGTQVTVSS

SEQ ID NO: 30020 - protein, 122 aa, Artificial Sequence
  Chemically Synthesized
QVQLQESGGGLVQAGGSLRLSCAASGNISTAYWMGWYRQAPGKERELVASISAGANTNYADSVKGRFTISRDNAKNTVYLQMNSLKPEDTAVYYCAALPAYPDRRWAILQYWGQGTQVTVSS

SEQ ID NO: 30021 - protein, 122 aa, Artificial Sequence
  Chemically Synthesized
QVQLQESGGGLVQAGGSLRLSCAASGTISRYRRMGWYRQAPGKEREFVAAIDSGTNTNYADSVKGRFTISRDNAKNTVYLQMNSLKPEDTAVYYCAAQYGVWWIVTKRLSYWGQGTQVTVSS

SEQ ID NO: 30022 - protein, 122 aa, Artificial Sequence
  Chemically Synthesized
QVQLQESGGGLVQAGGSLRLSCAASGTIFYYFDMGWYRQAPGKERELVAAISIGATTYYADSVKGRFTISRDNAKNTVYLQMNSLKPEDTAVYYCAVNTGPTQLGDRVHAYWGQGTQVTVSS

SEQ ID NO: 30023 - protein, 117 aa, Artificial Sequence
  Chemically Synthesized
QVQLQESGGGLVQAGGSLRLSCAASGTISGATMGWYRQAPGKEREFVATIGQGTTTNYADSVKGRFTISRDNAKNTVYLQMNSLKPEDTAVYYCAVTPDQVYYLSYWGQGTQVTVSS

SEQ ID NO: 30024 - protein, 117 aa, Artificial Sequence
  Chemically Synthesized
QVQLQESGGGLVQAGGSLRLSCAASGSISHAQYMGWYRQAPGKEREFVAGITVGLLPYADSVKGRFTISRDNAKNTVYLQMNSLKPEDTAVYYCAVGYWGLYTRIYWGQGTQVTVSS

SEQ ID NO: 30025 - protein, 121 aa, Artificial Sequence
  Chemically Synthesized
QVQLQESGGGLVQAGGSLRLSCAASGTIFDGYDMGWYRQAPGKEREFVASLLLVLLPYADSVKGRFTISRDNAKNTVYLQMNSLKPEDTAVYYCAVYVVYLLDDYVPYSYWGQGTQVTVSS

SEQ ID NO: 30026 - protein, 118 aa, Artificial Sequence
  Chemically Synthesized
QVQLQESGGGLVQAGGSLRLSCAASGYISDDSVMGWYRQAPGKEREFVAGIGNGAITNYADSVKGRFTISRDNAKNTVYLQMNSLKPEDTAVYYCAALSTAQLDLDYWGQGTQVTVSS

SEQ ID NO: 30027 - protein, 121 aa, Artificial Sequence
  Chemically Synthesized
QVQLQESGGGLVQAGGSLRLSCAASGTIFYYYMGWYRQAPGKERELVAAISKGGNTNYADSVKGRFTISRDNAKNTVYLQMNSLKPEDTAVYYCAAKRNQDYSTDLALYYWGQGTQVTVSS

SEQ ID NO: 30028 - protein, 117 aa, Artificial Sequence
  Chemically Synthesized
QVQLQESGGGLVQAGGSLRLSCAASGTIFRAFYMGWYRQAPGKEREFVATIDVVVLPYADSVKGRFTISRDNAKNTVYLQMNSLKPEDTAVYYCAAYYREPPQFDYWGQGTQVTVSS

SEQ ID NO: 30029 - protein, 125 aa, Artificial Sequence
  Chemically Synthesized
QVQLQESGGGLVQAGGSLRLSCAASGNISLDSMGWYRQAPGKEREFVASITSGSTTNYADSVKGRFTISRDNAKNTVYLQMNSLKPEDTAVYYCAVNVRGTGVGAGTLWVWLAYWGQGTQVTVSS

SEQ ID NO: 30030 - protein, 117 aa, Artificial Sequence
  Chemically Synthesized
QVQLQESGGGLVQAGGSLRLSCAASGTISSLRMGWYRQAPGKEREFVATIDVGGTTNYADSVKGRFTISRDNAKNTVYLQMNSLKPEDTAVYYCAATGAIVAIFHYWGQGTQVTVSS

SEQ ID NO: 30031 - protein, 119 aa, Artificial Sequence
  Chemically Synthesized
QVQLQESGGGLVQAGGSLRLSCAASGNISPQDVMGWYRQAPGKEREGITTWCYYQYADSVKGRFTISRDNAKNTVYLQMNSLKPEDTAVYYCAVWNYVGWSPIINLGYWGQGTQVTVSS

SEQ ID NO: 30032 - protein, 116 aa, Artificial Sequence
  Chemically Synthesized
QVQLQESGGGLVQAGGSLRLSCAASGYISTHTYMGWYRQAPGKEREFVASIVLVVLPYADSVKGRFTISRDNAKNTVYLQMNSLKPEDTAVYYCAVWEGLSVGIYWGQGTQVTVSS

SEQ ID NO: 30033 - protein, 122 aa, Artificial Sequence
  Chemically Synthesized
QVQLQESGGGLVQAGGSLRLSCAASGTIFLVLVMGWYRQAPGKERELVAGINGGGNTYYADSVKGRFTISRDNAKNTVYLQMNSLKPEDTAVYYCAVNDFYSYDVGGHYYYWGQGTQVTVSS

SEQ ID NO: 30034 - protein, 118 aa, Artificial Sequence
  Chemically Synthesized
QVQLQESGGGLVQAGGSLRLSCAASGTISLDGAMGWYRQAPGKEREFVAGITRGGITYYADSVKGRFTISRDNAKNTVYLQMNSLKPEDTAVYYCAVRRQDNPLHGYWGQGTQVTVSS

SEQ ID NO: 30035 - protein, 118 aa, Artificial Sequence
  Chemically Synthesized
QVQLQESGGGLVQAGGSLRLSCAASGTIFNKYWMGWYRQAPGKERELVAGITIGANTNYADSVKGRFTISRDNAKNTVYLQMNSLKPEDTAVYYCAAPRITYENLEYWGQGTQVTVSS

SEQ ID NO: 30036 - protein, 125 aa, Artificial Sequence
  Chemically Synthesized
QVQLQESGGGLVQAGGSLRLSCAASGNISTFPSMGWYRQAPGKERELVATITWGTTTNYADSVKGRFTISRDNAKNTVYLQMNSLKPEDTAVYYCAAGTWSTTVLVITKTSTFYWGQGTQVTVSS

SEQ ID NO: 30037 - protein, 122 aa, Artificial Sequence
  Chemically Synthesized
QVQLQESGGGLVQAGGSLRLSCAASGNISYLTYMGWYRQAPGKERELVASIARGTTTYYADSVKGRFTISRDNAKNTVYLQMNSLKPEDTAVYYCAANRYDYVLDATIYPYWGQGTQVTVSS

SEQ ID NO: 30038 - protein, 126 aa, Artificial Sequence
  Chemically Synthesized
QVQLQESGGGLVQAGGSLRLSCAASGTISWYTWMGWYRQAPGKEREFVAAINPGASTNYADSVKGRFTISRDNAKNTVYLQMNSLKPEDTAVYYCAADQVDVWERWDPRPVYLWYWGQGTQVTVSS

SEQ ID NO: 30039 - protein, 117 aa, Artificial Sequence
  Chemically Synthesized
QVQLQESGGGLVQAGGSLRLSCAASGNIFDYYYMGWYRQAPGKEREFVAISRGATTYYADSVKGRFTISRDNAKNTVYLQMNSLKPEDTAVYYCAVGATVVGYHAYWGQGTQVTVSS

SEQ ID NO: 30040 - protein, 126 aa, Artificial Sequence
  Chemically Synthesized
QVQLQESGGGLVQAGGSLRLSCAASGTISQLYGMGWYRQAPGKERELVAAITWGTITNYADSVKGRFTISRDNAKNTVYLQMNSLKPEDTAVYYCAAALDTLRDYNVAGTTAHRYWGQGTQVTVSS

SEQ ID NO: 30041 - protein, 122 aa, Artificial Sequence
  Chemically Synthesized
QVQLQESGGGLVQAGGSLRLSCAASGTIFRPPDMGWYRQAPGKERELVAGIDFGGNTYYADSVKGRFTISRDNAKNTVYLQMNSLKPEDTAVYYCAVVLIGTIAAVDRYDYWGQGTQVTVSS

SEQ ID NO: 30042 - protein, 126 aa, Artificial Sequence
  Chemically Synthesized
QVQLQESGGGLVQAGGSLRLSCAASGNISQSAWMGWYRQAPGKERELVAGISIGTSTNYADSVKGRFTISRDNAKNTVYLQMNSLKPEDTAVYYCAADAYRYIPWPVGLADVHGYWGQGTQVTVSS

SEQ ID NO: 30043 - protein, 117 aa, Artificial Sequence
  Chemically Synthesized
QVQLQESGGGLVQAGGSLRLSCAASGNISGDHGMGWYRQAPGKERELVASISVGLLPYADSVKGRFTISRDNAKNTVYLQMNSLKPEDTAVYYCAARSYTNAWYGYWGQGTQVTVSS

SEQ ID NO: 30044 - protein, 118 aa, Artificial Sequence
  Chemically Synthesized
QVQLQESGGGLVQAGGSLRLSCAASGYIFSYDRMGWYRQAPGKEREFVAGITVGANTNYADSVKGRFTISRDNAKNTVYLQMNSLKPEDTAVYYCAASDAKWYRHTYWGQGTQVTVSS

SEQ ID NO: 30045 - protein, 125 aa, Artificial Sequence
  Chemically Synthesized
QVQLQESGGGLVQAGGSLRLSCAASGYIFGWSMGWYRQAPGKEREFVATINRGANTLYADSVKGRFTISRDNAKNTVYLQMNSLKPEDTAVYYCAAYDIRRSVQTDYLDYTHAYWGQGTQVTVSS

SEQ ID NO: 30046 - protein, 121 aa, Artificial Sequence
  Chemically Synthesized
QVQLQESGGGLVQAGGSLRLSCAASGYISPRTMGWYRQAPGKEREFVAAISTGTNTNYADSVKGRFTISRDNAKNTVYLQMNSLKPEDTAVYYCAVKGLPLADVTYSYEYWGQGTQVTVSS

SEQ ID NO: 30047 - protein, 118 aa, Artificial Sequence
  Chemically Synthesized
QVQLQESGGGLVQAGGSLRLSCAASGNIFTVRIMGWYRQAPGKEREFVASIGHGTTTYYADSVKGRFTISRDNAKNTVYLQMNSLKPEDTAVYYCAVNALGAVIYYYWGQGTQVTVSS

SEQ ID NO: 30048 - protein, 126 aa, Artificial Sequence
  Chemically Synthesized
QVQLQESGGGLVQAGGSLRLSCAASGNIFQVYTMGWYRQAPGKERELVAAINRGATTYYADSVKGRFTISRDNAKNTVYLQMNSLKPEDTAVYYCAAYDEHEPEPHDRGAIQHYYWGQGTQVTVSS

SEQ ID NO: 30049 - protein, 121 aa, Artificial Sequence
  Chemically Synthesized
QVQLQESGGGLVQAGGSLRLSCAASGYISLTWYMGWYRQAPGKEREFVAGITFGTTTYYADSVKGRFTISRDNAKNTVYLQMNSLKPEDTAVYYCAAKYGSSSSTRLVLYWGQGTQVTVSS

SEQ ID NO: 30050 - protein, 126 aa, Artificial Sequence
  Chemically Synthesized
QVQLQESGGGLVQAGGSLRLSCAASGSIFRSNIMGWYRQAPGKERELVATISDGTSTYYADSVKGRFTISRDNAKNTVYLQMNSLKPEDTAVYYCAVGYVSGRGSRDVRLFILFYWGQGTQVTVSS

SEQ ID NO: 30051 - protein, 122 aa, Artificial Sequence
  Chemically Synthesized
QVQLQESGGGLVQAGGSLRLSCAASGNIFDDYYMGWYRQAPGKERELVASISDGSSTYYADSVKGRFTISRDNAKNTVYLQMNSLKPEDTAVYYCAAILRGRANDVQAHEYWGQGTQVTVSS

SEQ ID NO: 30052 - protein, 122 aa, Artificial Sequence
  Chemically Synthesized
QVQLQESGGGLVQAGGSLRLSCAASGSISRHGSMGWYRQAPGKERELVASIDDGTNTYYADSVKGRFTISRDNAKNTVYLQMNSLKPEDTAVYYCAVDPVRPQGIDYDHTYWGQGTQVTVSS

SEQ ID NO: 30053 - protein, 126 aa, Artificial Sequence
  Chemically Synthesized
QVQLQESGGGLVQAGGSLRLSCAASGYIFYQTLMGWYRQAPGKEREFVAGIAYGGTTNYADSVKGRFTISRDNAKNTVYLQMNSLKPEDTAVYYCAVGSYDYAGDLYQQYRYFYYWGQGTQVTVSS

SEQ ID NO: 30054 - protein, 126 aa, Artificial Sequence
  Chemically Synthesized
QVQLQESGGGLVQAGGSLRLSCAASGTISYATYMGWYRQAPGKEREFVAGINYGGNTYYADSVKGRFTISRDNAKNTVYLQMNSLKPEDTAVYYCAARELYYVENGYNLGNVLAYWGQGTQVTVSS

SEQ ID NO: 30055 - protein, 115 aa, Artificial Sequence
  Chemically Synthesized
QVQLQESGGGLVQAGGSLRLSCAASGFLTVLMGWYRQAPGKEREFVATISYGANTNYADSVKGRFTISRDNAKNTVYLQMNSLKPEDTAVYYCAVTLSTRVLIYWGQGTQVTVSS

SEQ ID NO: 30056 - protein, 121 aa, Artificial Sequence
  Chemically Synthesized
QVQLQESGGGLVQAGGSLRLSCAASGLFLRRVMGWYRQAPGKEREFVASIGAGTNTYYADSVKGRFTISRDNAKNTVYLQMNSLKPEDTAVYYCAVDYAIQFYYYDYFSYWGQGTQVTVSS

SEQ ID NO: 30057 - protein, 117 aa, Artificial Sequence
  Chemically Synthesized
QVQLQESGGGLVQAGGSLRLSCAASGNIHGPDMGWYRQAPGKERELVATITWGATTNYADSVKGRFTISRDNAKNTVYLQMNSLKPEDTAVYYCAVTYYYPVKHYYWGQGTQVTVSS

SEQ ID NO: 30058 - protein, 118 aa, Artificial Sequence
  Chemically Synthesized
QVQLQESGGGLVQAGGSLRLSCAASGYISAGYVMGWYRQAPGKEREFVASIGKGTNTYYADSVKGRFTISRDNAKNTVYLQMNSLKPEDTAVYYCAATLSSPDSLGYWGQGTQVTVSS

SEQ ID NO: 30059 - protein, 122 aa, Artificial Sequence
  Chemically Synthesized
QVQLQESGGGLVQAGGSLRLSCAASGNISDVYNMGWYRQAPGKERELVAGIGPGANTYYADSVKGRFTISRDNAKNTVYLQMNSLKPEDTAVYYCAVWYYGDFTTEPYFGYWGQGTQVTVSS

SEQ ID NO: 30060 - protein, 122 aa, Artificial Sequence
  Chemically Synthesized
QVQLQESGGGLVQAGGSLRLSCAASGSIFDASNMGWYRQAPGKERELVAGISWGTSTYYADSVKGRFTISRDNAKNTVYLQMNSLKPEDTAVYYCAADYLSLPVYYADHAYWGQGTQVTVSS

SEQ ID NO: 30061 - protein, 118 aa, Artificial Sequence
  Chemically Synthesized
QVQLQESGGGLVQAGGSLRLSCAASGTIFRPFYMGWYRQAPGKEREFVAAINRGSTTYYADSVKGRFTISRDNAKNTVYLQMNSLKPEDTAVYYCAVLYARGYRLEYWGQGTQVTVSS

SEQ ID NO: 30062 - protein, 126 aa, Artificial Sequence
  Chemically Synthesized
QVQLQESGGGLVQAGGSLRLSCAASGTIFIGYTMGWYRQAPGKERELVAAIASGGITNYADSVKGRFTISRDNAKNTVYLQMNSLKPEDTAVYYCAANANYDLIFVDSRRTGYTYWGQGTQVTVSS

SEQ ID NO: 30063 - protein, 118 aa, Artificial Sequence
  Chemically Synthesized
QVQLQESGGGLVQAGGSLRLSCAASGSISGGYVMGWYRQAPGKERELVAGISFGTITNYADSVKGRFTISRDNAKNTVYLQMNSLKPEDTAVYYCAALSPVRYTHYYWGQGTQVTVSS

SEQ ID NO: 30064 - protein, 126 aa, Artificial Sequence
  Chemically Synthesized
QVQLQESGGGLVQAGGSLRLSCAASGTISSGTTMGWYRQAPGKEREFVAAINVGSSTNYADSVKGRFTISRDNAKNTVYLQMNSLKPEDTAVYYCAADTDLGSDYRPDQRSRLHYWGQGTQVTVSS

SEQ ID NO: 30065 - protein, 113 aa, Artificial Sequence
  Chemically Synthesized
QVQLQESGGGLVQAGGSLRLSCAASGTISTAAYMGWYRQAPGKERELVAGINLGTNTYYADSVKGRFTISRDNAKNTVYLQMNSLKPEDTAVYYCAATRLPYWGQGTQVTVSS

SEQ ID NO: 30066 - protein, 126 aa, Artificial Sequence
  Chemically Synthesized
QVQLQESGGGLVQAGGSLRLSCAASGYIFGWWDMGWYRQAPGKEREFVATINIGSTTNYADSVKGRFTISRDNAKNTVYLQMNSLKPEDTAVYYCAAGKYLLRIWHGQWSNHFYYWGQGTQVTVSS

SEQ ID NO: 30067 - protein, 121 aa, Artificial Sequence
  Chemically Synthesized
QVQLQESGGGLVQAGGSLRLSCAASGYISDMLMGWYRQAPGKEREFVATIALGSITYYADSVKGRFTISRDNAKNTVYLQMNSLKPEDTAVYYCAAQAYYGTRRGYAHAYWGQGTQVTVSS

SEQ ID NO: 30068 - protein, 113 aa, Artificial Sequence
  Chemically Synthesized
QVQLQESGGGLVQAGGSLRLSCAASGTISYYKYMGWYRQAPGKEREFVASINHGTTTYYADSVKGRFTISRDNAKNTVYLQMNSLKPEDTAVYYCAATRNMYWGQGTQVTVSS

SEQ ID NO: 30069 - protein, 113 aa, Artificial Sequence
  Chemically Synthesized
QVQLQESGGGLVQAGGSLRLSCAASGTIMGWYRQAPGKERELVAGITSGTSTYYADSVKGRFTISRDNAKNTVYLQMNSLKPEDTAVYYCAVRSSEQRILFYWGQGTQVTVSS

SEQ ID NO: 30070 - protein, 117 aa, Artificial Sequence
  Chemically Synthesized
QVQLQESGGGLVQAGGSLRLSCAASGSISSTTMGWYRQAPGKERELVATIADGTTTNYADSVKGRFTISRDNAKNTVYLQMNSLKPEDTAVYYCAVYDYYTWDFGYWGQGTQVTVSS

SEQ ID NO: 30071 - protein, 117 aa, Artificial Sequence
  Chemically Synthesized
QVQLQESGGGLVQAGGSLRLSCAASGTIFDYRSMGWYRQAPGKERELIPYADSVKGRFTISRDNAKNTVYLQMNSLKPEDTAVYYCAVYDLKQGGGYYVLKGRHGYWGQGTQVTVSS

SEQ ID NO: 30072 - protein, 117 aa, Artificial Sequence
  Chemically Synthesized
QVQLQESGGGLVQAGGSLRLSCAASGNISNDPIMGWYRQAPGKEREFVASIDLGANTNYADSVKGRFTISRDNAKNTVYLQMNSLKPEDTAVYYCAAAGPSGLGLYWGQGTQVTVSS

SEQ ID NO: 30073 - protein, 115 aa, Artificial Sequence
  Chemically Synthesized
QVQLQESGGGLVQAGGSLRLSCAASGNISDVGRMGWYRQAPGKERELVAGINHGGSTYYADSVKGRFTISRDNAKNTVYLQMNSLKPEDTAVYYCAVPTDTHWYWGQGTQVTVSS

SEQ ID NO: 30074 - protein, 118 aa, Artificial Sequence
  Chemically Synthesized
QVQLQESGGGLVQAGGSLRLSCAASGSISARFSMGWYRQAPGKERELVAAIAYGTTTYYADSVKGRFTISRDNAKNTVYLQMNSLKPEDTAVYYCAAYDVNPFTLGYWGQGTQVTVSS

SEQ ID NO: 30075 - protein, 121 aa, Artificial Sequence
  Chemically Synthesized
QVQLQESGGGLVQAGGSLRLSCAASGNISYRPYMGWYRQAPGKERELLPVLMTVVLPYADSVKGRFTISRDNAKNTVYLQMNSLKPEDTAVYYCAAGPIVTQGAYDPHQYWGQGTQVTVSS

SEQ ID NO: 30076 - protein, 115 aa, Artificial Sequence
  Chemically Synthesized
QVQLQESGGGLVQAGGSLRLSCAASGYISPGVHMGWYRQAPGKEREFVAGISRGTTTNYADSVKGRFTISRDNAKNTVYLQMNSLKPEDTAVYYCAYSSYDFKYWGQGTQVTVSS

SEQ ID NO: 30077 - protein, 121 aa, Artificial Sequence
  Chemically Synthesized
QVQLQESGGGLVQAGGSLRLSCAASGYIFSTSRMGWYRQAPGKEREFVAGIDYGTTTNYADSVKGRFTISRDNAKNTVYLQMNSLKPEDTAVYYCAATQNGRNGDEVVIYWGQGTQVTVSS

SEQ ID NO: 30078 - protein, 117 aa, Artificial Sequence
  Chemically Synthesized
QVQLQESGGGLVQAGGSLRLSCAASGSISYRDYMGWYRQAPGKERELVATIALGSSTNYADSVKGRFTISRDNAKNTVYLQMNSLKPEDTAVYYCAVWPPTKLTIYWGQGTQVTVSS

SEQ ID NO: 30079 - protein, 121 aa, Artificial Sequence
  Chemically Synthesized
QVQLQESGGGLVQAGGSLRLSCAASGNISDATVMGWYRQAPGKEREFVAGIGGGASTYYADSVKGRFTISRDNAKNTVYLQMNSLKPEDTAVYYCAALRSIIFDWGWHAYWGQGTQVTVSS

SEQ ID NO: 30080 - protein, 118 aa, Artificial Sequence
  Chemically Synthesized
QVQLQESGGGLVQAGGSLRLSCAASGTIFATAVMGWYRQAPGKERELVAAISLGATTYYADSVKGRFTISRDNAKNTVYLQMNSLKPEDTAVYYCAVSLYYVTLHDYWGQGTQVTVSS

SEQ ID NO: 30081 - protein, 117 aa, Artificial Sequence
  Chemically Synthesized
QVQLQESGGGLVQAGGSLRLSCAASGYISAYYMGWYRQAPGKEREFVAAITYGAITYYADSVKGRFTISRDNAKNTVYLQMNSLKPEDTAVYYCAVYAADYNYFFYWGQGTQVTVSS

SEQ ID NO: 30082 - protein, 118 aa, Artificial Sequence
  Chemically Synthesized
QVQLQESGGGLVQAGGSLRLSCAASGNIFSAAFMGWYRQAPGKEREFVASISNGGITNYADSVKGRFTISRDNAKNTVYLQMNSLKPEDTAVYYCAVDGASYGYFFYWGQGTQVTVSS

SEQ ID NO: 30083 - protein, 122 aa, Artificial Sequence
  Chemically Synthesized
QVQLQESGGGLVQAGGSLRLSCAASGNIFRPYYMGWYRQAPGKERELVATIDNGSSTNYADSVKGRFTISRDNAKNTVYLQMNSLKPEDTAVYYCAVAYYGLTDGNGDYQYWGQGTQVTVSS

SEQ ID NO: 30084 - protein, 124 aa, Artificial Sequence
  Chemically Synthesized
QVQLQESGGGLVQAGGSLRLSCAASGSISYSAYMGWYRQAPGKERELVASIAYGASTYADSVKGRFTISRDNAKNTVYLQMNSLKPEDTAVYYCAVNRLYVIDNRYLDAYLGYWGQGTQVTVSS

SEQ ID NO: 30085 - protein, 118 aa, Artificial Sequence
  Chemically Synthesized
QVQLQESGGGLVQAGGSLRLSCAASGTIFIYGTMGWYRQAPGKEREFVASINYGTITYYADSVKGRFTISRDNAKNTVYLQMNSLKPEDTAVYYCAANDLQYRYHLYWGQGTQVTVSS

SEQ ID NO: 30086 - protein, 122 aa, Artificial Sequence
  Chemically Synthesized
QVQLQESGGGLVQAGGSLRLSCAASGTIFDLVYMGWYRQAPGKERELVASIAWGGTTNYADSVKGRFTISRDNAKNTVYLQMNSLKPEDTAVYYCAVYAHAGYYYPYYHDYWGQGTQVTVSS

SEQ ID NO: 30087 - protein, 126 aa, Artificial Sequence
  Chemically Synthesized
QVQLQESGGGLVQAGGSLRLSCAASGSIFALRDMGWYRQAPGKEREFVATIGSGTSTNYADSVKGRFTISRDNAKNTVYLQMNSLKPEDTAVYYCAVTLSQWTNGDLLIPGTHTYWGQGTQVTVSS

SEQ ID NO: 30088 - protein, 117 aa, Artificial Sequence
  Chemically Synthesized
QVQLQESGGGLVQAGGSLRLSCAASGYIFTSGDMGWYRQAPGKERELVASITSGSNTYYADSVKGRFTISRDNAKNTVYLQMNSLKPEDTAVYYCAVDAQSVLTIYWGQGTQVTVSS

SEQ ID NO: 30089 - protein, 124 aa, Artificial Sequence
  Chemically Synthesized
QVQLQESGGGLVQAGGSLRLSCAASGSISWAQGMGWYRQAPGKEREFVASLLLVVPYADSVKGRFTISRDNAKNTVYLQMNSLKPEDTAVYYCAALPDEEWRTGRVSYDYLDYWGQGTQVTVSS

SEQ ID NO: 30090 - protein, 118 aa, Artificial Sequence
  Chemically Synthesized
QVQLQESGGGLVQAGGSLRLSCAASGTISDIWSMGWYRQAPGKEREFVATIGRGGITYYADSVKGRFTISRDNAKNTVYLQMNSLKPEDTAVYYCAALGADVTAYYYWGQGTQVTVSS

SEQ ID NO: 30091 - protein, 118 aa, Artificial Sequence
  Chemically Synthesized
QVQLQESGGGLVQAGGSLRLSCAASGYISYQDYMGWYRQAPGKERELVASIDLGSSTYYADSVKGRFTISRDNAKNTVYLQMNSLKPEDTAVYYCAAPTKQWIDLQYWGQGTQVTVSS

SEQ ID NO: 30092 - protein, 118 aa, Artificial Sequence
  Chemically Synthesized
QVQLQESGGGLVQAGGSLRLSCAASGNIFRYFVMGWYRQAPGKEREFVAAIDGGGNTNYADSVKGRFTISRDNAKNTVYLQMNSLKPEDTAVYYCAVADEDGGDHGYWGQGTQVTVSS

SEQ ID NO: 30093 - protein, 117 aa, Artificial Sequence
  Chemically Synthesized
QVQLQESGGGLVQAGGSLRLSCAASGSISSVRGMGWYRQAPGKERELLPLLLKVLLPYADSVKGRFTISRDNAKNTVYLQMNSLKPEDTAVYYCAVNRAGYSGHGYWGQGTQVTVSS

SEQ ID NO: 30094 - protein, 116 aa, Artificial Sequence
  Chemically Synthesized
QVQLQESGGGLVQAGGSLRLSCAASGSISYWSMGWYRQAPGKERELVAAITSGATYYADSVKGRFTISRDNAKNTVYLQMNSLKPEDTAVYYCAVGYTVNYTHYYWGQGTQVTVSS

SEQ ID NO: 30095 - protein, 122 aa, Artificial Sequence
  Chemically Synthesized
QVQLQESGGGLVQAGGSLRLSCAASGNIFTVYYMGWYRQAPGKEREFVASIDRGTNTYYADSVKGRFTISRDNAKNTVYLQMNSLKPEDTAVYYCAVRVEYRYGHYYPLTYWGQGTQVTVSS

SEQ ID NO: 30096 - protein, 118 aa, Artificial Sequence
  Chemically Synthesized
QVQLQESGGGLVQAGGSLRLSCAASGYISTRDGMGWYRQAPGKEREFVATINDGGNTYYADSVKGRFTISRDNAKNTVYLQMNSLKPEDTAVYYCAVYYLADHVLYYWGQGTQVTVSS

SEQ ID NO: 30097 - protein, 118 aa, Artificial Sequence
  Chemically Synthesized
QVQLQESGGGLVQAGGSLRLSCAASGYISRSDTMGWYRQAPGKEREFVAAIDPGGNTYYADSVKGRFTISRDNAKNTVYLQMNSLKPEDTAVYYCAVEAVVSGDYRYWGQGTQVTVSS

SEQ ID NO: 30098 - protein, 118 aa, Artificial Sequence
  Chemically Synthesized
QVQLQESGGGLVQAGGSLRLSCAASGTISDVDGMGWYRQAPGKEREFVATINEGGTTNYADSVKGRFTISRDNAKNTVYLQMNSLKPEDTAVYYCAAYRYPSELHSYWGQGTQVTVSS

SEQ ID NO: 30099 - protein, 115 aa, Artificial Sequence
  Chemically Synthesized
QVQLQESGGGLVQAGGSLRLSCAASGNISGQNIMGWYRQAPGKERELVAGISVGTSTNYADSVKGRFTISRDNAKNTVYLQMNSLKPEDTAVYYCAGLPSLHRYWGQGTQVTVSS

SEQ ID NO: 30100 - protein, 118 aa, Artificial Sequence
  Chemically Synthesized
QVQLQESGGGLVQAGGSLRLSCAASGTIFDVDAMGWYRQAPGKERELVAGIGDGGTTNYADSVKGRFTISRDNAKNTVYLQMNSLKPEDTAVYYCAVGDTDVGQHFYWGQGTQVTVSS

SEQ ID NO: 30101 - protein, 126 aa, Artificial Sequence
  Chemically Synthesized
QVQLQESGGGLVQAGGSLRLSCAASGNISTDNTMGWYRQAPGKEREFVATITRGTTTYYADSVKGRFTISRDNAKNTVYLQMNSLKPEDTAVYYCAVATTIYTSVLSRYYARHDYWGQGTQVTVSS

SEQ ID NO: 30102 - protein, 121 aa, Artificial Sequence
  Chemically Synthesized
QVQLQESGGGLVQAGGSLRLSCAASGLFFSGLMGWYRQAPGKEREFVATIADGGITYYADSVKGRFTISRDNAKNTVYLQMNSLKPEDTAVYYCAVVTVSDWYDRRVYEYWGQGTQVTVSS

SEQ ID NO: 30103 - protein, 117 aa, Artificial Sequence
  Chemically Synthesized
QVQLQESGGGLVQAGGSLRLSCAASGYIFASLMGWYRQAPGKEREFVAAITSGANTNYADSVKGRFTISRDNAKNTVYLQMNSLKPEDTAVYYCAADVDSYLYFNYWGQGTQVTVSS

SEQ ID NO: 30104 - protein, 107 aa, Artificial Sequence
  Chemically Synthesized
QVQLQESGGGLVQAGGSLRLSCAASGTIFQYAYMGWYRQAPGKERELVASIGQYADSVKGRFTISRDNAKNTVYLQMNSLKPEDTAVYYCAVEADYWGQGTQVTVSS

SEQ ID NO: 30105 - protein, 118 aa, Artificial Sequence
  Chemically Synthesized
QVQLQESGGGLVQAGGSLRLSCAASGYISAHDYMGWYRQAPGKEREFVATIGYGGSTNYADSVKGRFTISRDNAKNTVYLQMNSLKPEDTAVYYCAAEPSSDLALPYWGQGTQVTVSS

SEQ ID NO: 30106 - protein, 118 aa, Artificial Sequence
  Chemically Synthesized
QVQLQESGGGLVQAGGSLRLSCAASGYISSYDTMGWYRQAPGKEREFVATIDSGGITNYADSVKGRFTISRDNAKNTVYLQMNSLKPEDTAVYYCAASLAVIEGFNYWGQGTQVTVSS

SEQ ID NO: 30107 - protein, 118 aa, Artificial Sequence
  Chemically Synthesized
QVQLQESGGGLVQAGGSLRLSCAASGSIFWSYYMGWYRQAPGKEREFVAGIDTGSNTYYADSVKGRFTISRDNAKNTVYLQMNSLKPEDTAVYYCAAAPWSSRTLRYWGQGTQVTVSS

SEQ ID NO: 30108 - protein, 113 aa, Artificial Sequence
  Chemically Synthesized
QVQLQESGGGLVQAGGSLRLSCAASGNISYDQDMGWYRQAPGKEREFVASIAQGTNTNYADSVKGRFTISRDNAKNTVYLQMNSLKPEDTAVYYCAADYLAYWGQGTQVTVSS

SEQ ID NO: 30109 - protein, 124 aa, Artificial Sequence
  Chemically Synthesized
QVQLQESGGGLVQAGGSLRLSCAASGYISVKWYMGWYRQAPGKERELVAAIGVGTNTYYADSVKGRFTISRDNAKNTVYLQMNSLKPEDTAVYYCAVVHPRPTAYFRAYYYGYWGQGTQVTVSS

SEQ ID NO: 30110 - protein, 121 aa, Artificial Sequence
  Chemically Synthesized
QVQLQESGGGLVQAGGSLRLSCAASGSISGRLDMGWYRQAPGKERELVAVLLSVLVPYADSVKGRFTISRDNAKNTVYLQMNSLKPEDTAVYYCAATEGRQVSYEYFHIYWGQGTQVTVSS

SEQ ID NO: 30111 - protein, 118 aa, Artificial Sequence
  Chemically Synthesized
QVQLQESGGGLVQAGGSLRLSCAASGYISTYIYMGWYRQAPGKERELVASITFGASTYYADSVKGRFTISRDNAKNTVYLQMNSLKPEDTAVYYCAVSIGVRDDYIYWGQGTQVTVSS

SEQ ID NO: 30112 - protein, 122 aa, Artificial Sequence
  Chemically Synthesized
QVQLQESGGGLVQAGGSLRLSCAASGNIFYIYDMGWYRQAPGKERELVASIAWGSSTNYADSVKGRFTISRDNAKNTVYLQMNSLKPEDTAVYYCAVLQRTPFGPVDPLGYWGQGTQVTVSS

SEQ ID NO: 30113 - protein, 125 aa, Artificial Sequence
  Chemically Synthesized
QVQLQESGGGLVQAGGSLRLSCAASGTISSANDMGWYRQAPGKERELVATITYGGSTNYADSVKGRFTISRDNAKNTVYLQMNSLKPEDTAVYYCAAVRRYPQVDSYITRRHSYWGQGTQVTVSS

SEQ ID NO: 30114 - protein, 122 aa, Artificial Sequence
  Chemically Synthesized
QVQLQESGGGLVQAGGSLRLSCAASGNISGWNYMGWYRQAPGKERELVASISYGSTTNYADSVKGRFTISRDNAKNTVYLQMNSLKPEDTAVYYCAADGSSQYYGDTWDHYWGQGTQVTVSS

SEQ ID NO: 30115 - protein, 122 aa, Artificial Sequence
  Chemically Synthesized
QVQLQESGGGLVQAGGSLRLSCAASGSISSGRVMGWYRQAPGKEREFVAAIGPGTNTNYADSVKGRFTISRDNAKNTVYLQMNSLKPEDTAVYYCAAYLDVFAAWVIVFDYWGQGTQVTVSS

SEQ ID NO: 30116 - protein, 121 aa, Artificial Sequence
  Chemically Synthesized
QVQLQESGGGLVQAGGSLRLSCAASGSISAYSGMGWYRQAPGKERELVAGITWGANQYADSVKGRFTISRDNAKNTVYLQMNSLKPEDTAVYYCAADGSQTVGSYDPFDYWGQGTQVTVSS

SEQ ID NO: 30117 - protein, 118 aa, Artificial Sequence
  Chemically Synthesized
QVQLQESGGGLVQAGGSLRLSCAASGYISDWYGMGWYRQAPGKEREFVATIDSGGNTNYADSVKGRFTISRDNAKNTVYLQMNSLKPEDTAVYYCAVFITTQEIHRYWGQGTQVTVSS

SEQ ID NO: 30118 - protein, 122 aa, Artificial Sequence
  Chemically Synthesized
QVQLQESGGGLVQAGGSLRLSCAASGYIFPWYWMGWYRQAPGKEREFVASISYGTSTYYADSVKGRFTISRDNAKNTVYLQMNSLKPEDTAVYYCAAYYPEPSYYTGVHVYWGQGTQVTVSS

SEQ ID NO: 30119 - protein, 122 aa, Artificial Sequence
  Chemically Synthesized
QVQLQESGGGLVQAGGSLRLSCAASGTISPRDFMGWYRQAPGKERELVAAITSGSSTNYADSVKGRFTISRDNAKNTVYLQMNSLKPEDTAVYYCAATYHSLRYFSYPHRYWGQGTQVTVSS

SEQ ID NO: 30120 - protein, 118 aa, Artificial Sequence
  Chemically Synthesized
QVQLQESGGGLVQAGGSLRLSCAASGNIFRVVYMGWYRQAPGKERELVATIGFGATTYYADSVKGRFTISRDNAKNTVYLQMNSLKPEDTAVYYCAVVQTLYLWHYYWGQGTQVTVSS

SEQ ID NO: 30121 - protein, 112 aa, Artificial Sequence
  Chemically Synthesized
QVQLQESGGGLVQAGGSLRLSCAASGTIFGDFDMGWYRQAPGKERELVAGIGDGGTTNYADSVKGRFTISRDNAKNTVYLQMNSLKPEDTAVYYCAVYHNYWGQGTQVTVSS

SEQ ID NO: 30122 - protein, 122 aa, Artificial Sequence
  Chemically Synthesized
QVQLQESGGGLVQAGGSLRLSCAASGSIFDLYDMGWYRQAPGKEREFVAAISPGANTYYADSVKGRFTISRDNAKNTVYLQMNSLKPEDTAVYYCAVDYGVSDTAGAIYRYWGQGTQVTVSS

SEQ ID NO: 30123 - protein, 126 aa, Artificial Sequence
  Chemically Synthesized
QVQLQESGGGLVQAGGSLRLSCAASGTISQPVYMGWYRQAPGKEREFVAGITLGSTTYYADSVKGRFTISRDNAKNTVYLQMNSLKPEDTAVYYCAANVRADENDYYGGVSDFEYWGQGTQVTVSS

SEQ ID NO: 30124 - protein, 118 aa, Artificial Sequence
  Chemically Synthesized
QVQLQESGGGLVQAGGSLRLSCAASGYISRGPYMGWYRQAPGKERELVATIAYGASTYYADSVKGRFTISRDNAKNTVYLQMNSLKPEDTAVYYCAVRPRWLKVHPYWGQGTQVTVSS

SEQ ID NO: 30125 - protein, 117 aa, Artificial Sequence
  Chemically Synthesized
QVQLQESGGGLVQAGGSLRLSCAASGTISGDSMGWYRQAPGKEREFVAGIGDGSNTYYADSVKGRFTISRDNAKNTVYLQMNSLKPEDTAVYYCAAYRYPDDNYVYWGQGTQVTVSS

SEQ ID NO: 30126 - protein, 110 aa, Artificial Sequence
  Chemically Synthesized
QVQLQESGGGLVQAGGSLRLSCAASGTMGWYRQAPGKERELVAGIGGGTSTNYADSVKGRFTISRDNAKNTVYLQMNSLKPEDTAVYYCAVERPYRLGYWGQGTQVTVSS

SEQ ID NO: 30127 - protein, 122 aa, Artificial Sequence
  Chemically Synthesized
QVQLQESGGGLVQAGGSLRLSCAASGNISDLTVMGWYRQAPGKERELVASIGYGGTTYYADSVKGRFTISRDNAKNTVYLQMNSLKPEDTAVYYCAVGNYDAAGIYGRHGYWGQGTQVTVSS

SEQ ID NO: 30128 - protein, 118 aa, Artificial Sequence
  Chemically Synthesized
QVQLQESGGGLVQAGGSLRLSCAASGSISQYLIMGWYRQAPGKERELVASIDGGGSTNYADSVKGRFTISRDNAKNTVYLQMNSLKPEDTAVYYCAVYYQGYGTLDYWGQGTQVTVSS

SEQ ID NO: 30129 - protein, 118 aa, Artificial Sequence
  Chemically Synthesized
QVQLQESGGGLVQAGGSLRLSCAASGTIFAGPDMGWYRQAPGKEREFVAGIDVGATTNYADSVKGRFTISRDNAKNTVYLQMNSLKPEDTAVYYCAAAAAGLLGFYYWGQGTQVTVSS

SEQ ID NO: 30130 - protein, 118 aa, Artificial Sequence
  Chemically Synthesized
QVQLQESGGGLVQAGGSLRLSCAASGYIFHSRYMGWYRQAPGKERELVAAIGYGASTNYADSVKGRFTISRDNAKNTVYLQMNSLKPEDTAVYYCAVYRRFTSCSSYWGQGTQVTVSS

SEQ ID NO: 30131 - protein, 122 aa, Artificial Sequence
  Chemically Synthesized
QVQLQESGGGLVQAGGSLRLSCAASGTISSAGAMGWYRQAPGKERELVATIGGGSITYYADSVKGRFTISRDNAKNTVYLQMNSLKPEDTAVYYCAVLQGEADYPYGSFYYWGQGTQVTVSS

SEQ ID NO: 30132 - protein, 118 aa, Artificial Sequence
  Chemically Synthesized
QVQLQESGGGLVQAGGSLRLSCAASGNISYLGYMGWYRQAPGKEREFVAAISLGSSTNYADSVKGRFTISRDNAKNTVYLQMNSLKPEDTAVYYCAVYYDGGGPLYYWGQGTQVTVSS

SEQ ID NO: 30133 - protein, 126 aa, Artificial Sequence
  Chemically Synthesized
QVQLQESGGGLVQAGGSLRLSCAASGNISFGFYMGWYRQAPGKERELVAGIDDGANTYYADSVKGRFTISRDNAKNTVYLQMNSLKPEDTAVYYCAVLDWVSYYWWSTDWYFLAYWGQGTQVTVSS

SEQ ID NO: 30134 - protein, 117 aa, Artificial Sequence
  Chemically Synthesized
QVQLQESGGGLVQAGGSLRLSCAASGTIFSPFDMGWYRQAPGKERELVASITRGSSTYYADSVKGRFTISRDNAKNTVYLQMNSLKPEDTAVYYCAATTTLTVSFYWGQGTQVTVSS

SEQ ID NO: 30135 - protein, 125 aa, Artificial Sequence
  Chemically Synthesized
QVQLQESGGGLVQAGGSLRLSCAASGTISASPMGWYRQAPGKERELVAAINAGSNTNYADSVKGRFTISRDNAKNTVYLQMNSLKPEDTAVYYCAVTNLVGHNGDVVDDDPFDYWGQGTQVTVSS

SEQ ID NO: 30136 - protein, 118 aa, Artificial Sequence
  Chemically Synthesized
QVQLQESGGGLVQAGGSLRLSCAASGNISPYTRMGWYRQAPGKERELVAGISFGAITNYADSVKGRFTISRDNAKNTVYLQMNSLKPEDTAVYYCAVGDTNTAHHPYWGQGTQVTVSS

SEQ ID NO: 30137 - protein, 126 aa, Artificial Sequence
  Chemically Synthesized
QVQLQESGGGLVQAGGSLRLSCAASGNIFDAYAMGWYRQAPGKERELVAGIDDGTSTNYADSVKGRFTISRDNAKNTVYLQMNSLKPEDTAVYYCAAADLYYRIVAYLWDHSYQYWGQGTQVTVSS

SEQ ID NO: 30138 - protein, 122 aa, Artificial Sequence
  Chemically Synthesized
QVQLQESGGGLVQAGGSLRLSCAASGTISTTYDMGWYRQAPGKEREFVASITLGGSTYYADSVKGRFTISRDNAKNTVYLQMNSLKPEDTAVYYCAAPSWGPWPYLLWYTYWGQGTQVTVSS

SEQ ID NO: 30139 - protein, 118 aa, Artificial Sequence
  Chemically Synthesized
QVQLQESGGGLVQAGGSLRLSCAASGNISYLRFMGWYRQAPGKERELVATIDTGSITYYADSVKGRFTISRDNAKNTVYLQMNSLKPEDTAVYYCAAQYDYDVTLPYWGQGTQVTVSS

SEQ ID NO: 30140 - protein, 126 aa, Artificial Sequence
  Chemically Synthesized
QVQLQESGGGLVQAGGSLRLSCAASGTISEYYYMGWYRQAPGKERELVAAINYGSNTYYADSVKGRFTISRDNAKNTVYLQMNSLKPEDTAVYYCAARPSYRDRGTNGVYFLLYYWGQGTQVTVSS

SEQ ID NO: 30141 - protein, 118 aa, Artificial Sequence
  Chemically Synthesized
QVQLQESGGGLVQAGGSLRLSCAASGSISTTRYMGWYRQAPGKEREFVASITGGSNTNYADSVKGRFTISRDNAKNTVYLQMNSLKPEDTAVYYCAAYYDAYIVHLYWGQGTQVTVSS

SEQ ID NO: 30142 - protein, 116 aa, Artificial Sequence
  Chemically Synthesized
QVQLQESGGGLVQAGGSLRLSCAASGTIFQDDFMGWYRQAPGKEREFVACVTVLIPYADSVKGRFTISRDNAKNTVYLQMNSLKPEDTAVYYCAVYYVWTQILWYWGQGTQVTVSS

SEQ ID NO: 30143 - protein, 126 aa, Artificial Sequence
  Chemically Synthesized
QVQLQESGGGLVQAGGSLRLSCAASGTIFYYRVMGWYRQAPGKEREFVATITRGANTYYADSVKGRFTISRDNAKNTVYLQMNSLKPEDTAVYYCAALYRYYVYRLSDYLYPHEYWGQGTQVTVSS

SEQ ID NO: 30144 - protein, 121 aa, Artificial Sequence
  Chemically Synthesized
QVQLQESGGGLVQAGGSLRLSCAASGSIFIVDYMGWYRQAPGKERELVAGIGDGGITNYADSVKGRFTISRDNAKNTVYLQMNSLKPEDTAVYYCAVEDGGGYPSVMNFYWGQGTQVTVSS

SEQ ID NO: 30145 - protein, 118 aa, Artificial Sequence
  Chemically Synthesized
QVQLQESGGGLVQAGGSLRLSCAASGSISLGKYMGWYRQAPGKERELVAGINTGTTTYYADSVKGRFTISRDNAKNTVYLQMNSLKPEDTAVYYCAVQDGSHRDYRYWGQGTQVTVSS

SEQ ID NO: 30146 - protein, 126 aa, Artificial Sequence
  Chemically Synthesized
QVQLQESGGGLVQAGGSLRLSCAASGNIFVYYDMGWYRQAPGKEREFVAGINDGGNTYYADSVKGRFTISRDNAKNTVYLQMNSLKPEDTAVYYCAAYYSYTNEAPSSDTVDHTYWGQGTQVTVSS

SEQ ID NO: 30147 - protein, 126 aa, Artificial Sequence
  Chemically Synthesized
QVQLQESGGGLVQAGGSLRLSCAASGTISALEYMGWYRQAPGKEREFVATINIGSNTNYADSVKGRFTISRDNAKNTVYLQMNSLKPEDTAVYYCAVGVIGLYSDYYREYSVYGYWGQGTQVTVSS

SEQ ID NO: 30148 - protein, 126 aa, Artificial Sequence
  Chemically Synthesized
QVQLQESGGGLVQAGGSLRLSCAASGTISSSEHMGWYRQAPGKEREFVAAIDYGTNTYYADSVKGRFTISRDNAKNTVYLQMNSLKPEDTAVYYCAARTTRTVSTIQLRPTGFFYWGQGTQVTVSS

SEQ ID NO: 30149 - protein, 126 aa, Artificial Sequence
  Chemically Synthesized
QVQLQESGGGLVQAGGSLRLSCAASGNISYPSGMGWYRQAPGKEREFVAAIARGGSTYYADSVKGRFTISRDNAKNTVYLQMNSLKPEDTAVYYCAVDWQQYGYDGVSQYTYHSYWGQGTQVTVSS

SEQ ID NO: 30150 - protein, 118 aa, Artificial Sequence
  Chemically Synthesized
QVQLQESGGGLVQAGGSLRLSCAASGSIFPGEYMGWYRQAPGKERELVAGIDAGAITNYADSVKGRFTISRDNAKNTVYLQMNSLKPEDTAVYYCAAGREAYPDYPYWGQGTQVTVSS

SEQ ID NO: 30151 - protein, 118 aa, Artificial Sequence
  Chemically Synthesized
QVQLQESGGGLVQAGGSLRLSCAASGNIFYNGTMGWYRQAPGKERELVATITYGGNTYYADSVKGRFTISRDNAKNTVYLQMNSLKPEDTAVYYCAARIWRYYRYPYWGQGTQVTVSS

SEQ ID NO: 30152 - protein, 111 aa, Artificial Sequence
  Chemically Synthesized
QVQLQESGGGLVQAGGSLRLSCAASGSISGDIKMGWYRQAPGKERELVATIAGGSITNYADSVKGRFTISRDNAKNTVYLQMNSLKPEDTAVYYCAALMYWGQGTQVTVSS

SEQ ID NO: 30153 - protein, 118 aa, Artificial Sequence
  Chemically Synthesized
QVQLQESGGGLVQAGGSLRLSCAASGYIFDPYYMGWYRQAPGKERELVATIAGGAITYYADSVKGRFTISRDNAKNTVYLQMNSLKPEDTAVYYCAATLYSQHYHTYWGQGTQVTVSS

SEQ ID NO: 30154 - protein, 115 aa, Artificial Sequence
  Chemically Synthesized
QVQLQESGGGLVQAGGSLRLSCAASGNISPLAGMGWYRQAPGKERELVAAITSGTNTYYADSVKGRFTISRDNAKNTVYLQMNSLKPEDTAVYYCAYAYRLHGYWGQGTQVTVSS

SEQ ID NO: 30155 - protein, 122 aa, Artificial Sequence
  Chemically Synthesized
QVQLQESGGGLVQAGGSLRLSCAASGYIFDSYYMGWYRQAPGKEREFVAGITDGTSTNYADSVKGRFTISRDNAKNTVYLQMNSLKPEDTAVYYCAAYLLGQDNYDAYFVYWGQGTQVTVSS

SEQ ID NO: 30156 - protein, 122 aa, Artificial Sequence
  Chemically Synthesized
QVQLQESGGGLVQAGGSLRLSCAASGYISTWNYMGWYRQAPGKEREFVATITPGATTNYADSVKGRFTISRDNAKNTVYLQMNSLKPEDTAVYYCAVEGYQPYVPPYYHLYWGQGTQVTVSS

SEQ ID NO: 30157 - protein, 122 aa, Artificial Sequence
  Chemically Synthesized
QVQLQESGGGLVQAGGSLRLSCAASGYISDDPYMGWYRQAPGKEREFVAAITIGATTYYADSVKGRFTISRDNAKNTVYLQMNSLKPEDTAVYYCAVVWYRSDLDYEFHYYWGQGTQVTVSS

SEQ ID NO: 30158 - protein, 122 aa, Artificial Sequence
  Chemically Synthesized
QVQLQESGGGLVQAGGSLRLSCAASGTIFGWYYMGWYRQAPGKEREFVAGITAGGTTNYADSVKGRFTISRDNAKNTVYLQMNSLKPEDTAVYYCAAGLANHNHVRFYFAYWGQGTQVTVSS

SEQ ID NO: 30159 - protein, 119 aa, Artificial Sequence
  Chemically Synthesized
QVQLQESGGGLVQAGGSLRLSCAASGSISAVPATMGWYRQAPGKEREFVAGIATGTITNYADSVKGRFTISRDNAKNTVYLQMNSLKPEDTAVYYCAAPWATPNGLGYWGQGTQVTVSS

SEQ ID NO: 30160 - protein, 112 aa, Artificial Sequence
  Chemically Synthesized
QVQLQESGGGLVQAGGSLRLSCAASGYISRRDYMGWYRQAPGKEREFVAAIGYGGSTNYADSVKGRFTISRDNAKNTVYLQMNSLKPEDTAVYYCAAYRSYWGQGTQVTVSS

SEQ ID NO: 30161 - protein, 122 aa, Artificial Sequence
  Chemically Synthesized
QVQLQESGGGLVQAGGSLRLSCAASGNISDWNYMGWYRQAPGKEREFVATIASGTTTYYADSVKGRFTISRDNAKNTVYLQMNSLKPEDTAVYYCAAEDYRYDVIPRYYLYWGQGTQVTVSS

SEQ ID NO: 30162 - protein, 122 aa, Artificial Sequence
  Chemically Synthesized
QVQLQESGGGLVQAGGSLRLSCAASGNISDYNYMGWYRQAPGKEREFVATITAGTSTNYADSVKGRFTISRDNAKNTVYLQMNSLKPEDTAVYYCAAEVFVNRYYAGYYRYWGQGTQVTVSS

SEQ ID NO: 30163 - protein, 118 aa, Artificial Sequence
  Chemically Synthesized
QVQLQESGGGLVQAGGSLRLSCAASGTISYYYYMGWYRQAPGKERELVATIDPGTTTNYADSVKGRFTISRDNAKNTVYLQMNSLKPEDTAVYYCAAPGNDWDILGYWGQGTQVTVSS

SEQ ID NO: 30164 - protein, 117 aa, Artificial Sequence
  Chemically Synthesized
QVQLQESGGGLVQAGGSLRLSCAASGTIFDYNWMGWYRQAPGKEREFVATITSGGITYYADSVKGRFTISRDNAKNTVYLQMNSLKPEDTAVYYCAVEYPRYFYQYWGQGTQVTVSS

SEQ ID NO: 30165 - protein, 111 aa, Artificial Sequence
  Chemically Synthesized
QVQLQESGGGLVQAGGSLRLSCAASGLFMGWYRQAPGKEREFVAAIDSGGTTNYADSVKGRFTISRDNAKNTVYLQMNSLKPEDTAVYYCAAIHYDYLEYWGQGTQVTVSS

SEQ ID NO: 30166 - protein, 118 aa, Artificial Sequence
  Chemically Synthesized
QVQLQESGGGLVQAGGSLRLSCAASGNIFKPQIMGWYRQAPGKEREFVAAISRGSTTYYADSVKGRFTISRDNAKNTVYLQMNSLKPEDTAVYYCAARHQDRLFHRYWGQGTQVTVSS

SEQ ID NO: 30167 - protein, 122 aa, Artificial Sequence
  Chemically Synthesized
QVQLQESGGGLVQAGGSLRLSCAASGSIFRLSAMGWYRQAPGKERELVAAINSGGITYYADSVKGRFTISRDNAKNTVYLQMNSLKPEDTAVYYCAVYLYWDYVLYSDHPYWGQGTQVTVSS

SEQ ID NO: 30168 - protein, 118 aa, Artificial Sequence
  Chemically Synthesized
QVQLQESGGGLVQAGGSLRLSCAASGSISRNPYMGWYRQAPGKEREFVATINHGGNTYYADSVKGRFTISRDNAKNTVYLQMNSLKPEDTAVYYCAVVAWFYRRHYYWGQGTQVTVSS

SEQ ID NO: 30169 - protein, 122 aa, Artificial Sequence
  Chemically Synthesized
QVQLQESGGGLVQAGGSLRLSCAASGTIFYWYDMGWYRQAPGKEREFVASIGDGANTNYADSVKGRFTISRDNAKNTVYLQMNSLKPEDTAVYYCAADLINSASKTYYHWYWGQGTQVTVSS

SEQ ID NO: 30170 - protein, 122 aa, Artificial Sequence
  Chemically Synthesized
QVQLQESGGGLVQAGGSLRLSCAASGNIFTAYYMGWYRQAPGKERELVAAIGYGSSTNYADSVKGRFTISRDNAKNTVYLQMNSLKPEDTAVYYCAAGLERVGGGAYYLAYWGQGTQVTVSS

SEQ ID NO: 30171 - protein, 118 aa, Artificial Sequence
  Chemically Synthesized
QVQLQESGGGLVQAGGSLRLSCAASGTIFYVTQMGWYRQAPGKERELVAGIALGTTTNYADSVKGRFTISRDNAKNTVYLQMNSLKPEDTAVYYCAAYGVYGQFLTYWGQGTQVTVSS

SEQ ID NO: 30172 - protein, 126 aa, Artificial Sequence
  Chemically Synthesized
QVQLQESGGGLVQAGGSLRLSCAASGTISDYRFMGWYRQAPGKEREFVAAIAYGTNTYYADSVKGRFTISRDNAKNTVYLQMNSLKPEDTAVYYCAVTTWQVDVYDDQQRYYLVYWGQGTQVTVSS

SEQ ID NO: 30173 - protein, 122 aa, Artificial Sequence
  Chemically Synthesized
QVQLQESGGGLVQAGGSLRLSCAASGNISHYDGMGWYRQAPGKEREFVATISRGASTNYADSVKGRFTISRDNAKNTVYLQMNSLKPEDTAVYYCAVVWYRSDLDYEVHYYWGQGTQVTVSS

SEQ ID NO: 30174 - protein, 118 aa, Artificial Sequence
  Chemically Synthesized
QVQLQESGGGLVQAGGSLRLSCAASGTISSYLRMGWYRQAPGKERELVAAIAGGSTTYYADSVKGRFTISRDNAKNTVYLQMNSLKPEDTAVYYCAVIGYVQVDYPYWGQGTQVTVSS

SEQ ID NO: 30175 - protein, 126 aa, Artificial Sequence
  Chemically Synthesized
QVQLQESGGGLVQAGGSLRLSCAASGNISRRWYMGWYRQAPGKERELVASIASGANTYYADSVKGRFTISRDNAKNTVYLQMNSLKPEDTAVYYCAVVNRDPAIYDGYYYWSYLYWGQGTQVTVSS

SEQ ID NO: 30176 - protein, 118 aa, Artificial Sequence
  Chemically Synthesized
QVQLQESGGGLVQAGGSLRLSCAASGSIFGRYRMGWYRQAPGKERELVAGITYGGNTYYADSVKGRFTISRDNAKNTVYLQMNSLKPEDTAVYYCAVPRYYRGNHLYWGQGTQVTVSS

SEQ ID NO: 30177 - protein, 118 aa, Artificial Sequence
  Chemically Synthesized
QVQLQESGGGLVQAGGSLRLSCAASGYISYPYFMGWYRQAPGKERELVAAIDGGGSTYYADSVKGRFTISRDNAKNTVYLQMNSLKPEDTAVYYCAVINSYEFYHAYWGQGTQVTVSS

SEQ ID NO: 30178 - protein, 122 aa, Artificial Sequence
  Chemically Synthesized
QVQLQESGGGLVQAGGSLRLSCAASGYISDATRMGWYRQAPGKERELVATINYGGITNYADSVKGRFTISRDNAKNTVYLQMNSLKPEDTAVYYCAVNDDEKYLWDYYLLYWGQGTQVTVSS

SEQ ID NO: 30179 - protein, 118 aa, Artificial Sequence
  Chemically Synthesized
QVQLQESGGGLVQAGGSLRLSCAASGYIFSRFYMGWYRQAPGKEREFVAGIAYGTITYYADSVKGRFTISRDNAKNTVYLQMNSLKPEDTAVYYCAVYPNRYADLSYWGQGTQVTVSS

SEQ ID NO: 30180 - protein, 126 aa, Artificial Sequence
  Chemically Synthesized
QVQLQESGGGLVQAGGSLRLSCAASGYISNTDTMGWYRQAPGKEREFVATISVGGSTNYADSVKGRFTISRDNAKNTVYLQMNSLKPEDTAVYYCAVYGKQDTSERKVRVRTYNYWGQGTQVTVSS

SEQ ID NO: 30181 - protein, 118 aa, Artificial Sequence
  Chemically Synthesized
QVQLQESGGGLVQAGGSLRLSCAASGNIFYLRGMGWYRQAPGKERELVAAISAGSSTNYADSVKGRFTISRDNAKNTVYLQMNSLKPEDTAVYYCAAQHWPWGRYAYWGQGTQVTVSS

SEQ ID NO: 30182 - protein, 122 aa, Artificial Sequence
  Chemically Synthesized
QVQLQESGGGLVQAGGSLRLSCAASGYIFTLISMGWYRQAPGKEREFVATISNGSTTNYADSVKGRFTISRDNAKNTVYLQMNSLKPEDTAVYYCAAYVGVVEYLSVVHRYWGQGTQVTVSS

SEQ ID NO: 30183 - protein, 122 aa, Artificial Sequence
  Chemically Synthesized
QVQLQESGGGLVQAGGSLRLSCAASGSISPRYAMGWYRQAPGKEREFVASISSGSNTYYADSVKGRFTISRDNAKNTVYLQMNSLKPEDTAVYYCAVLADTSEYSGATHYYWGQGTQVTVSS

SEQ ID NO: 30184 - protein, 118 aa, Artificial Sequence
  Chemically Synthesized
QVQLQESGGGLVQAGGSLRLSCAASGNISYRRYMGWYRQAPGKERELVASISYGANTNYADSVKGRFTISRDNAKNTVYLQMNSLKPEDTAVYYCAALLRPHRYLTYWGQGTQVTVSS

SEQ ID NO: 30185 - protein, 121 aa, Artificial Sequence
  Chemically Synthesized
QVQLQESGGGLVQAGGSLRLSCAASGTIFYDNRMGWYRQAPGKERELVPVLLTVVVPYADSVKGRFTISRDNAKNTVYLQMNSLKPEDTAVYYCAAWQGREYFPDDEHAYWGQGTQVTVSS

SEQ ID NO: 30186 - protein, 118 aa, Artificial Sequence
  Chemically Synthesized
QVQLQESGGGLVQAGGSLRLSCAASGNISDWSYMGWYRQAPGKEREFVATIAAGSITYYADSVKGRFTISRDNAKNTVYLQMNSLKPEDTAVYYCAVIANRAYEYAYWGQGTQVTVSS

SEQ ID NO: 30187 - protein, 119 aa, Artificial Sequence
  Chemically Synthesized
QVQLQESGGGLVQAGGSLRLSCAASGTISARGFMGWYRQAPGKEREFVAGITNGSSTYYADSVKGRFTISRDNAKNTVYLQMNSLKPEDTAVYYCAVKRTNWWVHSWYWGQGTQVTVSS

SEQ ID NO: 30188 - protein, 118 aa, Artificial Sequence
  Chemically Synthesized
QVQLQESGGGLVQAGGSLRLSCAASGTIFYWYDMGWYRQAPGKEREFVAAIALGGTTYYADSVKGRFTISRDNAKNTVYLQMNSLKPEDTAVYYCAAYLTTIDYFTYWGQGTQVTVSS

SEQ ID NO: 30189 - protein, 117 aa, Artificial Sequence
  Chemically Synthesized
QVQLQESGGGLVQAGGSLRLSCAASGTIFGGEAMGWYRQAPGKERELLPVLLTVVVPYADSVKGRFTISRDNAKNTVYLQMNSLKPEDTAVYYCAAGNWPWWFLSYWGQGTQVTVSS

SEQ ID NO: 30190 - protein, 118 aa, Artificial Sequence
  Chemically Synthesized
QVQLQESGGGLVQAGGSLRLSCAASGYIFARSAMGWYRQAPGKEREFVAAINWGSITYYADSVKGRFTISRDNAKNTVYLQMNSLKPEDTAVYYCAVADPDHRYHSYWGQGTQVTVSS

SEQ ID NO: 30191 - protein, 118 aa, Artificial Sequence
  Chemically Synthesized
QVQLQESGGGLVQAGGSLRLSCAASGSISDGASMGWYRQAPGKERELVAAIDSGTNTYYADSVKGRFTISRDNAKNTVYLQMNSLKPEDTAVYYCAVARWPGGAFGYWGQGTQVTVSS

SEQ ID NO: 30192 - protein, 107 aa, Artificial Sequence
  Chemically Synthesized
QVQLQESGGGLVQAGGSLRLSCAASGNISNDFAMGWYRQAPGKERELVVPYADSVKGRFTISRDNAKNTVYLQMNSLKPEDTAVYYCAVYDGDHLYWGQGTQVTVSS

SEQ ID NO: 30193 - protein, 122 aa, Artificial Sequence
  Chemically Synthesized
QVQLQESGGGLVQAGGSLRLSCAASGSISRLDAMGWYRQAPGKEREFVAAIGGGGSTYYADSVKGRFTISRDNAKNTVYLQMNSLKPEDTAVYYCAVDRGAAYRRGDSLRYWGQGTQVTVSS

SEQ ID NO: 30194 - protein, 118 aa, Artificial Sequence
  Chemically Synthesized
QVQLQESGGGLVQAGGSLRLSCAASGSISDGYYMGWYRQAPGKERELVAAINGGGITYYADSVKGRFTISRDNAKNTVYLQMNSLKPEDTAVYYCAAQTGGRGGLRYWGQGTQVTVSS

SEQ ID NO: 30195 - protein, 117 aa, Artificial Sequence
  Chemically Synthesized
QVQLQESGGGLVQAGGSLRLSCAASGNISNIDYMGWYRQAPGKERELVPVLISVLLPYADSVKGRFTISRDNAKNTVYLQMNSLKPEDTAVYYCAVAYKWYPIHYYWGQGTQVTVSS

SEQ ID NO: 30196 - protein, 118 aa, Artificial Sequence
  Chemically Synthesized
QVQLQESGGGLVQAGGSLRLSCAASGSIFNTGGMGWYRQAPGKERELVAAITQGGNTYYADSVKGRFTISRDNAKNTVYLQMNSLKPEDTAVYYCAVLEYDPYVFGYWGQGTQVTVSS

SEQ ID NO: 30197 - protein, 126 aa, Artificial Sequence
  Chemically Synthesized
QVQLQESGGGLVQAGGSLRLSCAASGNISYSYGMGWYRQAPGKERELVATIATGTSTNYADSVKGRFTISRDNAKNTVYLQMNSLKPEDTAVYYCAVGPHYQYGLTRPVSVGHGYWGQGTQVTVSS

SEQ ID NO: 30198 - protein, 121 aa, Artificial Sequence
  Chemically Synthesized
QVQLQESGGGLVQAGGSLRLSCAASGTIFLDDNMGWYRQAPGKERELVAGISVGANTNYADSVKGRFTISRDNAKNTVYLQMNSLKPEDTAVYYCAVYSWPDGEYWSTFYWGQGTQVTVSS

SEQ ID NO: 30199 - protein, 118 aa, Artificial Sequence
  Chemically Synthesized
QVQLQESGGGLVQAGGSLRLSCAASGSIFYRLYMGWYRQAPGKERELVATIGKGSNTNYADSVKGRFTISRDNAKNTVYLQMNSLKPEDTAVYYCAAYRYRYNYLVYWGQGTQVTVSS

SEQ ID NO: 30200 - protein, 116 aa, Artificial Sequence
  Chemically Synthesized
QVQLQESGGGLVQAGGSLRLSCAASGNISSLVMGWYRQAPGKEREFVAILLTVVVPYADSVKGRFTISRDNAKNTVYLQMNSLKPEDTAVYYCAVTTVTPRWHPYWGQGTQVTVSS

SEQ ID NO: 30201 - protein, 126 aa, Artificial Sequence
  Chemically Synthesized
QVQLQESGGGLVQAGGSLRLSCAASGSISDWYFMGWYRQAPGKEREFVASINYGTNTNYADSVKGRFTISRDNAKNTVYLQMNSLKPEDTAVYYCAVEGRWYTYSDEYTVAPLYYWGQGTQVTVSS

SEQ ID NO: 30202 - protein, 118 aa, Artificial Sequence
  Chemically Synthesized
QVQLQESGGGLVQAGGSLRLSCAASGTISYKNVMGWYRQAPGKERELVAAITRGATTYYADSVKGRFTISRDNAKNTVYLQMNSLKPEDTAVYYCAATGWWYRGHLYWGQGTQVTVSS

SEQ ID NO: 30203 - protein, 122 aa, Artificial Sequence
  Chemically Synthesized
QVQLQESGGGLVQAGGSLRLSCAASGNISHYDGMGWYRQAPGKEREFVATISRGASTNYADSVKGRFTISRDNAKNTVYLQMNSLKPEDTAVYYCAVVWYRSDLDYDFHYYWGQGTQVTVSS

SEQ ID NO: 30204 - protein, 122 aa, Artificial Sequence
  Chemically Synthesized
QVQLQESGGGLVQAGGSLRLSCAASGNISYAYYMGWYRQAPGKEREFVASINWGTTTYYADSVKGRFTISRDNAKNTVYLQMNSLKPEDTAVYYCAAWSDVPRSDEPTHSYWGQGTQVTVSS

SEQ ID NO: 30205 - protein, 122 aa, Artificial Sequence
  Chemically Synthesized
QVQLQESGGGLVQAGGSLRLSCAASGTISSYWDMGWYRQAPGKEREFVAAINQGSSTNYADSVKGRFTISRDNAKNTVYLQMNSLKPEDTAVYYCAANGADDGTIGQSHGYWGQGTQVTVSS

SEQ ID NO: 30206 - protein, 118 aa, Artificial Sequence
  Chemically Synthesized
QVQLQESGGGLVQAGGSLRLSCAASGSIFYNLIMGWYRQAPGKERELVASISPGANTNYADSVKGRFTISRDNAKNTVYLQMNSLKPEDTAVYYCAVYFLSYYLHPYWGQGTQVTVSS

SEQ ID NO: 30207 - protein, 121 aa, Artificial Sequence
  Chemically Synthesized
QVQLQESGGGLVQAGGSLRLSCAASGNIFASLMGWYRQAPGKEREFVAGIDYGTITYYADSVKGRFTISRDNAKNTVYLQMNSLKPEDTAVYYCAAELWRSPQSYQPHFYWGQGTQVTVSS

SEQ ID NO: 30208 - protein, 122 aa, Artificial Sequence
  Chemically Synthesized
QVQLQESGGGLVQAGGSLRLSCAASGTISREYYMGWYRQAPGKERELVAAIGTGGNTYYADSVKGRFTISRDNAKNTVYLQMNSLKPEDTAVYYCAVKFARRSYTSQLYRYWGQGTQVTVSS

SEQ ID NO: 30209 - protein, 113 aa, Artificial Sequence
  Chemically Synthesized
QVQLQESGGGLVQAGGSLRLSCAASGTIFWYWNMGWYRQAPGKEREFVASITYGGSTNYADSVKGRFTISRDNAKNTVYLQMNSLKPEDTAVYYCAADDLWYWGQGTQVTVSS

SEQ ID NO: 30210 - protein, 123 aa, Artificial Sequence
  Chemically Synthesized
QVQLQESGGGLVQAGGSLRLSCAASGTISYLGYMGWYRQAPGKERELVAAIAEYGGTTYYADSVKGRFTISRDNAKNTVYLQMNSLKPEDTAVYYCAVPYPTAYAGWAYHYYWGQGTQVTVSS

SEQ ID NO: 30211 - protein, 122 aa, Artificial Sequence
  Chemically Synthesized
QVQLQESGGGLVQAGGSLRLSCAASGTISAGLHMGWYRQAPGKERELVAGIDSGSSTNYADSVKGRFTISRDNAKNTVYLQMNSLKPEDTAVYYCAAGVYFLQDYRYYFAYWGQGTQVTVSS

SEQ ID NO: 30212 - protein, 122 aa, Artificial Sequence
  Chemically Synthesized
QVQLQESGGGLVQAGGSLRLSCAASGSIFTYRTMGWYRQAPGKEREFVAAISGGASTNYADSVKGRFTISRDNAKNTVYLQMNSLKPEDTAVYYCAAYRGYFSYRRPYYVYWGQGTQVTVSS

SEQ ID NO: 30213 - protein, 122 aa, Artificial Sequence
  Chemically Synthesized
QVQLQESGGGLVQAGGSLRLSCAASGYIFRVYYMGWYRQAPGKEREFVAAINRGGNTNYADSVKGRFTISRDNAKNTVYLQMNSLKPEDTAVYYCAVVPLRRQYLWADYDYWGQGTQVTVSS

SEQ ID NO: 30214 - protein, 118 aa, Artificial Sequence
  Chemically Synthesized
QVQLQESGGGLVQAGGSLRLSCAASGNIFDASVMGWYRQAPGKERELVATITYGTSTNYADSVKGRFTISRDNAKNTVYLQMNSLKPEDTAVYYCAVAIGDANIHYYWGQGTQVTVSS

SEQ ID NO: 30215 - protein, 118 aa, Artificial Sequence
  Chemically Synthesized
QVQLQESGGGLVQAGGSLRLSCAASGYISDDPYMGWYRQAPGKEREFVAAITIGATTYYADSVKGRFTISRDNAKNTVYLQMNSLKPEDTAVYYCAVIVRSASQYDYWGQGTQVTVSS

SEQ ID NO: 30216 - protein, 118 aa, Artificial Sequence
  Chemically Synthesized
QVQLQESGGGLVQAGGSLRLSCAASGSIFRVRKMGWYRQAPGKEREFVASIASGAITNYADSVKGRFTISRDNAKNTVYLQMNSLKPEDTAVYYCAASYYYTRGLRYWGQGTQVTVSS

SEQ ID NO: 30217 - protein, 118 aa, Artificial Sequence
  Chemically Synthesized
QVQLQESGGGLVQAGGSLRLSCAASGSISRFYFMGWYRQAPGKERELVAAINYGTTTYYADSVKGRFTISRDNAKNTVYLQMNSLKPEDTAVYYCAAIPRYYKRYGYWGQGTQVTVSS

SEQ ID NO: 30218 - protein, 119 aa, Artificial Sequence
  Chemically Synthesized
QVQLQESGGGLVQAGGSLRLSCAASGNISYAVRMGWYRQAPGKERELVATINWGGSTNYADSVKGRFTISRDNAKNTVYLQMNSLKPEDTAVYYCAVAPSIYRYYYKYWGQGTQVTVSS

SEQ ID NO: 30219 - protein, 122 aa, Artificial Sequence
  Chemically Synthesized
QVQLQESGGGLVQAGGSLRLSCAASGYISGHGGMGWYRQAPGKERELVAAIGTGTTTYYADSVKGRFTISRDNAKNTVYLQMNSLKPEDTAVYYCAVAILEDGELPDGHPYWGQGTQVTVSS

SEQ ID NO: 30220 - protein, 122 aa, Artificial Sequence
  Chemically Synthesized
QVQLQESGGGLVQAGGSLRLSCAASGSIFLSTYMGWYRQAPGKEREFVATITNGTTTYYADSVKGRFTISRDNAKNTVYLQMNSLKPEDTAVYYCAAEYYRDDQKPFYHLYWGQGTQVTVSS

SEQ ID NO: 30221 - protein, 122 aa, Artificial Sequence
  Chemically Synthesized
QVQLQESGGGLVQAGGSLRLSCAASGTIFTPYYMGWYRQAPGKERELVAGINIGASTYYADSVKGRFTISRDNAKNTVYLQMNSLKPEDTAVYYCAATYYDGQGGSPPLTYWGQGTQVTVSS

SEQ ID NO: 30222 - protein, 122 aa, Artificial Sequence
  Chemically Synthesized
QVQLQESGGGLVQAGGSLRLSCAASGYISDDPYMGWYRQAPGKEREFVAAITIGATTYYADSVKGRFTISRDNAKNTVYLQMNSLKPEDTAVYYCAAGWSIDGLLLYQLGYWGQGTQVTVSS

SEQ ID NO: 30223 - protein, 118 aa, Artificial Sequence
  Chemically Synthesized
QVQLQESGGGLVQAGGSLRLSCAASGYIFRYVGMGWYRQAPGKERELVASIAYGTTTYYADSVKGRFTISRDNAKNTVYLQMNSLKPEDTAVYYCAAWRPWGRGLWYWGQGTQVTVSS

SEQ ID NO: 30224 - protein, 117 aa, Artificial Sequence
  Chemically Synthesized
QVQLQESGGGLVQAGGSLRLSCAASGTIFATARMGWYRQAPGKERELVAGIANGTNTYYADSVKGRFTISRDNAKNTVYLQMNSLKPEDTAVYYCAELRGYYDHYYWGQGTQVTVSS

SEQ ID NO: 30225 - protein, 122 aa, Artificial Sequence
  Chemically Synthesized
QVQLQESGGGLVQAGGSLRLSCAASGYISGANFMGWYRQAPGKEREFVATIAGGSITNYADSVKGRFTISRDNAKNTVYLQMNSLKPEDTAVYYCAAGWSIEGLLLYQLGYWGQGTQVTVSS

SEQ ID NO: 30226 - protein, 122 aa, Artificial Sequence
  Chemically Synthesized
QVQLQESGGGLVQAGGSLRLSCAASGTISDNRYMGWYRQAPGKERELVAAIGQGAITYYADSVKGRFTISRDNAKNTVYLQMNSLKPEDTAVYYCAAGWSIEGLLLYQLGYWGQGTQVTVSS

SEQ ID NO: 30227 - protein, 118 aa, Artificial Sequence
  Chemically Synthesized
QVQLQESGGGLVQAGGSLRLSCAASGTIFSRSRMGWYRQAPGKEREFVAAISRGSITNYADSVKGRFTISRDNAKNTVYLQMNSLKPEDTAVYYCAVEHRWLTIHVYWGQGTQVTVSS

SEQ ID NO: 30228 - protein, 118 aa, Artificial Sequence
  Chemically Synthesized
QVQLQESGGGLVQAGGSLRLSCAASGTIFLSYVMGWYRQAPGKERELVATIATGGSTNYADSVKGRFTISRDNAKNTVYLQMNSLKPEDTAVYYCAVAPTYGYYLFYWGQGTQVTVSS

SEQ ID NO: 30229 - protein, 126 aa, Artificial Sequence
  Chemically Synthesized
QVQLQESGGGLVQAGGSLRLSCAASGTISTSVLMGWYRQAPGKEREFVAGISTGSTTYYADSVKGRFTISRDNAKNTVYLQMNSLKPEDTAVYYCAVFVPSPDIAVYTRVYALKYWGQGTQVTVSS

SEQ ID NO: 30230 - protein, 122 aa, Artificial Sequence
  Chemically Synthesized
QVQLQESGGGLVQAGGSLRLSCAASGYISSYYGMGWYRQAPGKEREFVAAIGVGGITYYADSVKGRFTISRDNAKNTVYLQMNSLKPEDTAVYYCAAVTLLSTTVQIGHIYWGQGTQVTVSS

SEQ ID NO: 30231 - protein, 125 aa, Artificial Sequence
  Chemically Synthesized
QVQLQESGGGLVQAGGSLRLSCAASGNIFSVSTMGWYRQAPGKEREFVAGIGSGSNTYYADSVKGRFTISRDNAKNTVYLQMNSLKPEDTAVYYCAARYSSVLVSLTTCVTTLYWGQGTQVTVSS

SEQ ID NO: 30232 - protein, 118 aa, Artificial Sequence
  Chemically Synthesized
QVQLQESGGGLVQAGGSLRLSCAASGNISAPYIMGWYRQAPGKERELVAAINQGSTTYYADSVKGRFTISRDNAKNTVYLQMNSLKPEDTAVYYCAAYLPLVYHLDYWGQGTQVTVSS

SEQ ID NO: 30233 - protein, 118 aa, Artificial Sequence
  Chemically Synthesized
QVQLQESGGGLVQAGGSLRLSCAASGTISYDVPMGWYRQAPGKEREFVASIAVGGITNYADSVKGRFTISRDNAKNTVYLQMNSLKPEDTAVYYCAVIWLYGLNHNYWGQGTQVTVSS

SEQ ID NO: 30234 - protein, 126 aa, Artificial Sequence
  Chemically Synthesized
QVQLQESGGGLVQAGGSLRLSCAASGYISYGYGMGWYRQAPGKERELVASITVGGNTNYADSVKGRFTISRDNAKNTVYLQMNSLKPEDTAVYYCAAHYTGNYYWLLGYGGAHNYWGQGTQVTVSS

SEQ ID NO: 30235 - protein, 118 aa, Artificial Sequence
  Chemically Synthesized
QVQLQESGGGLVQAGGSLRLSCAASGTISGWHYMGWYRQAPGKERELVAGIAPGSTTYYADSVKGRFTISRDNAKNTVYLQMNSLKPEDTAVYYCAVRYAYDLSYKYWGQGTQVTVSS

SEQ ID NO: 30236 - protein, 118 aa, Artificial Sequence
  Chemically Synthesized
QVQLQESGGGLVQAGGSLRLSCAASGSISRWYRMGWYRQAPGKERELVASIGYGANTNYADSVKGRFTISRDNAKNTVYLQMNSLKPEDTAVYYCAVLSYWPFRLRYWGQGTQVTVSS

SEQ ID NO: 30237 - protein, 118 aa, Artificial Sequence
  Chemically Synthesized
QVQLQESGGGLVQAGGSLRLSCAASGTIFYYGFMGWYRQAPGKERELVAGISWGGITNYADSVKGRFTISRDNAKNTVYLQMNSLKPEDTAVYYCAAYDDAFAAYTYWGQGTQVTVSS

SEQ ID NO: 30238 - protein, 126 aa, Artificial Sequence
  Chemically Synthesized
QVQLQESGGGLVQAGGSLRLSCAASGYISDDPYMGWYRQAPGKEREFVAAITIGATTYYADSVKGRFTISRDNAKNTVYLQMNSLKPEDTAVYYCAVRHDTNQQYPVPFGRYYRYWGQGTQVTVSS

SEQ ID NO: 30239 - protein, 121 aa, Artificial Sequence
  Chemically Synthesized
QVQLQESGGGLVQAGGSLRLSCAASGTISYSKTMGWYRQAPGKERELLPVLVSVVIPYADSVKGRFTISRDNAKNTVYLQMNSLKPEDTAVYYCAANYSDDRHGDVGHGYWGQGTQVTVSS

SEQ ID NO: 30240 - protein, 122 aa, Artificial Sequence
  Chemically Synthesized
QVQLQESGGGLVQAGGSLRLSCAASGNISHYDGMGWYRQAPGKEREFVATISRGASTNYADSVKGRFTISRDNAKNTVYLQMNSLKPEDTAVYYCAVDWYRSDLDYEFHYYWGQGTQVTVSS

SEQ ID NO: 30241 - protein, 118 aa, Artificial Sequence
  Chemically Synthesized
QVQLQESGGGLVQAGGSLRLSCAASGYIFGYYYMGWYRQAPGKERELVASIGYGGNTYYADSVKGRFTISRDNAKNTVYLQMNSLKPEDTAVYYCAVTRVRSWRHLYWGQGTQVTVSS

SEQ ID NO: 30242 - protein, 113 aa, Artificial Sequence
  Chemically Synthesized
QVQLQESGGGLVQAGGSLRLSCAASGYTMGWYRQAPGKERELVASINSGGNTNYADSVKGRFTISRDNAKNTVYLQMNSLKPEDTAVYYCAVVYESYAQYDYWGQGTQVTVSS

SEQ ID NO: 30243 - protein, 122 aa, Artificial Sequence
  Chemically Synthesized
QVQLQESGGGLVQAGGSLRLSCAASGSISYPYVMGWYRQAPGKERELVAGIGRGTTTNYADSVKGRFTISRDNAKNTVYLQMNSLKPEDTAVYYCAVGSRYTAWWGGVHGYWGQGTQVTVSS

SEQ ID NO: 30244 - protein, 119 aa, Artificial Sequence
  Chemically Synthesized
QVQLQESGGGLVQAGGSLRLSCAASGSIFAVRYMGWYRQAPGKEREFVAAIATGGTTYYADSVKGRFTISRDNAKNTVYLQMNSLKPEDTAVYYCAAWPRYRYRSYPYWGQGTQVTVSS

SEQ ID NO: 30245 - protein, 122 aa, Artificial Sequence
  Chemically Synthesized
QVQLQESGGGLVQAGGSLRLSCAASGYISLVYYMGWYRQAPGKEREFVAAITFGTNTNYADSVKGRFTISRDNAKNTVYLQMNSLKPEDTAVYYCAALYGGLRIGWRDYYYWGQGTQVTVSS

SEQ ID NO: 30246 - protein, 114 aa, Artificial Sequence
  Chemically Synthesized
QVQLQESGGGLVQAGGSLRLSCAASGSIFTRRTMGWYRQAPGKEREFVAAISGGANTNYADSVKGRFTISRDNAKNTVYLQMNSLKPEDTAVYYCAVGRWFGYWGQGTQVTVSS

SEQ ID NO: 30247 - protein, 121 aa, Artificial Sequence
  Chemically Synthesized
QVQLQESGGGLVQAGGSLRLSCAASGNIFSRFMGWYRQAPGKERELVAAIAGGGITNYADSVKGRFTISRDNAKNTVYLQMNSLKPEDTAVYYCAAYYYTWARLNRSLGYWGQGTQVTVSS

SEQ ID NO: 30248 - protein, 122 aa, Artificial Sequence
  Chemically Synthesized
QVQLQESGGGLVQAGGSLRLSCAASGTIFRAPAMGWYRQAPGKEREFVAAIGTGSNTNYADSVKGRFTISRDNAKNTVYLQMNSLKPEDTAVYYCAAGWRGGSSDPFDHVYWGQGTQVTVSS

SEQ ID NO: 30249 - protein, 119 aa, Artificial Sequence
  Chemically Synthesized
QVQLQESGGGLVQAGGSLRLSCAASGTIFADDYMGWYRQAPGKEREFVAAIANGGTSTNYADSVKGRFTISRDNAKNTVYLQMNSLKPEDTAVYYCAVAHVPDVTLPYWGQGTQVTVSS

SEQ ID NO: 30250 - protein, 122 aa, Artificial Sequence
  Chemically Synthesized
QVQLQESGGGLVQAGGSLRLSCAASGNISLGSYMGWYRQAPGKERELVAAIGYGGSTYYADSVKGRFTISRDNAKNTVYLQMNSLKPEDTAVYYCAANKYLAYARYYWFSYWGQGTQVTVSS

SEQ ID NO: 30251 - protein, 117 aa, Artificial Sequence
  Chemically Synthesized
QVQLQESGGGLVQAGGSLRLSCAASGSISRGPDMGWYRQAPGKEREFVAAISSGTNTYYADSVKGRFTISRDNAKNTVYLQMNSLKPEDTAVYYCAAGATYSDRLYWGQGTQVTVSS

SEQ ID NO: 30252 - protein, 121 aa, Artificial Sequence
  Chemically Synthesized
QVQLQESGGGLVQAGGSLRLSCAASGYISNYYYMGWYRQAPGKERELVAAIGYGASTNYADSVKGRFTISRDNAKNTVYLQMNSLKPEDTAVYYCAAGYYRDWYGSVTFYWGQGTQVTVSS

SEQ ID NO: 30253 - protein, 122 aa, Artificial Sequence
  Chemically Synthesized
QVQLQESGGGLVQAGGSLRLSCAASGNIFGAGDMGWYRQAPGKERELVASIAAGSITNYADSVKGRFTISRDNAKNTVYLQMNSLKPEDTAVYYCAVGKDDYAAWYVTHAYWGQGTQVTVSS

SEQ ID NO: 30254 - protein, 126 aa, Artificial Sequence
  Chemically Synthesized
QVQLQESGGGLVQAGGSLRLSCAASGSIFRFSIMGWYRQAPGKERELVAGISYGSTTYYADSVKGRFTISRDNAKNTVYLQMNSLKPEDTAVYYCAAGTRRTWWYADTPYSRHAYWGQGTQVTVSS

SEQ ID NO: 30255 - protein, 117 aa, Artificial Sequence
  Chemically Synthesized
QVQLQESGGGLVQAGGSLRLSCAASGYIFYSNTMGWYRQAPGKERELVAAIDDGGTTYYADSVKGRFTISRDNAKNTVYLQMNSLKPEDTAVYYCAAGYWYTPTHYWGQGTQVTVSS

SEQ ID NO: 30256 - protein, 126 aa, Artificial Sequence
  Chemically Synthesized
QVQLQESGGGLVQAGGSLRLSCAASGTIFDQWYMGWYRQAPGKEREFVASIGRGGTTYYADSVKGRFTISRDNAKNTVYLQMNSLKPEDTAVYYCAADNTQVYGGDDYVGFYLPYWGQGTQVTVSS

SEQ ID NO: 30257 - protein, 122 aa, Artificial Sequence
  Chemically Synthesized
QVQLQESGGGLVQAGGSLRLSCAASGTISRRGYMGWYRQAPGKERELVASIGWGTNTNYADSVKGRFTISRDNAKNTVYLQMNSLKPEDTAVYYCAAYWYPWPWYTYLHRYWGQGTQVTVSS

SEQ ID NO: 30258 - protein, 126 aa, Artificial Sequence
  Chemically Synthesized
QVQLQESGGGLVQAGGSLRLSCAASGSIFPWLNMGWYRQAPGKEREFVAAIARGSTTYYADSVKGRFTISRDNAKNTVYLQMNSLKPEDTAVYYCAAHILFDHIGYFTNSLPLDYWGQGTQVTVSS

SEQ ID NO: 30259 - protein, 122 aa, Artificial Sequence
  Chemically Synthesized
QVQLQESGGGLVQAGGSLRLSCAASGNIFYLYGMGWYRQAPGKERELVAAISGGSITNYADSVKGRFTISRDNAKNTVYLQMNSLKPEDTAVYYCAVHRRYRWFHTNPYAYWGQGTQVTVSS

SEQ ID NO: 30260 - protein, 118 aa, Artificial Sequence
  Chemically Synthesized
QVQLQESGGGLVQAGGSLRLSCAASGSIFRRVYMGWYRQAPGKEREFVAGINLGASTNYADSVKGRFTISRDNAKNTVYLQMNSLKPEDTAVYYCAAGRYYRTWFYYWGQGTQVTVSS

SEQ ID NO: 30261 - protein, 122 aa, Artificial Sequence
  Chemically Synthesized
QVQLQESGGGLVQAGGSLRLSCAASGSISDTTGMGWYRQAPGKERELVATIDTGGSTNYADSVKGRFTISRDNAKNTVYLQMNSLKPEDTAVYYCAVDYIDEEDQPGWLCYWGQGTQVTVSS

SEQ ID NO: 30262 - protein, 126 aa, Artificial Sequence
  Chemically Synthesized
QVQLQESGGGLVQAGGSLRLSCAASGSIFVKRTMGWYRQAPGKEREFVASISYGGITYYADSVKGRFTISRDNAKNTVYLQMNSLKPEDTAVYYCAVYRTYHLNGSYASKYKLTYWGQGTQVTVSS

SEQ ID NO: 30263 - protein, 118 aa, Artificial Sequence
  Chemically Synthesized
QVQLQESGGGLVQAGGSLRLSCAASGNIFSGGYMGWYRQAPGKERELVATIDYGSTTNYADSVKGRFTISRDNAKNTVYLQMNSLKPEDTAVYYCAAPWQAVFAHWYWGQGTQVTVSS

SEQ ID NO: 30264 - protein, 118 aa, Artificial Sequence
  Chemically Synthesized
QVQLQESGGGLVQAGGSLRLSCAASGYIFQRRWMGWYRQAPGKEREFVASIDPGGSTNYADSVKGRFTISRDNAKNTVYLQMNSLKPEDTAVYYCAAGRARYRTHWYWGQGTQVTVSS

SEQ ID NO: 30265 - protein, 118 aa, Artificial Sequence
  Chemically Synthesized
QVQLQESGGGLVQAGGSLRLSCAASGNISSLDNMGWYRQAPGKERELVAGIGKGATTYYADSVKGRFTISRDNAKNTVYLQMNSLKPEDTAVYYCAVDATTDDAFYYWGQGTQVTVSS

SEQ ID NO: 30266 - protein, 118 aa, Artificial Sequence
  Chemically Synthesized
QVQLQESGGGLVQAGGSLRLSCAASGTIFGADLMGWYRQAPGKEREFVASINDGTTTNYADSVKGRFTISRDNAKNTVYLQMNSLKPEDTAVYYCAAEYDYAGLACYWGQGTQVTVSS

SEQ ID NO: 30267 - protein, 122 aa, Artificial Sequence
  Chemically Synthesized
QVQLQESGGGLVQAGGSLRLSCAASGSIFWRHNMGWYRQAPGKERELVATITRGTITNYADSVKGRFTISRDNAKNTVYLQMNSLKPEDTAVYYCAVGRKAPALYYNGFTYWGQGTQVTVSS

SEQ ID NO: 30268 - protein, 119 aa, Artificial Sequence
  Chemically Synthesized
QVQLQESGGGLVQAGGSLRLSCAASGYIFGSNYMGWYRQAPGKERELVAGIAVGGNTNYADSVKGRFTISRDNAKNTVYLQMNSLKPEDTAVYYCAVVRKYLTWVYFYWGQGTQVTVSS

SEQ ID NO: 30269 - protein, 122 aa, Artificial Sequence
  Chemically Synthesized
QVQLQESGGGLVQAGGSLRLSCAASGYISDDPYMGWYRQAPGKEREFVAAITIGATTYYADSVKGRFTISRDNAKNTVYLQMNSLKPEDTAVYYCAAGWSIEGLLLYQIGYWGQGTQVTVSS

SEQ ID NO: 30270 - protein, 117 aa, Artificial Sequence
  Chemically Synthesized
QVQLQESGGGLVQAGGSLRLSCAASGNFLSTRMGWYRQAPGKERELVASITVVIPYADSVKGRFTISRDNAKNTVYLQMNSLKPEDTAVYYCAAGGAYSHTDWHAYWGQGTQVTVSS

SEQ ID NO: 30271 - protein, 122 aa, Artificial Sequence
  Chemically Synthesized
QVQLQESGGGLVQAGGSLRLSCAASGNISRYPSMGWYRQAPGKERELVAAIANGGITNYADSVKGRFTISRDNAKNTVYLQMNSLKPEDTAVYYCAARYRHLWTRYVWFDYWGQGTQVTVSS

SEQ ID NO: 30272 - protein, 116 aa, Artificial Sequence
  Chemically Synthesized
QVQLQESGGGLVQAGGSLRLSCAASGTIFRAMGWYRQAPGKERELVAGIGQGATTYYADSVKGRFTISRDNAKNTVYLQMNSLKPEDTAVYYCAAIANSLHTHQYWGQGTQVTVSS

SEQ ID NO: 30273 - protein, 119 aa, Artificial Sequence
  Chemically Synthesized
QVQLQESGGGLVQAGGSLRLSCAASGTISFTTGMGWYRQAPGKERELVAGIASGANTNYADSVKGRFTISRDNAKNTVYLQMNSLKPEDTAVYYCAAWIYYATWSLYYWGQGTQVTVSS

SEQ ID NO: 30274 - protein, 121 aa, Artificial Sequence
  Chemically Synthesized
QVQLQESGGGLVQAGGSLRLSCAASGTIFVVGDMGWYRQAPGKERELVAAIARGSSTNYADSVKGRFTISRDNAKNTVYLQMNSLKPEDTAVYYCAAATYREQVPSLTMYWGQGTQVTVSS

SEQ ID NO: 30275 - protein, 118 aa, Artificial Sequence
  Chemically Synthesized
QVQLQESGGGLVQAGGSLRLSCAASGTISTSYYMGWYRQAPGKEREFVATIANGANTNYADSVKGRFTISRDNAKNTVYLQMNSLKPEDTAVYYCAVRDLRQFALDYWGQGTQVTVSS

SEQ ID NO: 30276 - protein, 117 aa, Artificial Sequence
  Chemically Synthesized
QVQLQESGGGLVQAGGSLRLSCAASGNISGHYYMGWYRQAPGKEREFVATITDGGTTYYADSVKGRFTISRDNAKNTVYLQMNSLKPEDTAVYYCAAYRADYPLDYWGQGTQVTVSS

SEQ ID NO: 30277 - protein, 126 aa, Artificial Sequence
  Chemically Synthesized
QVQLQESGGGLVQAGGSLRLSCAASGTISATVDMGWYRQAPGKERELVATIAPGTITNYADSVKGRFTISRDNAKNTVYLQMNSLKPEDTAVYYCAVGERVHEDHWHPYTYQHIYWGQGTQVTVSS

SEQ ID NO: 30278 - protein, 121 aa, Artificial Sequence
  Chemically Synthesized
QVQLQESGGGLVQAGGSLRLSCAASGNISDVHDMGWYRQAPGKERELVATIGSVVLPYADSVKGRFTISRDNAKNTVYLQMNSLKPEDTAVYYCAVDKTIPVWPKDRYGYWGQGTQVTVSS

SEQ ID NO: 30279 - protein, 118 aa, Artificial Sequence
  Chemically Synthesized
QVQLQESGGGLVQAGGSLRLSCAASGSISRRLRMGWYRQAPGKERELVAAISYGTITNYADSVKGRFTISRDNAKNTVYLQMNSLKPEDTAVYYCAVHKRYYSNYPYWGQGTQVTVSS

SEQ ID NO: 30280 - protein, 111 aa, Artificial Sequence
  Chemically Synthesized
QVQLQESGGGLVQAGGSLRLSCAASGTISLGSNMGWYRQAPGKERELVATINDGSTTYYADSVKGRFTISRDNAKNTVYLQMNSLKPEDTAVYYCAASSYWGQGTQVTVSS

SEQ ID NO: 30281 - protein, 118 aa, Artificial Sequence
  Chemically Synthesized
QVQLQESGGGLVQAGGSLRLSCAASGTIFGTYDMGWYRQAPGKEREFVAAISLGTITNYADSVKGRFTISRDNAKNTVYLQMNSLKPEDTAVYYCAADGYAYDELGYWGQGTQVTVSS

SEQ ID NO: 30282 - protein, 122 aa, Artificial Sequence
  Chemically Synthesized
QVQLQESGGGLVQAGGSLRLSCAASGTIFRYIRMGWYRQAPGKERELVAGISYGASTYYADSVKGRFTISRDNAKNTVYLQMNSLKPEDTAVYYCAVDILSGPGQLDDLFYWGQGTQVTVSS

SEQ ID NO: 30283 - protein, 118 aa, Artificial Sequence
  Chemically Synthesized
QVQLQESGGGLVQAGGSLRLSCAASGNISGASHMGWYRQAPGKERELVAGINHGGNTNYADSVKGRFTISRDNAKNTVYLQMNSLKPEDTAVYYCAVSTYADDTYRYWGQGTQVTVSS

SEQ ID NO: 30284 - protein, 118 aa, Artificial Sequence
  Chemically Synthesized
QVQLQESGGGLVQAGGSLRLSCAASGNIFYVPHMGWYRQAPGKERELVATITAGGITNYADSVKGRFTISRDNAKNTVYLQMNSLKPEDTAVYYCAVYLADARNFAYWGQGTQVTVSS

SEQ ID NO: 30285 - protein, 118 aa, Artificial Sequence
  Chemically Synthesized
QVQLQESGGGLVQAGGSLRLSCAASGTISDLYDMGWYRQAPGKERELVAAIDYGGSTYYADSVKGRFTISRDNAKNTVYLQMNSLKPEDTAVYYCAAYGNTNPLYLYWGQGTQVTVSS

SEQ ID NO: 30286 - protein, 118 aa, Artificial Sequence
  Chemically Synthesized
QVQLQESGGGLVQAGGSLRLSCAASGTIFNWPKMGWYRQAPGKERELVATITFGGTTNYADSVKGRFTISRDNAKNTVYLQMNSLKPEDTAVYYCAVPIYGYGWYLYWGQGTQVTVSS

SEQ ID NO: 30287 - protein, 122 aa, Artificial Sequence
  Chemically Synthesized
QVQLQESGGGLVQAGGSLRLSCAASGNISPYYHMGWYRQAPGKERELVASINPGGITNYADSVKGRFTISRDNAKNTVYLQMNSLKPEDTAVYYCAVAYDDRSVDEGVHSYWGQGTQVTVSS

SEQ ID NO: 30288 - protein, 118 aa, Artificial Sequence
  Chemically Synthesized
QVQLQESGGGLVQAGGSLRLSCAASGNIFARAHMGWYRQAPGKEREFVASINRGGTTYYADSVKGRFTISRDNAKNTVYLQMNSLKPEDTAVYYCAARTYRLRYYRYWGQGTQVTVSS

SEQ ID NO: 30289 - protein, 108 aa, Artificial Sequence
  Chemically Synthesized
QVQLQESGGGLVQAGGSLRLSCAASGSIYDDHMGWYRQAPGKERELVASISTGALPYADSVKGRFTISRDNAKNTVYLQMNSLKPEDTAVYYCAVMYWGQGTQVTVSS

SEQ ID NO: 30290 - protein, 122 aa, Artificial Sequence
  Chemically Synthesized
QVQLQESGGGLVQAGGSLRLSCAASGTIFAYRFMGWYRQAPGKEREFVATIARGAITYYADSVKGRFTISRDNAKNTVYLQMNSLKPEDTAVYYCAADNYGWYYRSDDHGYWGQGTQVTVSS

SEQ ID NO: 30291 - protein, 118 aa, Artificial Sequence
  Chemically Synthesized
QVQLQESGGGLVQAGGSLRLSCAASGSISYDVPMGWYRQAPGKERELVATIAYGTSTNYADSVKGRFTISRDNAKNTVYLQMNSLKPEDTAVYYCAVPTRYPGNYNYWGQGTQVTVSS

SEQ ID NO: 30292 - protein, 118 aa, Artificial Sequence
  Chemically Synthesized
QVQLQESGGGLVQAGGSLRLSCAASGTIFGPVDMGWYRQAPGKEREFVAAIGDGTNTYYADSVKGRFTISRDNAKNTVYLQMNSLKPEDTAVYYCAGDNSDLYVYRYWGQGTQVTVSS

SEQ ID NO: 30293 - protein, 118 aa, Artificial Sequence
  Chemically Synthesized
QVQLQESGGGLVQAGGSLRLSCAASGSISDDTYMGWYRQAPGKEREFVATINYGANTNYADSVKGRFTISRDNAKNTVYLQMNSLKPEDTAVYYCAALLDGYYYLAYWGQGTQVTVSS

SEQ ID NO: 30294 - protein, 118 aa, Artificial Sequence
  Chemically Synthesized
QVQLQESGGGLVQAGGSLRLSCAASGSIFRPIVMGWYRQAPGKERELVASIGLGTNTNYADSVKGRFTISRDNAKNTVYLQMNSLKPEDTAVYYCAAYGTTRQSFRYWGQGTQVTVSS

SEQ ID NO: 30295 - protein, 122 aa, Artificial Sequence
  Chemically Synthesized
QVQLQESGGGLVQAGGSLRLSCAASGTIFPLHRMGWYRQAPGKEREFVATIGRGGSTYYADSVKGRFTISRDNAKNTVYLQMNSLKPEDTAVYYCAVLPAYNFYFRRYHYYWGQGTQVTVSS

SEQ ID NO: 30296 - protein, 122 aa, Artificial Sequence
  Chemically Synthesized
QVQLQESGGGLVQAGGSLRLSCAASGYISVRAAMGWYRQAPGKEREFVAGIANGAITNYADSVKGRFTISRDNAKNTVYLQMNSLKPEDTAVYYCAVDGYEYLKSKRYYGYWGQGTQVTVSS

SEQ ID NO: 30297 - protein, 118 aa, Artificial Sequence
  Chemically Synthesized
QVQLQESGGGLVQAGGSLRLSCAASGNISRRYSMGWYRQAPGKERELVAAITYGSTTNYADSVKGRFTISRDNAKNTVYLQMNSLKPEDTAVYYCAVVTTRTYTHRYWGQGTQVTVSS

SEQ ID NO: 30298 - protein, 122 aa, Artificial Sequence
  Chemically Synthesized
QVQLQESGGGLVQAGGSLRLSCAASGYIFVGVIMGWYRQAPGKEREFVAGIGPGASTYYADSVKGRFTISRDNAKNTVYLQMNSLKPEDTAVYYCAVIADTAYDYISLLGYWGQGTQVTVSS

SEQ ID NO: 30299 - protein, 121 aa, Artificial Sequence
  Chemically Synthesized
QVQLQESGGGLVQAGGSLRLSCAASGNISELGYMGWYRQAPGKERELVATIGLVVLPYADSVKGRFTISRDNAKNTVYLQMNSLKPEDTAVYYCAVVSLLYAYLYGEHGYWGQGTQVTVSS

SEQ ID NO: 30300 - protein, 122 aa, Artificial Sequence
  Chemically Synthesized
QVQLQESGGGLVQAGGSLRLSCAASGSISLAVDMGWYRQAPGKERELVAAIGRGTITNYADSVKGRFTISRDNAKNTVYLQMNSLKPEDTAVYYCAAGPYDIDTYVVVHGYWGQGTQVTVSS

SEQ ID NO: 30301 - protein, 118 aa, Artificial Sequence
  Chemically Synthesized
QVQLQESGGGLVQAGGSLRLSCAASGNISRYYYMGWYRQAPGKERELVATISSGGTTNYADSVKGRFTISRDNAKNTVYLQMNSLKPEDTAVYYCAVHDVVGIWLTYWGQGTQVTVSS

SEQ ID NO: 30302 - protein, 118 aa, Artificial Sequence
  Chemically Synthesized
QVQLQESGGGLVQAGGSLRLSCAASGTIFRYRTMGWYRQAPGKERELVATIAYGGSTNYADSVKGRFTISRDNAKNTVYLQMNSLKPEDTAVYYCAAGRWYRPVLAYWGQGTQVTVSS

SEQ ID NO: 30303 - protein, 118 aa, Artificial Sequence
  Chemically Synthesized
QVQLQESGGGLVQAGGSLRLSCAASGYIFPRPGMGWYRQAPGKEREFVAAINYGGTTYYADSVKGRFTISRDNAKNTVYLQMNSLKPEDTAVYYCAADDPYYGGLLYWGQGTQVTVSS

SEQ ID NO: 30304 - protein, 118 aa, Artificial Sequence
  Chemically Synthesized
QVQLQESGGGLVQAGGSLRLSCAASGTISWWRYMGWYRQAPGKEREFVAGIGLGSTTNYADSVKGRFTISRDNAKNTVYLQMNSLKPEDTAVYYCAVGYPYRRRHEYWGQGTQVTVSS

SEQ ID NO: 30305 - protein, 122 aa, Artificial Sequence
  Chemically Synthesized
QVQLQESGGGLVQAGGSLRLSCAASGTISRRAYMGWYRQAPGKEREFVAAIGQGSITYYADSVKGRFTISRDNAKNTVYLQMNSLKPEDTAVYYCAVQKGRRYLVRGYFIYWGQGTQVTVSS

SEQ ID NO: 30306 - protein, 117 aa, Artificial Sequence
  Chemically Synthesized
QVQLQESGGGLVQAGGSLRLSCAASGNISPYDSMGWYRQAPGKERELVASIGYGATTNYADSVKGRFTISRDNAKNTVYLQMNSLKPEDTAVYYCAVTLTSLKVLYWGQGTQVTVSS

SEQ ID NO: 30307 - protein, 122 aa, Artificial Sequence
  Chemically Synthesized
QVQLQESGGGLVQAGGSLRLSCAASGSIFTPTTMGWYRQAPGKERELVAAIGRGATTNYADSVKGRFTISRDNAKNTVYLQMNSLKPEDTAVYYCAVLYWLDAADYDYYDYWGQGTQVTVSS

SEQ ID NO: 30308 - protein, 118 aa, Artificial Sequence
  Chemically Synthesized
QVQLQESGGGLVQAGGSLRLSCAASGTIFPVDRMGWYRQAPGKEREFVAAITNGANTYYADSVKGRFTISRDNAKNTVYLQMNSLKPEDTAVYYCAVRYQYYYRHYYWGQGTQVTVSS

SEQ ID NO: 30309 - protein, 118 aa, Artificial Sequence
  Chemically Synthesized
QVQLQESGGGLVQAGGSLRLSCAASGYISSARPMGWYRQAPGKEREFVATIGWGASTNYADSVKGRFTISRDNAKNTVYLQMNSLKPEDTAVYYCAVRVRPYRVYYYWGQGTQVTVSS

SEQ ID NO: 30310 - protein, 118 aa, Artificial Sequence
  Chemically Synthesized
QVQLQESGGGLVQAGGSLRLSCAASGSISYYSQMGWYRQAPGKEREFVAGIGNGSSTNYADSVKGRFTISRDNAKNTVYLQMNSLKPEDTAVYYCAAKSDPKYLLEYWGQGTQVTVSS

SEQ ID NO: 30311 - protein, 126 aa, Artificial Sequence
  Chemically Synthesized
QVQLQESGGGLVQAGGSLRLSCAASGTIFRRPYMGWYRQAPGKERELVATIDGGGSTNYADSVKGRFTISRDNAKNTVYLQMNSLKPEDTAVYYCAAYRTRTYYLWRRDGWNLTYWGQGTQVTVSS

SEQ ID NO: 30312 - protein, 119 aa, Artificial Sequence
  Chemically Synthesized
QVQLQESGGGLVQAGGSLRLSCAASGYISYFYEMGWYRQAPGKEREFVASISDGTTTYYADSVKGRFTISRDNAKNTVYLQMNSLKPEDTAVYYCAALPYVYYARYRYWGQGTQVTVSS

SEQ ID NO: 30313 - protein, 122 aa, Artificial Sequence
  Chemically Synthesized
QVQLQESGGGLVQAGGSLRLSCAASGSIFGVRRMGWYRQAPGKEREFVAGIALGASTNYADSVKGRFTISRDNAKNTVYLQMNSLKPEDTAVYYCAARYTWAWLSRGAYYYWGQGTQVTVSS

SEQ ID NO: 30314 - protein, 118 aa, Artificial Sequence
  Chemically Synthesized
QVQLQESGGGLVQAGGSLRLSCAASGTISRYYVMGWYRQAPGKERELVAAIDGGSTTYYADSVKGRFTISRDNAKNTVYLQMNSLKPEDTAVYYCAVRRHYYVRFPYWGQGTQVTVSS

SEQ ID NO: 30315 - protein, 125 aa, Artificial Sequence
  Chemically Synthesized
QVQLQESGGGLVQAGGSLRLSCAASGYISTSIMGWYRQAPGKEREFVASIAYGSSTNYADSVKGRFTISRDNAKNTVYLQMNSLKPEDTAVYYCAAYTYWDIGAGNLPSDLHEYWGQGTQVTVSS

SEQ ID NO: 30316 - protein, 123 aa, Artificial Sequence
  Chemically Synthesized
QVQLQESGGGLVQAGGSLRLSCAASGTISHFGYMGWYRQAPGKEREFVAAISNGTSTYYADSVKGRFTISRDNAKNTVYLQMNSLKPEDTAVYYCAAIPNQRGGNWPYLYLYWGQGTQVTVSS

SEQ ID NO: 30317 - protein, 121 aa, Artificial Sequence
  Chemically Synthesized
QVQLQESGGGLVQAGGSLRLSCAASGTISYLWSMGWYRQAPGKERELVATIDAGATTNYADSVKGRFTISRDNAKNTVYLQMNSLKPEDTAVYYCAAQYDLDDYDISSMYWGQGTQVTVSS

SEQ ID NO: 30318 - protein, 118 aa, Artificial Sequence
  Chemically Synthesized
QVQLQESGGGLVQAGGSLRLSCAASGSIFDAIGMGWYRQAPGKERELVATITTGGTTNYADSVKGRFTISRDNAKNTVYLQMNSLKPEDTAVYYCAVSEWDYWLHGYWGQGTQVTVSS

SEQ ID NO: 30319 - protein, 114 aa, Artificial Sequence
  Chemically Synthesized
QVQLQESGGGLVQAGGSLRLSCAASGTISDNYVMGWYRQAPGKERELVAGIGQGSITNYADSVKGRFTISRDNAKNTVYLQMNSLKPEDTAVYYCAVGTRTMYWGQGTQVTVSS

SEQ ID NO: 30320 - protein, 118 aa, Artificial Sequence
  Chemically Synthesized
QVQLQESGGGLVQAGGSLRLSCAASGTISYYSAMGWYRQAPGKEREFVAAIGYGGNTYYADSVKGRFTISRDNAKNTVYLQMNSLKPEDTAVYYCAAYNHWLRYHYYWGQGTQVTVSS

SEQ ID NO: 30321 - protein, 118 aa, Artificial Sequence
  Chemically Synthesized
QVQLQESGGGLVQAGGSLRLSCAASGYIFGRQYMGWYRQAPGKEREFVAGITQGTNTNYADSVKGRFTISRDNAKNTVYLQMNSLKPEDTAVYYCAASRPWWTRYTYWGQGTQVTVSS

SEQ ID NO: 30322 - protein, 118 aa, Artificial Sequence
  Chemically Synthesized
QVQLQESGGGLVQAGGSLRLSCAASGSISHYPAMGWYRQAPGKERELVAAITLGSNTYYADSVKGRFTISRDNAKNTVYLQMNSLKPEDTAVYYCAVPYYPKPDHYYWGQGTQVTVSS

SEQ ID NO: 30323 - protein, 126 aa, Artificial Sequence
  Chemically Synthesized
QVQLQESGGGLVQAGGSLRLSCAASGNIFYDDSMGWYRQAPGKERELVASIGPGGTTNYADSVKGRFTISRDNAKNTVYLQMNSLKPEDTAVYYCAVYLQGYPVDDDDGQGTHRYWGQGTQVTVSS

SEQ ID NO: 30324 - protein, 122 aa, Artificial Sequence
  Chemically Synthesized
QVQLQESGGGLVQAGGSLRLSCAASGNIFRALSMGWYRQAPGKEREFVAGISYGSTTYYADSVKGRFTISRDNAKNTVYLQMNSLKPEDTAVYYCAALRREGGPYTDLYWYWGQGTQVTVSS

SEQ ID NO: 30325 - protein, 115 aa, Artificial Sequence
  Chemically Synthesized
QVQLQESGGGLVQAGGSLRLSCAASGTISYVIAMGWYRQAPGKEREFVATIAFGTSTYYADSVKGRFTISRDNAKNTVYLQMNSLKPEDTAVYYCAVPHNDHWYWGQGTQVTVSS

SEQ ID NO: 30326 - protein, 117 aa, Artificial Sequence
  Chemically Synthesized
QVQLQESGGGLVQAGGSLRLSCAASGTISLFYLMGWYRQAPGKEREFVAAIAGGTNTNYADSVKGRFTISRDNAKNTVYLQMNSLKPEDTAVYYCAVRRRYYYHTYWGQGTQVTVSS

SEQ ID NO: 30327 - protein, 118 aa, Artificial Sequence
  Chemically Synthesized
QVQLQESGGGLVQAGGSLRLSCAASGTIFARVYMGWYRQAPGKEREFVAGIGYGATTNYADSVKGRFTISRDNAKNTVYLQMNSLKPEDTAVYYCAANRYYYRNHPYWGQGTQVTVSS

SEQ ID NO: 30328 - protein, 125 aa, Artificial Sequence
  Chemically Synthesized
QVQLQESGGGLVQAGGSLRLSCAASGTISYGWYMGWYRQAPGKERELVATIADGGNTNYADSVKGRFTISRDNAKNTVYLQMNSLKPEDTAVYYCALKLVTLSSTGSLTVVTIYWGQGTQVTVSS

SEQ ID NO: 30329 - protein, 118 aa, Artificial Sequence
  Chemically Synthesized
QVQLQESGGGLVQAGGSLRLSCAASGNISYTYVMGWYRQAPGKEREFVAAIGWGSTTNYADSVKGRFTISRDNAKNTVYLQMNSLKPEDTAVYYCAAKRRVRGFYRYWGQGTQVTVSS

SEQ ID NO: 30330 - protein, 121 aa, Artificial Sequence
  Chemically Synthesized
QVQLQESGGGLVQAGGSLRLSCAASGSILLVVMGWYRQAPGKERELVATIDGGGSTNYADSVKGRFTISRDNAKNTVYLQMNSLKPEDTAVYYCAAAPRFYDYYQVWHFYWGQGTQVTVSS

SEQ ID NO: 30331 - protein, 121 aa, Artificial Sequence
  Chemically Synthesized
QVQLQESGGGLVQAGGSLRLSCAASGNISSPARMGWYRQAPGKERELVASIDRGTSTNYADSVKGRFTISRDNAKNTVYLQMNSLKPEDTAVYYCAVIIRNYYQIYHHKYWGQGTQVTVSS

SEQ ID NO: 30332 - protein, 121 aa, Artificial Sequence
  Chemically Synthesized
QVQLQESGGGLVQAGGSLRLSCAASGSISEQEIMGWYRQAPGKEREFVATIDYGGNTNYADSVKGRFTISRDNAKNTVYLQMNSLKPEDTAVYYCAAWRYASGLLVTVMYWGQGTQVTVSS

SEQ ID NO: 30333 - protein, 121 aa, Artificial Sequence
  Chemically Synthesized
QVQLQESGGGLVQAGGSLRLSCAASGNISYQWYMGWYRQAPGKEREFVASINVGANTNYADSVKGRFTISRDNAKNTVYLQMNSLKPEDTAVYYCAAVNPDVSYGSTGFYWGQGTQVTVSS

SEQ ID NO: 30334 - protein, 117 aa, Artificial Sequence
  Chemically Synthesized
QVQLQESGGGLVQAGGSLRLSCAASGNISPRYMGWYRQAPGKEREFVAAINYGAITYYADSVKGRFTISRDNAKNTVYLQMNSLKPEDTAVYYCAVRFQYIVYHTYWGQGTQVTVSS

SEQ ID NO: 30335 - protein, 122 aa, Artificial Sequence
  Chemically Synthesized
QVQLQESGGGLVQAGGSLRLSCAASGTIFDRRIMGWYRQAPGKEREFVATITYGANTYYADSVKGRFTISRDNAKNTVYLQMNSLKPEDTAVYYCAVRAGRWKGKWDYYNYWGQGTQVTVSS

SEQ ID NO: 30336 - protein, 118 aa, Artificial Sequence
  Chemically Synthesized
QVQLQESGGGLVQAGGSLRLSCAASGTIFYASYMGWYRQAPGKERELVAGIAGGTITNYADSVKGRFTISRDNAKNTVYLQMNSLKPEDTAVYYCAAKYNWYFGHGYWGQGTQVTVSS

SEQ ID NO: 30337 - protein, 125 aa, Artificial Sequence
  Chemically Synthesized
QVQLQESGGGLVQAGGSLRLSCAASGYIFVHGMGWYRQAPGKEREFVAAIGGGANTNYADSVKGRFTISRDNAKNTVYLQMNSLKPEDTAVYYCAVVGYFRYYLFDVSTRVFSYWGQGTQVTVSS

SEQ ID NO: 30338 - protein, 118 aa, Artificial Sequence
  Chemically Synthesized
QVQLQESGGGLVQAGGSLRLSCAASGSISGDGSMGWYRQAPGKERELVATISYGTSTYYADSVKGRFTISRDNAKNTVYLQMNSLKPEDTAVYYCAAVERSQAEYAYWGQGTQVTVSS

SEQ ID NO: 30339 - protein, 118 aa, Artificial Sequence
  Chemically Synthesized
QVQLQESGGGLVQAGGSLRLSCAASGSISYQDYMGWYRQAPGKERELVATIADGATTNYADSVKGRFTISRDNAKNTVYLQMNSLKPEDTAVYYCAAGEGSSDDYYYWGQGTQVTVSS

SEQ ID NO: 30340 - protein, 122 aa, Artificial Sequence
  Chemically Synthesized
QVQLQESGGGLVQAGGSLRLSCAASGYISRRPIMGWYRQAPGKEREFVAGINRGGTTYYADSVKGRFTISRDNAKNTVYLQMNSLKPEDTAVYYCAVARQYASTWHAQHTYWGQGTQVTVSS

SEQ ID NO: 30341 - protein, 118 aa, Artificial Sequence
  Chemically Synthesized
QVQLQESGGGLVQAGGSLRLSCAASGSISGVPDMGWYRQAPGKERELVAAIDYGGSTYYADSVKGRFTISRDNAKNTVYLQMNSLKPEDTAVYYCAAHSSVYYAYHYWGQGTQVTVSS

SEQ ID NO: 30342 - protein, 118 aa, Artificial Sequence
  Chemically Synthesized
QVQLQESGGGLVQAGGSLRLSCAASGYISRYAIMGWYRQAPGKERELVAAINGGTSTYYADSVKGRFTISRDNAKNTVYLQMNSLKPEDTAVYYCAAAVWRSLNYAYWGQGTQVTVSS

SEQ ID NO: 30343 - protein, 117 aa, Artificial Sequence
  Chemically Synthesized
QVQLQESGGGLVQAGGSLRLSCAASGTISYKYMGWYRQAPGKERELVATITAGTSTYYADSVKGRFTISRDNAKNTVYLQMNSLKPEDTAVYYCAAYATWVSVLEYWGQGTQVTVSS

SEQ ID NO: 30344 - protein, 122 aa, Artificial Sequence
  Chemically Synthesized
QVQLQESGGGLVQAGGSLRLSCAASGNISGYVHMGWYRQAPGKEREFVATIDYGGNTYYADSVKGRFTISRDNAKNTVYLQMNSLKPEDTAVYYCAAIIYSYQGAYYQYKYWGQGTQVTVSS

SEQ ID NO: 30345 - protein, 118 aa, Artificial Sequence
  Chemically Synthesized
QVQLQESGGGLVQAGGSLRLSCAASGSISNRGRMGWYRQAPGKERELVATIGSGGSTNYADSVKGRFTISRDNAKNTVYLQMNSLKPEDTAVYYCAAYRPVHYSLRYWGQGTQVTVSS

SEQ ID NO: 30346 - protein, 126 aa, Artificial Sequence
  Chemically Synthesized
QVQLQESGGGLVQAGGSLRLSCAASGYIFARYYMGWYRQAPGKERELVASIGRGSNTNYADSVKGRFTISRDNAKNTVYLQMNSLKPEDTAVYYCAVRRPSYTYYPYSKPHALRYWGQGTQVTVSS

SEQ ID NO: 30347 - protein, 126 aa, Artificial Sequence
  Chemically Synthesized
QVQLQESGGGLVQAGGSLRLSCAASGNIFAYSYMGWYRQAPGKERELVAAIGPGATTNYADSVKGRFTISRDNAKNTVYLQMNSLKPEDTAVYYCAAYDGYYDYDGYSLHVGHYYWGQGTQVTVSS

SEQ ID NO: 30348 - protein, 122 aa, Artificial Sequence
  Chemically Synthesized
QVQLQESGGGLVQAGGSLRLSCAASGNISDRFAMGWYRQAPGKEREFVAGIGQGAITYYADSVKGRFTISRDNAKNTVYLQMNSLKPEDTAVYYCAVPWRSSTFYGYALPYWGQGTQVTVSS

SEQ ID NO: 30349 - protein, 119 aa, Artificial Sequence
  Chemically Synthesized
QVQLQESGGGLVQAGGSLRLSCAASGYIFGDEGMGWYRQAPGKEREFVAGIGAGSNTYYADSVKGRFTISRDNAKNTVYLQMNSLKPEDTAVYYCAVDRSTLTTLTIYWGQGTQVTVSS

SEQ ID NO: 30350 - protein, 122 aa, Artificial Sequence
  Chemically Synthesized
QVQLQESGGGLVQAGGSLRLSCAASGYISRRDQMGWYRQAPGKERELVATITTGAITYYADSVKGRFTISRDNAKNTVYLQMNSLKPEDTAVYYCAVYKRRYYVAGGLFQYWGQGTQVTVSS

SEQ ID NO: 30351 - protein, 122 aa, Artificial Sequence
  Chemically Synthesized
QVQLQESGGGLVQAGGSLRLSCAASGSISYYDKMGWYRQAPGKEREFVAAIAGGTITNYADSVKGRFTISRDNAKNTVYLQMNSLKPEDTAVYYCAVVLSRGLWYPHRLYYWGQGTQVTVSS

SEQ ID NO: 30352 - protein, 126 aa, Artificial Sequence
  Chemically Synthesized
QVQLQESGGGLVQAGGSLRLSCAASGYIFTQQWMGWYRQAPGKERELVAGINYGSNTNYADSVKGRFTISRDNAKNTVYLQMNSLKPEDTAVYYCAAPSYGGGISDLVAGYKHYYWGQGTQVTVSS

SEQ ID NO: 30353 - protein, 122 aa, Artificial Sequence
  Chemically Synthesized
QVQLQESGGGLVQAGGSLRLSCAASGYIFLGYFMGWYRQAPGKEREFVAAIGYGTSTYYADSVKGRFTISRDNAKNTVYLQMNSLKPEDTAVYYCAASYTAFVPFYVVYAYWGQGTQVTVSS

SEQ ID NO: 30354 - protein, 118 aa, Artificial Sequence
  Chemically Synthesized
QVQLQESGGGLVQAGGSLRLSCAASGTIFRQGVMGWYRQAPGKERELVATITDGATTNYADSVKGRFTISRDNAKNTVYLQMNSLKPEDTAVYYCAATEITQHYLGYWGQGTQVTVSS

SEQ ID NO: 30355 - protein, 126 aa, Artificial Sequence
  Chemically Synthesized
QVQLQESGGGLVQAGGSLRLSCAASGTISKGVVMGWYRQAPGKEREFVATIAPGSTTYYADSVKGRFTISRDNAKNTVYLQMNSLKPEDTAVYYCAARGDGEGVDYIKSAYALAYWGQGTQVTVSS

SEQ ID NO: 30356 - protein, 121 aa, Artificial Sequence
  Chemically Synthesized
QVQLQESGGGLVQAGGSLRLSCAASGTISYEYQMGWYRQAPGKERELVASISLGGTTNYADSVKGRFTISRDNAKNTVYLQMNSLKPEDTAVYYCAAWREPATDGDVFGYWGQGTQVTVSS

SEQ ID NO: 30357 - protein, 116 aa, Artificial Sequence
  Chemically Synthesized
QVQLQESGGGLVQAGGSLRLSCAASGSISRWPRMGWYRQAPGKEREFVATIGRGGNTYYADSVKGRFTISRDNAKNTVYLQMNSLKPEDTAVYYCAARYSRWPYYWGQGTQVTVSS

SEQ ID NO: 30358 - protein, 118 aa, Artificial Sequence
  Chemically Synthesized
QVQLQESGGGLVQAGGSLRLSCAASGSIFYAPYMGWYRQAPGKEREFVAAITSGGITYYADSVKGRFTISRDNAKNTVYLQMNSLKPEDTAVYYCAAYVWTRVEHPYWGQGTQVTVSS

SEQ ID NO: 30359 - protein, 122 aa, Artificial Sequence
  Chemically Synthesized
QVQLQESGGGLVQAGGSLRLSCAASGYISGDLIMGWYRQAPGKERELVAGINEGATTYYADSVKGRFTISRDNAKNTVYLQMNSLKPEDTAVYYCAALYIDVYDYYGVPFYWGQGTQVTVSS

SEQ ID NO: 30360 - protein, 121 aa, Artificial Sequence
  Chemically Synthesized
QVQLQESGGGLVQAGGSLRLSCAASGNISSGDFMGWYRQAPGKEREFVAGISYGGTTNYADSVKGRFTISRDNAKNTVYLQMNSLKPEDTAVYYCAADLEYPEQIRFSMYWGQGTQVTVSS

SEQ ID NO: 30361 - protein, 122 aa, Artificial Sequence
  Chemically Synthesized
QVQLQESGGGLVQAGGSLRLSCAASGNISTLVRMGWYRQAPGKEREFVAGIDYGGITNYADSVKGRFTISRDNAKNTVYLQMNSLKPEDTAVYYCAVDAWLYYWVPYTFTYWGQGTQVTVSS

SEQ ID NO: 30362 - protein, 126 aa, Artificial Sequence
  Chemically Synthesized
QVQLQESGGGLVQAGGSLRLSCAASGTIFSSYGMGWYRQAPGKERELVATISKGTNTNYADSVKGRFTISRDNAKNTVYLQMNSLKPEDTAVYYCAAKYWVRYWPRFNGKYWHTYWGQGTQVTVSS

SEQ ID NO: 30363 - protein, 120 aa, Artificial Sequence
  Chemically Synthesized
QVQLQESGGGLVQAGGSLRLSCAASGNMGWYRQAPGKERELVAAITEGTITYYADSVKGRFTISRDNAKNTVYLQMNSLKPEDTAVYYCAARGGLGRSAQWVYDYYYGYWGQGTQVTVSS

SEQ ID NO: 30364 - protein, 126 aa, Artificial Sequence
  Chemically Synthesized
QVQLQESGGGLVQAGGSLRLSCAASGYIFVTPYMGWYRQAPGKERELVASIDYGGNTYYADSVKGRFTISRDNAKNTVYLQMNSLKPEDTAVYYCAVYGVLGDVSASIWGRYYGYWGQGTQVTVSS

SEQ ID NO: 30365 - protein, 122 aa, Artificial Sequence
  Chemically Synthesized
QVQLQESGGGLVQAGGSLRLSCAASGTISNPAYMGWYRQAPGKERELVATITQGATTYYADSVKGRFTISRDNAKNTVYLQMNSLKPEDTAVYYCAATYYYYYRYGPAYSYWGQGTQVTVSS

SEQ ID NO: 30366 - protein, 121 aa, Artificial Sequence
  Chemically Synthesized
QVQLQESGGGLVQAGGSLRLSCAASGSISQKYIMGWYRQAPGKERELVAAINFGGSTNYADSVKGRFTISRDNAKNTVYLQMNSLKPEDTAVYYCAAYYARWYLYRRHGYWGQGTQVTVSS

SEQ ID NO: 30367 - protein, 126 aa, Artificial Sequence
  Chemically Synthesized
QVQLQESGGGLVQAGGSLRLSCAASGTISGGYRMGWYRQAPGKERELVASIAIGGNTNYADSVKGRFTISRDNAKNTVYLQMNSLKPEDTAVYYCAAPGPDVRSRSLVQVASHIYWGQGTQVTVSS

SEQ ID NO: 30368 - protein, 122 aa, Artificial Sequence
  Chemically Synthesized
QVQLQESGGGLVQAGGSLRLSCAASGSIFHYSYMGWYRQAPGKERELVAGINDGATTYYADSVKGRFTISRDNAKNTVYLQMNSLKPEDTAVYYCAAAGYSRYRVWRVHVYWGQGTQVTVSS

SEQ ID NO: 30369 - protein, 118 aa, Artificial Sequence
  Chemically Synthesized
QVQLQESGGGLVQAGGSLRLSCAASGYISRRAWMGWYRQAPGKEREFVATISSGTSTNYADSVKGRFTISRDNAKNTVYLQMNSLKPEDTAVYYCAAWWRYRWSHVYWGQGTQVTVSS

SEQ ID NO: 30370 - protein, 122 aa, Artificial Sequence
  Chemically Synthesized
QVQLQESGGGLVQAGGSLRLSCAASGTIFEGQYMGWYRQAPGKEREFVATIDHGGNTNYADSVKGRFTISRDNAKNTVYLQMNSLKPEDTAVYYCAVDPPNYYGFTYIHWYWGQGTQVTVSS

SEQ ID NO: 30371 - protein, 118 aa, Artificial Sequence
  Chemically Synthesized
QVQLQESGGGLVQAGGSLRLSCAASGYISYATYMGWYRQAPGKERELVATITQGTNTYYADSVKGRFTISRDNAKNTVYLQMNSLKPEDTAVYYCAVYAHVDYEYRYWGQGTQVTVSS

SEQ ID NO: 30372 - protein, 121 aa, Artificial Sequence
  Chemically Synthesized
QVQLQESGGGLVQAGGSLRLSCAASGYISSYNPMGWYRQAPGKEREFVAGIAYGATTNYADSVKGRFTISRDNAKNTVYLQMNSLKPEDTAVYYCAVWEPPYLRESAHDYWGQGTQVTVSS

SEQ ID NO: 30373 - protein, 122 aa, Artificial Sequence
  Chemically Synthesized
QVQLQESGGGLVQAGGSLRLSCAASGTIFKYLFMGWYRQAPGKEREFVAAISTGTSTYYADSVKGRFTISRDNAKNTVYLQMNSLKPEDTAVYYCAAPGPWRNAPDDYLHYWGQGTQVTVSS

SEQ ID NO: 30374 - protein, 118 aa, Artificial Sequence
  Chemically Synthesized
QVQLQESGGGLVQAGGSLRLSCAASGTIFAPGWMGWYRQAPGKERELVATITYGATTNYADSVKGRFTISRDNAKNTVYLQMNSLKPEDTAVYYCAVKYWYDTVFYYWGQGTQVTVSS

SEQ ID NO: 30375 - protein, 126 aa, Artificial Sequence
  Chemically Synthesized
QVQLQESGGGLVQAGGSLRLSCAASGYISYYASMGWYRQAPGKERELVAGIAQGTSTYYADSVKGRFTISRDNAKNTVYLQMNSLKPEDTAVYYCAASPYSYPYYLAYIYWSLVYWGQGTQVTVSS

SEQ ID NO: 30376 - protein, 126 aa, Artificial Sequence
  Chemically Synthesized
QVQLQESGGGLVQAGGSLRLSCAASGTISPDGWMGWYRQAPGKEREFVATIDDGATTYYADSVKGRFTISRDNAKNTVYLQMNSLKPEDTAVYYCAVVDSPADGSYGTFHILFFYWGQGTQVTVSS

SEQ ID NO: 30377 - protein, 122 aa, Artificial Sequence
  Chemically Synthesized
QVQLQESGGGLVQAGGSLRLSCAASGSIFTLFYMGWYRQAPGKEREFVAGIDEGGNTYYADSVKGRFTISRDNAKNTVYLQMNSLKPEDTAVYYCAVSVIALVLYYSAYYYWGQGTQVTVSS

SEQ ID NO: 30378 - protein, 122 aa, Artificial Sequence
  Chemically Synthesized
QVQLQESGGGLVQAGGSLRLSCAASGSIFPPYDMGWYRQAPGKERELVAGINQGTITYYADSVKGRFTISRDNAKNTVYLQMNSLKPEDTAVYYCAAEADKPPWYGKPLAYWGQGTQVTVSS

SEQ ID NO: 30379 - protein, 118 aa, Artificial Sequence
  Chemically Synthesized
QVQLQESGGGLVQAGGSLRLSCAASGSISVPYYMGWYRQAPGKERELVAAITYGTNTYYADSVKGRFTISRDNAKNTVYLQMNSLKPEDTAVYYCAAQARTYRRYTYWGQGTQVTVSS

SEQ ID NO: 30380 - protein, 125 aa, Artificial Sequence
  Chemically Synthesized
QVQLQESGGGLVQAGGSLRLSCAASGTIFYVLWMGWYRQAPGKERELVASIDGGNTNYADSVKGRFTISRDNAKNTVYLQMNSLKPEDTAVYYCAAYDTWYAYLRGSHYHEHGYWGQGTQVTVSS

SEQ ID NO: 30381 - protein, 126 aa, Artificial Sequence
  Chemically Synthesized
QVQLQESGGGLVQAGGSLRLSCAASGYISNVSDMGWYRQAPGKEREFVAAISYGSITNYADSVKGRFTISRDNAKNTVYLQMNSLKPEDTAVYYCAVLIYTSGDYQGWYYASYDYWGQGTQVTVSS

SEQ ID NO: 30382 - protein, 122 aa, Artificial Sequence
  Chemically Synthesized
QVQLQESGGGLVQAGGSLRLSCAASGTIFQYSRMGWYRQAPGKERELVATINYGAITNYADSVKGRFTISRDNAKNTVYLQMNSLKPEDTAVYYCAVFLHRYQFTLRRLRYWGQGTQVTVSS

SEQ ID NO: 30383 - protein, 118 aa, Artificial Sequence
  Chemically Synthesized
QVQLQESGGGLVQAGGSLRLSCAASGSISYVEFMGWYRQAPGKERELVATINAGATTNYADSVKGRFTISRDNAKNTVYLQMNSLKPEDTAVYYCAVYAYDAGQLYYWGQGTQVTVSS

SEQ ID NO: 30384 - protein, 126 aa, Artificial Sequence
  Chemically Synthesized
QVQLQESGGGLVQAGGSLRLSCAASGSISHSWYMGWYRQAPGKERELVASIGFGANTYYADSVKGRFTISRDNAKNTVYLQMNSLKPEDTAVYYCAAPQFYVRPVREDKDKSHYYWGQGTQVTVSS

SEQ ID NO: 30385 - protein, 117 aa, Artificial Sequence
  Chemically Synthesized
QVQLQESGGGLVQAGGSLRLSCAASGNISGGTQMGWYRQAPGKERELVASINLGTNTYYADSVKGRFTISRDNAKNTVYLQMNSLKPEDTAVYYCAAGWYRYSSMYWGQGTQVTVSS

SEQ ID NO: 30386 - protein, 122 aa, Artificial Sequence
  Chemically Synthesized
QVQLQESGGGLVQAGGSLRLSCAASGYIFWTQRMGWYRQAPGKERELVAAIGRGASTYYADSVKGRFTISRDNAKNTVYLQMNSLKPEDTAVYYCAAIKRPYNVYRAGHNYWGQGTQVTVSS

SEQ ID NO: 30387 - protein, 122 aa, Artificial Sequence
  Chemically Synthesized
QVQLQESGGGLVQAGGSLRLSCAASGTIFALDAMGWYRQAPGKEREFVAGIGEGANTYYADSVKGRFTISRDNAKNTVYLQMNSLKPEDTAVYYCAARLYGRRYWRSYHVYWGQGTQVTVSS

SEQ ID NO: 30388 - protein, 122 aa, Artificial Sequence
  Chemically Synthesized
QVQLQESGGGLVQAGGSLRLSCAASGSIFRSWYMGWYRQAPGKEREFVAGISDGATTYYADSVKGRFTISRDNAKNTVYLQMNSLKPEDTAVYYCAAYPRVYLVFTPRLAYWGQGTQVTVSS

SEQ ID NO: 30389 - protein, 118 aa, Artificial Sequence
  Chemically Synthesized
QVQLQESGGGLVQAGGSLRLSCAASGTIFRYQTMGWYRQAPGKERELVAGIGFGTSTYYADSVKGRFTISRDNAKNTVYLQMNSLKPEDTAVYYCAVLRRKYSYHTYWGQGTQVTVSS

SEQ ID NO: 30390 - protein, 117 aa, Artificial Sequence
  Chemically Synthesized
QVQLQESGGGLVQAGGSLRLSCAASGNISYYLNMGWYRQAPGKEREFVASIDSVVVPYADSVKGRFTISRDNAKNTVYLQMNSLKPEDTAVYYCAVDDGYAGYLDYWGQGTQVTVSS

SEQ ID NO: 30391 - protein, 126 aa, Artificial Sequence
  Chemically Synthesized
QVQLQESGGGLVQAGGSLRLSCAASGNIFLRPYMGWYRQAPGKERELVATISRGSNTYYADSVKGRFTISRDNAKNTVYLQMNSLKPEDTAVYYCAVSTWLPFGGGRYTTGALRYWGQGTQVTVSS

SEQ ID NO: 30392 - protein, 121 aa, Artificial Sequence
  Chemically Synthesized
QVQLQESGGGLVQAGGSLRLSCAASGNIFRILAMGWYRQAPGKEREFVAGIADGANTNYADSVKGRFTISRDNAKNTVYLQMNSLKPEDTAVYYCAVYPVGDDALYWYHYWGQGTQVTVSS

SEQ ID NO: 30393 - protein, 118 aa, Artificial Sequence
  Chemically Synthesized
QVQLQESGGGLVQAGGSLRLSCAASGSIFLPRAMGWYRQAPGKEREFVASIAPGGITNYADSVKGRFTISRDNAKNTVYLQMNSLKPEDTAVYYCAVNDKRVYIFYYWGQGTQVTVSS

SEQ ID NO: 30394 - protein, 118 aa, Artificial Sequence
  Chemically Synthesized
QVQLQESGGGLVQAGGSLRLSCAASGTIFPSNYMGWYRQAPGKERELVATINSGSNTYYADSVKGRFTISRDNAKNTVYLQMNSLKPEDTAVYYCAVPLYVIAGYFYWGQGTQVTVSS

SEQ ID NO: 30395 - protein, 122 aa, Artificial Sequence
  Chemically Synthesized
QVQLQESGGGLVQAGGSLRLSCAASGYISTRDGMGWYRQAPGKERELVAGIDRGGNTYYADSVKGRFTISRDNAKNTVYLQMNSLKPEDTAVYYCAADNGPADYDYDFYYYWGQGTQVTVSS

SEQ ID NO: 30396 - protein, 118 aa, Artificial Sequence
  Chemically Synthesized
QVQLQESGGGLVQAGGSLRLSCAASGSIFFPGPMGWYRQAPGKEREFVATIDTGSTTNYADSVKGRFTISRDNAKNTVYLQMNSLKPEDTAVYYCAVRQDDYDTFEYWGQGTQVTVSS

SEQ ID NO: 30397 - protein, 122 aa, Artificial Sequence
  Chemically Synthesized
QVQLQESGGGLVQAGGSLRLSCAASGSIFTTTDMGWYRQAPGKERELVATINAGGNTYYADSVKGRFTISRDNAKNTVYLQMNSLKPEDTAVYYCAASDDYAAFDDYDHRYWGQGTQVTVSS

SEQ ID NO: 30398 - protein, 118 aa, Artificial Sequence
  Chemically Synthesized
QVQLQESGGGLVQAGGSLRLSCAASGTIFYGVRMGWYRQAPGKEREFVATINYGTITNYADSVKGRFTISRDNAKNTVYLQMNSLKPEDTAVYYCAAYTRRRSYFYYWGQGTQVTVSS

SEQ ID NO: 30399 - protein, 122 aa, Artificial Sequence
  Chemically Synthesized
QVQLQESGGGLVQAGGSLRLSCAASGTISRSPSMGWYRQAPGKEREFVASIGYGSNTYYADSVKGRFTISRDNAKNTVYLQMNSLKPEDTAVYYCAVYARYRTGRGNWHNYWGQGTQVTVSS

SEQ ID NO: 30400 - protein, 126 aa, Artificial Sequence
  Chemically Synthesized
QVQLQESGGGLVQAGGSLRLSCAASGSIFQIQTMGWYRQAPGKERELVATIDFGSITNYADSVKGRFTISRDNAKNTVYLQMNSLKPEDTAVYYCAVQRDSYVRDGLWWQRVLAYWGQGTQVTVSS

SEQ ID NO: 30401 - protein, 126 aa, Artificial Sequence
  Chemically Synthesized
QVQLQESGGGLVQAGGSLRLSCAASGSIFYRRPMGWYRQAPGKERELVATITGGTTTYYADSVKGRFTISRDNAKNTVYLQMNSLKPEDTAVYYCAARRAYYSPYDDRDTRPYRYWGQGTQVTVSS

SEQ ID NO: 30402 - protein, 116 aa, Artificial Sequence
  Chemically Synthesized
QVQLQESGGGLVQAGGSLRLSCAASGSISYVNMGWYRQAPGKERELVASIDSGANTNYADSVKGRFTISRDNAKNTVYLQMNSLKPEDTAVYYCAAISCRTTSMYWGQGTQVTVSS

SEQ ID NO: 30403 - protein, 125 aa, Artificial Sequence
  Chemically Synthesized
QVQLQESGGGLVQAGGSLRLSCAASGTIFYDQNMGWYRQAPGKEREFVATINGGTITYYADSVKGRFTISRDNAKNTVYLQMNSLKPEDTAVYYCAANTYLDWRYDSVTFTTIYWGQGTQVTVSS

SEQ ID NO: 30404 - protein, 117 aa, Artificial Sequence
  Chemically Synthesized
QVQLQESGGGLVQAGGSLRLSCAASGYISYENIMGWYRQAPGKERELVAGIASGALPYADSVKGRFTISRDNAKNTVYLQMNSLKPEDTAVYYCAAYDYWDYYLPYWGQGTQVTVSS

SEQ ID NO: 30405 - protein, 116 aa, Artificial Sequence
  Chemically Synthesized
QVQLQESGGGLVQAGGSLRLSCAASGNISNAWYMGWYRQAPGKERELVAAINSGTNTNYADSVKGRFTISRDNAKNTVYLQMNSLKPEDTAVYYCATLGRTRFIYWGQGTQVTVSS

SEQ ID NO: 30406 - protein, 112 aa, Artificial Sequence
  Chemically Synthesized
QVQLQESGGGLVQAGGSLRLSCAASGTISDRRSMGWYRQAPGKEREFVASIAGGGNTNYADSVKGRFTISRDNAKNTVYLQMNSLKPEDTAVYYCAVAYDYWGQGTQVTVSS

SEQ ID NO: 30407 - protein, 122 aa, Artificial Sequence
  Chemically Synthesized
QVQLQESGGGLVQAGGSLRLSCAASGTIFPRPFMGWYRQAPGKEREFVAGIAQGATTYYADSVKGRFTISRDNAKNTVYLQMNSLKPEDTAVYYCAVYVRRRQSQRYSFVYWGQGTQVTVSS

SEQ ID NO: 30408 - protein, 118 aa, Artificial Sequence
  Chemically Synthesized
QVQLQESGGGLVQAGGSLRLSCAASGSISRWVGMGWYRQAPGKERELVATIGRGTTTNYADSVKGRFTISRDNAKNTVYLQMNSLKPEDTAVYYCAAYYYRDYYHSYWGQGTQVTVSS

SEQ ID NO: 30409 - protein, 118 aa, Artificial Sequence
  Chemically Synthesized
QVQLQESGGGLVQAGGSLRLSCAASGNIFRERYMGWYRQAPGKEREFVASITPGSNTNYADSVKGRFTISRDNAKNTVYLQMNSLKPEDTAVYYCAVTRGFLYTLRYWGQGTQVTVSS

SEQ ID NO: 30410 - protein, 118 aa, Artificial Sequence
  Chemically Synthesized
QVQLQESGGGLVQAGGSLRLSCAASGTIFAYAPMGWYRQAPGKERELVATITYGGTTNYADSVKGRFTISRDNAKNTVYLQMNSLKPEDTAVYYCAVTPVYFSRLGYWGQGTQVTVSS

SEQ ID NO: 30411 - protein, 118 aa, Artificial Sequence
  Chemically Synthesized
QVQLQESGGGLVQAGGSLRLSCAASGSIFTRVGMGWYRQAPGKEREFVAAIAIGGNTYYADSVKGRFTISRDNAKNTVYLQMNSLKPEDTAVYYCAVDGGSVGWLYYWGQGTQVTVSS

SEQ ID NO: 30412 - protein, 118 aa, Artificial Sequence
  Chemically Synthesized
QVQLQESGGGLVQAGGSLRLSCAASGNIFTLRVMGWYRQAPGKERELVATINSGTSTNYADSVKGRFTISRDNAKNTVYLQMNSLKPEDTAVYYCAVKRGLFGKHYYWGQGTQVTVSS

SEQ ID NO: 30413 - protein, 118 aa, Artificial Sequence
  Chemically Synthesized
QVQLQESGGGLVQAGGSLRLSCAASGTIFARRPMGWYRQAPGKERELVAAINYGTTTYYADSVKGRFTISRDNAKNTVYLQMNSLKPEDTAVYYCAAYGGRSWRFFYWGQGTQVTVSS

SEQ ID NO: 30414 - protein, 118 aa, Artificial Sequence
  Chemically Synthesized
QVQLQESGGGLVQAGGSLRLSCAASGTISLDPSMGWYRQAPGKERELVAAIDYGGTTYYADSVKGRFTISRDNAKNTVYLQMNSLKPEDTAVYYCAASNWFRWKTIYWGQGTQVTVSS

SEQ ID NO: 30415 - protein, 122 aa, Artificial Sequence
  Chemically Synthesized
QVQLQESGGGLVQAGGSLRLSCAASGYISRVSYMGWYRQAPGKEREFVATIAYGASTNYADSVKGRFTISRDNAKNTVYLQMNSLKPEDTAVYYCAAADYDTRIFYQYHHYWGQGTQVTVSS

SEQ ID NO: 30416 - protein, 118 aa, Artificial Sequence
  Chemically Synthesized
QVQLQESGGGLVQAGGSLRLSCAASGTIFTHSRMGWYRQAPGKERELVAGIDYGSTTYYADSVKGRFTISRDNAKNTVYLQMNSLKPEDTAVYYCAVYVNLVDALDYWGQGTQVTVSS

SEQ ID NO: 30417 - protein, 121 aa, Artificial Sequence
  Chemically Synthesized
QVQLQESGGGLVQAGGSLRLSCAASGTILTLTMGWYRQAPGKERELVAGIDYGGTTYYADSVKGRFTISRDNAKNTVYLQMNSLKPEDTAVYYCAVYKQDDKLRYGYLEYWGQGTQVTVSS

SEQ ID NO: 30418 - protein, 118 aa, Artificial Sequence
  Chemically Synthesized
QVQLQESGGGLVQAGGSLRLSCAASGSIFYLYHMGWYRQAPGKERELVAAISYGAITYYADSVKGRFTISRDNAKNTVYLQMNSLKPEDTAVYYCAADASGDYTLSYWGQGTQVTVSS

SEQ ID NO: 30419 - protein, 118 aa, Artificial Sequence
  Chemically Synthesized
QVQLQESGGGLVQAGGSLRLSCAASGSISWYVGMGWYRQAPGKEREFVAAIGIGGNTNYADSVKGRFTISRDNAKNTVYLQMNSLKPEDTAVYYCAVFYGRSTEHYYWGQGTQVTVSS

SEQ ID NO: 30420 - protein, 122 aa, Artificial Sequence
  Chemically Synthesized
QVQLQESGGGLVQAGGSLRLSCAASGYISKGRRMGWYRQAPGKEREFVAAIDRGANTNYADSVKGRFTISRDNAKNTVYLQMNSLKPEDTAVYYCAAQYKYSFGRYRKYDYWGQGTQVTVSS

SEQ ID NO: 30421 - protein, 118 aa, Artificial Sequence
  Chemically Synthesized
QVQLQESGGGLVQAGGSLRLSCAASGYISRWANMGWYRQAPGKEREFVAGIARGTNTNYADSVKGRFTISRDNAKNTVYLQMNSLKPEDTAVYYCAAVLKYRGVHDYWGQGTQVTVSS

SEQ ID NO: 30422 - protein, 118 aa, Artificial Sequence
  Chemically Synthesized
QVQLQESGGGLVQAGGSLRLSCAASGTIFYPSAMGWYRQAPGKERELVASINGGGITYYADSVKGRFTISRDNAKNTVYLQMNSLKPEDTAVYYCAAAQLQNVWHHYWGQGTQVTVSS

SEQ ID NO: 30423 - protein, 117 aa, Artificial Sequence
  Chemically Synthesized
QVQLQESGGGLVQAGGSLRLSCAASGTIFPRTSMGWYRQAPGKEREFVATIDGGGITYYADSVKGRFTISRDNAKNTVYLQMNSLKPEDTAVYYCAVAIGAASLYYWGQGTQVTVSS

SEQ ID NO: 30424 - protein, 116 aa, Artificial Sequence
  Chemically Synthesized
QVQLQESGGGLVQAGGSLRLSCAASGNISSDPMGWYRQAPGKEREFVATIGNGSTTYYADSVKGRFTISRDNAKNTVYLQMNSLKPEDTAVYYCAVGTSRSTLIYWGQGTQVTVSS

SEQ ID NO: 30425 - protein, 118 aa, Artificial Sequence
  Chemically Synthesized
QVQLQESGGGLVQAGGSLRLSCAASGNIFQRRYMGWYRQAPGKERELVAAITRGANTYYADSVKGRFTISRDNAKNTVYLQMNSLKPEDTAVYYCAVQGFRGNQHYYWGQGTQVTVSS

SEQ ID NO: 30426 - protein, 118 aa, Artificial Sequence
  Chemically Synthesized
QVQLQESGGGLVQAGGSLRLSCAASGYIFYRREMGWYRQAPGKERELVAAINPGAITYYADSVKGRFTISRDNAKNTVYLQMNSLKPEDTAVYYCAVARYWWTNHRYWGQGTQVTVSS

SEQ ID NO: 30427 - protein, 118 aa, Artificial Sequence
  Chemically Synthesized
QVQLQESGGGLVQAGGSLRLSCAASGNISFLGSMGWYRQAPGKERELVASIARGATTQYADSVKGRFTISRDNAKNTVYLQMNSLKPEDTAVYYCAAYPQYDTAFDYWGQGTQVTVSS

SEQ ID NO: 30428 - protein, 118 aa, Artificial Sequence
  Chemically Synthesized
QVQLQESGGGLVQAGGSLRLSCAASGNISGYSYMGWYRQAPGKEREFVAAIAPGGSTYYADSVKGRFTISRDNAKNTVYLQMNSLKPEDTAVYYCAARNYYDGSLPYWGQGTQVTVSS

SEQ ID NO: 30429 - protein, 118 aa, Artificial Sequence
  Chemically Synthesized
QVQLQESGGGLVQAGGSLRLSCAASGYISRYTRMGWYRQAPGKEREFVAGINRGGTTYYADSVKGRFTISRDNAKNTVYLQMNSLKPEDTAVYYCAARARSTYRYPYWGQGTQVTVSS

SEQ ID NO: 30430 - protein, 117 aa, Artificial Sequence
  Chemically Synthesized
QVQLQESGGGLVQAGGSLRLSCAASGNIFTTAYMGWYRQAPGKERELVAAIGLGTNTYYADSVKGRFTISRDNAKNTVYLQMNSLKPEDTAVYYCAAGLDAGYVSYWGQGTQVTVSS

SEQ ID NO: 30431 - protein, 118 aa, Artificial Sequence
  Chemically Synthesized
QVQLQESGGGLVQAGGSLRLSCAASGYISYRRGMGWYRQAPGKEREFVAAISYGGITYYADSVKGRFTISRDNAKNTVYLQMNSLKPEDTAVYYCAAYGRRGTRHRYWGQGTQVTVSS

SEQ ID NO: 30432 - protein, 125 aa, Artificial Sequence
  Chemically Synthesized
QVQLQESGGGLVQAGGSLRLSCAASGNISYYKSMGWYRQAPGKEREFVAAIDSVLIPYADSVKGRFTISRDNAKNTVYLQMNSLKPEDTAVYYCAAFLSRRIDIYLHDTVGFGYWGQGTQVTVSS

SEQ ID NO: 30433 - protein, 121 aa, Artificial Sequence
  Chemically Synthesized
QVQLQESGGGLVQAGGSLRLSCAASGYIFDADVMGWYRQAPGKERELVATIDAGGSTNYADSVKGRFTISRDNAKNTVYLQMNSLKPEDTAVYYCAARWGDVSWSNSLIYWGQGTQVTVSS

SEQ ID NO: 30434 - protein, 122 aa, Artificial Sequence
  Chemically Synthesized
QVQLQESGGGLVQAGGSLRLSCAASGTIFPRGWMGWYRQAPGKEREFVATIARGAITNYADSVKGRFTISRDNAKNTVYLQMNSLKPEDTAVYYCAVHRDWKWGRVGWHLYWGQGTQVTVSS

SEQ ID NO: 30435 - protein, 118 aa, Artificial Sequence
  Chemically Synthesized
QVQLQESGGGLVQAGGSLRLSCAASGTISFDRYMGWYRQAPGKERELVAAITYGATTNYADSVKGRFTISRDNAKNTVYLQMNSLKPEDTAVYYCAAYRGYPYLPCYWGQGTQVTVSS

SEQ ID NO: 30436 - protein, 118 aa, Artificial Sequence
  Chemically Synthesized
QVQLQESGGGLVQAGGSLRLSCAASGTIFVPWYMGWYRQAPGKERELVATISRGGTTNYADSVKGRFTISRDNAKNTVYLQMNSLKPEDTAVYYCAATKAYLRVYRYWGQGTQVTVSS

SEQ ID NO: 30437 - protein, 118 aa, Artificial Sequence
  Chemically Synthesized
QVQLQESGGGLVQAGGSLRLSCAASGYISYAGFMGWYRQAPGKEREFVAGIGRGGTTYYADSVKGRFTISRDNAKNTVYLQMNSLKPEDTAVYYCAAGITYRTWHQYWGQGTQVTVSS

SEQ ID NO: 30438 - protein, 119 aa, Artificial Sequence
  Chemically Synthesized
QVQLQESGGGLVQAGGSLRLSCAASGTISGPGSMGWYRQAPGKEREFVATITNGASTYYADSVKGRFTISRDNAKNTVYLQMNSLKPEDTAVYYCAADPYYAYSAYLYWGQGTQVTVSS

SEQ ID NO: 30439 - protein, 118 aa, Artificial Sequence
  Chemically Synthesized
QVQLQESGGGLVQAGGSLRLSCAASGSIFYQYYMGWYRQAPGKEREFVAGIGYGGTTNYADSVKGRFTISRDNAKNTVYLQMNSLKPEDTAVYYCAAYYRVFLFHDYWGQGTQVTVSS

SEQ ID NO: 30440 - protein, 117 aa, Artificial Sequence
  Chemically Synthesized
QVQLQESGGGLVQAGGSLRLSCAASGYIFGKYYMGWYRQAPGKERELVATIDYGSTTYYADSVKGRFTISRDNAKNTVYLQMNSLKPEDTAVYYCAASLTVGRTIYWGQGTQVTVSS

SEQ ID NO: 30441 - protein, 118 aa, Artificial Sequence
  Chemically Synthesized
QVQLQESGGGLVQAGGSLRLSCAASGTISYIVTMGWYRQAPGKEREFVAAISRGTNTYYADSVKGRFTISRDNAKNTVYLQMNSLKPEDTAVYYCAAGVGWLYRHYYWGQGTQVTVSS

SEQ ID NO: 30442 - protein, 118 aa, Artificial Sequence
  Chemically Synthesized
QVQLQESGGGLVQAGGSLRLSCAASGNIFRSVRMGWYRQAPGKERELVAAITHGGNTYYADSVKGRFTISRDNAKNTVYLQMNSLKPEDTAVYYCAVGTVAHRYYHYWGQGTQVTVSS

SEQ ID NO: 30443 - protein, 123 aa, Artificial Sequence
  Chemically Synthesized
QVQLQESGGGLVQAGGSLRLSCAASGYISLSGVVMGWYRQAPGKEREFVAAIDEGAITNYADSVKGRFTISRDNAKNTVYLQMNSLKPEDTAVYYCAVDWYSDQSGNRQYVYWGQGTQVTVSS

SEQ ID NO: 30444 - protein, 118 aa, Artificial Sequence
  Chemically Synthesized
QVQLQESGGGLVQAGGSLRLSCAASGSIFGRRYMGWYRQAPGKERELVAAINGGSSTYYADSVKGRFTISRDNAKNTVYLQMNSLKPEDTAVYYCAAGSWRLHPHPYWGQGTQVTVSS

SEQ ID NO: 30445 - protein, 122 aa, Artificial Sequence
  Chemically Synthesized
QVQLQESGGGLVQAGGSLRLSCAASGNIFVGYYMGWYRQAPGKERELVASIGAGGTTYYADSVKGRFTISRDNAKNTVYLQMNSLKPEDTAVYYCAAPDRWRYGNYRRHWYWGQGTQVTVSS

SEQ ID NO: 30446 - protein, 118 aa, Artificial Sequence
  Chemically Synthesized
QVQLQESGGGLVQAGGSLRLSCAASGNIFSWRRMGWYRQAPGKERELVATISKGGSTNYADSVKGRFTISRDNAKNTVYLQMNSLKPEDTAVYYCAVGRNYPRVYGYWGQGTQVTVSS

SEQ ID NO: 30447 - protein, 122 aa, Artificial Sequence
  Chemically Synthesized
QVQLQESGGGLVQAGGSLRLSCAASGNISLAQDMGWYRQAPGKERELVAAIARGGTTYYADSVKGRFTISRDNAKNTVYLQMNSLKPEDTAVYYCAAIRYDVFPWYAVLPYWGQGTQVTVSS

SEQ ID NO: 30448 - protein, 122 aa, Artificial Sequence
  Chemically Synthesized
QVQLQESGGGLVQAGGSLRLSCAASGTIFPYRVMGWYRQAPGKERELVAAISRGSNTYYADSVKGRFTISRDNAKNTVYLQMNSLKPEDTAVYYCAVKYRGATYGNVRHPYWGQGTQVTVSS

SEQ ID NO: 30449 - protein, 118 aa, Artificial Sequence
  Chemically Synthesized
QVQLQESGGGLVQAGGSLRLSCAASGYISQYYYMGWYRQAPGKERELVATISRGSSTYYADSVKGRFTISRDNAKNTVYLQMNSLKPEDTAVYYCAARKGKYWAHSYWGQGTQVTVSS

SEQ ID NO: 30450 - protein, 126 aa, Artificial Sequence
  Chemically Synthesized
QVQLQESGGGLVQAGGSLRLSCAASGTISPGSEMGWYRQAPGKERELVAAIDFGGITYYADSVKGRFTISRDNAKNTVYLQMNSLKPEDTAVYYCAVGGSDDDGAYTIQYFKHAYWGQGTQVTVSS

SEQ ID NO: 30451 - protein, 118 aa, Artificial Sequence
  Chemically Synthesized
QVQLQESGGGLVQAGGSLRLSCAASGTISYYYLMGWYRQAPGKERELVAGINSGTSTNYADSVKGRFTISRDNAKNTVYLQMNSLKPEDTAVYYCAAGGVYYDSFYYWGQGTQVTVSS

SEQ ID NO: 30452 - protein, 122 aa, Artificial Sequence
  Chemically Synthesized
QVQLQESGGGLVQAGGSLRLSCAASGSIFRALVMGWYRQAPGKERELVASITRGTSTYYADSVKGRFTISRDNAKNTVYLQMNSLKPEDTAVYYCAVRSKRRQFGYHPLSYWGQGTQVTVSS

SEQ ID NO: 30453 - protein, 118 aa, Artificial Sequence
  Chemically Synthesized
QVQLQESGGGLVQAGGSLRLSCAASGNISYITAMGWYRQAPGKERELVAAISNGSITYYADSVKGRFTISRDNAKNTVYLQMNSLKPEDTAVYYCAAYAYWILDFDYWGQGTQVTVSS

SEQ ID NO: 30454 - protein, 126 aa, Artificial Sequence
  Chemically Synthesized
QVQLQESGGGLVQAGGSLRLSCAASGNISRRPRMGWYRQAPGKERELVASISWGTTTNYADSVKGRFTISRDNAKNTVYLQMNSLKPEDTAVYYCAVRVYTRYTYYSWDKYYHQYWGQGTQVTVSS

SEQ ID NO: 30455 - protein, 122 aa, Artificial Sequence
  Chemically Synthesized
QVQLQESGGGLVQAGGSLRLSCAASGTISLLWYMGWYRQAPGKEREFVATINYGGNTYYADSVKGRFTISRDNAKNTVYLQMNSLKPEDTAVYYCAAYDVDYFYNPYFFIYWGQGTQVTVSS

SEQ ID NO: 30456 - protein, 126 aa, Artificial Sequence
  Chemically Synthesized
QVQLQESGGGLVQAGGSLRLSCAASGTISYANYMGWYRQAPGKEREFVASISFGGTTNYADSVKGRFTISRDNAKNTVYLQMNSLKPEDTAVYYCAARGRYRGDSYGHWNRRHTYWGQGTQVTVSS

SEQ ID NO: 30457 - protein, 122 aa, Artificial Sequence
  Chemically Synthesized
QVQLQESGGGLVQAGGSLRLSCAASGTIFTPLNMGWYRQAPGKERELVASIATGGSTYYADSVKGRFTISRDNAKNTVYLQMNSLKPEDTAVYYCAARGRITAHPPFRHRYWGQGTQVTVSS

SEQ ID NO: 30458 - protein, 118 aa, Artificial Sequence
  Chemically Synthesized
QVQLQESGGGLVQAGGSLRLSCAASGSISRAWYMGWYRQAPGKERELVAGINYGAITYYADSVKGRFTISRDNAKNTVYLQMNSLKPEDTAVYYCAARGRRYYAYGYWGQGTQVTVSS

SEQ ID NO: 30459 - protein, 126 aa, Artificial Sequence
  Chemically Synthesized
QVQLQESGGGLVQAGGSLRLSCAASGSIFAYRYMGWYRQAPGKERELVAAIGSGSTTYYADSVKGRFTISRDNAKNTVYLQMNSLKPEDTAVYYCAALFYWPRYYRITDGFDLDYWGQGTQVTVSS

SEQ ID NO: 30460 - protein, 118 aa, Artificial Sequence
  Chemically Synthesized
QVQLQESGGGLVQAGGSLRLSCAASGYIFVYAYMGWYRQAPGKEREFVASIGTGGNTYYADSVKGRFTISRDNAKNTVYLQMNSLKPEDTAVYYCAAEDYDDQSHAYWGQGTQVTVSS

SEQ ID NO: 30461 - protein, 118 aa, Artificial Sequence
  Chemically Synthesized
QVQLQESGGGLVQAGGSLRLSCAASGTIFAPYYMGWYRQAPGKERELVAGITRGTTTYYADSVKGRFTISRDNAKNTVYLQMNSLKPEDTAVYYCAVLGTRLLRFSYWGQGTQVTVSS

SEQ ID NO: 30462 - protein, 116 aa, Artificial Sequence
  Chemically Synthesized
QVQLQESGGGLVQAGGSLRLSCAASGTISARYNMGWYRQAPGKEREFVAGIAYGGSYADSVKGRFTISRDNAKNTVYLQMNSLKPEDTAVYYCAVGGYRGHYHYYWGQGTQVTVSS

SEQ ID NO: 30463 - protein, 119 aa, Artificial Sequence
  Chemically Synthesized
QVQLQESGGGLVQAGGSLRLSCAASGNISRSYTMGWYRQAPGKEREFVAGISRGTITYYADSVKGRFTISRDNAKNTVYLQMNSLKPEDTAVYYCAARRAYPRALFPYWGQGTQVTVSS

SEQ ID NO: 30464 - protein, 118 aa, Artificial Sequence
  Chemically Synthesized
QVQLQESGGGLVQAGGSLRLSCAASGTISPYTIMGWYRQAPGKERELVASIGSGANTYYADSVKGRFTISRDNAKNTVYLQMNSLKPEDTAVYYCAVFTARTGGLYYWGQGTQVTVSS

SEQ ID NO: 30465 - protein, 118 aa, Artificial Sequence
  Chemically Synthesized
QVQLQESGGGLVQAGGSLRLSCAASGYIFDRRLMGWYRQAPGKERELVAAITRGASTYYADSVKGRFTISRDNAKNTVYLQMNSLKPEDTAVYYCAAPRRSYYTHTYWGQGTQVTVSS

SEQ ID NO: 30466 - protein, 116 aa, Artificial Sequence
  Chemically Synthesized
QVQLQESGGGLVQAGGSLRLSCAASGYIFYVDSMGWYRQAPGKERELVAGIGHGGTTYYADSVKGRFTISRDNAKNTVYLQMNSLKPEDTAVYYCAAWRGIPLTYWGQGTQVTVSS

SEQ ID NO: 30467 - protein, 121 aa, Artificial Sequence
  Chemically Synthesized
QVQLQESGGGLVQAGGSLRLSCAASGTISPRWHMGWYRQAPGKERELVAAISYGATTYYADSVKGRFTISRDNAKNTVYLQMNSLKPEDTAVYYCAVRTVYWLYFVRHRYWGQGTQVTVSS

SEQ ID NO: 30468 - protein, 122 aa, Artificial Sequence
  Chemically Synthesized
QVQLQESGGGLVQAGGSLRLSCAASGSIFVDGGMGWYRQAPGKERELVATITYGGITYYADSVKGRFTISRDNAKNTVYLQMNSLKPEDTAVYYCAVDRYFFATYYYDHLYWGQGTQVTVSS

SEQ ID NO: 30469 - protein, 118 aa, Artificial Sequence
  Chemically Synthesized
QVQLQESGGGLVQAGGSLRLSCAASGTIFYVHPMGWYRQAPGKERELVAAIGIGANTYYADSVKGRFTISRDNAKNTVYLQMNSLKPEDTAVYYCAAPYGYLVHHFYWGQGTQVTVSS

SEQ ID NO: 30470 - protein, 122 aa, Artificial Sequence
  Chemically Synthesized
QVQLQESGGGLVQAGGSLRLSCAASGYISGAHWMGWYRQAPGKERELVATIADGTITNYADSVKGRFTISRDNAKNTVYLQMNSLKPEDTAVYYCAAKYRVDGYPRGRHRYWGQGTQVTVSS

SEQ ID NO: 30471 - protein, 126 aa, Artificial Sequence
  Chemically Synthesized
QVQLQESGGGLVQAGGSLRLSCAASGNIFYYSRMGWYRQAPGKEREFVAAITYGTNTNYADSVKGRFTISRDNAKNTVYLQMNSLKPEDTAVYYCAAYRRYRNYTSGLFTVRHTYWGQGTQVTVSS

SEQ ID NO: 30472 - protein, 118 aa, Artificial Sequence
  Chemically Synthesized
QVQLQESGGGLVQAGGSLRLSCAASGYIFLVTGMGWYRQAPGKERELVAGIDTGAITYYADSVKGRFTISRDNAKNTVYLQMNSLKPEDTAVYYCAVWGYGYTKYRYWGQGTQVTVSS

SEQ ID NO: 30473 - protein, 125 aa, Artificial Sequence
  Chemically Synthesized
QVQLQESGGGLVQAGGSLRLSCAASGSIFGGSIMGWYRQAPGKERELVASINSGGNTNYADSVKGRFTISRDNAKNTVYLQMNSLKPEDTAVYYCAVASLSRTCWLTIRSGSMYWGQGTQVTVSS

SEQ ID NO: 30474 - protein, 121 aa, Artificial Sequence
  Chemically Synthesized
QVQLQESGGGLVQAGGSLRLSCAASGYIFRSTMGWYRQAPGKEREFVASISYGGTTYYADSVKGRFTISRDNAKNTVYLQMNSLKPEDTAVYYCAAGQPKIDLLAYAYVYWGQGTQVTVSS

SEQ ID NO: 30475 - protein, 126 aa, Artificial Sequence
  Chemically Synthesized
QVQLQESGGGLVQAGGSLRLSCAASGNISNPSVMGWYRQAPGKERELVAAIGLGANTYYADSVKGRFTISRDNAKNTVYLQMNSLKPEDTAVYYCAVGGVQNPYDDIGGESQYWYWGQGTQVTVSS

SEQ ID NO: 30476 - protein, 118 aa, Artificial Sequence
  Chemically Synthesized
QVQLQESGGGLVQAGGSLRLSCAASGTISYGPTMGWYRQAPGKERELVAAITFGSTTYYADSVKGRFTISRDNAKNTVYLQMNSLKPEDTAVYYCAVTRPYRPHFLYWGQGTQVTVSS

SEQ ID NO: 30477 - protein, 126 aa, Artificial Sequence
  Chemically Synthesized
QVQLQESGGGLVQAGGSLRLSCAASGYISARPGMGWYRQAPGKERELVASISVGGNTYYADSVKGRFTISRDNAKNTVYLQMNSLKPEDTAVYYCAVWGRLRRTRYGDFNSTFRYWGQGTQVTVSS

SEQ ID NO: 30478 - protein, 118 aa, Artificial Sequence
  Chemically Synthesized
QVQLQESGGGLVQAGGSLRLSCAASGYISYDDYMGWYRQAPGKERELVAAIGAGGNTNYADSVKGRFTISRDNAKNTVYLQMNSLKPEDTAVYYCAVGLSLGYRYGYWGQGTQVTVSS

SEQ ID NO: 30479 - protein, 122 aa, Artificial Sequence
  Chemically Synthesized
QVQLQESGGGLVQAGGSLRLSCAASGSISGKRYMGWYRQAPGKERELVAGIDQGSSTNYADSVKGRFTISRDNAKNTVYLQMNSLKPEDTAVYYCAVAGRRRVGGRYRHVYWGQGTQVTVSS

SEQ ID NO: 30480 - protein, 122 aa, Artificial Sequence
  Chemically Synthesized
QVQLQESGGGLVQAGGSLRLSCAASGYISPWPFMGWYRQAPGKEREFVAGIGGGTTTYYADSVKGRFTISRDNAKNTVYLQMNSLKPEDTAVYYCAARARTNYRYTPRYRYWGQGTQVTVSS

SEQ ID NO: 30481 - protein, 118 aa, Artificial Sequence
  Chemically Synthesized
QVQLQESGGGLVQAGGSLRLSCAASGNIFTLRVMGWYRQAPGKERELVAAIGRGSITYYADSVKGRFTISRDNAKNTVYLQMNSLKPEDTAVYYCAAAGGVYRSFGYWGQGTQVTVSS

SEQ ID NO: 30482 - protein, 118 aa, Artificial Sequence
  Chemically Synthesized
QVQLQESGGGLVQAGGSLRLSCAASGTISDHRYMGWYRQAPGKERELVATITYGTSTNYADSVKGRFTISRDNAKNTVYLQMNSLKPEDTAVYYCAAKGWWYRAHRYWGQGTQVTVSS

SEQ ID NO: 30483 - protein, 122 aa, Artificial Sequence
  Chemically Synthesized
QVQLQESGGGLVQAGGSLRLSCAASGNIFQYPYMGWYRQAPGKEREFVATINDGTSTYYADSVKGRFTISRDNAKNTVYLQMNSLKPEDTAVYYCAARYRQLLANPYAYRYWGQGTQVTVSS

SEQ ID NO: 30484 - protein, 117 aa, Artificial Sequence
  Chemically Synthesized
QVQLQESGGGLVQAGGSLRLSCAASGTIFRRGVMGWYRQAPGKERELVAAIDQGANTNYADSVKGRFTISRDNAKNTVYLQMNSLKPEDTAVYYCAVSGRYWHLLYWGQGTQVTVSS

SEQ ID NO: 30485 - protein, 122 aa, Artificial Sequence
  Chemically Synthesized
QVQLQESGGGLVQAGGSLRLSCAASGNIFRRVNMGWYRQAPGKERELVAAIGRGASTYYADSVKGRFTISRDNAKNTVYLQMNSLKPEDTAVYYCAARHRIFTASATYFYYWGQGTQVTVSS

SEQ ID NO: 30486 - protein, 126 aa, Artificial Sequence
  Chemically Synthesized
QVQLQESGGGLVQAGGSLRLSCAASGSISRWREMGWYRQAPGKERELVASINYGGNTYYADSVKGRFTISRDNAKNTVYLQMNSLKPEDTAVYYCAAWYVYGYRWHIRHLDNHGYWGQGTQVTVSS

SEQ ID NO: 30487 - protein, 118 aa, Artificial Sequence
  Chemically Synthesized
QVQLQESGGGLVQAGGSLRLSCAASGYISYRNIMGWYRQAPGKERELVAGITYGGNTNYADSVKGRFTISRDNAKNTVYLQMNSLKPEDTAVYYCAVIAWRRTYFSYWGQGTQVTVSS

SEQ ID NO: 30488 - protein, 118 aa, Artificial Sequence
  Chemically Synthesized
QVQLQESGGGLVQAGGSLRLSCAASGNISDLRTMGWYRQAPGKERELVATINGGATTNYADSVKGRFTISRDNAKNTVYLQMNSLKPEDTAVYYCAAYAPVLTGHNYWGQGTQVTVSS

SEQ ID NO: 30489 - protein, 118 aa, Artificial Sequence
  Chemically Synthesized
QVQLQESGGGLVQAGGSLRLSCAASGSISRSIDMGWYRQAPGKERELVATINDGGTTYYADSVKGRFTISRDNAKNTVYLQMNSLKPEDTAVYYCAVVDRVTRDHQYWGQGTQVTVSS

SEQ ID NO: 30490 - protein, 118 aa, Artificial Sequence
  Chemically Synthesized
QVQLQESGGGLVQAGGSLRLSCAASGNISWAYTMGWYRQAPGKEREFVASIALGANTNYADSVKGRFTISRDNAKNTVYLQMNSLKPEDTAVYYCAAYLVRYDYLIYWGQGTQVTVSS

SEQ ID NO: 30491 - protein, 118 aa, Artificial Sequence
  Chemically Synthesized
QVQLQESGGGLVQAGGSLRLSCAASGSISDYGYMGWYRQAPGKERELVASISEGTSTYYADSVKGRFTISRDNAKNTVYLQMNSLKPEDTAVYYCAVYYSPGYTLNYWGQGTQVTVSS

SEQ ID NO: 30492 - protein, 122 aa, Artificial Sequence
  Chemically Synthesized
QVQLQESGGGLVQAGGSLRLSCAASGNISRQGDMGWYRQAPGKEREFVAAIDYGGSTNYADSVKGRFTISRDNAKNTVYLQMNSLKPEDTAVYYCAADYLYQYYYPRHLVYWGQGTQVTVSS

SEQ ID NO: 30493 - protein, 118 aa, Artificial Sequence
  Chemically Synthesized
QVQLQESGGGLVQAGGSLRLSCAASGNISRTPNMGWYRQAPGKERELVVAIAGGATTNYADSVKGRFTISRDNAKNTVYLQMNSLKPEDTAVYYCAVADGYESALGYWGQGTQVTVSS

SEQ ID NO: 30494 - protein, 122 aa, Artificial Sequence
  Chemically Synthesized
QVQLQESGGGLVQAGGSLRLSCAASGYIFRRFDMGWYRQAPGKEREFVAAIASGGITNYADSVKGRFTISRDNAKNTVYLQMNSLKPEDTAVYYCAVRLYNTYAVRHYHFYWGQGTQVTVSS

SEQ ID NO: 30495 - protein, 122 aa, Artificial Sequence
  Chemically Synthesized
QVQLQESGGGLVQAGGSLRLSCAASGNIFYDTHMGWYRQAPGKERELVASIGYGGSTNYADSVKGRFTISRDNAKNTVYLQMNSLKPEDTAVYYCAALSYSVRPYWSSYRYWGQGTQVTVSS

SEQ ID NO: 30496 - protein, 126 aa, Artificial Sequence
  Chemically Synthesized
QVQLQESGGGLVQAGGSLRLSCAASGTIFNAYDMGWYRQAPGKERELVAAIDKGGITYYADSVKGRFTISRDNAKNTVYLQMNSLKPEDTAVYYCAVAYSYETPVGTTRYSAYDYWGQGTQVTVSS

SEQ ID NO: 30497 - protein, 119 aa, Artificial Sequence
  Chemically Synthesized
QVQLQESGGGLVQAGGSLRLSCAASGNIRYMGWYRQAPGKERELVASITYGASTNYADSVKGRFTISRDNAKNTVYLQMNSLKPEDTAVYYCAAKYWSRVHGYRYHQYWGQGTQVTVSS

SEQ ID NO: 30498 - protein, 122 aa, Artificial Sequence
  Chemically Synthesized
QVQLQESGGGLVQAGGSLRLSCAASGNISVSIGMGWYRQAPGKEREFVATINSGSNTYYADSVKGRFTISRDNAKNTVYLQMNSLKPEDTAVYYCAVYRASRGADPLLHVYWGQGTQVTVSS

SEQ ID NO: 30499 - protein, 126 aa, Artificial Sequence
  Chemically Synthesized
QVQLQESGGGLVQAGGSLRLSCAASGNISYYYRMGWYRQAPGKERELVATITVGSSTYYADSVKGRFTISRDNAKNTVYLQMNSLKPEDTAVYYCAAGWVWWWQQQWYYAGRHDYWGQGTQVTVSS

SEQ ID NO: 30500 - protein, 118 aa, Artificial Sequence
  Chemically Synthesized
QVQLQESGGGLVQAGGSLRLSCAASGNIFSYRGMGWYRQAPGKERELVATITYGATTNYADSVKGRFTISRDNAKNTVYLQMNSLKPEDTAVYYCAAYRGKYRLFRYWGQGTQVTVSS

SEQ ID NO: 30501 - protein, 126 aa, Artificial Sequence
  Chemically Synthesized
QVQLQESGGGLVQAGGSLRLSCAASGNISNDDAMGWYRQAPGKERELVASINTGSSTNYADSVKGRFTISRDNAKNTVYLQMNSLKPEDTAVYYCAAPTYDPEWRAQSPSRYYAYWGQGTQVTVSS

SEQ ID NO: 30502 - protein, 126 aa, Artificial Sequence
  Chemically Synthesized
QVQLQESGGGLVQAGGSLRLSCAASGTISRHYTMGWYRQAPGKERELVATISYGATTNYADSVKGRFTISRDNAKNTVYLQMNSLKPEDTAVYYCAVDRNNPYAYFRPFSRYYPYWGQGTQVTVSS

SEQ ID NO: 30503 - protein, 122 aa, Artificial Sequence
  Chemically Synthesized
QVQLQESGGGLVQAGGSLRLSCAASGNISHRQKMGWYRQAPGKERELVASITFGGTTYYADSVKGRFTISRDNAKNTVYLQMNSLKPEDTAVYYCAVRQYRKYYLRHFHDYWGQGTQVTVSS

SEQ ID NO: 30504 - protein, 118 aa, Artificial Sequence
  Chemically Synthesized
QVQLQESGGGLVQAGGSLRLSCAASGTIFLVWSMGWYRQAPGKERELVAAINRGAITNYADSVKGRFTISRDNAKNTVYLQMNSLKPEDTAVYYCAARPYYRLRHGYWGQGTQVTVSS

SEQ ID NO: 30505 - protein, 118 aa, Artificial Sequence
  Chemically Synthesized
QVQLQESGGGLVQAGGSLRLSCAASGNISPAKKMGWYRQAPGKERELVAAIARGSTTNYADSVKGRFTISRDNAKNTVYLQMNSLKPEDTAVYYCAAGTRWNTFHRYWGQGTQVTVSS

SEQ ID NO: 30506 - protein, 118 aa, Artificial Sequence
  Chemically Synthesized
QVQLQESGGGLVQAGGSLRLSCAASGTIFTIRYMGWYRQAPGKEREFVAGINRGSSTNYADSVKGRFTISRDNAKNTVYLQMNSLKPEDTAVYYCAVRGHSYYYHAYWGQGTQVTVSS

SEQ ID NO: 30507 - protein, 118 aa, Artificial Sequence
  Chemically Synthesized
QVQLQESGGGLVQAGGSLRLSCAASGTISYRGIMGWYRQAPGKEREFVAAIDYGAITNYADSVKGRFTISRDNAKNTVYLQMNSLKPEDTAVYYCAAYISYTGVYFYWGQGTQVTVSS

SEQ ID NO: 30508 - protein, 118 aa, Artificial Sequence
  Chemically Synthesized
QVQLQESGGGLVQAGGSLRLSCAASGSISRHTRMGWYRQAPGKEREFVATIGKGTITYYADSVKGRFTISRDNAKNTVYLQMNSLKPEDTAVYYCAVRWYSRYPYAYWGQGTQVTVSS

SEQ ID NO: 30509 - protein, 122 aa, Artificial Sequence
  Chemically Synthesized
QVQLQESGGGLVQAGGSLRLSCAASGTIFWVRDMGWYRQAPGKERELVATIGIGGTTYYADSVKGRFTISRDNAKNTVYLQMNSLKPEDTAVYYCAAGKYVRIYGYGRYRYWGQGTQVTVSS

SEQ ID NO: 30510 - protein, 122 aa, Artificial Sequence
  Chemically Synthesized
QVQLQESGGGLVQAGGSLRLSCAASGYIFWHLRMGWYRQAPGKERELVAAITRGGTTYYADSVKGRFTISRDNAKNTVYLQMNSLKPEDTAVYYCAAPGYPWRYRDTYYAYWGQGTQVTVSS

SEQ ID NO: 30511 - protein, 122 aa, Artificial Sequence
  Chemically Synthesized
QVQLQESGGGLVQAGGSLRLSCAASGSIFYPRTMGWYRQAPGKEREFVAGITGGSNTYYADSVKGRFTISRDNAKNTVYLQMNSLKPEDTAVYYCAARYYFAGRYDWTHSYWGQGTQVTVSS

SEQ ID NO: 30512 - protein, 126 aa, Artificial Sequence
  Chemically Synthesized
QVQLQESGGGLVQAGGSLRLSCAASGTIFEGDSMGWYRQAPGKEREFVATISYGTSTNYADSVKGRFTISRDNAKNTVYLQMNSLKPEDTAVYYCAVWIPGTTLYYIPVYYYHPYWGQGTQVTVSS

SEQ ID NO: 30513 - protein, 122 aa, Artificial Sequence
  Chemically Synthesized
QVQLQESGGGLVQAGGSLRLSCAASGTIFIVHPMGWYRQAPGKEREFVAGITYGGNTYYADSVKGRFTISRDNAKNTVYLQMNSLKPEDTAVYYCAAYTIAQRAPLLYYDYWGQGTQVTVSS

SEQ ID NO: 30514 - protein, 122 aa, Artificial Sequence
  Chemically Synthesized
QVQLQESGGGLVQAGGSLRLSCAASGSIFSHALMGWYRQAPGKERELVAAINSGGNTYYADSVKGRFTISRDNAKNTVYLQMNSLKPEDTAVYYCAAQKPRSYFQYRVHRYWGQGTQVTVSS

SEQ ID NO: 30515 - protein, 114 aa, Artificial Sequence
  Chemically Synthesized
QVQLQESGGGLVQAGGSLRLSCAASGNIFGWKRMGWYRQAPGKEREFVAAIGYGANTYYADSVKGRFTISRDNAKNTVYLQMNSLKPEDTAVYYCAYRYYHVYWGQGTQVTVSS

SEQ ID NO: 30516 - protein, 118 aa, Artificial Sequence
  Chemically Synthesized
QVQLQESGGGLVQAGGSLRLSCAASGYIFVPAIMGWYRQAPGKEREFVAAIDDGTITYYADSVKGRFTISRDNAKNTVYLQMNSLKPEDTAVYYCAVTDYYYLEFPYWGQGTQVTVSS

SEQ ID NO: 30517 - protein, 115 aa, Artificial Sequence
  Chemically Synthesized
QVQLQESGGGLVQAGGSLRLSCAASGYIFGYRVMGWYRQAPGKERELVAAIGRGSNTYYADSVKGRFTISRDNAKNTVYLQMNSLKPEDTAVYYCAVNTVRYSYWGQGTQVTVSS

SEQ ID NO: 30518 - protein, 118 aa, Artificial Sequence
  Chemically Synthesized
QVQLQESGGGLVQAGGSLRLSCAASGNIFNQKRMGWYRQAPGKEREFVASIGIGATTYYADSVKGRFTISRDNAKNTVYLQMNSLKPEDTAVYYCAATDDRAGSYRYWGQGTQVTVSS

SEQ ID NO: 30519 - protein, 118 aa, Artificial Sequence
  Chemically Synthesized
QVQLQESGGGLVQAGGSLRLSCAASGSISYRRYMGWYRQAPGKERELVAAINFGTSTYYADSVKGRFTISRDNAKNTVYLQMNSLKPEDTAVYYCAAWRYRRADLGYWGQGTQVTVSS

SEQ ID NO: 30520 - protein, 126 aa, Artificial Sequence
  Chemically Synthesized
QVQLQESGGGLVQAGGSLRLSCAASGYIFTRYAMGWYRQAPGKERELVAGISPGTTTNYADSVKGRFTISRDNAKNTVYLQMNSLKPEDTAVYYCAAYGQQNIYISYAYYYVHYYWGQGTQVTVSS

SEQ ID NO: 30521 - protein, 118 aa, Artificial Sequence
  Chemically Synthesized
QVQLQESGGGLVQAGGSLRLSCAASGSISASGRMGWYRQAPGKERELVAGIGRGASTYYADSVKGRFTISRDNAKNTVYLQMNSLKPEDTAVYYCAVWRAYRYYFRYWGQGTQVTVSS

SEQ ID NO: 30522 - protein, 118 aa, Artificial Sequence
  Chemically Synthesized
QVQLQESGGGLVQAGGSLRLSCAASGNISPRYIMGWYRQAPGKERELVATISVGSITYYADSVKGRFTISRDNAKNTVYLQMNSLKPEDTAVYYCAAKRGYFQRHYYWGQGTQVTVSS

SEQ ID NO: 30523 - protein, 118 aa, Artificial Sequence
  Chemically Synthesized
QVQLQESGGGLVQAGGSLRLSCAASGYISRARYMGWYRQAPGKEREFVATISYGASTNYADSVKGRFTISRDNAKNTVYLQMNSLKPEDTAVYYCAARRWTWQYHPYWGQGTQVTVSS

SEQ ID NO: 30524 - protein, 122 aa, Artificial Sequence
  Chemically Synthesized
QVQLQESGGGLVQAGGSLRLSCAASGNISDDFGMGWYRQAPGKERELVAGIATGSTTYYADSVKGRFTISRDNAKNTVYLQMNSLKPEDTAVYYCAVHHTLRDYAVGGFRYWGQGTQVTVSS

SEQ ID NO: 30525 - protein, 118 aa, Artificial Sequence
  Chemically Synthesized
QVQLQESGGGLVQAGGSLRLSCAASGTIFLAYNMGWYRQAPGKERELVASISRGSSTNYADSVKGRFTISRDNAKNTVYLQMNSLKPEDTAVYYCAVQGYRYTRHRYWGQGTQVTVSS

SEQ ID NO: 30526 - protein, 123 aa, Artificial Sequence
  Chemically Synthesized
QVQLQESGGGLVQAGGSLRLSCAASGTIFYAYSMGWYRQAPGKEREFVAGISPGSNTNYADSVKGRFTISRDNAKNTVYLQMNSLKPEDTAVYYCAARDNGEPTQYYVRYGYWGQGTQVTVSS

SEQ ID NO: 30527 - protein, 122 aa, Artificial Sequence
  Chemically Synthesized
QVQLQESGGGLVQAGGSLRLSCAASGNIFLARYMGWYRQAPGKERELVATITRGGSTNYADSVKGRFTISRDNAKNTVYLQMNSLKPEDTAVYYCAVGARGWDHWITYYHYWGQGTQVTVSS

SEQ ID NO: 30528 - protein, 117 aa, Artificial Sequence
  Chemically Synthesized
QVQLQESGGGLVQAGGSLRLSCAASGNISSTTMGWYRQAPGKEREFVASIDDGTITNYADSVKGRFTISRDNAKNTVYLQMNSLKPEDTAVYYCAADGTYAYKYYYWGQGTQVTVSS

SEQ ID NO: 30529 - protein, 126 aa, Artificial Sequence
  Chemically Synthesized
QVQLQESGGGLVQAGGSLRLSCAASGSIFLFDGMGWYRQAPGKERELVASIAAGTTTNYADSVKGRFTISRDNAKNTVYLQMNSLKPEDTAVYYCAVDVAKISLGYWYVYVYHPYWGQGTQVTVSS

SEQ ID NO: 30530 - protein, 121 aa, Artificial Sequence
  Chemically Synthesized
QVQLQESGGGLVQAGGSLRLSCAASGYISNTIFMGWYRQAPGKEREFVASISYGGNTYYADSVKGRFTISRDNAKNTVYLQMNSLKPEDTAVYYCAVWGGYSGYLTTVMYWGQGTQVTVSS

SEQ ID NO: 30531 - protein, 118 aa, Artificial Sequence
  Chemically Synthesized
QVQLQESGGGLVQAGGSLRLSCAASGNIFLRIRMGWYRQAPGKERELVASISQGANTYYADSVKGRFTISRDNAKNTVYLQMNSLKPEDTAVYYCAVRSRGIYRHYYWGQGTQVTVSS

SEQ ID NO: 30532 - protein, 126 aa, Artificial Sequence
  Chemically Synthesized
QVQLQESGGGLVQAGGSLRLSCAASGNISAFSGMGWYRQAPGKERELVAGIGSGTITYYADSVKGRFTISRDNAKNTVYLQMNSLKPEDTAVYYCAALNRKGPYSWRQQSWRHPYWGQGTQVTVSS

SEQ ID NO: 30533 - protein, 117 aa, Artificial Sequence
  Chemically Synthesized
QVQLQESGGGLVQAGGSLRLSCAASGNIFDSDMGWYRQAPGKERELVASIDSGANTNYADSVKGRFTISRDNAKNTVYLQMNSLKPEDTAVYYCAVQYFYDWRHVYWGQGTQVTVSS

SEQ ID NO: 30534 - protein, 118 aa, Artificial Sequence
  Chemically Synthesized
QVQLQESGGGLVQAGGSLRLSCAASGNISRFSRMGWYRQAPGKERELVASISRGGNTNYADSVKGRFTISRDNAKNTVYLQMNSLKPEDTAVYYCAAVRYGYYAHWYWGQGTQVTVSS

SEQ ID NO: 30535 - protein, 118 aa, Artificial Sequence
  Chemically Synthesized
QVQLQESGGGLVQAGGSLRLSCAASGSIFLVWYMGWYRQAPGKERELVATIATGSNTNYADSVKGRFTISRDNAKNTVYLQMNSLKPEDTAVYYCAVYGGWWRRYLYWGQGTQVTVSS

SEQ ID NO: 30536 - protein, 125 aa, Artificial Sequence
  Chemically Synthesized
QVQLQESGGGLVQAGGSLRLSCAASGYIFSRRYMGWYRQAPGKERELVASISSGGSTYADSVKGRFTISRDNAKNTVYLQMNSLKPEDTAVYYCAVDRLPYSDFETTVQFWHLYWGQGTQVTVSS

SEQ ID NO: 30537 - protein, 118 aa, Artificial Sequence
  Chemically Synthesized
QVQLQESGGGLVQAGGSLRLSCAASGYIFVGGHMGWYRQAPGKEREFVASISYGSSTYYADSVKGRFTISRDNAKNTVYLQMNSLKPEDTAVYYCAVIDATQYHHIYWGQGTQVTVSS

SEQ ID NO: 30538 - protein, 125 aa, Artificial Sequence
  Chemically Synthesized
QVQLQESGGGLVQAGGSLRLSCAASGTIFYSPYMGWYRQAPGKERELVAGITRGASTYYADSVKGRFTISRDNAKNTVYLQMNSLKPEDTAVYYCAVYDVGANRRQLAYITQYYWGQGTQVTVSS

SEQ ID NO: 30539 - protein, 126 aa, Artificial Sequence
  Chemically Synthesized
QVQLQESGGGLVQAGGSLRLSCAASGSISRRGYMGWYRQAPGKERELVATIARGGTTYYADSVKGRFTISRDNAKNTVYLQMNSLKPEDTAVYYCAAWRDYGWLSLPGSVDYHFYWGQGTQVTVSS

SEQ ID NO: 30540 - protein, 122 aa, Artificial Sequence
  Chemically Synthesized
QVQLQESGGGLVQAGGSLRLSCAASGTIFARRSMGWYRQAPGKEREFVAGIGVGGNTYYADSVKGRFTISRDNAKNTVYLQMNSLKPEDTAVYYCAVRYWYYHNRWRAHNYWGQGTQVTVSS

SEQ ID NO: 30541 - protein, 118 aa, Artificial Sequence
  Chemically Synthesized
QVQLQESGGGLVQAGGSLRLSCAASGYIFPDRYMGWYRQAPGKEREFVASISYGSNTNYADSVKGRFTISRDNAKNTVYLQMNSLKPEDTAVYYCAAFEDDYYAFRYWGQGTQVTVSS

SEQ ID NO: 30542 - protein, 125 aa, Artificial Sequence
  Chemically Synthesized
QVQLQESGGGLVQAGGSLRLSCAASGTISIKGNMGWYRQAPGKEREFVATIAVGGSTYYADSVKGRFTISRDNAKNTVYLQMNSLKPEDTAVYYCAVKRKSPWSQQPYLRRHTYWGQGTQVTVSS

SEQ ID NO: 30543 - protein, 122 aa, Artificial Sequence
  Chemically Synthesized
QVQLQESGGGLVQAGGSLRLSCAASGYISYHAGMGWYRQAPGKERELVAGIDYGSTTNYADSVKGRFTISRDNAKNTVYLQMNSLKPEDTAVYYCAVGNSFALYDADNYTYWGQGTQVTVSS

SEQ ID NO: 30544 - protein, 118 aa, Artificial Sequence
  Chemically Synthesized
QVQLQESGGGLVQAGGSLRLSCAASGTISVRRFMGWYRQAPGKEREFVAAIARGASTYYADSVKGRFTISRDNAKNTVYLQMNSLKPEDTAVYYCAVYSPRERRHYYWGQGTQVTVSS

SEQ ID NO: 30545 - protein, 118 aa, Artificial Sequence
  Chemically Synthesized
QVQLQESGGGLVQAGGSLRLSCAASGSIFRSRAMGWYRQAPGKERELVAAISGGATTNYADSVKGRFTISRDNAKNTVYLQMNSLKPEDTAVYYCAARAWRRYYLHYWGQGTQVTVSS

SEQ ID NO: 30546 - protein, 118 aa, Artificial Sequence
  Chemically Synthesized
QVQLQESGGGLVQAGGSLRLSCAASGNISTRDIMGWYRQAPGKERELVATIDYGGITNYADSVKGRFTISRDNAKNTVYLQMNSLKPEDTAVYYCAVWDVRYEYLVYWGQGTQVTVSS

SEQ ID NO: 30547 - protein, 118 aa, Artificial Sequence
  Chemically Synthesized
QVQLQESGGGLVQAGGSLRLSCAASGNIFDRSDMGWYRQAPGKERELVATIAVGTSTNYADSVKGRFTISRDNAKNTVYLQMNSLKPEDTAVYYCAVTDSTWCSACYWGQGTQVTVSS

SEQ ID NO: 30548 - protein, 116 aa, Artificial Sequence
  Chemically Synthesized
QVQLQESGGGLVQAGGSLRLSCAASGSISPEGYMGWYRQAPGKERELVAGIGYGGTTNYADSVKGRFTISRDNAKNTVYLQMNSLKPEDTAVYYCAADLRHGFTYWGQGTQVTVSS

SEQ ID NO: 30549 - protein, 111 aa, Artificial Sequence
  Chemically Synthesized
QVQLQESGGGLVQAGGSLRLSCAASGTISYLQYMGWYRQAPGKERELVAGINVGANTYYADSVKGRFTISRDNAKNTVYLQMNSLKPEDTAVYYCADYVYWGQGTQVTVSS

SEQ ID NO: 30550 - protein, 122 aa, Artificial Sequence
  Chemically Synthesized
QVQLQESGGGLVQAGGSLRLSCAASGNISGQYYMGWYRQAPGKERELVAAIGPGTTTYYADSVKGRFTISRDNAKNTVYLQMNSLKPEDTAVYYCAVSGEGYRDTYYWLYYWGQGTQVTVSS

SEQ ID NO: 30551 - protein, 122 aa, Artificial Sequence
  Chemically Synthesized
QVQLQESGGGLVQAGGSLRLSCAASGSISRRLLMGWYRQAPGKERELVAAIGLGGSTYYADSVKGRFTISRDNAKNTVYLQMNSLKPEDTAVYYCAVYGYKTDARGYWHAYWGQGTQVTVSS

SEQ ID NO: 30552 - protein, 122 aa, Artificial Sequence
  Chemically Synthesized
QVQLQESGGGLVQAGGSLRLSCAASGSIFDWYYMGWYRQAPGKEREFVAGIGGGTSTYYADSVKGRFTISRDNAKNTVYLQMNSLKPEDTAVYYCAVDLDQGTTRDWYFQYWGQGTQVTVSS

SEQ ID NO: 30553 - protein, 118 aa, Artificial Sequence
  Chemically Synthesized
QVQLQESGGGLVQAGGSLRLSCAASGTIFRPSVMGWYRQAPGKERELVAAIGYGGSTYYADSVKGRFTISRDNAKNTVYLQMNSLKPEDTAVYYCAAVYDRARGYRYWGQGTQVTVSS

SEQ ID NO: 30554 - protein, 126 aa, Artificial Sequence
  Chemically Synthesized
QVQLQESGGGLVQAGGSLRLSCAASGYIFLYIIMGWYRQAPGKEREFVATIDSGTSTYYADSVKGRFTISRDNAKNTVYLQMNSLKPEDTAVYYCAAREDLDDAQLARQYRDFYYWGQGTQVTVSS

SEQ ID NO: 30555 - protein, 110 aa, Artificial Sequence
  Chemically Synthesized
QVQLQESGGGLVQAGGSLRLSCAASGTISIERRMGWYRQAPGKEREFVATITLGSNTNYADSVKGRFTISRDNAKNTVYLQMNSLKPEDTAVYYCAALYWGQGTQVTVSS

SEQ ID NO: 30556 - protein, 121 aa, Artificial Sequence
  Chemically Synthesized
QVQLQESGGGLVQAGGSLRLSCAASGTISEPDSMGWYRQAPGKERELVPLLLVVVVPYADSVKGRFTISRDNAKNTVYLQMNSLKPEDTAVYYCAARGVQFVALDGDHDYWGQGTQVTVSS

SEQ ID NO: 30557 - protein, 117 aa, Artificial Sequence
  Chemically Synthesized
QVQLQESGGGLVQAGGSLRLSCAASGTISQQYTMGWYRQAPGKERELVATIADGTSTYYADSVKGRFTISRDNAKNTVYLQMNSLKPEDTAVYYCAATVSAGDPLYWGQGTQVTVSS

SEQ ID NO: 30558 - protein, 122 aa, Artificial Sequence
  Chemically Synthesized
QVQLQESGGGLVQAGGSLRLSCAASGTISAYTWMGWYRQAPGKERELVAAISNGTITYYADSVKGRFTISRDNAKNTVYLQMNSLKPEDTAVYYCAVPSKRRYGYVPWFDYWGQGTQVTVSS

SEQ ID NO: 30559 - protein, 123 aa, Artificial Sequence
  Chemically Synthesized
QVQLQESGGGLVQAGGSLRLSCAASGSIFGAYMGWYRQAPGKEREFVATISWGLLPYADSVKGRFTISRDNAKNTVYLQMNSLKPEDTAVYYCAAYIWYPGPYSYSYYYHKYWGQGTQVTVSS

SEQ ID NO: 30560 - protein, 126 aa, Artificial Sequence
  Chemically Synthesized
QVQLQESGGGLVQAGGSLRLSCAASGYISSFFAMGWYRQAPGKERELVAAINYGATTYYADSVKGRFTISRDNAKNTVYLQMNSLKPEDTAVYYCAAQRPFLQYLYSYFYLTYDYWGQGTQVTVSS

SEQ ID NO: 30561 - protein, 117 aa, Artificial Sequence
  Chemically Synthesized
QVQLQESGGGLVQAGGSLRLSCAASGTIFGGAVMGWYRQAPGKERELVAGIDSGSNTNYADSVKGRFTISRDNAKNTVYLQMNSLKPEDTAVYYCAAPRSTLTTLYWGQGTQVTVSS

SEQ ID NO: 30562 - protein, 126 aa, Artificial Sequence
  Chemically Synthesized
QVQLQESGGGLVQAGGSLRLSCAASGYISRRNYMGWYRQAPGKEREFVASIAGGTSTYYADSVKGRFTISRDNAKNTVYLQMNSLKPEDTAVYYCAVRIRLRDVRASSGIGTHAYWGQGTQVTVSS

SEQ ID NO: 30563 - protein, 121 aa, Artificial Sequence
  Chemically Synthesized
QVQLQESGGGLVQAGGSLRLSCAASGSISSEAFMGWYRQAPGKEREFVASIATGTTTNYADSVKGRFTISRDNAKNTVYLQMNSLKPEDTAVYYCAVGPYGYLRGYGDYYWGQGTQVTVSS

SEQ ID NO: 30564 - protein, 118 aa, Artificial Sequence
  Chemically Synthesized
QVQLQESGGGLVQAGGSLRLSCAASGSIFWNYDMGWYRQAPGKERELVAGIAQGTNTYYADSVKGRFTISRDNAKNTVYLQMNSLKPEDTAVYYCAVAAGYVDDHAYWGQGTQVTVSS

SEQ ID NO: 30565 - protein, 111 aa, Artificial Sequence
  Chemically Synthesized
QVQLQESGGGLVQAGGSLRLSCAASGNISSVTMGWYRQAPGKEREFVAAINYGTNTYYADSVKGRFTISRDNAKNTVYLQMNSLKPEDTAVYYCAVLPYYWGQGTQVTVSS

SEQ ID NO: 30566 - protein, 126 aa, Artificial Sequence
  Chemically Synthesized
QVQLQESGGGLVQAGGSLRLSCAASGSISRRTYMGWYRQAPGKERELVASITEGSTTNYADSVKGRFTISRDNAKNTVYLQMNSLKPEDTAVYYCAVYVGDSPVRNPRGSRNLPYWGQGTQVTVSS

SEQ ID NO: 30567 - protein, 118 aa, Artificial Sequence
  Chemically Synthesized
QVQLQESGGGLVQAGGSLRLSCAASGSISGNFGMGWYRQAPGKERELVATINTGGNTNYADSVKGRFTISRDNAKNTVYLQMNSLKPEDTAVYYCAVNIYYDYAFDYWGQGTQVTVSS

SEQ ID NO: 30568 - protein, 118 aa, Artificial Sequence
  Chemically Synthesized
QVQLQESGGGLVQAGGSLRLSCAASGTISKAVYMGWYRQAPGKEREFVAAIDNGSSTYYADSVKGRFTISRDNAKNTVYLQMNSLKPEDTAVYYCAVEIDGLELHDYWGQGTQVTVSS

SEQ ID NO: 30569 - protein, 118 aa, Artificial Sequence
  Chemically Synthesized
QVQLQESGGGLVQAGGSLRLSCAASGYISSLIYMGWYRQAPGKERELVAAIDDGSTTYYADSVKGRFTISRDNAKNTVYLQMNSLKPEDTAVYYCAVLSAYSTYYYYWGQGTQVTVSS

SEQ ID NO: 30570 - protein, 126 aa, Artificial Sequence
  Chemically Synthesized
QVQLQESGGGLVQAGGSLRLSCAASGNIFVASSMGWYRQAPGKEREFVASIGYGASTYYADSVKGRFTISRDNAKNTVYLQMNSLKPEDTAVYYCAAGALYVYPAYLVLNSPFWYWGQGTQVTVSS

SEQ ID NO: 30571 - protein, 118 aa, Artificial Sequence
  Chemically Synthesized
QVQLQESGGGLVQAGGSLRLSCAASGNISIPTEMGWYRQAPGKERELVAGIAYGTITNYADSVKGRFTISRDNAKNTVYLQMNSLKPEDTAVYYCAAASWDYYTHYYWGQGTQVTVSS

SEQ ID NO: 30572 - protein, 118 aa, Artificial Sequence
  Chemically Synthesized
QVQLQESGGGLVQAGGSLRLSCAASGNISDDYNMGWYRQAPGKEREFVASIAFGTSTYYADSVKGRFTISRDNAKNTVYLQMNSLKPEDTAVYYCAAHYYGISPLQYWGQGTQVTVSS

SEQ ID NO: 30573 - protein, 126 aa, Artificial Sequence
  Chemically Synthesized
QVQLQESGGGLVQAGGSLRLSCAASGNIFHLAWMGWYRQAPGKEREFVAGISYGAITYYADSVKGRFTISRDNAKNTVYLQMNSLKPEDTAVYYCAAYYRNDFHNTWEPLAYLAYWGQGTQVTVSS

SEQ ID NO: 30574 - protein, 122 aa, Artificial Sequence
  Chemically Synthesized
QVQLQESGGGLVQAGGSLRLSCAASGTIFAVGIMGWYRQAPGKEREFVASINYGASTYYADSVKGRFTISRDNAKNTVYLQMNSLKPEDTAVYYCAAWWLWGSVYKADHYYWGQGTQVTVSS

SEQ ID NO: 30575 - protein, 122 aa, Artificial Sequence
  Chemically Synthesized
QVQLQESGGGLVQAGGSLRLSCAASGSIFPDESMGWYRQAPGKEREFVASIDIGGTTYYADSVKGRFTISRDNAKNTVYLQMNSLKPEDTAVYYCAAYVQGDTYETYPLDYWGQGTQVTVSS

SEQ ID NO: 30576 - protein, 114 aa, Artificial Sequence
  Chemically Synthesized
QVQLQESGGGLVQAGGSLRLSCAASGSIFTGYDMGWYRQAPGKERELVAAIAYGSSTYYADSVKGRFTISRDNAKNTVYLQMNSLKPEDTAVYYCASDQSLAYWGQGTQVTVSS

SEQ ID NO: 30577 - protein, 111 aa, Artificial Sequence
  Chemically Synthesized
QVQLQESGGGLVQAGGSLRLSCAASGNIFQGATMGWYRQAPGKERELVASIDLGTSTNYADSVKGRFTISRDNAKNTVYLQMNSLKPEDTAVYYCAVRAYWGQGTQVTVSS

SEQ ID NO: 30578 - protein, 117 aa, Artificial Sequence
  Chemically Synthesized
QVQLQESGGGLVQAGGSLRLSCAASGTISGFRSMGWYRQAPGKEREFVATISSGSSTNYADSVKGRFTISRDNAKNTVYLQMNSLKPEDTAVYYCAARQDGRYHWYWGQGTQVTVSS

SEQ ID NO: 30579 - protein, 118 aa, Artificial Sequence
  Chemically Synthesized
QVQLQESGGGLVQAGGSLRLSCAASGNISADYWMGWYRQAPGKEREFVASISVGASTYYADSVKGRFTISRDNAKNTVYLQMNSLKPEDTAVYYCAADYSYLHYHHYWGQGTQVTVSS

SEQ ID NO: 30580 - protein, 117 aa, Artificial Sequence
  Chemically Synthesized
QVQLQESGGGLVQAGGSLRLSCAASGSILLNVMGWYRQAPGKERELVASIAHGSNTNYADSVKGRFTISRDNAKNTVYLQMNSLKPEDTAVYYCAAQPGYDSRHPYWGQGTQVTVSS

SEQ ID NO: 30581 - protein, 118 aa, Artificial Sequence
  Chemically Synthesized
QVQLQESGGGLVQAGGSLRLSCAASGYIFLAFVMGWYRQAPGKEREFVAAIGYGATTYYADSVKGRFTISRDNAKNTVYLQMNSLKPEDTAVYYCAAVREFRSQHTYWGQGTQVTVSS

SEQ ID NO: 30582 - protein, 118 aa, Artificial Sequence
  Chemically Synthesized
QVQLQESGGGLVQAGGSLRLSCAASGNISLHFDMGWYRQAPGKEREFVAGIDSGGTTNYADSVKGRFTISRDNAKNTVYLQMNSLKPEDTAVYYCAARYRQHDYLHYWGQGTQVTVSS

SEQ ID NO: 30583 - protein, 118 aa, Artificial Sequence
  Chemically Synthesized
QVQLQESGGGLVQAGGSLRLSCAASGNISYWATMGWYRQAPGKERELVATIDSGANTNYADSVKGRFTISRDNAKNTVYLQMNSLKPEDTAVYYCAVTRVTVLTCIYWGQGTQVTVSS

SEQ ID NO: 30584 - protein, 125 aa, Artificial Sequence
  Chemically Synthesized
QVQLQESGGGLVQAGGSLRLSCAASGLFLTKKMGWYRQAPGKEREFVAAITRGTTTNYADSVKGRFTISRDNAKNTVYLQMNSLKPEDTAVYYCAAREDTGGIYAEGIQDDFGYWGQGTQVTVSS

SEQ ID NO: 30585 - protein, 121 aa, Artificial Sequence
  Chemically Synthesized
QVQLQESGGGLVQAGGSLRLSCAASGNIFCFCSMGWYRQAPGKERELVAAIDAGGNTYYADSVKGRFTISRDNAKNTVYLQMNSLKPEDTAVYYCAADDPSADLYRGHYYWGQGTQVTVSS

SEQ ID NO: 30586 - protein, 117 aa, Artificial Sequence
  Chemically Synthesized
QVQLQESGGGLVQAGGSLRLSCAASGTISIWSRMGWYRQAPGKERELVATITDGSNTNYADSVKGRFTISRDNAKNTVYLQMNSLKPEDTAVYYCAVRRQQLHLFYWGQGTQVTVSS

SEQ ID NO: 30587 - protein, 123 aa, Artificial Sequence
  Chemically Synthesized
QVQLQESGGGLVQAGGSLRLSCAASGTIFLTNDMGWYRQAPGKEREFVAGIGWGATTNYADSVKGRFTISRDNAKNTVYLQMNSLKPEDTAVYYCAVTNRDQGSANPLPFPYWGQGTQVTVSS

SEQ ID NO: 30588 - protein, 118 aa, Artificial Sequence
  Chemically Synthesized
QVQLQESGGGLVQAGGSLRLSCAASGYISWVKRMGWYRQAPGKEREFVATISLGSTTYYADSVKGRFTISRDNAKNTVYLQMNSLKPEDTAVYYCAVVSRFDRRYYYWGQGTQVTVSS

SEQ ID NO: 30589 - protein, 126 aa, Artificial Sequence
  Chemically Synthesized
QVQLQESGGGLVQAGGSLRLSCAASGSISPYYDMGWYRQAPGKERELVASIATGATTYYADSVKGRFTISRDNAKNTVYLQMNSLKPEDTAVYYCAVPYFAYHTYYQSYVGTYRYWGQGTQVTVSS

SEQ ID NO: 30590 - protein, 120 aa, Artificial Sequence
  Chemically Synthesized
QVQLQESGGGLVQAGGSLRLSCAASGTIFPYTGMGWYRQAPGKEREFVASISVVLIPYADSVKGRFTISRDNAKNTVYLQMNSLKPEDTAVYYCAVGEDEAEYACRPLYWGQGTQVTVSS

SEQ ID NO: 30591 - protein, 118 aa, Artificial Sequence
  Chemically Synthesized
QVQLQESGGGLVQAGGSLRLSCAASGNISRTLRMGWYRQAPGKERELVAGIGDGGITNYADSVKGRFTISRDNAKNTVYLQMNSLKPEDTAVYYCAAYGDESGVFGYWGQGTQVTVSS

SEQ ID NO: 30592 - protein, 114 aa, Artificial Sequence
  Chemically Synthesized
QVQLQESGGGLVQAGGSLRLSCAASGNIFDNGYMGWYRQAPGKEREFVAAIAQGGSTNYADSVKGRFTISRDNAKNTVYLQMNSLKPEDTAVYYCAVGDELEYWGQGTQVTVSS

SEQ ID NO: 30593 - protein, 126 aa, Artificial Sequence
  Chemically Synthesized
QVQLQESGGGLVQAGGSLRLSCAASGNISPGRYMGWYRQAPGKEREFVASIGYGGNTYYADSVKGRFTISRDNAKNTVYLQMNSLKPEDTAVYYCAASILQDTYYRRTSYIRFRYWGQGTQVTVSS

SEQ ID NO: 30594 - protein, 117 aa, Artificial Sequence
  Chemically Synthesized
QVQLQESGGGLVQAGGSLRLSCAASGTFLVMTMGWYRQAPGKEREFVAGIDYGSNTNYADSVKGRFTISRDNAKNTVYLQMNSLKPEDTAVYYCAAGDRNNPKHTYWGQGTQVTVSS

SEQ ID NO: 30595 - protein, 118 aa, Artificial Sequence
  Chemically Synthesized
QVQLQESGGGLVQAGGSLRLSCAASGYISFDGQMGWYRQAPGKERELVAGIGRGASTYYADSVKGRFTISRDNAKNTVYLQMNSLKPEDTAVYYCAVLAWYVHSLSYWGQGTQVTVSS

SEQ ID NO: 30596 - protein, 118 aa, Artificial Sequence
  Chemically Synthesized
QVQLQESGGGLVQAGGSLRLSCAASGNISLQDAMGWYRQAPGKERELVAAISLGSNTYYADSVKGRFTISRDNAKNTVYLQMNSLKPEDTAVYYCAAYEGYPYSYYYWGQGTQVTVSS

SEQ ID NO: 30597 - protein, 123 aa, Artificial Sequence
  Chemically Synthesized
QVQLQESGGGLVQAGGSLRLSCAASGNISDIDIMGWYRQAPGKEREFVAGIAQGATTYYADSVKGRFTISRDNAKNTVYLQMNSLKPEDTAVYYCAADVYDYLGDDWYYFVYWGQGTQVTVSS

SEQ ID NO: 30598 - protein, 110 aa, Artificial Sequence
  Chemically Synthesized
QVQLQESGGGLVQAGGSLRLSCAASGTIFYDGDMGWYRQAPGKEREFVATIANGGTTYYADSVKGRFTISRDNAKNTVYLQMNSLKPEDTAVYYCAVDYWGQGTQVTVSS

SEQ ID NO: 30599 - protein, 126 aa, Artificial Sequence
  Chemically Synthesized
QVQLQESGGGLVQAGGSLRLSCAASGTIFAVAYMGWYRQAPGKERELVATIAYGASTNYADSVKGRFTISRDNAKNTVYLQMNSLKPEDTAVYYCAAAIQRGYPYRPYLDAVFDYWGQGTQVTVSS

SEQ ID NO: 30600 - protein, 126 aa, Artificial Sequence
  Chemically Synthesized
QVQLQESGGGLVQAGGSLRLSCAASGTISTRAYMGWYRQAPGKEREFVAGITKGSTTYYADSVKGRFTISRDNAKNTVYLQMNSLKPEDTAVYYCAVRVYVKPQYGSYQSRYHPYWGQGTQVTVSS

SEQ ID NO: 30601 - protein, 118 aa, Artificial Sequence
  Chemically Synthesized
QVQLQESGGGLVQAGGSLRLSCAASGTISLIGYMGWYRQAPGKERELVASISDGSTTNYADSVKGRFTISRDNAKNTVYLQMNSLKPEDTAVYYCAAYDTNSQTYIYWGQGTQVTVSS

SEQ ID NO: 30602 - protein, 122 aa, Artificial Sequence
  Chemically Synthesized
QVQLQESGGGLVQAGGSLRLSCAASGTIFFLLNMGWYRQAPGKEREFVATIGRGGITNYADSVKGRFTISRDNAKNTVYLQMNSLKPEDTAVYYCAAYYPWGLDQYYRLGYWGQGTQVTVSS

SEQ ID NO: 30603 - protein, 113 aa, Artificial Sequence
  Chemically Synthesized
QVQLQESGGGLVQAGGSLRLSCAASGSISRYWIMGWYRQAPGKEREFVAAIYLYADSVKGRFTISRDNAKNTVYLQMNSLKPEDTAVYYCAADLGAPNYFSYWGQGTQVTVSS

SEQ ID NO: 30604 - protein, 117 aa, Artificial Sequence
  Chemically Synthesized
QVQLQESGGGLVQAGGSLRLSCAASGNIFDDTMGWYRQAPGKERELVATIGAGSSTNYADSVKGRFTISRDNAKNTVYLQMNSLKPEDTAVYYCAAYWRGYDSHHYWGQGTQVTVSS

SEQ ID NO: 30605 - protein, 118 aa, Artificial Sequence
  Chemically Synthesized
QVQLQESGGGLVQAGGSLRLSCAASGTISDNASMGWYRQAPGKERELVASIGYGTTTYYADSVKGRFTISRDNAKNTVYLQMNSLKPEDTAVYYCAVTAYRDRHLAYWGQGTQVTVSS

SEQ ID NO: 30606 - protein, 121 aa, Artificial Sequence
  Chemically Synthesized
QVQLQESGGGLVQAGGSLRLSCAASGNIFDSTDMGWYRQAPGKERELVASIDGGSTYYADSVKGRFTISRDNAKNTVYLQMNSLKPEDTAVYYCAADNVLEYGDFADLPYWGQGTQVTVSS

SEQ ID NO: 30607 - protein, 117 aa, Artificial Sequence
  Chemically Synthesized
QVQLQESGGGLVQAGGSLRLSCAASGSFLVSVMGWYRQAPGKERELVATIGIGAITNYADSVKGRFTISRDNAKNTVYLQMNSLKPEDTAVYYCAAYNRDPRDLAYWGQGTQVTVSS

SEQ ID NO: 30608 - protein, 126 aa, Artificial Sequence
  Chemically Synthesized
QVQLQESGGGLVQAGGSLRLSCAASGSIFWTRQMGWYRQAPGKERELVAGISDGSNTYYADSVKGRFTISRDNAKNTVYLQMNSLKPEDTAVYYCAVVGRWINYYGAEYPSAYPYWGQGTQVTVSS

SEQ ID NO: 30609 - protein, 113 aa, Artificial Sequence
  Chemically Synthesized
QVQLQESGGGLVQAGGSLRLSCAASGYISHYDYMGWYRQAPGKERELVATITYGSSTNYADSVKGRFTISRDNAKNTVYLQMNSLKPEDTAVYYCAVDLNHYWGQGTQVTVSS

SEQ ID NO: 30610 - protein, 115 aa, Artificial Sequence
  Chemically Synthesized
QVQLQESGGGLVQAGGSLRLSCAASGTIPVMGWYRQAPGKEREFVAGIAFGTSTNYADSVKGRFTISRDNAKNTVYLQMNSLKPEDTAVYYCAAPVELGVSHPYWGQGTQVTVSS

SEQ ID NO: 30611 - protein, 112 aa, Artificial Sequence
  Chemically Synthesized
QVQLQESGGGLVQAGGSLRLSCAASGTISYFGSMGWYRQAPGKERELVTITNYADSVKGRFTISRDNAKNTVYLQMNSLKPEDTAVYYCAAAGAIGNGHLYWGQGTQVTVSS

SEQ ID NO: 30612 - protein, 127 aa, Artificial Sequence
  Chemically Synthesized
QVQLQESGGGLVQAGGSLRLSCAASGYIFESDNMGWYRQAPGKERELVATITAGSSTNYADSVKGRFTISRDNAKNTVYLQMNSLKPEDTAVYYCAVRPADQGYGDAGYGTNDLQYWGQGTQVTVSS

SEQ ID NO: 30613 - protein, 122 aa, Artificial Sequence
  Chemically Synthesized
QVQLQESGGGLVQAGGSLRLSCAASGTIFTWGYMGWYRQAPGKERELVAAINDGSSTYYADSVKGRFTISRDNAKNTVYLQMNSLKPEDTAVYYCAVKDNGGGDDRYLFLYWGQGTQVTVSS

SEQ ID NO: 30614 - protein, 118 aa, Artificial Sequence
  Chemically Synthesized
QVQLQESGGGLVQAGGSLRLSCAASGNIFWPEFMGWYRQAPGKEREFVATISFGATTNYADSVKGRFTISRDNAKNTVYLQMNSLKPEDTAVYYCAAAIDDTYEHPYWGQGTQVTVSS

SEQ ID NO: 30615 - protein, 118 aa, Artificial Sequence
  Chemically Synthesized
QVQLQESGGGLVQAGGSLRLSCAASGYISHTRDMGWYRQAPGKEREFVASIAVGATTNYADSVKGRFTISRDNAKNTVYLQMNSLKPEDTAVYYCAVWYATQSVHRYWGQGTQVTVSS

SEQ ID NO: 30616 - protein, 118 aa, Artificial Sequence
  Chemically Synthesized
QVQLQESGGGLVQAGGSLRLSCAASGTISPYLAMGWYRQAPGKEREFVAAISTGASTNYADSVKGRFTISRDNAKNTVYLQMNSLKPEDTAVYYCAAKLYSIWYHSYWGQGTQVTVSS

SEQ ID NO: 30617 - protein, 118 aa, Artificial Sequence
  Chemically Synthesized
QVQLQESGGGLVQAGGSLRLSCAASGYISYVPYMGWYRQAPGKERELVASISYGGNTYYADSVKGRFTISRDNAKNTVYLQMNSLKPEDTAVYYCAARARPTTWFPYWGQGTQVTVSS

SEQ ID NO: 30618 - protein, 116 aa, Artificial Sequence
  Chemically Synthesized
QVQLQESGGGLVQAGGSLRLSCAASGTMLTVMGWYRQAPGKEREFVAGIGTGGTTNYADSVKGRFTISRDNAKNTVYLQMNSLKPEDTAVYYCAVDPVRGYVLVYWGQGTQVTVSS

SEQ ID NO: 30619 - protein, 118 aa, Artificial Sequence
  Chemically Synthesized
QVQLQESGGGLVQAGGSLRLSCAASGSISLAQAMGWYRQAPGKERELVASINAGTTTNYADSVKGRFTISRDNAKNTVYLQMNSLKPEDTAVYYCAAPYSRRDDYNYWGQGTQVTVSS

SEQ ID NO: 30620 - protein, 125 aa, Artificial Sequence
  Chemically Synthesized
QVQLQESGGGLVQAGGSLRLSCAASGYISPSNIMGWYRQAPGKEREFVAAIGPGGSTYYADSVKGRFTISRDNAKNTVYLQMNSLKPEDTAVYYCAVVDPVDSGTYQGDAYYVYWGQGTQVTVSS

SEQ ID NO: 30621 - protein, 118 aa, Artificial Sequence
  Chemically Synthesized
QVQLQESGGGLVQAGGSLRLSCAASGSIFYTGGMGWYRQAPGKEREFVASIAGGSITYYADSVKGRFTISRDNAKNTVYLQMNSLKPEDTAVYYCAATWWYSLRPSYWGQGTQVTVSS

SEQ ID NO: 30622 - protein, 126 aa, Artificial Sequence
  Chemically Synthesized
QVQLQESGGGLVQAGGSLRLSCAASGYISDGGYMGWYRQAPGKEREFVASIGTGASTNYADSVKGRFTISRDNAKNTVYLQMNSLKPEDTAVYYCAAYYAALGGKYRTGYFIYIYWGQGTQVTVSS

SEQ ID NO: 30623 - protein, 118 aa, Artificial Sequence
  Chemically Synthesized
QVQLQESGGGLVQAGGSLRLSCAASGSISHYGAMGWYRQAPGKEREFVATITYGATTNYADSVKGRFTISRDNAKNTVYLQMNSLKPEDTAVYYCAAYGSPDDAYRYWGQGTQVTVSS

SEQ ID NO: 30624 - protein, 117 aa, Artificial Sequence
  Chemically Synthesized
QVQLQESGGGLVQAGGSLRLSCAASGSIFEQEDMGWYRQAPGKEREFVASINDGTSTYADSVKGRFTISRDNAKNTVYLQMNSLKPEDTAVYYCAAYAWRGYRLDYWGQGTQVTVSS

SEQ ID NO: 30625 - protein, 113 aa, Artificial Sequence
  Chemically Synthesized
QVQLQESGGGLVQAGGSLRLSCAASGYIFIIAPMGWYRQAPGKEREFVAGIGGGGSTYYADSVKGRFTISRDNAKNTVYLQMNSLKPEDTAVYYCAVYSHYYWGQGTQVTVSS

SEQ ID NO: 30626 - protein, 117 aa, Artificial Sequence
  Chemically Synthesized
QVQLQESGGGLVQAGGSLRLSCAASGYISPPSYMGWYRQAPGKERELVAGIAIGTSTNYADSVKGRFTISRDNAKNTVYLQMNSLKPEDTAVYYCAARYYYFYHEYWGQGTQVTVSS

SEQ ID NO: 30627 - protein, 116 aa, Artificial Sequence
  Chemically Synthesized
QVQLQESGGGLVQAGGSLRLSCAASGSISYYVMGWYRQAPGKERELVAGIGSGGTTNYADSVKGRFTISRDNAKNTVYLQMNSLKPEDTAVYYCAAWLYRYVLVYWGQGTQVTVSS

SEQ ID NO: 30628 - protein, 118 aa, Artificial Sequence
  Chemically Synthesized
QVQLQESGGGLVQAGGSLRLSCAASGTIFLRRLMGWYRQAPGKEREFVAAIAKGGSTYYADSVKGRFTISRDNAKNTVYLQMNSLKPEDTAVYYCAVTRYSSGRLGYWGQGTQVTVSS

SEQ ID NO: 30629 - protein, 118 aa, Artificial Sequence
  Chemically Synthesized
QVQLQESGGGLVQAGGSLRLSCAASGNIFLYDRMGWYRQAPGKEREFVATIGQGSTTNYADSVKGRFTISRDNAKNTVYLQMNSLKPEDTAVYYCAAYTARGDRHVYWGQGTQVTVSS

SEQ ID NO: 30630 - protein, 118 aa, Artificial Sequence
  Chemically Synthesized
QVQLQESGGGLVQAGGSLRLSCAASGTIFSGDAMGWYRQAPGKERELVATIGTGANTNYADSVKGRFTISRDNAKNTVYLQMNSLKPEDTAVYYCAVEGTVILTHDYWGQGTQVTVSS

SEQ ID NO: 30631 - protein, 126 aa, Artificial Sequence
  Chemically Synthesized
QVQLQESGGGLVQAGGSLRLSCAASGSIFLPNTMGWYRQAPGKERELVAAIGRGGSTNYADSVKGRFTISRDNAKNTVYLQMNSLKPEDTAVYYCAVDYTRQYILDGFIIGGYYYWGQGTQVTVSS

SEQ ID NO: 30632 - protein, 115 aa, Artificial Sequence
  Chemically Synthesized
QVQLQESGGGLVQAGGSLRLSCAASGSVVVMGWYRQAPGKEREFVATIGVGTNTNYADSVKGRFTISRDNAKNTVYLQMNSLKPEDTAVYYCAVNYVYDAILRYWGQGTQVTVSS

SEQ ID NO: 30633 - protein, 122 aa, Artificial Sequence
  Chemically Synthesized
QVQLQESGGGLVQAGGSLRLSCAASGNIFSQVYMGWYRQAPGKERELVATIARGGSTYYADSVKGRFTISRDNAKNTVYLQMNSLKPEDTAVYYCAASDYYKPNPIGTLAYWGQGTQVTVSS

SEQ ID NO: 30634 - protein, 126 aa, Artificial Sequence
  Chemically Synthesized
QVQLQESGGGLVQAGGSLRLSCAASGSIFVYSSMGWYRQAPGKERELVAAIGRGAITYYADSVKGRFTISRDNAKNTVYLQMNSLKPEDTAVYYCAVPGHGRPRYGANRDYPFYYWGQGTQVTVSS

SEQ ID NO: 30635 - protein, 123 aa, Artificial Sequence
  Chemically Synthesized
QVQLQESGGGLVQAGGSLRLSCAASGTISEEPNMGWYRQAPGKEREFVATIAYGSITYYADSVKGRFTISRDNAKNTVYLQMNSLKPEDTAVYYCAADYGAVDRLSGVTHWYWGQGTQVTVSS

SEQ ID NO: 30636 - protein, 122 aa, Artificial Sequence
  Chemically Synthesized
QVQLQESGGGLVQAGGSLRLSCAASGNIFDRYLMGWYRQAPGKERELVAGITDGSSTYYADSVKGRFTISRDNAKNTVYLQMNSLKPEDTAVYYCAVGYATGRYPSDVHPYWGQGTQVTVSS

SEQ ID NO: 30637 - protein, 118 aa, Artificial Sequence
  Chemically Synthesized
QVQLQESGGGLVQAGGSLRLSCAASGNIFTYAPMGWYRQAPGKEREFVAAISIGGITNYADSVKGRFTISRDNAKNTVYLQMNSLKPEDTAVYYCAADDNGRLPYWYWGQGTQVTVSS

SEQ ID NO: 30638 - protein, 121 aa, Artificial Sequence
  Chemically Synthesized
QVQLQESGGGLVQAGGSLRLSCAASGTIFTELMGWYRQAPGKERELVATITSGAITYYADSVKGRFTISRDNAKNTVYLQMNSLKPEDTAVYYCAADVVDDTSQWYVHPYWGQGTQVTVSS

SEQ ID NO: 30639 - protein, 116 aa, Artificial Sequence
  Chemically Synthesized
QVQLQESGGGLVQAGGSLRLSCAASGTISGYSDMGWYRQAPGKERELVAGITYGTSTNYADSVKGRFTISRDNAKNTVYLQMNSLKPEDTAVYYCARYYYDYHYYWGQGTQVTVSS

SEQ ID NO: 30640 - protein, 113 aa, Artificial Sequence
  Chemically Synthesized
QVQLQESGGGLVQAGGSLRLSCAASGNIFGDTYMGWYRQAPGKERELVAGITPGGITNYADSVKGRFTISRDNAKNTVYLQMNSLKPEDTAVYYCAGGDLGYWGQGTQVTVSS

SEQ ID NO: 30641 - protein, 118 aa, Artificial Sequence
  Chemically Synthesized
QVQLQESGGGLVQAGGSLRLSCAASGSISSYSVMGWYRQAPGKEREFVATIDYGAITNYADSVKGRFTISRDNAKNTVYLQMNSLKPEDTAVYYCAAYSRRVWWYPYWGQGTQVTVSS

SEQ ID NO: 30642 - protein, 125 aa, Artificial Sequence
  Chemically Synthesized
QVQLQESGGGLVQAGGSLRLSCAASGTISSQSYMGWYRQAPGKERELVAAIASVLLPYADSVKGRFTISRDNAKNTVYLQMNSLKPEDTAVYYCAVWINDFWDVGYPRYQAYTYWGQGTQVTVSS

SEQ ID NO: 30643 - protein, 121 aa, Artificial Sequence
  Chemically Synthesized
QVQLQESGGGLVQAGGSLRLSCAASGTISRSYVMGWYRQAPGKEREFVAAISYGGITNYADSVKGRFTISRDNAKNTVYLQMNSLKPEDTAVYYCAVKVQDTYNAWYHAYWGQGTQVTVSS

SEQ ID NO: 30644 - protein, 118 aa, Artificial Sequence
  Chemically Synthesized
QVQLQESGGGLVQAGGSLRLSCAASGYISHWLNMGWYRQAPGKEREFVAGISQGTSTYYADSVKGRFTISRDNAKNTVYLQMNSLKPEDTAVYYCAADLDYFNFHAYWGQGTQVTVSS

SEQ ID NO: 30645 - protein, 122 aa, Artificial Sequence
  Chemically Synthesized
QVQLQESGGGLVQAGGSLRLSCAASGTISIAYYMGWYRQAPGKEREFVASISLGSNTNYADSVKGRFTISRDNAKNTVYLQMNSLKPEDTAVYYCAARTRWDFDYGGDHVYWGQGTQVTVSS

SEQ ID NO: 30646 - protein, 118 aa, Artificial Sequence
  Chemically Synthesized
QVQLQESGGGLVQAGGSLRLSCAASGSISGGSIMGWYRQAPGKEREFVAAIARGTTTYYADSVKGRFTISRDNAKNTVYLQMNSLKPEDTAVYYCAASLFYRSGHKYWGQGTQVTVSS

SEQ ID NO: 30647 - protein, 117 aa, Artificial Sequence
  Chemically Synthesized
QVQLQESGGGLVQAGGSLRLSCAASGNISGSIEMGWYRQAPGKEREFVASINRGTNTNYADSVKGRFTISRDNAKNTVYLQMNSLKPEDTAVYYCAVLYNHSLLFYWGQGTQVTVSS

SEQ ID NO: 30648 - protein, 113 aa, Artificial Sequence
  Chemically Synthesized
QVQLQESGGGLVQAGGSLRLSCAASGNIFDVTQMGWYRQAPGKERELVQYADSVKGRFTISRDNAKNTVYLQMNSLKPEDTAVYYCAVTIEYDTTADDIYSYWGQGTQVTVSS

SEQ ID NO: 30649 - protein, 125 aa, Artificial Sequence
  Chemically Synthesized
QVQLQESGGGLVQAGGSLRLSCAASGTIFASWYMGWYRQAPGKEREFVAAIAVGGITNYADSVKGRFTISRDNAKNTVYLQMNSLKPEDTAVYYCAVVVSHILTSHRDYWGYYYWGQGTQVTVSS

SEQ ID NO: 30650 - protein, 118 aa, Artificial Sequence
  Chemically Synthesized
QVQLQESGGGLVQAGGSLRLSCAASGYIFRFYAMGWYRQAPGKERELVATIGDGTNTYYADSVKGRFTISRDNAKNTVYLQMNSLKPEDTAVYYCAAWPYHHIAHLYWGQGTQVTVSS

SEQ ID NO: 30651 - protein, 118 aa, Artificial Sequence
  Chemically Synthesized
QVQLQESGGGLVQAGGSLRLSCAASGNIFDALYMGWYRQAPGKEREFVAGIGYGGITYYADSVKGRFTISRDNAKNTVYLQMNSLKPEDTAVYYCAVTGQASDIYYYWGQGTQVTVSS

SEQ ID NO: 30652 - protein, 119 aa, Artificial Sequence
  Chemically Synthesized
QVQLQESGGGLVQAGGSLRLSCAASGTISYISYMGWYRQAPGKERELVATITYGAITYYADSVKGRFTISRDNAKNTVYLQMNSLKPEDTAVYYCAALRVQYWSWHRYWGQGTQVTVSS

SEQ ID NO: 30653 - protein, 122 aa, Artificial Sequence
  Chemically Synthesized
QVQLQESGGGLVQAGGSLRLSCAASGYISHGQHMGWYRQAPGKERELVASIGDGTNTNYADSVKGRFTISRDNAKNTVYLQMNSLKPEDTAVYYCAVTSWYYDYYSYGYWYWGQGTQVTVSS

SEQ ID NO: 30654 - protein, 118 aa, Artificial Sequence
  Chemically Synthesized
QVQLQESGGGLVQAGGSLRLSCAASGNIFPGDTMGWYRQAPGKEREFVASISYGTTTYYADSVKGRFTISRDNAKNTVYLQMNSLKPEDTAVYYCAAYRSYSFDFYYWGQGTQVTVSS

SEQ ID NO: 30655 - protein, 125 aa, Artificial Sequence
  Chemically Synthesized
QVQLQESGGGLVQAGGSLRLSCAASGYIFRDSMGWYRQAPGKEREFVATITFGSNTNYADSVKGRFTISRDNAKNTVYLQMNSLKPEDTAVYYCAALVWHYTAFTEYYAHTFRYWGQGTQVTVSS

SEQ ID NO: 30656 - protein, 123 aa, Artificial Sequence
  Chemically Synthesized
QVQLQESGGGLVQAGGSLRLSCAASGYIFGRVGYMGWYRQAPGKEREFVAGIAAGASTYYADSVKGRFTISRDNAKNTVYLQMNSLKPEDTAVYYCAAWPYEYDWERIPHFYWGQGTQVTVSS

SEQ ID NO: 30657 - protein, 109 aa, Artificial Sequence
  Chemically Synthesized
QVQLQESGGGLVQAGGSLRLSCAASGTIFQSNEMGWYRQAPGKERELVAGISDGGSTNYADSVKGRFTISRDNAKNTVYLQMNSLKPEDTAVYYCAVYWGQGTQVTVSS

SEQ ID NO: 30658 - protein, 121 aa, Artificial Sequence
  Chemically Synthesized
QVQLQESGGGLVQAGGSLRLSCAASGNISLLMGWYRQAPGKEREFVAAIGYGSTTNYADSVKGRFTISRDNAKNTVYLQMNSLKPEDTAVYYCAATKAVLYAYIDESLAYWGQGTQVTVSS

SEQ ID NO: 30659 - protein, 118 aa, Artificial Sequence
  Chemically Synthesized
QVQLQESGGGLVQAGGSLRLSCAASGTISGDTDMGWYRQAPGKERELVATISAGGNTYYADSVKGRFTISRDNAKNTVYLQMNSLKPEDTAVYYCAVFYTQGRRLAYWGQGTQVTVSS

SEQ ID NO: 30660 - protein, 121 aa, Artificial Sequence
  Chemically Synthesized
QVQLQESGGGLVQAGGSLRLSCAASGSIFWGRDMGWYRQAPGKERELVATITSGATTNYADSVKGRFTISRDNAKNTVYLQMNSLKPEDTAVYYCAAGAIKLLITTTLLYWGQGTQVTVSS

SEQ ID NO: 30661 - protein, 122 aa, Artificial Sequence
  Chemically Synthesized
QVQLQESGGGLVQAGGSLRLSCAASGNISDFSYMGWYRQAPGKEREFVAAISYGASTYYADSVKGRFTISRDNAKNTVYLQMNSLKPEDTAVYYCAVYDPGVGTSDNGYYYWGQGTQVTVSS

SEQ ID NO: 30662 - protein, 118 aa, Artificial Sequence
  Chemically Synthesized
QVQLQESGGGLVQAGGSLRLSCAASGTIFVNPTMGWYRQAPGKEREFVASIAQGSITNYADSVKGRFTISRDNAKNTVYLQMNSLKPEDTAVYYCAAGDDSYDSLYYWGQGTQVTVSS

SEQ ID NO: 30663 - protein, 118 aa, Artificial Sequence
  Chemically Synthesized
QVQLQESGGGLVQAGGSLRLSCAASGTISDYTLMGWYRQAPGKERELVAGIGYGSSTYYADSVKGRFTISRDNAKNTVYLQMNSLKPEDTAVYYCAAFDRYTRQFWYWGQGTQVTVSS

SEQ ID NO: 30664 - protein, 118 aa, Artificial Sequence
  Chemically Synthesized
QVQLQESGGGLVQAGGSLRLSCAASGYISVRSGMGWYRQAPGKERELVATISRGTTTNYADSVKGRFTISRDNAKNTVYLQMNSLKPEDTAVYYCAVRRYVAYGYYYWGQGTQVTVSS

SEQ ID NO: 30665 - protein, 115 aa, Artificial Sequence
  Chemically Synthesized
QVQLQESGGGLVQAGGSLRLSCAASGSTGLMGWYRQAPGKERELVATINYGSNTNYADSVKGRFTISRDNAKNTVYLQMNSLKPEDTAVYYCAAPRDVYGGYWYWGQGTQVTVSS

SEQ ID NO: 30666 - protein, 122 aa, Artificial Sequence
  Chemically Synthesized
QVQLQESGGGLVQAGGSLRLSCAASGTIFIAQIMGWYRQAPGKEREFVAAIGGGTSTYYADSVKGRFTISRDNAKNTVYLQMNSLKPEDTAVYYCAVWYDQWWGDYYGHTYWGQGTQVTVSS

SEQ ID NO: 30667 - protein, 112 aa, Artificial Sequence
  Chemically Synthesized
QVQLQESGGGLVQAGGSLRLSCAASGTIFWYRDMGWYRQAPGKERELVATIDFGSSTNYADSVKGRFTISRDNAKNTVYLQMNSLKPEDTAVYYCAAYYLYWGQGTQVTVSS

SEQ ID NO: 30668 - protein, 122 aa, Artificial Sequence
  Chemically Synthesized
QVQLQESGGGLVQAGGSLRLSCAASGNIFIQGDMGWYRQAPGKERELVATIAYGSTTNYADSVKGRFTISRDNAKNTVYLQMNSLKPEDTAVYYCAAYPYSRYLGEFRLDYWGQGTQVTVSS

SEQ ID NO: 30669 - protein, 118 aa, Artificial Sequence
  Chemically Synthesized
QVQLQESGGGLVQAGGSLRLSCAASGTIFPNTSMGWYRQAPGKERELVAGITSGASTNYADSVKGRFTISRDNAKNTVYLQMNSLKPEDTAVYYCAAAGHGDVLFAYWGQGTQVTVSS

SEQ ID NO: 30670 - protein, 118 aa, Artificial Sequence
  Chemically Synthesized
QVQLQESGGGLVQAGGSLRLSCAASGYISWRRDMGWYRQAPGKEREFVAGIGYGTTTNYADSVKGRFTISRDNAKNTVYLQMNSLKPEDTAVYYCAVANYAPVHFRYWGQGTQVTVSS

SEQ ID NO: 30671 - protein, 119 aa, Artificial Sequence
  Chemically Synthesized
QVQLQESGGGLVQAGGSLRLSCAASGTISWYGYMGWYRQAPGKEREFVAAITAGANTYYADSVKGRFTISRDNAKNTVYLQMNSLKPEDTAVYYCAVHTYGYDDSYDYWGQGTQVTVSS

SEQ ID NO: 30672 - protein, 118 aa, Artificial Sequence
  Chemically Synthesized
QVQLQESGGGLVQAGGSLRLSCAASGNIFTYVSMGWYRQAPGKEREFVATINLGTNTNYADSVKGRFTISRDNAKNTVYLQMNSLKPEDTAVYYCAANNIWPGWLVYWGQGTQVTVSS

SEQ ID NO: 30673 - protein, 122 aa, Artificial Sequence
  Chemically Synthesized
QVQLQESGGGLVQAGGSLRLSCAASGNIFYYRWMGWYRQAPGKERELVATITGGTTTNYADSVKGRFTISRDNAKNTVYLQMNSLKPEDTAVYYCAAEQWYSYYYPPGHDYWGQGTQVTVSS

SEQ ID NO: 30674 - protein, 118 aa, Artificial Sequence
  Chemically Synthesized
QVQLQESGGGLVQAGGSLRLSCAASGYISYQYEMGWYRQAPGKERELVAAIGIGANTNYADSVKGRFTISRDNAKNTVYLQMNSLKPEDTAVYYCAVHAYANSFHDYWGQGTQVTVSS

SEQ ID NO: 30675 - protein, 122 aa, Artificial Sequence
  Chemically Synthesized
QVQLQESGGGLVQAGGSLRLSCAASGYISPGGYMGWYRQAPGKERELVATIGQGASTNYADSVKGRFTISRDNAKNTVYLQMNSLKPEDTAVYYCAATYQADDDLDYTHTYWGQGTQVTVSS

SEQ ID NO: 30676 - protein, 121 aa, Artificial Sequence
  Chemically Synthesized
QVQLQESGGGLVQAGGSLRLSCAASGTISYWGMGWYRQAPGKERELVATIGLGTTTYYADSVKGRFTISRDNAKNTVYLQMNSLKPEDTAVYYCAAVIPHGNDWNGSYSYWGQGTQVTVSS

SEQ ID NO: 30677 - protein, 122 aa, Artificial Sequence
  Chemically Synthesized
QVQLQESGGGLVQAGGSLRLSCAASGYIFVSYYMGWYRQAPGKEREFVAAIGNGGTTYYADSVKGRFTISRDNAKNTVYLQMNSLKPEDTAVYYCAVIYPADRVDTDWFYYWGQGTQVTVSS

SEQ ID NO: 30678 - protein, 126 aa, Artificial Sequence
  Chemically Synthesized
QVQLQESGGGLVQAGGSLRLSCAASGTIFAHWVMGWYRQAPGKERELVASITLGTITNYADSVKGRFTISRDNAKNTVYLQMNSLKPEDTAVYYCAVDTYERDPAYYAYPPHHSYWGQGTQVTVSS

SEQ ID NO: 30679 - protein, 121 aa, Artificial Sequence
  Chemically Synthesized
QVQLQESGGGLVQAGGSLRLSCAASGSISSSKMGWYRQAPGKEREFVATISPGTTTNYADSVKGRFTISRDNAKNTVYLQMNSLKPEDTAVYYCAVPRDATYYFRYYFRYWGQGTQVTVSS

SEQ ID NO: 30680 - protein, 117 aa, Artificial Sequence
  Chemically Synthesized
QVQLQESGGGLVQAGGSLRLSCAASGSIFSWQDMGWYRQAPGKEREFVAGINPGSNTNYADSVKGRFTISRDNAKNTVYLQMNSLKPEDTAVYYCAAPAGYVSCFYWGQGTQVTVSS

SEQ ID NO: 30681 - protein, 118 aa, Artificial Sequence
  Chemically Synthesized
QVQLQESGGGLVQAGGSLRLSCAASGYISDWGNMGWYRQAPGKERELVASITVGTTTNYADSVKGRFTISRDNAKNTVYLQMNSLKPEDTAVYYCAVGYLLRDAHVYWGQGTQVTVSS

SEQ ID NO: 30682 - protein, 125 aa, Artificial Sequence
  Chemically Synthesized
QVQLQESGGGLVQAGGSLRLSCAASGTIFYSYQMGWYRQAPGKEREFVASIGAGTTTNYADSVKGRFTISRDNAKNTVYLQMNSLKPEDTAVYYCAVVRGPSDPSLGRSVRTMYWGQGTQVTVSS

SEQ ID NO: 30683 - protein, 118 aa, Artificial Sequence
  Chemically Synthesized
QVQLQESGGGLVQAGGSLRLSCAASGYISYYDTMGWYRQAPGKERELVAAISGGTTTLYADSVKGRFTISRDNAKNTVYLQMNSLKPEDTAVYYCAVPRNIITYFDYWGQGTQVTVSS

SEQ ID NO: 30684 - protein, 125 aa, Artificial Sequence
  Chemically Synthesized
QVQLQESGGGLVQAGGSLRLSCAASGSISASFMGWYRQAPGKERELVASITWGTNTNYADSVKGRFTISRDNAKNTVYLQMNSLKPEDTAVYYCAVYLYYWTPIQWAYGPFHAYWGQGTQVTVSS

SEQ ID NO: 30685 - protein, 117 aa, Artificial Sequence
  Chemically Synthesized
QVQLQESGGGLVQAGGSLRLSCAASGTIFYARYMGWYRQAPGKERELVAGIDSVVLPYADSVKGRFTISRDNAKNTVYLQMNSLKPEDTAVYYCAVDDYDTRNLSYWGQGTQVTVSS

SEQ ID NO: 30686 - protein, 117 aa, Artificial Sequence
  Chemically Synthesized
QVQLQESGGGLVQAGGSLRLSCAASGYIFRQADMGWYRQAPGKEREFVAGITYGGNTNYADSVKGRFTISRDNAKNTVYLQMNSLKPEDTAVYYCAATGDPSTTFYWGQGTQVTVSS

SEQ ID NO: 30687 - protein, 112 aa, Artificial Sequence
  Chemically Synthesized
QVQLQESGGGLVQAGGSLRLSCAASGYIFRTYKMGWYRQAPGKEREFVAGITYGAITYYADSVKGRFTISRDNAKNTVYLQMNSLKPEDTAVYYCAVLLIYWGQGTQVTVSS

SEQ ID NO: 30688 - protein, 113 aa, Artificial Sequence
  Chemically Synthesized
QVQLQESGGGLVQAGGSLRLSCAASGNISRDSVMGWYRQAPGKERELVASIDGGSITNYADSVKGRFTISRDNAKNTVYLQMNSLKPEDTAVYYCAEYVHDYWGQGTQVTVSS

SEQ ID NO: 30689 - protein, 107 aa, Artificial Sequence
  Chemically Synthesized
QVQLQESGGGLVQAGGSLRLSCAASGYISRGQTMGWYRQAPGKERELLPVLVVVPYADSVKGRFTISRDNAKNTVYLQMNSLKPEDTAVYYCAVMYWGQGTQVTVSS

SEQ ID NO: 30690 - protein, 114 aa, Artificial Sequence
  Chemically Synthesized
QVQLQESGGGLVQAGGSLRLSCAASGTISPYYYMGWYRQAPGKERELVAGIGIGYADSVKGRFTISRDNAKNTVYLQMNSLKPEDTAVYYCAVGRNYAYTHGYWGQGTQVTVSS

SEQ ID NO: 30691 - protein, 126 aa, Artificial Sequence
  Chemically Synthesized
QVQLQESGGGLVQAGGSLRLSCAASGYIFTATVMGWYRQAPGKEREFVAAIDGGSNTYYADSVKGRFTISRDNAKNTVYLQMNSLKPEDTAVYYCAVGDRRGGESYGDLYGDFTYWGQGTQVTVSS

SEQ ID NO: 30692 - protein, 113 aa, Artificial Sequence
  Chemically Synthesized
QVQLQESGGGLVQAGGSLRLSCAASGYIFYFDLMGWYRQAPGKEREFVATITSGASTNYADSVKGRFTISRDNAKNTVYLQMNSLKPEDTAVYYCAVAGPCYWGQGTQVTVSS

SEQ ID NO: 30693 - protein, 117 aa, Artificial Sequence
  Chemically Synthesized
QVQLQESGGGLVQAGGSLRLSCAASGSISIPGIMGWYRQAPGKEREFVAAISDGGNTYYADSVKGRFTISRDNAKNTVYLQMNSLKPEDTAVYYCAATDYASTTFYWGQGTQVTVSS

SEQ ID NO: 30694 - protein, 117 aa, Artificial Sequence
  Chemically Synthesized
QVQLQESGGGLVQAGGSLRLSCAASGTISADSMGWYRQAPGKERELVASITTGANTNYADSVKGRFTISRDNAKNTVYLQMNSLKPEDTAVYYCAVYVPSVWGHHYWGQGTQVTVSS

SEQ ID NO: 30695 - protein, 118 aa, Artificial Sequence
  Chemically Synthesized
QVQLQESGGGLVQAGGSLRLSCAASGSISTPPFMGWYRQAPGKERELVATIAFGGTTYYADSVKGRFTISRDNAKNTVYLQMNSLKPEDTAVYYCAAEHYYAYYHDYWGQGTQVTVSS

SEQ ID NO: 30696 - protein, 125 aa, Artificial Sequence
  Chemically Synthesized
QVQLQESGGGLVQAGGSLRLSCAASGNISGEEFMGWYRQAPGKERELVAAIGTGGNTNYADSVKGRFTISRDNAKNTVYLQMNSLKPEDTAVYYCAVYRDTQNKSPSFVGDYFYWGQGTQVTVSS

SEQ ID NO: 30697 - protein, 129 aa, Artificial Sequence
  Chemically Synthesized
QVQLQESGGGLVQAGGSLRLSCAASGYISQYTYMGWYRQAPGKERELVATIDYGANTNYADSVKGRFTISRDNAKNTVYLQMNSLKPEDTAVYYCAATNRYDGFDGGNADCLQLGLCYWGQGTQVTVSS

SEQ ID NO: 30698 - protein, 118 aa, Artificial Sequence
  Chemically Synthesized
QVQLQESGGGLVQAGGSLRLSCAASGTISDLSHMGWYRQAPGKEREFVATIADGASTYYADSVKGRFTISRDNAKNTVYLQMNSLKPEDTAVYYCAVLDHDPYDHNYWGQGTQVTVSS

SEQ ID NO: 30699 - protein, 122 aa, Artificial Sequence
  Chemically Synthesized
QVQLQESGGGLVQAGGSLRLSCAASGSIFRDVGMGWYRQAPGKERELVAGIAGGSNTYYADSVKGRFTISRDNAKNTVYLQMNSLKPEDTAVYYCAADDWRVPSNHDDLYYWGQGTQVTVSS

SEQ ID NO: 30700 - protein, 122 aa, Artificial Sequence
  Chemically Synthesized
QVQLQESGGGLVQAGGSLRLSCAASGYISGHNHMGWYRQAPGKEREFVAAINEGTNTNYADSVKGRFTISRDNAKNTVYLQMNSLKPEDTAVYYCAARSSEYFLSTFGHSYWGQGTQVTVSS

SEQ ID NO: 30701 - protein, 122 aa, Artificial Sequence
  Chemically Synthesized
QVQLQESGGGLVQAGGSLRLSCAASGYIFDYGYMGWYRQAPGKEREFVATIARGGSTYYADSVKGRFTISRDNAKNTVYLQMNSLKPEDTAVYYCAARYGFAPYFYYSYPYWGQGTQVTVSS

SEQ ID NO: 30702 - protein, 118 aa, Artificial Sequence
  Chemically Synthesized
QVQLQESGGGLVQAGGSLRLSCAASGYIFTVRGMGWYRQAPGKEREFVATISAGSITYYADSVKGRFTISRDNAKNTVYLQMNSLKPEDTAVYYCAATYAQGQTHVYWGQGTQVTVSS

SEQ ID NO: 30703 - protein, 118 aa, Artificial Sequence
  Chemically Synthesized
QVQLQESGGGLVQAGGSLRLSCAASGSISAVDYMGWYRQAPGKERELVALLVVVLVPYADSVKGRFTISRDNAKNTVYLQMNSLKPEDTAVYYCAVYNEHDAGYRYYWGQGTQVTVSS

SEQ ID NO: 30704 - protein, 117 aa, Artificial Sequence
  Chemically Synthesized
QVQLQESGGGLVQAGGSLRLSCAASGTIFEPSDMGWYRQAPGKERELVATIAGGGNTNYADSVKGRFTISRDNAKNTVYLQMNSLKPEDTAVYYCAALLTTLTLLYWGQGTQVTVSS

SEQ ID NO: 30705 - protein, 118 aa, Artificial Sequence
  Chemically Synthesized
QVQLQESGGGLVQAGGSLRLSCAASGSISRTEDMGWYRQAPGKEREFVAGITYGSTTYYADSVKGRFTISRDNAKNTVYLQMNSLKPEDTAVYYCAVIHNVDGDYGYWGQGTQVTVSS

SEQ ID NO: 30706 - protein, 118 aa, Artificial Sequence
  Chemically Synthesized
QVQLQESGGGLVQAGGSLRLSCAASGSISVYPYMGWYRQAPGKEREFVATISEGGITYYADSVKGRFTISRDNAKNTVYLQMNSLKPEDTAVYYCAVKAYWVVTHYYWGQGTQVTVSS

SEQ ID NO: 30707 - protein, 122 aa, Artificial Sequence
  Chemically Synthesized
QVQLQESGGGLVQAGGSLRLSCAASGSISGIIAMGWYRQAPGKERELVAAISVGASTNYADSVKGRFTISRDNAKNTVYLQMNSLKPEDTAVYYCAVPYYDDRYHRYWFLYWGQGTQVTVSS

SEQ ID NO: 30708 - protein, 126 aa, Artificial Sequence
  Chemically Synthesized
QVQLQESGGGLVQAGGSLRLSCAASGSIFVVSLMGWYRQAPGKERELVAGISLGGNYLYADSVKGRFTISRDNAKNTVYLQMNSLKPEDTAVYYCAAYYLVYVDATVAYTHPLLYWGQGTQVTVSS

SEQ ID NO: 30709 - protein, 122 aa, Artificial Sequence
  Chemically Synthesized
QVQLQESGGGLVQAGGSLRLSCAASGTIFVDDGMGWYRQAPGKERELVAAIDGGATTYYADSVKGRFTISRDNAKNTVYLQMNSLKPEDTAVYYCAAFARWFRHVLGAHPYWGQGTQVTVSS

SEQ ID NO: 30710 - protein, 118 aa, Artificial Sequence
  Chemically Synthesized
QVQLQESGGGLVQAGGSLRLSCAASGSIFVGSPMGWYRQAPGKEREFVAGIAWGASTNYADSVKGRFTISRDNAKNTVYLQMNSLKPEDTAVYYCAADKGTSTSHSYWGQGTQVTVSS

SEQ ID NO: 30711 - protein, 122 aa, Artificial Sequence
  Chemically Synthesized
QVQLQESGGGLVQAGGSLRLSCAASGYIFYARYMGWYRQAPGKERELVAGITDGGITYYADSVKGRFTISRDNAKNTVYLQMNSLKPEDTAVYYCAVYGPGSATGYIYLIYWGQGTQVTVSS

SEQ ID NO: 30712 - protein, 118 aa, Artificial Sequence
  Chemically Synthesized
QVQLQESGGGLVQAGGSLRLSCAASGTISFDDWMGWYRQAPGKEREFVAAISEGGITNYADSVKGRFTISRDNAKNTVYLQMNSLKPEDTAVYYCAVYLTEREELAYWGQGTQVTVSS

SEQ ID NO: 30713 - protein, 112 aa, Artificial Sequence
  Chemically Synthesized
QVQLQESGGGLVQAGGSLRLSCAASGNIFGRDYMGWYRQAPGKEREFVAAIAYADSVKGRFTISRDNAKNTVYLQMNSLKPEDTAVYYCAASGIDWVYYSYWGQGTQVTVSS

SEQ ID NO: 30714 - protein, 125 aa, Artificial Sequence
  Chemically Synthesized
QVQLQESGGGLVQAGGSLRLSCAASGTISYTFYMGWYRQAPGKEREFVASITHGANTYYADSVKGRFTISRDNAKNTVYLQMNSLKPEDTAVYYCAATLVSLVTLVTSRRLTFYWGQGTQVTVSS

SEQ ID NO: 30715 - protein, 108 aa, Artificial Sequence
  Chemically Synthesized
QVQLQESGGGLVQAGGSLRLSCAASGSISRRDHMGWYRQAPGKERESNYADSVKGRFTISRDNAKNTVYLQMNSLKPEDTAVYYCAAVVWDEIDYEYWGQGTQVTVSS

SEQ ID NO: 30716 - protein, 118 aa, Artificial Sequence
  Chemically Synthesized
QVQLQESGGGLVQAGGSLRLSCAASGSIFRHPDMGWYRQAPGKERELVATIGHGGSTYYADSVKGRFTISRDNAKNTVYLQMNSLKPEDTAVYYCAVDATPLRSHRYWGQGTQVTVSS

SEQ ID NO: 30717 - protein, 118 aa, Artificial Sequence
  Chemically Synthesized
QVQLQESGGGLVQAGGSLRLSCAASGSIFSTIYMGWYRQAPGKEREFVASIDFGSTTNYADSVKGRFTISRDNAKNTVYLQMNSLKPEDTAVYYCAAIYDNATKYWYWGQGTQVTVSS

SEQ ID NO: 30718 - protein, 119 aa, Artificial Sequence
  Chemically Synthesized
QVQLQESGGGLVQAGGSLRLSCAASGNISSGSIMGWYRQAPGKERELVAGISGGSTTYYADSVKGRFTISRDNAKNTVYLQMNSLKPEDTAVYYCAVSTTTRSLTTIYWGQGTQVTVSS

SEQ ID NO: 30719 - protein, 118 aa, Artificial Sequence
  Chemically Synthesized
QVQLQESGGGLVQAGGSLRLSCAASGYISRVVWMGWYRQAPGKERELVAAITFGGNTYYADSVKGRFTISRDNAKNTVYLQMNSLKPEDTAVYYCAVGYYYIYVLAYWGQGTQVTVSS

SEQ ID NO: 30720 - protein, 118 aa, Artificial Sequence
  Chemically Synthesized
QVQLQESGGGLVQAGGSLRLSCAASGNISVDLYMGWYRQAPGKERELVAAISNGASTYYADSVKGRFTISRDNAKNTVYLQMNSLKPEDTAVYYCAVRYQGASYHAYWGQGTQVTVSS

SEQ ID NO: 30721 - protein, 121 aa, Artificial Sequence
  Chemically Synthesized
QVQLQESGGGLVQAGGSLRLSCAASGTISAADVMGWYRQAPGKERELVATIGSVVLPYADSVKGRFTISRDNAKNTVYLQMNSLKPEDTAVYYCAVGLYTAAYDDNSFSYWGQGTQVTVSS

SEQ ID NO: 30722 - protein, 118 aa, Artificial Sequence
  Chemically Synthesized
QVQLQESGGGLVQAGGSLRLSCAASGYISQYGYMGWYRQAPGKEREFVAAITDGTITYYADSVKGRFTISRDNAKNTVYLQMNSLKPEDTAVYYCAAWDELYNDLVYWGQGTQVTVSS

SEQ ID NO: 30723 - protein, 122 aa, Artificial Sequence
  Chemically Synthesized
QVQLQESGGGLVQAGGSLRLSCAASGSIFRSTYMGWYRQAPGKEREFVAAITRGASTYYADSVKGRFTISRDNAKNTVYLQMNSLKPEDTAVYYCAVGYVYRDGSRYVYRYWGQGTQVTVSS

SEQ ID NO: 30724 - protein, 121 aa, Artificial Sequence
  Chemically Synthesized
QVQLQESGGGLVQAGGSLRLSCAASGYIFDKGLMGWYRQAPGKERELVASISLGAITNYADSVKGRFTISRDNAKNTVYLQMNSLKPEDTAVYYCAVYGRPDDSQDYYPYWGQGTQVTVSS

SEQ ID NO: 30725 - protein, 119 aa, Artificial Sequence
  Chemically Synthesized
QVQLQESGGGLVQAGGSLRLSCAASGSIFSGTDMGWYRQAPGKERELVASINFGGYYLYADSVKGRFTISRDNAKNTVYLQMNSLKPEDTAVYYCAAWDYPYYYLHRYWGQGTQVTVSS

SEQ ID NO: 30726 - protein, 122 aa, Artificial Sequence
  Chemically Synthesized
QVQLQESGGGLVQAGGSLRLSCAASGSISHFFRMGWYRQAPGKERELVAGISYGTTTNYADSVKGRFTISRDNAKNTVYLQMNSLKPEDTAVYYCAVVSAGDTYDGYTYRYWGQGTQVTVSS

SEQ ID NO: 30727 - protein, 118 aa, Artificial Sequence
  Chemically Synthesized
QVQLQESGGGLVQAGGSLRLSCAASGTISQYASMGWYRQAPGKEREFVASISDGSTTYYADSVKGRFTISRDNAKNTVYLQMNSLKPEDTAVYYCAVYGYYYVTFGYWGQGTQVTVSS

SEQ ID NO: 30728 - protein, 118 aa, Artificial Sequence
  Chemically Synthesized
QVQLQESGGGLVQAGGSLRLSCAASGTIFDSFQMGWYRQAPGKEREFVATISRGATTNYADSVKGRFTISRDNAKNTVYLQMNSLKPEDTAVYYCAAAVLVDSRFDYWGQGTQVTVSS

SEQ ID NO: 30729 - protein, 118 aa, Artificial Sequence
  Chemically Synthesized
QVQLQESGGGLVQAGGSLRLSCAASGSISRYIEMGWYRQAPGKERELVAAIGYGGITYYADSVKGRFTISRDNAKNTVYLQMNSLKPEDTAVYYCAVELYGDDSYYYWGQGTQVTVSS

SEQ ID NO: 30730 - protein, 122 aa, Artificial Sequence
  Chemically Synthesized
QVQLQESGGGLVQAGGSLRLSCAASGTIFDVAVMGWYRQAPGKEREFVAAIADGGITYYADSVKGRFTISRDNAKNTVYLQMNSLKPEDTAVYYCAARSGPNAVPLANHYYWGQGTQVTVSS

SEQ ID NO: 30731 - protein, 118 aa, Artificial Sequence
  Chemically Synthesized
QVQLQESGGGLVQAGGSLRLSCAASGTISWGGSMGWYRQAPGKERELVAAITDGAITYYADSVKGRFTISRDNAKNTVYLQMNSLKPEDTAVYYCAVVADYDGIYAYWGQGTQVTVSS

SEQ ID NO: 30732 - protein, 118 aa, Artificial Sequence
  Chemically Synthesized
QVQLQESGGGLVQAGGSLRLSCAASGYISATDYMGWYRQAPGKERELVASISVGSTTYYADSVKGRFTISRDNAKNTVYLQMNSLKPEDTAVYYCAAYDGDDNSYTYWGQGTQVTVSS

SEQ ID NO: 30733 - protein, 118 aa, Artificial Sequence
  Chemically Synthesized
QVQLQESGGGLVQAGGSLRLSCAASGSIFRTSYMGWYRQAPGKERELVATITYGTNTYYADSVKGRFTISRDNAKNTVYLQMNSLKPEDTAVYYCAADVADDAYYVYWGQGTQVTVSS

SEQ ID NO: 30734 - protein, 118 aa, Artificial Sequence
  Chemically Synthesized
QVQLQESGGGLVQAGGSLRLSCAASGTISYSDYMGWYRQAPGKERELVAAIADGANTNYADSVKGRFTISRDNAKNTVYLQMNSLKPEDTAVYYCAVPAGVRLYYEYWGQGTQVTVSS

SEQ ID NO: 30735 - protein, 116 aa, Artificial Sequence
  Chemically Synthesized
QVQLQESGGGLVQAGGSLRLSCAASGNIFNVAQMGWYRQAPGKERELVATITRGATTNYADSVKGRFTISRDNAKNTVYLQMNSLKPEDTAVYYCATTSSRLTIYWGQGTQVTVSS

SEQ ID NO: 30736 - protein, 118 aa, Artificial Sequence
  Chemically Synthesized
QVQLQESGGGLVQAGGSLRLSCAASGSIFYAPVMGWYRQAPGKERELVASISRGSITYYADSVKGRFTISRDNAKNTVYLQMNSLKPEDTAVYYCAVRVARSFQHLYWGQGTQVTVSS

SEQ ID NO: 30737 - protein, 122 aa, Artificial Sequence
  Chemically Synthesized
QVQLQESGGGLVQAGGSLRLSCAASGSISVNAYMGWYRQAPGKERELVAAINYGGTTYYADSVKGRFTISRDNAKNTVYLQMNSLKPEDTAVYYCAVYDPQLSQREADHYYWGQGTQVTVSS

SEQ ID NO: 30738 - protein, 121 aa, Artificial Sequence
  Chemically Synthesized
QVQLQESGGGLVQAGGSLRLSCAASGNIFDTDAMGWYRQAPGKEREFVASITLGGTTYYADSVKGRFTISRDNAKNTVYLQMNSLKPEDTAVYYCAAYGDGHTDGEQLDYWGQGTQVTVSS

SEQ ID NO: 30739 - protein, 122 aa, Artificial Sequence
  Chemically Synthesized
QVQLQESGGGLVQAGGSLRLSCAASGYIFYTTYMGWYRQAPGKEREFVAGIAIGTITNYADSVKGRFTISRDNAKNTVYLQMNSLKPEDTAVYYCAVYYIDTINRYHGLFYWGQGTQVTVSS

SEQ ID NO: 30740 - protein, 121 aa, Artificial Sequence
  Chemically Synthesized
QVQLQESGGGLVQAGGSLRLSCAASGNISVIAIMGWYRQAPGKERELVATIDPGAITNYADSVKGRFTISRDNAKNTVYLQMNSLKPEDTAVYYCAVISSSRRPGLRLLYWGQGTQVTVSS

SEQ ID NO: 30741 - protein, 122 aa, Artificial Sequence
  Chemically Synthesized
QVQLQESGGGLVQAGGSLRLSCAASGTISGDLDMGWYRQAPGKERELVATIDGGGTTYYADSVKGRFTISRDNAKNTVYLQMNSLKPEDTAVYYCAVEDTSRYSGYYPLQYWGQGTQVTVSS

SEQ ID NO: 30742 - protein, 117 aa, Artificial Sequence
  Chemically Synthesized
QVQLQESGGGLVQAGGSLRLSCAASGNIFRFDGMGWYRQAPGKERELVATISRGTITNYADSVKGRFTISRDNAKNTVYLQMNSLKPEDTAVYYCAAFWTTTRTIYWGQGTQVTVSS

SEQ ID NO: 30743 - protein, 122 aa, Artificial Sequence
  Chemically Synthesized
QVQLQESGGGLVQAGGSLRLSCAASGTISGFGDMGWYRQAPGKEREFVAAINGGANTNYADSVKGRFTISRDNAKNTVYLQMNSLKPEDTAVYYCAVVGGYRPGQDITHGYWGQGTQVTVSS

SEQ ID NO: 30744 - protein, 114 aa, Artificial Sequence
  Chemically Synthesized
QVQLQESGGGLVQAGGSLRLSCAASGYISVMGWYRQAPGKERELVAGIADGGSTYYADSVKGRFTISRDNAKNTVYLQMNSLKPEDTAVYYCAATSRRFRFIYWGQGTQVTVSS

SEQ ID NO: 30745 - protein, 122 aa, Artificial Sequence
  Chemically Synthesized
QVQLQESGGGLVQAGGSLRLSCAASGTISGGRYMGWYRQAPGKERELVASIAIGANTNYADSVKGRFTISRDNAKNTVYLQMNSLKPEDTAVYYCAAGVANNQRLRNDHDYWGQGTQVTVSS

SEQ ID NO: 30746 - protein, 121 aa, Artificial Sequence
  Chemically Synthesized
QVQLQESGGGLVQAGGSLRLSCAASGTISPIYMGWYRQAPGKERELVATIDGGTNTNYADSVKGRFTISRDNAKNTVYLQMNSLKPEDTAVYYCAVKSGYNPYGHIYHYYWGQGTQVTVSS

SEQ ID NO: 30747 - protein, 120 aa, Artificial Sequence
  Chemically Synthesized
QVQLQESGGGLVQAGGSLRLSCAASGNISDRDTMGWYRQAPGKERELVAGINEGGNTYYADSVKGRFTISRDNAKNTVYLQMNSLKPEDTAVYYCAASRVVSTTTLLIYWGQGTQVTVSS

SEQ ID NO: 30748 - protein, 122 aa, Artificial Sequence
  Chemically Synthesized
QVQLQESGGGLVQAGGSLRLSCAASGSISDQPSMGWYRQAPGKERELVATIDQGTTTNYADSVKGRFTISRDNAKNTVYLQMNSLKPEDTAVYYCAVIYATYWDRYGNHSYWGQGTQVTVSS

SEQ ID NO: 30749 - protein, 121 aa, Artificial Sequence
  Chemically Synthesized
QVQLQESGGGLVQAGGSLRLSCAASGTIFNLDYMGWYRQAPGKERELVASINGGTITNYADSVKGRFTISRDNAKNTVYLQMNSLKPEDTAVYYCAVSSTKLTNLLRFFYWGQGTQVTVSS

SEQ ID NO: 30750 - protein, 121 aa, Artificial Sequence
  Chemically Synthesized
QVQLQESGGGLVQAGGSLRLSCAASGTILTTCMGWYRQAPGKEREFVATIDSGTNTYYADSVKGRFTISRDNAKNTVYLQMNSLKPEDTAVYYCAADYDTDDTFDLLHRYWGQGTQVTVSS

SEQ ID NO: 30751 - protein, 118 aa, Artificial Sequence
  Chemically Synthesized
QVQLQESGGGLVQAGGSLRLSCAASGSISYNYIMGWYRQAPGKEREFVATIAYGGSTYYADSVKGRFTISRDNAKNTVYLQMNSLKPEDTAVYYCAVGVSAVTSYVYWGQGTQVTVSS

SEQ ID NO: 30752 - protein, 125 aa, Artificial Sequence
  Chemically Synthesized
QVQLQESGGGLVQAGGSLRLSCAASGSIFTRPDMGWYRQAPGKEREFVAGINWGGITNYADSVKGRFTISRDNAKNTVYLQMNSLKPEDTAVYYCAVWRSTRSLRSTLLGGGLYWGQGTQVTVSS

SEQ ID NO: 30753 - protein, 118 aa, Artificial Sequence
  Chemically Synthesized
QVQLQESGGGLVQAGGSLRLSCAASGYISNPRYMGWYRQAPGKERELVAAIDDGSITNYADSVKGRFTISRDNAKNTVYLQMNSLKPEDTAVYYCAAGLRYDQLHAYWGQGTQVTVSS

SEQ ID NO: 30754 - protein, 126 aa, Artificial Sequence
  Chemically Synthesized
QVQLQESGGGLVQAGGSLRLSCAASGYISYYPYMGWYRQAPGKEREFVATITWGSITYYADSVKGRFTISRDNAKNTVYLQMNSLKPEDTAVYYCAAVYYWGYLSPYAYDGQHGYWGQGTQVTVSS

SEQ ID NO: 30755 - protein, 125 aa, Artificial Sequence
  Chemically Synthesized
QVQLQESGGGLVQAGGSLRLSCAASGSIFNRLMGWYRQAPGKERELVAGIGDGTNTNYADSVKGRFTISRDNAKNTVYLQMNSLKPEDTAVYYCAARYAYGGDWLDFPYNTYSYWGQGTQVTVSS

SEQ ID NO: 30756 - protein, 118 aa, Artificial Sequence
  Chemically Synthesized
QVQLQESGGGLVQAGGSLRLSCAASGSIFYAVTMGWYRQAPGKERELVASINYGGTTNYADSVKGRFTISRDNAKNTVYLQMNSLKPEDTAVYYCAVSPRYRWYHRYWGQGTQVTVSS

SEQ ID NO: 30757 - protein, 122 aa, Artificial Sequence
  Chemically Synthesized
QVQLQESGGGLVQAGGSLRLSCAASGNIFVRYYMGWYRQAPGKERELVASIAAGANTNYADSVKGRFTISRDNAKNTVYLQMNSLKPEDTAVYYCAVPKVGNLLNVDDLGYWGQGTQVTVSS

SEQ ID NO: 30758 - protein, 115 aa, Artificial Sequence
  Chemically Synthesized
QVQLQESGGGLVQAGGSLRLSCAASGTIRTMGWYRQAPGKERELVASITAGGSTNYADSVKGRFTISRDNAKNTVYLQMNSLKPEDTAVYYCAVRTDNDNVHWYWGQGTQVTVSS

SEQ ID NO: 30759 - protein, 125 aa, Artificial Sequence
  Chemically Synthesized
QVQLQESGGGLVQAGGSLRLSCAASGTISHYTSMGWYRQAPGKERELVAAINYVVLPYADSVKGRFTISRDNAKNTVYLQMNSLKPEDTAVYYCAVDSGSYWDPRGTYPFPYHYWGQGTQVTVSS

SEQ ID NO: 30760 - protein, 122 aa, Artificial Sequence
  Chemically Synthesized
QVQLQESGGGLVQAGGSLRLSCAASGNISRRAYMGWYRQAPGKEREFVASINGGGSTYYADSVKGRFTISRDNAKNTVYLQMNSLKPEDTAVYYCAVAVVILRYFYGYHDYWGQGTQVTVSS

SEQ ID NO: 30761 - protein, 118 aa, Artificial Sequence
  Chemically Synthesized
QVQLQESGGGLVQAGGSLRLSCAASGSISSGSYMGWYRQAPGKEREFVASIAKGTSTYYADSVKGRFTISRDNAKNTVYLQMNSLKPEDTAVYYCAAHWQWYPYLSYWGQGTQVTVSS

SEQ ID NO: 30762 - protein, 126 aa, Artificial Sequence
  Chemically Synthesized
QVQLQESGGGLVQAGGSLRLSCAASGSISSQDSMGWYRQAPGKERELVATIAAGGNTYYADSVKGRFTISRDNAKNTVYLQMNSLKPEDTAVYYCAVKISYWLYDTYLSGYGFLYWGQGTQVTVSS

SEQ ID NO: 30763 - protein, 117 aa, Artificial Sequence
  Chemically Synthesized
QVQLQESGGGLVQAGGSLRLSCAASGSISGLRAMGWYRQAPGKEREFVAGIGYGTITYYADSVKGRFTISRDNAKNTVYLQMNSLKPEDTAVYYCAVSLRWRGHVYWGQGTQVTVSS

SEQ ID NO: 30764 - protein, 121 aa, Artificial Sequence
  Chemically Synthesized
QVQLQESGGGLVQAGGSLRLSCAASGTIFYSSNMGWYRQAPGKEREFVAAISDGAVPYADSVKGRFTISRDNAKNTVYLQMNSLKPEDTAVYYCAAIYSRVFLVDYAHAYWGQGTQVTVSS

SEQ ID NO: 30765 - protein, 118 aa, Artificial Sequence
  Chemically Synthesized
QVQLQESGGGLVQAGGSLRLSCAASGSIFGYAYMGWYRQAPGKERELVATINRGAITYYADSVKGRFTISRDNAKNTVYLQMNSLKPEDTAVYYCAVGLYVQTDHAYWGQGTQVTVSS

SEQ ID NO: 30766 - protein, 118 aa, Artificial Sequence
  Chemically Synthesized
QVQLQESGGGLVQAGGSLRLSCAASGNISDPFGMGWYRQAPGKERELVAAINYGTSTYYADSVKGRFTISRDNAKNTVYLQMNSLKPEDTAVYYCAAQFPDYAALIYWGQGTQVTVSS

SEQ ID NO: 30767 - protein, 118 aa, Artificial Sequence
  Chemically Synthesized
QVQLQESGGGLVQAGGSLRLSCAASGTIFRVLDMGWYRQAPGKEREFVASINAGATTYYADSVKGRFTISRDNAKNTVYLQMNSLKPEDTAVYYCAAYYYDLFVLGYWGQGTQVTVSS

SEQ ID NO: 30768 - protein, 116 aa, Artificial Sequence
  Chemically Synthesized
QVQLQESGGGLVQAGGSLRLSCAASGNISSLDYMGWYRQAPGKEREFVALLVVVLPYADSVKGRFTISRDNAKNTVYLQMNSLKPEDTAVYYCAVGYPFDYDLGYWGQGTQVTVSS

SEQ ID NO: 30769 - protein, 122 aa, Artificial Sequence
  Chemically Synthesized
QVQLQESGGGLVQAGGSLRLSCAASGNIFYSDYMGWYRQAPGKERELVAAIAYGTNTNYADSVKGRFTISRDNAKNTVYLQMNSLKPEDTAVYYCAVVKYVFLDTIYYHSYWGQGTQVTVSS

SEQ ID NO: 30770 - protein, 125 aa, Artificial Sequence
  Chemically Synthesized
QVQLQESGGGLVQAGGSLRLSCAASGTISSGYGMGWYRQAPGKERELLPVLLSVVVPYADSVKGRFTISRDNAKNTVYLQMNSLKPEDTAVYYCAVLGQLGTDTYTLVGNNYPYWGQGTQVTVSS

SEQ ID NO: 30771 - protein, 117 aa, Artificial Sequence
  Chemically Synthesized
QVQLQESGGGLVQAGGSLRLSCAASGTIFGDADMGWYRQAPGKEREFVAVLVTVVLPYADSVKGRFTISRDNAKNTVYLQMNSLKPEDTAVYYCAVSIDPWQYFHYWGQGTQVTVSS

SEQ ID NO: 30772 - protein, 125 aa, Artificial Sequence
  Chemically Synthesized
QVQLQESGGGLVQAGGSLRLSCAASGSIFAGGDMGWYRQAPGKEREFVAAITRVVIPYADSVKGRFTISRDNAKNTVYLQMNSLKPEDTAVYYCAVYYLYTQSSVTGYPPRHAYWGQGTQVTVSS

SEQ ID NO: 30773 - protein, 122 aa, Artificial Sequence
  Chemically Synthesized
QVQLQESGGGLVQAGGSLRLSCAASGTISDYGTMGWYRQAPGKERELVAAINLGSNTNYADSVKGRFTISRDNAKNTVYLQMNSLKPEDTAVYYCAAYSQYDGYYDRPFYYWGQGTQVTVSS

SEQ ID NO: 30774 - protein, 121 aa, Artificial Sequence
  Chemically Synthesized
QVQLQESGGGLVQAGGSLRLSCAASGTISYSVWMGWYRQAPGKERELVAAIGYGATTNYADSVKGRFTISRDNAKNTVYLQMNSLKPEDTAVYYCAAYYYVYSQFDSLYYWGQGTQVTVSS

SEQ ID NO: 30775 - protein, 120 aa, Artificial Sequence
  Chemically Synthesized
QVQLQESGGGLVQAGGSLRLSCAASGSISDSTMGWYRQAPGKERELLPVLLRVVVPYADSVKGRFTISRDNAKNTVYLQMNSLKPEDTAVYYCAAYTTVLYETHYHLIYWGQGTQVTVSS

SEQ ID NO: 30776 - protein, 122 aa, Artificial Sequence
  Chemically Synthesized
QVQLQESGGGLVQAGGSLRLSCAASGSISFTVAMGWYRQAPGKERELVAGISGGATTNYADSVKGRFTISRDNAKNTVYLQMNSLKPEDTAVYYCAATYLDGYTRPWPFGYWGQGTQVTVSS

SEQ ID NO: 30777 - protein, 117 aa, Artificial Sequence
  Chemically Synthesized
QVQLQESGGGLVQAGGSLRLSCAASGSIFPVYVMGWYRQAPGKERELVAAIGYGGSTYYADSVKGRFTISRDNAKNTVYLQMNSLKPEDTAVYYCAVGPLPLPYRYWGQGTQVTVSS

SEQ ID NO: 30778 - protein, 126 aa, Artificial Sequence
  Chemically Synthesized
QVQLQESGGGLVQAGGSLRLSCAASGYIFPGYIMGWYRQAPGKERELVASIASGGITYYADSVKGRFTISRDNAKNTVYLQMNSLKPEDTAVYYCAVYTQRYRGTDGRGYDYYGYWGQGTQVTVSS

SEQ ID NO: 30779 - protein, 118 aa, Artificial Sequence
  Chemically Synthesized
QVQLQESGGGLVQAGGSLRLSCAASGYIFGSVYMGWYRQAPGKEREFVAGIDTGGTTYYADSVKGRFTISRDNAKNTVYLQMNSLKPEDTAVYYCAVLNYLWWTHEYWGQGTQVTVSS

SEQ ID NO: 30780 - protein, 125 aa, Artificial Sequence
  Chemically Synthesized
QVQLQESGGGLVQAGGSLRLSCAASGSIFAFERMGWYRQAPGKERELVATIGDGATTNYADSVKGRFTISRDNAKNTVYLQMNSLKPEDTAVYYCAVYLEYDGYYDWGPATLPYWGQGTQVTVSS

SEQ ID NO: 30781 - protein, 122 aa, Artificial Sequence
  Chemically Synthesized
QVQLQESGGGLVQAGGSLRLSCAASGNIFLPSTMGWYRQAPGKEREFVATISYGSTTYYADSVKGRFTISRDNAKNTVYLQMNSLKPEDTAVYYCAAYRTDDSYDRWTYSYWGQGTQVTVSS

SEQ ID NO: 30782 - protein, 125 aa, Artificial Sequence
  Chemically Synthesized
QVQLQESGGGLVQAGGSLRLSCAASGSISSRDGMGWYRQAPGKERELVAGIGYGSSTYYADSVKGRFTISRDNAKNTVYLQMNSLKPEDTAVYYCAVGYWPDYLYIGDLSSLSYWGQGTQVTVSS

SEQ ID NO: 30783 - protein, 118 aa, Artificial Sequence
  Chemically Synthesized
QVQLQESGGGLVQAGGSLRLSCAASGYIFPGYIMGWYRQAPGKERELVATITYGSNTNYADSVKGRFTISRDNAKNTVYLQMNSLKPEDTAVYYCAVIGFGYASHRYWGQGTQVTVSS

SEQ ID NO: 30784 - protein, 117 aa, Artificial Sequence
  Chemically Synthesized
QVQLQESGGGLVQAGGSLRLSCAASGSILRSSMGWYRQAPGKEREFVAGIAIGTITNYADSVKGRFTISRDNAKNTVYLQMNSLKPEDTAVYYCAAYYYIDSFSCYWGQGTQVTVSS

SEQ ID NO: 30785 - protein, 122 aa, Artificial Sequence
  Chemically Synthesized
QVQLQESGGGLVQAGGSLRLSCAASGTIFRWFGMGWYRQAPGKERELVAAITSGATTYYADSVKGRFTISRDNAKNTVYLQMNSLKPEDTAVYYCAVPRYTAVSNGYYYYYWGQGTQVTVSS

SEQ ID NO: 30786 - protein, 118 aa, Artificial Sequence
  Chemically Synthesized
QVQLQESGGGLVQAGGSLRLSCAASGNISPKYGMGWYRQAPGKERELVATISYGSTTNYADSVKGRFTISRDNAKNTVYLQMNSLKPEDTAVYYCAVVLVLATVHLYWGQGTQVTVSS

SEQ ID NO: 30787 - protein, 122 aa, Artificial Sequence
  Chemically Synthesized
QVQLQESGGGLVQAGGSLRLSCAASGNIFRAASMGWYRQAPGKERELVASINVGTTTNYADSVKGRFTISRDNAKNTVYLQMNSLKPEDTAVYYCAAWYYGAWYPFRPFYYWGQGTQVTVSS

SEQ ID NO: 30788 - protein, 118 aa, Artificial Sequence
  Chemically Synthesized
QVQLQESGGGLVQAGGSLRLSCAASGNIFAYRSMGWYRQAPGKEREFVAAITKGTTTYYADSVKGRFTISRDNAKNTVYLQMNSLKPEDTAVYYCAVGAPYVVYHAYWGQGTQVTVSS

SEQ ID NO: 30789 - protein, 124 aa, Artificial Sequence
  Chemically Synthesized
QVQLQESGGGLVQAGGSLRLSCAASGSIFGYSMGWYRQAPGKEREFVATIVMVVLPYADSVKGRFTISRDNAKNTVYLQMNSLKPEDTAVYYCAVNFGDGIQYYPAYRDLLSYWGQGTQVTVSS

SEQ ID NO: 30790 - protein, 122 aa, Artificial Sequence
  Chemically Synthesized
QVQLQESGGGLVQAGGSLRLSCAASGYISADLYMGWYRQAPGKERELVATISAGSNTYYADSVKGRFTISRDNAKNTVYLQMNSLKPEDTAVYYCAARTHLDYVSDASHFYWGQGTQVTVSS

SEQ ID NO: 30791 - protein, 122 aa, Artificial Sequence
  Chemically Synthesized
QVQLQESGGGLVQAGGSLRLSCAASGNIFYTSYMGWYRQAPGKERELVASITVGTNTNYADSVKGRFTISRDNAKNTVYLQMNSLKPEDTAVYYCAVPISGDDDLDGPHIYWGQGTQVTVSS

SEQ ID NO: 30792 - protein, 121 aa, Artificial Sequence
  Chemically Synthesized
QVQLQESGGGLVQAGGSLRLSCAASGSISGRFGMGWYRQAPGKERELVATINDGGNTNYADSVKGRFTISRDNAKNTVYLQMNSLKPEDTAVYYCAAPVPYYRARYGYDYWGQGTQVTVSS

SEQ ID NO: 30793 - protein, 122 aa, Artificial Sequence
  Chemically Synthesized
QVQLQESGGGLVQAGGSLRLSCAASGTISGLGTMGWYRQAPGKERELVAAIAYGATTNYADSVKGRFTISRDNAKNTVYLQMNSLKPEDTAVYYCAVPYRQSPLDAGTLIYWGQGTQVTVSS

SEQ ID NO: 30794 - protein, 122 aa, Artificial Sequence
  Chemically Synthesized
QVQLQESGGGLVQAGGSLRLSCAASGYISLGSNMGWYRQAPGKEREFVAAIGNGGTTYYADSVKGRFTISRDNAKNTVYLQMNSLKPEDTAVYYCAVDDYVSWDEDDTLDYWGQGTQVTVSS

SEQ ID NO: 30795 - protein, 122 aa, Artificial Sequence
  Chemically Synthesized
QVQLQESGGGLVQAGGSLRLSCAASGSISTATAMGWYRQAPGKEREFVAGISFGGITYYADSVKGRFTISRDNAKNTVYLQMNSLKPEDTAVYYCAADDADYAGSYPIHDYWGQGTQVTVSS

SEQ ID NO: 30796 - protein, 118 aa, Artificial Sequence
  Chemically Synthesized
QVQLQESGGGLVQAGGSLRLSCAASGNIFLDDLMGWYRQAPGKEREFVAAINRGGTTYYADSVKGRFTISRDNAKNTVYLQMNSLKPEDTAVYYCAVILSKAWIYQYWGQGTQVTVSS

SEQ ID NO: 30797 - protein, 126 aa, Artificial Sequence
  Chemically Synthesized
QVQLQESGGGLVQAGGSLRLSCAASGSISDFGAMGWYRQAPGKERELVAGINPGGTTYYADSVKGRFTISRDNAKNTVYLQMNSLKPEDTAVYYCAAWSPYDVDTGIIVYASYAYWGQGTQVTVSS

SEQ ID NO: 30798 - protein, 121 aa, Artificial Sequence
  Chemically Synthesized
QVQLQESGGGLVQAGGSLRLSCAASGTISYPAKMGWYRQAPGKERELVAAITYGGSTYADSVKGRFTISRDNAKNTVYLQMNSLKPEDTAVYYCAARDSYLDGYDGGHYYWGQGTQVTVSS

SEQ ID NO: 30799 - protein, 118 aa, Artificial Sequence
  Chemically Synthesized
QVQLQESGGGLVQAGGSLRLSCAASGYIFYYLHMGWYRQAPGKEREFVAAISPGGITYYADSVKGRFTISRDNAKNTVYLQMNSLKPEDTAVYYCAAVDSLRFYFEYWGQGTQVTVSS

SEQ ID NO: 30800 - protein, 118 aa, Artificial Sequence
  Chemically Synthesized
QVQLQESGGGLVQAGGSLRLSCAASGYIFTYDLMGWYRQAPGKEREFVASISDGGNTNYADSVKGRFTISRDNAKNTVYLQMNSLKPEDTAVYYCAVVDYYDSDYAYWGQGTQVTVSS

SEQ ID NO: 30801 - protein, 117 aa, Artificial Sequence
  Chemically Synthesized
QVQLQESGGGLVQAGGSLRLSCAASGTISEISGMGWYRQAPGKEREFVASIANGGTTTNYADSVKGRFTISRDNAKNTVYLQMNSLKPEDTAVYYCAAVSRYNHGYWGQGTQVTVSS

SEQ ID NO: 30802 - protein, 113 aa, Artificial Sequence
  Chemically Synthesized
QVQLQESGGGLVQAGGSLRLSCAASGTIFTYLIMGWYRQAPGKEREFVAAINYGAITNYADSVKGRFTISRDNAKNTVYLQMNSLKPEDTAVYYCAAGAFRYWGQGTQVTVSS

SEQ ID NO: 30803 - protein, 122 aa, Artificial Sequence
  Chemically Synthesized
QVQLQESGGGLVQAGGSLRLSCAASGNIFWKGTMGWYRQAPGKEREFVATITTGATTYYADSVKGRFTISRDNAKNTVYLQMNSLKPEDTAVYYCAAEPHDQFQNDGYFLYWGQGTQVTVSS

SEQ ID NO: 30804 - protein, 118 aa, Artificial Sequence
  Chemically Synthesized
QVQLQESGGGLVQAGGSLRLSCAASGSISRILVMGWYRQAPGKEREFVAGIAYGASTNYADSVKGRFTISRDNAKNTVYLQMNSLKPEDTAVYYCAAVVDADRWLWYWGQGTQVTVSS

SEQ ID NO: 30805 - protein, 122 aa, Artificial Sequence
  Chemically Synthesized
QVQLQESGGGLVQAGGSLRLSCAASGNIFDGWIMGWYRQAPGKERELVAAITYGSSTNYADSVKGRFTISRDNAKNTVYLQMNSLKPEDTAVYYCAVHDYAYLVGDVDLWYWGQGTQVTVSS

SEQ ID NO: 30806 - protein, 122 aa, Artificial Sequence
  Chemically Synthesized
QVQLQESGGGLVQAGGSLRLSCAASGTISTYAPMGWYRQAPGKEREFVAAIGRGATTNYADSVKGRFTISRDNAKNTVYLQMNSLKPEDTAVYYCAVVTGANTTRGLYHYYWGQGTQVTVSS

SEQ ID NO: 30807 - protein, 122 aa, Artificial Sequence
  Chemically Synthesized
QVQLQESGGGLVQAGGSLRLSCAASGTISGPTGMGWYRQAPGKERELVAAIDVGGNTYYADSVKGRFTISRDNAKNTVYLQMNSLKPEDTAVYYCAVREWYVYGHDNHFGYWGQGTQVTVSS

SEQ ID NO: 30808 - protein, 115 aa, Artificial Sequence
  Chemically Synthesized
QVQLQESGGGLVQAGGSLRLSCAASGYISWYQVMGWYRQAPGKEREFVASIASGANTNYADSVKGRFTISRDNAKNTVYLQMNSLKPEDTAVYYCAAVTVTVLYWGQGTQVTVSS

SEQ ID NO: 30809 - protein, 122 aa, Artificial Sequence
  Chemically Synthesized
QVQLQESGGGLVQAGGSLRLSCAASGTISSSFVMGWYRQAPGKEREFVASIAQGSITYYADSVKGRFTISRDNAKNTVYLQMNSLKPEDTAVYYCAVYESYAYDKAVKYTYWGQGTQVTVSS

SEQ ID NO: 30810 - protein, 110 aa, Artificial Sequence
  Chemically Synthesized
QVQLQESGGGLVQAGGSLRLSCAASGNIFRGDRMGWYRQAPGKERELVAGIAAGGTTYYADSVKGRFTISRDNAKNTVYLQMNSLKPEDTAVYYCAAVYWGQGTQVTVSS

SEQ ID NO: 30811 - protein, 117 aa, Artificial Sequence
  Chemically Synthesized
QVQLQESGGGLVQAGGSLRLSCAASGSISSSRMGWYRQAPGKEREFVAGINSGTTTNYADSVKGRFTISRDNAKNTVYLQMNSLKPEDTAVYYCAVYYQDDDPLYYWGQGTQVTVSS

SEQ ID NO: 30812 - protein, 121 aa, Artificial Sequence
  Chemically Synthesized
QVQLQESGGGLVQAGGSLRLSCAASGTISYYPRMGWYRQAPGKEREFVAGINGATTNYADSVKGRFTISRDNAKNTVYLQMNSLKPEDTAVYYCAADTPNPIVGRNLHSYWGQGTQVTVSS

SEQ ID NO: 30813 - protein, 121 aa, Artificial Sequence
  Chemically Synthesized
QVQLQESGGGLVQAGGSLRLSCAASGNIFYTSMGWYRQAPGKEREFVAAIGDGTITNYADSVKGRFTISRDNAKNTVYLQMNSLKPEDTAVYYCAVGASYWGDPNDDFEYWGQGTQVTVSS

SEQ ID NO: 30814 - protein, 118 aa, Artificial Sequence
  Chemically Synthesized
QVQLQESGGGLVQAGGSLRLSCAASGTISYRGGMGWYRQAPGKEREFVAGIANGATTNYADSVKGRFTISRDNAKNTVYLQMNSLKPEDTAVYYCAAYDLRRRYYYYWGQGTQVTVSS

SEQ ID NO: 30815 - protein, 122 aa, Artificial Sequence
  Chemically Synthesized
QVQLQESGGGLVQAGGSLRLSCAASGTIFRDTNMGWYRQAPGKERELVASITDGTSTNYADSVKGRFTISRDNAKNTVYLQMNSLKPEDTAVYYCAAYVPDNDVDSGDYGYWGQGTQVTVSS

SEQ ID NO: 30816 - protein, 121 aa, Artificial Sequence
  Chemically Synthesized
QVQLQESGGGLVQAGGSLRLSCAASGTISGVDQMGWYRQAPGKERELVATINLGATTNYADSVKGRFTISRDNAKNTVYLQMNSLKPEDTAVYYCAVYSVTLLTLGVCMYWGQGTQVTVSS

SEQ ID NO: 30817 - protein, 118 aa, Artificial Sequence
  Chemically Synthesized
QVQLQESGGGLVQAGGSLRLSCAASGTISVTRGMGWYRQAPGKEREFVAAINTGGITNYADSVKGRFTISRDNAKNTVYLQMNSLKPEDTAVYYCAVYFAPYDSHFYWGQGTQVTVSS

SEQ ID NO: 30818 - protein, 117 aa, Artificial Sequence
  Chemically Synthesized
QVQLQESGGGLVQAGGSLRLSCAASGLFLTTGMGWYRQAPGKEREFVASIDTGSSTNYADSVKGRFTISRDNAKNTVYLQMNSLKPEDTAVYYCAVDDLDYLSLLYWGQGTQVTVSS

SEQ ID NO: 30819 - protein, 118 aa, Artificial Sequence
  Chemically Synthesized
QVQLQESGGGLVQAGGSLRLSCAASGTISWSNPMGWYRQAPGKERELVAGIGGGGITNYADSVKGRFTISRDNAKNTVYLQMNSLKPEDTAVYYCAAWTRQSRGYGYWGQGTQVTVSS

SEQ ID NO: 30820 - protein, 121 aa, Artificial Sequence
  Chemically Synthesized
QVQLQESGGGLVQAGGSLRLSCAASGTISDGDPMGWYRQAPGKERELVAGIGDGANTNYADSVKGRFTISRDNAKNTVYLQMNSLKPEDTAVYYCAAQDLDFSYDKSLFYWGQGTQVTVSS

SEQ ID NO: 30821 - protein, 122 aa, Artificial Sequence
  Chemically Synthesized
QVQLQESGGGLVQAGGSLRLSCAASGTISGTIYMGWYRQAPGKEREFVAAINHGASTYYADSVKGRFTISRDNAKNTVYLQMNSLKPEDTAVYYCAVYQGYDFQPYLRHHYWGQGTQVTVSS

SEQ ID NO: 30822 - protein, 117 aa, Artificial Sequence
  Chemically Synthesized
QVQLQESGGGLVQAGGSLRLSCAASGNILTVFMGWYRQAPGKERELVAAIDDGGSTYYADSVKGRFTISRDNAKNTVYLQMNSLKPEDTAVYYCAAYVKWAADLAYWGQGTQVTVSS

SEQ ID NO: 30823 - protein, 122 aa, Artificial Sequence
  Chemically Synthesized
QVQLQESGGGLVQAGGSLRLSCAASGSISTGWTMGWYRQAPGKEREFVAGIDPGGNTYYADSVKGRFTISRDNAKNTVYLQMNSLKPEDTAVYYCAVVDVRSLYDLRYYAYWGQGTQVTVSS

SEQ ID NO: 30824 - protein, 118 aa, Artificial Sequence
  Chemically Synthesized
QVQLQESGGGLVQAGGSLRLSCAASGNIFTADAMGWYRQAPGKERELVASIDRGAITYYADSVKGRFTISRDNAKNTVYLQMNSLKPEDTAVYYCAVGYRDIDPYRYWGQGTQVTVSS

SEQ ID NO: 30825 - protein, 118 aa, Artificial Sequence
  Chemically Synthesized
QVQLQESGGGLVQAGGSLRLSCAASGTIFGYGRMGWYRQAPGKEREFVAGISYGGNTYYADSVKGRFTISRDNAKNTVYLQMNSLKPEDTAVYYCAVYYVTRRTHQYWGQGTQVTVSS

SEQ ID NO: 30826 - protein, 113 aa, Artificial Sequence
  Chemically Synthesized
QVQLQESGGGLVQAGGSLRLSCAASGTISLLVMGWYRQAPGKERELVAAIDTGSITNYADSVKGRFTISRDNAKNTVYLQMNSLKPEDTAVYYCAADGGYYYWGQGTQVTVSS

SEQ ID NO: 30827 - protein, 118 aa, Artificial Sequence
  Chemically Synthesized
QVQLQESGGGLVQAGGSLRLSCAASGNIFRRSNMGWYRQAPGKEREFVAAIAYGGTTNYADSVKGRFTISRDNAKNTVYLQMNSLKPEDTAVYYCAVIWYRGAWLSYWGQGTQVTVSS

SEQ ID NO: 30828 - protein, 118 aa, Artificial Sequence
  Chemically Synthesized
QVQLQESGGGLVQAGGSLRLSCAASGTIFFPYAMGWYRQAPGKERELVAGISDGSNTYYADSVKGRFTISRDNAKNTVYLQMNSLKPEDTAVYYCAVYAVDVVQHSYWGQGTQVTVSS

SEQ ID NO: 30829 - protein, 118 aa, Artificial Sequence
  Chemically Synthesized
QVQLQESGGGLVQAGGSLRLSCAASGTISGRTYMGWYRQAPGKERELVASINRGAITYYADSVKGRFTISRDNAKNTVYLQMNSLKPEDTAVYYCAVPYWLHYRHLYWGQGTQVTVSS

SEQ ID NO: 30830 - protein, 121 aa, Artificial Sequence
  Chemically Synthesized
QVQLQESGGGLVQAGGSLRLSCAASGTISNSTMGWYRQAPGKEREFVAAINGGAITNYADSVKGRFTISRDNAKNTVYLQMNSLKPEDTAVYYCAANYYSPASRLTSLTYWGQGTQVTVSS

SEQ ID NO: 30831 - protein, 122 aa, Artificial Sequence
  Chemically Synthesized
QVQLQESGGGLVQAGGSLRLSCAASGNISPYLVMGWYRQAPGKEREFVAGISVGTTTYYADSVKGRFTISRDNAKNTVYLQMNSLKPEDTAVYYCAARNPFSYHYRDAYGYWGQGTQVTVSS

SEQ ID NO: 30832 - protein, 122 aa, Artificial Sequence
  Chemically Synthesized
QVQLQESGGGLVQAGGSLRLSCAASGYIFGNAYMGWYRQAPGKEREFVAAINPGGSTNYADSVKGRFTISRDNAKNTVYLQMNSLKPEDTAVYYCAAVRYAADRTAIWHYYWGQGTQVTVSS

SEQ ID NO: 30833 - protein, 119 aa, Artificial Sequence
  Chemically Synthesized
QVQLQESGGGLVQAGGSLRLSCAASGSISAVDTMGWYRQAPGKEREFVASIGQGTSTYYADSVKGRFTISRDNAKNTVYLQMNSLKPEDTAVYYCAVNDPADVVLVYYWGQGTQVTVSS

SEQ ID NO: 30834 - protein, 118 aa, Artificial Sequence
  Chemically Synthesized
QVQLQESGGGLVQAGGSLRLSCAASGSISELASMGWYRQAPGKERELVATISVGGITNYADSVKGRFTISRDNAKNTVYLQMNSLKPEDTAVYYCAVLFAFDAWYWYWGQGTQVTVSS

SEQ ID NO: 30835 - protein, 111 aa, Artificial Sequence
  Chemically Synthesized
QVQLQESGGGLVQAGGSLRLSCAASGSISYGTDMGWYRQAPGKERELATISYGSITNYADSVKGRFTISRDNAKNTVYLQMNSLKPEDTAVYYCAVDFGYWGQGTQVTVSS

SEQ ID NO: 30836 - protein, 113 aa, Artificial Sequence
  Chemically Synthesized
QVQLQESGGGLVQAGGSLRLSCAASGTISLAMGWYRQAPGKEREFVAAITPGSNTNYADSVKGRFTISRDNAKNTVYLQMNSLKPEDTAVYYCAADGGDLSYWGQGTQVTVSS

SEQ ID NO: 30837 - protein, 126 aa, Artificial Sequence
  Chemically Synthesized
QVQLQESGGGLVQAGGSLRLSCAASGSISAAYNMGWYRQAPGKEREFVAAISDGSSTNYADSVKGRFTISRDNAKNTVYLQMNSLKPEDTAVYYCAVYDGGFRPYDGSPDAEHGYWGQGTQVTVSS

SEQ ID NO: 30838 - protein, 122 aa, Artificial Sequence
  Chemically Synthesized
QVQLQESGGGLVQAGGSLRLSCAASGNISSIQTMGWYRQAPGKEREFVAAISDGGTTNYADSVKGRFTISRDNAKNTVYLQMNSLKPEDTAVYYCAVVGYDVGATPRRYYYWGQGTQVTVSS

SEQ ID NO: 30839 - protein, 116 aa, Artificial Sequence
  Chemically Synthesized
QVQLQESGGGLVQAGGSLRLSCAASGTIFRRGFMGWYRQAPGKEREFVASIAGGSNTNYADSVKGRFTISRDNAKNTVYLQMNSLKPEDTAVYYCARYRWRYLTYWGQGTQVTVSS

SEQ ID NO: 30840 - protein, 118 aa, Artificial Sequence
  Chemically Synthesized
QVQLQESGGGLVQAGGSLRLSCAASGYIFYRGPMGWYRQAPGKEREFVATIAVGGSTYYADSVKGRFTISRDNAKNTVYLQMNSLKPEDTAVYYCAAGNGGVFIHAYWGQGTQVTVSS

SEQ ID NO: 30841 - protein, 118 aa, Artificial Sequence
  Chemically Synthesized
QVQLQESGGGLVQAGGSLRLSCAASGNIFYKSYMGWYRQAPGKEREFVATIDRGSNTNYADSVKGRFTISRDNAKNTVYLQMNSLKPEDTAVYYCAVVSYYTRFHYYWGQGTQVTVSS

SEQ ID NO: 30842 - protein, 126 aa, Artificial Sequence
  Chemically Synthesized
QVQLQESGGGLVQAGGSLRLSCAASGNISSPRRMGWYRQAPGKEREFVAGIGTGGSTYYADSVKGRFTISRDNAKNTVYLQMNSLKPEDTAVYYCAVKNYYYTSDSSRHLYTYTYWGQGTQVTVSS

SEQ ID NO: 30843 - protein, 118 aa, Artificial Sequence
  Chemically Synthesized
QVQLQESGGGLVQAGGSLRLSCAASGNISGFRSMGWYRQAPGKEREFVAAIGDGSITNYADSVKGRFTISRDNAKNTVYLQMNSLKPEDTAVYYCAAVEYGYPYHYYWGQGTQVTVSS

SEQ ID NO: 30844 - protein, 110 aa, Artificial Sequence
  Chemically Synthesized
QVQLQESGGGLVQAGGSLRLSCAASGNIFYAGIMGWYRQAPGKERELVAGINYGSSTNYADSVKGRFTISRDNAKNTVYLQMNSLKPEDTAVYYCAYSYWGQGTQVTVSS

SEQ ID NO: 30845 - protein, 121 aa, Artificial Sequence
  Chemically Synthesized
QVQLQESGGGLVQAGGSLRLSCAASGNIFPDDYMGWYRQAPGKERELVAAIDNGSTTNYADSVKGRFTISRDNAKNTVYLQMNSLKPEDTAVYYCAAWYRYRTDVPVGLYWGQGTQVTVSS

SEQ ID NO: 30846 - protein, 121 aa, Artificial Sequence
  Chemically Synthesized
QVQLQESGGGLVQAGGSLRLSCAASGTISYRAMGWYRQAPGKEREFVATITYGGITYYADSVKGRFTISRDNAKNTVYLQMNSLKPEDTAVYYCAVDRSKDSGRYWPYWYWGQGTQVTVSS

SEQ ID NO: 30847 - protein, 122 aa, Artificial Sequence
  Chemically Synthesized
QVQLQESGGGLVQAGGSLRLSCAASGTIFWRRPMGWYRQAPGKERELVATINYGGTTNYADSVKGRFTISRDNAKNTVYLQMNSLKPEDTAVYYCAARKPYSYLYEWRHPYWGQGTQVTVSS

SEQ ID NO: 30848 - protein, 118 aa, Artificial Sequence
  Chemically Synthesized
QVQLQESGGGLVQAGGSLRLSCAASGSISSVGFMGWYRQAPGKEREFVAGIGYGGNTYYADSVKGRFTISRDNAKNTVYLQMNSLKPEDTAVYYCAAVHGALFTHGYWGQGTQVTVSS

SEQ ID NO: 30849 - protein, 121 aa, Artificial Sequence
  Chemically Synthesized
QVQLQESGGGLVQAGGSLRLSCAASGSISTESMGWYRQAPGKERELVASISGGTITNYADSVKGRFTISRDNAKNTVYLQMNSLKPEDTAVYYCAAVDTTGRLPILYHDYWGQGTQVTVSS

SEQ ID NO: 30850 - protein, 118 aa, Artificial Sequence
  Chemically Synthesized
QVQLQESGGGLVQAGGSLRLSCAASGSISRVYRMGWYRQAPGKEREFVAAISFGTNTNYADSVKGRFTISRDNAKNTVYLQMNSLKPEDTAVYYCAVVLYHYNWLYYWGQGTQVTVSS

SEQ ID NO: 30851 - protein, 122 aa, Artificial Sequence
  Chemically Synthesized
QVQLQESGGGLVQAGGSLRLSCAASGNIFYPGYMGWYRQAPGKEREFVAAIAYGGITNYADSVKGRFTISRDNAKNTVYLQMNSLKPEDTAVYYCAVYRYWRKHGTYVLRYWGQGTQVTVSS

SEQ ID NO: 30852 - protein, 118 aa, Artificial Sequence
  Chemically Synthesized
QVQLQESGGGLVQAGGSLRLSCAASGNISPWSYMGWYRQAPGKEREFVAAIGDGANTYYADSVKGRFTISRDNAKNTVYLQMNSLKPEDTAVYYCAVVIRDSTWLHYWGQGTQVTVSS

SEQ ID NO: 30853 - protein, 118 aa, Artificial Sequence
  Chemically Synthesized
QVQLQESGGGLVQAGGSLRLSCAASGSISVYVYMGWYRQAPGKEREFVATISYGTNTYYADSVKGRFTISRDNAKNTVYLQMNSLKPEDTAVYYCAVWARGSSTFGYWGQGTQVTVSS

SEQ ID NO: 30854 - protein, 121 aa, Artificial Sequence
  Chemically Synthesized
QVQLQESGGGLVQAGGSLRLSCAASGNISGELGMGWYRQAPGKERELVAAIAEVLLPYADSVKGRFTISRDNAKNTVYLQMNSLKPEDTAVYYCAAVGVGSDEDVGGLPYWGQGTQVTVSS

SEQ ID NO: 30855 - protein, 122 aa, Artificial Sequence
  Chemically Synthesized
QVQLQESGGGLVQAGGSLRLSCAASGTIFFARYMGWYRQAPGKEREFVAAISRGSSTNYADSVKGRFTISRDNAKNTVYLQMNSLKPEDTAVYYCAVKAASYYWQRGSHVYWGQGTQVTVSS

SEQ ID NO: 30856 - protein, 118 aa, Artificial Sequence
  Chemically Synthesized
QVQLQESGGGLVQAGGSLRLSCAASGYISAFSAMGWYRQAPGKERELVAGIGDGTTTNYADSVKGRFTISRDNAKNTVYLQMNSLKPEDTAVYYCAAVIRGSARLYYWGQGTQVTVSS

SEQ ID NO: 30857 - protein, 118 aa, Artificial Sequence
  Chemically Synthesized
QVQLQESGGGLVQAGGSLRLSCAASGNISANPIMGWYRQAPGKEREFVAAIDSGGITNYADSVKGRFTISRDNAKNTVYLQMNSLKPEDTAVYYCAVLSTNGGWLYYWGQGTQVTVSS

SEQ ID NO: 30858 - protein, 124 aa, Artificial Sequence
  Chemically Synthesized
QVQLQESGGGLVQAGGSLRLSCAASGYISSPKDMGWYRQAPGKERELVAGIGYGGNTYYADSVKGRFTISRDNAKNTVYLQMNSLKPEDTAVYYCAVLTRTWRPRQDAYKHWYWGQGTQVTVSS

SEQ ID NO: 30859 - protein, 127 aa, Artificial Sequence
  Chemically Synthesized
QVQLQESGGGLVQAGGSLRLSCAASGSISARLTMGWYRQAPGKEREFVAGISYDGGITNYADSVKGRFTISRDNAKNTVYLQMNSLKPEDTAVYYCAALLVDYGYAFELTGRSLIYWGQGTQVTVSS

SEQ ID NO: 30860 - protein, 118 aa, Artificial Sequence
  Chemically Synthesized
QVQLQESGGGLVQAGGSLRLSCAASGSISAIGSMGWYRQAPGKEREFVASINGGTITNYADSVKGRFTISRDNAKNTVYLQMNSLKPEDTAVYYCAAGWPDGSYHPYWGQGTQVTVSS

SEQ ID NO: 30861 - protein, 118 aa, Artificial Sequence
  Chemically Synthesized
QVQLQESGGGLVQAGGSLRLSCAASGSISRWYGMGWYRQAPGKEREFVASIAVGANTNYADSVKGRFTISRDNAKNTVYLQMNSLKPEDTAVYYCAVLIKGQYLLWYWGQGTQVTVSS

SEQ ID NO: 30862 - protein, 118 aa, Artificial Sequence
  Chemically Synthesized
QVQLQESGGGLVQAGGSLRLSCAASGNIFAGQFMGWYRQAPGKEREFVAGIAFGASTNYADSVKGRFTISRDNAKNTVYLQMNSLKPEDTAVYYCAALYHGKVYYYYWGQGTQVTVSS

SEQ ID NO: 30863 - protein, 126 aa, Artificial Sequence
  Chemically Synthesized
QVQLQESGGGLVQAGGSLRLSCAASGNIFGVGRMGWYRQAPGKEREFVASIGIGGSTYYADSVKGRFTISRDNAKNTVYLQMNSLKPEDTAVYYCAAVSYRQARSRPYDRGWHYYWGQGTQVTVSS

SEQ ID NO: 30864 - protein, 122 aa, Artificial Sequence
  Chemically Synthesized
QVQLQESGGGLVQAGGSLRLSCAASGTIFDDTFMGWYRQAPGKEREFVAGIGYGGTTNYADSVKGRFTISRDNAKNTVYLQMNSLKPEDTAVYYCAVTGLFDGDYTPLLPYWGQGTQVTVSS

SEQ ID NO: 30865 - protein, 121 aa, Artificial Sequence
  Chemically Synthesized
QVQLQESGGGLVQAGGSLRLSCAASGNIFTYSYMGWYRQAPGKEREFVASITRGATTNYADSVKGRFTISRDNAKNTVYLQMNSLKPEDTAVYYCAAYRYHYYQSRYRLYWGQGTQVTVSS

SEQ ID NO: 30866 - protein, 118 aa, Artificial Sequence
  Chemically Synthesized
QVQLQESGGGLVQAGGSLRLSCAASGYISRQQYMGWYRQAPGKEREFVAGIGRGGNTNYADSVKGRFTISRDNAKNTVYLQMNSLKPEDTAVYYCAVVYYVDRYLHYWGQGTQVTVSS

SEQ ID NO: 30867 - protein, 118 aa, Artificial Sequence
  Chemically Synthesized
QVQLQESGGGLVQAGGSLRLSCAASGYIFDYDVMGWYRQAPGKEREFVATITFGGITYYADSVKGRFTISRDNAKNTVYLQMNSLKPEDTAVYYCAVSYSGIELYSYWGQGTQVTVSS

SEQ ID NO: 30868 - protein, 126 aa, Artificial Sequence
  Chemically Synthesized
QVQLQESGGGLVQAGGSLRLSCAASGTIFQYSRMGWYRQAPGKERELVATISVGGITYYADSVKGRFTISRDNAKNTVYLQMNSLKPEDTAVYYCAVYDNVYYDAQQATDHPHEYWGQGTQVTVSS

SEQ ID NO: 30869 - protein, 118 aa, Artificial Sequence
  Chemically Synthesized
QVQLQESGGGLVQAGGSLRLSCAASGTISGRAYMGWYRQAPGKERELVASIGGGGTSTNYADSVKGRFTISRDNAKNTVYLQMNSLKPEDTAVYYCAAGKAYQDLDYWGQGTQVTVSS

SEQ ID NO: 30870 - protein, 118 aa, Artificial Sequence
  Chemically Synthesized
QVQLQESGGGLVQAGGSLRLSCAASGTIFSLKAMGWYRQAPGKERELVASINVGTITNYADSVKGRFTISRDNAKNTVYLQMNSLKPEDTAVYYCAAYLWYRVLLGYWGQGTQVTVSS

SEQ ID NO: 30871 - protein, 118 aa, Artificial Sequence
  Chemically Synthesized
QVQLQESGGGLVQAGGSLRLSCAASGSISYTVYMGWYRQAPGKERELVASINIGTTTYYADSVKGRFTISRDNAKNTVYLQMNSLKPEDTAVYYCAAIHYYEPGHWYWGQGTQVTVSS

SEQ ID NO: 30872 - protein, 122 aa, Artificial Sequence
  Chemically Synthesized
QVQLQESGGGLVQAGGSLRLSCAASGTISRTYYMGWYRQAPGKERELVATITTGGITYYADSVKGRFTISRDNAKNTVYLQMNSLKPEDTAVYYCAAIVDGSKTRGGYLAYWGQGTQVTVSS

SEQ ID NO: 30873 - protein, 116 aa, Artificial Sequence
  Chemically Synthesized
QVQLQESGGGLVQAGGSLRLSCAASGTISATEFMGWYRQAPGKERELVASIAGGSTTNYADSVKGRFTISRDNAKNTVYLQMNSLKPEDTAVYYCAVTPFSYHAYWGQGTQVTVSS

SEQ ID NO: 30874 - protein, 121 aa, Artificial Sequence
  Chemically Synthesized
QVQLQESGGGLVQAGGSLRLSCAASGYISDYDPMGWYRQAPGKERELVAGLVWVLIPYADSVKGRFTISRDNAKNTVYLQMNSLKPEDTAVYYCAVGTGLRSDPDYDHSYWGQGTQVTVSS

SEQ ID NO: 30875 - protein, 122 aa, Artificial Sequence
  Chemically Synthesized
QVQLQESGGGLVQAGGSLRLSCAASGYISPERNMGWYRQAPGKERELVAGINSGATTYYADSVKGRFTISRDNAKNTVYLQMNSLKPEDTAVYYCAAGVLSGYTSRASHAYWGQGTQVTVSS

SEQ ID NO: 30876 - protein, 122 aa, Artificial Sequence
  Chemically Synthesized
QVQLQESGGGLVQAGGSLRLSCAASGSISWYRRMGWYRQAPGKERELVATIGGGATTYYADSVKGRFTISRDNAKNTVYLQMNSLKPEDTAVYYCAVYVYVWYDWYLVLPYWGQGTQVTVSS

SEQ ID NO: 30877 - protein, 123 aa, Artificial Sequence
  Chemically Synthesized
QVQLQESGGGLVQAGGSLRLSCAASGNISGPSAMGWYRQAPGKEREFVAGIATGGTTNYADSVKGRFTISRDNAKNTVYLQMNSLKPEDTAVYYCAVVYPQYDHQDYRFHYYWGQGTQVTVSS

SEQ ID NO: 30878 - protein, 117 aa, Artificial Sequence
  Chemically Synthesized
QVQLQESGGGLVQAGGSLRLSCAASGNISYRYMGWYRQAPGKEREFVATISYGTSTYYADSVKGRFTISRDNAKNTVYLQMNSLKPEDTAVYYCAAIYHRHTWHYYWGQGTQVTVSS

SEQ ID NO: 30879 - protein, 118 aa, Artificial Sequence
  Chemically Synthesized
QVQLQESGGGLVQAGGSLRLSCAASGTIFYPGRMGWYRQAPGKERELVATISYGGITNYADSVKGRFTISRDNAKNTVYLQMNSLKPEDTAVYYCAAHLLEYSFLSYWGQGTQVTVSS

SEQ ID NO: 30880 - protein, 122 aa, Artificial Sequence
  Chemically Synthesized
QVQLQESGGGLVQAGGSLRLSCAASGYIFPTFRMGWYRQAPGKERELVATIGGGSNTYYADSVKGRFTISRDNAKNTVYLQMNSLKPEDTAVYYCAAIDHYDRRAIIGHQYWGQGTQVTVSS

SEQ ID NO: 30881 - protein, 118 aa, Artificial Sequence
  Chemically Synthesized
QVQLQESGGGLVQAGGSLRLSCAASGTIFIRSYMGWYRQAPGKEREFVAAISYGATTNYADSVKGRFTISRDNAKNTVYLQMNSLKPEDTAVYYCAVVNYASTWHWYWGQGTQVTVSS

SEQ ID NO: 30882 - protein, 118 aa, Artificial Sequence
  Chemically Synthesized
QVQLQESGGGLVQAGGSLRLSCAASGNISTLDTMGWYRQAPGKEREFVAAINAGASTNYADSVKGRFTISRDNAKNTVYLQMNSLKPEDTAVYYCAAIAWDLGWHYYWGQGTQVTVSS

SEQ ID NO: 30883 - protein, 118 aa, Artificial Sequence
  Chemically Synthesized
QVQLQESGGGLVQAGGSLRLSCAASGYIFRRTWMGWYRQAPGKERELVASISYGGNTYYADSVKGRFTISRDNAKNTVYLQMNSLKPEDTAVYYCAAGWYYTRALDYWGQGTQVTVSS

SEQ ID NO: 30884 - protein, 118 aa, Artificial Sequence
  Chemically Synthesized
QVQLQESGGGLVQAGGSLRLSCAASGNIFGLGVMGWYRQAPGKERELVASINAGGNTYYADSVKGRFTISRDNAKNTVYLQMNSLKPEDTAVYYCAVTYDRYYDHSYWGQGTQVTVSS

SEQ ID NO: 30885 - protein, 122 aa, Artificial Sequence
  Chemically Synthesized
QVQLQESGGGLVQAGGSLRLSCAASGNISYQVFMGWYRQAPGKEREFVAAIDPGGTTYYADSVKGRFTISRDNAKNTVYLQMNSLKPEDTAVYYCAAEPYGVEYADKTHGYWGQGTQVTVSS

SEQ ID NO: 30886 - protein, 126 aa, Artificial Sequence
  Chemically Synthesized
QVQLQESGGGLVQAGGSLRLSCAASGNISSAPLMGWYRQAPGKERELVAAITPGSSTYYADSVKGRFTISRDNAKNTVYLQMNSLKPEDTAVYYCAVLYNSYFGYDFFDVPPYLYWGQGTQVTVSS

SEQ ID NO: 30887 - protein, 121 aa, Artificial Sequence
  Chemically Synthesized
QVQLQESGGGLVQAGGSLRLSCAASGNISRDDRMGWYRQAPGKERELVASIDHGGTTYYADSVKGRFTISRDNAKNTVYLQMNSLKPEDTAVYYCAAYVGEYAVLTKTMYWGQGTQVTVSS

SEQ ID NO: 30888 - protein, 117 aa, Artificial Sequence
  Chemically Synthesized
QVQLQESGGGLVQAGGSLRLSCAASGSISSHRMGWYRQAPGKERELVASIDPGANTYYADSVKGRFTISRDNAKNTVYLQMNSLKPEDTAVYYCAARRSIGSPYRYWGQGTQVTVSS

SEQ ID NO: 30889 - protein, 122 aa, Artificial Sequence
  Chemically Synthesized
QVQLQESGGGLVQAGGSLRLSCAASGTISRRVSMGWYRQAPGKEREFVAGIATGGNTNYADSVKGRFTISRDNAKNTVYLQMNSLKPEDTAVYYCAALVADIDAYAYYHHYWGQGTQVTVSS

SEQ ID NO: 30890 - protein, 118 aa, Artificial Sequence
  Chemically Synthesized
QVQLQESGGGLVQAGGSLRLSCAASGTIFWSRRMGWYRQAPGKERELVAAIGYGTTTYYADSVKGRFTISRDNAKNTVYLQMNSLKPEDTAVYYCAVYYPHGRAFAYWGQGTQVTVSS

SEQ ID NO: 30891 - protein, 118 aa, Artificial Sequence
  Chemically Synthesized
QVQLQESGGGLVQAGGSLRLSCAASGSIFRRKVMGWYRQAPGKEREFVAAITGGTNTNYADSVKGRFTISRDNAKNTVYLQMNSLKPEDTAVYYCAAITYTSPFYYYWGQGTQVTVSS

SEQ ID NO: 30892 - protein, 117 aa, Artificial Sequence
  Chemically Synthesized
QVQLQESGGGLVQAGGSLRLSCAASGTISVRTRMGWYRQAPGKEREFVATITSGTTTYYADSVKGRFTISRDNAKNTVYLQMNSLKPEDTAVYYCAAASNWYSRYYWGQGTQVTVSS

SEQ ID NO: 30893 - protein, 125 aa, Artificial Sequence
  Chemically Synthesized
QVQLQESGGGLVQAGGSLRLSCAASGTISILYAMGWYRQAPGKEREFVASITYGGITNYADSVKGRFTISRDNAKNTVYLQMNSLKPEDTAVYYCAVVGYTPGQDPGRIRVYYYWGQGTQVTVSS

SEQ ID NO: 30894 - protein, 126 aa, Artificial Sequence
  Chemically Synthesized
QVQLQESGGGLVQAGGSLRLSCAASGTIFHYTKMGWYRQAPGKEREFVAAIAQGGTTNYADSVKGRFTISRDNAKNTVYLQMNSLKPEDTAVYYCAALAWTPRGAREGVYERHAYWGQGTQVTVSS

SEQ ID NO: 30895 - protein, 122 aa, Artificial Sequence
  Chemically Synthesized
QVQLQESGGGLVQAGGSLRLSCAASGNISDLGNMGWYRQAPGKEREFVAGISPGAITNYADSVKGRFTISRDNAKNTVYLQMNSLKPEDTAVYYCAAINYSSRLSGGRHSYWGQGTQVTVSS

SEQ ID NO: 30896 - protein, 121 aa, Artificial Sequence
  Chemically Synthesized
QVQLQESGGGLVQAGGSLRLSCAASGNISDEDVMGWYRQAPGKERELLPLLVWVVVPYADSVKGRFTISRDNAKNTVYLQMNSLKPEDTAVYYCAVVYDDDNRYATDHVYWGQGTQVTVSS

SEQ ID NO: 30897 - protein, 122 aa, Artificial Sequence
  Chemically Synthesized
QVQLQESGGGLVQAGGSLRLSCAASGSISLYTSMGWYRQAPGKEREFVAGIASGSTTYYADSVKGRFTISRDNAKNTVYLQMNSLKPEDTAVYYCAVDRAHDRQIGGLLVYWGQGTQVTVSS

SEQ ID NO: 30898 - protein, 121 aa, Artificial Sequence
  Chemically Synthesized
QVQLQESGGGLVQAGGSLRLSCAASGTISFYYSMGWYRQAPGKEREFVAAIAPVVLPYADSVKGRFTISRDNAKNTVYLQMNSLKPEDTAVYYCAALAYPTVESTAYHEYWGQGTQVTVSS

SEQ ID NO: 30899 - protein, 118 aa, Artificial Sequence
  Chemically Synthesized
QVQLQESGGGLVQAGGSLRLSCAASGYIFGYFYMGWYRQAPGKEREFVAAISRGGSTNYADSVKGRFTISRDNAKNTVYLQMNSLKPEDTAVYYCAAVDGRGGHFYYWGQGTQVTVSS

SEQ ID NO: 30900 - protein, 118 aa, Artificial Sequence
  Chemically Synthesized
QVQLQESGGGLVQAGGSLRLSCAASGTISEAVAMGWYRQAPGKERELVATITGGAITYYADSVKGRFTISRDNAKNTVYLQMNSLKPEDTAVYYCAAADTHWYIYDYWGQGTQVTVSS

SEQ ID NO: 30901 - protein, 118 aa, Artificial Sequence
  Chemically Synthesized
QVQLQESGGGLVQAGGSLRLSCAASGNIFEGLIMGWYRQAPGKEREFVAAINPGGNTNYADSVKGRFTISRDNAKNTVYLQMNSLKPEDTAVYYCAVTWRGIYRFYYWGQGTQVTVSS

SEQ ID NO: 30902 - protein, 126 aa, Artificial Sequence
  Chemically Synthesized
QVQLQESGGGLVQAGGSLRLSCAASGSISRPHVMGWYRQAPGKERELVAGITVGSTTNYADSVKGRFTISRDNAKNTVYLQMNSLKPEDTAVYYCAVGYLASPNLTGSADPRFTYWGQGTQVTVSS

SEQ ID NO: 30903 - protein, 118 aa, Artificial Sequence
  Chemically Synthesized
QVQLQESGGGLVQAGGSLRLSCAASGNISQYNGMGWYRQAPGKEREFVASITVGGITNYADSVKGRFTISRDNAKNTVYLQMNSLKPEDTAVYYCAAIRYYRVYLAYWGQGTQVTVSS

SEQ ID NO: 30904 - protein, 122 aa, Artificial Sequence
  Chemically Synthesized
QVQLQESGGGLVQAGGSLRLSCAASGTISAIRTMGWYRQAPGKEREFVAGIDYGSTTNYADSVKGRFTISRDNAKNTVYLQMNSLKPEDTAVYYCAVVVTSYTFYTAYHGYWGQGTQVTVSS

SEQ ID NO: 30905 - protein, 118 aa, Artificial Sequence
  Chemically Synthesized
QVQLQESGGGLVQAGGSLRLSCAASGSIFYSLYMGWYRQAPGKEREFVAAIAPGASTNYADSVKGRFTISRDNAKNTVYLQMNSLKPEDTAVYYCAAVKEHNGLHYYWGQGTQVTVSS

SEQ ID NO: 30906 - protein, 122 aa, Artificial Sequence
  Chemically Synthesized
QVQLQESGGGLVQAGGSLRLSCAASGNISPYYYMGWYRQAPGKERELVAAINWGSSTYYADSVKGRFTISRDNAKNTVYLQMNSLKPEDTAVYYCAVNRFYNTYKFWRHAYWGQGTQVTVSS

SEQ ID NO: 30907 - protein, 118 aa, Artificial Sequence
  Chemically Synthesized
QVQLQESGGGLVQAGGSLRLSCAASGTISNYSYMGWYRQAPGKEREFVASIATGGTTNYADSVKGRFTISRDNAKNTVYLQMNSLKPEDTAVYYCAAIHYVSAWLAYWGQGTQVTVSS

SEQ ID NO: 30908 - protein, 118 aa, Artificial Sequence
  Chemically Synthesized
QVQLQESGGGLVQAGGSLRLSCAASGYISGDPIMGWYRQAPGKEREFVAGITGGATTNYADSVKGRFTISRDNAKNTVYLQMNSLKPEDTAVYYCAAVLYATGVHGYWGQGTQVTVSS

SEQ ID NO: 30909 - protein, 119 aa, Artificial Sequence
  Chemically Synthesized
QVQLQESGGGLVQAGGSLRLSCAASGTISLLYNMGWYRQAPGKERELVAGIDSGGSTTNYADSVKGRFTISRDNAKNTVYLQMNSLKPEDTAVYYCAVVYYDLRYYHYWGQGTQVTVSS

SEQ ID NO: 30910 - protein, 122 aa, Artificial Sequence
  Chemically Synthesized
QVQLQESGGGLVQAGGSLRLSCAASGYISVDLLMGWYRQAPGKEREFVAGIAGGGNTNYADSVKGRFTISRDNAKNTVYLQMNSLKPEDTAVYYCAAISYAKKPNATYHYYWGQGTQVTVSS

SEQ ID NO: 30911 - protein, 118 aa, Artificial Sequence
  Chemically Synthesized
QVQLQESGGGLVQAGGSLRLSCAASGTISDTSRMGWYRQAPGKEREFVAGIDYGGTTNYADSVKGRFTISRDNAKNTVYLQMNSLKPEDTAVYYCAAIGFARVYLVYWGQGTQVTVSS

SEQ ID NO: 30912 - protein, 118 aa, Artificial Sequence
  Chemically Synthesized
QVQLQESGGGLVQAGGSLRLSCAASGTISYIYLMGWYRQAPGKEREFVAAINPGGSTNYADSVKGRFTISRDNAKNTVYLQMNSLKPEDTAVYYCAALSPYDNYHYYWGQGTQVTVSS

SEQ ID NO: 30913 - protein, 118 aa, Artificial Sequence
  Chemically Synthesized
QVQLQESGGGLVQAGGSLRLSCAASGSISDPYYMGWYRQAPGKEREFVAGINYGSNTNYADSVKGRFTISRDNAKNTVYLQMNSLKPEDTAVYYCAVITARQGYLYYWGQGTQVTVSS

SEQ ID NO: 30914 - protein, 127 aa, Artificial Sequence
  Chemically Synthesized
QVQLQESGGGLVQAGGSLRLSCAASGNIFGRGIMGWYRQAPGKERELVAAINEGTTTYYADSVKGRFTISRDNAKNTVYLQMNSLKPEDTAVYYCAAYPDVYVGDGSDSGRYNHNYWGQGTQVTVSS

SEQ ID NO: 30915 - protein, 118 aa, Artificial Sequence
  Chemically Synthesized
QVQLQESGGGLVQAGGSLRLSCAASGNIFVTVRMGWYRQAPGKEREFVAAIARGSSTYYADSVKGRFTISRDNAKNTVYLQMNSLKPEDTAVYYCAVPFYRRGWHLYWGQGTQVTVSS

SEQ ID NO: 30916 - protein, 118 aa, Artificial Sequence
  Chemically Synthesized
QVQLQESGGGLVQAGGSLRLSCAASGNIFARIGMGWYRQAPGKERELVATIGSGGTTYYADSVKGRFTISRDNAKNTVYLQMNSLKPEDTAVYYCAAWYIIIAVYPYWGQGTQVTVSS

SEQ ID NO: 30917 - protein, 122 aa, Artificial Sequence
  Chemically Synthesized
QVQLQESGGGLVQAGGSLRLSCAASGYISGAAGMGWYRQAPGKERELVASITGGGTTYYADSVKGRFTISRDNAKNTVYLQMNSLKPEDTAVYYCAVAEPENKRYRTNHWYWGQGTQVTVSS

SEQ ID NO: 30918 - protein, 121 aa, Artificial Sequence
  Chemically Synthesized
QVQLQESGGGLVQAGGSLRLSCAASGTISAILSMGWYRQAPGKEREFVAAITAGSTNYADSVKGRFTISRDNAKNTVYLQMNSLKPEDTAVYYCAAIGRDDVYIPFYHGYWGQGTQVTVSS

SEQ ID NO: 30919 - protein, 118 aa, Artificial Sequence
  Chemically Synthesized
QVQLQESGGGLVQAGGSLRLSCAASGSISLYAVMGWYRQAPGKEREFVATIAQGSTTNYADSVKGRFTISRDNAKNTVYLQMNSLKPEDTAVYYCAVTDPVRRNYGYWGQGTQVTVSS

SEQ ID NO: 30920 - protein, 118 aa, Artificial Sequence
  Chemically Synthesized
QVQLQESGGGLVQAGGSLRLSCAASGTIFDRQFMGWYRQAPGKERELVAGISDGTNTNYADSVKGRFTISRDNAKNTVYLQMNSLKPEDTAVYYCAVLGYATTWHYYWGQGTQVTVSS

SEQ ID NO: 30921 - protein, 118 aa, Artificial Sequence
  Chemically Synthesized
QVQLQESGGGLVQAGGSLRLSCAASGNIFWKWYMGWYRQAPGKEREFVAAIGNGTSTNYADSVKGRFTISRDNAKNTVYLQMNSLKPEDTAVYYCAVVTWSDVYHHYWGQGTQVTVSS

SEQ ID NO: 30922 - protein, 118 aa, Artificial Sequence
  Chemically Synthesized
QVQLQESGGGLVQAGGSLRLSCAASGNIFNYWTMGWYRQAPGKEREFVAAIGTGGITNYADSVKGRFTISRDNAKNTVYLQMNSLKPEDTAVYYCAAAWADEGYHYYWGQGTQVTVSS

SEQ ID NO: 30923 - protein, 126 aa, Artificial Sequence
  Chemically Synthesized
QVQLQESGGGLVQAGGSLRLSCAASGYIFHVKGMGWYRQAPGKEREFVASIATGSITNYADSVKGRFTISRDNAKNTVYLQMNSLKPEDTAVYYCAAILWYERYGPRYTGRWLYYWGQGTQVTVSS

SEQ ID NO: 30924 - protein, 118 aa, Artificial Sequence
  Chemically Synthesized
QVQLQESGGGLVQAGGSLRLSCAASGSISDPRVMGWYRQAPGKEREFVAGIGFGANTNYADSVKGRFTISRDNAKNTVYLQMNSLKPEDTAVYYCAAIVLLGPHHYYWGQGTQVTVSS

SEQ ID NO: 30925 - protein, 118 aa, Artificial Sequence
  Chemically Synthesized
QVQLQESGGGLVQAGGSLRLSCAASGYISVVRAMGWYRQAPGKEREFVAAIGTGSTTYYADSVKGRFTISRDNAKNTVYLQMNSLKPEDTAVYYCAASGTRYRYYYYWGQGTQVTVSS

SEQ ID NO: 30926 - protein, 122 aa, Artificial Sequence
  Chemically Synthesized
QVQLQESGGGLVQAGGSLRLSCAASGYIFPNAIMGWYRQAPGKEREFVAGIGAGATTNYADSVKGRFTISRDNAKNTVYLQMNSLKPEDTAVYYCAAVDRGRYAYQAYLYYWGQGTQVTVSS

SEQ ID NO: 30927 - protein, 118 aa, Artificial Sequence
  Chemically Synthesized
QVQLQESGGGLVQAGGSLRLSCAASGYISVNSNMGWYRQAPGKERELVASIDSGGTTNYADSVKGRFTISRDNAKNTVYLQMNSLKPEDTAVYYCAVVTYRRHWYYYWGQGTQVTVSS

SEQ ID NO: 30928 - protein, 118 aa, Artificial Sequence
  Chemically Synthesized
QVQLQESGGGLVQAGGSLRLSCAASGTIFAGSTMGWYRQAPGKEREFVAAIAFGGSTNYADSVKGRFTISRDNAKNTVYLQMNSLKPEDTAVYYCAVLKFDKIYHYYWGQGTQVTVSS

SEQ ID NO: 30929 - protein, 126 aa, Artificial Sequence
  Chemically Synthesized
QVQLQESGGGLVQAGGSLRLSCAASGYIFRPYAMGWYRQAPGKEREFVASINPGGNTNYADSVKGRFTISRDNAKNTVYLQMNSLKPEDTAVYYCAAALSYVQDFVRPHFDRLSYWGQGTQVTVSS

SEQ ID NO: 30930 - protein, 122 aa, Artificial Sequence
  Chemically Synthesized
QVQLQESGGGLVQAGGSLRLSCAASGSISLSFNMGWYRQAPGKEREFVASIGRGGSTNYADSVKGRFTISRDNAKNTVYLQMNSLKPEDTAVYYCAAIVQYLQYATAYHYYWGQGTQVTVSS

SEQ ID NO: 30931 - protein, 119 aa, Artificial Sequence
  Chemically Synthesized
QVQLQESGGGLVQAGGSLRLSCAASGTISYYHFMGWYRQAPGKERELVAGITAGTITYYADSVKGRFTISRDNAKNTVYLQMNSLKPEDTAVYYCAVRYYRILPWHRYWGQGTQVTVSS

SEQ ID NO: 30932 - protein, 122 aa, Artificial Sequence
  Chemically Synthesized
QVQLQESGGGLVQAGGSLRLSCAASGTIFAWYYMGWYRQAPGKERELVAGINQGTTTYYADSVKGRFTISRDNAKNTVYLQMNSLKPEDTAVYYCAVRPEYYDVDWTDYSYWGQGTQVTVSS

SEQ ID NO: 30933 - protein, 119 aa, Artificial Sequence
  Chemically Synthesized
QVQLQESGGGLVQAGGSLRLSCAASGSIFQGDYMGWYRQAPGKEREFVAAISVGGNTNYADSVKGRFTISRDNAKNTVYLQMNSLKPEDTAVYYCAAAGYYGGAWHGYWGQGTQVTVSS

SEQ ID NO: 30934 - protein, 121 aa, Artificial Sequence
  Chemically Synthesized
QVQLQESGGGLVQAGGSLRLSCAASGNIFTLAYMGWYRQAPGKEREFVAGIDTGANTNYADSVKGRFTISRDNAKNTVYLQMNSLKPEDTAVYYCAVLYKDYYSSVYHYYWGQGTQVTVSS

SEQ ID NO: 30935 - protein, 118 aa, Artificial Sequence
  Chemically Synthesized
QVQLQESGGGLVQAGGSLRLSCAASGYIFLWQDMGWYRQAPGKERELVAGIAGGTNTNYADSVKGRFTISRDNAKNTVYLQMNSLKPEDTAVYYCAVHPFYRVAYGYWGQGTQVTVSS

SEQ ID NO: 30936 - protein, 126 aa, Artificial Sequence
  Chemically Synthesized
QVQLQESGGGLVQAGGSLRLSCAASGTISDGDDMGWYRQAPGKERELVASIGSGTITNYADSVKGRFTISRDNAKNTVYLQMNSLKPEDTAVYYCAVDYYQLYTPLAYPPYGYDYWGQGTQVTVSS

SEQ ID NO: 30937 - protein, 118 aa, Artificial Sequence
  Chemically Synthesized
QVQLQESGGGLVQAGGSLRLSCAASGTIFANVSMGWYRQAPGKEREFVAAIDYGATTNYADSVKGRFTISRDNAKNTVYLQMNSLKPEDTAVYYCAAVAYHGTWHDYWGQGTQVTVSS

SEQ ID NO: 30938 - protein, 118 aa, Artificial Sequence
  Chemically Synthesized
QVQLQESGGGLVQAGGSLRLSCAASGSISRGYSMGWYRQAPGKEREFVAAIARGGSTNYADSVKGRFTISRDNAKNTVYLQMNSLKPEDTAVYYCAVVLYSDGYHYYWGQGTQVTVSS

SEQ ID NO: 30939 - protein, 122 aa, Artificial Sequence
  Chemically Synthesized
QVQLQESGGGLVQAGGSLRLSCAASGTIFRLRGMGWYRQAPGKEREFVAAISPGGTTYYADSVKGRFTISRDNAKNTVYLQMNSLKPEDTAVYYCAVPDAKGYTRTYTFIYWGQGTQVTVSS

SEQ ID NO: 30940 - protein, 122 aa, Artificial Sequence
  Chemically Synthesized
QVQLQESGGGLVQAGGSLRLSCAASGYIFGQITMGWYRQAPGKEREFVAGITGGAITNYADSVKGRFTISRDNAKNTVYLQMNSLKPEDTAVYYCAAVARSRSGPYKFHHYWGQGTQVTVSS

SEQ ID NO: 30941 - protein, 122 aa, Artificial Sequence
  Chemically Synthesized
QVQLQESGGGLVQAGGSLRLSCAASGSISRTRNMGWYRQAPGKEREFVAGITGGGSTYYADSVKGRFTISRDNAKNTVYLQMNSLKPEDTAVYYCAVYWRGRYRYPRLYYYWGQGTQVTVSS

SEQ ID NO: 30942 - protein, 118 aa, Artificial Sequence
  Chemically Synthesized
QVQLQESGGGLVQAGGSLRLSCAASGNISYYDEMGWYRQAPGKERELVASISAGGNTNYADSVKGRFTISRDNAKNTVYLQMNSLKPEDTAVYYCAVDKYRGYYHYYWGQGTQVTVSS

SEQ ID NO: 30943 - protein, 118 aa, Artificial Sequence
  Chemically Synthesized
QVQLQESGGGLVQAGGSLRLSCAASGTIFYDLVMGWYRQAPGKEREFVATINYGANTNYADSVKGRFTISRDNAKNTVYLQMNSLKPEDTAVYYCAVIWRQADYFSYWGQGTQVTVSS

SEQ ID NO: 30944 - protein, 122 aa, Artificial Sequence
  Chemically Synthesized
QVQLQESGGGLVQAGGSLRLSCAASGNISDGWQMGWYRQAPGKEREFVAAIDVGGITYYADSVKGRFTISRDNAKNTVYLQMNSLKPEDTAVYYCAASVYLWPYASQSHSYWGQGTQVTVSS

SEQ ID NO: 30945 - protein, 118 aa, Artificial Sequence
  Chemically Synthesized
QVQLQESGGGLVQAGGSLRLSCAASGTISSGGAMGWYRQAPGKEREFVATIGTGTSTNYADSVKGRFTISRDNAKNTVYLQMNSLKPEDTAVYYCAAIVYDVYYHWYWGQGTQVTVSS

SEQ ID NO: 30946 - protein, 122 aa, Artificial Sequence
  Chemically Synthesized
QVQLQESGGGLVQAGGSLRLSCAASGNIFQQWWMGWYRQAPGKEREFVAGINHGASTNYADSVKGRFTISRDNAKNTVYLQMNSLKPEDTAVYYCAVLVKVLAGNPTYYSYWGQGTQVTVSS

SEQ ID NO: 30947 - protein, 121 aa, Artificial Sequence
  Chemically Synthesized
QVQLQESGGGLVQAGGSLRLSCAASGTIFDPEAMGWYRQAPGKEREFVATIARGTTNYADSVKGRFTISRDNAKNTVYLQMNSLKPEDTAVYYCAAVVLSRFRHSGILFYWGQGTQVTVSS

SEQ ID NO: 30948 - protein, 118 aa, Artificial Sequence
  Chemically Synthesized
QVQLQESGGGLVQAGGSLRLSCAASGNIFTWQYMGWYRQAPGKERELVAGISAGGSTYYADSVKGRFTISRDNAKNTVYLQMNSLKPEDTAVYYCAVLTAYRHYHWYWGQGTQVTVSS

SEQ ID NO: 30949 - protein, 117 aa, Artificial Sequence
  Chemically Synthesized
QVQLQESGGGLVQAGGSLRLSCAASGNISDVWMGWYRQAPGKERELVAGIGAGASTNYADSVKGRFTISRDNAKNTVYLQMNSLKPEDTAVYYCAAPRTSGKPFFYWGQGTQVTVSS

SEQ ID NO: 30950 - protein, 122 aa, Artificial Sequence
  Chemically Synthesized
QVQLQESGGGLVQAGGSLRLSCAASGSIFARRSMGWYRQAPGKEREFVASISRGTNTYYADSVKGRFTISRDNAKNTVYLQMNSLKPEDTAVYYCAVGGLAYQHPLRRHWYWGQGTQVTVSS

SEQ ID NO: 30951 - protein, 122 aa, Artificial Sequence
  Chemically Synthesized
QVQLQESGGGLVQAGGSLRLSCAASGTISGQLNMGWYRQAPGKEREFVAAITTGGSTNYADSVKGRFTISRDNAKNTVYLQMNSLKPEDTAVYYCAAIGLAAYTKRGWLSYWGQGTQVTVSS

SEQ ID NO: 30952 - protein, 122 aa, Artificial Sequence
  Chemically Synthesized
QVQLQESGGGLVQAGGSLRLSCAASGTISPLSLMGWYRQAPGKERELVAGIGPGTNTNYADSVKGRFTISRDNAKNTVYLQMNSLKPEDTAVYYCAAVVIRAHASPRYFWYWGQGTQVTVSS

SEQ ID NO: 30953 - protein, 122 aa, Artificial Sequence
  Chemically Synthesized
QVQLQESGGGLVQAGGSLRLSCAASGTISQSYVMGWYRQAPGKEREFVAGIAPGTSTNYADSVKGRFTISRDNAKNTVYLQMNSLKPEDTAVYYCAAVYAGIGRYYRFHYYWGQGTQVTVSS

SEQ ID NO: 30954 - protein, 126 aa, Artificial Sequence
  Chemically Synthesized
QVQLQESGGGLVQAGGSLRLSCAASGYISRRYRMGWYRQAPGKEREFVAGIGGGTTNYADSVKGRFTISRDNAKNTVYLQMNSLKPEDTAVYYCAAVRYAVTIHTRPSTYGLDYYWGQGTQVTVSS

SEQ ID NO: 30955 - protein, 118 aa, Artificial Sequence
  Chemically Synthesized
QVQLQESGGGLVQAGGSLRLSCAASGTIFYFVGMGWYRQAPGKEREFVASIGSGANTYYADSVKGRFTISRDNAKNTVYLQMNSLKPEDTAVYYCAAYYRRVGYHGYWGQGTQVTVSS

SEQ ID NO: 30956 - protein, 122 aa, Artificial Sequence
  Chemically Synthesized
QVQLQESGGGLVQAGGSLRLSCAASGSISGVADMGWYRQAPGKEREFVAAISSGSTTNYADSVKGRFTISRDNAKNTVYLQMNSLKPEDTAVYYCAALIVRRFGTPSYFYYWGQGTQVTVSS

SEQ ID NO: 30957 - protein, 118 aa, Artificial Sequence
  Chemically Synthesized
QVQLQESGGGLVQAGGSLRLSCAASGYISSRIHMGWYRQAPGKEREFVASISDGASTNYADSVKGRFTISRDNAKNTVYLQMNSLKPEDTAVYYCAAAVFRVRWYYYWGQGTQVTVSS

SEQ ID NO: 30958 - protein, 121 aa, Artificial Sequence
  Chemically Synthesized
QVQLQESGGGLVQAGGSLRLSCAASGTISDTYHMGWYRQAPGKERELVATITLGTTTYYADSVKGRFTISRDNAKNTVYLQMNSLKPEDTAVYYCAVNDSVFLVLNSNIYWGQGTQVTVSS

SEQ ID NO: 30959 - protein, 118 aa, Artificial Sequence
  Chemically Synthesized
QVQLQESGGGLVQAGGSLRLSCAASGNIFIATRMGWYRQAPGKEREFVAAINTGATTYYADSVKGRFTISRDNAKNTVYLQMNSLKPEDTAVYYCAAVHYDYEYHGYWGQGTQVTVSS

SEQ ID NO: 30960 - protein, 122 aa, Artificial Sequence
  Chemically Synthesized
QVQLQESGGGLVQAGGSLRLSCAASGTIFYLSGMGWYRQAPGKEREFVAGIDRGANTNYADSVKGRFTISRDNAKNTVYLQMNSLKPEDTAVYYCAALLSVVRYDRSYHGYWGQGTQVTVSS

SEQ ID NO: 30961 - protein, 122 aa, Artificial Sequence
  Chemically Synthesized
QVQLQESGGGLVQAGGSLRLSCAASGTIFRRPNMGWYRQAPGKERELVAGINRGSSTYYADSVKGRFTISRDNAKNTVYLQMNSLKPEDTAVYYCAAARYVYVDSYLWHPYWGQGTQVTVSS

SEQ ID NO: 30962 - protein, 118 aa, Artificial Sequence
  Chemically Synthesized
QVQLQESGGGLVQAGGSLRLSCAASGTIFSRSTMGWYRQAPGKEREFVAAISDGSNTNYADSVKGRFTISRDNAKNTVYLQMNSLKPEDTAVYYCAALSRTRTLHFYWGQGTQVTVSS

SEQ ID NO: 30963 - protein, 122 aa, Artificial Sequence
  Chemically Synthesized
QVQLQESGGGLVQAGGSLRLSCAASGTIFFYYTMGWYRQAPGKERELVATISFGSNTYYADSVKGRFTISRDNAKNTVYLQMNSLKPEDTAVYYCAARPVYTQTLYYGHDYWGQGTQVTVSS

SEQ ID NO: 30964 - protein, 122 aa, Artificial Sequence
  Chemically Synthesized
QVQLQESGGGLVQAGGSLRLSCAASGNISGRGRMGWYRQAPGKEREFVAGITLGGSTNYADSVKGRFTISRDNAKNTVYLQMNSLKPEDTAVYYCAVVYTGVSDRGAYFYYWGQGTQVTVSS

SEQ ID NO: 30965 - protein, 122 aa, Artificial Sequence
  Chemically Synthesized
QVQLQESGGGLVQAGGSLRLSCAASGYIFGPASMGWYRQAPGKEREFVAAIDAGTTTNYADSVKGRFTISRDNAKNTVYLQMNSLKPEDTAVYYCAALSGTVTGTRRYHYYWGQGTQVTVSS

SEQ ID NO: 30966 - protein, 118 aa, Artificial Sequence
  Chemically Synthesized
QVQLQESGGGLVQAGGSLRLSCAASGSISGVADMGWYRQAPGKEREFVATISVGSSTNYADSVKGRFTISRDNAKNTVYLQMNSLKPEDTAVYYCAALFYDFQWHYYWGQGTQVTVSS

SEQ ID NO: 30967 - protein, 118 aa, Artificial Sequence
  Chemically Synthesized
QVQLQESGGGLVQAGGSLRLSCAASGTIFDRAYMGWYRQAPGKEREFVAAIGFGANTNYADSVKGRFTISRDNAKNTVYLQMNSLKPEDTAVYYCAAVTGISGYHGYWGQGTQVTVSS

SEQ ID NO: 30968 - protein, 121 aa, Artificial Sequence
  Chemically Synthesized
QVQLQESGGGLVQAGGSLRLSCAASGTISYDGSMGWYRQAPGKERELVATIAAGTNTYYADSVKGRFTISRDNAKNTVYLQMNSLKPEDTAVYYCAAYGDAPSDILSHDYWGQGTQVTVSS

SEQ ID NO: 30969 - protein, 118 aa, Artificial Sequence
  Chemically Synthesized
QVQLQESGGGLVQAGGSLRLSCAASGNIFGRRGMGWYRQAPGKEREFVATIASGTTTNYADSVKGRFTISRDNAKNTVYLQMNSLKPEDTAVYYCAALYYNAQWHYYWGQGTQVTVSS

SEQ ID NO: 30970 - protein, 118 aa, Artificial Sequence
  Chemically Synthesized
QVQLQESGGGLVQAGGSLRLSCAASGNIFLYSQMGWYRQAPGKERELVAAINSGSTTNYADSVKGRFTISRDNAKNTVYLQMNSLKPEDTAVYYCAAVSTPYPHHYYWGQGTQVTVSS

SEQ ID NO: 30971 - protein, 124 aa, Artificial Sequence
  Chemically Synthesized
QVQLQESGGGLVQAGGSLRLSCAASGSISDLIAMGWYRQAPGKEREFVATINYGGSTNYADSVKGRFTISRDNAKNTVYLQMNSLKPEDTAVYYCAVVAGGYHQDRTYSRHGYWGQGTQVTVSS

SEQ ID NO: 30972 - protein, 126 aa, Artificial Sequence
  Chemically Synthesized
QVQLQESGGGLVQAGGSLRLSCAASGTIFYIPTMGWYRQAPGKEREFVAGIAFGSTTNYADSVKGRFTISRDNAKNTVYLQMNSLKPEDTAVYYCAAGRGYYGDSDRRYRDAHRYWGQGTQVTVSS

SEQ ID NO: 30973 - protein, 118 aa, Artificial Sequence
  Chemically Synthesized
QVQLQESGGGLVQAGGSLRLSCAASGSIFYYRYMGWYRQAPGKEREFVATIGSGGSTYYADSVKGRFTISRDNAKNTVYLQMNSLKPEDTAVYYCAVPLYLAGHLWYWGQGTQVTVSS

SEQ ID NO: 30974 - protein, 122 aa, Artificial Sequence
  Chemically Synthesized
QVQLQESGGGLVQAGGSLRLSCAASGTIFYWSNMGWYRQAPGKEREFVAAIDTGGTTNYADSVKGRFTISRDNAKNTVYLQMNSLKPEDTAVYYCAAITVGPVVHRNYHGYWGQGTQVTVSS

SEQ ID NO: 30975 - protein, 118 aa, Artificial Sequence
  Chemically Synthesized
QVQLQESGGGLVQAGGSLRLSCAASGTISDRNYMGWYRQAPGKEREFVATIGGGGITNYADSVKGRFTISRDNAKNTVYLQMNSLKPEDTAVYYCAVLLWFKRYHFYWGQGTQVTVSS

SEQ ID NO: 30976 - protein, 122 aa, Artificial Sequence
  Chemically Synthesized
QVQLQESGGGLVQAGGSLRLSCAASGSIFGGSYMGWYRQAPGKEREFVASIDTGTNTNYADSVKGRFTISRDNAKNTVYLQMNSLKPEDTAVYYCAAVGKKHSRYGGLYGYWGQGTQVTVSS

SEQ ID NO: 30977 - protein, 122 aa, Artificial Sequence
  Chemically Synthesized
QVQLQESGGGLVQAGGSLRLSCAASGYISGGYTMGWYRQAPGKERELVASIADGSITYYADSVKGRFTISRDNAKNTVYLQMNSLKPEDTAVYYCAAGSYWIWPWLYAHDYWGQGTQVTVSS

SEQ ID NO: 30978 - protein, 122 aa, Artificial Sequence
  Chemically Synthesized
QVQLQESGGGLVQAGGSLRLSCAASGYISAREYMGWYRQAPGKERELVAGIAGGSNTYYADSVKGRFTISRDNAKNTVYLQMNSLKPEDTAVYYCAVVRYGGWYSRFRHRYWGQGTQVTVSS

SEQ ID NO: 30979 - protein, 118 aa, Artificial Sequence
  Chemically Synthesized
QVQLQESGGGLVQAGGSLRLSCAASGYISTADYMGWYRQAPGKERELVASIGIGASTNYADSVKGRFTISRDNAKNTVYLQMNSLKPEDTAVYYCAATAYRDTWHGYWGQGTQVTVSS

SEQ ID NO: 30980 - protein, 126 aa, Artificial Sequence
  Chemically Synthesized
QVQLQESGGGLVQAGGSLRLSCAASGYIFEFVLMGWYRQAPGKEREFVAGIANGTSTNYADSVKGRFTISRDNAKNTVYLQMNSLKPEDTAVYYCAAYYDVAPYSDADSGYRLGYWGQGTQVTVSS

SEQ ID NO: 30981 - protein, 117 aa, Artificial Sequence
  Chemically Synthesized
QVQLQESGGGLVQAGGSLRLSCAASGTISGGWNMGWYRQAPGKERELVAAIAGGNTNYADSVKGRFTISRDNAKNTVYLQMNSLKPEDTAVYYCAAVGVRPTYLFYWGQGTQVTVSS

SEQ ID NO: 30982 - protein, 122 aa, Artificial Sequence
  Chemically Synthesized
QVQLQESGGGLVQAGGSLRLSCAASGSISWTYYMGWYRQAPGKEREFVATIDYGSTTYYADSVKGRFTISRDNAKNTVYLQMNSLKPEDTAVYYCAVHFYPYFFWPRFHWYWGQGTQVTVSS

SEQ ID NO: 30983 - protein, 122 aa, Artificial Sequence
  Chemically Synthesized
QVQLQESGGGLVQAGGSLRLSCAASGYISYVGVMGWYRQAPGKEREFVAAISVGSTTNYADSVKGRFTISRDNAKNTVYLQMNSLKPEDTAVYYCAAYVYWTGDDEDALTYWGQGTQVTVSS

SEQ ID NO: 30984 - protein, 118 aa, Artificial Sequence
  Chemically Synthesized
QVQLQESGGGLVQAGGSLRLSCAASGYISGIRYMGWYRQAPGKEREFVAGINFGAITNYADSVKGRFTISRDNAKNTVYLQMNSLKPEDTAVYYCAAITYSTAWYNYWGQGTQVTVSS

SEQ ID NO: 30985 - protein, 118 aa, Artificial Sequence
  Chemically Synthesized
QVQLQESGGGLVQAGGSLRLSCAASGTISEYAYMGWYRQAPGKERELVATIGLGANTNYADSVKGRFTISRDNAKNTVYLQMNSLKPEDTAVYYCAVSDWYRHFHYYWGQGTQVTVSS

SEQ ID NO: 30986 - protein, 118 aa, Artificial Sequence
  Chemically Synthesized
QVQLQESGGGLVQAGGSLRLSCAASGTISGDYAMGWYRQAPGKEREFVATIDSGASTNYADSVKGRFTISRDNAKNTVYLQMNSLKPEDTAVYYCAVLLRVGGYLYYWGQGTQVTVSS

SEQ ID NO: 30987 - protein, 122 aa, Artificial Sequence
  Chemically Synthesized
QVQLQESGGGLVQAGGSLRLSCAASGTIFGYRNMGWYRQAPGKEREFVAAIGLGTNTNYADSVKGRFTISRDNAKNTVYLQMNSLKPEDTAVYYCAAVSTYDEVVNSYFWYWGQGTQVTVSS

SEQ ID NO: 30988 - protein, 126 aa, Artificial Sequence
  Chemically Synthesized
QVQLQESGGGLVQAGGSLRLSCAASGSIFVHWTMGWYRQAPGKERELVAGIAYGTSTNYADSVKGRFTISRDNAKNTVYLQMNSLKPEDTAVYYCAVQEPKLGSWTAWDFDSLGYWGQGTQVTVSS

SEQ ID NO: 30989 - protein, 118 aa, Artificial Sequence
  Chemically Synthesized
QVQLQESGGGLVQAGGSLRLSCAASGYIFDVPAMGWYRQAPGKEREFVAAITYGGNTNYADSVKGRFTISRDNAKNTVYLQMNSLKPEDTAVYYCAAYTRTRRYHYYWGQGTQVTVSS

SEQ ID NO: 30990 - protein, 122 aa, Artificial Sequence
  Chemically Synthesized
QVQLQESGGGLVQAGGSLRLSCAASGTISGDLIMGWYRQAPGKEREFVATIDAGTNTYYADSVKGRFTISRDNAKNTVYLQMNSLKPEDTAVYYCAVVYTQLGGQKRYHYYWGQGTQVTVSS

SEQ ID NO: 30991 - protein, 125 aa, Artificial Sequence
  Chemically Synthesized
QVQLQESGGGLVQAGGSLRLSCAASGNISRNGRMGWYRQAPGKERELVATISTGANTNYADSVKGRFTISRDNAKNTVYLQMNSLKPEDTAVYYCAVTTDPYWSLYRSVNRHPYWGQGTQVTVSS

SEQ ID NO: 30992 - protein, 118 aa, Artificial Sequence
  Chemically Synthesized
QVQLQESGGGLVQAGGSLRLSCAASGSISTIDVMGWYRQAPGKERELVATIAYGAITNYADSVKGRFTISRDNAKNTVYLQMNSLKPEDTAVYYCAAYYQPDVAFYYWGQGTQVTVSS

SEQ ID NO: 30993 - protein, 118 aa, Artificial Sequence
  Chemically Synthesized
QVQLQESGGGLVQAGGSLRLSCAASGYISYGYAMGWYRQAPGKEREFVATIADGGSTNYADSVKGRFTISRDNAKNTVYLQMNSLKPEDTAVYYCAVWVTGYSYHSYWGQGTQVTVSS

SEQ ID NO: 30994 - protein, 119 aa, Artificial Sequence
  Chemically Synthesized
QVQLQESGGGLVQAGGSLRLSCAASGTISNAFSMGWYRQAPGKEREFVAGIASGSNTNYADSVKGRFTISRDNAKNTVYLQMNSLKPEDTAVYYCAAIGYWYGGHHYYWGQGTQVTVSS

SEQ ID NO: 30995 - protein, 118 aa, Artificial Sequence
  Chemically Synthesized
QVQLQESGGGLVQAGGSLRLSCAASGYIFRWSRMGWYRQAPGKEREFVAGIARGAITYYADSVKGRFTISRDNAKNTVYLQMNSLKPEDTAVYYCAVPGYAHRGFVYWGQGTQVTVSS

SEQ ID NO: 30996 - protein, 118 aa, Artificial Sequence
  Chemically Synthesized
QVQLQESGGGLVQAGGSLRLSCAASGNISGRVYMGWYRQAPGKEREFVATISLGANTNYADSVKGRFTISRDNAKNTVYLQMNSLKPEDTAVYYCAVLQYQVAYFYYWGQGTQVTVSS

SEQ ID NO: 30997 - protein, 127 aa, Artificial Sequence
  Chemically Synthesized
QVQLQESGGGLVQAGGSLRLSCAASGTISGQLRMGWYRQAPGKERELVAGIGVGGSTNYADSVKGRFTISRDNAKNTVYLQMNSLKPEDTAVYYCAVPLYWPQSDASFLYVNYHTYWGQGTQVTVSS

SEQ ID NO: 30998 - protein, 118 aa, Artificial Sequence
  Chemically Synthesized
QVQLQESGGGLVQAGGSLRLSCAASGNISDGGIMGWYRQAPGKEREFVAAIARGSSTNYADSVKGRFTISRDNAKNTVYLQMNSLKPEDTAVYYCAVVLAVDHYYYYWGQGTQVTVSS

SEQ ID NO: 30999 - protein, 122 aa, Artificial Sequence
  Chemically Synthesized
QVQLQESGGGLVQAGGSLRLSCAASGTISPPESMGWYRQAPGKEREFVAGIDAGGITNYADSVKGRFTISRDNAKNTVYLQMNSLKPEDTAVYYCAALISWYSVRWAWHPYWGQGTQVTVSS

SEQ ID NO: 31000 - protein, 118 aa, Artificial Sequence
  Chemically Synthesized
QVQLQESGGGLVQAGGSLRLSCAASGSIFPYYNMGWYRQAPGKERELVAAIGAGSTTNYADSVKGRFTISRDNAKNTVYLQMNSLKPEDTAVYYCAAVVAGDRWLGYWGQGTQVTVSS

SEQ ID NO: 31001 - protein, 118 aa, Artificial Sequence
  Chemically Synthesized
QVQLQESGGGLVQAGGSLRLSCAASGYIFPANVMGWYRQAPGKEREFVATISTGTSTNYADSVKGRFTISRDNAKNTVYLQMNSLKPEDTAVYYCAAVIFNHRYHGYWGQGTQVTVSS

SEQ ID NO: 31002 - protein, 122 aa, Artificial Sequence
  Chemically Synthesized
QVQLQESGGGLVQAGGSLRLSCAASGTIFPSAAMGWYRQAPGKEREFVAGIAYGASTNYADSVKGRFTISRDNAKNTVYLQMNSLKPEDTAVYYCAALRDGRGQTTRLHYYWGQGTQVTVSS

SEQ ID NO: 31003 - protein, 118 aa, Artificial Sequence
  Chemically Synthesized
QVQLQESGGGLVQAGGSLRLSCAASGYIFGGGTMGWYRQAPGKEREFVAAINYGTTTYYADSVKGRFTISRDNAKNTVYLQMNSLKPEDTAVYYCAARYRRYHAHHYWGQGTQVTVSS

SEQ ID NO: 31004 - protein, 118 aa, Artificial Sequence
  Chemically Synthesized
QVQLQESGGGLVQAGGSLRLSCAASGSISTENNMGWYRQAPGKEREFVAAIAYGAITYYADSVKGRFTISRDNAKNTVYLQMNSLKPEDTAVYYCAAVGRKRGRHHYWGQGTQVTVSS

SEQ ID NO: 31005 - protein, 118 aa, Artificial Sequence
  Chemically Synthesized
QVQLQESGGGLVQAGGSLRLSCAASGSIFFWSYMGWYRQAPGKERELVASIGWGGSTYYADSVKGRFTISRDNAKNTVYLQMNSLKPEDTAVYYCAVTRYYANRHHYWGQGTQVTVSS

SEQ ID NO: 31006 - protein, 118 aa, Artificial Sequence
  Chemically Synthesized
QVQLQESGGGLVQAGGSLRLSCAASGNIFPAGTMGWYRQAPGKEREFVAAINGGTSTNYADSVKGRFTISRDNAKNTVYLQMNSLKPEDTAVYYCAAVISWDGYHYYWGQGTQVTVSS

SEQ ID NO: 31007 - protein, 122 aa, Artificial Sequence
  Chemically Synthesized
QVQLQESGGGLVQAGGSLRLSCAASGNISDYTGMGWYRQAPGKEREFVASIGDGGSTYYADSVKGRFTISRDNAKNTVYLQMNSLKPEDTAVYYCAALDYSRRYNNRRYYYWGQGTQVTVSS

SEQ ID NO: 31008 - protein, 124 aa, Artificial Sequence
  Chemically Synthesized
QVQLQESGGGLVQAGGSLRLSCAASGTIFRAAIMGWYRQAPGKEREFVAGISNGGTTNYADSVKGRFTISRDNAKNTVYLQMNSLKPEDTAVYYCAAVYDRRYYISPRRDYWYWGQGTQVTVSS

SEQ ID NO: 31009 - protein, 120 aa, Artificial Sequence
  Chemically Synthesized
QVQLQESGGGLVQAGGSLRLSCAASGYISSTVGMGWYRQAPGKEREFVAGIAYGSNTNYADSVKGRFTISRDNAKNTVYLQMNSLKPEDTAVYYCAAVRYVTNQRWRHYWGQGTQVTVSS

SEQ ID NO: 31010 - protein, 118 aa, Artificial Sequence
  Chemically Synthesized
QVQLQESGGGLVQAGGSLRLSCAASGNIFPTYYMGWYRQAPGKERELVASIASGATTNYADSVKGRFTISRDNAKNTVYLQMNSLKPEDTAVYYCAVLIFRYRWYYYWGQGTQVTVSS

SEQ ID NO: 31011 - protein, 122 aa, Artificial Sequence
  Chemically Synthesized
QVQLQESGGGLVQAGGSLRLSCAASGSIFDTFSMGWYRQAPGKERELVASINRGGITYYADSVKGRFTISRDNAKNTVYLQMNSLKPEDTAVYYCAVNRYITLNLATLHEYWGQGTQVTVSS

SEQ ID NO: 31012 - protein, 118 aa, Artificial Sequence
  Chemically Synthesized
QVQLQESGGGLVQAGGSLRLSCAASGNIFQLTNMGWYRQAPGKEREFVAGIGRGTTTNYADSVKGRFTISRDNAKNTVYLQMNSLKPEDTAVYYCAAIGLSKPRLAYWGQGTQVTVSS

SEQ ID NO: 31013 - protein, 117 aa, Artificial Sequence
  Chemically Synthesized
QVQLQESGGGLVQAGGSLRLSCAASGSIFVTLMGWYRQAPGKEREFVASIDYGASTNYADSVKGRFTISRDNAKNTVYLQMNSLKPEDTAVYYCAVRYYFHSQFGYWGQGTQVTVSS

SEQ ID NO: 31014 - protein, 122 aa, Artificial Sequence
  Chemically Synthesized
QVQLQESGGGLVQAGGSLRLSCAASGYIFGVTLMGWYRQAPGKEREFVASIGGGGSTYYADSVKGRFTISRDNAKNTVYLQMNSLKPEDTAVYYCAVYVNDARLTQYWHAYWGQGTQVTVSS

SEQ ID NO: 31015 - protein, 122 aa, Artificial Sequence
  Chemically Synthesized
QVQLQESGGGLVQAGGSLRLSCAASGNISAPALMGWYRQAPGKERELVAGIADGGSTNYADSVKGRFTISRDNAKNTVYLQMNSLKPEDTAVYYCAAYVWYYDGEGYFHDYWGQGTQVTVSS

SEQ ID NO: 31016 - protein, 118 aa, Artificial Sequence
  Chemically Synthesized
QVQLQESGGGLVQAGGSLRLSCAASGTISGYGVMGWYRQAPGKERELVAGIAHGANTNYADSVKGRFTISRDNAKNTVYLQMNSLKPEDTAVYYCAADVINQGVLPYWGQGTQVTVSS

SEQ ID NO: 31017 - protein, 118 aa, Artificial Sequence
  Chemically Synthesized
QVQLQESGGGLVQAGGSLRLSCAASGTIFHIVYMGWYRQAPGKERELVAGIDDGGSTNYADSVKGRFTISRDNAKNTVYLQMNSLKPEDTAVYYCAVLDADYDVHLYWGQGTQVTVSS

SEQ ID NO: 31018 - protein, 125 aa, Artificial Sequence
  Chemically Synthesized
QVQLQESGGGLVQAGGSLRLSCAASGSIFTDYVMGWYRQAPGKEREFVATISPGATTYYADSVKGRFTISRDNAKNTVYLQMNSLKPEDTAVYYCAVYPAETTEYDGNWRIHIYWGQGTQVTVSS

SEQ ID NO: 31019 - protein, 121 aa, Artificial Sequence
  Chemically Synthesized
QVQLQESGGGLVQAGGSLRLSCAASGNISYATTMGWYRQAPGKERELVAAIARGATTYYADSVKGRFTISRDNAKNTVYLQMNSLKPEDTAVYYCAARKYQYYSDWYYGYWGQGTQVTVSS

SEQ ID NO: 31020 - protein, 122 aa, Artificial Sequence
  Chemically Synthesized
QVQLQESGGGLVQAGGSLRLSCAASGYIFPVRLMGWYRQAPGKERELVAAIDTGSSTYYADSVKGRFTISRDNAKNTVYLQMNSLKPEDTAVYYCAADHFDEYNYAYDHWYWGQGTQVTVSS

SEQ ID NO: 31021 - protein, 118 aa, Artificial Sequence
  Chemically Synthesized
QVQLQESGGGLVQAGGSLRLSCAASGTIFPYQLMGWYRQAPGKERELVAGITWGTTTYYADSVKGRFTISRDNAKNTVYLQMNSLKPEDTAVYYCAVLAAEDLNLYYWGQGTQVTVSS

SEQ ID NO: 31022 - protein, 121 aa, Artificial Sequence
  Chemically Synthesized
QVQLQESGGGLVQAGGSLRLSCAASGNIFEWDMGWYRQAPGKEREFVASISPGGNTNYADSVKGRFTISRDNAKNTVYLQMNSLKPEDTAVYYCAAYPPYSPGYGTDHNYWGQGTQVTVSS

SEQ ID NO: 31023 - protein, 118 aa, Artificial Sequence
  Chemically Synthesized
QVQLQESGGGLVQAGGSLRLSCAASGTIFASYLMGWYRQAPGKEREFVASITGGAITNYADSVKGRFTISRDNAKNTVYLQMNSLKPEDTAVYYCAVLYVGPRTLPYWGQGTQVTVSS

SEQ ID NO: 31024 - protein, 118 aa, Artificial Sequence
  Chemically Synthesized
QVQLQESGGGLVQAGGSLRLSCAASGNISPYPAMGWYRQAPGKERELVAAIDTGTTTYYADSVKGRFTISRDNAKNTVYLQMNSLKPEDTAVYYCAVVKYWDTRFSYWGQGTQVTVSS

SEQ ID NO: 31025 - protein, 118 aa, Artificial Sequence
  Chemically Synthesized
QVQLQESGGGLVQAGGSLRLSCAASGTISAYVGMGWYRQAPGKEREFVATIAGGATTYYADSVKGRFTISRDNAKNTVYLQMNSLKPEDTAVYYCAVWPYRGDQYLYWGQGTQVTVSS

SEQ ID NO: 31026 - protein, 122 aa, Artificial Sequence
  Chemically Synthesized
QVQLQESGGGLVQAGGSLRLSCAASGYISTRYAMGWYRQAPGKERELVATITFGASTNYADSVKGRFTISRDNAKNTVYLQMNSLKPEDTAVYYCAAQRYTRGYTWARLQYWGQGTQVTVSS

SEQ ID NO: 31027 - protein, 118 aa, Artificial Sequence
  Chemically Synthesized
QVQLQESGGGLVQAGGSLRLSCAASGNISYGRDMGWYRQAPGKERELVATIAQGGNTNYADSVKGRFTISRDNAKNTVYLQMNSLKPEDTAVYYCAVNYDSYEAFYYWGQGTQVTVSS

SEQ ID NO: 31028 - protein, 121 aa, Artificial Sequence
  Chemically Synthesized
QVQLQESGGGLVQAGGSLRLSCAASGTIFRYPSMGWYRQAPGKERELVAGIGEVVVPYADSVKGRFTISRDNAKNTVYLQMNSLKPEDTAVYYCAATDWKVRPGEPYHDYWGQGTQVTVSS

SEQ ID NO: 31029 - protein, 125 aa, Artificial Sequence
  Chemically Synthesized
QVQLQESGGGLVQAGGSLRLSCAASGNISYAATMGWYRQAPGKEREFVAGIGGSITNYADSVKGRFTISRDNAKNTVYLQMNSLKPEDTAVYYCAVYEPPWSPYRVTPDYYLDYWGQGTQVTVSS

SEQ ID NO: 31030 - protein, 118 aa, Artificial Sequence
  Chemically Synthesized
QVQLQESGGGLVQAGGSLRLSCAASGYISRRSWMGWYRQAPGKEREFVAAISVGANTYYADSVKGRFTISRDNAKNTVYLQMNSLKPEDTAVYYCAAVRRWGVGLYYWGQGTQVTVSS

SEQ ID NO: 31031 - protein, 118 aa, Artificial Sequence
  Chemically Synthesized
QVQLQESGGGLVQAGGSLRLSCAASGNISRWAVMGWYRQAPGKERELVAGIAYGGITNYADSVKGRFTISRDNAKNTVYLQMNSLKPEDTAVYYCAVRDTYAPIFRYWGQGTQVTVSS

SEQ ID NO: 31032 - protein, 113 aa, Artificial Sequence
  Chemically Synthesized
QVQLQESGGGLVQAGGSLRLSCAASGTIFSDHYMGWYRQAPGKERELVATIDSGGSTYYADSVKGRFTISRDNAKNTVYLQMNSLKPEDTAVYYCAGLHSWYWGQGTQVTVSS

SEQ ID NO: 31033 - protein, 122 aa, Artificial Sequence
  Chemically Synthesized
QVQLQESGGGLVQAGGSLRLSCAASGTISDSGHMGWYRQAPGKERELVAGIDGGTSTYYADSVKGRFTISRDNAKNTVYLQMNSLKPEDTAVYYCAVFTPSYLSSGVGHDYWGQGTQVTVSS

SEQ ID NO: 31034 - protein, 115 aa, Artificial Sequence
  Chemically Synthesized
QVQLQESGGGLVQAGGSLRLSCAASGTISPIQDMGWYRQAPGKEREFVATIDPGSTTNYADSVKGRFTISRDNAKNTVYLQMNSLKPEDTAVYYCANDIGYHDYWGQGTQVTVSS

SEQ ID NO: 31035 - protein, 126 aa, Artificial Sequence
  Chemically Synthesized
QVQLQESGGGLVQAGGSLRLSCAASGYISRDFYMGWYRQAPGKERELVAAITEGGITNYADSVKGRFTISRDNAKNTVYLQMNSLKPEDTAVYYCAVRRRWFWYTQGTYWGGFWYWGQGTQVTVSS

SEQ ID NO: 31036 - protein, 118 aa, Artificial Sequence
  Chemically Synthesized
QVQLQESGGGLVQAGGSLRLSCAASGSISDGPNMGWYRQAPGKERELVAAIAYGSITYYADSVKGRFTISRDNAKNTVYLQMNSLKPEDTAVYYCAVEDAGSDWFDYWGQGTQVTVSS

SEQ ID NO: 31037 - protein, 113 aa, Artificial Sequence
  Chemically Synthesized
QVQLQESGGGLVQAGGSLRLSCAASGSISYVDMGWYRQAPGKERELVASITSGGNTYYADSVKGRFTISRDNAKNTVYLQMNSLKPEDTAVYYCAAYRRSCYWGQGTQVTVSS

SEQ ID NO: 31038 - protein, 118 aa, Artificial Sequence
  Chemically Synthesized
QVQLQESGGGLVQAGGSLRLSCAASGNIFAIAKMGWYRQAPGKEREFVASIASGTITYYADSVKGRFTISRDNAKNTVYLQMNSLKPEDTAVYYCAVDKLIDYYHEYWGQGTQVTVSS

SEQ ID NO: 31039 - protein, 118 aa, Artificial Sequence
  Chemically Synthesized
QVQLQESGGGLVQAGGSLRLSCAASGNISRPQNMGWYRQAPGKEREFVASITWGANTNYADSVKGRFTISRDNAKNTVYLQMNSLKPEDTAVYYCAVDDLVTYFFDYWGQGTQVTVSS

SEQ ID NO: 31040 - protein, 118 aa, Artificial Sequence
  Chemically Synthesized
QVQLQESGGGLVQAGGSLRLSCAASGTIFLDGPMGWYRQAPGKERELVAAIDRGGSTYYADSVKGRFTISRDNAKNTVYLQMNSLKPEDTAVYYCAVQGTNPTTFGYWGQGTQVTVSS

SEQ ID NO: 31041 - protein, 118 aa, Artificial Sequence
  Chemically Synthesized
QVQLQESGGGLVQAGGSLRLSCAASGTISPHTGMGWYRQAPGKERELVAAIGLGGNTYYADSVKGRFTISRDNAKNTVYLQMNSLKPEDTAVYYCAVQGYNSVRYPYWGQGTQVTVSS

SEQ ID NO: 31042 - protein, 122 aa, Artificial Sequence
  Chemically Synthesized
QVQLQESGGGLVQAGGSLRLSCAASGSISVDSIMGWYRQAPGKERELVAAIDFGAITYYADSVKGRFTISRDNAKNTVYLQMNSLKPEDTAVYYCAVVQWDTYDTLHRLSYWGQGTQVTVSS

SEQ ID NO: 31043 - protein, 118 aa, Artificial Sequence
  Chemically Synthesized
QVQLQESGGGLVQAGGSLRLSCAASGNIFYTYAMGWYRQAPGKEREFVAAISRGTTTNYADSVKGRFTISRDNAKNTVYLQMNSLKPEDTAVYYCAVTADARDGHPYWGQGTQVTVSS

SEQ ID NO: 31044 - protein, 122 aa, Artificial Sequence
  Chemically Synthesized
QVQLQESGGGLVQAGGSLRLSCAASGNISRHQSMGWYRQAPGKEREFVAAINDGGSTYYADSVKGRFTISRDNAKNTVYLQMNSLKPEDTAVYYCAVQTARRTPNIYFHRYWGQGTQVTVSS

SEQ ID NO: 31045 - protein, 122 aa, Artificial Sequence
  Chemically Synthesized
QVQLQESGGGLVQAGGSLRLSCAASGTIFWFRGMGWYRQAPGKERELVAGIGLGGNTNYADSVKGRFTISRDNAKNTVYLQMNSLKPEDTAVYYCAATTRGYLKLDRNYAYWGQGTQVTVSS

SEQ ID NO: 31046 - protein, 118 aa, Artificial Sequence
  Chemically Synthesized
QVQLQESGGGLVQAGGSLRLSCAASGSISNDAIMGWYRQAPGKERELVATIGGGTSTYYADSVKGRFTISRDNAKNTVYLQMNSLKPEDTAVYYCAAHEGYDYIHGYWGQGTQVTVSS

SEQ ID NO: 31047 - protein, 122 aa, Artificial Sequence
  Chemically Synthesized
QVQLQESGGGLVQAGGSLRLSCAASGYIFLKWAMGWYRQAPGKEREFVATIADGASTYYADSVKGRFTISRDNAKNTVYLQMNSLKPEDTAVYYCAAWYLYQYYQYNAHYYWGQGTQVTVSS

SEQ ID NO: 31048 - protein, 122 aa, Artificial Sequence
  Chemically Synthesized
QVQLQESGGGLVQAGGSLRLSCAASGNIFDGFTMGWYRQAPGKEREFVAGIDYGTSTNYADSVKGRFTISRDNAKNTVYLQMNSLKPEDTAVYYCAAVVTARRDYSDYYGYWGQGTQVTVSS

SEQ ID NO: 31049 - protein, 118 aa, Artificial Sequence
  Chemically Synthesized
QVQLQESGGGLVQAGGSLRLSCAASGYISYLDVMGWYRQAPGKEREFVAGINEGGSTYYADSVKGRFTISRDNAKNTVYLQMNSLKPEDTAVYYCAAGDYVYGTFRYWGQGTQVTVSS

SEQ ID NO: 31050 - protein, 126 aa, Artificial Sequence
  Chemically Synthesized
QVQLQESGGGLVQAGGSLRLSCAASGTIFHGGVMGWYRQAPGKERELVAAINFGGNTYYADSVKGRFTISRDNAKNTVYLQMNSLKPEDTAVYYCAVYTDLQPDHPRGDYYWFGYWGQGTQVTVSS

SEQ ID NO: 31051 - protein, 118 aa, Artificial Sequence
  Chemically Synthesized
QVQLQESGGGLVQAGGSLRLSCAASGTISARGRMGWYRQAPGKEREFVAGISRGANTNYADSVKGRFTISRDNAKNTVYLQMNSLKPEDTAVYYCAVQRTYTRYFRYWGQGTQVTVSS

SEQ ID NO: 31052 - protein, 117 aa, Artificial Sequence
  Chemically Synthesized
QVQLQESGGGLVQAGGSLRLSCAASGTISFNAYMGWYRQAPGKEREFVPLLVSVVLPYADSVKGRFTISRDNAKNTVYLQMNSLKPEDTAVYYCAVHFLPGTLHYYWGQGTQVTVSS

SEQ ID NO: 31053 - protein, 118 aa, Artificial Sequence
  Chemically Synthesized
QVQLQESGGGLVQAGGSLRLSCAASGTISTHYDMGWYRQAPGKERELVASIGYGGTTNYADSVKGRFTISRDNAKNTVYLQMNSLKPEDTAVYYCAVFPDAHGDFDYWGQGTQVTVSS

SEQ ID NO: 31054 - protein, 125 aa, Artificial Sequence
  Chemically Synthesized
QVQLQESGGGLVQAGGSLRLSCAASGSIFLYDYMGWYRQAPGKERELVASITDGGITNYADSVKGRFTISRDNAKNTVYLQMNSLKPEDTAVYYCAAVYPTFDTTPYSTTSTFYWGQGTQVTVSS

SEQ ID NO: 31055 - protein, 118 aa, Artificial Sequence
  Chemically Synthesized
QVQLQESGGGLVQAGGSLRLSCAASGSISQSDIMGWYRQAPGKEREFVAAISDGTITYYADSVKGRFTISRDNAKNTVYLQMNSLKPEDTAVYYCAAVAYTFESHLYWGQGTQVTVSS

SEQ ID NO: 31056 - protein, 118 aa, Artificial Sequence
  Chemically Synthesized
QVQLQESGGGLVQAGGSLRLSCAASGTISQYNVMGWYRQAPGKERELVASISIGGSTNYADSVKGRFTISRDNAKNTVYLQMNSLKPEDTAVYYCAVGNEDRQYHGYWGQGTQVTVSS

SEQ ID NO: 31057 - protein, 118 aa, Artificial Sequence
  Chemically Synthesized
QVQLQESGGGLVQAGGSLRLSCAASGYISTLYVMGWYRQAPGKERELVATINHGGNTYYADSVKGRFTISRDNAKNTVYLQMNSLKPEDTAVYYCAVLAQSDYDLYYWGQGTQVTVSS

SEQ ID NO: 31058 - protein, 118 aa, Artificial Sequence
  Chemically Synthesized
QVQLQESGGGLVQAGGSLRLSCAASGYISLGDRMGWYRQAPGKERELVATIDYGGNTYYADSVKGRFTISRDNAKNTVYLQMNSLKPEDTAVYYCAVVYLGPDGYGYWGQGTQVTVSS

SEQ ID NO: 31059 - protein, 118 aa, Artificial Sequence
  Chemically Synthesized
QVQLQESGGGLVQAGGSLRLSCAASGSIFRTYDMGWYRQAPGKERELVASIGRGGNTNYADSVKGRFTISRDNAKNTVYLQMNSLKPEDTAVYYCAVYIGDTYVHYYWGQGTQVTVSS

SEQ ID NO: 31060 - protein, 121 aa, Artificial Sequence
  Chemically Synthesized
QVQLQESGGGLVQAGGSLRLSCAASGNISAARYMGWYRQAPGKEREFVATINHGTTTNYADSVKGRFTISRDNAKNTVYLQMNSLKPEDTAVYYCAVYQYHFSWLYRHQYWGQGTQVTVSS

SEQ ID NO: 31061 - protein, 118 aa, Artificial Sequence
  Chemically Synthesized
QVQLQESGGGLVQAGGSLRLSCAASGTISTFDGMGWYRQAPGKEREFVAAIAWGSNTYYADSVKGRFTISRDNAKNTVYLQMNSLKPEDTAVYYCAVFYADWYYYTYWGQGTQVTVSS

SEQ ID NO: 31062 - protein, 126 aa, Artificial Sequence
  Chemically Synthesized
QVQLQESGGGLVQAGGSLRLSCAASGTISQRYRMGWYRQAPGKEREFVAGIARGGSTYYADSVKGRFTISRDNAKNTVYLQMNSLKPEDTAVYYCAAPAPKYYYGAYPYSKRFVYWGQGTQVTVSS

SEQ ID NO: 31063 - protein, 122 aa, Artificial Sequence
  Chemically Synthesized
QVQLQESGGGLVQAGGSLRLSCAASGSIFIGSKYMGWYRQAPGKEREFVAAINQGGSTNYADSVKGRFTISRDNAKNTVYLQMNSLKPEDTAVYYCAAYADDGSSSTGTLYWGQGTQVTVSS

SEQ ID NO: 31064 - protein, 122 aa, Artificial Sequence
  Chemically Synthesized
QVQLQESGGGLVQAGGSLRLSCAASGNISTTLVMGWYRQAPGKEREFVATIALGTITNYADSVKGRFTISRDNAKNTVYLQMNSLKPEDTAVYYCAAVYSVVGQYDRGLWYWGQGTQVTVSS

SEQ ID NO: 31065 - protein, 111 aa, Artificial Sequence
  Chemically Synthesized
QVQLQESGGGLVQAGGSLRLSCAASGYIFVYYYMGWYRQAPGKERELVAAINGGGNTYYADSVKGRFTISRDNAKNTVYLQMNSLKPEDTAVYYCAYLGYWGQGTQVTVSS

SEQ ID NO: 31066 - protein, 118 aa, Artificial Sequence
  Chemically Synthesized
QVQLQESGGGLVQAGGSLRLSCAASGNISYYTEMGWYRQAPGKEREFVAAISDGTITNYADSVKGRFTISRDNAKNTVYLQMNSLKPEDTAVYYCAVYVRTSRDYDYWGQGTQVTVSS

SEQ ID NO: 31067 - protein, 122 aa, Artificial Sequence
  Chemically Synthesized
QVQLQESGGGLVQAGGSLRLSCAASGTIFLFYRMGWYRQAPGKEREFVASIGRGASTYYADSVKGRFTISRDNAKNTVYLQMNSLKPEDTAVYYCAVYSRWGRTYPHYHRYWGQGTQVTVSS

SEQ ID NO: 31068 - protein, 118 aa, Artificial Sequence
  Chemically Synthesized
QVQLQESGGGLVQAGGSLRLSCAASGTIFYYYLMGWYRQAPGKERELVASISAGATTYYADSVKGRFTISRDNAKNTVYLQMNSLKPEDTAVYYCAAIGYYRYYHDYWGQGTQVTVSS

SEQ ID NO: 31069 - protein, 126 aa, Artificial Sequence
  Chemically Synthesized
QVQLQESGGGLVQAGGSLRLSCAASGTIFDVRNMGWYRQAPGKEREFVAAIDLGGTTYYADSVKGRFTISRDNAKNTVYLQMNSLKPEDTAVYYCAVDITIILRDDLSYPAAYQYWGQGTQVTVSS

SEQ ID NO: 31070 - protein, 118 aa, Artificial Sequence
  Chemically Synthesized
QVQLQESGGGLVQAGGSLRLSCAASGSISDLDYMGWYRQAPGKEREFVAGIAGGASTNYADSVKGRFTISRDNAKNTVYLQMNSLKPEDTAVYYCAALLFKIDLHYYWGQGTQVTVSS

SEQ ID NO: 31071 - protein, 118 aa, Artificial Sequence
  Chemically Synthesized
QVQLQESGGGLVQAGGSLRLSCAASGNISRIAYMGWYRQAPGKEREFVAAINSGSNTNYADSVKGRFTISRDNAKNTVYLQMNSLKPEDTAVYYCAVYYYVYRRHHYWGQGTQVTVSS

SEQ ID NO: 31072 - protein, 117 aa, Artificial Sequence
  Chemically Synthesized
QVQLQESGGGLVQAGGSLRLSCAASGYISYDIGMGWYRQAPGKEREFVASIDPGGNTYYADSVKGRFTISRDNAKNTVYLQMNSLKPEDTAVYYCAAPPNSTLLMYWGQGTQVTVSS

SEQ ID NO: 31073 - protein, 117 aa, Artificial Sequence
  Chemically Synthesized
QVQLQESGGGLVQAGGSLRLSCAASGYISLWAPMGWYRQAPGKERELVATINRGSITNYADSVKGRFTISRDNAKNTVYLQMNSLKPEDTAVYYCAVYYRRHRHVYWGQGTQVTVSS

SEQ ID NO: 31074 - protein, 120 aa, Artificial Sequence
  Chemically Synthesized
QVQLQESGGGLVQAGGSLRLSCAASGSIFWTRYMGWYRQAPGKERELVASIGRGGITYYADSVKGRFTISRDNAKNTVYLQMNSLKPEDTAVYYCAVAYRYTSLSRHDYWGQGTQVTVSS

SEQ ID NO: 31075 - protein, 118 aa, Artificial Sequence
  Chemically Synthesized
QVQLQESGGGLVQAGGSLRLSCAASGNISTVDYMGWYRQAPGKERELVAGIDVGTNTYYADSVKGRFTISRDNAKNTVYLQMNSLKPEDTAVYYCAVYHWVALYHWYWGQGTQVTVSS

SEQ ID NO: 31076 - protein, 126 aa, Artificial Sequence
  Chemically Synthesized
QVQLQESGGGLVQAGGSLRLSCAASGTISADFTMGWYRQAPGKERELVAGINVGGTTYYADSVKGRFTISRDNAKNTVYLQMNSLKPEDTAVYYCAVYYGPYTRYRSYATPAYRYWGQGTQVTVSS

SEQ ID NO: 31077 - protein, 122 aa, Artificial Sequence
  Chemically Synthesized
QVQLQESGGGLVQAGGSLRLSCAASGYISYASRMGWYRQAPGKEREFVAAIGRGGTTYYADSVKGRFTISRDNAKNTVYLQMNSLKPEDTAVYYCAVKRYGAYYYLEYYRYWGQGTQVTVSS

SEQ ID NO: 31078 - protein, 118 aa, Artificial Sequence
  Chemically Synthesized
QVQLQESGGGLVQAGGSLRLSCAASGNIFSLEDMGWYRQAPGKERELVATIDYGANTNYADSVKGRFTISRDNAKNTVYLQMNSLKPEDTAVYYCAVGPWWYKYFYYWGQGTQVTVSS

SEQ ID NO: 31079 - protein, 122 aa, Artificial Sequence
  Chemically Synthesized
QVQLQESGGGLVQAGGSLRLSCAASGNIFGGGDMGWYRQAPGKEREFVAAIATGGNTYYADSVKGRFTISRDNAKNTVYLQMNSLKPEDTAVYYCAVNLVNNLVFFVNLYYWGQGTQVTVSS

SEQ ID NO: 31080 - protein, 122 aa, Artificial Sequence
  Chemically Synthesized
QVQLQESGGGLVQAGGSLRLSCAASGNIFLIPPMGWYRQAPGKEREFVATISRGSITYYADSVKGRFTISRDNAKNTVYLQMNSLKPEDTAVYYCAADRVDYILYQQRYDYWGQGTQVTVSS

SEQ ID NO: 31081 - protein, 118 aa, Artificial Sequence
  Chemically Synthesized
QVQLQESGGGLVQAGGSLRLSCAASGSIFLPRYMGWYRQAPGKEREFVASITDGSTTNYADSVKGRFTISRDNAKNTVYLQMNSLKPEDTAVYYCAARDSPSTYLRYWGQGTQVTVSS

SEQ ID NO: 31082 - protein, 118 aa, Artificial Sequence
  Chemically Synthesized
QVQLQESGGGLVQAGGSLRLSCAASGTISVGTRMGWYRQAPGKEREFVASIGFGTITNYADSVKGRFTISRDNAKNTVYLQMNSLKPEDTAVYYCAVGRWFRLSYRYWGQGTQVTVSS

SEQ ID NO: 31083 - protein, 126 aa, Artificial Sequence
  Chemically Synthesized
QVQLQESGGGLVQAGGSLRLSCAASGNIFDTYGMGWYRQAPGKEREFVAAINGGTNTYYADSVKGRFTISRDNAKNTVYLQMNSLKPEDTAVYYCAVYTYFPTYPFFVSRKIHYYWGQGTQVTVSS

SEQ ID NO: 31084 - protein, 118 aa, Artificial Sequence
  Chemically Synthesized
QVQLQESGGGLVQAGGSLRLSCAASGNISYFSLMGWYRQAPGKEREFVAGIAQGGTTNYADSVKGRFTISRDNAKNTVYLQMNSLKPEDTAVYYCAVSISDYEFHTYWGQGTQVTVSS

SEQ ID NO: 31085 - protein, 121 aa, Artificial Sequence
  Chemically Synthesized
QVQLQESGGGLVQAGGSLRLSCAASGYISRVGYMGWYRQAPGKEREFVAAIGRGSNTNYADSVKGRFTISRDNAKNTVYLQMNSLKPEDTAVYYCAVYLLTPDRYYHHGYWGQGTQVTVSS

SEQ ID NO: 31086 - protein, 126 aa, Artificial Sequence
  Chemically Synthesized
QVQLQESGGGLVQAGGSLRLSCAASGYISLVNAMGWYRQAPGKERELVASISSGGITYYADSVKGRFTISRDNAKNTVYLQMNSLKPEDTAVYYCAVSYRYDYRIYDSGTPDHNYWGQGTQVTVSS

SEQ ID NO: 31087 - protein, 120 aa, Artificial Sequence
  Chemically Synthesized
QVQLQESGGGLVQAGGSLRLSCAASGSISYIAKMGWYRQAPGKERELVAAISGGGTTNYADSVKGRFTISRDNAKNTVYLQMNSLKPEDTAVYYCAARYHHYYKFRHEYWGQGTQVTVSS

SEQ ID NO: 31088 - protein, 118 aa, Artificial Sequence
  Chemically Synthesized
QVQLQESGGGLVQAGGSLRLSCAASGNIFLDLSMGWYRQAPGKEREFVATITVGGSTYYADSVKGRFTISRDNAKNTVYLQMNSLKPEDTAVYYCAAAIYAGSGYSYWGQGTQVTVSS

SEQ ID NO: 31089 - protein, 118 aa, Artificial Sequence
  Chemically Synthesized
QVQLQESGGGLVQAGGSLRLSCAASGTISDRYTMGWYRQAPGKERELVASIAPGGTTYYADSVKGRFTISRDNAKNTVYLQMNSLKPEDTAVYYCAVRSYLSYQHYYWGQGTQVTVSS

SEQ ID NO: 31090 - protein, 122 aa, Artificial Sequence
  Chemically Synthesized
QVQLQESGGGLVQAGGSLRLSCAASGTIFRARRMGWYRQAPGKERELVAAINDGTSTYYADSVKGRFTISRDNAKNTVYLQMNSLKPEDTAVYYCAARVRNTRYRPSFYIYWGQGTQVTVSS

SEQ ID NO: 31091 - protein, 121 aa, Artificial Sequence
  Chemically Synthesized
QVQLQESGGGLVQAGGSLRLSCAASGTISASYVMGWYRQAPGKERELVAGIDYGTNTYYADSVKGRFTISRDNAKNTVYLQMNSLKPEDTAVYYCAVYYRVDRDRCDYAYWGQGTQVTVSS

SEQ ID NO: 31092 - protein, 122 aa, Artificial Sequence
  Chemically Synthesized
QVQLQESGGGLVQAGGSLRLSCAASGSIFHRRYMGWYRQAPGKERELVASIAYGSITYYADSVKGRFTISRDNAKNTVYLQMNSLKPEDTAVYYCAAYSFSRYGQGPRHYYWGQGTQVTVSS

SEQ ID NO: 31093 - protein, 118 aa, Artificial Sequence
  Chemically Synthesized
QVQLQESGGGLVQAGGSLRLSCAASGYIFRWGAMGWYRQAPGKEREFVAAISFGGNTNYADSVKGRFTISRDNAKNTVYLQMNSLKPEDTAVYYCAAHERYRRTHYYWGQGTQVTVSS

SEQ ID NO: 31094 - protein, 125 aa, Artificial Sequence
  Chemically Synthesized
QVQLQESGGGLVQAGGSLRLSCAASGYISYREYMGWYRQAPGKEREFVASIAYGAITYYADSVKGRFTISRDNAKNTVYLQMNSLKPEDTAVYYCAAYIDRSYVRADDPDVLPYWGQGTQVTVSS

SEQ ID NO: 31095 - protein, 118 aa, Artificial Sequence
  Chemically Synthesized
QVQLQESGGGLVQAGGSLRLSCAASGTIFDEYGMGWYRQAPGKERELVATIDRGATTNYADSVKGRFTISRDNAKNTVYLQMNSLKPEDTAVYYCAATGPPQDDHRYWGQGTQVTVSS

SEQ ID NO: 31096 - protein, 112 aa, Artificial Sequence
  Chemically Synthesized
QVQLQESGGGLVQAGGSLRLSCAASGYISYANAMGWYRQAPGKERELVAGIGDGGNTYYADSVKGRFTISRDNAKNTVYLQMNSLKPEDTAVYYCATVFMYWGQGTQVTVSS

SEQ ID NO: 31097 - protein, 125 aa, Artificial Sequence
  Chemically Synthesized
QVQLQESGGGLVQAGGSLRLSCAASGSISRYSDMGWYRQAPGKEREFVATITFGAITYADSVKGRFTISRDNAKNTVYLQMNSLKPEDTAVYYCAVLPSYLDEWSAIRGFSHGYWGQGTQVTVSS

SEQ ID NO: 31098 - protein, 117 aa, Artificial Sequence
  Chemically Synthesized
QVQLQESGGGLVQAGGSLRLSCAASGYISSGYMGWYRQAPGKERELVASINYGSSTYYADSVKGRFTISRDNAKNTVYLQMNSLKPEDTAVYYCAAANKTDYWYFYWGQGTQVTVSS

SEQ ID NO: 31099 - protein, 118 aa, Artificial Sequence
  Chemically Synthesized
QVQLQESGGGLVQAGGSLRLSCAASGTIFVLQPMGWYRQAPGKEREFVAAIGYGATTNYADSVKGRFTISRDNAKNTVYLQMNSLKPEDTAVYYCAVDYDPQPYPFYWGQGTQVTVSS

SEQ ID NO: 31100 - protein, 121 aa, Artificial Sequence
  Chemically Synthesized
QVQLQESGGGLVQAGGSLRLSCAASGYIFTLMMGWYRQAPGKERELVATIAYGTNTNYADSVKGRFTISRDNAKNTVYLQMNSLKPEDTAVYYCAVFLSTPHWYQSYFTYWGQGTQVTVSS

SEQ ID NO: 31101 - protein, 121 aa, Artificial Sequence
  Chemically Synthesized
QVQLQESGGGLVQAGGSLRLSCAASGNIFQWYDMGWYRQAPGKERELLPLLVVVLLPYADSVKGRFTISRDNAKNTVYLQMNSLKPEDTAVYYCAVYVTYEFVDTFELPYWGQGTQVTVSS

SEQ ID NO: 31102 - protein, 126 aa, Artificial Sequence
  Chemically Synthesized
QVQLQESGGGLVQAGGSLRLSCAASGSISQEGQMGWYRQAPGKERELVATIGDGGNTNYADSVKGRFTISRDNAKNTVYLQMNSLKPEDTAVYYCAAADPYGRLQYVDTYDYHDYWGQGTQVTVSS

SEQ ID NO: 31103 - protein, 118 aa, Artificial Sequence
  Chemically Synthesized
QVQLQESGGGLVQAGGSLRLSCAASGSISLYYQMGWYRQAPGKERELVATITYGSITNYADSVKGRFTISRDNAKNTVYLQMNSLKPEDTAVYYCAAYSGKYAALDYWGQGTQVTVSS

SEQ ID NO: 31104 - protein, 122 aa, Artificial Sequence
  Chemically Synthesized
QVQLQESGGGLVQAGGSLRLSCAASGTIFDPTYMGWYRQAPGKEREFVAAIDYGGSTYYADSVKGRFTISRDNAKNTVYLQMNSLKPEDTAVYYCAAYRFATYYRYYVFYYWGQGTQVTVSS

SEQ ID NO: 31105 - protein, 126 aa, Artificial Sequence
  Chemically Synthesized
QVQLQESGGGLVQAGGSLRLSCAASGYISYDTVMGWYRQAPGKEREFGCRYCCWWYYQYADSVKGRFTISRDNAKNTVYLQMNSLKPEDTAVYYCAVWWGGVDRVDIRYPYYHEYWGQGTQVTVSS

SEQ ID NO: 31106 - protein, 118 aa, Artificial Sequence
  Chemically Synthesized
QVQLQESGGGLVQAGGSLRLSCAASGSISSVDGMGWYRQAPGKEREFVATITDGSTTNYADSVKGRFTISRDNAKNTVYLQMNSLKPEDTAVYYCAVNSGAVVALPYWGQGTQVTVSS

SEQ ID NO: 31107 - protein, 122 aa, Artificial Sequence
  Chemically Synthesized
QVQLQESGGGLVQAGGSLRLSCAASGNISRPSYMGWYRQAPGKEREFVATIDIGGITNYADSVKGRFTISRDNAKNTVYLQMNSLKPEDTAVYYCAARHRGPILSYVRLVYWGQGTQVTVSS

SEQ ID NO: 31108 - protein, 122 aa, Artificial Sequence
  Chemically Synthesized
QVQLQESGGGLVQAGGSLRLSCAASGNISAVWQMGWYRQAPGKEREFVASISKGSNTNYADSVKGRFTISRDNAKNTVYLQMNSLKPEDTAVYYCAAYFPAVRSADAYHYYWGQGTQVTVSS

SEQ ID NO: 31109 - protein, 122 aa, Artificial Sequence
  Chemically Synthesized
QVQLQESGGGLVQAGGSLRLSCAASGYISYRYRMGWYRQAPGKERELVATISYGASTYYADSVKGRFTISRDNAKNTVYLQMNSLKPEDTAVYYCAARYYRDSGLSQRHRYWGQGTQVTVSS

SEQ ID NO: 31110 - protein, 117 aa, Artificial Sequence
  Chemically Synthesized
QVQLQESGGGLVQAGGSLRLSCAASGTIFDYEMGWYRQAPGKERELVASIGYGGSTYYADSVKGRFTISRDNAKNTVYLQMNSLKPEDTAVYYCALTLTTKNRFLYWGQGTQVTVSS

SEQ ID NO: 31111 - protein, 126 aa, Artificial Sequence
  Chemically Synthesized
QVQLQESGGGLVQAGGSLRLSCAASGTISPRYGMGWYRQAPGKERELVAAINRGSITYYADSVKGRFTISRDNAKNTVYLQMNSLKPEDTAVYYCAADRYFARYYWRVGNNDHVYWGQGTQVTVSS

SEQ ID NO: 31112 - protein, 118 aa, Artificial Sequence
  Chemically Synthesized
QVQLQESGGGLVQAGGSLRLSCAASGYIFSRAYMGWYRQAPGKERELVAAITRGSTTYYADSVKGRFTISRDNAKNTVYLQMNSLKPEDTAVYYCAVRWYRRYYHGYWGQGTQVTVSS

SEQ ID NO: 31113 - protein, 117 aa, Artificial Sequence
  Chemically Synthesized
QVQLQESGGGLVQAGGSLRLSCAASGNISRGYYMGWYRQAPGKERELVATIGGGITYYADSVKGRFTISRDNAKNTVYLQMNSLKPEDTAVYYCAAQWYYRERHSYWGQGTQVTVSS

SEQ ID NO: 31114 - protein, 118 aa, Artificial Sequence
  Chemically Synthesized
QVQLQESGGGLVQAGGSLRLSCAASGTISRFLYMGWYRQAPGKERELVAAIDPGSTTNYADSVKGRFTISRDNAKNTVYLQMNSLKPEDTAVYYCAVERPDPYTYDYWGQGTQVTVSS

SEQ ID NO: 31115 - protein, 118 aa, Artificial Sequence
  Chemically Synthesized
QVQLQESGGGLVQAGGSLRLSCAASGYIFTTSYMGWYRQAPGKERELVAGIGYGGITNYADSVKGRFTISRDNAKNTVYLQMNSLKPEDTAVYYCAVDRDNYGYYWYWGQGTQVTVSS

SEQ ID NO: 31116 - protein, 122 aa, Artificial Sequence
  Chemically Synthesized
QVQLQESGGGLVQAGGSLRLSCAASGSISDYVDMGWYRQAPGKEREFVATIGYGTSTNYADSVKGRFTISRDNAKNTVYLQMNSLKPEDTAVYYCAAPYLQDTYDYGLLRYWGQGTQVTVSS

SEQ ID NO: 31117 - protein, 118 aa, Artificial Sequence
  Chemically Synthesized
QVQLQESGGGLVQAGGSLRLSCAASGYISYRYQMGWYRQAPGKERELVASIGVGGTTYYADSVKGRFTISRDNAKNTVYLQMNSLKPEDTAVYYCAVDDVAYDQHGYWGQGTQVTVSS

SEQ ID NO: 31118 - protein, 118 aa, Artificial Sequence
  Chemically Synthesized
QVQLQESGGGLVQAGGSLRLSCAASGNISVYSFMGWYRQAPGKEREFVAGISSGGNTYYADSVKGRFTISRDNAKNTVYLQMNSLKPEDTAVYYCAVYDIASDDFWYWGQGTQVTVSS

SEQ ID NO: 31119 - protein, 122 aa, Artificial Sequence
  Chemically Synthesized
QVQLQESGGGLVQAGGSLRLSCAASGNIFSYHYMGWYRQAPGKERELVATIDGGGSTYYADSVKGRFTISRDNAKNTVYLQMNSLKPEDTAVYYCAVRSYDGNYSGDYYYYWGQGTQVTVSS

SEQ ID NO: 31120 - protein, 110 aa, Artificial Sequence
  Chemically Synthesized
QVQLQESGGGLVQAGGSLRLSCAASGYISPFRDMGWYRQAPGKERELVASIDDGGSTYYADSVKGRFTISRDNAKNTVYLQMNSLKPEDTAVYYCAACYWGQGTQVTVSS

SEQ ID NO: 31121 - protein, 118 aa, Artificial Sequence
  Chemically Synthesized
QVQLQESGGGLVQAGGSLRLSCAASGSIFLLPIMGWYRQAPGKERELVAGINAGSITNYADSVKGRFTISRDNAKNTVYLQMNSLKPEDTAVYYCAVDAALVLPYLYWGQGTQVTVSS

SEQ ID NO: 31122 - protein, 117 aa, Artificial Sequence
  Chemically Synthesized
QVQLQESGGGLVQAGGSLRLSCAASGNISTSLMGWYRQAPGKERELVASIDNGTNTNYADSVKGRFTISRDNAKNTVYLQMNSLKPEDTAVYYCAVRTRSYQRHVYWGQGTQVTVSS

SEQ ID NO: 31123 - protein, 118 aa, Artificial Sequence
  Chemically Synthesized
QVQLQESGGGLVQAGGSLRLSCAASGTISNIAAMGWYRQAPGKERELVAAITKGTSTNYADSVKGRFTISRDNAKNTVYLQMNSLKPEDTAVYYCAARDWLVGPYIYWGQGTQVTVSS

SEQ ID NO: 31124 - protein, 120 aa, Artificial Sequence
  Chemically Synthesized
QVQLQESGGGLVQAGGSLRLSCAASGTISWRAVMGWYRQAPGKEREFVASIASGGTTYYADSVKGRFTISRDNAKNTVYLQMNSLKPEDTAVYYCAAERYSYQPYRLIYWGQGTQVTVSS

SEQ ID NO: 31125 - protein, 118 aa, Artificial Sequence
  Chemically Synthesized
QVQLQESGGGLVQAGGSLRLSCAASGSISVRVYMGWYRQAPGKERELVASISAGGNTYYADSVKGRFTISRDNAKNTVYLQMNSLKPEDTAVYYCAVYVPRYRSFQYWGQGTQVTVSS

SEQ ID NO: 31126 - protein, 122 aa, Artificial Sequence
  Chemically Synthesized
QVQLQESGGGLVQAGGSLRLSCAASGTISKRSYMGWYRQAPGKERELVAAINKGGITYYADSVKGRFTISRDNAKNTVYLQMNSLKPEDTAVYYCAAQYDGGYSGYRRYTYWGQGTQVTVSS

SEQ ID NO: 31127 - protein, 118 aa, Artificial Sequence
  Chemically Synthesized
QVQLQESGGGLVQAGGSLRLSCAASGTIFVLFYMGWYRQAPGKERELVATISVGTTTNYADSVKGRFTISRDNAKNTVYLQMNSLKPEDTAVYYCAVGYTDGFIYLYWGQGTQVTVSS

SEQ ID NO: 31128 - protein, 115 aa, Artificial Sequence
  Chemically Synthesized
QVQLQESGGGLVQAGGSLRLSCAASGTISRGLYMGWYRQAPGKEREFVAAIAYGGITYYADSVKGRFTISRDNAKNTVYLQMNSLKPEDTAVYYCAVSTTLTIYWGQGTQVTVSS

SEQ ID NO: 31129 - protein, 118 aa, Artificial Sequence
  Chemically Synthesized
QVQLQESGGGLVQAGGSLRLSCAASGSIFTWQDMGWYRQAPGKEREFVDQYADSVKGRFTISRDNAKNTVYLQMNSLKPEDTAVYYCAVRDGTTRDYYIPDPQSYDYWGQGTQVTVSS

SEQ ID NO: 31130 - protein, 122 aa, Artificial Sequence
  Chemically Synthesized
QVQLQESGGGLVQAGGSLRLSCAASGTIFDTTDMGWYRQAPGKERELVAAIGYGGITYYADSVKGRFTISRDNAKNTVYLQMNSLKPEDTAVYYCAAPAYGGGSIFLDYWYWGQGTQVTVSS

SEQ ID NO: 31131 - protein, 118 aa, Artificial Sequence
  Chemically Synthesized
QVQLQESGGGLVQAGGSLRLSCAASGSIFYYRNMGWYRQAPGKEREFVATIGLGTNTYYADSVKGRFTISRDNAKNTVYLQMNSLKPEDTAVYYCAARLRRGWRHYYWGQGTQVTVSS

SEQ ID NO: 31132 - protein, 118 aa, Artificial Sequence
  Chemically Synthesized
QVQLQESGGGLVQAGGSLRLSCAASGTISARTKMGWYRQAPGKERELVAGITSGGTTYYADSVKGRFTISRDNAKNTVYLQMNSLKPEDTAVYYCAVLWWYRYLHYYWGQGTQVTVSS

SEQ ID NO: 31133 - protein, 118 aa, Artificial Sequence
  Chemically Synthesized
QVQLQESGGGLVQAGGSLRLSCAASGYIFVVYAMGWYRQAPGKEREFVASIDSGTITNYADSVKGRFTISRDNAKNTVYLQMNSLKPEDTAVYYCAALLYARGKHEYWGQGTQVTVSS

SEQ ID NO: 31134 - protein, 119 aa, Artificial Sequence
  Chemically Synthesized
QVQLQESGGGLVQAGGSLRLSCAASGTIFVSAFMGWYRQAPGKERELVATINTAGTSTNYADSVKGRFTISRDNAKNTVYLQMNSLKPEDTAVYYCAAWGYDQYRFPYWGQGTQVTVSS

SEQ ID NO: 31135 - protein, 118 aa, Artificial Sequence
  Chemically Synthesized
QVQLQESGGGLVQAGGSLRLSCAASGYIFFSRNMGWYRQAPGKERELVAAITYGASTYYADSVKGRFTISRDNAKNTVYLQMNSLKPEDTAVYYCAAWHRLSRRFVYWGQGTQVTVSS

SEQ ID NO: 31136 - protein, 121 aa, Artificial Sequence
  Chemically Synthesized
QVQLQESGGGLVQAGGSLRLSCAASGSIFSIWSMGWYRQAPGKEREFVASINFGSITYYADSVKGRFTISRDNAKNTVYLQMNSLKPEDTAVYYCAASTRSSRTLVTFLYWGQGTQVTVSS

SEQ ID NO: 31137 - protein, 118 aa, Artificial Sequence
  Chemically Synthesized
QVQLQESGGGLVQAGGSLRLSCAASGYIFDTASMGWYRQAPGKERELVAAISAGTSTYYADSVKGRFTISRDNAKNTVYLQMNSLKPEDTAVYYCAVTWLYLYILPYWGQGTQVTVSS

SEQ ID NO: 31138 - protein, 118 aa, Artificial Sequence
  Chemically Synthesized
QVQLQESGGGLVQAGGSLRLSCAASGNISPARKMGWYRQAPGKERELVAGIARGGITYYADSVKGRFTISRDNAKNTVYLQMNSLKPEDTAVYYCAAIYYRVNRHRYWGQGTQVTVSS

SEQ ID NO: 31139 - protein, 118 aa, Artificial Sequence
  Chemically Synthesized
QVQLQESGGGLVQAGGSLRLSCAASGTIFGYRYMGWYRQAPGKERELVATINYGSNTYYADSVKGRFTISRDNAKNTVYLQMNSLKPEDTAVYYCAVRRLWIPGYYYWGQGTQVTVSS

SEQ ID NO: 31140 - protein, 122 aa, Artificial Sequence
  Chemically Synthesized
QVQLQESGGGLVQAGGSLRLSCAASGNIFLNRRMGWYRQAPGKEREFVAAIAYGANTYYADSVKGRFTISRDNAKNTVYLQMNSLKPEDTAVYYCAVIYRRYSGQPRGHWYWGQGTQVTVSS

SEQ ID NO: 31141 - protein, 113 aa, Artificial Sequence
  Chemically Synthesized
QVQLQESGGGLVQAGGSLRLSCAASGNISATYNMGWYRQAPGKERELLGGNTNYADSVKGRFTISRDNAKNTVYLQMNSLKPEDTAVYYCAVDFYPVWPHYYWGQGTQVTVSS

SEQ ID NO: 31142 - protein, 118 aa, Artificial Sequence
  Chemically Synthesized
QVQLQESGGGLVQAGGSLRLSCAASGTIFYLRFMGWYRQAPGKEREFVAAISYGANTYYADSVKGRFTISRDNAKNTVYLQMNSLKPEDTAVYYCAAYYPSSTGHGYWGQGTQVTVSS

SEQ ID NO: 31143 - protein, 110 aa, Artificial Sequence
  Chemically Synthesized
QVQLQESGGGLVQAGGSLRLSCAASGTISVYYMGWYRQAPGKEREFVAAIDAGSNTNYADSVKGRFTISRDNAKNTVYLQMNSLKPEDTAVYYCAWYYYWGQGTQVTVSS

SEQ ID NO: 31144 - protein, 118 aa, Artificial Sequence
  Chemically Synthesized
QVQLQESGGGLVQAGGSLRLSCAASGSIFPKRVMGWYRQAPGKERELVAAIAPGSITYYADSVKGRFTISRDNAKNTVYLQMNSLKPEDTAVYYCAATYFRGTRLLYWGQGTQVTVSS

SEQ ID NO: 31145 - protein, 118 aa, Artificial Sequence
  Chemically Synthesized
QVQLQESGGGLVQAGGSLRLSCAASGYIFVYSVMGWYRQAPGKEREFVAGINNGGTTNYADSVKGRFTISRDNAKNTVYLQMNSLKPEDTAVYYCAALGGTSDPLHYWGQGTQVTVSS

SEQ ID NO: 31146 - protein, 118 aa, Artificial Sequence
  Chemically Synthesized
QVQLQESGGGLVQAGGSLRLSCAASGNISGRWPMGWYRQAPGKEREFVAAISDGSNTNYADSVKGRFTISRDNAKNTVYLQMNSLKPEDTAVYYCAAVRYRYRYHAYWGQGTQVTVSS

SEQ ID NO: 31147 - protein, 119 aa, Artificial Sequence
  Chemically Synthesized
QVQLQESGGGLVQAGGSLRLSCAASGNIFPPHTMGWYRQAPGKEREFVASIAVGGTTNYADSVKGRFTISRDNAKNTVYLQMNSLKPEDTAVYYCAAQYNRWYAILVYWGQGTQVTVSS

SEQ ID NO: 31148 - protein, 118 aa, Artificial Sequence
  Chemically Synthesized
QVQLQESGGGLVQAGGSLRLSCAASGTISWRRTMGWYRQAPGKEREFVAGISIGSNTYYADSVKGRFTISRDNAKNTVYLQMNSLKPEDTAVYYCAAGARRRTYLPYWGQGTQVTVSS

SEQ ID NO: 31149 - protein, 118 aa, Artificial Sequence
  Chemically Synthesized
QVQLQESGGGLVQAGGSLRLSCAASGYIFIYFPMGWYRQAPGKERELVAGITNGASTYYADSVKGRFTISRDNAKNTVYLQMNSLKPEDTAVYYCAVVALFWDPLGYWGQGTQVTVSS

SEQ ID NO: 31150 - protein, 122 aa, Artificial Sequence
  Chemically Synthesized
QVQLQESGGGLVQAGGSLRLSCAASGSIFGAVTMGWYRQAPGKEREFVASIGGGSSTNYADSVKGRFTISRDNAKNTVYLQMNSLKPEDTAVYYCAVTRSSRPYYLRPHRYWGQGTQVTVSS

SEQ ID NO: 31151 - protein, 126 aa, Artificial Sequence
  Chemically Synthesized
QVQLQESGGGLVQAGGSLRLSCAASGTISRRYDMGWYRQAPGKEREFVATISTGASTNYADSVKGRFTISRDNAKNTVYLQMNSLKPEDTAVYYCAAVSKRAGWVTYYVRDKHGYWGQGTQVTVSS

SEQ ID NO: 31152 - protein, 122 aa, Artificial Sequence
  Chemically Synthesized
QVQLQESGGGLVQAGGSLRLSCAASGSIFRRYSMGWYRQAPGKERELVASITRGSNTYYADSVKGRFTISRDNAKNTVYLQMNSLKPEDTAVYYCAARPWVGYYARDFHGYWGQGTQVTVSS

SEQ ID NO: 31153 - protein, 126 aa, Artificial Sequence
  Chemically Synthesized
QVQLQESGGGLVQAGGSLRLSCAASGNIFGNASMGWYRQAPGKERELVASIAYGSNTYYADSVKGRFTISRDNAKNTVYLQMNSLKPEDTAVYYCAAWRGFVNVVGYYYVDRLPYWGQGTQVTVSS

SEQ ID NO: 31154 - protein, 118 aa, Artificial Sequence
  Chemically Synthesized
QVQLQESGGGLVQAGGSLRLSCAASGNIFRRTRMGWYRQAPGKEREFVATINHGATTYYADSVKGRFTISRDNAKNTVYLQMNSLKPEDTAVYYCAAGGLFRDSLAYWGQGTQVTVSS

SEQ ID NO: 31155 - protein, 118 aa, Artificial Sequence
  Chemically Synthesized
QVQLQESGGGLVQAGGSLRLSCAASGSISWRQVMGWYRQAPGKEREFVAAIAYGSITYYADSVKGRFTISRDNAKNTVYLQMNSLKPEDTAVYYCAVSYPYRFRYYYWGQGTQVTVSS

SEQ ID NO: 31156 - protein, 122 aa, Artificial Sequence
  Chemically Synthesized
QVQLQESGGGLVQAGGSLRLSCAASGSIFRQVNMGWYRQAPGKERELVATISSGSSTNYADSVKGRFTISRDNAKNTVYLQMNSLKPEDTAVYYCAVYPGGRNQGDTSHSYWGQGTQVTVSS

SEQ ID NO: 31157 - protein, 122 aa, Artificial Sequence
  Chemically Synthesized
QVQLQESGGGLVQAGGSLRLSCAASGSIFWNGVMGWYRQAPGKERELVAGISYGSTTYYADSVKGRFTISRDNAKNTVYLQMNSLKPEDTAVYYCAVVNKGGPVRRRDHVYWGQGTQVTVSS

SEQ ID NO: 31158 - protein, 118 aa, Artificial Sequence
  Chemically Synthesized
QVQLQESGGGLVQAGGSLRLSCAASGNIFRRPYMGWYRQAPGKERELVATINVGTNTNYADSVKGRFTISRDNAKNTVYLQMNSLKPEDTAVYYCAARSRYWPKFYYWGQGTQVTVSS

SEQ ID NO: 31159 - protein, 122 aa, Artificial Sequence
  Chemically Synthesized
QVQLQESGGGLVQAGGSLRLSCAASGTISGPHLMGWYRQAPGKERELVAGINTGGTTNYADSVKGRFTISRDNAKNTVYLQMNSLKPEDTAVYYCAVSTYDVDGEYDSHDYWGQGTQVTVSS

SEQ ID NO: 31160 - protein, 118 aa, Artificial Sequence
  Chemically Synthesized
QVQLQESGGGLVQAGGSLRLSCAASGSISWSYYMGWYRQAPGKEREFVAAIDDGSNTYYADSVKGRFTISRDNAKNTVYLQMNSLKPEDTAVYYCAADGYLPADYEYWGQGTQVTVSS

SEQ ID NO: 31161 - protein, 115 aa, Artificial Sequence
  Chemically Synthesized
QVQLQESGGGLVQAGGSLRLSCAASGTISFYRYMGWYRQAPGKEREFVAAIAHGSSTYYADSVKGRFTISRDNAKNTVYLQMNSLKPEDTAVYYCARGQWRHVYWGQGTQVTVSS

SEQ ID NO: 31162 - protein, 126 aa, Artificial Sequence
  Chemically Synthesized
QVQLQESGGGLVQAGGSLRLSCAASGYISKTAYMGWYRQAPGKEREFVAAITRGGTTYYADSVKGRFTISRDNAKNTVYLQMNSLKPEDTAVYYCAALKYYYPWRARYVSQPFVYWGQGTQVTVSS

SEQ ID NO: 31163 - protein, 122 aa, Artificial Sequence
  Chemically Synthesized
QVQLQESGGGLVQAGGSLRLSCAASGYISSGVEMGWYRQAPGKEREFVAGITAGTITYYADSVKGRFTISRDNAKNTVYLQMNSLKPEDTAVYYCAVDSLIAQYSLLPLDYWGQGTQVTVSS

SEQ ID NO: 31164 - protein, 126 aa, Artificial Sequence
  Chemically Synthesized
QVQLQESGGGLVQAGGSLRLSCAASGTISAYYYMGWYRQAPGKERELVAGIGYGASTYYADSVKGRFTISRDNAKNTVYLQMNSLKPEDTAVYYCAADKDDLDTKDQAYDLYLHYWGQGTQVTVSS

SEQ ID NO: 31165 - protein, 122 aa, Artificial Sequence
  Chemically Synthesized
QVQLQESGGGLVQAGGSLRLSCAASGNISWAQQMGWYRQAPGKERELVAAIGGGGSTYYADSVKGRFTISRDNAKNTVYLQMNSLKPEDTAVYYCAVRAPWYIRTWYTHVYWGQGTQVTVSS

SEQ ID NO: 31166 - protein, 127 aa, Artificial Sequence
  Chemically Synthesized
QVQLQESGGGLVQAGGSLRLSCAASGNIFPVANRMGWYRQAPGKERELVAAINRGGITYYADSVKGRFTISRDNAKNTVYLQMNSLKPEDTAVYYCAAQRYRQTWRYPSYDPLHAYWGQGTQVTVSS

SEQ ID NO: 31167 - protein, 118 aa, Artificial Sequence
  Chemically Synthesized
QVQLQESGGGLVQAGGSLRLSCAASGNIFPPDRMGWYRQAPGKERELVAAISYGANTNYADSVKGRFTISRDNAKNTVYLQMNSLKPEDTAVYYCAARYAYWSVFIYWGQGTQVTVSS

SEQ ID NO: 31168 - protein, 122 aa, Artificial Sequence
  Chemically Synthesized
QVQLQESGGGLVQAGGSLRLSCAASGTISRARYMGWYRQAPGKEREFVATINYGTITNYADSVKGRFTISRDNAKNTVYLQMNSLKPEDTAVYYCAARRRSWHYAYQGHRYWGQGTQVTVSS

SEQ ID NO: 31169 - protein, 126 aa, Artificial Sequence
  Chemically Synthesized
QVQLQESGGGLVQAGGSLRLSCAASGTIFGPRRMGWYRQAPGKEREFVATIGYGGNTYYADSVKGRFTISRDNAKNTVYLQMNSLKPEDTAVYYCAVRYYKTPRVNDGDARTHAYWGQGTQVTVSS

SEQ ID NO: 31170 - protein, 117 aa, Artificial Sequence
  Chemically Synthesized
QVQLQESGGGLVQAGGSLRLSCAASGTISPRYGMGWYRQAPGKERELVAAINRGSITYYADSVKGRFTISRDNAKNTVYLQMNSLKPEDTAVYYCAVYNYRWQLGYWGQGTQVTVSS

SEQ ID NO: 31171 - protein, 126 aa, Artificial Sequence
  Chemically Synthesized
QVQLQESGGGLVQAGGSLRLSCAASGSIFRVKRMGWYRQAPGKEREFVASIGYGGSTYYADSVKGRFTISRDNAKNTVYLQMNSLKPEDTAVYYCAAYQRRYAIPHTVSTDQHNYWGQGTQVTVSS

SEQ ID NO: 31172 - protein, 126 aa, Artificial Sequence
  Chemically Synthesized
QVQLQESGGGLVQAGGSLRLSCAASGYISWRTRMGWYRQAPGKEREFVAGIGYGTTTYYADSVKGRFTISRDNAKNTVYLQMNSLKPEDTAVYYCAVIYDRVGPYVGSRFVRHYYWGQGTQVTVSS

SEQ ID NO: 31173 - protein, 126 aa, Artificial Sequence
  Chemically Synthesized
QVQLQESGGGLVQAGGSLRLSCAASGTISPLRTMGWYRQAPGKERELVAAINDGASTYYADSVKGRFTISRDNAKNTVYLQMNSLKPEDTAVYYCAVRYLWYPYHGGGRRDRYRYWGQGTQVTVSS

SEQ ID NO: 31174 - protein, 118 aa, Artificial Sequence
  Chemically Synthesized
QVQLQESGGGLVQAGGSLRLSCAASGYISQWRGMGWYRQAPGKEREFVASIALGTTTNYADSVKGRFTISRDNAKNTVYLQMNSLKPEDTAVYYCAARRPSRYALWYWGQGTQVTVSS

SEQ ID NO: 31175 - protein, 122 aa, Artificial Sequence
  Chemically Synthesized
QVQLQESGGGLVQAGGSLRLSCAASGSIFIVNGMGWYRQAPGKERELVAGISIGGSTYYADSVKGRFTISRDNAKNTVYLQMNSLKPEDTAVYYCAVTGSFYYYYYYKHVYWGQGTQVTVSS

SEQ ID NO: 31176 - protein, 126 aa, Artificial Sequence
  Chemically Synthesized
QVQLQESGGGLVQAGGSLRLSCAASGSIFSSGYMGWYRQAPGKERELVASIGYGASTYYADSVKGRFTISRDNAKNTVYLQMNSLKPEDTAVYYCAAQRVTWANYNPGRYRTHTYWGQGTQVTVSS

SEQ ID NO: 31177 - protein, 122 aa, Artificial Sequence
  Chemically Synthesized
QVQLQESGGGLVQAGGSLRLSCAASGYISGYAIMGWYRQAPGKEREFVATITGGTITYYADSVKGRFTISRDNAKNTVYLQMNSLKPEDTAVYYCAAVFVPLLYDWITHQYWGQGTQVTVSS

SEQ ID NO: 31178 - protein, 122 aa, Artificial Sequence
  Chemically Synthesized
QVQLQESGGGLVQAGGSLRLSCAASGYIFTRRDMGWYRQAPGKERELVATIDYGSTTNYADSVKGRFTISRDNAKNTVYLQMNSLKPEDTAVYYCAVQKWVPFGRYFYHYYWGQGTQVTVSS

SEQ ID NO: 31179 - protein, 118 aa, Artificial Sequence
  Chemically Synthesized
QVQLQESGGGLVQAGGSLRLSCAASGYISRGIRMGWYRQAPGKEREFVATIGRGTNTNYADSVKGRFTISRDNAKNTVYLQMNSLKPEDTAVYYCAVRYWWNTTHRYWGQGTQVTVSS

SEQ ID NO: 31180 - protein, 125 aa, Artificial Sequence
  Chemically Synthesized
QVQLQESGGGLVQAGGSLRLSCAASGTIFAVWDMGWYRQAPGKERELVASIDFGGITNYADSVKGRFTISRDNAKNTVYLQMNSLKPEDTAVYYCAANGDENTRTTLTRLVTMYWGQGTQVTVSS

SEQ ID NO: 31181 - protein, 122 aa, Artificial Sequence
  Chemically Synthesized
QVQLQESGGGLVQAGGSLRLSCAASGTIFYLHRMGWYRQAPGKEREFVAAITSGSITYYADSVKGRFTISRDNAKNTVYLQMNSLKPEDTAVYYCAAGITPIYDERPTLEYWGQGTQVTVSS

SEQ ID NO: 31182 - protein, 116 aa, Artificial Sequence
  Chemically Synthesized
QVQLQESGGGLVQAGGSLRLSCAASGSISSGKSMGWYRQAPGKERELVATISYGTTTYYADSVKGRFTISRDNAKNTVYLQMNSLKPEDTAVYYCAARSYVYHTYWGQGTQVTVSS

SEQ ID NO: 31183 - protein, 117 aa, Artificial Sequence
  Chemically Synthesized
QVQLQESGGGLVQAGGSLRLSCAASGNISADVFMGWYRQAPGKERELVAAITGGTTYYADSVKGRFTISRDNAKNTVYLQMNSLKPEDTAVYYCAVYFYPPDVYFYWGQGTQVTVSS

SEQ ID NO: 31184 - protein, 118 aa, Artificial Sequence
  Chemically Synthesized
QVQLQESGGGLVQAGGSLRLSCAASGSIFSDSIMGWYRQAPGKERELVATIGSGGSTYYADSVKGRFTISRDNAKNTVYLQMNSLKPEDTAVYYCAVHYATWDTHGYWGQGTQVTVSS

SEQ ID NO: 31185 - protein, 118 aa, Artificial Sequence
  Chemically Synthesized
QVQLQESGGGLVQAGGSLRLSCAASGSIFPVYNMGWYRQAPGKEREFVAAINRGTNTNYADSVKGRFTISRDNAKNTVYLQMNSLKPEDTAVYYCAARISIPRKHHYWGQGTQVTVSS

SEQ ID NO: 31186 - protein, 113 aa, Artificial Sequence
  Chemically Synthesized
QVQLQESGGGLVQAGGSLRLSCAASGNISAFAWMGWYRQAPGKEREFVAGIGGGTSTNYADSVKGRFTISRDNAKNTVYLQMNSLKPEDTAVYYCAANYTLYWGQGTQVTVSS

SEQ ID NO: 31187 - protein, 126 aa, Artificial Sequence
  Chemically Synthesized
QVQLQESGGGLVQAGGSLRLSCAASGSIFAYVGMGWYRQAPGKEREFVATIDDGGTTYYADSVKGRFTISRDNAKNTVYLQMNSLKPEDTAVYYCAVDDRIYPVAGHYVRPPHYYWGQGTQVTVSS

SEQ ID NO: 31188 - protein, 122 aa, Artificial Sequence
  Chemically Synthesized
QVQLQESGGGLVQAGGSLRLSCAASGYIFGRSYMGWYRQAPGKEREFVASIAYGGTTNYADSVKGRFTISRDNAKNTVYLQMNSLKPEDTAVYYCAVAFRRVYRARDWYYYWGQGTQVTVSS

SEQ ID NO: 31189 - protein, 126 aa, Artificial Sequence
  Chemically Synthesized
QVQLQESGGGLVQAGGSLRLSCAASGTISYVLRMGWYRQAPGKEREFVASISAGGTTYYADSVKGRFTISRDNAKNTVYLQMNSLKPEDTAVYYCAVRRYGQYYRPDQYYRGHYYWGQGTQVTVSS

SEQ ID NO: 31190 - protein, 118 aa, Artificial Sequence
  Chemically Synthesized
QVQLQESGGGLVQAGGSLRLSCAASGSISYTGYMGWYRQAPGKEREFVATIAGGGITNYADSVKGRFTISRDNAKNTVYLQMNSLKPEDTAVYYCAADDVHDLGLGYWGQGTQVTVSS

SEQ ID NO: 31191 - protein, 118 aa, Artificial Sequence
  Chemically Synthesized
QVQLQESGGGLVQAGGSLRLSCAASGNISQIASMGWYRQAPGKEREFVAGIDAGGNTNYADSVKGRFTISRDNAKNTVYLQMNSLKPEDTAVYYCAARHDVVTEFVYWGQGTQVTVSS

SEQ ID NO: 31192 - protein, 125 aa, Artificial Sequence
  Chemically Synthesized
QVQLQESGGGLVQAGGSLRLSCAASGYIFSPLMGWYRQAPGKEREFVASIAYGAITYYADSVKGRFTISRDNAKNTVYLQMNSLKPEDTAVYYCAAGNPTYYVLEHYEGYSHVYWGQGTQVTVSS

SEQ ID NO: 31193 - protein, 118 aa, Artificial Sequence
  Chemically Synthesized
QVQLQESGGGLVQAGGSLRLSCAASGTIFHRLAMGWYRQAPGKEREFVASINRGASTYYADSVKGRFTISRDNAKNTVYLQMNSLKPEDTAVYYCAARYRYPYSLVYWGQGTQVTVSS

SEQ ID NO: 31194 - protein, 122 aa, Artificial Sequence
  Chemically Synthesized
QVQLQESGGGLVQAGGSLRLSCAASGTISYVKLMGWYRQAPGKEREFVASIATGATTNYADSVKGRFTISRDNAKNTVYLQMNSLKPEDTAVYYCAVVKRYRGWSRYPHHYWGQGTQVTVSS

SEQ ID NO: 31195 - protein, 118 aa, Artificial Sequence
  Chemically Synthesized
QVQLQESGGGLVQAGGSLRLSCAASGTIFKWRAMGWYRQAPGKEREFVAGIDGGAITNYADSVKGRFTISRDNAKNTVYLQMNSLKPEDTAVYYCAAYSRWGFRHGYWGQGTQVTVSS

SEQ ID NO: 31196 - protein, 126 aa, Artificial Sequence
  Chemically Synthesized
QVQLQESGGGLVQAGGSLRLSCAASGYIFGAGGMGWYRQAPGKEREFVATINPGAITNYADSVKGRFTISRDNAKNTVYLQMNSLKPEDTAVYYCAVSARDGYYWYPRPFVRHYYWGQGTQVTVSS

SEQ ID NO: 31197 - protein, 118 aa, Artificial Sequence
  Chemically Synthesized
QVQLQESGGGLVQAGGSLRLSCAASGSIFGRSVMGWYRQAPGKERELVAAIAQGSNTYYADSVKGRFTISRDNAKNTVYLQMNSLKPEDTAVYYCAAQWYYRERHSYWGQGTQVTVSS

SEQ ID NO: 31198 - protein, 118 aa, Artificial Sequence
  Chemically Synthesized
QVQLQESGGGLVQAGGSLRLSCAASGSIFAAYYMGWYRQAPGKERELVAGIGNGGTTYYADSVKGRFTISRDNAKNTVYLQMNSLKPEDTAVYYCAVNYDDEYWYGYWGQGTQVTVSS

SEQ ID NO: 31199 - protein, 128 aa, Artificial Sequence
  Chemically Synthesized
QVQLQESGGGLVQAGGSLRLSCAASGTIFGRVYMGWYRQAPGKEREFVASIDYGSTTNYADSVKGRFTISRDNAKNTVYLQMNSLKPEDTAVYYCAVNPELYKGFPYPGGGTWRHRYWGQGTQVTVSS

SEQ ID NO: 31200 - protein, 120 aa, Artificial Sequence
  Chemically Synthesized
QVQLQESGGGLVQAGGSLRLSCAASGTIFDGNDMGWYRQAPGKERELVAGINAGANTYADSVKGRFTISRDNAKNTVYLQMNSLKPEDTAVYYCAVALSLTLVFMLTMYWGQGTQVTVSS

SEQ ID NO: 31201 - protein, 118 aa, Artificial Sequence
  Chemically Synthesized
QVQLQESGGGLVQAGGSLRLSCAASGTISYRDWMGWYRQAPGKEREFVAGIDYGGSTYYADSVKGRFTISRDNAKNTVYLQMNSLKPEDTAVYYCAVQLGFPRHHSYWGQGTQVTVSS

SEQ ID NO: 31202 - protein, 118 aa, Artificial Sequence
  Chemically Synthesized
QVQLQESGGGLVQAGGSLRLSCAASGNISDTVWMGWYRQAPGKEREFVAGIDVGSITYYADSVKGRFTISRDNAKNTVYLQMNSLKPEDTAVYYCAAQQYYGYYLDYWGQGTQVTVSS

SEQ ID NO: 31203 - protein, 119 aa, Artificial Sequence
  Chemically Synthesized
QVQLQESGGGLVQAGGSLRLSCAASGSISWRRWMGWYRQAPGKEREFVAGIAGGATTYYADSVKGRFTISRDNAKNTVYLQMNSLKPEDTAVYYCAAQYKGDPYYHDYWGQGTQVTVSS

SEQ ID NO: 31204 - protein, 122 aa, Artificial Sequence
  Chemically Synthesized
QVQLQESGGGLVQAGGSLRLSCAASGSISWRRWMGWYRQAPGKEREVVAGIAGGATTYYADSVKGRFTISRDNAKNTVYLQMNSLKPEDTAVYYCAAQVYTARPPYFYHDYWGQGTQVTVSS

SEQ ID NO: 31205 - protein, 118 aa, Artificial Sequence
  Chemically Synthesized
QVQLQESGGGLVQAGGSLRLSCAASGTISIKSWMGWYRQAPGKEREFVAGISRGTTTYYADSVKGRFTISRDNAKNTVYLQMNSLKPEDTAVYYCAAQSYLDRYLDYWGQGTQVTVSS

SEQ ID NO: 31206 - protein, 126 aa, Artificial Sequence
  Chemically Synthesized
QVQLQESGGGLVQAGGSLRLSCAASGTISRRSWMGWYRQAPGKEREFVAGIASGANTYYADSVKGRFTISRDNAKNTVYLQMNSLKPEDTAVYYCAVQTNEYDSATTVGYRYYDYWGQGTQVTVSS

SEQ ID NO: 31207 - protein, 122 aa, Artificial Sequence
  Chemically Synthesized
QVQLQESGGGLVQAGGSLRLSCAASGNIFYVHWMGWYRQAPGKEREFVAGIGNGGITYYADSVKGRFTISRDNAKNTVYLQMNSLKPEDTAVYYCAVQVYVDIPGSGYHDYWGQGTQVTVSS

SEQ ID NO: 31208 - protein, 121 aa, Artificial Sequence
  Chemically Synthesized
QVQLQESGGGLVQAGGSLRLSCAASGSIFTQEWMGWYRQAPGKEREFVAGISRGSITYYADSVKGRFTISRDNAKNTVYLQMNSLKPEDTAVYYCAVQYNDNYNRIYLDYWGQGTQVTVSS

SEQ ID NO: 31209 - protein, 121 aa, Artificial Sequence
  Chemically Synthesized
QVQLQESGGGLVQAGGSLRLSCAASGNIFQTQWMGWYRQAPGKEREFVAGIARGSSTYYADSVKGRFTISRDNAKNTVYLQMNSLKPEDTAVYYCAVQYTWRQRTGYHDYWGQGTQVTVSS

SEQ ID NO: 31210 - protein, 122 aa, Artificial Sequence
  Chemically Synthesized
QVQLQESGGGLVQAGGSLRLSCAASGSISWRRWMGWYRQAPGKEREFVAGLAGGATTYYADSVKGRFTISRDNAKNTVYLQMNSLKPEDTAVYYCAAQVYTARPPYFYHDYWGQGTQVTVSS

SEQ ID NO: 31211 - protein, 118 aa, Artificial Sequence
  Chemically Synthesized
QVQLQESGGGLVQAGGSLRLSCAASGSISWRRWMGWYRQAPGKEREFVAGIAGGATTYYADSVKGRFTISRDNAKNTVYLQMNSLKPEDTAVYYCAAPRRYGPTHTYWGQGTQVTVSS

SEQ ID NO: 31212 - protein, 118 aa, Artificial Sequence
  Chemically Synthesized
QVQLQESGGGLVQAGGSLRLSCAASGNISSIIWMGWYRQAPGKEREFVAGITYGTTTYYADSVKGRFTISRDNAKNTVYLQMNSLKPEDTAVYYCAAQTASVRVLDYWGQGTQVTVSS

SEQ ID NO: 31213 - protein, 122 aa, Artificial Sequence
  Chemically Synthesized
QVQLQESGGGLVQAGGSLRLSCAASGNIFGVRWMGWYRQAPGKEREFVAGIAFGSNTYYADSVKGRFTISRDNAKNTVYLQMNSLKPEDTAVYYCAAQDNPSKTYARYFDYWGQGTQVTVSS

SEQ ID NO: 31214 - protein, 122 aa, Artificial Sequence
  Chemically Synthesized
QVQLQESGGGLVQAGGSLRLSCAASGSISWRRWMGWYRQAPGKEREFVAGIAGGATTYYADSVKGRFTISRDNAKNTVYLQMNSLKPEDTAVYYCAAQVYTARPPYFYQDYWGQGTQVTVSS

SEQ ID NO: 31215 - protein, 122 aa, Artificial Sequence
  Chemically Synthesized
QVQLQESGGGLVQAGGSLRLSCAASGSISDPDWMGWYRQAPGKEREFVAGIDVGSNTYYADSVKGRFTISRDNAKNTVYLQMNSLKPEDTAVYYCAAQVVKLRPQARYHTYWGQGTQVTVSS

SEQ ID NO: 31216 - protein, 118 aa, Artificial Sequence
  Chemically Synthesized
QVQLQESGGGLVQAGGSLRLSCAASGYISPWYWMGWYRQAPGKEREFVAGIALGGNTYYADSVKGRFTISRDNAKNTVYLQMNSLKPEDTAVYYCAVQGNRSTRHDYWGQGTQVTVSS

SEQ ID NO: 31217 - protein, 117 aa, Artificial Sequence
  Chemically Synthesized
QVQLQESGGGLVQAGGSLRLSCAASGYIFLYHWMGWYRQAPGKEREFVAGISRGGSTYYADSVKGRFTISRDNAKNTVYLQMNSLKPEDTAVYYCAAQRRYTYLDYWGQGTQVTVSS

SEQ ID NO: 31218 - protein, 118 aa, Artificial Sequence
  Chemically Synthesized
QVQLQESGGGLVQAGGSLRLSCAASGNISPTRWMGWYRQAPGKEREFVAGIGLGSTTYYADSVKGRFTISRDNAKNTVYLQMNSLKPEDTAVYYCAAQYYGSTYYDYWGQGTQVTVSS

SEQ ID NO: 31219 - protein, 125 aa, Artificial Sequence
  Chemically Synthesized
QVQLQESGGGLVQAGGSLRLSCAASGSISDLGWMGWYRQAPGKEREFVAGITSGSITYYADSVKGRFTISRDNAKNTVYLQMNSLKPEDTAVYYCAAQSTVYADDRGAYRYYSYWGQGTQVTVSS

SEQ ID NO: 31220 - protein, 122 aa, Artificial Sequence
  Chemically Synthesized
QVQLQESGGGLVQAGGSLRLSCAASGYIFGPHWMGWYRQAPGKEREFVAGIDVGSTTYYADSVKGRFTISRDNAKNTVYLQMNSLKPEDTAVYYCAAQYRAGYVDRLYHSYWGQGTQVTVSS

SEQ ID NO: 31221 - protein, 118 aa, Artificial Sequence
  Chemically Synthesized
QVQLQESGGGLVQAGGSLRLSCAASGSISPIYYMGWYRQAPGKEREFVAGIADGTITNYADSVKGRFTISRDNAKNTVYLQMNSLKPEDTAVYYCAVDRGYASLHRYWGQGTQVTVSS

SEQ ID NO: 31222 - protein, 122 aa, Artificial Sequence
  Chemically Synthesized
QVQLQESGGGLVQAGGSLRLSCAASGTISTYHYMGWYRQAPGKERELVAGISYGTITNYADSVKGRFTISRDNAKNTVYLQMNSLKPEDTAVYYCAAQYWLDGDRDLHLDYWGQGTQVTVSS

SEQ ID NO: 31223 - protein, 118 aa, Artificial Sequence
  Chemically Synthesized
QVQLQESGGGLVQAGGSLRLSCAASGYISLQTVMGWYRQAPGKERELVAGIDGGSTTNYADSVKGRFTISRDNAKNTVYLQMNSLKPEDTAVYYCAADYIYAWPFNYWGQGTQVTVSS

SEQ ID NO: 31224 - protein, 122 aa, Artificial Sequence
  Chemically Synthesized
QVQLQESGGGLVQAGGSLRLSCAASGTIFYGLYMGWYRQAPGKEREFVATINSGTITYYADSVKGRFTISRDNAKNTVYLQMNSLKPEDTAVYYCAAEYTYHYYPFYPLGYWGQGTQVTVSS

SEQ ID NO: 31225 - protein, 118 aa, Artificial Sequence
  Chemically Synthesized
QVQLQESGGGLVQAGGSLRLSCAASGTISRYRSMGWYRQAPGKEREFVASIATGGTTYYADSVKGRFTISRDNAKNTVYLQMNSLKPEDTAVYYCAVRAYYTRYHTYWGQGTQVTVSS

SEQ ID NO: 31226 - protein, 122 aa, Artificial Sequence
  Chemically Synthesized
QVQLQESGGGLVQAGGSLRLSCAASGYIFPGYYMGWYRQAPGKERELVAGIGGGTNTNYADSVKGRFTISRDNAKNTVYLQMNSLKPEDTAVYYCAAGHTDGGVYYEDHYYWGQGTQVTVSS

SEQ ID NO: 31227 - protein, 113 aa, Artificial Sequence
  Chemically Synthesized
QVQLQESGGGLVQAGGSLRLSCAASGNISDRLMGWYRQAPGKERELLPLLIRYYYLYADSVKGRFTISRDNAKNTVYLQMNSLKPEDTAVYYCAVDGYWLPYWGQGTQVTVSS

SEQ ID NO: 31228 - protein, 118 aa, Artificial Sequence
  Chemically Synthesized
QVQLQESGGGLVQAGGSLRLSCAASGSISAVRVMGWYRQAPGKEREFVASIARGASTNYADSVKGRFTISRDNAKNTVYLQMNSLKPEDTAVYYCAAVYLDSVPHDYWGQGTQVTVSS

SEQ ID NO: 31229 - protein, 118 aa, Artificial Sequence
  Chemically Synthesized
QVQLQESGGGLVQAGGSLRLSCAASGYISRGGYMGWYRQAPGKEREFVATITKGASTNYADSVKGRFTISRDNAKNTVYLQMNSLKPEDTAVYYCAAYSYYVRFHRYWGQGTQVTVSS

SEQ ID NO: 31230 - protein, 122 aa, Artificial Sequence
  Chemically Synthesized
QVQLQESGGGLVQAGGSLRLSCAASGNISYSYDMGWYRQAPGKEREFVAAITEGGITNYADSVKGRFTISRDNAKNTVYLQMNSLKPEDTAVYYCAATPSLDGPYLYDHGYWGQGTQVTVSS

SEQ ID NO: 31231 - protein, 117 aa, Artificial Sequence
  Chemically Synthesized
QVQLQESGGGLVQAGGSLRLSCAASGSIFQGNYMGWYRQAPGKEREFVATIGGGTNTYYADSVKGRFTISRDNAKNTVYLQMNSLKPEDTAVYYCAAWDPYDHNYYWGQGTQVTVSS

SEQ ID NO: 31232 - protein, 117 aa, Artificial Sequence
  Chemically Synthesized
QVQLQESGGGLVQAGGSLRLSCAASGYIMGWYRQAPGKEREFVATITVGTITNYADSVKGRFTISRDNAKNTVYLQMNSLKPEDTAVYYCAVDDYVLEGSDVVLDYWGQGTQVTVSS

SEQ ID NO: 31233 - protein, 118 aa, Artificial Sequence
  Chemically Synthesized
QVQLQESGGGLVQAGGSLRLSCAASGYIFIISYMGWYRQAPGKEREFVAGIGTGGSTNYADSVKGRFTISRDNAKNTVYLQMNSLKPEDTAVYYCAANDAYHYPYYYWGQGTQVTVSS

SEQ ID NO: 31234 - protein, 118 aa, Artificial Sequence
  Chemically Synthesized
QVQLQESGGGLVQAGGSLRLSCAASGYISYKDNMGWYRQAPGKEREFVAGISFGSNTNYADSVKGRFTISRDNAKNTVYLQMNSLKPEDTAVYYCAADTNTYRYHYYWGQGTQVTVSS

SEQ ID NO: 31235 - protein, 125 aa, Artificial Sequence
  Chemically Synthesized
QVQLQESGGGLVQAGGSLRLSCAASGSIFAPDVMGWYRQAPGKEREFVAAITWGSTTNYADSVKGRFTISRDNAKNTVYLQMNSLKPEDTAVYYCAVNTRTLLRSIGTLVRVLYWGQGTQVTVSS

SEQ ID NO: 31236 - protein, 121 aa, Artificial Sequence
  Chemically Synthesized
QVQLQESGGGLVQAGGSLRLSCAASGTISLYGMGWYRQAPGKERELVAGISDGSNTNYADSVKGRFTISRDNAKNTVYLQMNSLKPEDTAVYYCAAAYYSGYGTRVGLWYWGQGTQVTVSS

SEQ ID NO: 31237 - protein, 118 aa, Artificial Sequence
  Chemically Synthesized
QVQLQESGGGLVQAGGSLRLSCAASGYISRGRRMGWYRQAPGKEREFVAAISVGGSTNYADSVKGRFTISRDNAKNTVYLQMNSLKPEDTAVYYCAVDLWWLGWLNYWGQGTQVTVSS

SEQ ID NO: 31238 - protein, 121 aa, Artificial Sequence
  Chemically Synthesized
QVQLQESGGGLVQAGGSLRLSCAASGYISYGRGMGWYRQAPGKERELVASIGGGASTNYADSVKGRFTISRDNAKNTVYLQMNSLKPEDTAVYYCAVYQFDHYPWLFHYYWGQGTQVTVSS

SEQ ID NO: 31239 - protein, 117 aa, Artificial Sequence
  Chemically Synthesized
QVQLQESGGGLVQAGGSLRLSCAASGTFLVTGMGWYRQAPGKEREFVAGITDGSTTNYADSVKGRFTISRDNAKNTVYLQMNSLKPEDTAVYYCAVWDLQADEYTYWGQGTQVTVSS

SEQ ID NO: 31240 - protein, 117 aa, Artificial Sequence
  Chemically Synthesized
QVQLQESGGGLVQAGGSLRLSCAASGNIFRSDAMGWYRQAPGKERELVAGINGGTTNYADSVKGRFTISRDNAKNTVYLQMNSLKPEDTAVYYCAALTYDNRWYSYWGQGTQVTVSS

SEQ ID NO: 31241 - protein, 126 aa, Artificial Sequence
  Chemically Synthesized
QVQLQESGGGLVQAGGSLRLSCAASGNISGQLTMGWYRQAPGKEREFVAAIAYGASTNYADSVKGRFTISRDNAKNTVYLQMNSLKPEDTAVYYCAAVHALYDGGQWGGVERHYYWGQGTQVTVSS

SEQ ID NO: 31242 - protein, 122 aa, Artificial Sequence
  Chemically Synthesized
QVQLQESGGGLVQAGGSLRLSCAASGSISGYTYMGWYRQAPGKERELVASINTGGITYYADSVKGRFTISRDNAKNTVYLQMNSLKPEDTAVYYCAVDYPPADGYVYQLRYWGQGTQVTVSS

SEQ ID NO: 31243 - protein, 118 aa, Artificial Sequence
  Chemically Synthesized
QVQLQESGGGLVQAGGSLRLSCAASGNIFYYKSMGWYRQAPGKERELVAGITGGATTNYADSVKGRFTISRDNAKNTVYLQMNSLKPEDTAVYYCAAAYYDDGWHAYWGQGTQVTVSS

SEQ ID NO: 31244 - protein, 120 aa, Artificial Sequence
  Chemically Synthesized
QVQLQESGGGLVQAGGSLRLSCAASGNISSYMGWYRQAPGKERELVASITDGSTTNYADSVKGRFTISRDNAKNTVYLQMNSLKPEDTAVYYCAARGVLGHWFPLYYTYWGQGTQVTVSS

SEQ ID NO: 31245 - protein, 118 aa, Artificial Sequence
  Chemically Synthesized
QVQLQESGGGLVQAGGSLRLSCAASGTIFSADFMGWYRQAPGKERELVAGINGGSITYYADSVKGRFTISRDNAKNTVYLQMNSLKPEDTAVYYCAVYDAVYGPYRYWGQGTQVTVSS

SEQ ID NO: 31246 - protein, 126 aa, Artificial Sequence
  Chemically Synthesized
QVQLQESGGGLVQAGGSLRLSCAASGNISDAIFMGWYRQAPGKERELVASINIGTITNYADSVKGRFTISRDNAKNTVYLQMNSLKPEDTAVYYCAVKTPAYYYVVLRAPNLHTYWGQGTQVTVSS

SEQ ID NO: 31247 - protein, 121 aa, Artificial Sequence
  Chemically Synthesized
QVQLQESGGGLVQAGGSLRLSCAASGTIFDTYYMGWYRQAPGKEREFVATITTGTITYADSVKGRFTISRDNAKNTVYLQMNSLKPEDTAVYYCAAYVHNGGYINIGLIYWGQGTQVTVSS

SEQ ID NO: 31248 - protein, 116 aa, Artificial Sequence
  Chemically Synthesized
QVQLQESGGGLVQAGGSLRLSCAASGTISYYAGMGWYRQAPGKEREFVAAINRGASTNYADSVKGRFTISRDNAKNTVYLQMNSLKPEDTAVYYCAAYAAYPYGYWGQGTQVTVSS

SEQ ID NO: 31249 - protein, 118 aa, Artificial Sequence
  Chemically Synthesized
QVQLQESGGGLVQAGGSLRLSCAASGNIFAYRGMGWYRQAPGKEREFVAGIAYGATTNYADSVKGRFTISRDNAKNTVYLQMNSLKPEDTAVYYCAVVTQDAGFHWYWGQGTQVTVSS

SEQ ID NO: 31250 - protein, 121 aa, Artificial Sequence
  Chemically Synthesized
QVQLQESGGGLVQAGGSLRLSCAASGSIFIATMGWYRQAPGKERELVASISYGSITYYADSVKGRFTISRDNAKNTVYLQMNSLKPEDTAVYYCAADLSYGDTQADTFPYWGQGTQVTVSS

SEQ ID NO: 31251 - protein, 126 aa, Artificial Sequence
  Chemically Synthesized
QVQLQESGGGLVQAGGSLRLSCAASGSISFLYIMGWYRQAPGKERELVAGIAGGTITYYADSVKGRFTISRDNAKNTVYLQMNSLKPEDTAVYYCAVARLSVYSFDRYVYVYHPYWGQGTQVTVSS

SEQ ID NO: 31252 - protein, 117 aa, Artificial Sequence
  Chemically Synthesized
QVQLQESGGGLVQAGGSLRLSCAASGSISSYRFMGWYRQAPGKERELVAGIAYGTSTNYADSVKGRFTISRDNAKNTVYLQMNSLKPEDTAVYYCAVQSQYQDRYYWGQGTQVTVSS

SEQ ID NO: 31253 - protein, 118 aa, Artificial Sequence
  Chemically Synthesized
QVQLQESGGGLVQAGGSLRLSCAASGTISRWGAMGWYRQAPGKEREFVAGISAGASTNYADSVKGRFTISRDNAKNTVYLQMNSLKPEDTAVYYCAAVIDGEIRYYYWGQGTQVTVSS

SEQ ID NO: 31254 - protein, 118 aa, Artificial Sequence
  Chemically Synthesized
QVQLQESGGGLVQAGGSLRLSCAASGTISGHDPMGWYRQAPGKERELVAAIDNGGITNYADSVKGRFTISRDNAKNTVYLQMNSLKPEDTAVYYCAVYDYGIRVHYYWGQGTQVTVSS

SEQ ID NO: 31255 - protein, 118 aa, Artificial Sequence
  Chemically Synthesized
QVQLQESGGGLVQAGGSLRLSCAASGYISNSYFMGWYRQAPGKEREFVAAIGVGAITNYADSVKGRFTISRDNAKNTVYLQMNSLKPEDTAVYYCAALSRNGQYFWYWGQGTQVTVSS

SEQ ID NO: 31256 - protein, 118 aa, Artificial Sequence
  Chemically Synthesized
QVQLQESGGGLVQAGGSLRLSCAASGSISYPIVMGWYRQAPGKEREFVAAIATGTSTNYADSVKGRFTISRDNAKNTVYLQMNSLKPEDTAVYYCAAIRAERTYYYYWGQGTQVTVSS

SEQ ID NO: 31257 - protein, 118 aa, Artificial Sequence
  Chemically Synthesized
QVQLQESGGGLVQAGGSLRLSCAASGTIFGPWYMGWYRQAPGKEREFVATITRGGSTYYADSVKGRFTISRDNAKNTVYLQMNSLKPEDTAVYYCAVTTIYGYRHVYWGQGTQVTVSS

SEQ ID NO: 31258 - protein, 123 aa, Artificial Sequence
  Chemically Synthesized
QVQLQESGGGLVQAGGSLRLSCAASGTISAWAGTMGWYRQAPGKEREFVASITYGGSTYYADSVKGRFTISRDNAKNTVYLQMNSLKPEDTAVYYCAVDDQFIPDYYWVLSYWGQGTQVTVSS

SEQ ID NO: 31259 - protein, 118 aa, Artificial Sequence
  Chemically Synthesized
QVQLQESGGGLVQAGGSLRLSCAASGTISYISQMGWYRQAPGKERELVATITYGANTNYADSVKGRFTISRDNAKNTVYLQMNSLKPEDTAVYYCAVRYPQGSFHYYWGQGTQVTVSS

SEQ ID NO: 31260 - protein, 118 aa, Artificial Sequence
  Chemically Synthesized
QVQLQESGGGLVQAGGSLRLSCAASGYISRTYWMGWYRQAPGKERELVAAIAYGGTTYYADSVKGRFTISRDNAKNTVYLQMNSLKPEDTAVYYCAAYRARRLYHPYWGQGTQVTVSS

SEQ ID NO: 31261 - protein, 121 aa, Artificial Sequence
  Chemically Synthesized
QVQLQESGGGLVQAGGSLRLSCAASGNISHDQLMGWYRQAPGKEREFVAIAAGGNTNYADSVKGRFTISRDNAKNTVYLQMNSLKPEDTAVYYCAAYDTQSPFFSDTLAYWGQGTQVTVSS

SEQ ID NO: 31262 - protein, 126 aa, Artificial Sequence
  Chemically Synthesized
QVQLQESGGGLVQAGGSLRLSCAASGTISDLSHMGWYRQAPGKERELVAAIDGGTNTYYADSVKGRFTISRDNAKNTVYLQMNSLKPEDTAVYYCAVYTGSYFGDWIYRPHGHDYWGQGTQVTVSS

SEQ ID NO: 31263 - protein, 118 aa, Artificial Sequence
  Chemically Synthesized
QVQLQESGGGLVQAGGSLRLSCAASGNIFRSTTMGWYRQAPGKEREFVAGIAPGTTTNYADSVKGRFTISRDNAKNTVYLQMNSLKPEDTAVYYCAVLLHGTRILYYWGQGTQVTVSS

SEQ ID NO: 31264 - protein, 118 aa, Artificial Sequence
  Chemically Synthesized
QVQLQESGGGLVQAGGSLRLSCAASGSISFLRHMGWYRQAPGKEREFVASIAYGANTYYADSVKGRFTISRDNAKNTVYLQMNSLKPEDTAVYYCAVVVYDDAYYGYWGQGTQVTVSS

SEQ ID NO: 31265 - protein, 122 aa, Artificial Sequence
  Chemically Synthesized
QVQLQESGGGLVQAGGSLRLSCAASGTISVGDGMGWYRQAPGKERELVAAIDVGGNTYYADSVKGRFTISRDNAKNTVYLQMNSLKPEDTAVYYCAVYGYGPDVTGPTYPYWGQGTQVTVSS

SEQ ID NO: 31266 - protein, 117 aa, Artificial Sequence
  Chemically Synthesized
QVQLQESGGGLVQAGGSLRLSCAASGSIFRPSMGWYRQAPGKERELVAGITYGTTTNYADSVKGRFTISRDNAKNTVYLQMNSLKPEDTAVYYCAVARDYHTTFDYWGQGTQVTVSS

SEQ ID NO: 31267 - protein, 118 aa, Artificial Sequence
  Chemically Synthesized
QVQLQESGGGLVQAGGSLRLSCAASGTISTYYAMGWYRQAPGKEREFVAGIGQGGTTYYADSVKGRFTISRDNAKNTVYLQMNSLKPEDTAVYYCAVLAGRSPAHYYWGQGTQVTVSS

SEQ ID NO: 31268 - protein, 118 aa, Artificial Sequence
  Chemically Synthesized
QVQLQESGGGLVQAGGSLRLSCAASGYISGYDYMGWYRQAPGKEREFVAGISTGTSTNYADSVKGRFTISRDNAKNTVYLQMNSLKPEDTAVYYCAALAYVRRYHSYWGQGTQVTVSS

SEQ ID NO: 31269 - protein, 118 aa, Artificial Sequence
  Chemically Synthesized
QVQLQESGGGLVQAGGSLRLSCAASGSISYKFRMGWYRQAPGKEREFVASITYGTTTNYADSVKGRFTISRDNAKNTVYLQMNSLKPEDTAVYYCAALDPPSGQYPYWGQGTQVTVSS

SEQ ID NO: 31270 - protein, 121 aa, Artificial Sequence
  Chemically Synthesized
QVQLQESGGGLVQAGGSLRLSCAASGTFLVLLMGWYRQAPGKEREFVASIAYGATTNYADSVKGRFTISRDNAKNTVYLQMNSLKPEDTAVYYCAARGSSYRVGTALYTYWGQGTQVTVSS

SEQ ID NO: 31271 - protein, 125 aa, Artificial Sequence
  Chemically Synthesized
QVQLQESGGGLVQAGGSLRLSCAASGNISWHRPMGWYRQAPGKERELVATISDGASTYYADSVKGRFTISRDNAKNTVYLQMNSLKPEDTAVYYCAAKLLAYGDYYGAEFPHLYWGQGTQVTVSS

SEQ ID NO: 31272 - protein, 125 aa, Artificial Sequence
  Chemically Synthesized
QVQLQESGGGLVQAGGSLRLSCAASGYISGYDMGWYRQAPGKERELVAAIGSGTSTNYADSVKGRFTISRDNAKNTVYLQMNSLKPEDTAVYYCAVDDYYGSRQRDGDGAGHDYWGQGTQVTVSS

SEQ ID NO: 31273 - protein, 118 aa, Artificial Sequence
  Chemically Synthesized
QVQLQESGGGLVQAGGSLRLSCAASGTISPIVSMGWYRQAPGKERELVATISYGGNTNYADSVKGRFTISRDNAKNTVYLQMNSLKPEDTAVYYCAANLSATSIHAYWGQGTQVTVSS

SEQ ID NO: 31274 - protein, 118 aa, Artificial Sequence
  Chemically Synthesized
QVQLQESGGGLVQAGGSLRLSCAASGSIFDDYYMGWYRQAPGKERELVAAIASGANTYYADSVKGRFTISRDNAKNTVYLQMNSLKPEDTAVYYCAVQKLYGPGHDYWGQGTQVTVSS

SEQ ID NO: 31275 - protein, 122 aa, Artificial Sequence
  Chemically Synthesized
QVQLQESGGGLVQAGGSLRLSCAASGNISQFTYMGWYRQAPGKEREFVASINYGSNTNYADSVKGRFTISRDNAKNTVYLQMNSLKPEDTAVYYCAVLIYFQDYASRYLSYWGQGTQVTVSS

SEQ ID NO: 31276 - protein, 117 aa, Artificial Sequence
  Chemically Synthesized
QVQLQESGGGLVQAGGSLRLSCAASGSISRGSNMGWYRQAPGKEREFVATIAEGTITYYADSVKGRFTISRDNAKNTVYLQMNSLKPEDTAVYYCAVYDRNSRYYYWGQGTQVTVSS

SEQ ID NO: 31277 - protein, 118 aa, Artificial Sequence
  Chemically Synthesized
QVQLQESGGGLVQAGGSLRLSCAASGNIFFATVMGWYRQAPGKEREFVAGIDAGTTTNYADSVKGRFTISRDNAKNTVYLQMNSLKPEDTAVYYCAAVYADHGYHAYWGQGTQVTVSS

SEQ ID NO: 31278 - protein, 118 aa, Artificial Sequence
  Chemically Synthesized
QVQLQESGGGLVQAGGSLRLSCAASGTISVPTIMGWYRQAPGKEREFVASIDYGTSTNYADSVKGRFTISRDNAKNTVYLQMNSLKPEDTAVYYCAVLVHRRKWLYYWGQGTQVTVSS

SEQ ID NO: 31279 - protein, 118 aa, Artificial Sequence
  Chemically Synthesized
QVQLQESGGGLVQAGGSLRLSCAASGNIFVPANMGWYRQAPGKEREFVAGIGEGGNTNYADSVKGRFTISRDNAKNTVYLQMNSLKPEDTAVYYCAALYRDRGYLYYWGQGTQVTVSS

SEQ ID NO: 31280 - protein, 118 aa, Artificial Sequence
  Chemically Synthesized
QVQLQESGGGLVQAGGSLRLSCAASGSIFDYLSMGWYRQAPGKERELVATIGEGSNTYYADSVKGRFTISRDNAKNTVYLQMNSLKPEDTAVYYCAVDSDDLYAYYYWGQGTQVTVSS

SEQ ID NO: 31281 - protein, 121 aa, Artificial Sequence
  Chemically Synthesized
QVQLQESGGGLVQAGGSLRLSCAASGNIFYVGYMGWYRQAPGKERELLPVLVLVLLPYADSVKGRFTISRDNAKNTVYLQMNSLKPEDTAVYYCAAGNSPGVSYVPYLPYWGQGTQVTVSS

SEQ ID NO: 31282 - protein, 117 aa, Artificial Sequence
  Chemically Synthesized
QVQLQESGGGLVQAGGSLRLSCAASGSISGYSMGWYRQAPGKERELVAAIDQGVNTNYADSVKGRFTISRDNAKNTVYLQMNSLKPEDTAVYYCAASGRGLYGFTYWGQGTQVTVSS

SEQ ID NO: 31283 - protein, 122 aa, Artificial Sequence
  Chemically Synthesized
QVQLQESGGGLVQAGGSLRLSCAASGSISGGYYMGWYRQAPGKEREFVAGIGTGGITYYADSVKGRFTISRDNAKNTVYLQMNSLKPEDTAVYYCAVGHYYDGIVSRGLLYWGQGTQVTVSS

SEQ ID NO: 31284 - protein, 118 aa, Artificial Sequence
  Chemically Synthesized
QVQLQESGGGLVQAGGSLRLSCAASGNIFGHSTMGWYRQAPGKEREFVAGISKGANTNYADSVKGRFTISRDNAKNTVYLQMNSLKPEDTAVYYCAALYNDRAYYHYWGQGTQVTVSS

SEQ ID NO: 31285 - protein, 118 aa, Artificial Sequence
  Chemically Synthesized
QVQLQESGGGLVQAGGSLRLSCAASGYISAEGLMGWYRQAPGKERELVASIAGGGTTYYADSVKGRFTISRDNAKNTVYLQMNSLKPEDTAVYYCAALFYDTRYYYYWGQGTQVTVSS

SEQ ID NO: 31286 - protein, 117 aa, Artificial Sequence
  Chemically Synthesized
QVQLQESGGGLVQAGGSLRLSCAASGTISRIRYMGWYRQAPGKERELVAAISRGTITYYADSVKGRFTISRDNAKNTVYLQMNSLKPEDTAVYYCAAVDYRQDLDYWGQGTQVTVSS

SEQ ID NO: 31287 - protein, 118 aa, Artificial Sequence
  Chemically Synthesized
QVQLQESGGGLVQAGGSLRLSCAASGYIFAFLDMGWYRQAPGKEREFVAAIAYGGTTNYADSVKGRFTISRDNAKNTVYLQMNSLKPEDTAVYYCAAGYRFHGYHYYWGQGTQVTVSS

SEQ ID NO: 31288 - protein, 117 aa, Artificial Sequence
  Chemically Synthesized
QVQLQESGGGLVQAGGSLRLSCAASGTISQADYMGWYRQAPGKEREFVAAIGGGTTNYADSVKGRFTISRDNAKNTVYLQMNSLKPEDTAVYYCAAVVQEKTLHGYWGQGTQVTVSS

SEQ ID NO: 31289 - protein, 118 aa, Artificial Sequence
  Chemically Synthesized
QVQLQESGGGLVQAGGSLRLSCAASGTIFRVVVMGWYRQAPGKERELVASIASGGNTNYADSVKGRFTISRDNAKNTVYLQMNSLKPEDTAVYYCAVLSYNTIWYYYWGQGTQVTVSS

SEQ ID NO: 31290 - protein, 118 aa, Artificial Sequence
  Chemically Synthesized
QVQLQESGGGLVQAGGSLRLSCAASGNIFTLYGMGWYRQAPGKERELVATIGPGANTYYADSVKGRFTISRDNAKNTVYLQMNSLKPEDTAVYYCAVNYIFFLFHRYWGQGTQVTVSS

SEQ ID NO: 31291 - protein, 118 aa, Artificial Sequence
  Chemically Synthesized
QVQLQESGGGLVQAGGSLRLSCAASGTISRRLIMGWYRQAPGKEREFVASISDGANTNYADSVKGRFTISRDNAKNTVYLQMNSLKPEDTAVYYCAAVQRAKDYHGYWGQGTQVTVSS

SEQ ID NO: 31292 - protein, 118 aa, Artificial Sequence
  Chemically Synthesized
QVQLQESGGGLVQAGGSLRLSCAASGNISYIYGMGWYRQAPGKEREFVAAIGVGGTTYYADSVKGRFTISRDNAKNTVYLQMNSLKPEDTAVYYCAADTRYFLLHHYWGQGTQVTVSS

SEQ ID NO: 31293 - protein, 122 aa, Artificial Sequence
  Chemically Synthesized
QVQLQESGGGLVQAGGSLRLSCAASGYISFPYVMGWYRQAPGKERELVAGIATGAITYYADSVKGRFTISRDNAKNTVYLQMNSLKPEDTAVYYCAAYPDDYSGYQIYHVYWGQGTQVTVSS

SEQ ID NO: 31294 - protein, 122 aa, Artificial Sequence
  Chemically Synthesized
QVQLQESGGGLVQAGGSLRLSCAASGTISWFRYMGWYRQAPGKEREFVATIDYGTNTNYADSVKGRFTISRDNAKNTVYLQMNSLKPEDTAVYYCAVILGGRRGGPKWHFYWGQGTQVTVSS

SEQ ID NO: 31295 - protein, 126 aa, Artificial Sequence
  Chemically Synthesized
QVQLQESGGGLVQAGGSLRLSCAASGNISDTYAMGWYRQAPGKEREFVAAITYGATTNYADSVKGRFTISRDNAKNTVYLQMNSLKPEDTAVYYCAAVRYFAVYDSGRARRRHYYWGQGTQVTVSS

SEQ ID NO: 31296 - protein, 122 aa, Artificial Sequence
  Chemically Synthesized
QVQLQESGGGLVQAGGSLRLSCAASGSIFQPWSMGWYRQAPGKEREFVAAIARGSNTNYADSVKGRFTISRDNAKNTVYLQMNSLKPEDTAVYYCAALWYITTPEYDWHYYWGQGTQVTVSS

SEQ ID NO: 31297 - protein, 122 aa, Artificial Sequence
  Chemically Synthesized
QVQLQESGGGLVQAGGSLRLSCAASGNISSSAYMGWYRQAPGKEREFVAAISYGAITNYADSVKGRFTISRDNAKNTVYLQMNSLKPEDTAVYYCAAVLVRYTRDVGFLYYWGQGTQVTVSS

SEQ ID NO: 31298 - protein, 121 aa, Artificial Sequence
  Chemically Synthesized
QVQLQESGGGLVQAGGSLRLSCAASGSISERYIMGWYRQAPGKEREFVAGIARGSTNYADSVKGRFTISRDNAKNTVYLQMNSLKPEDTAVYYCAVIDYDSHEGFIYHYYWGQGTQVTVSS

SEQ ID NO: 31299 - protein, 114 aa, Artificial Sequence
  Chemically Synthesized
QVQLQESGGGLVQAGGSLRLSCAASGTIFSSDVMGWYRQAPGKEREFVASIDYGSSTNYADSVKGRFTISRDNAKNTVYLQMNSLKPEDTAVYYCAVTTRSSYWGQGTQVTVSS

SEQ ID NO: 31300 - protein, 118 aa, Artificial Sequence
  Chemically Synthesized
QVQLQESGGGLVQAGGSLRLSCAASGNIFYRDPMGWYRQAPGKEREFVAAIGRGANTNYADSVKGRFTISRDNAKNTVYLQMNSLKPEDTAVYYCAAVTQTGLYHWYWGQGTQVTVSS

SEQ ID NO: 31301 - protein, 118 aa, Artificial Sequence
  Chemically Synthesized
QVQLQESGGGLVQAGGSLRLSCAASGSISPLSYMGWYRQAPGKEREFVATIASGASTNYADSVKGRFTISRDNAKNTVYLQMNSLKPEDTAVYYCAVLAYDWGWHYYWGQGTQVTVSS

SEQ ID NO: 31302 - protein, 120 aa, Artificial Sequence
  Chemically Synthesized
QVQLQESGGGLVQAGGSLRLSCAASGTISTLAAMGWYRQAPGKEREFVAAIGYGGNTNYADSVKGRFTISRDNAKNTVYLQMNSLKPEDTAVYYCAAYAGFLPFRQHGYWGQGTQVTVSS

SEQ ID NO: 31303 - protein, 118 aa, Artificial Sequence
  Chemically Synthesized
QVQLQESGGGLVQAGGSLRLSCAASGYIFDLREMGWYRQAPGKEREFVATIDRGTITYYADSVKGRFTISRDNAKNTVYLQMNSLKPEDTAVYYCAVRASGDHPHAYWGQGTQVTVSS

SEQ ID NO: 31304 - protein, 118 aa, Artificial Sequence
  Chemically Synthesized
QVQLQESGGGLVQAGGSLRLSCAASGNISLNGIMGWYRQAPGKEREFVATIDNGGITYYADSVKGRFTISRDNAKNTVYLQMNSLKPEDTAVYYCAVVGRRSVAHYYWGQGTQVTVSS

SEQ ID NO: 31305 - protein, 118 aa, Artificial Sequence
  Chemically Synthesized
QVQLQESGGGLVQAGGSLRLSCAASGTIFYIYRMGWYRQAPGKEREFVAAIARGGNTNYADSVKGRFTISRDNAKNTVYLQMNSLKPEDTAVYYCAARYLLYPLHYYWGQGTQVTVSS

SEQ ID NO: 31306 - protein, 113 aa, Artificial Sequence
  Chemically Synthesized
QVQLQESGGGLVQAGGSLRLSCAASGSIFLYFIMGWYRQAPGKEREFVASISDGTNTNYADSVKGRFTISRDNAKNTVYLQMNSLKPEDTAVYYCAVWYYAYWGQGTQVTVSS

SEQ ID NO: 31307 - protein, 118 aa, Artificial Sequence
  Chemically Synthesized
QVQLQESGGGLVQAGGSLRLSCAASGSISRDAIMGWYRQAPGKERELVAAITVGTNTNYADSVKGRFTISRDNAKNTVYLQMNSLKPEDTAVYYCAVIYKRQYYFWYWGQGTQVTVSS

SEQ ID NO: 31308 - protein, 124 aa, Artificial Sequence
  Chemically Synthesized
QVQLQESGGGLVQAGGSLRLSCAASGTISLEGVMGWYRQAPGKEREFVAAINGGGTTNYADSVKGRFTISRDNAKNTVYLQMNSLKPEDTAVYYCAVVYRVKRDVGSRQLLWYWGQGTQVTVSS

SEQ ID NO: 31309 - protein, 116 aa, Artificial Sequence
  Chemically Synthesized
QVQLQESGGGLVQAGGSLRLSCAASGNIFRRPSMGWYRQAPGKEREFVAAIDDGGNTNYADSVKGRFTISRDNAKNTVYLQMNSLKPEDTAVYYCAAVLYQRHYYWGQGTQVTVSS

SEQ ID NO: 31310 - protein, 126 aa, Artificial Sequence
  Chemically Synthesized
QVQLQESGGGLVQAGGSLRLSCAASGSIFQTSLMGWYRQAPGKEREFVAAIGLGGITYYADSVKGRFTISRDNAKNTVYLQMNSLKPEDTAVYYCAAGVDGGNEWIDVYITWYLYWGQGTQVTVSS

SEQ ID NO: 31311 - protein, 126 aa, Artificial Sequence
  Chemically Synthesized
QVQLQESGGGLVQAGGSLRLSCAASGTIFLLYSMGWYRQAPGKERELVAGIDVGSNTYYADSVKGRFTISRDNAKNTVYLQMNSLKPEDTAVYYCAAYTGAWYFAGAYRYVDFPYWGQGTQVTVSS

SEQ ID NO: 31312 - protein, 122 aa, Artificial Sequence
  Chemically Synthesized
QVQLQESGGGLVQAGGSLRLSCAASGSIFSVYGMGWYRQAPGKERELVASISYGSSTYYADSVKGRFTISRDNAKNTVYLQMNSLKPEDTAVYYCAAELWGVIWPKWTLYYWGQGTQVTVSS

SEQ ID NO: 31313 - protein, 118 aa, Artificial Sequence
  Chemically Synthesized
QVQLQESGGGLVQAGGSLRLSCAASGTIFVPQYMGWYRQAPGKEREFVASIGIGASTNYADSVKGRFTISRDNAKNTVYLQMNSLKPEDTAVYYCAAIWYDASVYYYWGQGTQVTVSS

SEQ ID NO: 31314 - protein, 123 aa, Artificial Sequence
  Chemically Synthesized
QVQLQESGGGLVQAGGSLRLSCAASGNISSLYRMGWYRQAPGKEREFVAAITNGTTTYYADSVKGRFTISRDNAKNTVYLQMNSLKPEDTAVYYCAAGGGRYNPSTYDHFGYWGQGTQVTVSS

SEQ ID NO: 31315 - protein, 122 aa, Artificial Sequence
  Chemically Synthesized
QVQLQESGGGLVQAGGSLRLSCAASGNISRGSYMGWYRQAPGKEREFVAGIAVGGNTNYADSVKGRFTISRDNAKNTVYLQMNSLKPEDTAVYYCAALQLPDHSHRYYLYYWGQGTQVTVSS

SEQ ID NO: 31316 - protein, 118 aa, Artificial Sequence
  Chemically Synthesized
QVQLQESGGGLVQAGGSLRLSCAASGNIFSRPYMGWYRQAPGKERELVASIDFGGITYYADSVKGRFTISRDNAKNTVYLQMNSLKPEDTAVYYCAAGYDYDAGHSYWGQGTQVTVSS

SEQ ID NO: 31317 - protein, 118 aa, Artificial Sequence
  Chemically Synthesized
QVQLQESGGGLVQAGGSLRLSCAASGYISEPRTMGWYRQAPGKEREFVAGIDTGANTNYADSVKGRFTISRDNAKNTVYLQMNSLKPEDTAVYYCAAVYWSAGYFGYWGQGTQVTVSS

SEQ ID NO: 31318 - protein, 118 aa, Artificial Sequence
  Chemically Synthesized
QVQLQESGGGLVQAGGSLRLSCAASGTISDEWAMGWYRQAPGKEREFVAAIGSGTITNYADSVKGRFTISRDNAKNTVYLQMNSLKPEDTAVYYCAVARYTRPYYGYWGQGTQVTVSS

SEQ ID NO: 31319 - protein, 121 aa, Artificial Sequence
  Chemically Synthesized
QVQLQESGGGLVQAGGSLRLSCAASGNISHQDMGWYRQAPGKERELVAGITRGSITYYADSVKGRFTISRDNAKNTVYLQMNSLKPEDTAVYYCAAWAAGNIQYAKAHSYWGQGTQVTVSS

SEQ ID NO: 31320 - protein, 118 aa, Artificial Sequence
  Chemically Synthesized
QVQLQESGGGLVQAGGSLRLSCAASGYIFLYSWMGWYRQAPGKEREFVATIGAGASTNYADSVKGRFTISRDNAKNTVYLQMNSLKPEDTAVYYCAANLFPYIQLPYWGQGTQVTVSS

SEQ ID NO: 31321 - protein, 118 aa, Artificial Sequence
  Chemically Synthesized
QVQLQESGGGLVQAGGSLRLSCAASGTISRLQYMGWYRQAPGKEREFVAAIDGGTSTNYADSVKGRFTISRDNAKNTVYLQMNSLKPEDTAVYYCAAIDYQYGYHSYWGQGTQVTVSS

SEQ ID NO: 31322 - protein, 122 aa, Artificial Sequence
  Chemically Synthesized
QVQLQESGGGLVQAGGSLRLSCAASGYIFVFLPMGWYRQAPGKEREFVASIAYGSSTNYADSVKGRFTISRDNAKNTVYLQMNSLKPEDTAVYYCAADYQRYYWLWASLDYWGQGTQVTVSS

SEQ ID NO: 31323 - protein, 119 aa, Artificial Sequence
  Chemically Synthesized
QVQLQESGGGLVQAGGSLRLSCAASGNIFGSAAMGWYRQAPGKERELVGFWCYYQYADSVKGRFTISRDNAKNTVYLQMNSLKPEDTAVYYCAVRHSYVPWYYDFFYYWGQGTQVTVSS

SEQ ID NO: 31324 - protein, 122 aa, Artificial Sequence
  Chemically Synthesized
QVQLQESGGGLVQAGGSLRLSCAASGNIFIPSFMGWYRQAPGKERELVAAINGGGTTYYADSVKGRFTISRDNAKNTVYLQMNSLKPEDTAVYYCAAWVIPWPHGVVWFTYWGQGTQVTVSS

SEQ ID NO: 31325 - protein, 122 aa, Artificial Sequence
  Chemically Synthesized
QVQLQESGGGLVQAGGSLRLSCAASGSISDWGFMGWYRQAPGKEREFVASISGGANTNYADSVKGRFTISRDNAKNTVYLQMNSLKPEDTAVYYCAAYYSYAAYLGGDHDYWGQGTQVTVSS

SEQ ID NO: 31326 - protein, 118 aa, Artificial Sequence
  Chemically Synthesized
QVQLQESGGGLVQAGGSLRLSCAASGNIFRQYRMGWYRQAPGKEREFVAGIDAGSNTNYADSVKGRFTISRDNAKNTVYLQMNSLKPEDTAVYYCAALVYRGGYHTYWGQGTQVTVSS

SEQ ID NO: 31327 - protein, 123 aa, Artificial Sequence
  Chemically Synthesized
QVQLQESGGGLVQAGGSLRLSCAASGYISQRDTMGWYRQAPGKEREFVAAIGYGSNTNYADSVKGRFTISRDNAKNTVYLQMNSLKPEDTAVYYCAAVIKHGGYSAYGALAYWGQGTQVTVSS

SEQ ID NO: 31328 - protein, 126 aa, Artificial Sequence
  Chemically Synthesized
QVQLQESGGGLVQAGGSLRLSCAASGNIFAGLAMGWYRQAPGKEREFVAAITWGTITYYADSVKGRFTISRDNAKNTVYLQMNSLKPEDTAVYYCAVDYLWDFIVENAYDSYLGYWGQGTQVTVSS

SEQ ID NO: 31329 - protein, 118 aa, Artificial Sequence
  Chemically Synthesized
QVQLQESGGGLVQAGGSLRLSCAASGNISTPTVMGWYRQAPGKEREFVAGIGDGGTTNYADSVKGRFTISRDNAKNTVYLQMNSLKPEDTAVYYCAAIQYYIGWHYYWGQGTQVTVSS

SEQ ID NO: 31330 - protein, 126 aa, Artificial Sequence
  Chemically Synthesized
QVQLQESGGGLVQAGGSLRLSCAASGNIFRRPNMGWYRQAPGKERELVASITSGSSTNYADSVKGRFTISRDNAKNTVYLQMNSLKPEDTAVYYCAVTSTADRIWWVLPRTPHRYWGQGTQVTVSS

SEQ ID NO: 31331 - protein, 118 aa, Artificial Sequence
  Chemically Synthesized
QVQLQESGGGLVQAGGSLRLSCAASGTIFRRQYMGWYRQAPGKERELVAAIAAGGTTYYADSVKGRFTISRDNAKNTVYLQMNSLKPEDTAVYYCAVRGYRTGWFGYWGQGTQVTVSS

SEQ ID NO: 31332 - protein, 118 aa, Artificial Sequence
  Chemically Synthesized
QVQLQESGGGLVQAGGSLRLSCAASGNISATSTMGWYRQAPGKEREFVAAITYGTSTNYADSVKGRFTISRDNAKNTVYLQMNSLKPEDTAVYYCAAVVRYGTPHYYWGQGTQVTVSS

SEQ ID NO: 31333 - protein, 126 aa, Artificial Sequence
  Chemically Synthesized
QVQLQESGGGLVQAGGSLRLSCAASGTIFRTYSMGWYRQAPGKEREFVAAISYGATTNYADSVKGRFTISRDNAKNTVYLQMNSLKPEDTAVYYCAVDLDYGLFKYLVTTGVYPYWGQGTQVTVSS

SEQ ID NO: 31334 - protein, 118 aa, Artificial Sequence
  Chemically Synthesized
QVQLQESGGGLVQAGGSLRLSCAASGNISGDSNMGWYRQAPGKEREFVAAINSGANTYYADSVKGRFTISRDNAKNTVYLQMNSLKPEDTAVYYCAVVYWGQSRLYYWGQGTQVTVSS

SEQ ID NO: 31335 - protein, 122 aa, Artificial Sequence
  Chemically Synthesized
QVQLQESGGGLVQAGGSLRLSCAASGYISPYYYMGWYRQAPGKEREFVASISFGGNTYYADSVKGRFTISRDNAKNTVYLQMNSLKPEDTAVYYCAVRLYGLYRWRYLYPYWGQGTQVTVSS

SEQ ID NO: 31336 - protein, 118 aa, Artificial Sequence
  Chemically Synthesized
QVQLQESGGGLVQAGGSLRLSCAASGNISDYYGMGWYRQAPGKEREFVAGIDAGSITNYADSVKGRFTISRDNAKNTVYLQMNSLKPEDTAVYYCAALSYTNGWHYYWGQGTQVTVSS

SEQ ID NO: 31337 - protein, 122 aa, Artificial Sequence
  Chemically Synthesized
QVQLQESGGGLVQAGGSLRLSCAASGNISGYRYMGWYRQAPGKERELVASIAWGGTTYYADSVKGRFTISRDNAKNTVYLQMNSLKPEDTAVYYCAAGYVLHRAYVPYHAYWGQGTQVTVSS

SEQ ID NO: 31338 - protein, 120 aa, Artificial Sequence
  Chemically Synthesized
QVQLQESGGGLVQAGGSLRLSCAASGTIFEGTYMGWYRQAPGKEREFVAAIDYGSNTNYADSVKGRFTISRDNAKNTVYLQMNSLKPEDTAVYYCAAVTTDRRLRYHYYWGQGTQVTVSS

SEQ ID NO: 31339 - protein, 127 aa, Artificial Sequence
  Chemically Synthesized
QVQLQESGGGLVQAGGSLRLSCAASGTISDLPYMGWYRQAPGKEREFVASIDKGGITNYADSVKGRFTISRDNAKNTVYLQMNSLKPEDTAVYYCAALSVKYVITLDYAARKYLWYWGQGTQVTVSS

SEQ ID NO: 31340 - protein, 119 aa, Artificial Sequence
  Chemically Synthesized
QVQLQESGGGLVQAGGSLRLSCAASGNISPYLDMGWYRQAPGKEREFVAAIAGTSTNYADSVKGRFTISRDNAKNTVYLQMNSLKPEDTAVYYCAALSGRKVVRYLYYWGQGTQVTVSS

SEQ ID NO: 31341 - protein, 118 aa, Artificial Sequence
  Chemically Synthesized
QVQLQESGGGLVQAGGSLRLSCAASGTISFPPYMGWYRQAPGKEREFVAAIGFGGNTYYADSVKGRFTISRDNAKNTVYLQMNSLKPEDTAVYYCAVTVRYWYPHRYWGQGTQVTVSS

SEQ ID NO: 31342 - protein, 118 aa, Artificial Sequence
  Chemically Synthesized
QVQLQESGGGLVQAGGSLRLSCAASGSISQLISMGWYRQAPGKEREFVAGINRGGTTNYADSVKGRFTISRDNAKNTVYLQMNSLKPEDTAVYYCAVITRNADRYYYWGQGTQVTVSS

SEQ ID NO: 31343 - protein, 126 aa, Artificial Sequence
  Chemically Synthesized
QVQLQESGGGLVQAGGSLRLSCAASGTISILTYMGWYRQAPGKEREFVAGIGYGGSTNYADSVKGRFTISRDNAKNTVYLQMNSLKPEDTAVYYCAAILRISRDGTGRGYRNLVYWGQGTQVTVSS

SEQ ID NO: 31344 - protein, 117 aa, Artificial Sequence
  Chemically Synthesized
QVQLQESGGGLVQAGGSLRLSCAASGTIFRLYQMGWYRQAPGKERELVASIAHGSTTNYADSVKGRFTISRDNAKNTVYLQMNSLKPEDTAVYYCAAHQTDTRPCYWGQGTQVTVSS

SEQ ID NO: 31345 - protein, 122 aa, Artificial Sequence
  Chemically Synthesized
QVQLQESGGGLVQAGGSLRLSCAASGYISPDTIMGWYRQAPGKERELVATIGHGATTYYADSVKGRFTISRDNAKNTVYLQMNSLKPEDTAVYYCAAAGNDTYNNHGRLGYWGQGTQVTVSS

SEQ ID NO: 31346 - protein, 118 aa, Artificial Sequence
  Chemically Synthesized
QVQLQESGGGLVQAGGSLRLSCAASGNIFALIDMGWYRQAPGKERELVAAIAYGGSTNYADSVKGRFTISRDNAKNTVYLQMNSLKPEDTAVYYCAVLNAVRSYYVYWGQGTQVTVSS

SEQ ID NO: 31347 - protein, 118 aa, Artificial Sequence
  Chemically Synthesized
QVQLQESGGGLVQAGGSLRLSCAASGSIFGWRGMGWYRQAPGKERELVAAIDAGSITYYADSVKGRFTISRDNAKNTVYLQMNSLKPEDTAVYYCAAQPPYVYRLRYWGQGTQVTVSS

SEQ ID NO: 31348 - protein, 125 aa, Artificial Sequence
  Chemically Synthesized
QVQLQESGGGLVQAGGSLRLSCAASGSIFGAYYMGWYRQAPGKERELVAGIAWGTNTNYADSVKGRFTISRDNAKNTVYLQMNSLKPEDTAVYYCAAYLYDVVELGYPTIAHRYWGQGTQVTVSS

SEQ ID NO: 31349 - protein, 122 aa, Artificial Sequence
  Chemically Synthesized
QVQLQESGGGLVQAGGSLRLSCAASGNISQGRYMGWYRQAPGKEREFVATINEGGTTNYADSVKGRFTISRDNAKNTVYLQMNSLKPEDTAVYYCAVYYRSNATYYLAYDYWGQGTQVTVSS

SEQ ID NO: 31350 - protein, 116 aa, Artificial Sequence
  Chemically Synthesized
QVQLQESGGGLVQAGGSLRLSCAASGSISYVSGMGWYRQAPGKEREFVAAIAAGGITNYADSVKGRFTISRDNAKNTVYLQMNSLKPEDTAVYYCAAAGSYPHIYWGQGTQVTVSS

SEQ ID NO: 31351 - protein, 115 aa, Artificial Sequence
  Chemically Synthesized
QVQLQESGGGLVQAGGSLRLSCAASGSIFLWTPMGWYRQAPGKEREFVAAIDKGTSTNYADSVKGRFTISRDNAKNTVYLQMNSLKPEDTAVYYCAAPYYPHVYWGQGTQVTVSS

SEQ ID NO: 31352 - protein, 118 aa, Artificial Sequence
  Chemically Synthesized
QVQLQESGGGLVQAGGSLRLSCAASGYISRRGTMGWYRQAPGKEREFVAGIAVGGNTNYADSVKGRFTISRDNAKNTVYLQMNSLKPEDTAVYYCAAEYRFNGSHLYWGQGTQVTVSS

SEQ ID NO: 31353 - protein, 122 aa, Artificial Sequence
  Chemically Synthesized
QVQLQESGGGLVQAGGSLRLSCAASGNIFLIYGMGWYRQAPGKEREFVAAISAGSNTYYADSVKGRFTISRDNAKNTVYLQMNSLKPEDTAVYYCAAEILGNRFDARRYLYWGQGTQVTVSS

SEQ ID NO: 31354 - protein, 115 aa, Artificial Sequence
  Chemically Synthesized
QVQLQESGGGLVQAGGSLRLSCAASGTISGPYSMGWYRQAPGKEREFVASISAGSTTYYADSVKGRFTISRDNAKNTVYLQMNSLKPEDTAVYYCAVPYYPLVYWGQGTQVTVSS

SEQ ID NO: 31355 - protein, 122 aa, Artificial Sequence
  Chemically Synthesized
QVQLQESGGGLVQAGGSLRLSCAASGSISYIIAMGWYRQAPGKEREFVAAIARGTTTYYADSVKGRFTISRDNAKNTVYLQMNSLKPEDTAVYYCAALRYSRLYPNRQHTYWGQGTQVTVSS

SEQ ID NO: 31356 - protein, 121 aa, Artificial Sequence
  Chemically Synthesized
QVQLQESGGGLVQAGGSLRLSCAASGTIFELDGMGWYRQAPGKEREFVAAIDSVVLPYADSVKGRFTISRDNAKNTVYLQMNSLKPEDTAVYYCAAIYYEQGPSGGGHVYWGQGTQVTVSS

SEQ ID NO: 31357 - protein, 118 aa, Artificial Sequence
  Chemically Synthesized
QVQLQESGGGLVQAGGSLRLSCAASGYISDRSDMGWYRQAPGKEREFVAAISYGTTTYYADSVKGRFTISRDNAKNTVYLQMNSLKPEDTAVYYCAVVVNGRQYHVYWGQGTQVTVSS

SEQ ID NO: 31358 - protein, 118 aa, Artificial Sequence
  Chemically Synthesized
QVQLQESGGGLVQAGGSLRLSCAASGSISGTVDMGWYRQAPGKEREFVAAIASGGNTYYADSVKGRFTISRDNAKNTVYLQMNSLKPEDTAVYYCAAITTGAYAHDYWGQGTQVTVSS

SEQ ID NO: 31359 - protein, 115 aa, Artificial Sequence
  Chemically Synthesized
QVQLQESGGGLVQAGGSLRLSCAASGSIFGHADMGWYRQAPGKEREFVAAIGGGTTTYYADSVKGRFTISRDNAKNTVYLQMNSLKPEDTAVYYCAVPYDYHLYWGQGTQVTVSS

SEQ ID NO: 31360 - protein, 121 aa, Artificial Sequence
  Chemically Synthesized
QVQLQESGGGLVQAGGSLRLSCAASGSISRAWEMGWYRQAPGKERELVATIGRGGSTNYADSVKGRFTISRDNAKNTVYLQMNSLKPEDTAVYYCAALDSDTYVETFLLYWGQGTQVTVSS

SEQ ID NO: 31361 - protein, 118 aa, Artificial Sequence
  Chemically Synthesized
QVQLQESGGGLVQAGGSLRLSCAASGSISYIIAMGWYRQAPGKEREFVAAIARGTTTYYADSVKGRFTISRDNAKNTVYLQMNSLKPEDTAVYYCAAPRRYGPTHTYWGQGTQVTVSS

SEQ ID NO: 31362 - protein, 116 aa, Artificial Sequence
  Chemically Synthesized
QVQLQESGGGLVQAGGSLRLSCAASGSISYAMGWYRQAPGKERELVAGINHGANTYYADSVKGRFTISRDNAKNTVYLQMNSLKPEDTAVYYCAAKAVYPSRHFYWGQGTQVTVSS

SEQ ID NO: 31363 - protein, 118 aa, Artificial Sequence
  Chemically Synthesized
QVQLQESGGGLVQAGGSLRLSCAASGTIFRVRYMGWYRQAPGKEREFVAGIGTGTITNYADSVKGRFTISRDNAKNTVYLQMNSLKPEDTAVYYCAVPYYPAENHVYWGQGTQVTVSS

SEQ ID NO: 31364 - protein, 118 aa, Artificial Sequence
  Chemically Synthesized
QVQLQESGGGLVQAGGSLRLSCAASGTIFVTTFMGWYRQAPGKEREFVAGISPGTITYYADSVKGRFTISRDNAKNTVYLQMNSLKPEDTAVYYCAVFDYDYYRYGYWGQGTQVTVSS

SEQ ID NO: 31365 - protein, 118 aa, Artificial Sequence
  Chemically Synthesized
QVQLQESGGGLVQAGGSLRLSCAASGTISQYRPMGWYRQAPGKERELVAAIGRGSSTYYADSVKGRFTISRDNAKNTVYLQMNSLKPEDTAVYYCAAEYRFNGSHLYWGQGTQVTVSS

SEQ ID NO: 31366 - protein, 118 aa, Artificial Sequence
  Chemically Synthesized
QVQLQESGGGLVQAGGSLRLSCAASGTISRYNAMGWYRQAPGKEREFVAAINGGGTTYYADSVKGRFTISRDNAKNTVYLQMNSLKPEDTAVYYCAVPVHDIDYYTYWGQGTQVTVSS

SEQ ID NO: 31367 - protein, 122 aa, Artificial Sequence
  Chemically Synthesized
QVQLQESGGGLVQAGGSLRLSCAASGSISYIIAMGWYRQAPGKEREFVAGIAVGGNTNYADSVKGRFTISRDNAKNTVYLQMNSLKPEDTAVYYCAALRYSRLYPNRQHTYWGQGTQVTVSS

SEQ ID NO: 31368 - protein, 118 aa, Artificial Sequence
  Chemically Synthesized
QVQLQESGGGLVQAGGSLRLSCAASGNISSAYYMGWYRQAPGKERELVAAISHGANTYYADSVKGRFTISRDNAKNTVYLQMNSLKPEDTAVYYCAATTDSDGTLWYWGQGTQVTVSS

SEQ ID NO: 31369 - protein, 117 aa, Artificial Sequence
  Chemically Synthesized
QVQLQESGGGLVQAGGSLRLSCAASGYISAYSYMGWYRQAPGKEREFVAAISYGGNTYADSVKGRFTISRDNAKNTVYLQMNSLKPEDTAVYYCAAYISDADLLGYWGQGTQVTVSS

SEQ ID NO: 31370 - protein, 125 aa, Artificial Sequence
  Chemically Synthesized
QVQLQESGGGLVQAGGSLRLSCAASGSISRGSMGWYRQAPGKERELVASITLGGTTNYADSVKGRFTISRDNAKNTVYLQMNSLKPEDTAVYYCAVTLATDQAVYSWVSPPLRYWGQGTQVTVSS

SEQ ID NO: 31371 - protein, 112 aa, Artificial Sequence
  Chemically Synthesized
QVQLQESGGGLVQAGGSLRLSCAASGNISVQDDMGWYRQAPGKEREFVAAIGYGAITNYADSVKGRFTISRDNAKNTVYLQMNSLKPEDTAVYYCADSVSYWGQGTQVTVSS

SEQ ID NO: 31372 - protein, 122 aa, Artificial Sequence
  Chemically Synthesized
QVQLQESGGGLVQAGGSLRLSCAASGSISFLGDMGWYRQAPGKERELVAGIDGGTTTNYADSVKGRFTISRDNAKNTVYLQMNSLKPEDTAVYYCAVYREAADRWWYRFHYWGQGTQVTVSS

SEQ ID NO: 31373 - protein, 117 aa, Artificial Sequence
  Chemically Synthesized
QVQLQESGGGLVQAGGSLRLSCAASGYISAYPMGWYRQAPGKERELVASITLGGITNYADSVKGRFTISRDNAKNTVYLQMNSLKPEDTAVYYCAAGLSRRIRHRYWGQGTQVTVSS

SEQ ID NO: 31374 - protein, 116 aa, Artificial Sequence
  Chemically Synthesized
QVQLQESGGGLVQAGGSLRLSCAASGYIFPASMGWYRQAPGKERELVAAITNYADSVKGRFTISRDNAKNTVYLQMNSLKPEDTAVYYCAVPWDYYSQRDVPYQYWGQGTQVTVSS

SEQ ID NO: 31375 - protein, 122 aa, Artificial Sequence
  Chemically Synthesized
QVQLQESGGGLVQAGGSLRLSCAASGYISDAYIMGWYRQAPGKERELVAGIATGTNTYYADSVKGRFTISRDNAKNTVYLQMNSLKPEDTAVYYCAARDGYDPDGYLTLLYWGQGTQVTVSS

SEQ ID NO: 31376 - protein, 111 aa, Artificial Sequence
  Chemically Synthesized
QVQLQESGGGLVQAGGSLRLSCAASGTIFDGSMGWYRQAPGKEREFVAGIASGSNTNYADSVKGRFTISRDNAKNTVYLQMNSLKPEDTAVYYCAYRHSYWGQGTQVTVSS

SEQ ID NO: 31377 - protein, 122 aa, Artificial Sequence
  Chemically Synthesized
QVQLQESGGGLVQAGGSLRLSCAASGTIFPRVRMGWYRQAPGKEREFVATIGAGGNTNYADSVKGRFTISRDNAKNTVYLQMNSLKPEDTAVYYCAATYAGPIHYLYGHVYWGQGTQVTVSS

SEQ ID NO: 31378 - protein, 122 aa, Artificial Sequence
  Chemically Synthesized
QVQLQESGGGLVQAGGSLRLSCAASGTIFVGRNMGWYRQAPGKEREFVAAITTGGSTYYADSVKGRFTISRDNAKNTVYLQMNSLKPEDTAVYYCAAYYTAPRTRSVDLGYWGQGTQVTVSS

SEQ ID NO: 31379 - protein, 125 aa, Artificial Sequence
  Chemically Synthesized
QVQLQESGGGLVQAGGSLRLSCAASGYISQFGMGWYRQAPGKEREFVAGIAYGSTTNYADSVKGRFTISRDNAKNTVYLQMNSLKPEDTAVYYCAVGVVYRYSARYSYDTDHIYWGQGTQVTVSS

SEQ ID NO: 31380 - protein, 118 aa, Artificial Sequence
  Chemically Synthesized
QVQLQESGGGLVQAGGSLRLSCAASGTIFYPNFMGWYRQAPGKEREFVAGIAYGTITNYADSVKGRFTISRDNAKNTVYLQMNSLKPEDTAVYYCAVRSLRNIALRYWGQGTQVTVSS

SEQ ID NO: 31381 - protein, 118 aa, Artificial Sequence
  Chemically Synthesized
QVQLQESGGGLVQAGGSLRLSCAASGTISTSVYMGWYRQAPGKERELVASIAVGSSTYYADSVKGRFTISRDNAKNTVYLQMNSLKPEDTAVYYCAAVPFAYFLHRYWGQGTQVTVSS

SEQ ID NO: 31382 - protein, 122 aa, Artificial Sequence
  Chemically Synthesized
QVQLQESGGGLVQAGGSLRLSCAASGSIFVYAQMGWYRQAPGKERELVASIDDGSTTNYADSVKGRFTISRDNAKNTVYLQMNSLKPEDTAVYYCAAYTGELDTSDYHFDYWGQGTQVTVSS

SEQ ID NO: 31383 - protein, 122 aa, Artificial Sequence
  Chemically Synthesized
QVQLQESGGGLVQAGGSLRLSCAASGSIFGRDNMGWYRQAPGKERELLPLLILVLLPYADSVKGRFTISRDNAKNTVYLQMNSLKPEDTAVYYCAAVYYDLGATELYAYYYWGQGTQVTVSS

SEQ ID NO: 31384 - protein, 118 aa, Artificial Sequence
  Chemically Synthesized
QVQLQESGGGLVQAGGSLRLSCAASGYIFGGDDMGWYRQAPGKERELVAAITYGGSTYYADSVKGRFTISRDNAKNTVYLQMNSLKPEDTAVYYCAAYPNDEYWHDYWGQGTQVTVSS

SEQ ID NO: 31385 - protein, 121 aa, Artificial Sequence
  Chemically Synthesized
QVQLQESGGGLVQAGGSLRLSCAASGNISLAEPMGWYRQAPGKERELVAAIMVVVLPYADSVKGRFTISRDNAKNTVYLQMNSLKPEDTAVYYCAAQLDYHSNTNSRFWYWGQGTQVTVSS

SEQ ID NO: 31386 - protein, 121 aa, Artificial Sequence
  Chemically Synthesized
QVQLQESGGGLVQAGGSLRLSCAASGNIFAPGTMGWYRQAPGKERELVAGINTGGNTYYADSVKGRFTISRDNAKNTVYLQMNSLKPEDTAVYYCAVYWSGDVYQFDSFYWGQGTQVTVSS

SEQ ID NO: 31387 - protein, 126 aa, Artificial Sequence
  Chemically Synthesized
QVQLQESGGGLVQAGGSLRLSCAASGYISAQYIMGWYRQAPGKEREFVATIDYGTSTYYADSVKGRFTISRDNAKNTVYLQMNSLKPEDTAVYYCAVLGGYLYPATWYEVWYHGYWGQGTQVTVSS

SEQ ID NO: 31388 - protein, 122 aa, Artificial Sequence
  Chemically Synthesized
QVQLQESGGGLVQAGGSLRLSCAASGYISASRYMGWYRQAPGKERELVAAIDYGGSTYYADSVKGRFTISRDNAKNTVYLQMNSLKPEDTAVYYCAVKVERYVANYVHLRYWGQGTQVTVSS

SEQ ID NO: 31389 - protein, 118 aa, Artificial Sequence
  Chemically Synthesized
QVQLQESGGGLVQAGGSLRLSCAASGYISYHQYMGWYRQAPGKEREFVASIAYGANTYYADSVKGRFTISRDNAKNTVYLQMNSLKPEDTAVYYCAVDGVYFRHHKYWGQGTQVTVSS

SEQ ID NO: 31390 - protein, 117 aa, Artificial Sequence
  Chemically Synthesized
QVQLQESGGGLVQAGGSLRLSCAASGNISLLTMGWYRQAPGKERELVAAIGAGATTNYADSVKGRFTISRDNAKNTVYLQMNSLKPEDTAVYYCAADTPYYQWLAYWGQGTQVTVSS

SEQ ID NO: 31391 - protein, 118 aa, Artificial Sequence
  Chemically Synthesized
QVQLQESGGGLVQAGGSLRLSCAASGNISHPFYMGWYRQAPGKERELVAGIGRGSSTNYADSVKGRFTISRDNAKNTVYLQMNSLKPEDTAVYYCAAGYKRHGRFYYWGQGTQVTVSS

SEQ ID NO: 31392 - protein, 118 aa, Artificial Sequence
  Chemically Synthesized
QVQLQESGGGLVQAGGSLRLSCAASGSISDLPDMGWYRQAPGKEREFVAGITSGGTTNYADSVKGRFTISRDNAKNTVYLQMNSLKPEDTAVYYCAAWEPGAGSHHYWGQGTQVTVSS

SEQ ID NO: 31393 - protein, 118 aa, Artificial Sequence
  Chemically Synthesized
QVQLQESGGGLVQAGGSLRLSCAASGTIFEAPYMGWYRQAPGKEREFVASITSGGSTYYADSVKGRFTISRDNAKNTVYLQMNSLKPEDTAVYYCAAAQAIKDSHDYWGQGTQVTVSS

SEQ ID NO: 31394 - protein, 117 aa, Artificial Sequence
  Chemically Synthesized
QVQLQESGGGLVQAGGSLRLSCAASGYIFVTTMGWYRQAPGKEREFVASIGNGANTYYADSVKGRFTISRDNAKNTVYLQMNSLKPEDTAVYYCAVKTHVDTWLDYWGQGTQVTVSS

SEQ ID NO: 31395 - protein, 118 aa, Artificial Sequence
  Chemically Synthesized
QVQLQESGGGLVQAGGSLRLSCAASGSISDHVDMGWYRQAPGKEREFVAAIAAGTNTYYADSVKGRFTISRDNAKNTVYLQMNSLKPEDTAVYYCAVAPLGGIFLAYWGQGTQVTVSS

SEQ ID NO: 31396 - protein, 118 aa, Artificial Sequence
  Chemically Synthesized
QVQLQESGGGLVQAGGSLRLSCAASGNIFPRTRMGWYRQAPGKERELVAGITWGSNTNYADSVKGRFTISRDNAKNTVYLQMNSLKPEDTAVYYCAVGYRPWYRHWYWGQGTQVTVSS

SEQ ID NO: 31397 - protein, 118 aa, Artificial Sequence
  Chemically Synthesized
QVQLQESGGGLVQAGGSLRLSCAASGTIFRVLRMGWYRQAPGKERELVASINRGGNTNYADSVKGRFTISRDNAKNTVYLQMNSLKPEDTAVYYCAVAVLYYSRFYYWGQGTQVTVSS

SEQ ID NO: 31398 - protein, 122 aa, Artificial Sequence
  Chemically Synthesized
QVQLQESGGGLVQAGGSLRLSCAASGTISGPYIMGWYRQAPGKERELVAGIGEGSITNYADSVKGRFTISRDNAKNTVYLQMNSLKPEDTAVYYCAADSFRGYFSDYAHYYWGQGTQVTVSS

SEQ ID NO: 31399 - protein, 126 aa, Artificial Sequence
  Chemically Synthesized
QVQLQESGGGLVQAGGSLRLSCAASGSISQSDPMGWYRQAPGKERELVAAIAAGTSTNYADSVKGRFTISRDNAKNTVYLQMNSLKPEDTAVYYCAVVGTQYGDYSKRRTDGLAYWGQGTQVTVSS

SEQ ID NO: 31400 - protein, 126 aa, Artificial Sequence
  Chemically Synthesized
QVQLQESGGGLVQAGGSLRLSCAASGTISTAPFMGWYRQAPGKERELVAAINWGGNTNYADSVKGRFTISRDNAKNTVYLQMNSLKPEDTAVYYCAVYSRDRDYVDHAVDPEHVYWGQGTQVTVSS

SEQ ID NO: 31401 - protein, 122 aa, Artificial Sequence
  Chemically Synthesized
QVQLQESGGGLVQAGGSLRLSCAASGSIFVWYVMGWYRQAPGKERELVATISRGGITYYADSVKGRFTISRDNAKNTVYLQMNSLKPEDTAVYYCAAGTHPDDDDGGLHGYWGQGTQVTVSS

SEQ ID NO: 31402 - protein, 118 aa, Artificial Sequence
  Chemically Synthesized
QVQLQESGGGLVQAGGSLRLSCAASGTIFGWRKMGWYRQAPGKEREFVAGINFGTITYYADSVKGRFTISRDNAKNTVYLQMNSLKPEDTAVYYCAVRKRYDSVHAYWGQGTQVTVSS

SEQ ID NO: 31403 - protein, 117 aa, Artificial Sequence
  Chemically Synthesized
QVQLQESGGGLVQAGGSLRLSCAASGNISTSSYMGWYRQAPGKEREFVASITAGSITNYADSVKGRFTISRDNAKNTVYLQMNSLKPEDTAVYYCAVAYGGWDHRYWGQGTQVTVSS

SEQ ID NO: 31404 - protein, 118 aa, Artificial Sequence
  Chemically Synthesized
QVQLQESGGGLVQAGGSLRLSCAASGSISGATDMGWYRQAPGKERELVAGITYGSSTNYADSVKGRFTISRDNAKNTVYLQMNSLKPEDTAVYYCAVDDDYTAPHDYWGQGTQVTVSS

SEQ ID NO: 31405 - protein, 110 aa, Artificial Sequence
  Chemically Synthesized
QVQLQESGGGLVQAGGSLRLSCAASGTISRAYDMGWYRQAPGKERELVAGIAHGGITNYADSVKGRFTISRDNAKNTVYLQMNSLKPEDTAVYYCAVMYWGQGTQVTVSS

SEQ ID NO: 31406 - protein, 118 aa, Artificial Sequence
  Chemically Synthesized
QVQLQESGGGLVQAGGSLRLSCAASGSISLADYMGWYRQAPGKERELVAGINVGGNTNYADSVKGRFTISRDNAKNTVYLQMNSLKPEDTAVYYCAVTATDTYDLYYWGQGTQVTVSS

SEQ ID NO: 31407 - protein, 122 aa, Artificial Sequence
  Chemically Synthesized
QVQLQESGGGLVQAGGSLRLSCAASGSIFYRYAMGWYRQAPGKERELVAAIARGGNTYYADSVKGRFTISRDNAKNTVYLQMNSLKPEDTAVYYCAARYATYFYLYSNHRYWGQGTQVTVSS

SEQ ID NO: 31408 - protein, 122 aa, Artificial Sequence
  Chemically Synthesized
QVQLQESGGGLVQAGGSLRLSCAASGTISYYRYMGWYRQAPGKERELVAAIGSGGSTYYADSVKGRFTISRDNAKNTVYLQMNSLKPEDTAVYYCAAYRRYSDLTRYYFRYWGQGTQVTVSS

SEQ ID NO: 31409 - protein, 118 aa, Artificial Sequence
  Chemically Synthesized
QVQLQESGGGLVQAGGSLRLSCAASGTISRFDGMGWYRQAPGKERELVAAIAYGGTTYYADSVKGRFTISRDNAKNTVYLQMNSLKPEDTAVYYCAALQRYRYSYIYWGQGTQVTVSS

SEQ ID NO: 31410 - protein, 118 aa, Artificial Sequence
  Chemically Synthesized
QVQLQESGGGLVQAGGSLRLSCAASGNIFEFYYMGWYRQAPGKEREFVASISVGATTYYADSVKGRFTISRDNAKNTVYLQMNSLKPEDTAVYYCAAGFYSVSLHHYWGQGTQVTVSS

SEQ ID NO: 31411 - protein, 126 aa, Artificial Sequence
  Chemically Synthesized
QVQLQESGGGLVQAGGSLRLSCAASGYIFHYRAMGWYRQAPGKERELVASIGYGTSTYYADSVKGRFTISRDNAKNTVYLQMNSLKPEDTAVYYCAVWGHDVGYGPGINNRQFWYWGQGTQVTVSS

SEQ ID NO: 31412 - protein, 123 aa, Artificial Sequence
  Chemically Synthesized
QVQLQESGGGLVQAGGSLRLSCAASGYIFITVVMGWYRQAPGKERELVAGIDYGTIPYADSVKGRFTISRDNAKNTVYLQMNSLKPEDTAVYYCAADADYTYTKDEDRQHDYWGQGTQVTVSS

SEQ ID NO: 31413 - protein, 122 aa, Artificial Sequence
  Chemically Synthesized
QVQLQESGGGLVQAGGSLRLSCAASGTISQGTGMGWYRQAPGKEREFVATIGGGGSTNYADSVKGRFTISRDNAKNTVYLQMNSLKPEDTAVYYCAAVFAWPDGGDTYLWYWGQGTQVTVSS

SEQ ID NO: 31414 - protein, 118 aa, Artificial Sequence
  Chemically Synthesized
QVQLQESGGGLVQAGGSLRLSCAASGTISGNTTMGWYRQAPGKEREFVASITGGSTTYYADSVKGRFTISRDNAKNTVYLQMNSLKPEDTAVYYCAVRYTFFDPHDYWGQGTQVTVSS

SEQ ID NO: 31415 - protein, 118 aa, Artificial Sequence
  Chemically Synthesized
QVQLQESGGGLVQAGGSLRLSCAASGSISPRWSMGWYRQAPGKERELVAGIASGGSTYYADSVKGRFTISRDNAKNTVYLQMNSLKPEDTAVYYCAAYRKGFLLHVYWGQGTQVTVSS

SEQ ID NO: 31416 - protein, 122 aa, Artificial Sequence
  Chemically Synthesized
QVQLQESGGGLVQAGGSLRLSCAASGTISHYLIMGWYRQAPGKERELVAGISVGGSTYYADSVKGRFTISRDNAKNTVYLQMNSLKPEDTAVYYCAARSRNYTYFIGGHYYWGQGTQVTVSS

SEQ ID NO: 31417 - protein, 118 aa, Artificial Sequence
  Chemically Synthesized
QVQLQESGGGLVQAGGSLRLSCAASGNIFRYAYMGWYRQAPGKEREFVAGIGYGGNTYYADSVKGRFTISRDNAKNTVYLQMNSLKPEDTAVYYCAVIARRKTIHRYWGQGTQVTVSS

SEQ ID NO: 31418 - protein, 115 aa, Artificial Sequence
  Chemically Synthesized
QVQLQESGGGLVQAGGSLRLSCAASGTIFLTRKMGWYRQAPGKERELVASIAIGGITYYADSVKGRFTISRDNAKNTVYLQMNSLKPEDTAVYYCAARTYRYVYWGQGTQVTVSS

SEQ ID NO: 31419 - protein, 118 aa, Artificial Sequence
  Chemically Synthesized
QVQLQESGGGLVQAGGSLRLSCAASGNIFYDDAMGWYRQAPGKEREFVATISVGATTNYADSVKGRFTISRDNAKNTVYLQMNSLKPEDTAVYYCAAYLQIGAQYRYWGQGTQVTVSS

SEQ ID NO: 31420 - protein, 125 aa, Artificial Sequence
  Chemically Synthesized
QVQLQESGGGLVQAGGSLRLSCAASGNIFSRVMGWYRQAPGKEREFVATITSGGSTNYADSVKGRFTISRDNAKNTVYLQMNSLKPEDTAVYYCAVAATDGPYPVVWKGDTLPYWGQGTQVTVSS

SEQ ID NO: 31421 - protein, 118 aa, Artificial Sequence
  Chemically Synthesized
QVQLQESGGGLVQAGGSLRLSCAASGNISVYYDMGWYRQAPGKEREFVAAISNGAITYYADSVKGRFTISRDNAKNTVYLQMNSLKPEDTAVYYCAADLGHHDTHGYWGQGTQVTVSS

SEQ ID NO: 31422 - protein, 112 aa, Artificial Sequence
  Chemically Synthesized
QVQLQESGGGLVQAGGSLRLSCAASGNIFGDFPMGWYRQAPGKERELVAGISDGTITNYADSVKGRFTISRDNAKNTVYLQMNSLKPEDTAVYYCAAQDLYWGQGTQVTVSS

SEQ ID NO: 31423 - protein, 115 aa, Artificial Sequence
  Chemically Synthesized
QVQLQESGGGLVQAGGSLRLSCAASGYIFVEVGMGWYRQAPGKERELVAGIDGGASTYYADSVKGRFTISRDNAKNTVYLQMNSLKPEDTAVYYCAAGFPDFRYWGQGTQVTVSS

SEQ ID NO: 31424 - protein, 109 aa, Artificial Sequence
  Chemically Synthesized
QVQLQESGGGLVQAGGSLRLSCAASGYIFSEDYMGWYRQAPGKERELVATIATGGNTNYADSVKGRFTISRDNAKNTVYLQMNSLKPEDTAVYYCAAYWGQGTQVTVSS

SEQ ID NO: 31425 - protein, 122 aa, Artificial Sequence
  Chemically Synthesized
QVQLQESGGGLVQAGGSLRLSCAASGSISGPYYMGWYRQAPGKEREFVATITPGTTTNYADSVKGRFTISRDNAKNTVYLQMNSLKPEDTAVYYCAAYPGLLYYYLGYHRYWGQGTQVTVSS

SEQ ID NO: 31426 - protein, 112 aa, Artificial Sequence
  Chemically Synthesized
QVQLQESGGGLVQAGGSLRLSCAASGYIFGGPFMGWYRQAPGKEREFVAGISFGASTNYADSVKGRFTISRDNAKNTVYLQMNSLKPEDTAVYYCAARHRYWGQGTQVTVSS

SEQ ID NO: 31427 - protein, 118 aa, Artificial Sequence
  Chemically Synthesized
QVQLQESGGGLVQAGGSLRLSCAASGNIFSRAVMGWYRQAPGKERELVAAISIGTSTYYADSVKGRFTISRDNAKNTVYLQMNSLKPEDTAVYYCAVKRNFPRAHYYWGQGTQVTVSS

SEQ ID NO: 31428 - protein, 125 aa, Artificial Sequence
  Chemically Synthesized
QVQLQESGGGLVQAGGSLRLSCAASGTISSYYMGWYRQAPGKEREFVATISLGTNTNYADSVKGRFTISRDNAKNTVYLQMNSLKPEDTAVYYCAVYADYDDYLPRYYYGYYYYWGQGTQVTVSS

SEQ ID NO: 31429 - protein, 118 aa, Artificial Sequence
  Chemically Synthesized
QVQLQESGGGLVQAGGSLRLSCAASGSIFPDLSMGWYRQAPGKERELVAGIAVGAITNYADSVKGRFTISRDNAKNTVYLQMNSLKPEDTAVYYCAVYYRTGGGHDYWGQGTQVTVSS

SEQ ID NO: 31430 - protein, 118 aa, Artificial Sequence
  Chemically Synthesized
QVQLQESGGGLVQAGGSLRLSCAASGNISVNARMGWYRQAPGKEREFVASIASGSNTYYADSVKGRFTISRDNAKNTVYLQMNSLKPEDTAVYYCAVDYPYYSGHGYWGQGTQVTVSS

SEQ ID NO: 31431 - protein, 118 aa, Artificial Sequence
  Chemically Synthesized
QVQLQESGGGLVQAGGSLRLSCAASGYIFQTRSMGWYRQAPGKEREFVAGIARGAITYYADSVKGRFTISRDNAKNTVYLQMNSLKPEDTAVYYCAARRPYYRDFYYWGQGTQVTVSS

SEQ ID NO: 31432 - protein, 118 aa, Artificial Sequence
  Chemically Synthesized
QVQLQESGGGLVQAGGSLRLSCAASGSIFHRKLMGWYRQAPGKEREFVASIGAGSSTNYADSVKGRFTISRDNAKNTVYLQMNSLKPEDTAVYYCAVRSSWTWLHVYWGQGTQVTVSS

SEQ ID NO: 31433 - protein, 118 aa, Artificial Sequence
  Chemically Synthesized
QVQLQESGGGLVQAGGSLRLSCAASGTIFWSPFMGWYRQAPGKEREFVAAIAPGGTTNYADSVKGRFTISRDNAKNTVYLQMNSLKPEDTAVYYCAVPRTLRKRHPYWGQGTQVTVSS

SEQ ID NO: 31434 - protein, 122 aa, Artificial Sequence
  Chemically Synthesized
QVQLQESGGGLVQAGGSLRLSCAASGYISWIPYMGWYRQAPGKEREFVASINYGTITYYADSVKGRFTISRDNAKNTVYLQMNSLKPEDTAVYYCAVLLRRQWYRRDAHEYWGQGTQVTVSS

SEQ ID NO: 31435 - protein, 126 aa, Artificial Sequence
  Chemically Synthesized
QVQLQESGGGLVQAGGSLRLSCAASGNIFLDNTMGWYRQAPGKERELVATISPGAITYYADSVKGRFTISRDNAKNTVYLQMNSLKPEDTAVYYCAVYFVTDRYSTYVIYDKFTYWGQGTQVTVSS

SEQ ID NO: 31436 - protein, 118 aa, Artificial Sequence
  Chemically Synthesized
QVQLQESGGGLVQAGGSLRLSCAASGYISPFTAMGWYRQAPGKEREFVASISYGSSTYYADSVKGRFTISRDNAKNTVYLQMNSLKPEDTAVYYCAVWLVSQPSHGYWGQGTQVTVSS

SEQ ID NO: 31437 - protein, 121 aa, Artificial Sequence
  Chemically Synthesized
QVQLQESGGGLVQAGGSLRLSCAASGTILLRVMGWYRQAPGKEREFVAGIAHGSTTYYADSVKGRFTISRDNAKNTVYLQMNSLKPEDTAVYYCAVYYWIYAFDQYAFDYWGQGTQVTVSS

SEQ ID NO: 31438 - protein, 117 aa, Artificial Sequence
  Chemically Synthesized
QVQLQESGGGLVQAGGSLRLSCAASGTIFATQKMGWYRQAPGKEREFVASISDGTITNYADSVKGRFTISRDNAKNTVYLQMNSLKPEDTAVYYCALLTRRSTRIYWGQGTQVTVSS

SEQ ID NO: 31439 - protein, 118 aa, Artificial Sequence
  Chemically Synthesized
QVQLQESGGGLVQAGGSLRLSCAASGSISRPVTMGWYRQAPGKERELVATIGYGGTTNYADSVKGRFTISRDNAKNTVYLQMNSLKPEDTAVYYCAVVLRYSRWFRYWGQGTQVTVSS

SEQ ID NO: 31440 - protein, 118 aa, Artificial Sequence
  Chemically Synthesized
QVQLQESGGGLVQAGGSLRLSCAASGYISYRDEMGWYRQAPGKEREFVAGIAIGTNTYYADSVKGRFTISRDNAKNTVYLQMNSLKPEDTAVYYCAAPAYITKALFYWGQGTQVTVSS

SEQ ID NO: 31441 - protein, 120 aa, Artificial Sequence
  Chemically Synthesized
QVQLQESGGGLVQAGGSLRLSCAASGYIFDPYHMGWYRQAPGKERELVATITGGASTNYADSVKGRFTISRDNAKNTVYLQMNSLKPEDTAVYYCAVTYIATYDRPHVYWGQGTQVTVSS

SEQ ID NO: 31442 - protein, 122 aa, Artificial Sequence
  Chemically Synthesized
QVQLQESGGGLVQAGGSLRLSCAASGTIFRPRRMGWYRQAPGKERELVAGITYGTSTYYADSVKGRFTISRDNAKNTVYLQMNSLKPEDTAVYYCAAGFQRPWYAGDRHAYWGQGTQVTVSS

SEQ ID NO: 31443 - protein, 118 aa, Artificial Sequence
  Chemically Synthesized
QVQLQESGGGLVQAGGSLRLSCAASGNISTRGTMGWYRQAPGKEREFVAAIGEGSNTNYADSVKGRFTISRDNAKNTVYLQMNSLKPEDTAVYYCAAVYPDVLYFTYWGQGTQVTVSS

SEQ ID NO: 31444 - protein, 121 aa, Artificial Sequence
  Chemically Synthesized
QVQLQESGGGLVQAGGSLRLSCAASGSISRGYYMGWYRQAPGKEREFVAAIAHGGTTYYADSVKGRFTISRDNAKNTVYLQMNSLKPEDTAVYYCAVRYHGGLFRAKFYYWGQGTQVTVSS

SEQ ID NO: 31445 - protein, 120 aa, Artificial Sequence
  Chemically Synthesized
QVQLQESGGGLVQAGGSLRLSCAASGTISVDWDMGWYRQAPGKEREFVATITYGGSTNYADSVKGRFTISRDNAKNTVYLQMNSLKPEDTAVYYCAAHSNGGSSCCCMYWGQGTQVTVSS

SEQ ID NO: 31446 - protein, 122 aa, Artificial Sequence
  Chemically Synthesized
QVQLQESGGGLVQAGGSLRLSCAASGNISWATYMGWYRQAPGKEREFVAGITYGSNTNYADSVKGRFTISRDNAKNTVYLQMNSLKPEDTAVYYCAAYVFRDAWRYRRLGYWGQGTQVTVSS

SEQ ID NO: 31447 - protein, 125 aa, Artificial Sequence
  Chemically Synthesized
QVQLQESGGGLVQAGGSLRLSCAASGNIFFTYMGWYRQAPGKERELVASINTGSSTNYADSVKGRFTISRDNAKNTVYLQMNSLKPEDTAVYYCAADGPDPEGDYTWGDPQLDYWGQGTQVTVSS

SEQ ID NO: 31448 - protein, 126 aa, Artificial Sequence
  Chemically Synthesized
QVQLQESGGGLVQAGGSLRLSCAASGSISGNSKMGWYRQAPGKEREFVAAITRGGNTNYADSVKGRFTISRDNAKNTVYLQMNSLKPEDTAVYYCAAYVRVRRYYYDRYAPYLSYWGQGTQVTVSS

SEQ ID NO: 31449 - protein, 118 aa, Artificial Sequence
  Chemically Synthesized
QVQLQESGGGLVQAGGSLRLSCAASGNISPTTLMGWYRQAPGKERELVASIDYGGNTNYADSVKGRFTISRDNAKNTVYLQMNSLKPEDTAVYYCAARRYGGGLLGYWGQGTQVTVSS

SEQ ID NO: 31450 - protein, 122 aa, Artificial Sequence
  Chemically Synthesized
QVQLQESGGGLVQAGGSLRLSCAASGNIFALRVMGWYRQAPGKEREFVAGIGYGANTYYADSVKGRFTISRDNAKNTVYLQMNSLKPEDTAVYYCAVKRPDHPYYARAHYYWGQGTQVTVSS

SEQ ID NO: 31451 - protein, 122 aa, Artificial Sequence
  Chemically Synthesized
QVQLQESGGGLVQAGGSLRLSCAASGTIFRVRYMGWYRQAPGKEREFVAGIGTGTNTYYADSVKGRFTISRDNAKNTVYLQMNSLKPEDTAVYYCAVSYSAYYWLLYKHWYWGQGTQVTVSS

SEQ ID NO: 31452 - protein, 118 aa, Artificial Sequence
  Chemically Synthesized
QVQLQESGGGLVQAGGSLRLSCAASGNIFRRFYMGWYRQAPGKERELVASIGRGGITNYADSVKGRFTISRDNAKNTVYLQMNSLKPEDTAVYYCAVYYWYIDRHVYWGQGTQVTVSS

SEQ ID NO: 31453 - protein, 122 aa, Artificial Sequence
  Chemically Synthesized
QVQLQESGGGLVQAGGSLRLSCAASGNIFYRFRMGWYRQAPGKEREFVASINYGTITYYADSVKGRFTISRDNAKNTVYLQMNSLKPEDTAVYYCAVARGGWPIPVRYLDYWGQGTQVTVSS

SEQ ID NO: 31454 - protein, 118 aa, Artificial Sequence
  Chemically Synthesized
QVQLQESGGGLVQAGGSLRLSCAASGNISQHRYMGWYRQAPGKEREFVAAIDDGSNTNYADSVKGRFTISRDNAKNTVYLQMNSLKPEDTAVYYCAAITYDPTLFDYWGQGTQVTVSS

SEQ ID NO: 31455 - protein, 120 aa, Artificial Sequence
  Chemically Synthesized
QVQLQESGGGLVQAGGSLRLSCAASGSISEDVRMGWYRQAPGKERELVAIDYGGSTNYADSVKGRFTISRDNAKNTVYLQMNSLKPEDTAVYYCAASTLRGRTVVGVFYWGQGTQVTVSS

SEQ ID NO: 31456 - protein, 122 aa, Artificial Sequence
  Chemically Synthesized
QVQLQESGGGLVQAGGSLRLSCAASGSISWYTFMGWYRQAPGKEREFVATIGYGTSTYYADSVKGRFTISRDNAKNTVYLQMNSLKPEDTAVYYCAVGLHIHTTLPYIHDYWGQGTQVTVSS

SEQ ID NO: 31457 - protein, 122 aa, Artificial Sequence
  Chemically Synthesized
QVQLQESGGGLVQAGGSLRLSCAASGNIFWPYGMGWYRQAPGKEREFVAAIAVGATTYYADSVKGRFTISRDNAKNTVYLQMNSLKPEDTAVYYCAVTRRLWVGTRSRHPYWGQGTQVTVSS

SEQ ID NO: 31458 - protein, 118 aa, Artificial Sequence
  Chemically Synthesized
QVQLQESGGGLVQAGGSLRLSCAASGYIFYPSYMGWYRQAPGKEREFVASINRGAITYYADSVKGRFTISRDNAKNTVYLQMNSLKPEDTAVYYCAATRGRYRTHDYWGQGTQVTVSS

SEQ ID NO: 31459 - protein, 122 aa, Artificial Sequence
  Chemically Synthesized
QVQLQESGGGLVQAGGSLRLSCAASGNIFLIYVMGWYRQAPGKERELVAAINYGTSTNYADSVKGRFTISRDNAKNTVYLQMNSLKPEDTAVYYCAVYYLTGLFYAGRLSYWGQGTQVTVSS

SEQ ID NO: 31460 - protein, 122 aa, Artificial Sequence
  Chemically Synthesized
QVQLQESGGGLVQAGGSLRLSCAASGSISDYTPMGWYRQAPGKEREFVASIGVGAITNYADSVKGRFTISRDNAKNTVYLQMNSLKPEDTAVYYCAATGLGGGDTSKVHIYWGQGTQVTVSS

SEQ ID NO: 31461 - protein, 125 aa, Artificial Sequence
  Chemically Synthesized
QVQLQESGGGLVQAGGSLRLSCAASGNISTISFMGWYRQAPGKERELVATINAGSSTYYADSVKGRFTISRDNAKNTVYLQMNSLKPEDTAVYYCAALYYYGDGIRYPYNYYYYWGQGTQVTVSS

SEQ ID NO: 31462 - protein, 123 aa, Artificial Sequence
  Chemically Synthesized
QVQLQESGGGLVQAGGSLRLSCAASGSIFDSDPMGWYRQAPGKERELVLLVMVLVPYADSVKGRFTISRDNAKNTVYLQMNSLKPEDTAVYYCAVYGPAYTAEDVGELLHVYWGQGTQVTVSS

SEQ ID NO: 31463 - protein, 118 aa, Artificial Sequence
  Chemically Synthesized
QVQLQESGGGLVQAGGSLRLSCAASGYISVRRYMGWYRQAPGKERELVAAISRGASTNYADSVKGRFTISRDNAKNTVYLQMNSLKPEDTAVYYCAVNWRGQNDYSYWGQGTQVTVSS

SEQ ID NO: 31464 - protein, 118 aa, Artificial Sequence
  Chemically Synthesized
QVQLQESGGGLVQAGGSLRLSCAASGTIFSSYDMGWYRQAPGKEREFVAGIAIGSNTNYADSVKGRFTISRDNAKNTVYLQMNSLKPEDTAVYYCAVGVLIYYQFWYWGQGTQVTVSS

SEQ ID NO: 31465 - protein, 125 aa, Artificial Sequence
  Chemically Synthesized
QVQLQESGGGLVQAGGSLRLSCAASGYIFGVLMGWYRQAPGKERELVAAIGYGTSTYYADSVKGRFTISRDNAKNTVYLQMNSLKPEDTAVYYCAAPHQGSDRDSVGTNIPYTYWGQGTQVTVSS

SEQ ID NO: 31466 - protein, 118 aa, Artificial Sequence
  Chemically Synthesized
QVQLQESGGGLVQAGGSLRLSCAASGSISGTDIMGWYRQAPGKERELVAAITIGANTYYADSVKGRFTISRDNAKNTVYLQMNSLKPEDTAVYYCAVWHPGDYYLAYWGQGTQVTVSS

SEQ ID NO: 31467 - protein, 125 aa, Artificial Sequence
  Chemically Synthesized
QVQLQESGGGLVQAGGSLRLSCAASGSISRFAYMGWYRQAPGKERELVAAISRGSNTNYADSVKGRFTISRDNAKNTVYLQMNSLKPEDTAVYYCAVLLCTRRTITSTVGNCIYWGQGTQVTVSS

SEQ ID NO: 31468 - protein, 125 aa, Artificial Sequence
  Chemically Synthesized
QVQLQESGGGLVQAGGSLRLSCAASGNIFDGVMGWYRQAPGKERELVAGITYGSSTNYADSVKGRFTISRDNAKNTVYLQMNSLKPEDTAVYYCAARSGYRYYHGLYVGGGHAYWGQGTQVTVSS

SEQ ID NO: 31469 - protein, 118 aa, Artificial Sequence
  Chemically Synthesized
QVQLQESGGGLVQAGGSLRLSCAASGYISLTPYMGWYRQAPGKEREFVAAIAYGATTYYADSVKGRFTISRDNAKNTVYLQMNSLKPEDTAVYYCAVQRYSYSRHQYWGQGTQVTVSS

SEQ ID NO: 31470 - protein, 118 aa, Artificial Sequence
  Chemically Synthesized
QVQLQESGGGLVQAGGSLRLSCAASGNIFATDIMGWYRQAPGKERELVASIAAGGTTYYADSVKGRFTISRDNAKNTVYLQMNSLKPEDTAVYYCAVWDYLERGYRYWGQGTQVTVSS

SEQ ID NO: 31471 - protein, 122 aa, Artificial Sequence
  Chemically Synthesized
QVQLQESGGGLVQAGGSLRLSCAASGNISRVGRMGWYRQAPGKERELVAGISRGTITYYADSVKGRFTISRDNAKNTVYLQMNSLKPEDTAVYYCAASIKYTYYYRDRLTYWGQGTQVTVSS

SEQ ID NO: 31472 - protein, 118 aa, Artificial Sequence
  Chemically Synthesized
QVQLQESGGGLVQAGGSLRLSCAASGSIFTPYVMGWYRQAPGKERELVAAIGRGGTTYYADSVKGRFTISRDNAKNTVYLQMNSLKPEDTAVYYCAARYYYWHNYPYWGQGTQVTVSS

SEQ ID NO: 31473 - protein, 118 aa, Artificial Sequence
  Chemically Synthesized
QVQLQESGGGLVQAGGSLRLSCAASGYISRWYKMGWYRQAPGKERELVASIARGTTTYYADSVKGRFTISRDNAKNTVYLQMNSLKPEDTAVYYCAVYRAWSNTYLYWGQGTQVTVSS

SEQ ID NO: 31474 - protein, 122 aa, Artificial Sequence
  Chemically Synthesized
QVQLQESGGGLVQAGGSLRLSCAASGSIFVQSAMGWYRQAPGKEREFVAGIGYGASTNYADSVKGRFTISRDNAKNTVYLQMNSLKPEDTAVYYCAATTAYPTYNVYSYPYWGQGTQVTVSS

SEQ ID NO: 31475 - protein, 122 aa, Artificial Sequence
  Chemically Synthesized
QVQLQESGGGLVQAGGSLRLSCAASGNIFPSPQMGWYRQAPGKERELVAGIDVGASTNYADSVKGRFTISRDNAKNTVYLQMNSLKPEDTAVYYCAADPAQRYTEQLGYAYWGQGTQVTVSS

SEQ ID NO: 31476 - protein, 122 aa, Artificial Sequence
  Chemically Synthesized
QVQLQESGGGLVQAGGSLRLSCAASGSISWTLSMGWYRQAPGKEREFVASINSGGNTYYADSVKGRFTISRDNAKNTVYLQMNSLKPEDTAVYYCAVIAGSDYVETDWHAYWGQGTQVTVSS

SEQ ID NO: 31477 - protein, 118 aa, Artificial Sequence
  Chemically Synthesized
QVQLQESGGGLVQAGGSLRLSCAASGTISNYDDMGWYRQAPGKEREFVATIGIGTSTNYADSVKGRFTISRDNAKNTVYLQMNSLKPEDTAVYYCAVVYGGNQGHGYWGQGTQVTVSS

SEQ ID NO: 31478 - protein, 125 aa, Artificial Sequence
  Chemically Synthesized
QVQLQESGGGLVQAGGSLRLSCAASGYISAGVYMGWYRQAPGKERELVAGIDSGTTTYYADSVKGRFTISRDNAKNTVYLQMNSLKPEDTAVYYCAVYTADDTLRYDDILVVFYWGQGTQVTVSS

SEQ ID NO: 31479 - protein, 118 aa, Artificial Sequence
  Chemically Synthesized
QVQLQESGGGLVQAGGSLRLSCAASGSIFSSQAMGWYRQAPGKERELVAAIAYGGTTYYADSVKGRFTISRDNAKNTVYLQMNSLKPEDTAVYYCAARRYHVRKHLYWGQGTQVTVSS

SEQ ID NO: 31480 - protein, 126 aa, Artificial Sequence
  Chemically Synthesized
QVQLQESGGGLVQAGGSLRLSCAASGTIFPLTGMGWYRQAPGKERELVAGISYGGSTNYADSVKGRFTISRDNAKNTVYLQMNSLKPEDTAVYYCAAIRPRYSKPYAERGGRHLYWGQGTQVTVSS

SEQ ID NO: 31481 - protein, 122 aa, Artificial Sequence
  Chemically Synthesized
QVQLQESGGGLVQAGGSLRLSCAASGNISPRVLMGWYRQAPGKERELVATISRGTTTNYADSVKGRFTISRDNAKNTVYLQMNSLKPEDTAVYYCAAYNPSPAYFHTRHAYWGQGTQVTVSS

SEQ ID NO: 31482 - protein, 126 aa, Artificial Sequence
  Chemically Synthesized
QVQLQESGGGLVQAGGSLRLSCAASGSIFDTITMGWYRQAPGKEREFVAGIAYGGSTYYADSVKGRFTISRDNAKNTVYLQMNSLKPEDTAVYYCAVRGRGYNGPFYYRWFYHRYWGQGTQVTVSS

SEQ ID NO: 31483 - protein, 127 aa, Artificial Sequence
  Chemically Synthesized
QVQLQESGGGLVQAGGSLRLSCAASGNISGHYYMGWYRQAPGKERELVAAIAAGANTYYADSVKGRFTISRDNAKNTVYLQMNSLKPEDTAVYYCAAVGYTTGDGKGGAERRHYVYWGQGTQVTVSS

SEQ ID NO: 31484 - protein, 118 aa, Artificial Sequence
  Chemically Synthesized
QVQLQESGGGLVQAGGSLRLSCAASGTISRLLGMGWYRQAPGKERELVAGITFGGITYYADSVKGRFTISRDNAKNTVYLQMNSLKPEDTAVYYCAALIRPYGPYSYWGQGTQVTVSS

SEQ ID NO: 31485 - protein, 126 aa, Artificial Sequence
  Chemically Synthesized
QVQLQESGGGLVQAGGSLRLSCAASGTIFRYYNMGWYRQAPGKERELVAAIGYGASTNYADSVKGRFTISRDNAKNTVYLQMNSLKPEDTAVYYCAVIRYDEIYIQWVEGAVHYYWGQGTQVTVSS

SEQ ID NO: 31486 - protein, 126 aa, Artificial Sequence
  Chemically Synthesized
QVQLQESGGGLVQAGGSLRLSCAASGYIFRRKDMGWYRQAPGKERELVATINWGATTNYADSVKGRFTISRDNAKNTVYLQMNSLKPEDTAVYYCAVAGYPTRQDYREYRYRHVYWGQGTQVTVSS

SEQ ID NO: 31487 - protein, 118 aa, Artificial Sequence
  Chemically Synthesized
QVQLQESGGGLVQAGGSLRLSCAASGSISRRYYMGWYRQAPGKERELVAAIGDGTITYYADSVKGRFTISRDNAKNTVYLQMNSLKPEDTAVYYCAAIPDSGTSLVYWGQGTQVTVSS

SEQ ID NO: 31488 - protein, 118 aa, Artificial Sequence
  Chemically Synthesized
QVQLQESGGGLVQAGGSLRLSCAASGNIFYLRTMGWYRQAPGKEREFVAGITRGATTYYADSVKGRFTISRDNAKNTVYLQMNSLKPEDTAVYYCAVRPRPINAYYYWGQGTQVTVSS

SEQ ID NO: 31489 - protein, 115 aa, Artificial Sequence
  Chemically Synthesized
QVQLQESGGGLVQAGGSLRLSCAASGSISGRQSMGWYRQAPGKERELVATISIGGNTYYADSVKGRFTISRDNAKNTVYLQMNSLKPEDTAVYYCAAGHLQYSYWGQGTQVTVSS

SEQ ID NO: 31490 - protein, 120 aa, Artificial Sequence
  Chemically Synthesized
QVQLQESGGGLVQAGGSLRLSCAASGSISRQRYMGWYRQAPGKEREFVAAIGYGSSTYYADSVKGRFTISRDNAKNTVYLQMNSLKPEDTAVYYCAVAYQLGNGDAHFYWGQGTQVTVSS

SEQ ID NO: 31491 - protein, 122 aa, Artificial Sequence
  Chemically Synthesized
QVQLQESGGGLVQAGGSLRLSCAASGNISYSQDMGWYRQAPGKERELVAAINDGGNTNYADSVKGRFTISRDNAKNTVYLQMNSLKPEDTAVYYCAVVTLTNTTTSWVLLYWGQGTQVTVSS

SEQ ID NO: 31492 - protein, 118 aa, Artificial Sequence
  Chemically Synthesized
QVQLQESGGGLVQAGGSLRLSCAASGTIFARVAMGWYRQAPGKEREFVATINDGSSTYYADSVKGRFTISRDNAKNTVYLQMNSLKPEDTAVYYCAAYDRQDRGFEYWGQGTQVTVSS

SEQ ID NO: 31493 - protein, 117 aa, Artificial Sequence
  Chemically Synthesized
QVQLQESGGGLVQAGGSLRLSCAASGYISWRTMGWYRQAPGKEREFVAGITRGTNTNYADSVKGRFTISRDNAKNTVYLQMNSLKPEDTAVYYCAASLRHNSYHYYWGQGTQVTVSS

SEQ ID NO: 31494 - protein, 118 aa, Artificial Sequence
  Chemically Synthesized
QVQLQESGGGLVQAGGSLRLSCAASGYISTYAYMGWYRQAPGKERELVASIGYGTTTNYADSVKGRFTISRDNAKNTVYLQMNSLKPEDTAVYYCAASTHAGYGFVYWGQGTQVTVSS

SEQ ID NO: 31495 - protein, 126 aa, Artificial Sequence
  Chemically Synthesized
QVQLQESGGGLVQAGGSLRLSCAASGTISVFATMGWYRQAPGKERELVASIGDGANTNYADSVKGRFTISRDNAKNTVYLQMNSLKPEDTAVYYCAADDNARVQAWDVQGVLYYYWGQGTQVTVSS

SEQ ID NO: 31496 - protein, 114 aa, Artificial Sequence
  Chemically Synthesized
QVQLQESGGGLVQAGGSLRLSCAASGNISSVLLMGWYRQAPGKEREFVAAIGSGGSTYYADSVKGRFTISRDNAKNTVYLQMNSLKPEDTAVYYCAGYRRLCYWGQGTQVTVSS

SEQ ID NO: 31497 - protein, 118 aa, Artificial Sequence
  Chemically Synthesized
QVQLQESGGGLVQAGGSLRLSCAASGNISTVRFMGWYRQAPGKEREFVATINRGSSTYYADSVKGRFTISRDNAKNTVYLQMNSLKPEDTAVYYCAAAVAFDESHTYWGQGTQVTVSS

SEQ ID NO: 31498 - protein, 121 aa, Artificial Sequence
  Chemically Synthesized
QVQLQESGGGLVQAGGSLRLSCAASGTIFRVGAMGWYRQAPGKEREFVAGIGSGGSTYYADSVKGRFTISRDNAKNTVYLQMNSLKPEDTAVYYCAARYRGRYYATYLLYWGQGTQVTVSS

SEQ ID NO: 31499 - protein, 124 aa, Artificial Sequence
  Chemically Synthesized
QVQLQESGGGLVQAGGSLRLSCAASGTIFLSVFMGWYRQAPGKEREFVASIDQGGSTNYADSVKGRFTISRDNAKNTVYLQMNSLKPEDTAVYYCAVWYQWWAGGQIDLRYPYWGQGTQVTVSS

SEQ ID NO: 31500 - protein, 118 aa, Artificial Sequence
  Chemically Synthesized
QVQLQESGGGLVQAGGSLRLSCAASGTIFYASDMGWYRQAPGKERELVAAIGTGTSTYYADSVKGRFTISRDNAKNTVYLQMNSLKPEDTAVYYCAAWPVAYSDHGYWGQGTQVTVSS

SEQ ID NO: 31501 - protein, 118 aa, Artificial Sequence
  Chemically Synthesized
QVQLQESGGGLVQAGGSLRLSCAASGTISYYVRMGWYRQAPGKERELVATINRGGSTNYADSVKGRFTISRDNAKNTVYLQMNSLKPEDTAVYYCAALRYRHGVHRYWGQGTQVTVSS

SEQ ID NO: 31502 - protein, 122 aa, Artificial Sequence
  Chemically Synthesized
QVQLQESGGGLVQAGGSLRLSCAASGYISQLRLMGWYRQAPGKERELVAAIASGANTYYADSVKGRFTISRDNAKNTVYLQMNSLKPEDTAVYYCAAGHYRYIWRSAKFNYWGQGTQVTVSS

SEQ ID NO: 31503 - protein, 113 aa, Artificial Sequence
  Chemically Synthesized
QVQLQESGGGLVQAGGSLRLSCAASGNIFPWYLMGWYRQAPGKERELVATIGVGTTTNYADSVKGRFTISRDNAKNTVYLQMNSLKPEDTAVYYCAAGGAYYWGQGTQVTVSS

SEQ ID NO: 31504 - protein, 122 aa, Artificial Sequence
  Chemically Synthesized
QVQLQESGGGLVQAGGSLRLSCAASGNIFGRDFMGWYRQAPGKEREFVATIAYGSNTNYADSVKGRFTISRDNAKNTVYLQMNSLKPEDTAVYYCAVWYRRYGAYRHTHRYWGQGTQVTVSS

SEQ ID NO: 31505 - protein, 118 aa, Artificial Sequence
  Chemically Synthesized
QVQLQESGGGLVQAGGSLRLSCAASGSIFGLTSMGWYRQAPGKEREFVAGIDYGAITYYADSVKGRFTISRDNAKNTVYLQMNSLKPEDTAVYYCAVYTRKSDGHGYWGQGTQVTVSS

SEQ ID NO: 31506 - protein, 122 aa, Artificial Sequence
  Chemically Synthesized
QVQLQESGGGLVQAGGSLRLSCAASGSIFQSGLMGWYRQAPGKEREFVAGITVGGNTYYADSVKGRFTISRDNAKNTVYLQMNSLKPEDTAVYYCAVISARRPYRPRLYYYWGQGTQVTVSS

SEQ ID NO: 31507 - protein, 122 aa, Artificial Sequence
  Chemically Synthesized
QVQLQESGGGLVQAGGSLRLSCAASGYISYDDVMGWYRQAPGKERELVATINWGANTYYADSVKGRFTISRDNAKNTVYLQMNSLKPEDTAVYYCAASDKDVFYVTSRYIYWGQGTQVTVSS

SEQ ID NO: 31508 - protein, 124 aa, Artificial Sequence
  Chemically Synthesized
QVQLQESGGGLVQAGGSLRLSCAASGTISYRWNMGWYRQAPGKEREFVAAIDRGGSTNYADSVKGRFTISRDNAKNTVYLQMNSLKPEDTAVYYCAAYTDHRYSYDSQIGFTYWGQGTQVTVSS

SEQ ID NO: 31509 - protein, 122 aa, Artificial Sequence
  Chemically Synthesized
QVQLQESGGGLVQAGGSLRLSCAASGNISHYLPMGWYRQAPGKERELVAAITYGTNTNYADSVKGRFTISRDNAKNTVYLQMNSLKPEDTAVYYCAAGKRRQWYPFYRLYYWGQGTQVTVSS

SEQ ID NO: 31510 - protein, 122 aa, Artificial Sequence
  Chemically Synthesized
QVQLQESGGGLVQAGGSLRLSCAASGNIFTDRSMGWYRQAPGKEREFVATISDGGNTYYADSVKGRFTISRDNAKNTVYLQMNSLKPEDTAVYYCAVGPFTNDGAPVIYQYWGQGTQVTVSS

SEQ ID NO: 31511 - protein, 122 aa, Artificial Sequence
  Chemically Synthesized
QVQLQESGGGLVQAGGSLRLSCAASGNISYTDDMGWYRQAPGKERELVASIGAGGTTYYADSVKGRFTISRDNAKNTVYLQMNSLKPEDTAVYYCAAPYSLGPRQADYHHYWGQGTQVTVSS

SEQ ID NO: 31512 - protein, 115 aa, Artificial Sequence
  Chemically Synthesized
QVQLQESGGGLVQAGGSLRLSCAASGNIFYPYYMGWYRQAPGKEREFVAAITVGTITYYADSVKGRFTISRDNAKNTVYLQMNSLKPEDTAVYYCAARRYYHHYWGQGTQVTVSS

SEQ ID NO: 31513 - protein, 121 aa, Artificial Sequence
  Chemically Synthesized
QVQLQESGGGLVQAGGSLRLSCAASGTISPTSMGWYRQAPGKEREFVAAISSGGNTYYADSVKGRFTISRDNAKNTVYLQMNSLKPEDTAVYYCAVEDYYGDVTGYSFPYWGQGTQVTVSS

SEQ ID NO: 31514 - protein, 122 aa, Artificial Sequence
  Chemically Synthesized
QVQLQESGGGLVQAGGSLRLSCAASGYIFRHRRMGWYRQAPGKERELVAGIARGGITYYADSVKGRFTISRDNAKNTVYLQMNSLKPEDTAVYYCAAVFPYTSYGYRDHRYWGQGTQVTVSS

SEQ ID NO: 31515 - protein, 122 aa, Artificial Sequence
  Chemically Synthesized
QVQLQESGGGLVQAGGSLRLSCAASGNISRWYNMGWYRQAPGKEREFVASIARGTNTYYADSVKGRFTISRDNAKNTVYLQMNSLKPEDTAVYYCAVRRTSYSYWGNWLSYWGQGTQVTVSS

SEQ ID NO: 31516 - protein, 126 aa, Artificial Sequence
  Chemically Synthesized
QVQLQESGGGLVQAGGSLRLSCAASGTIFDQAVMGWYRQAPGKERELVAAINIGGNTNYADSVKGRFTISRDNAKNTVYLQMNSLKPEDTAVYYCAVRYRRRYHILEYFYSTHGYWGQGTQVTVSS

SEQ ID NO: 31517 - protein, 118 aa, Artificial Sequence
  Chemically Synthesized
QVQLQESGGGLVQAGGSLRLSCAASGNISWFRYMGWYRQAPGKEREFVAAIAPGANTNYADSVKGRFTISRDNAKNTVYLQMNSLKPEDTAVYYCAAPARVRWYHSYWGQGTQVTVSS

SEQ ID NO: 31518 - protein, 126 aa, Artificial Sequence
  Chemically Synthesized
QVQLQESGGGLVQAGGSLRLSCAASGYIFYFAVMGWYRQAPGKERELVAAITDGSITNYADSVKGRFTISRDNAKNTVYLQMNSLKPEDTAVYYCAVTQVGVQSVIGLYGDVFEYWGQGTQVTVSS

SEQ ID NO: 31519 - protein, 122 aa, Artificial Sequence
  Chemically Synthesized
QVQLQESGGGLVQAGGSLRLSCAASGYISYHWVMGWYRQAPGKEREFVATISSGTSTNYADSVKGRFTISRDNAKNTVYLQMNSLKPEDTAVYYCAVYKSGDFDGQDVHKYWGQGTQVTVSS

SEQ ID NO: 31520 - protein, 122 aa, Artificial Sequence
  Chemically Synthesized
QVQLQESGGGLVQAGGSLRLSCAASGTISRKFNMGWYRQAPGKERELVAGISRGSTTYYADSVKGRFTISRDNAKNTVYLQMNSLKPEDTAVYYCAADPLWWLYRYSVHYYWGQGTQVTVSS

SEQ ID NO: 31521 - protein, 126 aa, Artificial Sequence
  Chemically Synthesized
QVQLQESGGGLVQAGGSLRLSCAASGTIFFRRYMGWYRQAPGKEREFVAGIDRGASTYYADSVKGRFTISRDNAKNTVYLQMNSLKPEDTAVYYCAAGLRTYYNLNRDYTYYHVYWGQGTQVTVSS

SEQ ID NO: 31522 - protein, 122 aa, Artificial Sequence
  Chemically Synthesized
QVQLQESGGGLVQAGGSLRLSCAASGTISSFTRMGWYRQAPGKEREFVASINFGANTNYADSVKGRFTISRDNAKNTVYLQMNSLKPEDTAVYYCAVPPRWVYAWGGSYFYWGQGTQVTVSS

SEQ ID NO: 31523 - protein, 126 aa, Artificial Sequence
  Chemically Synthesized
QVQLQESGGGLVQAGGSLRLSCAASGSISYYTYMGWYRQAPGKEREFVAAIGYGATTNYADSVKGRFTISRDNAKNTVYLQMNSLKPEDTAVYYCAVSTWWSRLIYRGPIGQHLYWGQGTQVTVSS

SEQ ID NO: 31524 - protein, 118 aa, Artificial Sequence
  Chemically Synthesized
QVQLQESGGGLVQAGGSLRLSCAASGNISYGTAMGWYRQAPGKEREFVAGIAYGGNTYYADSVKGRFTISRDNAKNTVYLQMNSLKPEDTAVYYCAARTHYVIYYYYWGQGTQVTVSS

SEQ ID NO: 31525 - protein, 114 aa, Artificial Sequence
  Chemically Synthesized
QVQLQESGGGLVQAGGSLRLSCAASGYISDAPRMGWYRQAPGKEREFVASIAYGASTNYADSVKGRFTISRDNAKNTVYLQMNSLKPEDTAVYYCAAKTVTIYWGQGTQVTVSS

SEQ ID NO: 31526 - protein, 118 aa, Artificial Sequence
  Chemically Synthesized
QVQLQESGGGLVQAGGSLRLSCAASGYIFWYTSMGWYRQAPGKERELVASIARGATTYYADSVKGRFTISRDNAKNTVYLQMNSLKPEDTAVYYCAAVRSRRYGHQYWGQGTQVTVSS

SEQ ID NO: 31527 - protein, 121 aa, Artificial Sequence
  Chemically Synthesized
QVQLQESGGGLVQAGGSLRLSCAASGTISRLLFMGWYRQAPGKEREFVAGISEGGSTNYADSVKGRFTISRDNAKNTVYLQMNSLKPEDTAVYYCAVGNRAFKRPYSSLYWGQGTQVTVSS

SEQ ID NO: 31528 - protein, 109 aa, Artificial Sequence
  Chemically Synthesized
QVQLQESGGGLVQAGGSLRLSCAASGSISGGYVMGWYRQAPGKERELVAAITEGASTYYADSVKGRFTISRDNAKNTVYLQMNSLKPEDTAVYYCALYWGQGTQVTVSS

SEQ ID NO: 31529 - protein, 126 aa, Artificial Sequence
  Chemically Synthesized
QVQLQESGGGLVQAGGSLRLSCAASGYISIWYDMGWYRQAPGKERELVAAISPGGNTNYADSVKGRFTISRDNAKNTVYLQMNSLKPEDTAVYYCAVYWWYDSQVAYGDIIYFWYWGQGTQVTVSS

SEQ ID NO: 31530 - protein, 125 aa, Artificial Sequence
  Chemically Synthesized
QVQLQESGGGLVQAGGSLRLSCAASGSISDLYGMGWYRQAPGKERELVAGINKGGNTNYADSVKGRFTISRDNAKNTVYLQMNSLKPEDTAVYYCAAGDHDYDTRQGVPQSLMYWGQGTQVTVSS

SEQ ID NO: 31531 - protein, 126 aa, Artificial Sequence
  Chemically Synthesized
QVQLQESGGGLVQAGGSLRLSCAASGNIFPLVYMGWYRQAPGKEREFVAAIAPGSITYYADSVKGRFTISRDNAKNTVYLQMNSLKPEDTAVYYCAVRYARDQGEGNGVLPEHYYWGQGTQVTVSS

SEQ ID NO: 31532 - protein, 125 aa, Artificial Sequence
  Chemically Synthesized
QVQLQESGGGLVQAGGSLRLSCAASGTISDDVHMGWYRQAPGKEREFVAGISYGSVPYADSVKGRFTISRDNAKNTVYLQMNSLKPEDTAVYYCAVLQISSPTELQVTDGQYGYWGQGTQVTVSS

SEQ ID NO: 31533 - protein, 118 aa, Artificial Sequence
  Chemically Synthesized
QVQLQESGGGLVQAGGSLRLSCAASGYIFVDLSMGWYRQAPGKERELVATIASGSSTNYADSVKGRFTISRDNAKNTVYLQMNSLKPEDTAVYYCAVYAQPLQYHDYWGQGTQVTVSS

SEQ ID NO: 31534 - protein, 118 aa, Artificial Sequence
  Chemically Synthesized
QVQLQESGGGLVQAGGSLRLSCAASGSISPTFDMGWYRQAPGKEREFVAAINNGASTYYADSVKGRFTISRDNAKNTVYLQMNSLKPEDTAVYYCAAKAESAYIYTYWGQGTQVTVSS

SEQ ID NO: 31535 - protein, 118 aa, Artificial Sequence
  Chemically Synthesized
QVQLQESGGGLVQAGGSLRLSCAASGSISLSYLMGWYRQAPGKERELVAAIGDGSITYYADSVKGRFTISRDNAKNTVYLQMNSLKPEDTAVYYCAAYVGIYYDFDYWGQGTQVTVSS

SEQ ID NO: 31536 - protein, 127 aa, Artificial Sequence
  Chemically Synthesized
QVQLQESGGGLVQAGGSLRLSCAASGNIFSRANMGWYRQAPGKERELVAAIDGGTSTYYADSVKGRFTISRDNAKNTVYLQMNSLKPEDTAVYYCAVYIAPYDTAWIYYGYLRHYYWGQGTQVTVSS

SEQ ID NO: 31537 - protein, 121 aa, Artificial Sequence
  Chemically Synthesized
QVQLQESGGGLVQAGGSLRLSCAASGNIFWDGRMGWYRQAPGKEREFVASIGVGGSTNYADSVKGRFTISRDNAKNTVYLQMNSLKPEDTAVYYCAVSLTRYRTALHSIYWGQGTQVTVSS

SEQ ID NO: 31538 - protein, 126 aa, Artificial Sequence
  Chemically Synthesized
QVQLQESGGGLVQAGGSLRLSCAASGTIFVYWIMGWYRQAPGKERELVAGIGSGGTTYYADSVKGRFTISRDNAKNTVYLQMNSLKPEDTAVYYCAAGGPYARGLINTGRVPHDYWGQGTQVTVSS

SEQ ID NO: 31539 - protein, 121 aa, Artificial Sequence
  Chemically Synthesized
QVQLQESGGGLVQAGGSLRLSCAASGNISYLGGMGWYRQAPGKERELVASISLGAITYYADSVKGRFTISRDNAKNTVYLQMNSLKPEDTAVYYCAVRDYYYSTGSTCFYWGQGTQVTVSS

SEQ ID NO: 31540 - protein, 118 aa, Artificial Sequence
  Chemically Synthesized
QVQLQESGGGLVQAGGSLRLSCAASGNIFPTDGMGWYRQAPGKEREFVASIDLGTSTNYADSVKGRFTISRDNAKNTVYLQMNSLKPEDTAVYYCAARYDVGSLLYYWGQGTQVTVSS

SEQ ID NO: 31541 - protein, 117 aa, Artificial Sequence
  Chemically Synthesized
QVQLQESGGGLVQAGGSLRLSCAASGTISYLLDMGWYRQAPGKERELVAAIASVLLPYADSVKGRFTISRDNAKNTVYLQMNSLKPEDTAVYYCAANGAAVWDLSYWGQGTQVTVSS

SEQ ID NO: 31542 - protein, 117 aa, Artificial Sequence
  Chemically Synthesized
QVQLQESGGGLVQAGGSLRLSCAASGTISTSYAMGWYRQAPGKERELLPVLLLVVLPYADSVKGRFTISRDNAKNTVYLQMNSLKPEDTAVYYCAAQKFYRDGHDYWGQGTQVTVSS

SEQ ID NO: 31543 - protein, 122 aa, Artificial Sequence
  Chemically Synthesized
QVQLQESGGGLVQAGGSLRLSCAASGSIFQTEIMGWYRQAPGKERELVAAIATGGSTNYADSVKGRFTISRDNAKNTVYLQMNSLKPEDTAVYYCAVIGRLYYVSYRRHYYWGQGTQVTVSS

SEQ ID NO: 31544 - protein, 122 aa, Artificial Sequence
  Chemically Synthesized
QVQLQESGGGLVQAGGSLRLSCAASGNISVPYKMGWYRQAPGKERELVAGISPGGNTYYADSVKGRFTISRDNAKNTVYLQMNSLKPEDTAVYYCAVAWRDGAEYGGNLLYWGQGTQVTVSS

SEQ ID NO: 31545 - protein, 121 aa, Artificial Sequence
  Chemically Synthesized
QVQLQESGGGLVQAGGSLRLSCAASGTISDIRYMGWYRQAPGKEREFVATIDWGANTYYADSVKGRFTISRDNAKNTVYLQMNSLKPEDTAVYYCAVYHVEARDLTVVLYWGQGTQVTVSS

SEQ ID NO: 31546 - protein, 118 aa, Artificial Sequence
  Chemically Synthesized
QVQLQESGGGLVQAGGSLRLSCAASGNISLDNEMGWYRQAPGKEREFVAGIGPGASTYYADSVKGRFTISRDNAKNTVYLQMNSLKPEDTAVYYCAVVASRAQYHTYWGQGTQVTVSS

SEQ ID NO: 31547 - protein, 120 aa, Artificial Sequence
  Chemically Synthesized
QVQLQESGGGLVQAGGSLRLSCAASGSISGFTRMGWYRQAPGKEREFVAGIDIGSITYYADSVKGRFTISRDNAKNTVYLQMNSLKPEDTAVYYCAALYSTTKVFCSLYWGQGTQVTVSS

SEQ ID NO: 31548 - protein, 114 aa, Artificial Sequence
  Chemically Synthesized
QVQLQESGGGLVQAGGSLRLSCAASGNISSAYAMGWYRQAPGKERELVATITSGAITYYADSVKGRFTISRDNAKNTVYLQMNSLKPEDTAVYYCAAGYSHVYWGQGTQVTVSS

SEQ ID NO: 31549 - protein, 119 aa, Artificial Sequence
  Chemically Synthesized
QVQLQESGGGLVQAGGSLRLSCAASGTISDSVFMGWYRQAPGKERELVAAINSGGTTNYADSVKGRFTISRDNAKNTVYLQMNSLKPEDTAVYYCAKYRPWDGSDHDYWGQGTQVTVSS

SEQ ID NO: 31550 - protein, 117 aa, Artificial Sequence
  Chemically Synthesized
QVQLQESGGGLVQAGGSLRLSCAASGYISQTYQMGWYRQAPGKEREFVATISYGSTTYYADSVKGRFTISRDNAKNTVYLQMNSLKPEDTAVYYCAAFHTTLTTMYWGQGTQVTVSS

SEQ ID NO: 31551 - protein, 116 aa, Artificial Sequence
  Chemically Synthesized
QVQLQESGGGLVQAGGSLRLSCAASGTIFGTLAMGWYRQAPGKEREFVAGIGYGTTTYYADSVKGRFTISRDNAKNTVYLQMNSLKPEDTAVYYCAAYLRSLLIYWGQGTQVTVSS

SEQ ID NO: 31552 - protein, 122 aa, Artificial Sequence
  Chemically Synthesized
QVQLQESGGGLVQAGGSLRLSCAASGSIFEAIDMGWYRQAPGKERELVASIAAGGTTYYADSVKGRFTISRDNAKNTVYLQMNSLKPEDTAVYYCAVYAGYTNPQFVYHPYWGQGTQVTVSS

SEQ ID NO: 31553 - protein, 118 aa, Artificial Sequence
  Chemically Synthesized
QVQLQESGGGLVQAGGSLRLSCAASGYIFIRSVMGWYRQAPGKEREFVAAITRGATTNYADSVKGRFTISRDNAKNTVYLQMNSLKPEDTAVYYCAVKFTGWSPHYYWGQGTQVTVSS

SEQ ID NO: 31554 - protein, 118 aa, Artificial Sequence
  Chemically Synthesized
QVQLQESGGGLVQAGGSLRLSCAASGNIFPLLDMGWYRQAPGKERELVASIASGGITYYADSVKGRFTISRDNAKNTVYLQMNSLKPEDTAVYYCAAVWPDAGSHDYWGQGTQVTVSS

SEQ ID NO: 31555 - protein, 118 aa, Artificial Sequence
  Chemically Synthesized
QVQLQESGGGLVQAGGSLRLSCAASGTIFAAAYMGWYRQAPGKERELVAAIGKGASTNYADSVKGRFTISRDNAKNTVYLQMNSLKPEDTAVYYCAVVVLGDTYFTYWGQGTQVTVSS

SEQ ID NO: 31556 - protein, 118 aa, Artificial Sequence
  Chemically Synthesized
QVQLQESGGGLVQAGGSLRLSCAASGNIFYYYLMGWYRQAPGKEREFVATITSGAITYYADSVKGRFTISRDNAKNTVYLQMNSLKPEDTAVYYCAVGGYGSQWHGYWGQGTQVTVSS

SEQ ID NO: 31557 - protein, 118 aa, Artificial Sequence
  Chemically Synthesized
QVQLQESGGGLVQAGGSLRLSCAASGSIFNSHYMGWYRQAPGKEREFVASIDWGSSTNYADSVKGRFTISRDNAKNTVYLQMNSLKPEDTAVYYCAAYDYIFTAHAYWGQGTQVTVSS

SEQ ID NO: 31558 - protein, 126 aa, Artificial Sequence
  Chemically Synthesized
QVQLQESGGGLVQAGGSLRLSCAASGNIFQSNGMGWYRQAPGKEREFVAAIAVGTSTNYADSVKGRFTISRDNAKNTVYLQMNSLKPEDTAVYYCAAVDHTLRTLYYDDARDHGYWGQGTQVTVSS

SEQ ID NO: 31559 - protein, 122 aa, Artificial Sequence
  Chemically Synthesized
QVQLQESGGGLVQAGGSLRLSCAASGSIFGSAFMGWYRQAPGKERELVAAITAGSSTNYADSVKGRFTISRDNAKNTVYLQMNSLKPEDTAVYYCAVYGYDRYFPRADHYYWGQGTQVTVSS

SEQ ID NO: 31560 - protein, 119 aa, Artificial Sequence
  Chemically Synthesized
QVQLQESGGGLVQAGGSLRLSCAASGSISTNRYMGWYRQAPGKERELVAAINYGGSTNYADSVKGRFTISRDNAKNTVYLQMNSLKPEDTAVYYCAWLYLLDVYSYLYWGQGTQVTVSS

SEQ ID NO: 31561 - protein, 118 aa, Artificial Sequence
  Chemically Synthesized
QVQLQESGGGLVQAGGSLRLSCAASGNISYPSKMGWYRQAPGKERELVAAIAYGSSTYYADSVKGRFTISRDNAKNTVYLQMNSLKPEDTAVYYCAVVTRDYTYYFYWGQGTQVTVSS

SEQ ID NO: 31562 - protein, 118 aa, Artificial Sequence
  Chemically Synthesized
QVQLQESGGGLVQAGGSLRLSCAASGNIFSTDVMGWYRQAPGKERELVAAIAYGANTYYADSVKGRFTISRDNAKNTVYLQMNSLKPEDTAVYYCAAILGDDGVHYYWGQGTQVTVSS

SEQ ID NO: 31563 - protein, 109 aa, Artificial Sequence
  Chemically Synthesized
QVQLQESGGGLVQAGGSLRLSCAASGTIFWYDDMGWYRQAPGKERELVAAIADGSSTYYADSVKGRFTISRDNAKNTVYLQMNSLKPEDTAVYYCAVYWGQGTQVTVSS

SEQ ID NO: 31564 - protein, 122 aa, Artificial Sequence
  Chemically Synthesized
QVQLQESGGGLVQAGGSLRLSCAASGSIFDDYPMGWYRQAPGKEREFVAAIGDGSSTNYADSVKGRFTISRDNAKNTVYLQMNSLKPEDTAVYYCAVKGVARDYAGSDYGYWGQGTQVTVSS

SEQ ID NO: 31565 - protein, 122 aa, Artificial Sequence
  Chemically Synthesized
QVQLQESGGGLVQAGGSLRLSCAASGSIFTQYVMGWYRQAPGKERELVAAIGTEGGNTYYADSVKGRFTISRDNAKNTVYLQMNSLKPEDTAVYYCAAYLVGSIHRPTYYYWGQGTQVTVSS

SEQ ID NO: 31566 - protein, 118 aa, Artificial Sequence
  Chemically Synthesized
QVQLQESGGGLVQAGGSLRLSCAASGYISYYNAMGWYRQAPGKEREFVAAINRGAITNYADSVKGRFTISRDNAKNTVYLQMNSLKPEDTAVYYCAALKFDYDTFYYWGQGTQVTVSS

SEQ ID NO: 31567 - protein, 117 aa, Artificial Sequence
  Chemically Synthesized
QVQLQESGGGLVQAGGSLRLSCAASGTISYTDLMGWYRQAPGKERELVATISYGSIPYADSVKGRFTISRDNAKNTVYLQMNSLKPEDTAVYYCAVVSATSGYYNYWGQGTQVTVSS

SEQ ID NO: 31568 - protein, 126 aa, Artificial Sequence
  Chemically Synthesized
QVQLQESGGGLVQAGGSLRLSCAASGYIFRWRYMGWYRQAPGKERELVAGITQGSTTYYADSVKGRFTISRDNAKNTVYLQMNSLKPEDTAVYYCAVRDYARDTGRIQDRIYHLYWGQGTQVTVSS

SEQ ID NO: 31569 - protein, 118 aa, Artificial Sequence
  Chemically Synthesized
QVQLQESGGGLVQAGGSLRLSCAASGSISGVLSMGWYRQAPGKEREFVAAITDGTTTNYADSVKGRFTISRDNAKNTVYLQMNSLKPEDTAVYYCAVVDEVTGYFRYWGQGTQVTVSS

SEQ ID NO: 31570 - protein, 122 aa, Artificial Sequence
  Chemically Synthesized
QVQLQESGGGLVQAGGSLRLSCAASGNISYRNDMGWYRQAPGKERELVATIASGATTYYADSVKGRFTISRDNAKNTVYLQMNSLKPEDTAVYYCAANVYYHYDYGDSHDYWGQGTQVTVSS

SEQ ID NO: 31571 - protein, 117 aa, Artificial Sequence
  Chemically Synthesized
QVQLQESGGGLVQAGGSLRLSCAASGNISASTAMGWYRQAPGKEREFVAAIDDGAITNYADSVKGRFTISRDNAKNTVYLQMNSLKPEDTAVYYCAARSNAYSHTYWGQGTQVTVSS

SEQ ID NO: 31572 - protein, 118 aa, Artificial Sequence
  Chemically Synthesized
QVQLQESGGGLVQAGGSLRLSCAASGNIFPAGGMGWYRQAPGKERELVATIGGGGNTYYADSVKGRFTISRDNAKNTVYLQMNSLKPEDTAVYYCAASYQGNSPHAYWGQGTQVTVSS

SEQ ID NO: 31573 - protein, 118 aa, Artificial Sequence
  Chemically Synthesized
QVQLQESGGGLVQAGGSLRLSCAASGYISSGYIMGWYRQAPGKERELVATIGLGGNTYYADSVKGRFTISRDNAKNTVYLQMNSLKPEDTAVYYCAAYNDSIYYHDYWGQGTQVTVSS

SEQ ID NO: 31574 - protein, 121 aa, Artificial Sequence
  Chemically Synthesized
QVQLQESGGGLVQAGGSLRLSCAASGNIFSSIMGWYRQAPGKERELVASIGYGGNTYYADSVKGRFTISRDNAKNTVYLQMNSLKPEDTAVYYCAAYEEYWESIEDYHNYWGQGTQVTVSS

SEQ ID NO: 31575 - protein, 122 aa, Artificial Sequence
  Chemically Synthesized
QVQLQESGGGLVQAGGSLRLSCAASGNISGYGPMGWYRQAPGKERELVATIGDGSTTYYADSVKGRFTISRDNAKNTVYLQMNSLKPEDTAVYYCAVWYESEVRGHYRFEYWGQGTQVTVSS

SEQ ID NO: 31576 - protein, 126 aa, Artificial Sequence
  Chemically Synthesized
QVQLQESGGGLVQAGGSLRLSCAASGTISHPWTMGWYRQAPGKEREFVASITPGGNTYYADSVKGRFTISRDNAKNTVYLQMNSLKPEDTAVYYCAVGYTYTWGADYDTYRNFRYWGQGTQVTVSS

SEQ ID NO: 31577 - protein, 118 aa, Artificial Sequence
  Chemically Synthesized
QVQLQESGGGLVQAGGSLRLSCAASGSISVTRYMGWYRQAPGKERELVATISIGSTTNYADSVKGRFTISRDNAKNTVYLQMNSLKPEDTAVYYCAVLYDAVGDYNYWGQGTQVTVSS

SEQ ID NO: 31578 - protein, 118 aa, Artificial Sequence
  Chemically Synthesized
QVQLQESGGGLVQAGGSLRLSCAASGYISRRWYMGWYRQAPGKERELVAAIGYGANTYYADSVKGRFTISRDNAKNTVYLQMNSLKPEDTAVYYCAVGYHRRSDLVYWGQGTQVTVSS

SEQ ID NO: 31579 - protein, 122 aa, Artificial Sequence
  Chemically Synthesized
QVQLQESGGGLVQAGGSLRLSCAASGTIFVGGNMGWYRQAPGKEREFVAGINYGATTYYADSVKGRFTISRDNAKNTVYLQMNSLKPEDTAVYYCAVYQVNGYSLSDGLHYWGQGTQVTVSS

SEQ ID NO: 31580 - protein, 125 aa, Artificial Sequence
  Chemically Synthesized
QVQLQESGGGLVQAGGSLRLSCAASGYISYGGEMGWYRQAPGKEREFVASIDYGGSTNYADSVKGRFTISRDNAKNTVYLQMNSLKPEDTAVYYCAVGRRYEVFSYQFDGWHIYWGQGTQVTVSS

SEQ ID NO: 31581 - protein, 117 aa, Artificial Sequence
  Chemically Synthesized
QVQLQESGGGLVQAGGSLRLSCAASGTISDVTDMGWYRQAPGKERELVAAISHGSSTYYADSVKGRFTISRDNAKNTVYLQMNSLKPEDTAVYYCAAHYGDPSYEYWGQGTQVTVSS

SEQ ID NO: 31582 - protein, 121 aa, Artificial Sequence
  Chemically Synthesized
QVQLQESGGGLVQAGGSLRLSCAASGNISDRPYMGWYRQAPGKERELVAAITIGGNTNYADSVKGRFTISRDNAKNTVYLQMNSLKPEDTAVYYCAVRLTYHTSVDYYSYWGQGTQVTVSS

SEQ ID NO: 31583 - protein, 125 aa, Artificial Sequence
  Chemically Synthesized
QVQLQESGGGLVQAGGSLRLSCAASGYISPYWDMGWYRQAPGKERELVAGINAGSNTNYADSVKGRFTISRDNAKNTVYLQMNSLKPEDTAVYYCAVGRVQQGGSSLRLVRTLYWGQGTQVTVSS

SEQ ID NO: 31584 - protein, 122 aa, Artificial Sequence
  Chemically Synthesized
QVQLQESGGGLVQAGGSLRLSCAASGNISVYYWMGWYRQAPGKEREFVASITWGGTTNYADSVKGRFTISRDNAKNTVYLQMNSLKPEDTAVYYCAVIVAYYDAYRRRFDYWGQGTQVTVSS

SEQ ID NO: 31585 - protein, 125 aa, Artificial Sequence
  Chemically Synthesized
QVQLQESGGGLVQAGGSLRLSCAASGYISPYDYMGWYRQAPGKERELVASINYGANTYYADSVKGRFTISRDNAKNTVYLQMNSLKPEDTAVYYCAASLRTCRSRTTSVVTSIYWGQGTQVTVSS

SEQ ID NO: 31586 - protein, 126 aa, Artificial Sequence
  Chemically Synthesized
QVQLQESGGGLVQAGGSLRLSCAASGYISYYYTMGWYRQAPGKEREFVAAIDSGGITNYADSVKGRFTISRDNAKNTVYLQMNSLKPEDTAVYYCAVRRSRISPGYDHDIDPFYYWGQGTQVTVSS

SEQ ID NO: 31587 - protein, 123 aa, Artificial Sequence
  Chemically Synthesized
QVQLQESGGGLVQAGGSLRLSCAASGTIFWMGWYRQAPGKERELVASINYGTSTYYADSVKGRFTISRDNAKNTVYLQMNSLKPEDTAVYYCAVQYNSTPTKPGLDSYDYAYWGQGTQVTVSS

SEQ ID NO: 31588 - protein, 117 aa, Artificial Sequence
  Chemically Synthesized
QVQLQESGGGLVQAGGSLRLSCAASGNISQTQLMGWYRQAPGKERELVATIDAGANTNYADSVKGRFTISRDNAKNTVYLQMNSLKPEDTAVYYCAAADLRSAYLYWGQGTQVTVSS

SEQ ID NO: 31589 - protein, 116 aa, Artificial Sequence
  Chemically Synthesized
QVQLQESGGGLVQAGGSLRLSCAASGNISGQHTMGWYRQAPGKEREFVAILLSVLLPYADSVKGRFTISRDNAKNTVYLQMNSLKPEDTAVYYCAVYYRDDLHAYWGQGTQVTVSS

SEQ ID NO: 31590 - protein, 126 aa, Artificial Sequence
  Chemically Synthesized
QVQLQESGGGLVQAGGSLRLSCAASGYISYQHVMGWYRQAPGKERELVATIDSGTITNYADSVKGRFTISRDNAKNTVYLQMNSLKPEDTAVYYCAAGSDVITRYTQSVTGRYAYWGQGTQVTVSS

SEQ ID NO: 31591 - protein, 118 aa, Artificial Sequence
  Chemically Synthesized
QVQLQESGGGLVQAGGSLRLSCAASGTIFGYVTMGWYRQAPGKERELVASITDGTITNYADSVKGRFTISRDNAKNTVYLQMNSLKPEDTAVYYCAVRWRYGAVLWYWGQGTQVTVSS

SEQ ID NO: 31592 - protein, 119 aa, Artificial Sequence
  Chemically Synthesized
QVQLQESGGGLVQAGGSLRLSCAASGTISVRNWDMGWYRQAPGKEREFVASIDHGGNTYYADSVKGRFTISRDNAKNTVYLQMNSLKPEDTAVYYCAVYDPNDAYFGYWGQGTQVTVSS

SEQ ID NO: 31593 - protein, 126 aa, Artificial Sequence
  Chemically Synthesized
QVQLQESGGGLVQAGGSLRLSCAASGNIFQYTGMGWYRQAPGKERELVASIGYGGSTYYADSVKGRFTISRDNAKNTVYLQMNSLKPEDTAVYYCAAYSQDTDVWRHADGAAYRYWGQGTQVTVSS

SEQ ID NO: 31594 - protein, 118 aa, Artificial Sequence
  Chemically Synthesized
QVQLQESGGGLVQAGGSLRLSCAASGTISDLYPMGWYRQAPGKEREFVAGIDTGGNTYYADSVKGRFTISRDNAKNTVYLQMNSLKPEDTAVYYCAARPENGPWHGYWGQGTQVTVSS

SEQ ID NO: 31595 - protein, 118 aa, Artificial Sequence
  Chemically Synthesized
QVQLQESGGGLVQAGGSLRLSCAASGSISTYDEMGWYRQAPGKEREFVATIGKGTSTYYADSVKGRFTISRDNAKNTVYLQMNSLKPEDTAVYYCAAGYYPTSLYHYWGQGTQVTVSS

SEQ ID NO: 31596 - protein, 118 aa, Artificial Sequence
  Chemically Synthesized
QVQLQESGGGLVQAGGSLRLSCAASGNISTPKDMGWYRQAPGKERELVATISVGSTTYYADSVKGRFTISRDNAKNTVYLQMNSLKPEDTAVYYCAVDRDYVDDFRYWGQGTQVTVSS

SEQ ID NO: 31597 - protein, 112 aa, Artificial Sequence
  Chemically Synthesized
QVQLQESGGGLVQAGGSLRLSCAASGTISRLYWMGWYRQAPGKERELVADYLYADSVKGRFTISRDNAKNTVYLQMNSLKPEDTAVYYCAAYSAITKYLYYWGQGTQVTVSS

SEQ ID NO: 31598 - protein, 118 aa, Artificial Sequence
  Chemically Synthesized
QVQLQESGGGLVQAGGSLRLSCAASGYISASDGMGWYRQAPGKERELVASITSGANTNYADSVKGRFTISRDNAKNTVYLQMNSLKPEDTAVYYCAVATDLYTNHQYWGQGTQVTVSS

SEQ ID NO: 31599 - protein, 122 aa, Artificial Sequence
  Chemically Synthesized
QVQLQESGGGLVQAGGSLRLSCAASGNIFRYIYMGWYRQAPGKERELVAAIDAGTTTYYADSVKGRFTISRDNAKNTVYLQMNSLKPEDTAVYYCAVYYIYDSQDKSDHYYWGQGTQVTVSS

SEQ ID NO: 31600 - protein, 118 aa, Artificial Sequence
  Chemically Synthesized
QVQLQESGGGLVQAGGSLRLSCAASGTIFDDRPMGWYRQAPGKEREFVAAIASGSITYYADSVKGRFTISRDNAKNTVYLQMNSLKPEDTAVYYCAVIANVSLYHFYWGQGTQVTVSS

SEQ ID NO: 31601 - protein, 117 aa, Artificial Sequence
  Chemically Synthesized
QVQLQESGGGLVQAGGSLRLSCAASGTIFARSNMGWYRQAPGKERELVAAIMTVVIPYADSVKGRFTISRDNAKNTVYLQMNSLKPEDTAVYYCAVSDTYDTRYRYWGQGTQVTVSS

SEQ ID NO: 31602 - protein, 118 aa, Artificial Sequence
  Chemically Synthesized
QVQLQESGGGLVQAGGSLRLSCAASGYIFYAGVMGWYRQAPGKEREFVAGIGFGGSTYYADSVKGRFTISRDNAKNTVYLQMNSLKPEDTAVYYCAVAGTDIDSLGYWGQGTQVTVSS

SEQ ID NO: 31603 - protein, 122 aa, Artificial Sequence
  Chemically Synthesized
QVQLQESGGGLVQAGGSLRLSCAASGTISGYDFMGWYRQAPGKERELVAAIAGGGSTYYADSVKGRFTISRDNAKNTVYLQMNSLKPEDTAVYYCAVRDGRGPDVPVIFPYWGQGTQVTVSS

SEQ ID NO: 31604 - protein, 118 aa, Artificial Sequence
  Chemically Synthesized
QVQLQESGGGLVQAGGSLRLSCAASGTIFPAKRMGWYRQAPGKEREFVAGIDNGAITNYADSVKGRFTISRDNAKNTVYLQMNSLKPEDTAVYYCAVDERDRAYLYYWGQGTQVTVSS

SEQ ID NO: 31605 - protein, 114 aa, Artificial Sequence
  Chemically Synthesized
QVQLQESGGGLVQAGGSLRLSCAASGNISAYQEMGWYRQAPGKERELVATIARGSSTNYADSVKGRFTISRDNAKNTVYLQMNSLKPEDTAVYYCAAVVAHPYWGQGTQVTVSS

SEQ ID NO: 31606 - protein, 117 aa, Artificial Sequence
  Chemically Synthesized
QVQLQESGGGLVQAGGSLRLSCAASGTISSSTVMGWYRQAPGKEREFVATITYGSLPYADSVKGRFTISRDNAKNTVYLQMNSLKPEDTAVYYCAADTTAGRQYPYWGQGTQVTVSS

SEQ ID NO: 31607 - protein, 112 aa, Artificial Sequence
  Chemically Synthesized
QVQLQESGGGLVQAGGSLRLSCAASGYISSDYSMGWYRQAPGKEREFVATITDGGSTYYADSVKGRFTISRDNAKNTVYLQMNSLKPEDTAVYYCAATLLYWGQGTQVTVSS

SEQ ID NO: 31608 - protein, 118 aa, Artificial Sequence
  Chemically Synthesized
QVQLQESGGGLVQAGGSLRLSCAASGTISIYADMGWYRQAPGKERELVASITIGASTNYADSVKGRFTISRDNAKNTVYLQMNSLKPEDTAVYYCAAIVGDWPTLRYWGQGTQVTVSS

SEQ ID NO: 31609 - protein, 122 aa, Artificial Sequence
  Chemically Synthesized
QVQLQESGGGLVQAGGSLRLSCAASGTISYDTIMGWYRQAPGKERELVASITLGATTYYADSVKGRFTISRDNAKNTVYLQMNSLKPEDTAVYYCAVPWVLLTYAVYDYGYWGQGTQVTVSS

SEQ ID NO: 31610 - protein, 118 aa, Artificial Sequence
  Chemically Synthesized
QVQLQESGGGLVQAGGSLRLSCAASGTISVRGVMGWYRQAPGKEREFVASIAWGGSTQYADSVKGRFTISRDNAKNTVYLQMNSLKPEDTAVYYCAAYGRNDYYHVYWGQGTQVTVSS

SEQ ID NO: 31611 - protein, 113 aa, Artificial Sequence
  Chemically Synthesized
QVQLQESGGGLVQAGGSLRLSCAASGNISDPRVMGWYRQAPGKERELVAAITNGSTTNYADSVKGRFTISRDNAKNTVYLQMNSLKPEDTAVYYCATTTVLYWGQGTQVTVSS

SEQ ID NO: 31612 - protein, 119 aa, Artificial Sequence
  Chemically Synthesized
QVQLQESGGGLVQAGGSLRLSCAASGTISTLYDMGWYRQAPGKERELVAAIDRGGSTYYADSVKGRFTISRDNAKNTVYLQMNSLKPEDTAVYYCAVYVIRPRVIYVYWGQGTQVTVSS

SEQ ID NO: 31613 - protein, 118 aa, Artificial Sequence
  Chemically Synthesized
QVQLQESGGGLVQAGGSLRLSCAASGSISPFSYMGWYRQAPGKERELVATIARGGNTNYADSVKGRFTISRDNAKNTVYLQMNSLKPEDTAVYYCAAYIAGQVAFYYWGQGTQVTVSS

SEQ ID NO: 31614 - protein, 122 aa, Artificial Sequence
  Chemically Synthesized
QVQLQESGGGLVQAGGSLRLSCAASGTIFWDYNMGWYRQAPGKEREFVATITSGTSTNYADSVKGRFTISRDNAKNTVYLQMNSLKPEDTAVYYCAVDRIEDYYEYSKFSYWGQGTQVTVSS

SEQ ID NO: 31615 - protein, 122 aa, Artificial Sequence
  Chemically Synthesized
QVQLQESGGGLVQAGGSLRLSCAASGSIFPDKIMGWYRQAPGKERELVASISRGTTTNYADSVKGRFTISRDNAKNTVYLQMNSLKPEDTAVYYCAARQFYQDLDRGIYTYWGQGTQVTVSS

SEQ ID NO: 31616 - protein, 118 aa, Artificial Sequence
  Chemically Synthesized
QVQLQESGGGLVQAGGSLRLSCAASGSISYWDFMGWYRQAPGKERELVAAITIGGSTYYADSVKGRFTISRDNAKNTVYLQMNSLKPEDTAVYYCAADDVFVFGHIYWGQGTQVTVSS

SEQ ID NO: 31617 - protein, 117 aa, Artificial Sequence
  Chemically Synthesized
QVQLQESGGGLVQAGGSLRLSCAASGTIFYPTDMGWYRQAPGKERELVAGITIGGITNYADSVKGRFTISRDNAKNTVYLQMNSLKPEDTAVYYCAAVYDSSTGIYWGQGTQVTVSS

SEQ ID NO: 31618 - protein, 118 aa, Artificial Sequence
  Chemically Synthesized
QVQLQESGGGLVQAGGSLRLSCAASGTIFWYRGMGWYRQAPGKERELVATIDGGTSTNYADSVKGRFTISRDNAKNTVYLQMNSLKPEDTAVYYCAADAQHGTRHRYWGQGTQVTVSS

SEQ ID NO: 31619 - protein, 126 aa, Artificial Sequence
  Chemically Synthesized
QVQLQESGGGLVQAGGSLRLSCAASGTISYTTYMGWYRQAPGKERELVAAIDAGSTTNYADSVKGRFTISRDNAKNTVYLQMNSLKPEDTAVYYCAVWPYSYRDVSANYTVGTIYWGQGTQVTVSS

SEQ ID NO: 31620 - protein, 110 aa, Artificial Sequence
  Chemically Synthesized
QVQLQESGGGLVQAGGSLRLSCAASGTISDYAPMGWYRQAPGKEREFVATITLGGSTNYADSVKGRFTISRDNAKNTVYLQMNSLKPEDTAVYYCAVPYWGQGTQVTVSS

SEQ ID NO: 31621 - protein, 118 aa, Artificial Sequence
  Chemically Synthesized
QVQLQESGGGLVQAGGSLRLSCAASGSIFYLRYMGWYRQAPGKERELVAGITDGAITNYADSVKGRFTISRDNAKNTVYLQMNSLKPEDTAVYYCAADYYIAFIHDYWGQGTQVTVSS

SEQ ID NO: 31622 - protein, 122 aa, Artificial Sequence
  Chemically Synthesized
QVQLQESGGGLVQAGGSLRLSCAASGSIFTGDGMGWYRQAPGKERELVATISNGGTTNYADSVKGRFTISRDNAKNTVYLQMNSLKPEDTAVYYCAADRDVYSPRASGFGYWGQGTQVTVSS

SEQ ID NO: 31623 - protein, 117 aa, Artificial Sequence
  Chemically Synthesized
QVQLQESGGGLVQAGGSLRLSCAASGSMVMGWYRQAPGKEREFVATISTGSTTYYADSVKGRFTISRDNAKNTVYLQMNSLKPEDTAVYYCAVSTLTTTSTTRTIYWGQGTQVTVSS

SEQ ID NO: 31624 - protein, 112 aa, Artificial Sequence
  Chemically Synthesized
QVQLQESGGGLVQAGGSLRLSCAASGSIFDPQFMGWYRQAPGKEREFVASLLTVVVPYADSVKGRFTISRDNAKNTVYLQMNSLKPEDTAVYYCAFYYFSYWGQGTQVTVSS

SEQ ID NO: 31625 - protein, 117 aa, Artificial Sequence
  Chemically Synthesized
QVQLQESGGGLVQAGGSLRLSCAASGSISYSVAMGWYRQAPGKEREFVAAIAVVVVPYADSVKGRFTISRDNAKNTVYLQMNSLKPEDTAVYYCAVDPWEYVKFGYWGQGTQVTVSS

SEQ ID NO: 31626 - protein, 119 aa, Artificial Sequence
  Chemically Synthesized
QVQLQESGGGLVQAGGSLRLSCAASGNISYGGTMGWYRQAPGKERELVAGIATGTTTYYADSVKGRFTISRDNAKNTVYLQMNSLKPEDTAVYYCAVVLYNVGGLHTYWGQGTQVTVSS

SEQ ID NO: 31627 - protein, 117 aa, Artificial Sequence
  Chemically Synthesized
QVQLQESGGGLVQAGGSLRLSCAASGNISYSHWMGWYRQAPGKERELVASIDLGAITYYADSVKGRFTISRDNAKNTVYLQMNSLKPEDTAVYYCAATDSLTKFIYWGQGTQVTVSS

SEQ ID NO: 31628 - protein, 118 aa, Artificial Sequence
  Chemically Synthesized
QVQLQESGGGLVQAGGSLRLSCAASGNISTRSYMGWYRQAPGKERELVAAIDAGSITYYADSVKGRFTISRDNAKNTVYLQMNSLKPEDTAVYYCAAQIDNTDGLGYWGQGTQVTVSS

SEQ ID NO: 31629 - protein, 118 aa, Artificial Sequence
  Chemically Synthesized
QVQLQESGGGLVQAGGSLRLSCAASGSISDDYGMGWYRQAPGKERELVASIGDGSNTNYADSVKGRFTISRDNAKNTVYLQMNSLKPEDTAVYYCAVPDRWGSYHDYWGQGTQVTVSS

SEQ ID NO: 31630 - protein, 117 aa, Artificial Sequence
  Chemically Synthesized
QVQLQESGGGLVQAGGSLRLSCAASGTIMGWYRQAPGKEREFVASINRGAITNYADSVKGRFTISRDNAKNTVYLQMNSLKPEDTAVYYCAVDPSDYGLPYVALVYWGQGTQVTVSS

SEQ ID NO: 31631 - protein, 121 aa, Artificial Sequence
  Chemically Synthesized
QVQLQESGGGLVQAGGSLRLSCAASGTIFREARMGWYRQAPGKEREFVATITNYADSVKGRFTISRDNAKNTVYLQMNSLKPEDTAVYYCAVVEPKGDYATNGNDKPYYYWGQGTQVTVSS

SEQ ID NO: 31632 - protein, 118 aa, Artificial Sequence
  Chemically Synthesized
QVQLQESGGGLVQAGGSLRLSCAASGYISDSTNMGWYRQAPGKERELVASINDGGITYYADSVKGRFTISRDNAKNTVYLQMNSLKPEDTAVYYCAVDAVPTDQHYYWGQGTQVTVSS

SEQ ID NO: 31633 - protein, 118 aa, Artificial Sequence
  Chemically Synthesized
QVQLQESGGGLVQAGGSLRLSCAASGNIFAVIDMGWYRQAPGKERELVAGINDGASTNYADSVKGRFTISRDNAKNTVYLQMNSLKPEDTAVYYCAADYELEDLLEYWGQGTQVTVSS

SEQ ID NO: 31634 - protein, 118 aa, Artificial Sequence
  Chemically Synthesized
QVQLQESGGGLVQAGGSLRLSCAASGNISDALGMGWYRQAPGKERELVAAIAQGATTNYADSVKGRFTISRDNAKNTVYLQMNSLKPEDTAVYYCAADSPRSLYYVYWGQGTQVTVSS

SEQ ID NO: 31635 - protein, 125 aa, Artificial Sequence
  Chemically Synthesized
QVQLQESGGGLVQAGGSLRLSCAASGNISRYGYMGWYRQAPGKERELVATIAYGANTNYADSVKGRFTISRDNAKNTVYLQMNSLKPEDTAVYYCAVQYNLWFYQYYNTSLLLYWGQGTQVTVSS

SEQ ID NO: 31636 - protein, 117 aa, Artificial Sequence
  Chemically Synthesized
QVQLQESGGGLVQAGGSLRLSCAASGNISALGYMGWYRQAPGKERELVAGITAGGNTNYADSVKGRFTISRDNAKNTVYLQMNSLKPEDTAVYYCAATASQTWLGYWGQGTQVTVSS

SEQ ID NO: 31637 - protein, 112 aa, Artificial Sequence
  Chemically Synthesized
QVQLQESGGGLVQAGGSLRLSCAASGTMGWYRQAPGKERELVAAINYGASTNYADSVKGRFTISRDNAKNTVYLQMNSLKPEDTAVYYCAVVTHPIYFLYYWGQGTQVTVSS

SEQ ID NO: 31638 - protein, 122 aa, Artificial Sequence
  Chemically Synthesized
QVQLQESGGGLVQAGGSLRLSCAASGTIFLLLFMGWYRQAPGKERELVATINLGGNTNYADSVKGRFTISRDNAKNTVYLQMNSLKPEDTAVYYCAVPKNVAYHAYTTYDYWGQGTQVTVSS

SEQ ID NO: 31639 - protein, 122 aa, Artificial Sequence
  Chemically Synthesized
QVQLQESGGGLVQAGGSLRLSCAASGNIFPRGDMGWYRQAPGKERELVAGIADGSNTYYADSVKGRFTISRDNAKNTVYLQMNSLKPEDTAVYYCAVLYPARYPPDPGHGYWGQGTQVTVSS

SEQ ID NO: 31640 - protein, 122 aa, Artificial Sequence
  Chemically Synthesized
QVQLQESGGGLVQAGGSLRLSCAASGNISPDYYMGWYRQAPGKEREFVATIDGGAITYYADSVKGRFTISRDNAKNTVYLQMNSLKPEDTAVYYCAVGYFLGLGDYEWHHYWGQGTQVTVSS

SEQ ID NO: 31641 - protein, 117 aa, Artificial Sequence
  Chemically Synthesized
QVQLQESGGGLVQAGGSLRLSCAASGNISLYATMGWYRQAPGKERELVATIDTGATTYYADSVKGRFTISRDNAKNTVYLQMNSLKPEDTAVYYCAVDSVTTLLLYWGQGTQVTVSS

SEQ ID NO: 31642 - protein, 126 aa, Artificial Sequence
  Chemically Synthesized
QVQLQESGGGLVQAGGSLRLSCAASGYIFSTRIMGWYRQAPGKEREFVAGISVGTSTNYADSVKGRFTISRDNAKNTVYLQMNSLKPEDTAVYYCAVDTLGSHYDPRPDPRQLPYWGQGTQVTVSS

SEQ ID NO: 31643 - protein, 122 aa, Artificial Sequence
  Chemically Synthesized
QVQLQESGGGLVQAGGSLRLSCAASGNISSAVIMGWYRQAPGKERELVAAINGGTITYYADSVKGRFTISRDNAKNTVYLQMNSLKPEDTAVYYCAAREYGRNPKSESYRYWGQGTQVTVSS

SEQ ID NO: 31644 - protein, 118 aa, Artificial Sequence
  Chemically Synthesized
QVQLQESGGGLVQAGGSLRLSCAASGNISDSIVMGWYRQAPGKERELVAGIGYGSSTYYADSVKGRFTISRDNAKNTVYLQMNSLKPEDTAVYYCAVNGPRTGVHDYWGQGTQVTVSS

SEQ ID NO: 31645 - protein, 116 aa, Artificial Sequence
  Chemically Synthesized
QVQLQESGGGLVQAGGSLRLSCAASGTIFPNMGWYRQAPGKERELVAAIDYGASTYYADSVKGRFTISRDNAKNTVYLQMNSLKPEDTAVYYCAAIYWRGDYHVYWGQGTQVTVSS

SEQ ID NO: 31646 - protein, 122 aa, Artificial Sequence
  Chemically Synthesized
QVQLQESGGGLVQAGGSLRLSCAASGYIFGTYYMGWYRQAPGKERELVAAIAYGGTTYYADSVKGRFTISRDNAKNTVYLQMNSLKPEDTAVYYCAADPTYYGSGVYRYVYWGQGTQVTVSS

SEQ ID NO: 31647 - protein, 115 aa, Artificial Sequence
  Chemically Synthesized
QVQLQESGGGLVQAGGSLRLSCAASGNISLFVDMGWYRQAPGKEREFVASIGSVLLPYADSVKGRFTISRDNAKNTVYLQMNSLKPEDTAVYYCAAVRLYLDQYWGQGTQVTVSS

SEQ ID NO: 31648 - protein, 118 aa, Artificial Sequence
  Chemically Synthesized
QVQLQESGGGLVQAGGSLRLSCAASGTIFNTLTMGWYRQAPGKEREFVATIDYGSSTNYADSVKGRFTISRDNAKNTVYLQMNSLKPEDTAVYYCAVRYGNRAYHGYWGQGTQVTVSS

SEQ ID NO: 31649 - protein, 121 aa, Artificial Sequence
  Chemically Synthesized
QVQLQESGGGLVQAGGSLRLSCAASGTISGTDMGWYRQAPGKEREFVAGIADGGTTYYADSVKGRFTISRDNAKNTVYLQMNSLKPEDTAVYYCAVGPYNQTFVAVGYIYWGQGTQVTVSS

SEQ ID NO: 31650 - protein, 118 aa, Artificial Sequence
  Chemically Synthesized
QVQLQESGGGLVQAGGSLRLSCAASGNISRPFYMGWYRQAPGKERELVAGINWGTITYYADSVKGRFTISRDNAKNTVYLQMNSLKPEDTAVYYCAVRYSPSPTHGYWGQGTQVTVSS

SEQ ID NO: 31651 - protein, 122 aa, Artificial Sequence
  Chemically Synthesized
QVQLQESGGGLVQAGGSLRLSCAASGNIFLNVIMGWYRQAPGKEREFVAGITRGTITNYADSVKGRFTISRDNAKNTVYLQMNSLKPEDTAVYYCAATVNPLARAHKDLPYWGQGTQVTVSS

SEQ ID NO: 31652 - protein, 122 aa, Artificial Sequence
  Chemically Synthesized
QVQLQESGGGLVQAGGSLRLSCAASGTISFGTRMGWYRQAPGKERELVAAITYGGTTYYADSVKGRFTISRDNAKNTVYLQMNSLKPEDTAVYYCAALRRYRWRGDNKHDYWGQGTQVTVSS

SEQ ID NO: 31653 - protein, 117 aa, Artificial Sequence
  Chemically Synthesized
QVQLQESGGGLVQAGGSLRLSCAASGSISTPSYMGWYRQAPGKERELVALLLRVLLPYADSVKGRFTISRDNAKNTVYLQMNSLKPEDTAVYYCAADIYVGIVHQYWGQGTQVTVSS

SEQ ID NO: 31654 - protein, 118 aa, Artificial Sequence
  Chemically Synthesized
QVQLQESGGGLVQAGGSLRLSCAASGNISVSSAMGWYRQAPGKERELVAAINAGTNTNYADSVKGRFTISRDNAKNTVYLQMNSLKPEDTAVYYCAVIRPQYADFGYWGQGTQVTVSS

SEQ ID NO: 31655 - protein, 118 aa, Artificial Sequence
  Chemically Synthesized
QVQLQESGGGLVQAGGSLRLSCAASGSIFHDRYMGWYRQAPGKEREFVAGISIGAITNYADSVKGRFTISRDNAKNTVYLQMNSLKPEDTAVYYCAVQEYRSDLHLYWGQGTQVTVSS

SEQ ID NO: 31656 - protein, 118 aa, Artificial Sequence
  Chemically Synthesized
QVQLQESGGGLVQAGGSLRLSCAASGTIFTFLVMGWYRQAPGKERELVAGITVGANTNYADSVKGRFTISRDNAKNTVYLQMNSLKPEDTAVYYCAADGGHYYYHAYWGQGTQVTVSS

SEQ ID NO: 31657 - protein, 110 aa, Artificial Sequence
  Chemically Synthesized
QVQLQESGGGLVQAGGSLRLSCAASGTIFYPAYMGWYRQAPGKEREFVAGIAYGGTTNYADSVKGRFTISRDNAKNTVYLQMNSLKPEDTAVYYCAVWYWGQGTQVTVSS

SEQ ID NO: 31658 - protein, 118 aa, Artificial Sequence
  Chemically Synthesized
QVQLQESGGGLVQAGGSLRLSCAASGTIFYTAPMGWYRQAPGKERELVATITYGASTNYADSVKGRFTISRDNAKNTVYLQMNSLKPEDTAVYYCAAYDVYPAYHRYWGQGTQVTVSS

SEQ ID NO: 31659 - protein, 118 aa, Artificial Sequence
  Chemically Synthesized
QVQLQESGGGLVQAGGSLRLSCAASGNISGRYTMGWYRQAPGKERELVAAIGQGANTYYADSVKGRFTISRDNAKNTVYLQMNSLKPEDTAVYYCAVSDQSFTEHYYWGQGTQVTVSS

SEQ ID NO: 31660 - protein, 117 aa, Artificial Sequence
  Chemically Synthesized
QVQLQESGGGLVQAGGSLRLSCAASGYISRAQYMGWYRQAPGKERELVASIGRGSSTNYADSVKGRFTISRDNAKNTVYLQMNSLKPEDTAVYYCAVDYVYNTSMYWGQGTQVTVSS

SEQ ID NO: 31661 - protein, 118 aa, Artificial Sequence
  Chemically Synthesized
QVQLQESGGGLVQAGGSLRLSCAASGTIFYYDTMGWYRQAPGKERELVAGIAFGGNTYYADSVKGRFTISRDNAKNTVYLQMNSLKPEDTAVYYCAVGPWFYGDLAYWGQGTQVTVSS

SEQ ID NO: 31662 - protein, 118 aa, Artificial Sequence
  Chemically Synthesized
QVQLQESGGGLVQAGGSLRLSCAASGYIFTYTAMGWYRQAPGKEREFVASISDGANTNYADSVKGRFTISRDNAKNTVYLQMNSLKPEDTAVYYCAADYVPTRPYRYWGQGTQVTVSS

SEQ ID NO: 31663 - protein, 116 aa, Artificial Sequence
  Chemically Synthesized
QVQLQESGGGLVQAGGSLRLSCAASGTIFQVYDMGWYRQAPGKERELVASIDAGATTNYADSVKGRFTISRDNAKNTVYLQMNSLKPEDTAVYYCAADQGDSSMYWGQGTQVTVSS

SEQ ID NO: 31664 - protein, 118 aa, Artificial Sequence
  Chemically Synthesized
QVQLQESGGGLVQAGGSLRLSCAASGSIFKSRPMGWYRQAPGKEREFVASISDGSSTNYADSVKGRFTISRDNAKNTVYLQMNSLKPEDTAVYYCAVSYGDVPGYPYWGQGTQVTVSS

SEQ ID NO: 31665 - protein, 118 aa, Artificial Sequence
  Chemically Synthesized
QVQLQESGGGLVQAGGSLRLSCAASGNIFSHDSMGWYRQAPGKEREFVAAIDDGTSTYYADSVKGRFTISRDNAKNTVYLQMNSLKPEDTAVYYCAADEYADQEHKYWGQGTQVTVSS

SEQ ID NO: 31666 - protein, 121 aa, Artificial Sequence
  Chemically Synthesized
QVQLQESGGGLVQAGGSLRLSCAASGSIFGPYYMGWYRQAPGKEREFVASIARGTTTNYADSVKGRFTISRDNAKNTVYLQMNSLKPEDTAVYYCAVRGFGTYHVYGHLYWGQGTQVTVSS

SEQ ID NO: 31667 - protein, 117 aa, Artificial Sequence
  Chemically Synthesized
QVQLQESGGGLVQAGGSLRLSCAASGTILLWLMGWYRQAPGKERELVATIAHGTTTYYADSVKGRFTISRDNAKNTVYLQMNSLKPEDTAVYYCAATAADTDYLVYWGQGTQVTVSS

SEQ ID NO: 31668 - protein, 118 aa, Artificial Sequence
  Chemically Synthesized
QVQLQESGGGLVQAGGSLRLSCAASGYISYRPGMGWYRQAPGKERELVAAIGVGTNTYYADSVKGRFTISRDNAKNTVYLQMNSLKPEDTAVYYCAVHTRAIDYHDYWGQGTQVTVSS

SEQ ID NO: 31669 - protein, 115 aa, Artificial Sequence
  Chemically Synthesized
QVQLQESGGGLVQAGGSLRLSCAASGYIFYLYRMGWYRQAPGKERELVASITHGSSTYYADSVKGRFTISRDNAKNTVYLQMNSLKPEDTAVYYCAYTEDGLHYWGQGTQVTVSS

SEQ ID NO: 31670 - protein, 122 aa, Artificial Sequence
  Chemically Synthesized
QVQLQESGGGLVQAGGSLRLSCAASGSISPRVYMGWYRQAPGKEREFVAGIDQGTSTNYADSVKGRFTISRDNAKNTVYLQMNSLKPEDTAVYYCAVDGGSIGYDGVRYYYWGQGTQVTVSS

SEQ ID NO: 31671 - protein, 118 aa, Artificial Sequence
  Chemically Synthesized
QVQLQESGGGLVQAGGSLRLSCAASGTISELPYMGWYRQAPGKEREFVAAIGFGATTNYADSVKGRFTISRDNAKNTVYLQMNSLKPEDTAVYYCAAGRYPSYPYSYWGQGTQVTVSS

SEQ ID NO: 31672 - protein, 118 aa, Artificial Sequence
  Chemically Synthesized
QVQLQESGGGLVQAGGSLRLSCAASGTIFPFTYMGWYRQAPGKERELVATITVGTITYYADSVKGRFTISRDNAKNTVYLQMNSLKPEDTAVYYCAVVFGRSYVLRYWGQGTQVTVSS

SEQ ID NO: 31673 - protein, 117 aa, Artificial Sequence
  Chemically Synthesized
QVQLQESGGGLVQAGGSLRLSCAASGYISPSQTMGWYRQAPGKERELVATIDTVVVPYADSVKGRFTISRDNAKNTVYLQMNSLKPEDTAVYYCAATRVEDTYYWYWGQGTQVTVSS

SEQ ID NO: 31674 - protein, 117 aa, Artificial Sequence
  Chemically Synthesized
QVQLQESGGGLVQAGGSLRLSCAASGSISTYHMGWYRQAPGKEREFVATINEGSSTNYADSVKGRFTISRDNAKNTVYLQMNSLKPEDTAVYYCAVLGADVGYYLYWGQGTQVTVSS

SEQ ID NO: 31675 - protein, 121 aa, Artificial Sequence
  Chemically Synthesized
QVQLQESGGGLVQAGGSLRLSCAASGTISLYYYMGWYRQAPGKEREFVATISNGGNTYYADSVKGRFTISRDNAKNTVYLQMNSLKPEDTAVYYCAVSPTSRGTYNGYDYWGQGTQVTVSS

SEQ ID NO: 31676 - protein, 117 aa, Artificial Sequence
  Chemically Synthesized
QVQLQESGGGLVQAGGSLRLSCAASGNILCSTMGWYRQAPGKERELVATITDGSSTNYADSVKGRFTISRDNAKNTVYLQMNSLKPEDTAVYYCAVRSGRYRRHAYWGQGTQVTVSS

SEQ ID NO: 31677 - protein, 117 aa, Artificial Sequence
  Chemically Synthesized
QVQLQESGGGLVQAGGSLRLSCAASGTISLVVMGWYRQAPGKEREFVAAINYGGTTYYADSVKGRFTISRDNAKNTVYLQMNSLKPEDTAVYYCAVYDFLDGYFTYWGQGTQVTVSS

SEQ ID NO: 31678 - protein, 126 aa, Artificial Sequence
  Chemically Synthesized
QVQLQESGGGLVQAGGSLRLSCAASGNIFELLDMGWYRQAPGKEREFVATIDYGSNTYYADSVKGRFTISRDNAKNTVYLQMNSLKPEDTAVYYCAAVLYYIYGYGGDTLYYYDYWGQGTQVTVSS

SEQ ID NO: 31679 - protein, 122 aa, Artificial Sequence
  Chemically Synthesized
QVQLQESGGGLVQAGGSLRLSCAASGNIFPYWRMGWYRQAPGKEREFVAGIAYGGSTYYADSVKGRFTISRDNAKNTVYLQMNSLKPEDTAVYYCAAYGVGDEEHPVDHFYWGQGTQVTVSS

SEQ ID NO: 31680 - protein, 118 aa, Artificial Sequence
  Chemically Synthesized
QVQLQESGGGLVQAGGSLRLSCAASGSISPRTTMGWYRQAPGKERELVATIGYGASTYYADSVKGRFTISRDNAKNTVYLQMNSLKPEDTAVYYCAADLYRYPRFVYWGQGTQVTVSS

SEQ ID NO: 31681 - protein, 118 aa, Artificial Sequence
  Chemically Synthesized
QVQLQESGGGLVQAGGSLRLSCAASGTISRDPDMGWYRQAPGKEREFVATITSGAITYYADSVKGRFTISRDNAKNTVYLQMNSLKPEDTAVYYCAVYAWIEYDLYYWGQGTQVTVSS

SEQ ID NO: 31682 - protein, 118 aa, Artificial Sequence
  Chemically Synthesized
QVQLQESGGGLVQAGGSLRLSCAASGNISDRYPMGWYRQAPGKEREFVAAITRGGITNYADSVKGRFTISRDNAKNTVYLQMNSLKPEDTAVYYCAVLLADRRRHRYWGQGTQVTVSS

SEQ ID NO: 31683 - protein, 123 aa, Artificial Sequence
  Chemically Synthesized
QVQLQESGGGLVQAGGSLRLSCAASGTIFDTIYMGWYRQAPGKEREFVASINWGGTTYYADSVKGRFTISRDNAKNTVYLQMNSLKPEDTAVYYCAVDGDVTLEGIYYYLIYWGQGTQVTVSS

SEQ ID NO: 31684 - protein, 118 aa, Artificial Sequence
  Chemically Synthesized
QVQLQESGGGLVQAGGSLRLSCAASGSIFLYYVMGWYRQAPGKEREFVASITFGGITYYADSVKGRFTISRDNAKNTVYLQMNSLKPEDTAVYYCAVGGYLRYYYLYWGQGTQVTVSS

SEQ ID NO: 31685 - protein, 116 aa, Artificial Sequence
  Chemically Synthesized
QVQLQESGGGLVQAGGSLRLSCAASGTIFRQLYMGWYRQAPGKEREFVPLLLLVLVPYADSVKGRFTISRDNAKNTVYLQMNSLKPEDTAVYYCAVLYYYVTHVYWGQGTQVTVSS

SEQ ID NO: 31686 - protein, 118 aa, Artificial Sequence
  Chemically Synthesized
QVQLQESGGGLVQAGGSLRLSCAASGYISGYSEMGWYRQAPGKEREFVAAIDDGGTTNYADSVKGRFTISRDNAKNTVYLQMNSLKPEDTAVYYCAVDGLVYQYHYYWGQGTQVTVSS

SEQ ID NO: 31687 - protein, 118 aa, Artificial Sequence
  Chemically Synthesized
QVQLQESGGGLVQAGGSLRLSCAASGSISHELAMGWYRQAPGKEREFVATITSGTTTYYADSVKGRFTISRDNAKNTVYLQMNSLKPEDTAVYYCAAVYYGDYPLTYWGQGTQVTVSS

SEQ ID NO: 31688 - protein, 126 aa, Artificial Sequence
  Chemically Synthesized
QVQLQESGGGLVQAGGSLRLSCAASGTISFYAEMGWYRQAPGKERELVASISYGTSTYYADSVKGRFTISRDNAKNTVYLQMNSLKPEDTAVYYCAVHGYNLAEDYLDYRATFDYWGQGTQVTVSS

SEQ ID NO: 31689 - protein, 118 aa, Artificial Sequence
  Chemically Synthesized
QVQLQESGGGLVQAGGSLRLSCAASGTIFRPYYMGWYRQAPGKEREFVAGITYGGSTYYADSVKGRFTISRDNAKNTVYLQMNSLKPEDTAVYYCAAWDRYHVTHYYWGQGTQVTVSS

SEQ ID NO: 31690 - protein, 126 aa, Artificial Sequence
  Chemically Synthesized
QVQLQESGGGLVQAGGSLRLSCAASGNISLFYTMGWYRQAPGKERELVAGITVGASTNYADSVKGRFTISRDNAKNTVYLQMNSLKPEDTAVYYCAAKDWYYVRQYTDVFGTHDYWGQGTQVTVSS

SEQ ID NO: 31691 - protein, 118 aa, Artificial Sequence
  Chemically Synthesized
QVQLQESGGGLVQAGGSLRLSCAASGSISTYNVMGWYRQAPGKERELVAAISYGGSTYYADSVKGRFTISRDNAKNTVYLQMNSLKPEDTAVYYCAAYYPTWDVFGYWGQGTQVTVSS

SEQ ID NO: 31692 - protein, 117 aa, Artificial Sequence
  Chemically Synthesized
QVQLQESGGGLVQAGGSLRLSCAASGSISDIVVMGWYRQAPGKEREFVATIDAGGTTNYADSVKGRFTISRDNAKNTVYLQMNSLKPEDTAVYYCAVDTAELRSMYWGQGTQVTVSS

SEQ ID NO: 31693 - protein, 119 aa, Artificial Sequence
  Chemically Synthesized
QVQLQESGGGLVQAGGSLRLSCAASGTIFGTRYMGWYRQAPGKERELVAGINDGANTYYADSVKGRFTISRDNAKNTVYLQMNSLKPEDTAVYYCAVTRYVANPDLPYWGQGTQVTVSS

SEQ ID NO: 31694 - protein, 118 aa, Artificial Sequence
  Chemically Synthesized
QVQLQESGGGLVQAGGSLRLSCAASGYISGTSVMGWYRQAPGKERELVAAITQGGNTYYADSVKGRFTISRDNAKNTVYLQMNSLKPEDTAVYYCAVGRYDDLFLGYWGQGTQVTVSS

SEQ ID NO: 31695 - protein, 118 aa, Artificial Sequence
  Chemically Synthesized
QVQLQESGGGLVQAGGSLRLSCAASGNISLDTGMGWYRQAPGKEREFVAAITTGGITYYADSVKGRFTISRDNAKNTVYLQMNSLKPEDTAVYYCAVTEYTVPAHIYWGQGTQVTVSS

SEQ ID NO: 31696 - protein, 115 aa, Artificial Sequence
  Chemically Synthesized
QVQLQESGGGLVQAGGSLRLSCAASGYISVGRYMGWYRQAPGKERELVAAIDNGAITYYADSVKGRFTISRDNAKNTVYLQMNSLKPEDTAVYYCAAELLYFVYWGQGTQVTVSS

SEQ ID NO: 31697 - protein, 126 aa, Artificial Sequence
  Chemically Synthesized
QVQLQESGGGLVQAGGSLRLSCAASGSISAGYFMGWYRQAPGKEREFVAAISYGGNTNYADSVKGRFTISRDNAKNTVYLQMNSLKPEDTAVYYCAVGYGGEDGSYWYRIVDHSYWGQGTQVTVSS

SEQ ID NO: 31698 - protein, 118 aa, Artificial Sequence
  Chemically Synthesized
QVQLQESGGGLVQAGGSLRLSCAASGYISQVGTMGWYRQAPGKERELVATIGHGGITNYADSVKGRFTISRDNAKNTVYLQMNSLKPEDTAVYYCAVIPTSAFRFRYWGQGTQVTVSS

SEQ ID NO: 31699 - protein, 126 aa, Artificial Sequence
  Chemically Synthesized
QVQLQESGGGLVQAGGSLRLSCAASGTIFKLWEMGWYRQAPGKEREFVASINTGGITYYADSVKGRFTISRDNAKNTVYLQMNSLKPEDTAVYYCAVDIRHGGRPYPGWDLYYGYWGQGTQVTVSS

SEQ ID NO: 31700 - protein, 126 aa, Artificial Sequence
  Chemically Synthesized
QVQLQESGGGLVQAGGSLRLSCAASGTISDRDGMGWYRQAPGKERELVATIGLGSNTNYADSVKGRFTISRDNAKNTVYLQMNSLKPEDTAVYYCAANDGYPTWNFGLRSPVHDYWGQGTQVTVSS

SEQ ID NO: 31701 - protein, 120 aa, Artificial Sequence
  Chemically Synthesized
QVQLQESGGGLVQAGGSLRLSCAASGSTFRSMGWYRQAPGKEREFVAGIDLGTSTNYADSVKGRFTISRDNAKNTVYLQMNSLKPEDTAVYYCAVEYYYDWYAGPVHLYWGQGTQVTVSS

SEQ ID NO: 31702 - protein, 126 aa, Artificial Sequence
  Chemically Synthesized
QVQLQESGGGLVQAGGSLRLSCAASGNISSTRYMGWYRQAPGKERELVASISDGSNTYYADSVKGRFTISRDNAKNTVYLQMNSLKPEDTAVYYCAVEDHIYRGYYRSGGRWLYYWGQGTQVTVSS

SEQ ID NO: 31703 - protein, 118 aa, Artificial Sequence
  Chemically Synthesized
QVQLQESGGGLVQAGGSLRLSCAASGYISPSPTMGWYRQAPGKERELVAGITDGSTTNYADSVKGRFTISRDNAKNTVYLQMNSLKPEDTAVYYCAVYDLEDPLFDYWGQGTQVTVSS

SEQ ID NO: 31704 - protein, 118 aa, Artificial Sequence
  Chemically Synthesized
QVQLQESGGGLVQAGGSLRLSCAASGTISGVSIMGWYRQAPGKEREFVASIDYGATTYYADSVKGRFTISRDNAKNTVYLQMNSLKPEDTAVYYCAARYGYPVGYDYWGQGTQVTVSS

SEQ ID NO: 31705 - protein, 118 aa, Artificial Sequence
  Chemically Synthesized
QVQLQESGGGLVQAGGSLRLSCAASGNISHAHDMGWYRQAPGKEREFVATIGYGSTTNYADSVKGRFTISRDNAKNTVYLQMNSLKPEDTAVYYCAAVPGTNYVYPYWGQGTQVTVSS

SEQ ID NO: 31706 - protein, 118 aa, Artificial Sequence
  Chemically Synthesized
QVQLQESGGGLVQAGGSLRLSCAASGNISARDDMGWYRQAPGKERELVATIDQGGSTNYADSVKGRFTISRDNAKNTVYLQMNSLKPEDTAVYYCAVDLVTPNDYPYWGQGTQVTVSS

SEQ ID NO: 31707 - protein, 118 aa, Artificial Sequence
  Chemically Synthesized
QVQLQESGGGLVQAGGSLRLSCAASGYISNLVSMGWYRQAPGKEREFVAAIGNGGSTYYADSVKGRFTISRDNAKNTVYLQMNSLKPEDTAVYYCAAWFDGYQDHDYWGQGTQVTVSS

SEQ ID NO: 31708 - protein, 122 aa, Artificial Sequence
  Chemically Synthesized
QVQLQESGGGLVQAGGSLRLSCAASGTISLGIRMGWYRQAPGKERELVAAITDGSITNYADSVKGRFTISRDNAKNTVYLQMNSLKPEDTAVYYCAAYDASERIYSDAHSYWGQGTQVTVSS

SEQ ID NO: 31709 - protein, 118 aa, Artificial Sequence
  Chemically Synthesized
QVQLQESGGGLVQAGGSLRLSCAASGNISGPTDMGWYRQAPGKEREFVAAITDGATTNYADSVKGRFTISRDNAKNTVYLQMNSLKPEDTAVYYCAAPANGNQQHGYWGQGTQVTVSS

SEQ ID NO: 31710 - protein, 118 aa, Artificial Sequence
  Chemically Synthesized
QVQLQESGGGLVQAGGSLRLSCAASGSISPTVFMGWYRQAPGKEREFVATISHGTTTYYADSVKGRFTISRDNAKNTVYLQMNSLKPEDTAVYYCAVHRPERYPYDYWGQGTQVTVSS

SEQ ID NO: 31711 - protein, 122 aa, Artificial Sequence
  Chemically Synthesized
QVQLQESGGGLVQAGGSLRLSCAASGSIFRLTYMGWYRQAPGKEREFVASIGKGGTTYYADSVKGRFTISRDNAKNTVYLQMNSLKPEDTAVYYCAAGSPTDYTYRFPHGYWGQGTQVTVSS

SEQ ID NO: 31712 - protein, 116 aa, Artificial Sequence
  Chemically Synthesized
QVQLQESGGGLVQAGGSLRLSCAASGNIFASYYMGWYRQAPGKEREFVASIAYGATTYYADSVKGRFTISRDNAKNTVYLQMNSLKPEDTAVYYCASPDDPPYFYWGQGTQVTVSS

SEQ ID NO: 31713 - protein, 118 aa, Artificial Sequence
  Chemically Synthesized
QVQLQESGGGLVQAGGSLRLSCAASGNIFWSIRMGWYRQAPGKERELVAGIGTGSITNYADSVKGRFTISRDNAKNTVYLQMNSLKPEDTAVYYCAVYASHFLRHYYWGQGTQVTVSS

SEQ ID NO: 31714 - protein, 122 aa, Artificial Sequence
  Chemically Synthesized
QVQLQESGGGLVQAGGSLRLSCAASGNISGLYQMGWYRQAPGKERELVASITEGTNTNYADSVKGRFTISRDNAKNTVYLQMNSLKPEDTAVYYCAANSDRQYGTDRSLPYWGQGTQVTVSS

SEQ ID NO: 31715 - protein, 118 aa, Artificial Sequence
  Chemically Synthesized
QVQLQESGGGLVQAGGSLRLSCAASGTIFGRPGMGWYRQAPGKEREFVASINVGGNTNYADSVKGRFTISRDNAKNTVYLQMNSLKPEDTAVYYCAVFGWYLHGHPYWGQGTQVTVSS

SEQ ID NO: 31716 - protein, 122 aa, Artificial Sequence
  Chemically Synthesized
QVQLQESGGGLVQAGGSLRLSCAASGTIFRTAGMGWYRQAPGKERELVATIDAGATTNYADSVKGRFTISRDNAKNTVYLQMNSLKPEDTAVYYCAAVLAWGLAGWRLHRYWGQGTQVTVSS

SEQ ID NO: 31717 - protein, 122 aa, Artificial Sequence
  Chemically Synthesized
QVQLQESGGGLVQAGGSLRLSCAASGNISAWDEMGWYRQAPGKEREFVASIADGAITYYADSVKGRFTISRDNAKNTVYLQMNSLKPEDTAVYYCAVDDYRSGENTVNFGYWGQGTQVTVSS

SEQ ID NO: 31718 - protein, 116 aa, Artificial Sequence
  Chemically Synthesized
QVQLQESGGGLVQAGGSLRLSCAASGYIYTTMGWYRQAPGKEREFVASISVGGNTNYADSVKGRFTISRDNAKNTVYLQMNSLKPEDTAVYYCAAYDDSYEDHWYWGQGTQVTVSS

SEQ ID NO: 31719 - protein, 125 aa, Artificial Sequence
  Chemically Synthesized
QVQLQESGGGLVQAGGSLRLSCAASGTISIWSMGWYRQAPGKERELVAAITNGTSTYYADSVKGRFTISRDNAKNTVYLQMNSLKPEDTAVYYCAALWYEVRNAPFVDLPNFGYWGQGTQVTVSS

SEQ ID NO: 31720 - protein, 121 aa, Artificial Sequence
  Chemically Synthesized
QVQLQESGGGLVQAGGSLRLSCAASGTIFNDDIMGWYRQAPGKERELVATIGRGTSTNYADSVKGRFTISRDNAKNTVYLQMNSLKPEDTAVYYCAAQTWSTGLLRTLIYWGQGTQVTVSS

SEQ ID NO: 31721 - protein, 118 aa, Artificial Sequence
  Chemically Synthesized
QVQLQESGGGLVQAGGSLRLSCAASGTISVTWIMGWYRQAPGKERELVATISGGSSTNYADSVKGRFTISRDNAKNTVYLQMNSLKPEDTAVYYCAVPYSYTRDYAYWGQGTQVTVSS

SEQ ID NO: 31722 - protein, 118 aa, Artificial Sequence
  Chemically Synthesized
QVQLQESGGGLVQAGGSLRLSCAASGNISYRFYMGWYRQAPGKEREFVASITFGGSTYYADSVKGRFTISRDNAKNTVYLQMNSLKPEDTAVYYCAVVIYGARYYYYWGQGTQVTVSS

SEQ ID NO: 31723 - protein, 122 aa, Artificial Sequence
  Chemically Synthesized
QVQLQESGGGLVQAGGSLRLSCAASGNISDDFLMGWYRQAPGKEREFVASIDTGTITYYADSVKGRFTISRDNAKNTVYLQMNSLKPEDTAVYYCAALYRDDWWDPAGYDYWGQGTQVTVSS

SEQ ID NO: 31724 - protein, 126 aa, Artificial Sequence
  Chemically Synthesized
QVQLQESGGGLVQAGGSLRLSCAASGNISRISTMGWYRQAPGKEREFVAGISHGGTTNYADSVKGRFTISRDNAKNTVYLQMNSLKPEDTAVYYCAARALGYRYNNQIIIYRYGYWGQGTQVTVSS

SEQ ID NO: 31725 - protein, 122 aa, Artificial Sequence
  Chemically Synthesized
QVQLQESGGGLVQAGGSLRLSCAASGSIFRWYNMGWYRQAPGKERELVASISRGGITNYADSVKGRFTISRDNAKNTVYLQMNSLKPEDTAVYYCAVYQYYRQETRYNYRYWGQGTQVTVSS

SEQ ID NO: 31726 - protein, 122 aa, Artificial Sequence
  Chemically Synthesized
QVQLQESGGGLVQAGGSLRLSCAASGNISARGWMGWYRQAPGKERELVATIGVGSTTYYADSVKGRFTISRDNAKNTVYLQMNSLKPEDTAVYYCAVRKWWWIVPRGSHAYWGQGTQVTVSS

SEQ ID NO: 31727 - protein, 118 aa, Artificial Sequence
  Chemically Synthesized
QVQLQESGGGLVQAGGSLRLSCAASGYISSIIAMGWYRQAPGKEREFVAAIATGSTTYYADSVKGRFTISRDNAKNTVYLQMNSLKPEDTAVYYCAAGGLRRYRHRYWGQGTQVTVSS

SEQ ID NO: 31728 - protein, 118 aa, Artificial Sequence
  Chemically Synthesized
QVQLQESGGGLVQAGGSLRLSCAASGNIFWANAMGWYRQAPGKEREFVAGITGGASTYYADSVKGRFTISRDNAKNTVYLQMNSLKPEDTAVYYCAVDDWIPYYHRYWGQGTQVTVSS

SEQ ID NO: 31729 - protein, 118 aa, Artificial Sequence
  Chemically Synthesized
QVQLQESGGGLVQAGGSLRLSCAASGNISPRWTMGWYRQAPGKEREFVAGINYGGSTYYADSVKGRFTISRDNAKNTVYLQMNSLKPEDTAVYYCAVAYPRTQVHPYWGQGTQVTVSS

SEQ ID NO: 31730 - protein, 117 aa, Artificial Sequence
  Chemically Synthesized
QVQLQESGGGLVQAGGSLRLSCAASGNISGIYVMGWYRQAPGKERELVAVLISVVLPYADSVKGRFTISRDNAKNTVYLQMNSLKPEDTAVYYCAVYGDRPSYLAYWGQGTQVTVSS

SEQ ID NO: 31731 - protein, 118 aa, Artificial Sequence
  Chemically Synthesized
QVQLQESGGGLVQAGGSLRLSCAASGSIFPWYYMGWYRQAPGKEREFVAGIGLGANTYYADSVKGRFTISRDNAKNTVYLQMNSLKPEDTAVYYCAVHYPWDVFHDYWGQGTQVTVSS

SEQ ID NO: 31732 - protein, 117 aa, Artificial Sequence
  Chemically Synthesized
QVQLQESGGGLVQAGGSLRLSCAASGTILTLFMGWYRQAPGKEREFVASISIGGTTNYADSVKGRFTISRDNAKNTVYLQMNSLKPEDTAVYYCAATVGYASGHWYWGQGTQVTVSS

SEQ ID NO: 31733 - protein, 118 aa, Artificial Sequence
  Chemically Synthesized
QVQLQESGGGLVQAGGSLRLSCAASGSIFGHRYMGWYRQAPGKERELVATIGTGTNTNYADSVKGRFTISRDNAKNTVYLQMNSLKPEDTAVYYCAVIYVWARPYAYWGQGTQVTVSS

SEQ ID NO: 31734 - protein, 122 aa, Artificial Sequence
  Chemically Synthesized
QVQLQESGGGLVQAGGSLRLSCAASGTIFRYGPMGWYRQAPGKERELVASINYGSTTYYADSVKGRFTISRDNAKNTVYLQMNSLKPEDTAVYYCAVQYHVYLRGWRTHSYWGQGTQVTVSS

SEQ ID NO: 31735 - protein, 122 aa, Artificial Sequence
  Chemically Synthesized
QVQLQESGGGLVQAGGSLRLSCAASGNISQYDTMGWYRQAPGKERELVAAIAAGSTTNYADSVKGRFTISRDNAKNTVYLQMNSLKPEDTAVYYCAVRVIDDLSDDPWLEYWGQGTQVTVSS

SEQ ID NO: 31736 - protein, 118 aa, Artificial Sequence
  Chemically Synthesized
QVQLQESGGGLVQAGGSLRLSCAASGTIFAPLGMGWYRQAPGKEREFVAAIANGGTTNYADSVKGRFTISRDNAKNTVYLQMNSLKPEDTAVYYCAVTINPLAALDYWGQGTQVTVSS

SEQ ID NO: 31737 - protein, 122 aa, Artificial Sequence
  Chemically Synthesized
QVQLQESGGGLVQAGGSLRLSCAASGYISSDGDMGWYRQAPGKERELVAAISYGASTNYADSVKGRFTISRDNAKNTVYLQMNSLKPEDTAVYYCAADDGTYVYYLGGLIYWGQGTQVTVSS

SEQ ID NO: 31738 - protein, 118 aa, Artificial Sequence
  Chemically Synthesized
QVQLQESGGGLVQAGGSLRLSCAASGNISHADTMGWYRQAPGKERELVASINWGATTYYADSVKGRFTISRDNAKNTVYLQMNSLKPEDTAVYYCAVVAWDDYYFFYWGQGTQVTVSS

SEQ ID NO: 31739 - protein, 118 aa, Artificial Sequence
  Chemically Synthesized
QVQLQESGGGLVQAGGSLRLSCAASGYIFPGLYMGWYRQAPGKERELVASITGGTSTYYADSVKGRFTISRDNAKNTVYLQMNSLKPEDTAVYYCAVQYTAPVYLLYWGQGTQVTVSS

SEQ ID NO: 31740 - protein, 118 aa, Artificial Sequence
  Chemically Synthesized
QVQLQESGGGLVQAGGSLRLSCAASGNISYRNYMGWYRQAPGKEREFVASIGPGGNTYYADSVKGRFTISRDNAKNTVYLQMNSLKPEDTAVYYCAVRRWFAHYHQYWGQGTQVTVSS

SEQ ID NO: 31741 - protein, 121 aa, Artificial Sequence
  Chemically Synthesized
QVQLQESGGGLVQAGGSLRLSCAASGTISYGGTMGWYRQAPGKERELVATIDYGSTTNYADSVKGRFTISRDNAKNTVYLQMNSLKPEDTAVYYCAAGAYDYSTPGRNYYWGQGTQVTVSS

SEQ ID NO: 31742 - protein, 118 aa, Artificial Sequence
  Chemically Synthesized
QVQLQESGGGLVQAGGSLRLSCAASGSISYPDYMGWYRQAPGKEREFVAGIGYGGTTNYADSVKGRFTISRDNAKNTVYLQMNSLKPEDTAVYYCAVDPGYKSYHNYWGQGTQVTVSS

SEQ ID NO: 31743 - protein, 118 aa, Artificial Sequence
  Chemically Synthesized
QVQLQESGGGLVQAGGSLRLSCAASGTIFYGGYMGWYRQAPGKEREFVATISYGTNTNYADSVKGRFTISRDNAKNTVYLQMNSLKPEDTAVYYCAVSPDRSTYHIYWGQGTQVTVSS

SEQ ID NO: 31744 - protein, 118 aa, Artificial Sequence
  Chemically Synthesized
QVQLQESGGGLVQAGGSLRLSCAASGNISDSSWMGWYRQAPGKEREFVATIDSGAITNYADSVKGRFTISRDNAKNTVYLQMNSLKPEDTAVYYCAANRLFRLINIYWGQGTQVTVSS

SEQ ID NO: 31745 - protein, 117 aa, Artificial Sequence
  Chemically Synthesized
QVQLQESGGGLVQAGGSLRLSCAASGSISPAYSMGWYRQAPGKEREFVAAITYGSTTNYADSVKGRFTISRDNAKNTVYLQMNSLKPEDTAVYYCAAYRFRKSTIYWGQGTQVTVSS

SEQ ID NO: 31746 - protein, 126 aa, Artificial Sequence
  Chemically Synthesized
QVQLQESGGGLVQAGGSLRLSCAASGTIFALYGMGWYRQAPGKEREFVAGIGPGSSTYYADSVKGRFTISRDNAKNTVYLQMNSLKPEDTAVYYCAVIIGWVRYYRWLDRWTFEYWGQGTQVTVSS

SEQ ID NO: 31747 - protein, 118 aa, Artificial Sequence
  Chemically Synthesized
QVQLQESGGGLVQAGGSLRLSCAASGTIFQARAMGWYRQAPGKEREFVATIGYGSSTYYADSVKGRFTISRDNAKNTVYLQMNSLKPEDTAVYYCAAIWRHTGRLIYWGQGTQVTVSS

SEQ ID NO: 31748 - protein, 118 aa, Artificial Sequence
  Chemically Synthesized
QVQLQESGGGLVQAGGSLRLSCAASGYIFITRYMGWYRQAPGKERELVAAIDWGCYYLYADSVKGRFTISRDNAKNTVYLQMNSLKPEDTAVYYCAVHDNGTYPHVYWGQGTQVTVSS

SEQ ID NO: 31749 - protein, 118 aa, Artificial Sequence
  Chemically Synthesized
QVQLQESGGGLVQAGGSLRLSCAASGTISWTDYMGWYRQAPGKERELVAGIDIGGIYQYADSVKGRFTISRDNAKNTVYLQMNSLKPEDTAVYYCAVRTGYRRPYSYWGQGTQVTVSS

SEQ ID NO: 31750 - protein, 122 aa, Artificial Sequence
  Chemically Synthesized
QVQLQESGGGLVQAGGSLRLSCAASGYISQWTRMGWYRQAPGKEREFVATITYGGNTNYADSVKGRFTISRDNAKNTVYLQMNSLKPEDTAVYYCAVDQDRYGGVGPYLIYWGQGTQVTVSS

SEQ ID NO: 31751 - protein, 118 aa, Artificial Sequence
  Chemically Synthesized
QVQLQESGGGLVQAGGSLRLSCAASGNISMGWYRQAPGKERELVAGIGTGSTTNYADSVKGRFTISRDNAKNTVYLQMNSLKPEDTAVYYCAVTAFDTTDQSDDFWYWGQGTQVTVSS

SEQ ID NO: 31752 - protein, 121 aa, Artificial Sequence
  Chemically Synthesized
QVQLQESGGGLVQAGGSLRLSCAASGNISDASMGWYRQAPGKEREFVASIGAGASTNYADSVKGRFTISRDNAKNTVYLQMNSLKPEDTAVYYCAVLYLYGDYSTLRHWYWGQGTQVTVSS

SEQ ID NO: 31753 - protein, 123 aa, Artificial Sequence
  Chemically Synthesized
QVQLQESGGGLVQAGGSLRLSCAASGTIFHGQDMGWYRQAPGKERELVAAIGHDGTNTYYADSVKGRFTISRDNAKNTVYLQMNSLKPEDTAVYYCAASDEPLNDVTRHYDYWGQGTQVTVSS

SEQ ID NO: 31754 - protein, 121 aa, Artificial Sequence
  Chemically Synthesized
QVQLQESGGGLVQAGGSLRLSCAASGNISSLIYMGWYRQAPGKERELVASITSGATTNYADSVKGRFTISRDNAKNTVYLQMNSLKPEDTAVYYCAVDYIATADYYGPHYWGQGTQVTVSS

SEQ ID NO: 31755 - protein, 122 aa, Artificial Sequence
  Chemically Synthesized
QVQLQESGGGLVQAGGSLRLSCAASGSIFSYAWMGWYRQAPGKERELVATIDAGGSTNYADSVKGRFTISRDNAKNTVYLQMNSLKPEDTAVYYCAAYTDRWRANGDTHYYWGQGTQVTVSS

SEQ ID NO: 31756 - protein, 120 aa, Artificial Sequence
  Chemically Synthesized
QVQLQESGGGLVQAGGSLRLSCAASGNIFWYKDMGWYRQAPGKERELVATIGGGGTTNYADSVKGRFTISRDNAKNTVYLQMNSLKPEDTAVYYCAYDGRYFWTWDHAYWGQGTQVTVSS

SEQ ID NO: 31757 - protein, 124 aa, Artificial Sequence
  Chemically Synthesized
QVQLQESGGGLVQAGGSLRLSCAASGYISDRDMGWYRQAPGKEREFVAAITYGAITNYADSVKGRFTISRDNAKNTVYLQMNSLKPEDTAVYYCAVGYSGTTSTTRTVFTTFYWGQGTQVTVSS

SEQ ID NO: 31758 - protein, 117 aa, Artificial Sequence
  Chemically Synthesized
QVQLQESGGGLVQAGGSLRLSCAASGYILLVVMGWYRQAPGKERELVAGIGDGGSTYYADSVKGRFTISRDNAKNTVYLQMNSLKPEDTAVYYCAVGRYGRGPFRYWGQGTQVTVSS

SEQ ID NO: 31759 - protein, 117 aa, Artificial Sequence
  Chemically Synthesized
QVQLQESGGGLVQAGGSLRLSCAASGYISGHDVMGWYRQAPGKERELVATITNGATTYYADSVKGRFTISRDNAKNTVYLQMNSLKPEDTAVYYCAVYYYRTPYFYWGQGTQVTVSS

SEQ ID NO: 31760 - protein, 122 aa, Artificial Sequence
  Chemically Synthesized
QVQLQESGGGLVQAGGSLRLSCAASGTISTRAVMGWYRQAPGKEREFVAAIGDGTSTNYADSVKGRFTISRDNAKNTVYLQMNSLKPEDTAVYYCAAYYFRQSPPYPIHDYWGQGTQVTVSS

SEQ ID NO: 31761 - protein, 118 aa, Artificial Sequence
  Chemically Synthesized
QVQLQESGGGLVQAGGSLRLSCAASGTIFLGYAMGWYRQAPGKERELVAGIAGGTNTNYADSVKGRFTISRDNAKNTVYLQMNSLKPEDTAVYYCAVGTIYVGDHIYWGQGTQVTVSS

SEQ ID NO: 31762 - protein, 125 aa, Artificial Sequence
  Chemically Synthesized
QVQLQESGGGLVQAGGSLRLSCAASGSISYGGMGWYRQAPGKEREFVATIDPGTITNYADSVKGRFTISRDNAKNTVYLQMNSLKPEDTAVYYCAVVDPPAYVSQADNTYSFSYWGQGTQVTVSS

SEQ ID NO: 31763 - protein, 113 aa, Artificial Sequence
  Chemically Synthesized
QVQLQESGGGLVQAGGSLRLSCAASGNIFFLSPMGWYRQAPGKERELVASITNYADSVKGRFTISRDNAKNTVYLQMNSLKPEDTAVYYCAADGVDQVWYSYWGQGTQVTVSS

SEQ ID NO: 31764 - protein, 118 aa, Artificial Sequence
  Chemically Synthesized
QVQLQESGGGLVQAGGSLRLSCAASGNIFIAIEMGWYRQAPGKEREFVAAIDYGGTTYYADSVKGRFTISRDNAKNTVYLQMNSLKPEDTAVYYCAVYRNADQLHYYWGQGTQVTVSS

SEQ ID NO: 31765 - protein, 122 aa, Artificial Sequence
  Chemically Synthesized
QVQLQESGGGLVQAGGSLRLSCAASGSISGSTPMGWYRQAPGKEREFVAAIDTGGTTYYADSVKGRFTISRDNAKNTVYLQMNSLKPEDTAVYYCAVTVALDYNYYGYYDYWGQGTQVTVSS

SEQ ID NO: 31766 - protein, 125 aa, Artificial Sequence
  Chemically Synthesized
QVQLQESGGGLVQAGGSLRLSCAASGSIFGTVRMGWYRQAPGKEREFVASIDEGTSTNYADSVKGRFTISRDNAKNTVYLQMNSLKPEDTAVYYCAAEYDDDLAYTDLSTLRLYWGQGTQVTVSS

SEQ ID NO: 31767 - protein, 119 aa, Artificial Sequence
  Chemically Synthesized
QVQLQESGGGLVQAGGSLRLSCAASGYMGWYRQAPGKERELVAAIISVLLPYADSVKGRFTISRDNAKNTVYLQMNSLKPEDTAVYYCAAYQWVTPTYGHYDTDGHPYWGQGTQVTVSS

SEQ ID NO: 31768 - protein, 118 aa, Artificial Sequence
  Chemically Synthesized
QVQLQESGGGLVQAGGSLRLSCAASGTIFAIYVMGWYRQAPGKEREFVASISSGGSTNYADSVKGRFTISRDNAKNTVYLQMNSLKPEDTAVYYCAARPLYDDGFQYWGQGTQVTVSS

SEQ ID NO: 31769 - protein, 111 aa, Artificial Sequence
  Chemically Synthesized
QVQLQESGGGLVQAGGSLRLSCAASGTIFPTTIMGWYRQAPGKERELVLLPYADSVKGRFTISRDNAKNTVYLQMNSLKPEDTAVYYCAADGNREDDHRYWGQGTQVTVSS

SEQ ID NO: 31770 - protein, 125 aa, Artificial Sequence
  Chemically Synthesized
QVQLQESGGGLVQAGGSLRLSCAASGYISHAAVMGWYRQAPGKERELVATIGYGGTTNYADSVKGRFTISRDNAKNTVYLQMNSLKPEDTAVYYCAAYRYRPYYWGHGAPRHYYWGQGTQVTVSS

SEQ ID NO: 31771 - protein, 117 aa, Artificial Sequence
  Chemically Synthesized
QVQLQESGGGLVQAGGSLRLSCAASGYISGRDYMGWYRQAPGKERELVAAITNGGNTNYADSVKGRFTISRDNAKNTVYLQMNSLKPEDTAVYYCAAYSCTTFTFYWGQGTQVTVSS

SEQ ID NO: 31772 - protein, 118 aa, Artificial Sequence
  Chemically Synthesized
QVQLQESGGGLVQAGGSLRLSCAASGSISTLYAMGWYRQAPGKERELVATIGNGTSTNYADSVKGRFTISRDNAKNTVYLQMNSLKPEDTAVYYCAAPVGDIDNYRYWGQGTQVTVSS

SEQ ID NO: 31773 - protein, 118 aa, Artificial Sequence
  Chemically Synthesized
QVQLQESGGGLVQAGGSLRLSCAASGNIFRWYDMGWYRQAPGKEREFVASISGGTTTYYADSVKGRFTISRDNAKNTVYLQMNSLKPEDTAVYYCAVGNWVFYYLLYWGQGTQVTVSS

SEQ ID NO: 31774 - protein, 118 aa, Artificial Sequence
  Chemically Synthesized
QVQLQESGGGLVQAGGSLRLSCAASGNISGRYTMGWYRQAPGKEREFVATIDIGASTYYADSVKGRFTISRDNAKNTVYLQMNSLKPEDTAVYYCAVHKSLYDVHPYWGQGTQVTVSS

SEQ ID NO: 31775 - protein, 118 aa, Artificial Sequence
  Chemically Synthesized
QVQLQESGGGLVQAGGSLRLSCAASGSISYGDYMGWYRQAPGKERELVASITKGATTNYADSVKGRFTISRDNAKNTVYLQMNSLKPEDTAVYYCAARSNEWNEFHYWGQGTQVTVSS

SEQ ID NO: 31776 - protein, 122 aa, Artificial Sequence
  Chemically Synthesized
QVQLQESGGGLVQAGGSLRLSCAASGTISRDDGMGWYRQAPGKEREFVAGINTGGTTYYADSVKGRFTISRDNAKNTVYLQMNSLKPEDTAVYYCAVPYAPYPEDASDLYYWGQGTQVTVSS

SEQ ID NO: 31777 - protein, 123 aa, Artificial Sequence
  Chemically Synthesized
QVQLQESGGGLVQAGGSLRLSCAASGNISAHEQMGWYRQAPGKEREFVAGIGYGTSTYYADSVKGRFTISRDNAKNTVYLQMNSLKPEDTAVYYCAFVTTSTTTTITVVTFYWGQGTQVTVSS

SEQ ID NO: 31778 - protein, 113 aa, Artificial Sequence
  Chemically Synthesized
QVQLQESGGGLVQAGGSLRLSCAASGYIFGVNGMGWYRQAPGKEREFVASISYGATTYYADSVKGRFTISRDNAKNTVYLQMNSLKPEDTAVYYCAQGRLGYWGQGTQVTVSS

SEQ ID NO: 31779 - protein, 122 aa, Artificial Sequence
  Chemically Synthesized
QVQLQESGGGLVQAGGSLRLSCAASGTIFYDLFMGWYRQAPGKERELVAAITYGGNTYYADSVKGRFTISRDNAKNTVYLQMNSLKPEDTAVYYCAVFRRADYVAQQVLTYWGQGTQVTVSS

SEQ ID NO: 31780 - protein, 122 aa, Artificial Sequence
  Chemically Synthesized
QVQLQESGGGLVQAGGSLRLSCAASGSIFRAGDMGWYRQAPGKERELVAGINSGTSTNYADSVKGRFTISRDNAKNTVYLQMNSLKPEDTAVYYCAVYSTYIARLRAGYPYWGQGTQVTVSS

SEQ ID NO: 31781 - protein, 116 aa, Artificial Sequence
  Chemically Synthesized
QVQLQESGGGLVQAGGSLRLSCAASGNILVLTMGWYRQAPGKERELVAGISYGGTTYYADSVKGRFTISRDNAKNTVYLQMNSLKPEDTAVYYCAVTQYIDLSFYWGQGTQVTVSS

SEQ ID NO: 31782 - protein, 117 aa, Artificial Sequence
  Chemically Synthesized
QVQLQESGGGLVQAGGSLRLSCAASGTISQAPFMGWYRQAPGKERELVAGIDNGTKPYADSVKGRFTISRDNAKNTVYLQMNSLKPEDTAVYYCAVYETDYSRFPYWGQGTQVTVSS

SEQ ID NO: 31783 - protein, 113 aa, Artificial Sequence
  Chemically Synthesized
QVQLQESGGGLVQAGGSLRLSCAASGNISYYDYMGWYRQAPGKERELVAAIASGTNTNYADSVKGRFTISRDNAKNTVYLQMNSLKPEDTAVYYCADNVYRYWGQGTQVTVSS

SEQ ID NO: 31784 - protein, 118 aa, Artificial Sequence
  Chemically Synthesized
QVQLQESGGGLVQAGGSLRLSCAASGTISDGRTMGWYRQAPGKEREFVAGIGFGGTTYYADSVKGRFTISRDNAKNTVYLQMNSLKPEDTAVYYCAVYYQDDTGHVYWGQGTQVTVSS

SEQ ID NO: 31785 - protein, 125 aa, Artificial Sequence
  Chemically Synthesized
QVQLQESGGGLVQAGGSLRLSCAASGNIFSTTMGWYRQAPGKEREFVASIDYGSITYYADSVKGRFTISRDNAKNTVYLQMNSLKPEDTAVYYCAVDSDGASGVGDYGDARLYYWGQGTQVTVSS

SEQ ID NO: 31786 - protein, 122 aa, Artificial Sequence
  Chemically Synthesized
QVQLQESGGGLVQAGGSLRLSCAASGSISEYVTMGWYRQAPGKEREFVATITSGGSTNYADSVKGRFTISRDNAKNTVYLQMNSLKPEDTAVYYCAVNYPSYYVSYWRYIYWGQGTQVTVSS

SEQ ID NO: 31787 - protein, 115 aa, Artificial Sequence
  Chemically Synthesized
QVQLQESGGGLVQAGGSLRLSCAASGTISPNIGMGWYRQAPGKERETIADGSITQYADSVKGRFTISRDNAKNTVYLQMNSLKPEDTAVYYCAVLDGNTDWFHYWGQGTQVTVSS

SEQ ID NO: 31788 - protein, 118 aa, Artificial Sequence
  Chemically Synthesized
QVQLQESGGGLVQAGGSLRLSCAASGSISGGYYMGWYRQAPGKEREFVASIGPGSTTNYADSVKGRFTISRDNAKNTVYLQMNSLKPEDTAVYYCAVLVGRDYILGYWGQGTQVTVSS

SEQ ID NO: 31789 - protein, 118 aa, Artificial Sequence
  Chemically Synthesized
QVQLQESGGGLVQAGGSLRLSCAASGYIFPLLFMGWYRQAPGKEREFVASIGAGAITYYADSVKGRFTISRDNAKNTVYLQMNSLKPEDTAVYYCAAGYATAHTHYYWGQGTQVTVSS

SEQ ID NO: 31790 - protein, 121 aa, Artificial Sequence
  Chemically Synthesized
QVQLQESGGGLVQAGGSLRLSCAASGTIFDVPYMGWYRQAPGKEREFVAAITDGATTYYADSVKGRFTISRDNAKNTVYLQMNSLKPEDTAVYYCAVDLQSLTCSTTSLYWGQGTQVTVSS

SEQ ID NO: 31791 - protein, 122 aa, Artificial Sequence
  Chemically Synthesized
QVQLQESGGGLVQAGGSLRLSCAASGTISRDYYMGWYRQAPGKEREFVAGITYGGNTYYADSVKGRFTISRDNAKNTVYLQMNSLKPEDTAVYYCAVILAGTWIDPYEYAYWGQGTQVTVSS

SEQ ID NO: 31792 - protein, 118 aa, Artificial Sequence
  Chemically Synthesized
QVQLQESGGGLVQAGGSLRLSCAASGNIFAYVSMGWYRQAPGKERELVAAISGGAITYYADSVKGRFTISRDNAKNTVYLQMNSLKPEDTAVYYCAARDFGIEAYGYWGQGTQVTVSS

SEQ ID NO: 31793 - protein, 122 aa, Artificial Sequence
  Chemically Synthesized
QVQLQESGGGLVQAGGSLRLSCAASGNISGYDAMGWYRQAPGKEREFVAGINYGTTTYYADSVKGRFTISRDNAKNTVYLQMNSLKPEDTAVYYCAARYYASFYWSGDHVYWGQGTQVTVSS

SEQ ID NO: 31794 - protein, 124 aa, Artificial Sequence
  Chemically Synthesized
QVQLQESGGGLVQAGGSLRLSCAASGNISKYRMGWYRQAPGKEREFVAAINDGGTTNYADSVKGRFTISRDNAKNTVYLQMNSLKPEDTAVYYCAVRDDYGYGLFTYRQEFDYWGQGTQVTVSS

SEQ ID NO: 31795 - protein, 118 aa, Artificial Sequence
  Chemically Synthesized
QVQLQESGGGLVQAGGSLRLSCAASGSISYQTGMGWYRQAPGKEREFVATINDGGSTYYADSVKGRFTISRDNAKNTVYLQMNSLKPEDTAVYYCAAQRTQPVYLVYWGQGTQVTVSS

SEQ ID NO: 31796 - protein, 122 aa, Artificial Sequence
  Chemically Synthesized
QVQLQESGGGLVQAGGSLRLSCAASGSIFQRNDMGWYRQAPGKERELVATIDYGASTYYADSVKGRFTISRDNAKNTVYLQMNSLKPEDTAVYYCAVYLYVYYYGGLPYYYWGQGTQVTVSS

SEQ ID NO: 31797 - protein, 112 aa, Artificial Sequence
  Chemically Synthesized
QVQLQESGGGLVQAGGSLRLSCAASGTIFDYNGMGWYRQAPGKERELVAGTTYADSVKGRFTISRDNAKNTVYLQMNSLKPEDTAVYYCAVPWYYGNRYEYWGQGTQVTVSS

SEQ ID NO: 31798 - protein, 117 aa, Artificial Sequence
  Chemically Synthesized
QVQLQESGGGLVQAGGSLRLSCAASGSISSDDDMGWYRQAPGKERELVAGISDGTSTYYADSVKGRFTISRDNAKNTVYLQMNSLKPEDTAVYYCAAKRSVNRVIYWGQGTQVTVSS

SEQ ID NO: 31799 - protein, 118 aa, Artificial Sequence
  Chemically Synthesized
QVQLQESGGGLVQAGGSLRLSCAASGNISSSWRMGWYRQAPGKEREFVAAIGRGSTTYYADSVKGRFTISRDNAKNTVYLQMNSLKPEDTAVYYCAVALSYYTYYPYWGQGTQVTVSS

SEQ ID NO: 31800 - protein, 126 aa, Artificial Sequence
  Chemically Synthesized
QVQLQESGGGLVQAGGSLRLSCAASGNISLFGAMGWYRQAPGKERELVAAIGYGGTTNYADSVKGRFTISRDNAKNTVYLQMNSLKPEDTAVYYCAVGWLKDGLILYYGYDKYLYWGQGTQVTVSS

SEQ ID NO: 31801 - protein, 118 aa, Artificial Sequence
  Chemically Synthesized
QVQLQESGGGLVQAGGSLRLSCAASGNIFDKDQMGWYRQAPGKEREFVASIGNGGITYYADSVKGRFTISRDNAKNTVYLQMNSLKPEDTAVYYCAASGPDTVWFDYWGQGTQVTVSS

SEQ ID NO: 31802 - protein, 118 aa, Artificial Sequence
  Chemically Synthesized
QVQLQESGGGLVQAGGSLRLSCAASGNIFQNFNMGWYRQAPGKEREFVATISWGGITNYADSVKGRFTISRDNAKNTVYLQMNSLKPEDTAVYYCAAVPRSGGIFNYWGQGTQVTVSS

SEQ ID NO: 31803 - protein, 117 aa, Artificial Sequence
  Chemically Synthesized
QVQLQESGGGLVQAGGSLRLSCAASGNISGHLGMGWYRQAPGKERELVASIAGGSTYYADSVKGRFTISRDNAKNTVYLQMNSLKPEDTAVYYCAVYGKVYEGLDYWGQGTQVTVSS

SEQ ID NO: 31804 - protein, 118 aa, Artificial Sequence
  Chemically Synthesized
QVQLQESGGGLVQAGGSLRLSCAASGSISPDYNMGWYRQAPGKERELVASIDNGTITNYADSVKGRFTISRDNAKNTVYLQMNSLKPEDTAVYYCAADDGEELQLYYWGQGTQVTVSS

SEQ ID NO: 31805 - protein, 118 aa, Artificial Sequence
  Chemically Synthesized
QVQLQESGGGLVQAGGSLRLSCAASGTIFPRNAMGWYRQAPGKEREFVATITVGGSTNYADSVKGRFTISRDNAKNTVYLQMNSLKPEDTAVYYCAASTYGDGDLAYWGQGTQVTVSS

SEQ ID NO: 31806 - protein, 118 aa, Artificial Sequence
  Chemically Synthesized
QVQLQESGGGLVQAGGSLRLSCAASGNIFDVDAMGWYRQAPGKERELVAAINRGAITNYADSVKGRFTISRDNAKNTVYLQMNSLKPEDTAVYYCAAEPYTDGGLLYWGQGTQVTVSS

SEQ ID NO: 31807 - protein, 110 aa, Artificial Sequence
  Chemically Synthesized
QVQLQESGGGLVQAGGSLRLSCAASGTISQDNRMGWYRQAPGKEREFVAGINSGASTYYADSVKGRFTISRDNAKNTVYLQMNSLKPEDTAVYYCAVLYWGQGTQVTVSS

SEQ ID NO: 31808 - protein, 113 aa, Artificial Sequence
  Chemically Synthesized
QVQLQESGGGLVQAGGSLRLSCAASGSIFDDYRMGWYRQAPGKERELVATIDGGGNTNYADSVKGRFTISRDNAKNTVYLQMNSLKPEDTAVYYCAVGDFSYWGQGTQVTVSS

SEQ ID NO: 31809 - protein, 117 aa, Artificial Sequence
  Chemically Synthesized
QVQLQESGGGLVQAGGSLRLSCAASGTISVAWYMGWYRQAPGKERELVASITGGNTNYADSVKGRFTISRDNAKNTVYLQMNSLKPEDTAVYYCAAISIDPTWYYYWGQGTQVTVSS

SEQ ID NO: 31810 - protein, 117 aa, Artificial Sequence
  Chemically Synthesized
QVQLQESGGGLVQAGGSLRLSCAASGTISSWTMGWYRQAPGKERELVAGIAIGANTYYADSVKGRFTISRDNAKNTVYLQMNSLKPEDTAVYYCAVRIGVALLLYYWGQGTQVTVSS

SEQ ID NO: 31811 - protein, 118 aa, Artificial Sequence
  Chemically Synthesized
QVQLQESGGGLVQAGGSLRLSCAASGTIFDDLNMGWYRQAPGKERELVATIGNGGTTNYADSVKGRFTISRDNAKNTVYLQMNSLKPEDTAVYYCAAYDPIGGRLSYWGQGTQVTVSS

SEQ ID NO: 31812 - protein, 113 aa, Artificial Sequence
  Chemically Synthesized
QVQLQESGGGLVQAGGSLRLSCAASGTIFRTSYMGWYRQAPGKEREFVATIAHGGSTYYADSVKGRFTISRDNAKNTVYLQMNSLKPEDTAVYYCAWDGLTYWGQGTQVTVSS

SEQ ID NO: 31813 - protein, 116 aa, Artificial Sequence
  Chemically Synthesized
QVQLQESGGGLVQAGGSLRLSCAASGTLTLLMGWYRQAPGKEREFVAAIDPGGSTNYADSVKGRFTISRDNAKNTVYLQMNSLKPEDTAVYYCAVRYRSVRTSLYWGQGTQVTVSS

SEQ ID NO: 31814 - protein, 112 aa, Artificial Sequence
  Chemically Synthesized
QVQLQESGGGLVQAGGSLRLSCAASGSIFDPYAMGWYRQAPGKEREFVATIAPGSSTNYADSVKGRFTISRDNAKNTVYLQMNSLKPEDTAVYYCAAVYPYWGQGTQVTVSS

SEQ ID NO: 31815 - protein, 121 aa, Artificial Sequence
  Chemically Synthesized
QVQLQESGGGLVQAGGSLRLSCAASGSISVDTYMGWYRQAPGKERELVASIATGGSTNYADSVKGRFTISRDNAKNTVYLQMNSLKPEDTAVYYCAVTGRYSSGSLVVMYWGQGTQVTVSS

SEQ ID NO: 31816 - protein, 118 aa, Artificial Sequence
  Chemically Synthesized
QVQLQESGGGLVQAGGSLRLSCAASGNIFRLKRMGWYRQAPGKERELVASISRGGTTYYADSVKGRFTISRDNAKNTVYLQMNSLKPEDTAVYYCAVRGYWNDAHSYWGQGTQVTVSS

SEQ ID NO: 31817 - protein, 122 aa, Artificial Sequence
  Chemically Synthesized
QVQLQESGGGLVQAGGSLRLSCAASGNISYRPYMGWYRQAPGKEREFVAGIGAGTSTNYADSVKGRFTISRDNAKNTVYLQMNSLKPEDTAVYYCAASYPYKYGYWRDHVYWGQGTQVTVSS

SEQ ID NO: 31818 - protein, 118 aa, Artificial Sequence
  Chemically Synthesized
QVQLQESGGGLVQAGGSLRLSCAASGSIFPYAIMGWYRQAPGKEREFVASINYGSTTNYADSVKGRFTISRDNAKNTVYLQMNSLKPEDTAVYYCAVVYYAAESHGYWGQGTQVTVSS

SEQ ID NO: 31819 - protein, 118 aa, Artificial Sequence
  Chemically Synthesized
QVQLQESGGGLVQAGGSLRLSCAASGTIFGQEYMGWYRQAPGKERELVAGITYGATTNYADSVKGRFTISRDNAKNTVYLQMNSLKPEDTAVYYCAAITITDGYHDYWGQGTQVTVSS

SEQ ID NO: 31820 - protein, 110 aa, Artificial Sequence
  Chemically Synthesized
QVQLQESGGGLVQAGGSLRLSCAASGSISYRPGMGWYRQAPGKEREFVATIGWGSTTNYADSVKGRFTISRDNAKNTVYLQMNSLKPEDTAVYYCAVIYWGQGTQVTVSS

SEQ ID NO: 31821 - protein, 120 aa, Artificial Sequence
  Chemically Synthesized
QVQLQESGGGLVQAGGSLRLSCAASGTIFGYYGMGWYRQAPGKERELLPLLMVVVPYADSVKGRFTISRDNAKNTVYLQMNSLKPEDTAVYYCAAWYLYPASSGSWSWYWGQGTQVTVSS

SEQ ID NO: 31822 - protein, 121 aa, Artificial Sequence
  Chemically Synthesized
QVQLQESGGGLVQAGGSLRLSCAASGTISRRWRMGWYRQAPGKERELVAAIDYGAITYYADSVKGRFTISRDNAKNTVYLQMNSLKPEDTAVYYCAVVYPYLYYGSDHSYWGQGTQVTVSS

SEQ ID NO: 31823 - protein, 118 aa, Artificial Sequence
  Chemically Synthesized
QVQLQESGGGLVQAGGSLRLSCAASGTISSLPYMGWYRQAPGKEREFVASISTGTNTYYADSVKGRFTISRDNAKNTVYLQMNSLKPEDTAVYYCAADDGTSTAFPYWGQGTQVTVSS

SEQ ID NO: 31824 - protein, 118 aa, Artificial Sequence
  Chemically Synthesized
QVQLQESGGGLVQAGGSLRLSCAASGTISPGAFMGWYRQAPGKERELVASIAGGGTTNYADSVKGRFTISRDNAKNTVYLQMNSLKPEDTAVYYCAAGLGDAPPYVYWGQGTQVTVSS

SEQ ID NO: 31825 - protein, 118 aa, Artificial Sequence
  Chemically Synthesized
QVQLQESGGGLVQAGGSLRLSCAASGSISASTWMGWYRQAPGKEREFVAAIATGGTTNYADSVKGRFTISRDNAKNTVYLQMNSLKPEDTAVYYCAAIDIGGPDYAYWGQGTQVTVSS

SEQ ID NO: 31826 - protein, 123 aa, Artificial Sequence
  Chemically Synthesized
QVQLQESGGGLVQAGGSLRLSCAASGNIFYQLFMGWYRQAPGKERELVAAITYGATTYYADSVKGRFTISRDNAKNTVYLQMNSLKPEDTAVYYCAVAVRRTYVYYRDQYSYWGQGTQVTVSS

SEQ ID NO: 31827 - protein, 126 aa, Artificial Sequence
  Chemically Synthesized
QVQLQESGGGLVQAGGSLRLSCAASGTIFFHGYMGWYRQAPGKEREFVATINLGGITNYADSVKGRFTISRDNAKNTVYLQMNSLKPEDTAVYYCAAASADQSAYDRRIRGRYGYWGQGTQVTVSS

SEQ ID NO: 31828 - protein, 116 aa, Artificial Sequence
  Chemically Synthesized
QVQLQESGGGLVQAGGSLRLSCAASGTIFQDKVMGWYRQAPGKERELVAAINFGTNTNYADSVKGRFTISRDNAKNTVYLQMNSLKPEDTAVYYCAVNYSFDTRYWGQGTQVTVSS

SEQ ID NO: 31829 - protein, 121 aa, Artificial Sequence
  Chemically Synthesized
QVQLQESGGGLVQAGGSLRLSCAASGSIFTYAGMGWYRQAPGKERELVAAIGYGTNTNYADSVKGRFTISRDNAKNTVYLQMNSLKPEDTAVYYCAVEESVNTVTTRFIYWGQGTQVTVSS

SEQ ID NO: 31830 - protein, 112 aa, Artificial Sequence
  Chemically Synthesized
QVQLQESGGGLVQAGGSLRLSCAASGNIFDRNTMGWYRQAPGKERELVAGITFGSNTNYADSVKGRFTISRDNAKNTVYLQMNSLKPEDTAVYYCAAILLYWGQGTQVTVSS

SEQ ID NO: 31831 - protein, 117 aa, Artificial Sequence
  Chemically Synthesized
QVQLQESGGGLVQAGGSLRLSCAASGTISQHYIMGWYRQAPGKEREFVASIDNGGTTYYADSVKGRFTISRDNAKNTVYLQMNSLKPEDTAVYYCAVYEGGYQFQYWGQGTQVTVSS

SEQ ID NO: 31832 - protein, 110 aa, Artificial Sequence
  Chemically Synthesized
QVQLQESGGGLVQAGGSLRLSCAASGNIFNYYRMGWYRQAPGKERELVAGIDVGTSTYYADSVKGRFTISRDNAKNTVYLQMNSLKPEDTAVYYCAASYWGQGTQVTVSS

SEQ ID NO: 31833 - protein, 120 aa, Artificial Sequence
  Chemically Synthesized
QVQLQESGGGLVQAGGSLRLSCAASGNIFGLGGMGWYRQAPGKERELVASITLGGNTYYADSVKGRFTISRDNAKNTVYLQMNSLKPEDTAVYYCAVYVDVYRRYYYFYWGQGTQVTVSS

SEQ ID NO: 31834 - protein, 125 aa, Artificial Sequence
  Chemically Synthesized
QVQLQESGGGLVQAGGSLRLSCAASGNISEEPYMGWYRQAPGKEREFVAAIADGALPYADSVKGRFTISRDNAKNTVYLQMNSLKPEDTAVYYCAARYDGSLRWYSLYRWDYDYWGQGTQVTVSS

SEQ ID NO: 31835 - protein, 122 aa, Artificial Sequence
  Chemically Synthesized
QVQLQESGGGLVQAGGSLRLSCAASGSISGGPYMGWYRQAPGKEREFVAAIGLGAITNYADSVKGRFTISRDNAKNTVYLQMNSLKPEDTAVYYCAAYGTRDYPAEIYLGYWGQGTQVTVSS

SEQ ID NO: 31836 - protein, 118 aa, Artificial Sequence
  Chemically Synthesized
QVQLQESGGGLVQAGGSLRLSCAASGNIFLDDAMGWYRQAPGKERELVAAINDGSSTYYADSVKGRFTISRDNAKNTVYLQMNSLKPEDTAVYYCAATIYYYSGLDYWGQGTQVTVSS

SEQ ID NO: 31837 - protein, 117 aa, Artificial Sequence
  Chemically Synthesized
QVQLQESGGGLVQAGGSLRLSCAASGTISPLWSMGWYRQAPGKERELVATISSVLIPYADSVKGRFTISRDNAKNTVYLQMNSLKPEDTAVYYCAVYPEDTGRHPYWGQGTQVTVSS

SEQ ID NO: 31838 - protein, 118 aa, Artificial Sequence
  Chemically Synthesized
QVQLQESGGGLVQAGGSLRLSCAASGNISPGGRMGWYRQAPGKERELVAAISYGGTTYYADSVKGRFTISRDNAKNTVYLQMNSLKPEDTAVYYCAAYHSSDYRYPYWGQGTQVTVSS

SEQ ID NO: 31839 - protein, 121 aa, Artificial Sequence
  Chemically Synthesized
QVQLQESGGGLVQAGGSLRLSCAASGTIFGQGDMGWYRQAPGKERELVAGITLGTNTNYADSVKGRFTISRDNAKNTVYLQMNSLKPEDTAVYYCAAYVLRPSSTSLTMYWGQGTQVTVSS

SEQ ID NO: 31840 - protein, 122 aa, Artificial Sequence
  Chemically Synthesized
QVQLQESGGGLVQAGGSLRLSCAASGTIFRRVSMGWYRQAPGKERELVATIGYGATTNYADSVKGRFTISRDNAKNTVYLQMNSLKPEDTAVYYCAVKYRVPHLYYDPFTYWGQGTQVTVSS

SEQ ID NO: 31841 - protein, 121 aa, Artificial Sequence
  Chemically Synthesized
QVQLQESGGGLVQAGGSLRLSCAASGSISAFYEMGWYRQAPGKERELVAAIGVGSTYYADSVKGRFTISRDNAKNTVYLQMNSLKPEDTAVYYCAVTADQTRRAYDHLDYWGQGTQVTVSS

SEQ ID NO: 31842 - protein, 119 aa, Artificial Sequence
  Chemically Synthesized
QVQLQESGGGLVQAGGSLRLSCAASGTIFDPVNMGWYRQAPGKEREFVASISSGATPYADSVKGRFTISRDNAKNTVYLQMNSLKPEDTAVYYCAVQDYYAKDSYLQYWGQGTQVTVSS

SEQ ID NO: 31843 - protein, 117 aa, Artificial Sequence
  Chemically Synthesized
QVQLQESGGGLVQAGGSLRLSCAASGYISPGDIMGWYRQAPGKEREFVAGIATGGITNYADSVKGRFTISRDNAKNTVYLQMNSLKPEDTAVYYCAVYDGQYRSLYWGQGTQVTVSS

SEQ ID NO: 31844 - protein, 121 aa, Artificial Sequence
  Chemically Synthesized
QVQLQESGGGLVQAGGSLRLSCAASGNISSAYSMGWYRQAPGKERELVATIDIGGTTYYADSVKGRFTISRDNAKNTVYLQMNSLKPEDTAVYYCAAASALWLYPAEQHYWGQGTQVTVSS

SEQ ID NO: 31845 - protein, 117 aa, Artificial Sequence
  Chemically Synthesized
QVQLQESGGGLVQAGGSLRLSCAASGNIFAATSMGWYRQAPGKERELVAGISDGGSTYYADSVKGRFTISRDNAKNTVYLQMNSLKPEDTAVYYCAVPGYNEQFDYWGQGTQVTVSS

SEQ ID NO: 31846 - protein, 121 aa, Artificial Sequence
  Chemically Synthesized
QVQLQESGGGLVQAGGSLRLSCAASGTIFYTVAMGWYRQAPGKERELVATISTGANTYYADSVKGRFTISRDNAKNTVYLQMNSLKPEDTAVYYCAVSRTYGSTTTTVMYWGQGTQVTVSS

SEQ ID NO: 31847 - protein, 118 aa, Artificial Sequence
  Chemically Synthesized
QVQLQESGGGLVQAGGSLRLSCAASGNISGKGTMGWYRQAPGKERELVASIGQGGITNYADSVKGRFTISRDNAKNTVYLQMNSLKPEDTAVYYCAVYIADLGIYSYWGQGTQVTVSS

SEQ ID NO: 31848 - protein, 118 aa, Artificial Sequence
  Chemically Synthesized
QVQLQESGGGLVQAGGSLRLSCAASGSISYYLVMGWYRQAPGKEREFVATIGTGANTNYADSVKGRFTISRDNAKNTVYLQMNSLKPEDTAVYYCAVDRAIDDTYDYWGQGTQVTVSS

SEQ ID NO: 31849 - protein, 118 aa, Artificial Sequence
  Chemically Synthesized
QVQLQESGGGLVQAGGSLRLSCAASGSIFYRYDMGWYRQAPGKERELVAAITDGGNTNYADSVKGRFTISRDNAKNTVYLQMNSLKPEDTAVYYCAAYPADDYIHIYWGQGTQVTVSS

SEQ ID NO: 31850 - protein, 122 aa, Artificial Sequence
  Chemically Synthesized
QVQLQESGGGLVQAGGSLRLSCAASGTISYPRQMGWYRQAPGKERELVATISSGGNTNYADSVKGRFTISRDNAKNTVYLQMNSLKPEDTAVYYCAVRVGAPWTDLPYLAYWGQGTQVTVSS

SEQ ID NO: 31851 - protein, 118 aa, Artificial Sequence
  Chemically Synthesized
QVQLQESGGGLVQAGGSLRLSCAASGNISDSLNMGWYRQAPGKEREFVATIPYADSVKGRFTISRDNAKNTVYLQMNSLKPEDTAVYYCAAVGRDQTDIYEHADHVYWGQGTQVTVSS

SEQ ID NO: 31852 - protein, 126 aa, Artificial Sequence
  Chemically Synthesized
QVQLQESGGGLVQAGGSLRLSCAASGTIFSGYSMGWYRQAPGKERELVATIGDGAITYYADSVKGRFTISRDNAKNTVYLQMNSLKPEDTAVYYCAAELYRVDRPQTTSVLRSSYWGQGTQVTVSS

SEQ ID NO: 31853 - protein, 126 aa, Artificial Sequence
  Chemically Synthesized
QVQLQESGGGLVQAGGSLRLSCAASGNISDWGPMGWYRQAPGKERELVAAINTGATTNYADSVKGRFTISRDNAKNTVYLQMNSLKPEDTAVYYCAVNYHDAEGSRPVIADVHAYWGQGTQVTVSS

SEQ ID NO: 31854 - protein, 117 aa, Artificial Sequence
  Chemically Synthesized
QVQLQESGGGLVQAGGSLRLSCAASGNISDYTYMGWYRQAPGKERELVASITDGSNTYYADSVKGRFTISRDNAKNTVYLQMNSLKPEDTAVYYCAAYTASSTRIYWGQGTQVTVSS

SEQ ID NO: 31855 - protein, 109 aa, Artificial Sequence
  Chemically Synthesized
QVQLQESGGGLVQAGGSLRLSCAASGNISVYNNMGWYRQAPGKEREFVATIDSGGITYYADSVKGRFTISRDNAKNTVYLQMNSLKPEDTAVYYCALYWGQGTQVTVSS

SEQ ID NO: 31856 - protein, 125 aa, Artificial Sequence
  Chemically Synthesized
QVQLQESGGGLVQAGGSLRLSCAASGNISYYRTMGWYRQAPGKEREFVATISDGGIPYADSVKGRFTISRDNAKNTVYLQMNSLKPEDTAVYYCAAGFRPNGDNAVSLRYEHYYWGQGTQVTVSS

SEQ ID NO: 31857 - protein, 124 aa, Artificial Sequence
  Chemically Synthesized
QVQLQESGGGLVQAGGSLRLSCAASGNIFRYYYMGWYRQAPGKERELVAGIDSGTSTYYADSVKGRFTISRDNAKNTVYLQMNSLKPEDTAVYYCAAGYETLSATDPHWAHGYWGQGTQVTVSS

SEQ ID NO: 31858 - protein, 121 aa, Artificial Sequence
  Chemically Synthesized
QVQLQESGGGLVQAGGSLRLSCAASGTISRSQAMGWYRQAPGKERELVATITRGGTTNYADSVKGRFTISRDNAKNTVYLQMNSLKPEDTAVYYCAATRYWRYGRTEHRYWGQGTQVTVSS

SEQ ID NO: 31859 - protein, 110 aa, Artificial Sequence
  Chemically Synthesized
QVQLQESGGGLVQAGGSLRLSCAASGNISSTVTMGWYRQAPGKEREFVAGISRGSITYYADSVKGRFTISRDNAKNTVYLQMNSLKPEDTAVYYCAHDYWGQGTQVTVSS

SEQ ID NO: 31860 - protein, 121 aa, Artificial Sequence
  Chemically Synthesized
QVQLQESGGGLVQAGGSLRLSCAASGYISKVPRMGWYRQAPGKEREFVATIGGGASTYYADSVKGRFTISRDNAKNTVYLQMNSLKPEDTAVYYCAAYSPHDSTTVGLMYWGQGTQVTVSS

SEQ ID NO: 31861 - protein, 118 aa, Artificial Sequence
  Chemically Synthesized
QVQLQESGGGLVQAGGSLRLSCAASGTISDEHYMGWYRQAPGKERELVATIAAGSNTYYADSVKGRFTISRDNAKNTVYLQMNSLKPEDTAVYYCAVRAADQANYAYWGQGTQVTVSS

SEQ ID NO: 31862 - protein, 118 aa, Artificial Sequence
  Chemically Synthesized
QVQLQESGGGLVQAGGSLRLSCAASGYIFPHYAMGWYRQAPGKERELVATIDAGGITYYADSVKGRFTISRDNAKNTVYLQMNSLKPEDTAVYYCAVDRFSCTTFIYWGQGTQVTVSS

SEQ ID NO: 31863 - protein, 122 aa, Artificial Sequence
  Chemically Synthesized
QVQLQESGGGLVQAGGSLRLSCAASGTIFAVDVMGWYRQAPGKERELVATIAGGANTYYADSVKGRFTISRDNAKNTVYLQMNSLKPEDTAVYYCAAEYAFSNLGTADYNYWGQGTQVTVSS

SEQ ID NO: 31864 - protein, 118 aa, Artificial Sequence
  Chemically Synthesized
QVQLQESGGGLVQAGGSLRLSCAASGTISDTVGMGWYRQAPGKEREFVASISEGGTTYYADSVKGRFTISRDNAKNTVYLQMNSLKPEDTAVYYCAVYYRAQTLHYYWGQGTQVTVSS

SEQ ID NO: 31865 - protein, 118 aa, Artificial Sequence
  Chemically Synthesized
QVQLQESGGGLVQAGGSLRLSCAASGTISRDYPMGWYRQAPGKEREFVATIAYGAITYYADSVKGRFTISRDNAKNTVYLQMNSLKPEDTAVYYCAAWTRYVLTHTYWGQGTQVTVSS

SEQ ID NO: 31866 - protein, 118 aa, Artificial Sequence
  Chemically Synthesized
QVQLQESGGGLVQAGGSLRLSCAASGTIFSRYSMGWYRQAPGKEREFVASIDAGGNTYYADSVKGRFTISRDNAKNTVYLQMNSLKPEDTAVYYCAVIGTRKANYLYWGQGTQVTVSS

SEQ ID NO: 31867 - protein, 118 aa, Artificial Sequence
  Chemically Synthesized
QVQLQESGGGLVQAGGSLRLSCAASGYIFGHHKMGWYRQAPGKEREFVATIGAGASTYYADSVKGRFTISRDNAKNTVYLQMNSLKPEDTAVYYCAAVAYRNRSYTYWGQGTQVTVSS

SEQ ID NO: 31868 - protein, 124 aa, Artificial Sequence
  Chemically Synthesized
QVQLQESGGGLVQAGGSLRLSCAASGYISSLLMGWYRQAPGKEREFVAAIARGTNTNYADSVKGRFTISRDNAKNTVYLQMNSLKPEDTAVYYCAASVSVSTRVKVTRVRSFYWGQGTQVTVSS

SEQ ID NO: 31869 - protein, 117 aa, Artificial Sequence
  Chemically Synthesized
QVQLQESGGGLVQAGGSLRLSCAASGNISRSYEMGWYRQAPGKERELVAGIADGTNTNYADSVKGRFTISRDNAKNTVYLQMNSLKPEDTAVYYCAVGYHPLLGWYWGQGTQVTVSS

SEQ ID NO: 31870 - protein, 122 aa, Artificial Sequence
  Chemically Synthesized
QVQLQESGGGLVQAGGSLRLSCAASGNIFSGYAMGWYRQAPGKEREFVASINQGSNTYYADSVKGRFTISRDNAKNTVYLQMNSLKPEDTAVYYCAVWQYQLAPYHDYHYYWGQGTQVTVSS

SEQ ID NO: 31871 - protein, 117 aa, Artificial Sequence
  Chemically Synthesized
QVQLQESGGGLVQAGGSLRLSCAASGNISDVIDMGWYRQAPGKERELVATIDFGAITNYADSVKGRFTISRDNAKNTVYLQMNSLKPEDTAVYYCAAPSVTTLLLYWGQGTQVTVSS

SEQ ID NO: 31872 - protein, 116 aa, Artificial Sequence
  Chemically Synthesized
QVQLQESGGGLVQAGGSLRLSCAASGNISYTDMGWYRQAPGKERELVATINGGYYLYADSVKGRFTISRDNAKNTVYLQMNSLKPEDTAVYYCAATYYAYVYHRYWGQGTQVTVSS

SEQ ID NO: 31873 - protein, 117 aa, Artificial Sequence
  Chemically Synthesized
QVQLQESGGGLVQAGGSLRLSCAASGSISDPLTMGWYRQAPGKERELVAGISSGGTTYYADSVKGRFTISRDNAKNTVYLQMNSLKPEDTAVYYCAVWWQPWYTFYWGQGTQVTVSS

SEQ ID NO: 31874 - protein, 117 aa, Artificial Sequence
  Chemically Synthesized
QVQLQESGGGLVQAGGSLRLSCAASGTIFNLTVMGWYRQAPGKERELIRVLVPYADSVKGRFTISRDNAKNTVYLQMNSLKPEDTAVYYCAVGTDGYAASSPDYGYWGQGTQVTVSS

SEQ ID NO: 31875 - protein, 126 aa, Artificial Sequence
  Chemically Synthesized
QVQLQESGGGLVQAGGSLRLSCAASGNISDGPPMGWYRQAPGKERELVATISSGSTTNYADSVKGRFTISRDNAKNTVYLQMNSLKPEDTAVYYCAVWLSVYGDRWQYWWYPFGYWGQGTQVTVSS

SEQ ID NO: 31876 - protein, 126 aa, Artificial Sequence
  Chemically Synthesized
QVQLQESGGGLVQAGGSLRLSCAASGNISADDYMGWYRQAPGKEREFVAAITDGSNTYYADSVKGRFTISRDNAKNTVYLQMNSLKPEDTAVYYCAANSGRWNPYTIYLVRDHTYWGQGTQVTVSS

SEQ ID NO: 31877 - protein, 122 aa, Artificial Sequence
  Chemically Synthesized
QVQLQESGGGLVQAGGSLRLSCAASGTISTNPEMGWYRQAPGKEREFVAGIDYGATTYYADSVKGRFTISRDNAKNTVYLQMNSLKPEDTAVYYCAAPSYPPYDYYYALDYWGQGTQVTVSS

SEQ ID NO: 31878 - protein, 121 aa, Artificial Sequence
  Chemically Synthesized
QVQLQESGGGLVQAGGSLRLSCAASGYISRYTDMGWYRQAPGKEREFVAAISYGATTYYADSVKGRFTISRDNAKNTVYLQMNSLKPEDTAVYYCAAIYDDDATQLFSIYWGQGTQVTVSS

SEQ ID NO: 31879 - protein, 118 aa, Artificial Sequence
  Chemically Synthesized
QVQLQESGGGLVQAGGSLRLSCAASGTIFPGRDMGWYRQAPGKERELVATISVGGSTNYADSVKGRFTISRDNAKNTVYLQMNSLKPEDTAVYYCAAGDYAYRNLYYWGQGTQVTVSS

SEQ ID NO: 31880 - protein, 118 aa, Artificial Sequence
  Chemically Synthesized
QVQLQESGGGLVQAGGSLRLSCAASGNIFAGPNMGWYRQAPGKERELVAAIGTGGSTNYADSVKGRFTISRDNAKNTVYLQMNSLKPEDTAVYYCAADRRTNAFYTYWGQGTQVTVSS

SEQ ID NO: 31881 - protein, 122 aa, Artificial Sequence
  Chemically Synthesized
QVQLQESGGGLVQAGGSLRLSCAASGTIFYPAYMGWYRQAPGKERELVAAINTGTSTYYADSVKGRFTISRDNAKNTVYLQMNSLKPEDTAVYYCAAGSRYDAPRYWYFGYWGQGTQVTVSS

SEQ ID NO: 31882 - protein, 117 aa, Artificial Sequence
  Chemically Synthesized
QVQLQESGGGLVQAGGSLRLSCAASGTISDPDTMGWYRQAPGKEREFVAALMTVLVPYADSVKGRFTISRDNAKNTVYLQMNSLKPEDTAVYYCAADHYRRGQLGYWGQGTQVTVSS

SEQ ID NO: 31883 - protein, 121 aa, Artificial Sequence
  Chemically Synthesized
QVQLQESGGGLVQAGGSLRLSCAASGSIFAERDMGWYRQAPGKERELVATIAYGAITNYADSVKGRFTISRDNAKNTVYLQMNSLKPEDTAVYYCAAGYYGYYSPSLTMYWGQGTQVTVSS

SEQ ID NO: 31884 - protein, 122 aa, Artificial Sequence
  Chemically Synthesized
QVQLQESGGGLVQAGGSLRLSCAASGNISVTFDMGWYRQAPGKEREFVAAINVGTITNYADSVKGRFTISRDNAKNTVYLQMNSLKPEDTAVYYCAVGIIRKRTDHSVLDYWGQGTQVTVSS

SEQ ID NO: 31885 - protein, 123 aa, Artificial Sequence
  Chemically Synthesized
QVQLQESGGGLVQAGGSLRLSCAASGTIFFTGQAMGWYRQAPGKEREFVAAIDKGGSTYYADSVKGRFTISRDNAKNTVYLQMNSLKPEDTAVYYCAADTYINYPWYYDLPYWGQGTQVTVSS

SEQ ID NO: 31886 - protein, 116 aa, Artificial Sequence
  Chemically Synthesized
QVQLQESGGGLVQAGGSLRLSCAASGTISRYSYMGWYRQAPGKERELLPLLMTVVLPYADSVKGRFTISRDNAKNTVYLQMNSLKPEDTAVYYCAVYIYPVLYPYWGQGTQVTVSS

SEQ ID NO: 31887 - protein, 122 aa, Artificial Sequence
  Chemically Synthesized
QVQLQESGGGLVQAGGSLRLSCAASGTISRIGYMGWYRQAPGKEREFVAGIAYGGITYYADSVKGRFTISRDNAKNTVYLQMNSLKPEDTAVYYCAVDVYSGDDQEVYLLYWGQGTQVTVSS

SEQ ID NO: 31888 - protein, 116 aa, Artificial Sequence
  Chemically Synthesized
QVQLQESGGGLVQAGGSLRLSCAASGSISSGVMGWYRQAPGKERELVAAIASGSNTYYADSVKGRFTISRDNAKNTVYLQMNSLKPEDTAVYYCAAYYEARDVLYWGQGTQVTVSS

SEQ ID NO: 31889 - protein, 118 aa, Artificial Sequence
  Chemically Synthesized
QVQLQESGGGLVQAGGSLRLSCAASGTIFGERRMGWYRQAPGKERELVAGIDYGATTNYADSVKGRFTISRDNAKNTVYLQMNSLKPEDTAVYYCAASAYARWSHLYWGQGTQVTVSS

SEQ ID NO: 31890 - protein, 118 aa, Artificial Sequence
  Chemically Synthesized
QVQLQESGGGLVQAGGSLRLSCAASGSIFSDAAMGWYRQAPGKERELVASIAEGSTTYYADSVKGRFTISRDNAKNTVYLQMNSLKPEDTAVYYCAVGRADWDWYRYWGQGTQVTVSS

SEQ ID NO: 31891 - protein, 110 aa, Artificial Sequence
  Chemically Synthesized
QVQLQESGGGLVQAGGSLRLSCAASGTIFDQTGMGWYRQAPGKEREFVATINGGAITNYADSVKGRFTISRDNAKNTVYLQMNSLKPEDTAVYYCANIYWGQGTQVTVSS

SEQ ID NO: 31892 - protein, 117 aa, Artificial Sequence
  Chemically Synthesized
QVQLQESGGGLVQAGGSLRLSCAASGNIFHPDVMGWYRQAPGKEREFVAGITTGTSTNYADSVKGRFTISRDNAKNTVYLQMNSLKPEDTAVYYCAASNDYPSVIYWGQGTQVTVSS

SEQ ID NO: 31893 - protein, 118 aa, Artificial Sequence
  Chemically Synthesized
QVQLQESGGGLVQAGGSLRLSCAASGNIFLIGDMGWYRQAPGKEREFVATINDGGSTNYADSVKGRFTISRDNAKNTVYLQMNSLKPEDTAVYYCAVYDILEGDLTYWGQGTQVTVSS

SEQ ID NO: 31894 - protein, 118 aa, Artificial Sequence
  Chemically Synthesized
QVQLQESGGGLVQAGGSLRLSCAASGSISYPQSMGWYRQAPGKERELVAAIDRGASTYYADSVKGRFTISRDNAKNTVYLQMNSLKPEDTAVYYCAVDWAGSTGHDYWGQGTQVTVSS

SEQ ID NO: 31895 - protein, 124 aa, Artificial Sequence
  Chemically Synthesized
QVQLQESGGGLVQAGGSLRLSCAASGTISPSFDMGWYRQAPGKERELVATIDHGASTNYADSVKGRFTISRDNAKNTVYLQMNSLKPEDTAVYYCAVYYGPKYDPATASDSDYWGQGTQVTVSS

SEQ ID NO: 31896 - protein, 121 aa, Artificial Sequence
  Chemically Synthesized
QVQLQESGGGLVQAGGSLRLSCAASGTILTRLMGWYRQAPGKERELVAAIDGGGITNYADSVKGRFTISRDNAKNTVYLQMNSLKPEDTAVYYCAAGDFVDLELVEVHRYWGQGTQVTVSS

SEQ ID NO: 31897 - protein, 117 aa, Artificial Sequence
  Chemically Synthesized
QVQLQESGGGLVQAGGSLRLSCAASGTISWYIYMGWYRQAPGKEREFVATIGSVVLPYADSVKGRFTISRDNAKNTVYLQMNSLKPEDTAVYYCAVTAYRYLRFYYWGQGTQVTVSS

SEQ ID NO: 31898 - protein, 118 aa, Artificial Sequence
  Chemically Synthesized
QVQLQESGGGLVQAGGSLRLSCAASGNIFYVLDMGWYRQAPGKERELVAGIAPGTTTNYADSVKGRFTISRDNAKNTVYLQMNSLKPEDTAVYYCAADTVADWRYDYWGQGTQVTVSS

SEQ ID NO: 31899 - protein, 118 aa, Artificial Sequence
  Chemically Synthesized
QVQLQESGGGLVQAGGSLRLSCAASGYIFRYNGMGWYRQAPGKEREFVASIGWGAITYYADSVKGRFTISRDNAKNTVYLQMNSLKPEDTAVYYCAVEVDVYRRHPYWGQGTQVTVSS

SEQ ID NO: 31900 - protein, 118 aa, Artificial Sequence
  Chemically Synthesized
QVQLQESGGGLVQAGGSLRLSCAASGNISTRTPMGWYRQAPGKEREFVAAIDGGSTTNYADSVKGRFTISRDNAKNTVYLQMNSLKPEDTAVYYCAAWPSSVYRLDYWGQGTQVTVSS

SEQ ID NO: 31901 - protein, 122 aa, Artificial Sequence
  Chemically Synthesized
QVQLQESGGGLVQAGGSLRLSCAASGTISNFWAMGWYRQAPGKERELVATIDPGTTTNYADSVKGRFTISRDNAKNTVYLQMNSLKPEDTAVYYCAVFLLFIGQGVQRLRYWGQGTQVTVSS

SEQ ID NO: 31902 - protein, 125 aa, Artificial Sequence
  Chemically Synthesized
QVQLQESGGGLVQAGGSLRLSCAASGTISVTAFMGWYRQAPGKEREFVATIGYGVLPYADSVKGRFTISRDNAKNTVYLQMNSLKPEDTAVYYCAVVVYVTFDRYWWTPVTHSYWGQGTQVTVSS

SEQ ID NO: 31903 - protein, 125 aa, Artificial Sequence
  Chemically Synthesized
QVQLQESGGGLVQAGGSLRLSCAASGYISSLRPMGWYRQAPGKERELVATINGTTTNYADSVKGRFTISRDNAKNTVYLQMNSLKPEDTAVYYCAVAAYVSVPYRYYLYTSLDYWGQGTQVTVSS

SEQ ID NO: 31904 - protein, 118 aa, Artificial Sequence
  Chemically Synthesized
QVQLQESGGGLVQAGGSLRLSCAASGTISTIYVMGWYRQAPGKEREFVASISDGGTTNYADSVKGRFTISRDNAKNTVYLQMNSLKPEDTAVYYCAVRYYDPKDLVYWGQGTQVTVSS

SEQ ID NO: 31905 - protein, 118 aa, Artificial Sequence
  Chemically Synthesized
QVQLQESGGGLVQAGGSLRLSCAASGNIFVYGVMGWYRQAPGKERELVASIANGTTTYYADSVKGRFTISRDNAKNTVYLQMNSLKPEDTAVYYCAAKRGREDVYPYWGQGTQVTVSS

SEQ ID NO: 31906 - protein, 118 aa, Artificial Sequence
  Chemically Synthesized
QVQLQESGGGLVQAGGSLRLSCAASGNIFPTEIMGWYRQAPGKERELVASIGFGGITYYADSVKGRFTISRDNAKNTVYLQMNSLKPEDTAVYYCAVVIGAIRKYWYWGQGTQVTVSS

SEQ ID NO: 31907 - protein, 126 aa, Artificial Sequence
  Chemically Synthesized
QVQLQESGGGLVQAGGSLRLSCAASGNIFRFGIMGWYRQAPGKERELVASIGFGTTTNYADSVKGRFTISRDNAKNTVYLQMNSLKPEDTAVYYCAVDQDLVVYTIYDSARYHPYWGQGTQVTVSS

SEQ ID NO: 31908 - protein, 118 aa, Artificial Sequence
  Chemically Synthesized
QVQLQESGGGLVQAGGSLRLSCAASGYISPGYIMGWYRQAPGKEREFVASISQGSITYYADSVKGRFTISRDNAKNTVYLQMNSLKPEDTAVYYCAVYDDFVRDFFYWGQGTQVTVSS

SEQ ID NO: 31909 - protein, 117 aa, Artificial Sequence
  Chemically Synthesized
QVQLQESGGGLVQAGGSLRLSCAASGSISKWTRMGWYRQAPGKEREFVAGIDFGGTTYYADSVKGRFTISRDNAKNTVYLQMNSLKPEDTAVYYCALFLTSWLLLYWGQGTQVTVSS

SEQ ID NO: 31910 - protein, 126 aa, Artificial Sequence
  Chemically Synthesized
QVQLQESGGGLVQAGGSLRLSCAASGSIFGYATMGWYRQAPGKEREFVAAITRGTTTYYADSVKGRFTISRDNAKNTVYLQMNSLKPEDTAVYYCAVQWPRHHYREWYLRVHHPYWGQGTQVTVSS

SEQ ID NO: 31911 - protein, 118 aa, Artificial Sequence
  Chemically Synthesized
QVQLQESGGGLVQAGGSLRLSCAASGSIFYAQAMGWYRQAPGKEREFVATISGGGNTNYADSVKGRFTISRDNAKNTVYLQMNSLKPEDTAVYYCAADLLWSYALSYWGQGTQVTVSS

SEQ ID NO: 31912 - protein, 126 aa, Artificial Sequence
  Chemically Synthesized
QVQLQESGGGLVQAGGSLRLSCAASGYISGFVTMGWYRQAPGKERELVAAIGYGGNTYYADSVKGRFTISRDNAKNTVYLQMNSLKPEDTAVYYCAVALSSYLYEQPGVYYDHYYWGQGTQVTVSS

SEQ ID NO: 31913 - protein, 117 aa, Artificial Sequence
  Chemically Synthesized
QVQLQESGGGLVQAGGSLRLSCAASGTISGGTDMGWYRQAPGKERELVASIGDGAIPYADSVKGRFTISRDNAKNTVYLQMNSLKPEDTAVYYCAAYADSGYQLAYWGQGTQVTVSS

SEQ ID NO: 31914 - protein, 118 aa, Artificial Sequence
  Chemically Synthesized
QVQLQESGGGLVQAGGSLRLSCAASGTISRNVVMGWYRQAPGKERELVAAIGPGGTTYYADSVKGRFTISRDNAKNTVYLQMNSLKPEDTAVYYCAVVYDYVQDLVYWGQGTQVTVSS

SEQ ID NO: 31915 - protein, 118 aa, Artificial Sequence
  Chemically Synthesized
QVQLQESGGGLVQAGGSLRLSCAASGNISYAQYMGWYRQAPGKEREFVASITLGTTTYYADSVKGRFTISRDNAKNTVYLQMNSLKPEDTAVYYCAVDYYGVWYHLYWGQGTQVTVSS

SEQ ID NO: 31916 - protein, 118 aa, Artificial Sequence
  Chemically Synthesized
QVQLQESGGGLVQAGGSLRLSCAASGTISTYSTMGWYRQAPGKEREFVASITTGGTTNYADSVKGRFTISRDNAKNTVYLQMNSLKPEDTAVYYCAVNVYDDDVLFYWGQGTQVTVSS

SEQ ID NO: 31917 - protein, 125 aa, Artificial Sequence
  Chemically Synthesized
QVQLQESGGGLVQAGGSLRLSCAASGTIFSLSMGWYRQAPGKERELVAGIGYGTTTYYADSVKGRFTISRDNAKNTVYLQMNSLKPEDTAVYYCAVTNPSYDSTDVRPSGTHPYWGQGTQVTVSS

SEQ ID NO: 31918 - protein, 122 aa, Artificial Sequence
  Chemically Synthesized
QVQLQESGGGLVQAGGSLRLSCAASGNISGFDTMGWYRQAPGKERELVAAINGGGITNYADSVKGRFTISRDNAKNTVYLQMNSLKPEDTAVYYCAVGPYYTGNRQRFHGYWGQGTQVTVSS

SEQ ID NO: 31919 - protein, 117 aa, Artificial Sequence
  Chemically Synthesized
QVQLQESGGGLVQAGGSLRLSCAASGYISGTTMGWYRQAPGKEREFVAGIGSGSSTNYADSVKGRFTISRDNAKNTVYLQMNSLKPEDTAVYYCAAYYSDPHAYAYWGQGTQVTVSS

SEQ ID NO: 31920 - protein, 121 aa, Artificial Sequence
  Chemically Synthesized
QVQLQESGGGLVQAGGSLRLSCAASGNISDDGAMGWYRQAPGKEREFVASIDYGSNTNYADSVKGRFTISRDNAKNTVYLQMNSLKPEDTAVYYCAVGRDSDVQSTLTIYWGQGTQVTVSS

SEQ ID NO: 31921 - protein, 127 aa, Artificial Sequence
  Chemically Synthesized
QVQLQESGGGLVQAGGSLRLSCAASGYISQYDPYMGWYRQAPGKERELVAGISYGATTYYADSVKGRFTISRDNAKNTVYLQMNSLKPEDTAVYYCAVRAADVATRYDTYRYLYYYWGQGTQVTVSS

SEQ ID NO: 31922 - protein, 118 aa, Artificial Sequence
  Chemically Synthesized
QVQLQESGGGLVQAGGSLRLSCAASGTISDGLVMGWYRQAPGKERELVAAIGDGGNTYYADSVKGRFTISRDNAKNTVYLQMNSLKPEDTAVYYCAVFDTGNVRLIYWGQGTQVTVSS

SEQ ID NO: 31923 - protein, 122 aa, Artificial Sequence
  Chemically Synthesized
QVQLQESGGGLVQAGGSLRLSCAASGTISVRVYMGWYRQAPGKERELVASIGTGGSTNYADSVKGRFTISRDNAKNTVYLQMNSLKPEDTAVYYCAVHGNRYQTNSTYHPYWGQGTQVTVSS

SEQ ID NO: 31924 - protein, 126 aa, Artificial Sequence
  Chemically Synthesized
QVQLQESGGGLVQAGGSLRLSCAASGTIFQSDRMGWYRQAPGKERELVAAIDTGANTNYADSVKGRFTISRDNAKNTVYLQMNSLKPEDTAVYYCAVGDYAPNGGAWAYLRYHDYWGQGTQVTVSS

SEQ ID NO: 31925 - protein, 117 aa, Artificial Sequence
  Chemically Synthesized
QVQLQESGGGLVQAGGSLRLSCAASGTISGTYMGWYRQAPGKEREFVAAISFGGSTYYADSVKGRFTISRDNAKNTVYLQMNSLKPEDTAVYYCAVRYDRGHTYYYWGQGTQVTVSS

SEQ ID NO: 31926 - protein, 124 aa, Artificial Sequence
  Chemically Synthesized
QVQLQESGGGLVQAGGSLRLSCAASGNISPRPTMGWYRQAPGKEREFVAAINQGYLYADSVKGRFTISRDNAKNTVYLQMNSLKPEDTAVYYCAVRYIEHAYVLLFDTRLLVYWGQGTQVTVSS

SEQ ID NO: 31927 - protein, 115 aa, Artificial Sequence
  Chemically Synthesized
QVQLQESGGGLVQAGGSLRLSCAASGNISADPVMGWYRQAPGKERELVATIAGGATTYYADSVKGRFTISRDNAKNTVYLQMNSLKPEDTAVYYCARYKSYHRYWGQGTQVTVSS

SEQ ID NO: 31928 - protein, 119 aa, Artificial Sequence
  Chemically Synthesized
QVQLQESGGGLVQAGGSLRLSCAASGNISSYIYMGWYRQAPGKERELVAGIATGGITYYADSVKGRFTISRDNAKNTVYLQMNSLKPEDTAVYYCALTLLTTLLVVFYWGQGTQVTVSS

SEQ ID NO: 31929 - protein, 118 aa, Artificial Sequence
  Chemically Synthesized
QVQLQESGGGLVQAGGSLRLSCAASGYISGVTDMGWYRQAPGKEREFVAAIDTGGTTNYADSVKGRFTISRDNAKNTVYLQMNSLKPEDTAVYYCAATIYPSYDHGYWGQGTQVTVSS

SEQ ID NO: 31930 - protein, 114 aa, Artificial Sequence
  Chemically Synthesized
QVQLQESGGGLVQAGGSLRLSCAASGTISWSGFMGWYRQAPGKERELVATISNGGNTNYADSVKGRFTISRDNAKNTVYLQMNSLKPEDTAVYYCAVDYLGSYWGQGTQVTVSS

SEQ ID NO: 31931 - protein, 122 aa, Artificial Sequence
  Chemically Synthesized
QVQLQESGGGLVQAGGSLRLSCAASGTIFGIFAMGWYRQAPGKEREFVAAISGGGNTYYADSVKGRFTISRDNAKNTVYLQMNSLKPEDTAVYYCAAYYHIVHQDRNGYDYWGQGTQVTVSS

SEQ ID NO: 31932 - protein, 118 aa, Artificial Sequence
  Chemically Synthesized
QVQLQESGGGLVQAGGSLRLSCAASGTISIRDVMGWYRQAPGKEREFVAGIASGTNTYYADSVKGRFTISRDNAKNTVYLQMNSLKPEDTAVYYCAAIDAYGPRHGYWGQGTQVTVSS

SEQ ID NO: 31933 - protein, 122 aa, Artificial Sequence
  Chemically Synthesized
QVQLQESGGGLVQAGGSLRLSCAASGTISRHYYMGWYRQAPGKEREFVAAINDGAITYYADSVKGRFTISRDNAKNTVYLQMNSLKPEDTAVYYCAAYEGEIYYPRPYHRYWGQGTQVTVSS

SEQ ID NO: 31934 - protein, 118 aa, Artificial Sequence
  Chemically Synthesized
QVQLQESGGGLVQAGGSLRLSCAASGNISSQYTMGWYRQAPGKERELVAAISDGGSTNYADSVKGRFTISRDNAKNTVYLQMNSLKPEDTAVYYCAADYPDDAAYVYWGQGTQVTVSS

SEQ ID NO: 31935 - protein, 118 aa, Artificial Sequence
  Chemically Synthesized
QVQLQESGGGLVQAGGSLRLSCAASGSISAPDNMGWYRQAPGKEREFVAGINVGASTNYADSVKGRFTISRDNAKNTVYLQMNSLKPEDTAVYYCAVPYHGDYAHRYWGQGTQVTVSS

SEQ ID NO: 31936 - protein, 109 aa, Artificial Sequence
  Chemically Synthesized
QVQLQESGGGLVQAGGSLRLSCAASGYISDYERMGWYRQAPGKERELVAYADSVKGRFTISRDNAKNTVYLQMNSLKPEDTAVYYCAVYGDVPLPFGYWGQGTQVTVSS

SEQ ID NO: 31937 - protein, 126 aa, Artificial Sequence
  Chemically Synthesized
QVQLQESGGGLVQAGGSLRLSCAASGSIFDASIMGWYRQAPGKEREFVATIDDGTTTNYADSVKGRFTISRDNAKNTVYLQMNSLKPEDTAVYYCAVYDDYYLKARDENGSDHDYWGQGTQVTVSS

SEQ ID NO: 31938 - protein, 118 aa, Artificial Sequence
  Chemically Synthesized
QVQLQESGGGLVQAGGSLRLSCAASGTIFPYYYMGWYRQAPGKEREFVASISIGAITYYADSVKGRFTISRDNAKNTVYLQMNSLKPEDTAVYYCAVWVYVYGELRYWGQGTQVTVSS

SEQ ID NO: 31939 - protein, 118 aa, Artificial Sequence
  Chemically Synthesized
QVQLQESGGGLVQAGGSLRLSCAASGTISPAFLMGWYRQAPGKERELVATISVGTNTYYADSVKGRFTISRDNAKNTVYLQMNSLKPEDTAVYYCAVRYVTYYSHSYWGQGTQVTVSS

SEQ ID NO: 31940 - protein, 118 aa, Artificial Sequence
  Chemically Synthesized
QVQLQESGGGLVQAGGSLRLSCAASGNIFAGSYMGWYRQAPGKERELVATISRGGITYYADSVKGRFTISRDNAKNTVYLQMNSLKPEDTAVYYCAALVPYYGGYPYWGQGTQVTVSS

SEQ ID NO: 31941 - protein, 118 aa, Artificial Sequence
  Chemically Synthesized
QVQLQESGGGLVQAGGSLRLSCAASGTIFLGLYMGWYRQAPGKERELVATIAFGSNTNYADSVKGRFTISRDNAKNTVYLQMNSLKPEDTAVYYCAARPYYVYTYYYWGQGTQVTVSS

SEQ ID NO: 31942 - protein, 116 aa, Artificial Sequence
  Chemically Synthesized
QVQLQESGGGLVQAGGSLRLSCAASGSISDDTMGWYRQAPGKERELVATIGYGGSTYYADSVKGRFTISRDNAKNTVYLQMNSLKPEDTAVYYCAVTWGNYSLFYWGQGTQVTVSS

SEQ ID NO: 31943 - protein, 118 aa, Artificial Sequence
  Chemically Synthesized
QVQLQESGGGLVQAGGSLRLSCAASGTISYALIMGWYRQAPGKERELVASIGPGSSTYYADSVKGRFTISRDNAKNTVYLQMNSLKPEDTAVYYCAVYKDPYDVYRYWGQGTQVTVSS

SEQ ID NO: 31944 - protein, 118 aa, Artificial Sequence
  Chemically Synthesized
QVQLQESGGGLVQAGGSLRLSCAASGSISTTAFMGWYRQAPGKERELVATINYGGTTNYADSVKGRFTISRDNAKNTVYLQMNSLKPEDTAVYYCAVGPYEYGYFYYWGQGTQVTVSS

SEQ ID NO: 31945 - protein, 120 aa, Artificial Sequence
  Chemically Synthesized
QVQLQESGGGLVQAGGSLRLSCAASGTIFPNDYMGWYRQAPGKERELVAAIDFGSSTNYADSVKGRFTISRDNAKNTVYLQMNSLKPEDTAVYYCAVDQTQFDKTGFAYWGQGTQVTVSS

SEQ ID NO: 31946 - protein, 121 aa, Artificial Sequence
  Chemically Synthesized
QVQLQESGGGLVQAGGSLRLSCAASGNIFYDLVMGWYRQAPGKEREFVATIDSGSSTNYADSVKGRFTISRDNAKNTVYLQMNSLKPEDTAVYYCAVSTLLVTSCTSSFYWGQGTQVTVSS

SEQ ID NO: 31947 - protein, 116 aa, Artificial Sequence
  Chemically Synthesized
QVQLQESGGGLVQAGGSLRLSCAASGNIFYIAVMGWYRQAPGKEREFVATIAPGANTYYADSVKGRFTISRDNAKNTVYLQMNSLKPEDTAVYYCAAYLPQNFAYWGQGTQVTVSS

SEQ ID NO: 31948 - protein, 118 aa, Artificial Sequence
  Chemically Synthesized
QVQLQESGGGLVQAGGSLRLSCAASGSISDDDTMGWYRQAPGKERELVATIARGAITNYADSVKGRFTISRDNAKNTVYLQMNSLKPEDTAVYYCAVYTSGRASYAYWGQGTQVTVSS

SEQ ID NO: 31949 - protein, 118 aa, Artificial Sequence
  Chemically Synthesized
QVQLQESGGGLVQAGGSLRLSCAASGNISRVSYMGWYRQAPGKERELVASISTGGSTYYADSVKGRFTISRDNAKNTVYLQMNSLKPEDTAVYYCAVSSGDADYFVYWGQGTQVTVSS

SEQ ID NO: 31950 - protein, 118 aa, Artificial Sequence
  Chemically Synthesized
QVQLQESGGGLVQAGGSLRLSCAASGTISDSWYMGWYRQAPGKEREFVASIDYGGSTYYADSVKGRFTISRDNAKNTVYLQMNSLKPEDTAVYYCAVNYNYYPYHDYWGQGTQVTVSS

SEQ ID NO: 31951 - protein, 116 aa, Artificial Sequence
  Chemically Synthesized
QVQLQESGGGLVQAGGSLRLSCAASGTISVSMGWYRQAPGKEREFVAGISYGGNTNYADSVKGRFTISRDNAKNTVYLQMNSLKPEDTAVYYCAARIEDLRDYFYWGQGTQVTVSS

SEQ ID NO: 31952 - protein, 122 aa, Artificial Sequence
  Chemically Synthesized
QVQLQESGGGLVQAGGSLRLSCAASGSIFPGGYMGWYRQAPGKERELVAAIARGTITYYADSVKGRFTISRDNAKNTVYLQMNSLKPEDTAVYYCAVGDGDANYRYGSYRYWGQGTQVTVSS

SEQ ID NO: 31953 - protein, 122 aa, Artificial Sequence
  Chemically Synthesized
QVQLQESGGGLVQAGGSLRLSCAASGTIFENYEMGWYRQAPGKEREFVAAINSGASTNYADSVKGRFTISRDNAKNTVYLQMNSLKPEDTAVYYCAASYYGHGRTWDTHYYWGQGTQVTVSS

SEQ ID NO: 31954 - protein, 121 aa, Artificial Sequence
  Chemically Synthesized
QVQLQESGGGLVQAGGSLRLSCAASGSIFADYRMGWYRQAPGKERELLPVLIRVYYLYADSVKGRFTISRDNAKNTVYLQMNSLKPEDTAVYYCAVPTDYDTPVTVYYRYWGQGTQVTVSS

SEQ ID NO: 31955 - protein, 118 aa, Artificial Sequence
  Chemically Synthesized
QVQLQESGGGLVQAGGSLRLSCAASGNIFRGRHMGWYRQAPGKERELVASIDRGANTYYADSVKGRFTISRDNAKNTVYLQMNSLKPEDTAVYYCAAYKFRSPYLAYWGQGTQVTVSS

SEQ ID NO: 31956 - protein, 122 aa, Artificial Sequence
  Chemically Synthesized
QVQLQESGGGLVQAGGSLRLSCAASGNISDVRSMGWYRQAPGKERELVATIDTGTTTYYADSVKGRFTISRDNAKNTVYLQMNSLKPEDTAVYYCAAPDWVRYGVYGDYGYWGQGTQVTVSS

SEQ ID NO: 31957 - protein, 122 aa, Artificial Sequence
  Chemically Synthesized
QVQLQESGGGLVQAGGSLRLSCAASGYISYPIGMGWYRQAPGKERELVASISRGTSTYYADSVKGRFTISRDNAKNTVYLQMNSLKPEDTAVYYCAVIWVVDDYDGLSHAYWGQGTQVTVSS

SEQ ID NO: 31958 - protein, 121 aa, Artificial Sequence
  Chemically Synthesized
QVQLQESGGGLVQAGGSLRLSCAASGTIFDSWYMGWYRQAPGKEREFVASISYGSITYYADSVKGRFTISRDNAKNTVYLQMNSLKPEDTAVYYCAVPAIGYVDEFGHLYWGQGTQVTVSS

SEQ ID NO: 31959 - protein, 122 aa, Artificial Sequence
  Chemically Synthesized
QVQLQESGGGLVQAGGSLRLSCAASGTIFGGYDMGWYRQAPGKEREFVATITDGATTYYADSVKGRFTISRDNAKNTVYLQMNSLKPEDTAVYYCAVDVDYAYLHFIGHIYWGQGTQVTVSS

SEQ ID NO: 31960 - protein, 118 aa, Artificial Sequence
  Chemically Synthesized
QVQLQESGGGLVQAGGSLRLSCAASGSISEGEQMGWYRQAPGKEREFVATINAGTSTNYADSVKGRFTISRDNAKNTVYLQMNSLKPEDTAVYYCAVVPFTHAYLTYWGQGTQVTVSS

SEQ ID NO: 31961 - protein, 118 aa, Artificial Sequence
  Chemically Synthesized
QVQLQESGGGLVQAGGSLRLSCAASGTISVDDYMGWYRQAPGKERELVAGIAAGANTNYADSVKGRFTISRDNAKNTVYLQMNSLKPEDTAVYYCAVQYDIAPYHTYWGQGTQVTVSS

SEQ ID NO: 31962 - protein, 122 aa, Artificial Sequence
  Chemically Synthesized
QVQLQESGGGLVQAGGSLRLSCAASGSIFAYTVMGWYRQAPGKEREFVASITFGTITNYADSVKGRFTISRDNAKNTVYLQMNSLKPEDTAVYYCAVYNIHQYYTTAALVYWGQGTQVTVSS

SEQ ID NO: 31963 - protein, 110 aa, Artificial Sequence
  Chemically Synthesized
QVQLQESGGGLVQAGGSLRLSCAASGYIFDANVMGWYRQAPGKERELVASIDQGATTNYADSVKGRFTISRDNAKNTVYLQMNSLKPEDTAVYYCAFMYWGQGTQVTVSS

SEQ ID NO: 31964 - protein, 122 aa, Artificial Sequence
  Chemically Synthesized
QVQLQESGGGLVQAGGSLRLSCAASGSISRDAYMGWYRQAPGKEREFVASINTGGITYYADSVKGRFTISRDNAKNTVYLQMNSLKPEDTAVYYCAVPRYYYVGFGYVYYYWGQGTQVTVSS

SEQ ID NO: 31965 - protein, 122 aa, Artificial Sequence
  Chemically Synthesized
QVQLQESGGGLVQAGGSLRLSCAASGYISGRWVMGWYRQAPGKERELVAAIGQGTNTYYADSVKGRFTISRDNAKNTVYLQMNSLKPEDTAVYYCAVTVDVAIRPRKVYYYWGQGTQVTVSS

SEQ ID NO: 31966 - protein, 122 aa, Artificial Sequence
  Chemically Synthesized
QVQLQESGGGLVQAGGSLRLSCAASGSIFRYIAMGWYRQAPGKEREFVATIDEGGSTYYADSVKGRFTISRDNAKNTVYLQMNSLKPEDTAVYYCAASRIDVTNNARYLDYWGQGTQVTVSS

SEQ ID NO: 31967 - protein, 118 aa, Artificial Sequence
  Chemically Synthesized
QVQLQESGGGLVQAGGSLRLSCAASGTIFSTRSMGWYRQAPGKERELVASIGDGANTNYADSVKGRFTISRDNAKNTVYLQMNSLKPEDTAVYYCAVIRRRPGPLIYWGQGTQVTVSS

SEQ ID NO: 31968 - protein, 108 aa, Artificial Sequence
  Chemically Synthesized
QVQLQESGGGLVQAGGSLRLSCAASGYIFYVPMGWYRQAPGKEREFVATITYGTSTYADSVKGRFTISRDNAKNTVYLQMNSLKPEDTAVYYCAVIYWGQGTQVTVSS

SEQ ID NO: 31969 - protein, 115 aa, Artificial Sequence
  Chemically Synthesized
QVQLQESGGGLVQAGGSLRLSCAASGSIFPYFMGWYRQAPGKEREFVAAIGHGSITNYADSVKGRFTISRDNAKNTVYLQMNSLKPEDTAVYYCAVGDLNYYLYWGQGTQVTVSS

SEQ ID NO: 31970 - protein, 121 aa, Artificial Sequence
  Chemically Synthesized
QVQLQESGGGLVQAGGSLRLSCAASGTISPPAYMGWYRQAPGKERELVASISYGGTTYYADSVKGRFTISRDNAKNTVYLQMNSLKPEDTAVYYCAVSFAVYPGDDLFAYWGQGTQVTVSS

SEQ ID NO: 31971 - protein, 116 aa, Artificial Sequence
  Chemically Synthesized
QVQLQESGGGLVQAGGSLRLSCAASGNIFRRRNMGWYRQAPGKERELVAAITTGSTTYYADSVKGRFTISRDNAKNTVYLQMNSLKPEDTAVYYCAIRRTYYLDYWGQGTQVTVSS

SEQ ID NO: 31972 - protein, 121 aa, Artificial Sequence
  Chemically Synthesized
QVQLQESGGGLVQAGGSLRLSCAASGSISDVSMGWYRQAPGKEREFVATIDIGSTTNYADSVKGRFTISRDNAKNTVYLQMNSLKPEDTAVYYCAAVLGGRYLGPDGHVYWGQGTQVTVSS

SEQ ID NO: 31973 - protein, 122 aa, Artificial Sequence
  Chemically Synthesized
QVQLQESGGGLVQAGGSLRLSCAASGNIFAHTTMGWYRQAPGKEREFVATINYGATTYYADSVKGRFTISRDNAKNTVYLQMNSLKPEDTAVYYCAVDLLELYGTIYDFVYWGQGTQVTVSS

SEQ ID NO: 31974 - protein, 118 aa, Artificial Sequence
  Chemically Synthesized
QVQLQESGGGLVQAGGSLRLSCAASGYISYWNVMGWYRQAPGKEREFVAAIGHGSNTYYADSVKGRFTISRDNAKNTVYLQMNSLKPEDTAVYYCAVHYRYLWAHWYWGQGTQVTVSS

SEQ ID NO: 31975 - protein, 127 aa, Artificial Sequence
  Chemically Synthesized
QVQLQESGGGLVQAGGSLRLSCAASGTIFSPGQFMGWYRQAPGKERELVAAIGPGGITYYADSVKGRFTISRDNAKNTVYLQMNSLKPEDTAVYYCAVYRDDDVHGDKQGTRIFGYWGQGTQVTVSS

SEQ ID NO: 31976 - protein, 122 aa, Artificial Sequence
  Chemically Synthesized
QVQLQESGGGLVQAGGSLRLSCAASGSIFLGQVMGWYRQAPGKERELVAGINIGGSTYYADSVKGRFTISRDNAKNTVYLQMNSLKPEDTAVYYCAAVYAEYGLSDDAYDYWGQGTQVTVSS

SEQ ID NO: 31977 - protein, 118 aa, Artificial Sequence
  Chemically Synthesized
QVQLQESGGGLVQAGGSLRLSCAASGYISNSGYMGWYRQAPGKERELVAAIAGGSNTYYADSVKGRFTISRDNAKNTVYLQMNSLKPEDTAVYYCAVDDYYGGLYGYWGQGTQVTVSS

SEQ ID NO: 31978 - protein, 110 aa, Artificial Sequence
  Chemically Synthesized
QVQLQESGGGLVQAGGSLRLSCAASGTIFPAADMGWYRQAPGKEREFVAAIAYGASTYYADSVKGRFTISRDNAKNTVYLQMNSLKPEDTAVYYCAVLYWGQGTQVTVSS

SEQ ID NO: 31979 - protein, 118 aa, Artificial Sequence
  Chemically Synthesized
QVQLQESGGGLVQAGGSLRLSCAASGYIFTPYDMGWYRQAPGKERELVASISRGGTTYYADSVKGRFTISRDNAKNTVYLQMNSLKPEDTAVYYCAATDQSAQFYQYWGQGTQVTVSS

SEQ ID NO: 31980 - protein, 118 aa, Artificial Sequence
  Chemically Synthesized
QVQLQESGGGLVQAGGSLRLSCAASGNISDYNYMGWYRQAPGKERELVAAISSGSSTYYADSVKGRFTISRDNAKNTVYLQMNSLKPEDTAVYYCAVLRTYDTDGLYWGQGTQVTVSS

SEQ ID NO: 31981 - protein, 117 aa, Artificial Sequence
  Chemically Synthesized
QVQLQESGGGLVQAGGSLRLSCAASGNIFHWAWMGWYRQAPGKEREFVATISYGASTYYADSVKGRFTISRDNAKNTVYLQMNSLKPEDTAVYYCAVYRGDERAYYWGQGTQVTVSS

SEQ ID NO: 31982 - protein, 121 aa, Artificial Sequence
  Chemically Synthesized
QVQLQESGGGLVQAGGSLRLSCAASGTISSLTMGWYRQAPGKEREFVAGIASGSTTYYADSVKGRFTISRDNAKNTVYLQMNSLKPEDTAVYYCAVVSTHVDEAYWYFVYWGQGTQVTVSS

SEQ ID NO: 31983 - protein, 121 aa, Artificial Sequence
  Chemically Synthesized
QVQLQESGGGLVQAGGSLRLSCAASGSIFTADGMGWYRQAPGKERELVASIASGAITYYADSVKGRFTISRDNAKNTVYLQMNSLKPEDTAVYYCAARVGGVSLSTTCFYWGQGTQVTVSS

SEQ ID NO: 31984 - protein, 122 aa, Artificial Sequence
  Chemically Synthesized
QVQLQESGGGLVQAGGSLRLSCAASGTISGQVLMGWYRQAPGKEREFVAAITVGSNTNYADSVKGRFTISRDNAKNTVYLQMNSLKPEDTAVYYCAVDWYSTPGTRDTLLYWGQGTQVTVSS

SEQ ID NO: 31985 - protein, 122 aa, Artificial Sequence
  Chemically Synthesized
QVQLQESGGGLVQAGGSLRLSCAASGTIFDYGAMGWYRQAPGKERELVATIGNGATTNYADSVKGRFTISRDNAKNTVYLQMNSLKPEDTAVYYCAVDEIDGDDWEFRYYYWGQGTQVTVSS

SEQ ID NO: 31986 - protein, 117 aa, Artificial Sequence
  Chemically Synthesized
QVQLQESGGGLVQAGGSLRLSCAASGSISRSTMGWYRQAPGKEREFVAAITGGASTNYADSVKGRFTISRDNAKNTVYLQMNSLKPEDTAVYYCAVHDQRVLYHGYWGQGTQVTVSS

SEQ ID NO: 31987 - protein, 116 aa, Artificial Sequence
  Chemically Synthesized
QVQLQESGGGLVQAGGSLRLSCAASGSIFTTRMGWYRQAPGKEREFVAAIDLGATTNYADSVKGRFTISRDNAKNTVYLQMNSLKPEDTAVYYCAVLVVITTCIYWGQGTQVTVSS

SEQ ID NO: 31988 - protein, 124 aa, Artificial Sequence
  Chemically Synthesized
QVQLQESGGGLVQAGGSLRLSCAASGTIFGYMGWYRQAPGKERELVATISDGSITYYADSVKGRFTISRDNAKNTVYLQMNSLKPEDTAVYYCAAYEGWHPATANGYEYTHRYWGQGTQVTVSS

SEQ ID NO: 31989 - protein, 109 aa, Artificial Sequence
  Chemically Synthesized
QVQLQESGGGLVQAGGSLRLSCAASGTISDHDYMGWYRQAPGKERELVAYADSVKGRFTISRDNAKNTVYLQMNSLKPEDTAVYYCAVDDITYTHHAYWGQGTQVTVSS

SEQ ID NO: 31990 - protein, 110 aa, Artificial Sequence
  Chemically Synthesized
QVQLQESGGGLVQAGGSLRLSCAASGNISSDVYMGWYRQAPGKEREFVATINYGSSTNYADSVKGRFTISRDNAKNTVYLQMNSLKPEDTAVYYCALSYWGQGTQVTVSS

SEQ ID NO: 31991 - protein, 120 aa, Artificial Sequence
  Chemically Synthesized
QVQLQESGGGLVQAGGSLRLSCAASGNISAISPMGWYRQAPGKEREFVAAISIGTTTNYADSVKGRFTISRDNAKNTVYLQMNSLKPEDTAVYYCAVRVVGGLQSTGMYWGQGTQVTVSS

SEQ ID NO: 31992 - protein, 126 aa, Artificial Sequence
  Chemically Synthesized
QVQLQESGGGLVQAGGSLRLSCAASGSISGGSAMGWYRQAPGKEREFVAGISWGSNTYYADSVKGRFTISRDNAKNTVYLQMNSLKPEDTAVYYCAAERYFVGKWIPTIKYSFDYWGQGTQVTVSS

SEQ ID NO: 31993 - protein, 118 aa, Artificial Sequence
  Chemically Synthesized
QVQLQESGGGLVQAGGSLRLSCAASGYIFVRSSMGWYRQAPGKEREFVAAIDRGTITNYADSVKGRFTISRDNAKNTVYLQMNSLKPEDTAVYYCAADVTDNLVLPYWGQGTQVTVSS

SEQ ID NO: 31994 - protein, 126 aa, Artificial Sequence
  Chemically Synthesized
QVQLQESGGGLVQAGGSLRLSCAASGNISTASAMGWYRQAPGKEREFVASISRGGTTNYADSVKGRFTISRDNAKNTVYLQMNSLKPEDTAVYYCAAYPYLRYVYADQQYDFHIYWGQGTQVTVSS

SEQ ID NO: 31995 - protein, 118 aa, Artificial Sequence
  Chemically Synthesized
QVQLQESGGGLVQAGGSLRLSCAASGTIFVLGYMGWYRQAPGKEREFVAGITQGSNTYYADSVKGRFTISRDNAKNTVYLQMNSLKPEDTAVYYCAVKSWGHGVLHYWGQGTQVTVSS

SEQ ID NO: 31996 - protein, 121 aa, Artificial Sequence
  Chemically Synthesized
QVQLQESGGGLVQAGGSLRLSCAASGSIFTLTMGWYRQAPGKERELVAAISGGTSTYYADSVKGRFTISRDNAKNTVYLQMNSLKPEDTAVYYCAVAHEVYPPTYPAHAYWGQGTQVTVSS

SEQ ID NO: 31997 - protein, 126 aa, Artificial Sequence
  Chemically Synthesized
QVQLQESGGGLVQAGGSLRLSCAASGTISRSRYMGWYRQAPGKERELVASIADGASTNYADSVKGRFTISRDNAKNTVYLQMNSLKPEDTAVYYCATYSYLPAWLESKFDVVFAYWGQGTQVTVSS

SEQ ID NO: 31998 - protein, 117 aa, Artificial Sequence
  Chemically Synthesized
QVQLQESGGGLVQAGGSLRLSCAASGSIFYQRGMGWYRQAPGKEREFVATISDGGITNYADSVKGRFTISRDNAKNTVYLQMNSLKPEDTAVYYCAVDPYSLTLLYWGQGTQVTVSS

SEQ ID NO: 31999 - protein, 118 aa, Artificial Sequence
  Chemically Synthesized
QVQLQESGGGLVQAGGSLRLSCAASGYISDSGAMGWYRQAPGKEREFVAGIAGGTTTNYADSVKGRFTISRDNAKNTVYLQMNSLKPEDTAVYYCAVNHHWAWKHPYWGQGTQVTVSS

SEQ ID NO: 32000 - protein, 118 aa, Artificial Sequence
  Chemically Synthesized
QVQLQESGGGLVQAGGSLRLSCAASGTIFYVYVMGWYRQAPGKERELVAAIASGASTNYADSVKGRFTISRDNAKNTVYLQMNSLKPEDTAVYYCAVADLYRTDHAYWGQGTQVTVSS

SEQ ID NO: 32001 - protein, 118 aa, Artificial Sequence
  Chemically Synthesized
QVQLQESGGGLVQAGGSLRLSCAASGNIFWLRRMGWYRQAPGKERELVATIGRGSSTYYADSVKGRFTISRDNAKNTVYLQMNSLKPEDTAVYYCAARETGRWAHPYWGQGTQVTVSS

SEQ ID NO: 32002 - protein, 122 aa, Artificial Sequence
  Chemically Synthesized
QVQLQESGGGLVQAGGSLRLSCAASGTISHWYYMGWYRQAPGKEREFVASINDGSNTNYADSVKGRFTISRDNAKNTVYLQMNSLKPEDTAVYYCAVILYLKGDHYDGHPYWGQGTQVTVSS

SEQ ID NO: 32003 - protein, 118 aa, Artificial Sequence
  Chemically Synthesized
QVQLQESGGGLVQAGGSLRLSCAASGTISPLQYMGWYRQAPGKEREFVASINSGTITNYADSVKGRFTISRDNAKNTVYLQMNSLKPEDTAVYYCAVDLYQGLWLNYWGQGTQVTVSS

SEQ ID NO: 32004 - protein, 118 aa, Artificial Sequence
  Chemically Synthesized
QVQLQESGGGLVQAGGSLRLSCAASGTISGAYLMGWYRQAPGKEREFVATITWGTTTYYADSVKGRFTISRDNAKNTVYLQMNSLKPEDTAVYYCAVGNNSYAILNYWGQGTQVTVSS

SEQ ID NO: 32005 - protein, 118 aa, Artificial Sequence
  Chemically Synthesized
QVQLQESGGGLVQAGGSLRLSCAASGNISGAIWMGWYRQAPGKERELVAGISAGGTTNYADSVKGRFTISRDNAKNTVYLQMNSLKPEDTAVYYCAVPSQQYWVHAYWGQGTQVTVSS

SEQ ID NO: 32006 - protein, 118 aa, Artificial Sequence
  Chemically Synthesized
QVQLQESGGGLVQAGGSLRLSCAASGTIFTWITMGWYRQAPGKERELVAAINYGAITYYADSVKGRFTISRDNAKNTVYLQMNSLKPEDTAVYYCAVRKTRGVGLSYWGQGTQVTVSS

SEQ ID NO: 32007 - protein, 121 aa, Artificial Sequence
  Chemically Synthesized
QVQLQESGGGLVQAGGSLRLSCAASGTISQGVFMGWYRQAPGKEREFVASINYGANTYYADSVKGRFTISRDNAKNTVYLQMNSLKPEDTAVYYCAAWYRGGSDYLSLDYWGQGTQVTVSS

SEQ ID NO: 32008 - protein, 126 aa, Artificial Sequence
  Chemically Synthesized
QVQLQESGGGLVQAGGSLRLSCAASGNIFYSRRMGWYRQAPGKERELVASITWGASTNYADSVKGRFTISRDNAKNTVYLQMNSLKPEDTAVYYCAVRYTTYGFTPPARGDLYRYWGQGTQVTVSS

SEQ ID NO: 32009 - protein, 117 aa, Artificial Sequence
  Chemically Synthesized
QVQLQESGGGLVQAGGSLRLSCAASGSIFVDTSMGWYRQAPGKEREFVASIDSVVIPYADSVKGRFTISRDNAKNTVYLQMNSLKPEDTAVYYCAVDYSPDGYHGYWGQGTQVTVSS

SEQ ID NO: 32010 - protein, 110 aa, Artificial Sequence
  Chemically Synthesized
QVQLQESGGGLVQAGGSLRLSCAASGSIFHQLSMGWYRQAPGKEREFVASISHGANTNYADSVKGRFTISRDNAKNTVYLQMNSLKPEDTAVYYCAAEYWGQGTQVTVSS

SEQ ID NO: 32011 - protein, 118 aa, Artificial Sequence
  Chemically Synthesized
QVQLQESGGGLVQAGGSLRLSCAASGYIFGTLFMGWYRQAPGKERELVAAISYGGTTNYADSVKGRFTISRDNAKNTVYLQMNSLKPEDTAVYYCAAFRQNYRAHLYWGQGTQVTVSS

SEQ ID NO: 32012 - protein, 122 aa, Artificial Sequence
  Chemically Synthesized
QVQLQESGGGLVQAGGSLRLSCAASGNIFPASTMGWYRQAPGKEREFVATITGGGTTNYADSVKGRFTISRDNAKNTVYLQMNSLKPEDTAVYYCAVWLLYWPYIIYPYRYWGQGTQVTVSS

SEQ ID NO: 32013 - protein, 118 aa, Artificial Sequence
  Chemically Synthesized
QVQLQESGGGLVQAGGSLRLSCAASGNISLGYSMGWYRQAPGKEREFVAAIAVGTTTNYADSVKGRFTISRDNAKNTVYLQMNSLKPEDTAVYYCAVYRYRYTWLHYWGQGTQVTVSS

SEQ ID NO: 32014 - protein, 118 aa, Artificial Sequence
  Chemically Synthesized
QVQLQESGGGLVQAGGSLRLSCAASGNIFDAYDMGWYRQAPGKEREFVAGITYGSTTNYADSVKGRFTISRDNAKNTVYLQMNSLKPEDTAVYYCAAPPSPLSDLAYWGQGTQVTVSS

SEQ ID NO: 32015 - protein, 113 aa, Artificial Sequence
  Chemically Synthesized
QVQLQESGGGLVQAGGSLRLSCAASGNIFHSASMGWYRQAPGKERELVAGIADGATTYYADSVKGRFTISRDNAKNTVYLQMNSLKPEDTAVYYCAYWNLPYWGQGTQVTVSS

SEQ ID NO: 32016 - protein, 118 aa, Artificial Sequence
  Chemically Synthesized
QVQLQESGGGLVQAGGSLRLSCAASGTISTYVYMGWYRQAPGKERELVAAIDPGGITYYADSVKGRFTISRDNAKNTVYLQMNSLKPEDTAVYYCAADDSDADDHLYWGQGTQVTVSS

SEQ ID NO: 32017 - protein, 118 aa, Artificial Sequence
  Chemically Synthesized
QVQLQESGGGLVQAGGSLRLSCAASGSIFGYRTMGWYRQAPGKEREFVASIDYGGNTNYADSVKGRFTISRDNAKNTVYLQMNSLKPEDTAVYYCAVNRRFDEQHVYWGQGTQVTVSS

SEQ ID NO: 32018 - protein, 117 aa, Artificial Sequence
  Chemically Synthesized
QVQLQESGGGLVQAGGSLRLSCAASGNIFGYVGMGWYRQAPGKERELVAAISDGAITNYADSVKGRFTISRDNAKNTVYLQMNSLKPEDTAVYYCAVGYGRASTIYWGQGTQVTVSS

SEQ ID NO: 32019 - protein, 118 aa, Artificial Sequence
  Chemically Synthesized
QVQLQESGGGLVQAGGSLRLSCAASGYISYPYAMGWYRQAPGKEREFVASITKGTTTYYADSVKGRFTISRDNAKNTVYLQMNSLKPEDTAVYYCAVPYAGTSGFYYWGQGTQVTVSS

SEQ ID NO: 32020 - protein, 118 aa, Artificial Sequence
  Chemically Synthesized
QVQLQESGGGLVQAGGSLRLSCAASGYIFFTWPMGWYRQAPGKERELVASINVGSSTYYADSVKGRFTISRDNAKNTVYLQMNSLKPEDTAVYYCAASLDYPLYHSYWGQGTQVTVSS

SEQ ID NO: 32021 - protein, 116 aa, Artificial Sequence
  Chemically Synthesized
QVQLQESGGGLVQAGGSLRLSCAASGTISDSYYMGWYRQAPGKERELVAGIDLGGTTYYADSVKGRFTISRDNAKNTVYLQMNSLKPEDTAVYYCAVVDPQYHIYWGQGTQVTVSS

SEQ ID NO: 32022 - protein, 122 aa, Artificial Sequence
  Chemically Synthesized
QVQLQESGGGLVQAGGSLRLSCAASGTISETGYMGWYRQAPGKERELVAAIDPGGSTNYADSVKGRFTISRDNAKNTVYLQMNSLKPEDTAVYYCAVAGYYGTLTDDYYLYWGQGTQVTVSS

SEQ ID NO: 32023 - protein, 118 aa, Artificial Sequence
  Chemically Synthesized
QVQLQESGGGLVQAGGSLRLSCAASGTIFTVGYMGWYRQAPGKERELVAAISRGGTTYYADSVKGRFTISRDNAKNTVYLQMNSLKPEDTAVYYCAVYGEYEYAFYYWGQGTQVTVSS

SEQ ID NO: 32024 - protein, 126 aa, Artificial Sequence
  Chemically Synthesized
QVQLQESGGGLVQAGGSLRLSCAASGNIFDTLVMGWYRQAPGKERELVASIAIGGNTNYADSVKGRFTISRDNAKNTVYLQMNSLKPEDTAVYYCAVFYWGAGITDDLTDPRHSYWGQGTQVTVSS

SEQ ID NO: 32025 - protein, 122 aa, Artificial Sequence
  Chemically Synthesized
QVQLQESGGGLVQAGGSLRLSCAASGTISTANYMGWYRQAPGKERELVASISYGGITNYADSVKGRFTISRDNAKNTVYLQMNSLKPEDTAVYYCAVYVASDFYDRAGFSYWGQGTQVTVSS

SEQ ID NO: 32026 - protein, 121 aa, Artificial Sequence
  Chemically Synthesized
QVQLQESGGGLVQAGGSLRLSCAASGTISAFLRMGWYRQAPGKEREFVASIAGGGSTYYADSVKGRFTISRDNAKNTVYLQMNSLKPEDTAVYYCAVYYTDDSSLTLTFYWGQGTQVTVSS

SEQ ID NO: 32027 - protein, 118 aa, Artificial Sequence
  Chemically Synthesized
QVQLQESGGGLVQAGGSLRLSCAASGTIFDVEYMGWYRQAPGKEREFVAAISFGAITYYADSVKGRFTISRDNAKNTVYLQMNSLKPEDTAVYYCAVDGWYADSYLYWGQGTQVTVSS

SEQ ID NO: 32028 - protein, 119 aa, Artificial Sequence
  Chemically Synthesized
QVQLQESGGGLVQAGGSLRLSCAASGYISSLPHMGWYRQAPGKERELVASIAIGAITNYADSVKGRFTISRDNAKNTVYLQMNSLKPEDTAVYYCAVDIYVYYYYDGYWGQGTQVTVSS

SEQ ID NO: 32029 - protein, 117 aa, Artificial Sequence
  Chemically Synthesized
QVQLQESGGGLVQAGGSLRLSCAASGNISWVRMGWYRQAPGKEREFVASINKGGITYYADSVKGRFTISRDNAKNTVYLQMNSLKPEDTAVYYCAAWDGRVNRYWYWGQGTQVTVSS

SEQ ID NO: 32030 - protein, 118 aa, Artificial Sequence
  Chemically Synthesized
QVQLQESGGGLVQAGGSLRLSCAASGSISELDYMGWYRQAPGKERELVAAIASGASTYYADSVKGRFTISRDNAKNTVYLQMNSLKPEDTAVYYCAAWHPRTYPLDYWGQGTQVTVSS

SEQ ID NO: 32031 - protein, 117 aa, Artificial Sequence
  Chemically Synthesized
QVQLQESGGGLVQAGGSLRLSCAASGTISLELMGWYRQAPGKEREFVATIGYGGITNYADSVKGRFTISRDNAKNTVYLQMNSLKPEDTAVYYCAAGLRGDPYYYYWGQGTQVTVSS

SEQ ID NO: 32032 - protein, 121 aa, Artificial Sequence
  Chemically Synthesized
QVQLQESGGGLVQAGGSLRLSCAASGSISYLLDMGWYRQAPGKERELVAAITAGSITNYADSVKGRFTISRDNAKNTVYLQMNSLKPEDTAVYYCAVWDASTVRGNTVIYWGQGTQVTVSS

SEQ ID NO: 32033 - protein, 126 aa, Artificial Sequence
  Chemically Synthesized
QVQLQESGGGLVQAGGSLRLSCAASGNIFQASGMGWYRQAPGKERELVATIADGATTNYADSVKGRFTISRDNAKNTVYLQMNSLKPEDTAVYYCAAVLIFWYDLDVIVYWTHFYWGQGTQVTVSS

SEQ ID NO: 32034 - protein, 123 aa, Artificial Sequence
  Chemically Synthesized
QVQLQESGGGLVQAGGSLRLSCAASGTISTVAEMGWYRQAPGKERELVASIGYGASTYYADSVKGRFTISRDNAKNTVYLQMNSLKPEDTAVYYCAVEPNPLGQYDAQLGLYWGQGTQVTVSS

SEQ ID NO: 32035 - protein, 116 aa, Artificial Sequence
  Chemically Synthesized
QVQLQESGGGLVQAGGSLRLSCAASGTISDSYYMGWYRQAPGKEREFVAAISFGAITYYADSVKGRFTISRDNAKNTVYLQMNSLKPEDTAVYYCAVVDPQYHIYWGQGTQVTVSS

SEQ ID NO: 32036 - protein, 118 aa, Artificial Sequence
  Chemically Synthesized
QVQLQESGGGLVQAGGSLRLSCAASGTIFDVEYMGWYRQAPGKERELVAGIDLGGTTYYADSVKGRFTISRDNAKNTVYLQMNSLKPEDTAVYYCAVDGWYADSYLYWGQGTQVTVSS

SEQ ID NO: 32037 - protein, 118 aa, Artificial Sequence
  Chemically Synthesized
QVQLQESGGGLVQAGGSLRLSCAASGTISIYDIMGWYRQAPGKEREFVAGIAEGSNTNYADSVKGRFTISRDNAKNTVYLQMNSLKPEDTAVYYCAAYVLYSGLHGYWGQGTQVTVSS

SEQ ID NO: 32038 - protein, 118 aa, Artificial Sequence
  Chemically Synthesized
QVQLQESGGGLVQAGGSLRLSCAASGTISAGLEMGWYRQAPGKEREFVAGIDRGSNTNYADSVKGRFTISRDNAKNTVYLQMNSLKPEDTAVYYCAADYTVYYDHGYWGQGTQVTVSS

SEQ ID NO: 32039 - protein, 126 aa, Artificial Sequence
  Chemically Synthesized
QVQLQESGGGLVQAGGSLRLSCAASGNISGYRKMGWYRQAPGKERELVATIDQGGITNYADSVKGRFTISRDNAKNTVYLQMNSLKPEDTAVYYCAVAYTIDRRAYIKPSGVHQYWGQGTQVTVSS

SEQ ID NO: 32040 - protein, 117 aa, Artificial Sequence
  Chemically Synthesized
QVQLQESGGGLVQAGGSLRLSCAASGTISYDDYMGWYRQAPGKEREFVATIGSVVIPYADSVKGRFTISRDNAKNTVYLQMNSLKPEDTAVYYCAVIGFPVDYHYYWGQGTQVTVSS

SEQ ID NO: 32041 - protein, 115 aa, Artificial Sequence
  Chemically Synthesized
QVQLQESGGGLVQAGGSLRLSCAASGNIFLFYSMGWYRQAPGKEREFVATMVLLPYADSVKGRFTISRDNAKNTVYLQMNSLKPEDTAVYYCAVYAYYDGDFRYWGQGTQVTVSS

SEQ ID NO: 32042 - protein, 113 aa, Artificial Sequence
  Chemically Synthesized
QVQLQESGGGLVQAGGSLRLSCAASGNIMGWYRQAPGKEREFVAAIGVGASTYYADSVKGRFTISRDNAKNTVYLQMNSLKPEDTAVYYCAVAYGVFHDLYYWGQGTQVTVSS

SEQ ID NO: 32043 - protein, 126 aa, Artificial Sequence
  Chemically Synthesized
QVQLQESGGGLVQAGGSLRLSCAASGSISYYRYMGWYRQAPGKERELVAGINFGSNTNYADSVKGRFTISRDNAKNTVYLQMNSLKPEDTAVYYCAVQKWYSYAVPGAGIPYFPYWGQGTQVTVSS

SEQ ID NO: 32044 - protein, 118 aa, Artificial Sequence
  Chemically Synthesized
QVQLQESGGGLVQAGGSLRLSCAASGYISDGEAMGWYRQAPGKERELVAGIGHGTITYYADSVKGRFTISRDNAKNTVYLQMNSLKPEDTAVYYCAVGESYLHNHRYWGQGTQVTVSS

SEQ ID NO: 32045 - protein, 114 aa, Artificial Sequence
  Chemically Synthesized
QVQLQESGGGLVQAGGSLRLSCAASGTIFDADRMGWYRQAPGKERELVLLSVLLPYADSVKGRFTISRDNAKNTVYLQMNSLKPEDTAVYYCAVDYLRTLLVYWGQGTQVTVSS

SEQ ID NO: 32046 - protein, 118 aa, Artificial Sequence
  Chemically Synthesized
QVQLQESGGGLVQAGGSLRLSCAASGNIFGDRYMGWYRQAPGKEREFVAGITNGGSTNYADSVKGRFTISRDNAKNTVYLQMNSLKPEDTAVYYCAAVVVVPDAYYYWGQGTQVTVSS

SEQ ID NO: 32047 - protein, 126 aa, Artificial Sequence
  Chemically Synthesized
QVQLQESGGGLVQAGGSLRLSCAASGYISYPGDMGWYRQAPGKEREFVASIGYGTSTNYADSVKGRFTISRDNAKNTVYLQMNSLKPEDTAVYYCAAYDRNQVAIAQDYTGGHQYWGQGTQVTVSS

SEQ ID NO: 32048 - protein, 118 aa, Artificial Sequence
  Chemically Synthesized
QVQLQESGGGLVQAGGSLRLSCAASGTIFADSSMGWYRQAPGKERELVATIGPGGNTNYADSVKGRFTISRDNAKNTVYLQMNSLKPEDTAVYYCAVEWYDVGQFGYWGQGTQVTVSS

SEQ ID NO: 32049 - protein, 117 aa, Artificial Sequence
  Chemically Synthesized
QVQLQESGGGLVQAGGSLRLSCAASGTISLSDMGWYRQAPGKERELVATITAGTTTNYADSVKGRFTISRDNAKNTVYLQMNSLKPEDTAVYYCAVYYDPFSDFSYWGQGTQVTVSS

SEQ ID NO: 32050 - protein, 118 aa, Artificial Sequence
  Chemically Synthesized
QVQLQESGGGLVQAGGSLRLSCAASGTISAQTVMGWYRQAPGKEREFVAGIDYGTNTNYADSVKGRFTISRDNAKNTVYLQMNSLKPEDTAVYYCAAYFNWNKGFLYWGQGTQVTVSS

SEQ ID NO: 32051 - protein, 122 aa, Artificial Sequence
  Chemically Synthesized
QVQLQESGGGLVQAGGSLRLSCAASGSIFYFDGMGWYRQAPGKEREFVAGITFGGNTYYADSVKGRFTISRDNAKNTVYLQMNSLKPEDTAVYYCAVLAFDYAYLYVTYYYWGQGTQVTVSS

SEQ ID NO: 32052 - protein, 118 aa, Artificial Sequence
  Chemically Synthesized
QVQLQESGGGLVQAGGSLRLSCAASGSIFTRTTMGWYRQAPGKERELVATISPGGSTNYADSVKGRFTISRDNAKNTVYLQMNSLKPEDTAVYYCAVTEDRPYYYPYWGQGTQVTVSS

SEQ ID NO: 32053 - protein, 126 aa, Artificial Sequence
  Chemically Synthesized
QVQLQESGGGLVQAGGSLRLSCAASGSISYDNIMGWYRQAPGKEREFVAAITYGGITYYADSVKGRFTISRDNAKNTVYLQMNSLKPEDTAVYYCAASNYSRDYVSQSTYVNFYYWGQGTQVTVSS

SEQ ID NO: 32054 - protein, 122 aa, Artificial Sequence
  Chemically Synthesized
QVQLQESGGGLVQAGGSLRLSCAASGNIFINQDMGWYRQAPGKERELVAAIAYGTNTNYADSVKGRFTISRDNAKNTVYLQMNSLKPEDTAVYYCAVTYTDSDAGSRVHQYWGQGTQVTVSS

SEQ ID NO: 32055 - protein, 111 aa, Artificial Sequence
  Chemically Synthesized
QVQLQESGGGLVQAGGSLRLSCAASGYISGQSLMGWYRQAPGKERELVAGIDSGSNTNYADSVKGRFTISRDNAKNTVYLQMNSLKPEDTAVYYCAPYGYWGQGTQVTVSS

SEQ ID NO: 32056 - protein, 121 aa, Artificial Sequence
  Chemically Synthesized
QVQLQESGGGLVQAGGSLRLSCAASGTIFGGYSMGWYRQAPGKERELVAAISYGANTYYADSVKGRFTISRDNAKNTVYLQMNSLKPEDTAVYYCAADDDGVLTTTVSLYWGQGTQVTVSS

SEQ ID NO: 32057 - protein, 118 aa, Artificial Sequence
  Chemically Synthesized
QVQLQESGGGLVQAGGSLRLSCAASGYISYYVVMGWYRQAPGKERELVAGISRGSTTYYADSVKGRFTISRDNAKNTVYLQMNSLKPEDTAVYYCAAAFRVTRPHEYWGQGTQVTVSS

SEQ ID NO: 32058 - protein, 116 aa, Artificial Sequence
  Chemically Synthesized
QVQLQESGGGLVQAGGSLRLSCAASGTISLRDAMGWYRQAPGKERELVATISHGGITNYADSVKGRFTISRDNAKNTVYLQMNSLKPEDTAVYYCAYEPRKRHVYWGQGTQVTVSS

SEQ ID NO: 32059 - protein, 118 aa, Artificial Sequence
  Chemically Synthesized
QVQLQESGGGLVQAGGSLRLSCAASGNISSPDFMGWYRQAPGKERELVATIATGSNTNYADSVKGRFTISRDNAKNTVYLQMNSLKPEDTAVYYCAVWTDANYGHKYWGQGTQVTVSS

SEQ ID NO: 32060 - protein, 121 aa, Artificial Sequence
  Chemically Synthesized
QVQLQESGGGLVQAGGSLRLSCAASGYISSSVMGWYRQAPGKEREFVATIGLGSSTYYADSVKGRFTISRDNAKNTVYLQMNSLKPEDTAVYYCAVQNYGYEDDILYHGYWGQGTQVTVSS

SEQ ID NO: 32061 - protein, 114 aa, Artificial Sequence
  Chemically Synthesized
QVQLQESGGGLVQAGGSLRLSCAASGTISQRYYMGWYRQAPGKERELGHLPYADSVKGRFTISRDNAKNTVYLQMNSLKPEDTAVYYCAALVGYRSRLVTSIYWGQGTQVTVSS

SEQ ID NO: 32062 - protein, 122 aa, Artificial Sequence
  Chemically Synthesized
QVQLQESGGGLVQAGGSLRLSCAASGYISPRTSMGWYRQAPGKEREFVAAINGGGSTNYADSVKGRFTISRDNAKNTVYLQMNSLKPEDTAVYYCAVDFAYDVSNWIGHSYWGQGTQVTVSS

SEQ ID NO: 32063 - protein, 113 aa, Artificial Sequence
  Chemically Synthesized
QVQLQESGGGLVQAGGSLRLSCAASGNIFYGDYMGWYRQAPGKEREFVAGIAYGTSTNYADSVKGRFTISRDNAKNTVYLQMNSLKPEDTAVYYCAAGRNPYWGQGTQVTVSS

SEQ ID NO: 32064 - protein, 115 aa, Artificial Sequence
  Chemically Synthesized
QVQLQESGGGLVQAGGSLRLSCAASGTISYDHYMGWYRQAPGKERELVSTNYADSVKGRFTISRDNAKNTVYLQMNSLKPEDTAVYYCAVRYGDWYSRHDEHEYWGQGTQVTVSS

SEQ ID NO: 32065 - protein, 118 aa, Artificial Sequence
  Chemically Synthesized
QVQLQESGGGLVQAGGSLRLSCAASGYIFGYVYMGWYRQAPGKEREFVAAIGYGGTTNYADSVKGRFTISRDNAKNTVYLQMNSLKPEDTAVYYCAVFRDYYLLHHYWGQGTQVTVSS

SEQ ID NO: 32066 - protein, 122 aa, Artificial Sequence
  Chemically Synthesized
QVQLQESGGGLVQAGGSLRLSCAASGNIFPGIAMGWYRQAPGKEREFVAAIDAGSITNYADSVKGRFTISRDNAKNTVYLQMNSLKPEDTAVYYCAAHYRSDDRAVDPLGYWGQGTQVTVSS

SEQ ID NO: 32067 - protein, 121 aa, Artificial Sequence
  Chemically Synthesized
QVQLQESGGGLVQAGGSLRLSCAASGSISYRWMGWYRQAPGKERELVASISYGTITNYADSVKGRFTISRDNAKNTVYLQMNSLKPEDTAVYYCAARDTYNQDTRRDHVYWGQGTQVTVSS

SEQ ID NO: 32068 - protein, 117 aa, Artificial Sequence
  Chemically Synthesized
QVQLQESGGGLVQAGGSLRLSCAASGSISYRIYMGWYRQAPGKEREFVATITFGGSTYYADSVKGRFTISRDNAKNTVYLQMNSLKPEDTAVYYCAAYGDWYYYPYWGQGTQVTVSS

SEQ ID NO: 32069 - protein, 122 aa, Artificial Sequence
  Chemically Synthesized
QVQLQESGGGLVQAGGSLRLSCAASGTISPTGIMGWYRQAPGKERELVAAIGSGGTTYYADSVKGRFTISRDNAKNTVYLQMNSLKPEDTAVYYCAALYDYVIEVTQDHDYWGQGTQVTVSS

SEQ ID NO: 32070 - protein, 118 aa, Artificial Sequence
  Chemically Synthesized
QVQLQESGGGLVQAGGSLRLSCAASGTISDYFAMGWYRQAPGKERELVAAITYGANTYYADSVKGRFTISRDNAKNTVYLQMNSLKPEDTAVYYCAARAYWGRDHSYWGQGTQVTVSS

SEQ ID NO: 32071 - protein, 117 aa, Artificial Sequence
  Chemically Synthesized
QVQLQESGGGLVQAGGSLRLSCAASGTISDDRYMGWYRQAPGKEREFVATINVGTSTYYADSVKGRFTISRDNAKNTVYLQMNSLKPEDTAVYYCAVDRSALSLIYWGQGTQVTVSS

SEQ ID NO: 32072 - protein, 126 aa, Artificial Sequence
  Chemically Synthesized
QVQLQESGGGLVQAGGSLRLSCAASGNISSLANMGWYRQAPGKERELVASISVGTITNYADSVKGRFTISRDNAKNTVYLQMNSLKPEDTAVYYCAAAPDRYYNKSPPDYPYLAYWGQGTQVTVSS

SEQ ID NO: 32073 - protein, 118 aa, Artificial Sequence
  Chemically Synthesized
QVQLQESGGGLVQAGGSLRLSCAASGNISVSATMGWYRQAPGKERELVATITPGTNTNYADSVKGRFTISRDNAKNTVYLQMNSLKPEDTAVYYCAVDDPTTYRFLYWGQGTQVTVSS

SEQ ID NO: 32074 - protein, 122 aa, Artificial Sequence
  Chemically Synthesized
QVQLQESGGGLVQAGGSLRLSCAASGTISRYGKMGWYRQAPGKERELVASIDQGTTTNYADSVKGRFTISRDNAKNTVYLQMNSLKPEDTAVYYCAAAGDYYTTDLYAHAYWGQGTQVTVSS

SEQ ID NO: 32075 - protein, 118 aa, Artificial Sequence
  Chemically Synthesized
QVQLQESGGGLVQAGGSLRLSCAASGYISIYQSMGWYRQAPGKERELVAAIDGGGSTNYADSVKGRFTISRDNAKNTVYLQMNSLKPEDTAVYYCAAGVNFDSDHAYWGQGTQVTVSS

SEQ ID NO: 32076 - protein, 117 aa, Artificial Sequence
  Chemically Synthesized
QVQLQESGGGLVQAGGSLRLSCAASGTISNHGTMGWYRQAPGKEREFVASIADGGTTNYADSVKGRFTISRDNAKNTVYLQMNSLKPEDTAVYYCAAPDVTAWHPYWGQGTQVTVSS

SEQ ID NO: 32077 - protein, 120 aa, Artificial Sequence
  Chemically Synthesized
QVQLQESGGGLVQAGGSLRLSCAASGYIFGYVVMGWYRQAPGKERELVASIGDGGSTNYADSVKGRFTISRDNAKNTVYLQMNSLKPEDTAVYYCAAGQYPLRADDHTYWGQGTQVTVSS

SEQ ID NO: 32078 - protein, 110 aa, Artificial Sequence
  Chemically Synthesized
QVQLQESGGGLVQAGGSLRLSCAASGTISFTSPMGWYRQAPGKERELVATISLGSITYYADSVKGRFTISRDNAKNTVYLQMNSLKPEDTAVYYCAVPYWGQGTQVTVSS

SEQ ID NO: 32079 - protein, 118 aa, Artificial Sequence
  Chemically Synthesized
QVQLQESGGGLVQAGGSLRLSCAASGSISDHATMGWYRQAPGKERELVATIGYGGSTYYADSVKGRFTISRDNAKNTVYLQMNSLKPEDTAVYYCAAEPLDTPDYGYWGQGTQVTVSS

SEQ ID NO: 32080 - protein, 109 aa, Artificial Sequence
  Chemically Synthesized
QVQLQESGGGLVQAGGSLRLSCAASGYISQSNYMGWYRQAPGKERELVASIGRGTSTNYADSVKGRFTISRDNAKNTVYLQMNSLKPEDTAVYYCALYWGQGTQVTVSS

SEQ ID NO: 32081 - protein, 122 aa, Artificial Sequence
  Chemically Synthesized
QVQLQESGGGLVQAGGSLRLSCAASGTISNDIPMGWYRQAPGKERELVASINGGTITYYADSVKGRFTISRDNAKNTVYLQMNSLKPEDTAVYYCAVYTYDEYAIGLTFRYWGQGTQVTVSS

SEQ ID NO: 32082 - protein, 117 aa, Artificial Sequence
  Chemically Synthesized
QVQLQESGGGLVQAGGSLRLSCAASGSISTWTYMGWYRQAPGKEREFVATLLVVLLPYADSVKGRFTISRDNAKNTVYLQMNSLKPEDTAVYYCAVPRDEWDILRYWGQGTQVTVSS

SEQ ID NO: 32083 - protein, 122 aa, Artificial Sequence
  Chemically Synthesized
QVQLQESGGGLVQAGGSLRLSCAASGSIFPFLAMGWYRQAPGKERELVAAITEGATTNYADSVKGRFTISRDNAKNTVYLQMNSLKPEDTAVYYCAVYTRGGSYLGTDLGYWGQGTQVTVSS

SEQ ID NO: 32084 - protein, 115 aa, Artificial Sequence
  Chemically Synthesized
QVQLQESGGGLVQAGGSLRLSCAASGNISASTFMGWYRQAPGKERELVVVPYADSVKGRFTISRDNAKNTVYLQMNSLKPEDTAVYYCAVAYYRLATVDATHQYWGQGTQVTVSS

SEQ ID NO: 32085 - protein, 118 aa, Artificial Sequence
  Chemically Synthesized
QVQLQESGGGLVQAGGSLRLSCAASGTIFSQAVMGWYRQAPGKERELVATISKGSITYYADSVKGRFTISRDNAKNTVYLQMNSLKPEDTAVYYCAVYRRTLPSFWYWGQGTQVTVSS

SEQ ID NO: 32086 - protein, 114 aa, Artificial Sequence
  Chemically Synthesized
QVQLQESGGGLVQAGGSLRLSCAASGSISATYYMGWYRQAPGKERELVATIAYGTNTYYADSVKGRFTISRDNAKNTVYLQMNSLKPEDTAVYYCAVDDQLAYWGQGTQVTVSS

SEQ ID NO: 32087 - protein, 117 aa, Artificial Sequence
  Chemically Synthesized
QVQLQESGGGLVQAGGSLRLSCAASGSISNQDGMGWYRQAPGKEREFVPLLLLVLVPYADSVKGRFTISRDNAKNTVYLQMNSLKPEDTAVYYCAVVDWFLPRHGYWGQGTQVTVSS

SEQ ID NO: 32088 - protein, 118 aa, Artificial Sequence
  Chemically Synthesized
QVQLQESGGGLVQAGGSLRLSCAASGNISANYYMGWYRQAPGKEREFVAAIARGANTYYADSVKGRFTISRDNAKNTVYLQMNSLKPEDTAVYYCAAYYLGYPYFPYWGQGTQVTVSS

SEQ ID NO: 32089 - protein, 118 aa, Artificial Sequence
  Chemically Synthesized
QVQLQESGGGLVQAGGSLRLSCAASGYIFRTYVMGWYRQAPGKERELVAAINYGASTYYADSVKGRFTISRDNAKNTVYLQMNSLKPEDTAVYYCAVPLYYYRLHGYWGQGTQVTVSS

SEQ ID NO: 32090 - protein, 118 aa, Artificial Sequence
  Chemically Synthesized
QVQLQESGGGLVQAGGSLRLSCAASGNIFPGSRMGWYRQAPGKEREFVATINAGTITNYADSVKGRFTISRDNAKNTVYLQMNSLKPEDTAVYYCAVADGYIEGYYYWGQGTQVTVSS

SEQ ID NO: 32091 - protein, 118 aa, Artificial Sequence
  Chemically Synthesized
QVQLQESGGGLVQAGGSLRLSCAASGSISRGVSMGWYRQAPGKERELVATIGYGGTTYYADSVKGRFTISRDNAKNTVYLQMNSLKPEDTAVYYCAVHVVVDSAHTYWGQGTQVTVSS

SEQ ID NO: 32092 - protein, 125 aa, Artificial Sequence
  Chemically Synthesized
QVQLQESGGGLVQAGGSLRLSCAASGNIFTWSMGWYRQAPGKERELVAAITDGTITYYADSVKGRFTISRDNAKNTVYLQMNSLKPEDTAVYYCAASPYIISSVNESWQYLYLYWGQGTQVTVSS

SEQ ID NO: 32093 - protein, 125 aa, Artificial Sequence
  Chemically Synthesized
QVQLQESGGGLVQAGGSLRLSCAASGYIFYLVRMGWYRQAPGKERELVAGISVGSNTYYADSVKGRFTISRDNAKNTVYLQMNSLKPEDTAVYYCAADYQYPHSNRIGFDAKLYWGQGTQVTVSS

SEQ ID NO: 32094 - protein, 118 aa, Artificial Sequence
  Chemically Synthesized
QVQLQESGGGLVQAGGSLRLSCAASGTISSRDDMGWYRQAPGKERELVTNTNYADSVKGRFTISRDNAKNTVYLQMNSLKPEDTAVYYCAAYRDGRKSNPDWDSYRYWGQGTQVTVSS

SEQ ID NO: 32095 - protein, 118 aa, Artificial Sequence
  Chemically Synthesized
QVQLQESGGGLVQAGGSLRLSCAASGTIFLADVMGWYRQAPGKERELVATIGAGTITYYADSVKGRFTISRDNAKNTVYLQMNSLKPEDTAVYYCAVYQGIAYPLPYWGQGTQVTVSS

SEQ ID NO: 32096 - protein, 120 aa, Artificial Sequence
  Chemically Synthesized
QVQLQESGGGLVQAGGSLRLSCAASGILMGWYRQAPGKERELVAGIGLVVLPYADSVKGRFTISRDNAKNTVYLQMNSLKPEDTAVYYCAADYYYDFGGPPDLRETFYYWGQGTQVTVSS

SEQ ID NO: 32097 - protein, 121 aa, Artificial Sequence
  Chemically Synthesized
QVQLQESGGGLVQAGGSLRLSCAASGNIFSLLMGWYRQAPGKEREFVASITVGSNTNYADSVKGRFTISRDNAKNTVYLQMNSLKPEDTAVYYCAAPVEGPQWSDTLFGYWGQGTQVTVSS

SEQ ID NO: 32098 - protein, 118 aa, Artificial Sequence
  Chemically Synthesized
QVQLQESGGGLVQAGGSLRLSCAASGTISHRDRMGWYRQAPGKEREFVAAISLGGNTNYADSVKGRFTISRDNAKNTVYLQMNSLKPEDTAVYYCAVPPYTTRELGYWGQGTQVTVSS

SEQ ID NO: 32099 - protein, 118 aa, Artificial Sequence
  Chemically Synthesized
QVQLQESGGGLVQAGGSLRLSCAASGTISLNWYMGWYRQAPGKERELVAAINYGAITYYADSVKGRFTISRDNAKNTVYLQMNSLKPEDTAVYYCAVNYSPYTSLVYWGQGTQVTVSS

SEQ ID NO: 32100 - protein, 123 aa, Artificial Sequence
  Chemically Synthesized
QVQLQESGGGLVQAGGSLRLSCAASGNISWYVMGWYRQAPGKERELVAGITYGTTTYYADSVKGRFTISRDNAKNTVYLQMNSLKPEDTAVYYCAAYPVESTVRSVYVQYSYWGQGTQVTVSS

SEQ ID NO: 32101 - protein, 122 aa, Artificial Sequence
  Chemically Synthesized
QVQLQESGGGLVQAGGSLRLSCAASGNISTYDSMGWYRQAPGKEREFVAGINTGSTTYYADSVKGRFTISRDNAKNTVYLQMNSLKPEDTAVYYCAASPIYSWYETSRLLYWGQGTQVTVSS

SEQ ID NO: 32102 - protein, 117 aa, Artificial Sequence
  Chemically Synthesized
QVQLQESGGGLVQAGGSLRLSCAASGSISADGQMGWYRQAPGKERELVAAIDNGGTTNYADSVKGRFTISRDNAKNTVYLQMNSLKPEDTAVYYCAANSYYAYPFYWGQGTQVTVSS

SEQ ID NO: 32103 - protein, 118 aa, Artificial Sequence
  Chemically Synthesized
QVQLQESGGGLVQAGGSLRLSCAASGTIFDVAGMGWYRQAPGKERELVAAIGVGATTYYADSVKGRFTISRDNAKNTVYLQMNSLKPEDTAVYYCAADNVDQSYHTYWGQGTQVTVSS

SEQ ID NO: 32104 - protein, 118 aa, Artificial Sequence
  Chemically Synthesized
QVQLQESGGGLVQAGGSLRLSCAASGSIFARDGMGWYRQAPGKERELVATIDAGSITNYADSVKGRFTISRDNAKNTVYLQMNSLKPEDTAVYYCAASTDPVRYLPYWGQGTQVTVSS

SEQ ID NO: 32105 - protein, 121 aa, Artificial Sequence
  Chemically Synthesized
QVQLQESGGGLVQAGGSLRLSCAASGYISSRLGMGWYRQAPGKERELVAAISSGTNTNYADSVKGRFTISRDNAKNTVYLQMNSLKPEDTAVYYCAARNGDWHGYGADLYWGQGTQVTVSS

SEQ ID NO: 32106 - protein, 126 aa, Artificial Sequence
  Chemically Synthesized
QVQLQESGGGLVQAGGSLRLSCAASGSISGDRIMGWYRQAPGKERELVAAISVGSNTNYADSVKGRFTISRDNAKNTVYLQMNSLKPEDTAVYYCAVGGNDVQPQYDLYLRVLFYWGQGTQVTVSS

SEQ ID NO: 32107 - protein, 110 aa, Artificial Sequence
  Chemically Synthesized
QVQLQESGGGLVQAGGSLRLSCAASGTISRYNYMGWYRQAPGKEREFVATIADGSTTYYADSVKGRFTISRDNAKNTVYLQMNSLKPEDTAVYYCALMYWGQGTQVTVSS

SEQ ID NO: 32108 - protein, 112 aa, Artificial Sequence
  Chemically Synthesized
QVQLQESGGGLVQAGGSLRLSCAASGTISYRDNMGWYRQAPGKERELVATITQGAITYYADSVKGRFTISRDNAKNTVYLQMNSLKPEDTAVYYCAYRHYYWGQGTQVTVSS

SEQ ID NO: 32109 - protein, 126 aa, Artificial Sequence
  Chemically Synthesized
QVQLQESGGGLVQAGGSLRLSCAASGNIFSGNGMGWYRQAPGKERELVAAIADGGTTNYADSVKGRFTISRDNAKNTVYLQMNSLKPEDTAVYYCAVYDYNPKRSLRRWWEPYDYWGQGTQVTVSS

SEQ ID NO: 32110 - protein, 118 aa, Artificial Sequence
  Chemically Synthesized
QVQLQESGGGLVQAGGSLRLSCAASGNISSRFYMGWYRQAPGKEREFVASISGGGNTYYADSVKGRFTISRDNAKNTVYLQMNSLKPEDTAVYYCAVFKLWAYYHVYWGQGTQVTVSS

SEQ ID NO: 32111 - protein, 116 aa, Artificial Sequence
  Chemically Synthesized
QVQLQESGGGLVQAGGSLRLSCAASGNILLVLMGWYRQAPGKEREFVATINFGAITYYADSVKGRFTISRDNAKNTVYLQMNSLKPEDTAVYYCAADDYDLSLFYWGQGTQVTVSS

SEQ ID NO: 32112 - protein, 126 aa, Artificial Sequence
  Chemically Synthesized
QVQLQESGGGLVQAGGSLRLSCAASGSIFGSSDMGWYRQAPGKEREFVAAISDGTSTNYADSVKGRFTISRDNAKNTVYLQMNSLKPEDTAVYYCAANYRVTVWSYHDEFGHHYYWGQGTQVTVSS

SEQ ID NO: 32113 - protein, 122 aa, Artificial Sequence
  Chemically Synthesized
QVQLQESGGGLVQAGGSLRLSCAASGYIFRIDKMGWYRQAPGKEREFVAGIAPGANTNYADSVKGRFTISRDNAKNTVYLQMNSLKPEDTAVYYCAALSADYGHDLDLLNYWGQGTQVTVSS

SEQ ID NO: 32114 - protein, 117 aa, Artificial Sequence
  Chemically Synthesized
QVQLQESGGGLVQAGGSLRLSCAASGSISTYVFMGWYRQAPGKERELVATIAWGTNTYYADSVKGRFTISRDNAKNTVYLQMNSLKPEDTAVYYCAVYYYTKDFGYWGQGTQVTVSS

SEQ ID NO: 32115 - protein, 121 aa, Artificial Sequence
  Chemically Synthesized
QVQLQESGGGLVQAGGSLRLSCAASGTIFRSLYMGWYRQAPGKEREFVAAIAQGSSTNYADSVKGRFTISRDNAKNTVYLQMNSLKPEDTAVYYCAVDDNYYQSPTGHAYWGQGTQVTVSS

SEQ ID NO: 32116 - protein, 121 aa, Artificial Sequence
  Chemically Synthesized
QVQLQESGGGLVQAGGSLRLSCAASGNISSLLMGWYRQAPGKERELVASINSGGNTNYADSVKGRFTISRDNAKNTVYLQMNSLKPEDTAVYYCAAHTYRVDYPDTAHSYWGQGTQVTVSS

SEQ ID NO: 32117 - protein, 118 aa, Artificial Sequence
  Chemically Synthesized
QVQLQESGGGLVQAGGSLRLSCAASGNISYVYAMGWYRQAPGKERELVATITRGSTTNYADSVKGRFTISRDNAKNTVYLQMNSLKPEDTAVYYCAVWSTSVGSHGYWGQGTQVTVSS

SEQ ID NO: 32118 - protein, 116 aa, Artificial Sequence
  Chemically Synthesized
QVQLQESGGGLVQAGGSLRLSCAASGNIFDQFYMGWYRQAPGKERELVATIGSVLVPYADSVKGRFTISRDNAKNTVYLQMNSLKPEDTAVYYCAAYYVVYPFQYWGQGTQVTVSS

SEQ ID NO: 32119 - protein, 117 aa, Artificial Sequence
  Chemically Synthesized
QVQLQESGGGLVQAGGSLRLSCAASGYIFQYDGMGWYRQAPGKEREFVATITGGTTNYADSVKGRFTISRDNAKNTVYLQMNSLKPEDTAVYYCAVYSKPSSTHPYWGQGTQVTVSS

SEQ ID NO: 32120 - protein, 118 aa, Artificial Sequence
  Chemically Synthesized
QVQLQESGGGLVQAGGSLRLSCAASGSIFVIVWMGWYRQAPGKEREFVASINYGANTNYADSVKGRFTISRDNAKNTVYLQMNSLKPEDTAVYYCAVDGYLSFGLGYWGQGTQVTVSS

SEQ ID NO: 32121 - protein, 125 aa, Artificial Sequence
  Chemically Synthesized
QVQLQESGGGLVQAGGSLRLSCAASGSISAYWMGWYRQAPGKERELVASIASGTITNYADSVKGRFTISRDNAKNTVYLQMNSLKPEDTAVYYCAVYIIYYAGNLGGNVDYHIYWGQGTQVTVSS

SEQ ID NO: 32122 - protein, 118 aa, Artificial Sequence
  Chemically Synthesized
QVQLQESGGGLVQAGGSLRLSCAASGTISQSYYMGWYRQAPGKEREFVASISDGTITNYADSVKGRFTISRDNAKNTVYLQMNSLKPEDTAVYYCAADDLYERALPYWGQGTQVTVSS

SEQ ID NO: 32123 - protein, 126 aa, Artificial Sequence
  Chemically Synthesized
QVQLQESGGGLVQAGGSLRLSCAASGNIFRTSGMGWYRQAPGKEREFVAGITYGGITNYADSVKGRFTISRDNAKNTVYLQMNSLKPEDTAVYYCAAFYDQGGAHYLDSVENHGYWGQGTQVTVSS

SEQ ID NO: 32124 - protein, 117 aa, Artificial Sequence
  Chemically Synthesized
QVQLQESGGGLVQAGGSLRLSCAASGSIFADQYMGWYRQAPGKERELVASIDKGATTYYADSVKGRFTISRDNAKNTVYLQMNSLKPEDTAVYYCAAYAVTRRHIYWGQGTQVTVSS

SEQ ID NO: 32125 - protein, 126 aa, Artificial Sequence
  Chemically Synthesized
QVQLQESGGGLVQAGGSLRLSCAASGTISYLYRMGWYRQAPGKERELVATITSGTTTYYADSVKGRFTISRDNAKNTVYLQMNSLKPEDTAVYYCAVYYQLGGDRTRDSDGVYDYWGQGTQVTVSS

SEQ ID NO: 32126 - protein, 109 aa, Artificial Sequence
  Chemically Synthesized
QVQLQESGGGLVQAGGSLRLSCAASGYISFYGNMGWYRQAPGKERELVPYADSVKGRFTISRDNAKNTVYLQMNSLKPEDTAVYYCAAYWDQYDRYLYWGQGTQVTVSS

SEQ ID NO: 32127 - protein, 122 aa, Artificial Sequence
  Chemically Synthesized
QVQLQESGGGLVQAGGSLRLSCAASGYISSDGYMGWYRQAPGKEREFVASIAWGSSTNYADSVKGRFTISRDNAKNTVYLQMNSLKPEDTAVYYCAAYSGAGNAYQKEHGYWGQGTQVTVSS

SEQ ID NO: 32128 - protein, 120 aa, Artificial Sequence
  Chemically Synthesized
QVQLQESGGGLVQAGGSLRLSCAASGSIFYPAGMGWYRQAPGKERELVASIARGTITNYADSVKGRFTISRDNAKNTVYLQMNSLKPEDTAVYYCAVYGPYHIDTRLDYWGQGTQVTVSS

SEQ ID NO: 32129 - protein, 118 aa, Artificial Sequence
  Chemically Synthesized
QVQLQESGGGLVQAGGSLRLSCAASGTIFYKFGMGWYRQAPGKERELVAGIGYGSNTYYADSVKGRFTISRDNAKNTVYLQMNSLKPEDTAVYYCAVVYGYGQYHIYWGQGTQVTVSS

SEQ ID NO: 32130 - protein, 121 aa, Artificial Sequence
  Chemically Synthesized
QVQLQESGGGLVQAGGSLRLSCAASGNISDASMGWYRQAPGKERELVAAINVGASTYYADSVKGRFTISRDNAKNTVYLQMNSLKPEDTAVYYCAVDRPVEDPLDDAHPYWGQGTQVTVSS

SEQ ID NO: 32131 - protein, 122 aa, Artificial Sequence
  Chemically Synthesized
QVQLQESGGGLVQAGGSLRLSCAASGNISGVKDMGWYRQAPGKERELVAGISYGGNTNYADSVKGRFTISRDNAKNTVYLQMNSLKPEDTAVYYCAVPYHVTAAGVVPHPYWGQGTQVTVSS

SEQ ID NO: 32132 - protein, 125 aa, Artificial Sequence
  Chemically Synthesized
QVQLQESGGGLVQAGGSLRLSCAASGIFLTIVMGWYRQAPGKERELVATITGGGSTNYADSVKGRFTISRDNAKNTVYLQMNSLKPEDTAVYYCAAVTLLYARNYVYGPDSFYYWGQGTQVTVSS

SEQ ID NO: 32133 - protein, 118 aa, Artificial Sequence
  Chemically Synthesized
QVQLQESGGGLVQAGGSLRLSCAASGSIFWHSDMGWYRQAPGKEREFVASINRGASTYYADSVKGRFTISRDNAKNTVYLQMNSLKPEDTAVYYCAVVLAYALGHRYWGQGTQVTVSS

SEQ ID NO: 32134 - protein, 118 aa, Artificial Sequence
  Chemically Synthesized
QVQLQESGGGLVQAGGSLRLSCAASGTISFTGEMGWYRQAPGKEREFVAAITDGAITYYADSVKGRFTISRDNAKNTVYLQMNSLKPEDTAVYYCAARYDRWEDLSYWGQGTQVTVSS

SEQ ID NO: 32135 - protein, 118 aa, Artificial Sequence
  Chemically Synthesized
QVQLQESGGGLVQAGGSLRLSCAASGNIFNLSHMGWYRQAPGKEREFVAGIATGASTYYADSVKGRFTISRDNAKNTVYLQMNSLKPEDTAVYYCAVVYGVYTALPYWGQGTQVTVSS

SEQ ID NO: 32136 - protein, 126 aa, Artificial Sequence
  Chemically Synthesized
QVQLQESGGGLVQAGGSLRLSCAASGNISPLYYMGWYRQAPGKERELVATIGYGASTYYADSVKGRFTISRDNAKNTVYLQMNSLKPEDTAVYYCAATYTFDIHSGQLSVRSLAYWGQGTQVTVSS

SEQ ID NO: 32137 - protein, 118 aa, Artificial Sequence
  Chemically Synthesized
QVQLQESGGGLVQAGGSLRLSCAASGSISRYYPMGWYRQAPGKERELVASIAVGGTTYYADSVKGRFTISRDNAKNTVYLQMNSLKPEDTAVYYCAVYTRNQSLFDYWGQGTQVTVSS

SEQ ID NO: 32138 - protein, 118 aa, Artificial Sequence
  Chemically Synthesized
QVQLQESGGGLVQAGGSLRLSCAASGTISGTRIMGWYRQAPGKEREFVAAIDYGSITYYADSVKGRFTISRDNAKNTVYLQMNSLKPEDTAVYYCAATWQRIYAHSYWGQGTQVTVSS

SEQ ID NO: 32139 - protein, 122 aa, Artificial Sequence
  Chemically Synthesized
QVQLQESGGGLVQAGGSLRLSCAASGTISRVWRMGWYRQAPGKERELVAGISFGTSTNYADSVKGRFTISRDNAKNTVYLQMNSLKPEDTAVYYCAVDSTSVGPVQDIHAYWGQGTQVTVSS

SEQ ID NO: 32140 - protein, 118 aa, Artificial Sequence
  Chemically Synthesized
QVQLQESGGGLVQAGGSLRLSCAASGNIFEISVMGWYRQAPGKERELVATIGPGATTNYADSVKGRFTISRDNAKNTVYLQMNSLKPEDTAVYYCAVRTYIATSFSYWGQGTQVTVSS

SEQ ID NO: 32141 - protein, 118 aa, Artificial Sequence
  Chemically Synthesized
QVQLQESGGGLVQAGGSLRLSCAASGTIFAVARMGWYRQAPGKEREFVAAIADGSTTYYADSVKGRFTISRDNAKNTVYLQMNSLKPEDTAVYYCAVPLDWSGTYYYWGQGTQVTVSS

SEQ ID NO: 32142 - protein, 125 aa, Artificial Sequence
  Chemically Synthesized
QVQLQESGGGLVQAGGSLRLSCAASGSISGTGDMGWYRQAPGKEREFVATIDRGATTNYADSVKGRFTISRDNAKNTVYLQMNSLKPEDTAVYYCAARIRSDASTFRLWVSRIYWGQGTQVTVSS

SEQ ID NO: 32143 - protein, 118 aa, Artificial Sequence
  Chemically Synthesized
QVQLQESGGGLVQAGGSLRLSCAASGYIFYIYRMGWYRQAPGKERELVATINVGGSTNYADSVKGRFTISRDNAKNTVYLQMNSLKPEDTAVYYCAVGYNFIDGHFYWGQGTQVTVSS

SEQ ID NO: 32144 - protein, 110 aa, Artificial Sequence
  Chemically Synthesized
QVQLQESGGGLVQAGGSLRLSCAASGTIFPYEYMGWYRQAPGKERELVASIDRGGSTYYADSVKGRFTISRDNAKNTVYLQMNSLKPEDTAVYYCAAWYWGQGTQVTVSS

SEQ ID NO: 32145 - protein, 114 aa, Artificial Sequence
  Chemically Synthesized
QVQLQESGGGLVQAGGSLRLSCAASGTISNQYNMGWYRQAPGKEREFVATITEGASTYYADSVKGRFTISRDNAKNTVYLQMNSLKPEDTAVYYCAASVPVSYWGQGTQVTVSS

SEQ ID NO: 32146 - protein, 122 aa, Artificial Sequence
  Chemically Synthesized
QVQLQESGGGLVQAGGSLRLSCAASGTIFKHSWMGWYRQAPGKEREFVAAIGDGSNTNYADSVKGRFTISRDNAKNTVYLQMNSLKPEDTAVYYCAALYQTNAYGRTWHWYWGQGTQVTVSS

SEQ ID NO: 32147 - protein, 122 aa, Artificial Sequence
  Chemically Synthesized
QVQLQESGGGLVQAGGSLRLSCAASGYISTFGIMGWYRQAPGKERELVAAIDLGTNTYYADSVKGRFTISRDNAKNTVYLQMNSLKPEDTAVYYCAVYDDNLYAGDYDHTYWGQGTQVTVSS

SEQ ID NO: 32148 - protein, 122 aa, Artificial Sequence
  Chemically Synthesized
QVQLQESGGGLVQAGGSLRLSCAASGYISARTKMGWYRQAPGKEREFVAGIGAGGSTYYADSVKGRFTISRDNAKNTVYLQMNSLKPEDTAVYYCAAVVRQQGTDYGYHAYWGQGTQVTVSS

SEQ ID NO: 32149 - protein, 116 aa, Artificial Sequence
  Chemically Synthesized
QVQLQESGGGLVQAGGSLRLSCAASGNIFGDANMGWYRQAPGKEREFVASIGYYYLYADSVKGRFTISRDNAKNTVYLQMNSLKPEDTAVYYCAVNGGYPVLPSYWGQGTQVTVSS

SEQ ID NO: 32150 - protein, 122 aa, Artificial Sequence
  Chemically Synthesized
QVQLQESGGGLVQAGGSLRLSCAASGTIFDGAAMGWYRQAPGKERELVASIARGAITNYADSVKGRFTISRDNAKNTVYLQMNSLKPEDTAVYYCAVVQGWGQVDEVWHGYWGQGTQVTVSS

SEQ ID NO: 32151 - protein, 118 aa, Artificial Sequence
  Chemically Synthesized
QVQLQESGGGLVQAGGSLRLSCAASGSIFEASDMGWYRQAPGKERELVASIGSGSTTYYADSVKGRFTISRDNAKNTVYLQMNSLKPEDTAVYYCAARSADNHPHEYWGQGTQVTVSS

SEQ ID NO: 32152 - protein, 118 aa, Artificial Sequence
  Chemically Synthesized
QVQLQESGGGLVQAGGSLRLSCAASGTISNILVMGWYRQAPGKEREFVAGIGHGGNTNYADSVKGRFTISRDNAKNTVYLQMNSLKPEDTAVYYCAAVGSRSVNHYYWGQGTQVTVSS

SEQ ID NO: 32153 - protein, 118 aa, Artificial Sequence
  Chemically Synthesized
QVQLQESGGGLVQAGGSLRLSCAASGYISKRNYMGWYRQAPGKEREFVATIGRGTYYQYADSVKGRFTISRDNAKNTVYLQMNSLKPEDTAVYYCAVYAYTIRHLGYWGQGTQVTVSS

SEQ ID NO: 32154 - protein, 118 aa, Artificial Sequence
  Chemically Synthesized
QVQLQESGGGLVQAGGSLRLSCAASGYISGVTYMGWYRQAPGKEREFVAAIADGGNTNYADSVKGRFTISRDNAKNTVYLQMNSLKPEDTAVYYCAVLLYADGYFWYWGQGTQVTVSS

SEQ ID NO: 32155 - protein, 118 aa, Artificial Sequence
  Chemically Synthesized
QVQLQESGGGLVQAGGSLRLSCAASGTISDVYDMGWYRQAPGKEREFVAAISSGTNTYYADSVKGRFTISRDNAKNTVYLQMNSLKPEDTAVYYCAVEIGYDDLLLYWGQGTQVTVSS

SEQ ID NO: 32156 - protein, 121 aa, Artificial Sequence
  Chemically Synthesized
QVQLQESGGGLVQAGGSLRLSCAASGTICCWLMGWYRQAPGKEREFVASISQGTTTNYADSVKGRFTISRDNAKNTVYLQMNSLKPEDTAVYYCAARSPSQHYRGGAYWYWGQGTQVTVSS

SEQ ID NO: 32157 - protein, 118 aa, Artificial Sequence
  Chemically Synthesized
QVQLQESGGGLVQAGGSLRLSCAASGNISPAQYMGWYRQAPGKEREFVAGIGAGGTTNYADSVKGRFTISRDNAKNTVYLQMNSLKPEDTAVYYCAVLHYRDGYHYYWGQGTQVTVSS

SEQ ID NO: 32158 - protein, 122 aa, Artificial Sequence
  Chemically Synthesized
QVQLQESGGGLVQAGGSLRLSCAASGSIFDRYIMGWYRQAPGKEREFVAGIDIGGSTNYADSVKGRFTISRDNAKNTVYLQMNSLKPEDTAVYYCAVVYRGGPHFTRYHYYWGQGTQVTVSS

SEQ ID NO: 32159 - protein, 117 aa, Artificial Sequence
  Chemically Synthesized
QVQLQESGGGLVQAGGSLRLSCAASGNIFSITMGWYRQAPGKERELVATINGGTNTNYADSVKGRFTISRDNAKNTVYLQMNSLKPEDTAVYYCAVTYTKRPQFYYWGQGTQVTVSS

SEQ ID NO: 32160 - protein, 119 aa, Artificial Sequence
  Chemically Synthesized
QVQLQESGGGLVQAGGSLRLSCAASGTISDYEYMGWYRQAPGKEREFVAAIGAGGGITNYADSVKGRFTISRDNAKNTVYLQMNSLKPEDTAVYYCAVYDDYGYAFLYWGQGTQVTVSS

SEQ ID NO: 32161 - protein, 122 aa, Artificial Sequence
  Chemically Synthesized
QVQLQESGGGLVQAGGSLRLSCAASGTISTLVTMGWYRQAPGKERELVAGIGTGSNTYYADSVKGRFTISRDNAKNTVYLQMNSLKPEDTAVYYCAVRVAKWYLIGRDYIYWGQGTQVTVSS

SEQ ID NO: 32162 - protein, 111 aa, Artificial Sequence
  Chemically Synthesized
QVQLQESGGGLVQAGGSLRLSCAASGSISTIYYMGWYRQAPGKEREFVAGIDSGGTTNYADSVKGRFTISRDNAKNTVYLQMNSLKPEDTAVYYCAVTFYWGQGTQVTVSS

SEQ ID NO: 32163 - protein, 113 aa, Artificial Sequence
  Chemically Synthesized
QVQLQESGGGLVQAGGSLRLSCAASGTISIYGDMGWYRQAPGKEREFVAAIADGSNTNYADSVKGRFTISRDNAKNTVYLQMNSLKPEDTAVYYCAVRDQLYWGQGTQVTVSS

SEQ ID NO: 32164 - protein, 122 aa, Artificial Sequence
  Chemically Synthesized
QVQLQESGGGLVQAGGSLRLSCAASGNISRAGYMGWYRQAPGKERELVATIGYGASTYYADSVKGRFTISRDNAKNTVYLQMNSLKPEDTAVYYCAAYDTTYVRIDGTLYYWGQGTQVTVSS

SEQ ID NO: 32165 - protein, 126 aa, Artificial Sequence
  Chemically Synthesized
QVQLQESGGGLVQAGGSLRLSCAASGNISRLYKMGWYRQAPGKEREFVAGIAYGASTYYADSVKGRFTISRDNAKNTVYLQMNSLKPEDTAVYYCAALYQDPYGQQVDRVYGHVYWGQGTQVTVSS

SEQ ID NO: 32166 - protein, 116 aa, Artificial Sequence
  Chemically Synthesized
QVQLQESGGGLVQAGGSLRLSCAASGNIFLYRVMGWYRQAPGKEREFVAGIGFGGTTNYADSVKGRFTISRDNAKNTVYLQMNSLKPEDTAVYYCAAVRSPQHYYWGQGTQVTVSS

SEQ ID NO: 32167 - protein, 117 aa, Artificial Sequence
  Chemically Synthesized
QVQLQESGGGLVQAGGSLRLSCAASGYISDSIYMGWYRQAPGKEREFVASINGGGTTYYADSVKGRFTISRDNAKNTVYLQMNSLKPEDTAVYYCAARGDYVDNHYWGQGTQVTVSS

SEQ ID NO: 32168 - protein, 122 aa, Artificial Sequence
  Chemically Synthesized
QVQLQESGGGLVQAGGSLRLSCAASGNISLQDGMGWYRQAPGKERELVAAITYGTTTNYADSVKGRFTISRDNAKNTVYLQMNSLKPEDTAVYYCAAWWATSPDYPYYLPYWGQGTQVTVSS

SEQ ID NO: 32169 - protein, 118 aa, Artificial Sequence
  Chemically Synthesized
QVQLQESGGGLVQAGGSLRLSCAASGTISSRPSMGWYRQAPGKEREFVATIDSGGTTNYADSVKGRFTISRDNAKNTVYLQMNSLKPEDTAVYYCAALVKAYGYHPYWGQGTQVTVSS

SEQ ID NO: 32170 - protein, 122 aa, Artificial Sequence
  Chemically Synthesized
QVQLQESGGGLVQAGGSLRLSCAASGSISTGDGMGWYRQAPGKERELVASIGWGANTNYADSVKGRFTISRDNAKNTVYLQMNSLKPEDTAVYYCAAVTHGYSYGYGVFYYWGQGTQVTVSS

SEQ ID NO: 32171 - protein, 122 aa, Artificial Sequence
  Chemically Synthesized
QVQLQESGGGLVQAGGSLRLSCAASGSISYYTPMGWYRQAPGKERELVAGINPGTNTYYADSVKGRFTISRDNAKNTVYLQMNSLKPEDTAVYYCAVGILYIAYYNGGSSYWGQGTQVTVSS

SEQ ID NO: 32172 - protein, 118 aa, Artificial Sequence
  Chemically Synthesized
QVQLQESGGGLVQAGGSLRLSCAASGYISITWAMGWYRQAPGKERELVAAINSGGTTNYADSVKGRFTISRDNAKNTVYLQMNSLKPEDTAVYYCAALRGSKPYHWYWGQGTQVTVSS

SEQ ID NO: 32173 - protein, 118 aa, Artificial Sequence
  Chemically Synthesized
QVQLQESGGGLVQAGGSLRLSCAASGSIFPFAVMGWYRQAPGKERELVAAINLGAITYYADSVKGRFTISRDNAKNTVYLQMNSLKPEDTAVYYCAVPSDLQNAFLYWGQGTQVTVSS

SEQ ID NO: 32174 - protein, 114 aa, Artificial Sequence
  Chemically Synthesized
QVQLQESGGGLVQAGGSLRLSCAASGSGPSTMGWYRQAPGKEREFVAGIATGTITNYADSVKGRFTISRDNAKNTVYLQMNSLKPEDTAVYYCAVVYDYDHWYWGQGTQVTVSS

SEQ ID NO: 32175 - protein, 118 aa, Artificial Sequence
  Chemically Synthesized
QVQLQESGGGLVQAGGSLRLSCAASGTISPYYVMGWYRQAPGKEREFVAGIGKGSSTNYADSVKGRFTISRDNAKNTVYLQMNSLKPEDTAVYYCAAVHYIGHAYYYWGQGTQVTVSS

SEQ ID NO: 32176 - protein, 120 aa, Artificial Sequence
  Chemically Synthesized
QVQLQESGGGLVQAGGSLRLSCAASGYIFRTSHMGWYRQAPGKEREFVASINDGSITNYADSVKGRFTISRDNAKNTVYLQMNSLKPEDTAVYYCAVTQYGYAGGNFPYWGQGTQVTVSS

SEQ ID NO: 32177 - protein, 119 aa, Artificial Sequence
  Chemically Synthesized
QVQLQESGGGLVQAGGSLRLSCAASGYISQQDDLMGWYRQAPGKEREFVASIGYGTSTNYADSVKGRFTISRDNAKNTVYLQMNSLKPEDTAVYYCAVPGVVGGAYTYWGQGTQVTVSS

SEQ ID NO: 32178 - protein, 120 aa, Artificial Sequence
  Chemically Synthesized
QVQLQESGGGLVQAGGSLRLSCAASGSILRTVMGWYRQAPGKERELVAGIGAGASTYYADSVKGRFTISRDNAKNTVYLQMNSLKPEDTAVYYCAVRITTTWVNSTVMYWGQGTQVTVSS

SEQ ID NO: 32179 - protein, 118 aa, Artificial Sequence
  Chemically Synthesized
QVQLQESGGGLVQAGGSLRLSCAASGTISTLPVMGWYRQAPGKEREFVAAIADGGSTNYADSVKGRFTISRDNAKNTVYLQMNSLKPEDTAVYYCAVLTATRGYHSYWGQGTQVTVSS

SEQ ID NO: 32180 - protein, 117 aa, Artificial Sequence
  Chemically Synthesized
QVQLQESGGGLVQAGGSLRLSCAASGYIFDMLMGWYRQAPGKEREFVATISGGTTTNYADSVKGRFTISRDNAKNTVYLQMNSLKPEDTAVYYCAAYDIDYTALFYWGQGTQVTVSS

SEQ ID NO: 32181 - protein, 118 aa, Artificial Sequence
  Chemically Synthesized
QVQLQESGGGLVQAGGSLRLSCAASGTISGTLSMGWYRQAPGKEREFVAGIAIGASTYYADSVKGRFTISRDNAKNTVYLQMNSLKPEDTAVYYCAAVDRDAGYHGYWGQGTQVTVSS

SEQ ID NO: 32182 - protein, 118 aa, Artificial Sequence
  Chemically Synthesized
QVQLQESGGGLVQAGGSLRLSCAASGSISDRRGMGWYRQAPGKERELVAGINDGTSTNYADSVKGRFTISRDNAKNTVYLQMNSLKPEDTAVYYCAAGYAPGVYLYYWGQGTQVTVSS

SEQ ID NO: 32183 - protein, 118 aa, Artificial Sequence
  Chemically Synthesized
QVQLQESGGGLVQAGGSLRLSCAASGYISRRGYMGWYRQAPGKERELVATIAGGANTYYADSVKGRFTISRDNAKNTVYLQMNSLKPEDTAVYYCAVTDNSIPYLHYWGQGTQVTVSS

SEQ ID NO: 32184 - protein, 126 aa, Artificial Sequence
  Chemically Synthesized
QVQLQESGGGLVQAGGSLRLSCAASGYISARNAMGWYRQAPGKERELVAGIGKGTTTNYADSVKGRFTISRDNAKNTVYLQMNSLKPEDTAVYYCAAINYREDYSSLYDGAWHYYWGQGTQVTVSS

SEQ ID NO: 32185 - protein, 126 aa, Artificial Sequence
  Chemically Synthesized
QVQLQESGGGLVQAGGSLRLSCAASGSIFGRSYMGWYRQAPGKEREFVAGIGDGGSTYYADSVKGRFTISRDNAKNTVYLQMNSLKPEDTAVYYCAVYRLSYLEDINQRYYYYGYWGQGTQVTVSS

SEQ ID NO: 32186 - protein, 118 aa, Artificial Sequence
  Chemically Synthesized
QVQLQESGGGLVQAGGSLRLSCAASGSISVIVVMGWYRQAPGKERELVAAIARGGNTNYADSVKGRFTISRDNAKNTVYLQMNSLKPEDTAVYYCAAVDYVGQYHGYWGQGTQVTVSS

SEQ ID NO: 32187 - protein, 118 aa, Artificial Sequence
  Chemically Synthesized
QVQLQESGGGLVQAGGSLRLSCAASGYISRVRRMGWYRQAPGKERELVAAITSGSITYYADSVKGRFTISRDNAKNTVYLQMNSLKPEDTAVYYCAALYKDNDYHAYWGQGTQVTVSS

SEQ ID NO: 32188 - protein, 122 aa, Artificial Sequence
  Chemically Synthesized
QVQLQESGGGLVQAGGSLRLSCAASGNISTGSFMGWYRQAPGKERELVASIAGGSITYYADSVKGRFTISRDNAKNTVYLQMNSLKPEDTAVYYCAVWLPYHYYNPTTHVYWGQGTQVTVSS

SEQ ID NO: 32189 - protein, 122 aa, Artificial Sequence
  Chemically Synthesized
QVQLQESGGGLVQAGGSLRLSCAASGSISRDDTMGWYRQAPGKERELVATINHGSSTNYADSVKGRFTISRDNAKNTVYLQMNSLKPEDTAVYYCAVEYNSVVGHAVQLPYWGQGTQVTVSS

SEQ ID NO: 32190 - protein, 118 aa, Artificial Sequence
  Chemically Synthesized
QVQLQESGGGLVQAGGSLRLSCAASGSIFVQYDMGWYRQAPGKERELVATIAYGGITYYADSVKGRFTISRDNAKNTVYLQMNSLKPEDTAVYYCAVSYDSADRFVYWGQGTQVTVSS

SEQ ID NO: 32191 - protein, 126 aa, Artificial Sequence
  Chemically Synthesized
QVQLQESGGGLVQAGGSLRLSCAASGTISTVPLMGWYRQAPGKERELVASITGGSTTYYADSVKGRFTISRDNAKNTVYLQMNSLKPEDTAVYYCAASGGSAGPYAQVYADLYRYWGQGTQVTVSS

SEQ ID NO: 32192 - protein, 118 aa, Artificial Sequence
  Chemically Synthesized
QVQLQESGGGLVQAGGSLRLSCAASGSIFSYGGMGWYRQAPGKERELVAAITYGGTTNYADSVKGRFTISRDNAKNTVYLQMNSLKPEDTAVYYCAAIGYRDRWFYYWGQGTQVTVSS

SEQ ID NO: 32193 - protein, 118 aa, Artificial Sequence
  Chemically Synthesized
QVQLQESGGGLVQAGGSLRLSCAASGTISGNVWMGWYRQAPGKERELVAGISYGTITNYADSVKGRFTISRDNAKNTVYLQMNSLKPEDTAVYYCAVGTFYYAFYPYWGQGTQVTVSS

SEQ ID NO: 32194 - protein, 118 aa, Artificial Sequence
  Chemically Synthesized
QVQLQESGGGLVQAGGSLRLSCAASGTISRRHYMGWYRQAPGKERELVAGIDRGSTTNYADSVKGRFTISRDNAKNTVYLQMNSLKPEDTAVYYCAADGVLSTLHYYWGQGTQVTVSS

SEQ ID NO: 32195 - protein, 118 aa, Artificial Sequence
  Chemically Synthesized
QVQLQESGGGLVQAGGSLRLSCAASGNISWLRAMGWYRQAPGKERELVAAISAGGNTNYADSVKGRFTISRDNAKNTVYLQMNSLKPEDTAVYYCAALGPPDTYYYYWGQGTQVTVSS

SEQ ID NO: 32196 - protein, 118 aa, Artificial Sequence
  Chemically Synthesized
QVQLQESGGGLVQAGGSLRLSCAASGTISGEDIMGWYRQAPGKEREFVASIGIGTNTNYADSVKGRFTISRDNAKNTVYLQMNSLKPEDTAVYYCAVLVHRDGYHYYWGQGTQVTVSS

SEQ ID NO: 32197 - protein, 118 aa, Artificial Sequence
  Chemically Synthesized
QVQLQESGGGLVQAGGSLRLSCAASGNISYYRSMGWYRQAPGKEREFVAGIARGSTTNYADSVKGRFTISRDNAKNTVYLQMNSLKPEDTAVYYCAVIYRGSGWFHYWGQGTQVTVSS

SEQ ID NO: 32198 - protein, 118 aa, Artificial Sequence
  Chemically Synthesized
QVQLQESGGGLVQAGGSLRLSCAASGYISPARWMGWYRQAPGKEREFVATINIGTTTNYADSVKGRFTISRDNAKNTVYLQMNSLKPEDTAVYYCAAVYKTATYLGYWGQGTQVTVSS

SEQ ID NO: 32199 - protein, 118 aa, Artificial Sequence
  Chemically Synthesized
QVQLQESGGGLVQAGGSLRLSCAASGNIFGYFVMGWYRQAPGKERELVAGIASGTITYYADSVKGRFTISRDNAKNTVYLQMNSLKPEDTAVYYCAAYYVSTYLLGYWGQGTQVTVSS

SEQ ID NO: 32200 - protein, 118 aa, Artificial Sequence
  Chemically Synthesized
QVQLQESGGGLVQAGGSLRLSCAASGNIFLRRRMGWYRQAPGKEREFVAAITDGGTTNYADSVKGRFTISRDNAKNTVYLQMNSLKPEDTAVYYCAAPRYLYLFFTYWGQGTQVTVSS

SEQ ID NO: 32201 - protein, 118 aa, Artificial Sequence
  Chemically Synthesized
QVQLQESGGGLVQAGGSLRLSCAASGYISHLFTMGWYRQAPGKEREFVATINPGATTYYADSVKGRFTISRDNAKNTVYLQMNSLKPEDTAVYYCAVGVDSGLDLYYWGQGTQVTVSS

SEQ ID NO: 32202 - protein, 118 aa, Artificial Sequence
  Chemically Synthesized
QVQLQESGGGLVQAGGSLRLSCAASGNISTYPYMGWYRQAPGKERELVAAIDIGSITYYADSVKGRFTISRDNAKNTVYLQMNSLKPEDTAVYYCAVVDYGWWTYTYWGQGTQVTVSS

SEQ ID NO: 32203 - protein, 118 aa, Artificial Sequence
  Chemically Synthesized
QVQLQESGGGLVQAGGSLRLSCAASGYIFLYTAMGWYRQAPGKERELVATIGTGSITYYADSVKGRFTISRDNAKNTVYLQMNSLKPEDTAVYYCAVGWAVGNDHPYWGQGTQVTVSS

SEQ ID NO: 32204 - protein, 118 aa, Artificial Sequence
  Chemically Synthesized
QVQLQESGGGLVQAGGSLRLSCAASGTISDWRSMGWYRQAPGKEREFVAGINAGGNTNYADSVKGRFTISRDNAKNTVYLQMNSLKPEDTAVYYCAALSSDVPLHGYWGQGTQVTVSS

SEQ ID NO: 32205 - protein, 121 aa, Artificial Sequence
  Chemically Synthesized
QVQLQESGGGLVQAGGSLRLSCAASGNIFHPYVMGWYRQAPGKEREFVASINDGANTNYADSVKGRFTISRDNAKNTVYLQMNSLKPEDTAVYYCAAVAAAIPGGTWHGYWGQGTQVTVSS

SEQ ID NO: 32206 - protein, 118 aa, Artificial Sequence
  Chemically Synthesized
QVQLQESGGGLVQAGGSLRLSCAASGNKLMGWYRQAPGKERELVAGIDKGAITNYADSVKGRFTISRDNAKNTVYLQMNSLKPEDTAVYYCAVDPSSGWGYDYALGYWGQGTQVTVSS

SEQ ID NO: 32207 - protein, 114 aa, Artificial Sequence
  Chemically Synthesized
QVQLQESGGGLVQAGGSLRLSCAASGNISVDWYMGWYRQAPGKEREFVASITSGYADSVKGRFTISRDNAKNTVYLQMNSLKPEDTAVYYCAVAYYLEGWHYYWGQGTQVTVSS

SEQ ID NO: 32208 - protein, 118 aa, Artificial Sequence
  Chemically Synthesized
QVQLQESGGGLVQAGGSLRLSCAASGTISVDPTMGWYRQAPGKEREFVATIGTGANTNYADSVKGRFTISRDNAKNTVYLQMNSLKPEDTAVYYCAVLYYFSAYHFYWGQGTQVTVSS

SEQ ID NO: 32209 - protein, 118 aa, Artificial Sequence
  Chemically Synthesized
QVQLQESGGGLVQAGGSLRLSCAASGNISVRATMGWYRQAPGKEREFVAGIAFGGITNYADSVKGRFTISRDNAKNTVYLQMNSLKPEDTAVYYCAAVGNDSGYHYYWGQGTQVTVSS

SEQ ID NO: 32210 - protein, 118 aa, Artificial Sequence
  Chemically Synthesized
QVQLQESGGGLVQAGGSLRLSCAASGYIFQSRDMGWYRQAPGKERELVATISYGGSTYYADSVKGRFTISRDNAKNTVYLQMNSLKPEDTAVYYCAASIVHETGHPYWGQGTQVTVSS

SEQ ID NO: 32211 - protein, 118 aa, Artificial Sequence
  Chemically Synthesized
QVQLQESGGGLVQAGGSLRLSCAASGYISPVIYMGWYRQAPGKERELVAAIDRGGNTNYADSVKGRFTISRDNAKNTVYLQMNSLKPEDTAVYYCAVIYYSDRWHWYWGQGTQVTVSS

SEQ ID NO: 32212 - protein, 122 aa, Artificial Sequence
  Chemically Synthesized
QVQLQESGGGLVQAGGSLRLSCAASGTIFAYKGMGWYRQAPGKEREFVAGITTGGITYYADSVKGRFTISRDNAKNTVYLQMNSLKPEDTAVYYCAVDSRQRYYQGYRHFYWGQGTQVTVSS

SEQ ID NO: 32213 - protein, 118 aa, Artificial Sequence
  Chemically Synthesized
QVQLQESGGGLVQAGGSLRLSCAASGSISSPFIMGWYRQAPGKEREFVASISNGTITNYADSVKGRFTISRDNAKNTVYLQMNSLKPEDTAVYYCAAVSHGPTLHYYWGQGTQVTVSS

SEQ ID NO: 32214 - protein, 118 aa, Artificial Sequence
  Chemically Synthesized
QVQLQESGGGLVQAGGSLRLSCAASGSISSRSYMGWYRQAPGKEREFVATIAKGTITNYADSVKGRFTISRDNAKNTVYLQMNSLKPEDTAVYYCAAITYTDRWYDYWGQGTQVTVSS

SEQ ID NO: 32215 - protein, 118 aa, Artificial Sequence
  Chemically Synthesized
QVQLQESGGGLVQAGGSLRLSCAASGTISRYYAMGWYRQAPGKEREFVAAIDYGANTNYADSVKGRFTISRDNAKNTVYLQMNSLKPEDTAVYYCAAVSIYSSHHWYWGQGTQVTVSS

SEQ ID NO: 32216 - protein, 122 aa, Artificial Sequence
  Chemically Synthesized
QVQLQESGGGLVQAGGSLRLSCAASGTISHVRVMGWYRQAPGKEREFVAGIDSGANTYYADSVKGRFTISRDNAKNTVYLQMNSLKPEDTAVYYCAVIYYGVRGDRRSLYYWGQGTQVTVSS

SEQ ID NO: 32217 - protein, 118 aa, Artificial Sequence
  Chemically Synthesized
QVQLQESGGGLVQAGGSLRLSCAASGYISVPLVMGWYRQAPGKEREFVAAINTGATTNYADSVKGRFTISRDNAKNTVYLQMNSLKPEDTAVYYCAAVVHDGFRHYYWGQGTQVTVSS

SEQ ID NO: 32218 - protein, 118 aa, Artificial Sequence
  Chemically Synthesized
QVQLQESGGGLVQAGGSLRLSCAASGNISAPGYMGWYRQAPGKEREFVATIGSGSITNYADSVKGRFTISRDNAKNTVYLQMNSLKPEDTAVYYCAAVYRYHNYLYYWGQGTQVTVSS

SEQ ID NO: 32219 - protein, 118 aa, Artificial Sequence
  Chemically Synthesized
QVQLQESGGGLVQAGGSLRLSCAASGTISYPVAMGWYRQAPGKEREFVASIAQGSTTNYADSVKGRFTISRDNAKNTVYLQMNSLKPEDTAVYYCAVVTFYERYHYYWGQGTQVTVSS

SEQ ID NO: 32220 - protein, 121 aa, Artificial Sequence
  Chemically Synthesized
QVQLQESGGGLVQAGGSLRLSCAASGYISTVFYMGWYRQAPGKEREFVAAIARGSSTNYADSVKGRFTISRDNAKNTVYLQMNSLKPEDTAVYYCAAVGQLEGGYSYHYYWGQGTQVTVSS

SEQ ID NO: 32221 - protein, 121 aa, Artificial Sequence
  Chemically Synthesized
QVQLQESGGGLVQAGGSLRLSCAASGYISRSYHMGWYRQAPGKEREFVASINYGSNTNYADSVKGRFTISRDNAKNTVYLQMNSLKPEDTAVYYCALMVCGLGTTLLVIYWGQGTQVTVSS

SEQ ID NO: 32222 - protein, 121 aa, Artificial Sequence
  Chemically Synthesized
QVQLQESGGGLVQAGGSLRLSCAASGYISYPSYMGWYRQAPGKEREFVATITLGSTTYYADSVKGRFTISRDNAKNTVYLQMNSLKPEDTAVYYCAVSDTSGAYSSVVIYWGQGTQVTVSS

SEQ ID NO: 32223 - protein, 118 aa, Artificial Sequence
  Chemically Synthesized
QVQLQESGGGLVQAGGSLRLSCAASGSIFYAFAMGWYRQAPGKEREFVAAIAKGAITNYADSVKGRFTISRDNAKNTVYLQMNSLKPEDTAVYYCAAIFRNNGIFSYWGQGTQVTVSS

SEQ ID NO: 32224 - protein, 122 aa, Artificial Sequence
  Chemically Synthesized
QVQLQESGGGLVQAGGSLRLSCAASGYISDVLVMGWYRQAPGKERELVATIGGGGNTYYADSVKGRFTISRDNAKNTVYLQMNSLKPEDTAVYYCAVALPDNTQSDYYLPYWGQGTQVTVSS

SEQ ID NO: 32225 - protein, 126 aa, Artificial Sequence
  Chemically Synthesized
QVQLQESGGGLVQAGGSLRLSCAASGTIFELQRMGWYRQAPGKERELVAGIDRGGSTYYADSVKGRFTISRDNAKNTVYLQMNSLKPEDTAVYYCAAEWYDYSIYRWYPYWSYHYWGQGTQVTVSS

SEQ ID NO: 32226 - protein, 118 aa, Artificial Sequence
  Chemically Synthesized
QVQLQESGGGLVQAGGSLRLSCAASGNISTYLSMGWYRQAPGKERELVATIDYGTSTYYADSVKGRFTISRDNAKNTVYLQMNSLKPEDTAVYYCAAISAKPYTFYYWGQGTQVTVSS

SEQ ID NO: 32227 - protein, 118 aa, Artificial Sequence
  Chemically Synthesized
QVQLQESGGGLVQAGGSLRLSCAASGNIFRYYYMGWYRQAPGKEREFVAAIALGSTTNYADSVKGRFTISRDNAKNTVYLQMNSLKPEDTAVYYCAALDSGRYDHFYWGQGTQVTVSS

SEQ ID NO: 32228 - protein, 118 aa, Artificial Sequence
  Chemically Synthesized
QVQLQESGGGLVQAGGSLRLSCAASGNISVRYAMGWYRQAPGKEREFVAGISIGAITNYADSVKGRFTISRDNAKNTVYLQMNSLKPEDTAVYYCAAISYDEYSYYYWGQGTQVTVSS

SEQ ID NO: 32229 - protein, 118 aa, Artificial Sequence
  Chemically Synthesized
QVQLQESGGGLVQAGGSLRLSCAASGNIFFYRPMGWYRQAPGKEREFVAAIGYGTTTYYADSVKGRFTISRDNAKNTVYLQMNSLKPEDTAVYYCAAEWPWYYTHPYWGQGTQVTVSS

SEQ ID NO: 32230 - protein, 118 aa, Artificial Sequence
  Chemically Synthesized
QVQLQESGGGLVQAGGSLRLSCAASGTISLFYVMGWYRQAPGKERELVAAISSGASTNYADSVKGRFTISRDNAKNTVYLQMNSLKPEDTAVYYCAVVYRDDGWHGYWGQGTQVTVSS

SEQ ID NO: 32231 - protein, 118 aa, Artificial Sequence
  Chemically Synthesized
QVQLQESGGGLVQAGGSLRLSCAASGTISYPVIMGWYRQAPGKEREFVAGIDPGTTTNYADSVKGRFTISRDNAKNTVYLQMNSLKPEDTAVYYCAVLIWTRRWLDYWGQGTQVTVSS

SEQ ID NO: 32232 - protein, 118 aa, Artificial Sequence
  Chemically Synthesized
QVQLQESGGGLVQAGGSLRLSCAASGNIFDPWQMGWYRQAPGKEREFVAAISSGSTTYYADSVKGRFTISRDNAKNTVYLQMNSLKPEDTAVYYCAAIEYNYGWHYYWGQGTQVTVSS

SEQ ID NO: 32233 - protein, 118 aa, Artificial Sequence
  Chemically Synthesized
QVQLQESGGGLVQAGGSLRLSCAASGSISLYYAMGWYRQAPGKERELVAGISLGAITYYADSVKGRFTISRDNAKNTVYLQMNSLKPEDTAVYYCAAVVYVESYHGYWGQGTQVTVSS

SEQ ID NO: 32234 - protein, 122 aa, Artificial Sequence
  Chemically Synthesized
QVQLQESGGGLVQAGGSLRLSCAASGNISYDRDMGWYRQAPGKEREFVAGIDGGANTNYADSVKGRFTISRDNAKNTVYLQMNSLKPEDTAVYYCAVDDIADDLLRWYSSYWGQGTQVTVSS

SEQ ID NO: 32235 - protein, 121 aa, Artificial Sequence
  Chemically Synthesized
QVQLQESGGGLVQAGGSLRLSCAASGYIFGSLMGWYRQAPGKEREFVASIDYGATTNYADSVKGRFTISRDNAKNTVYLQMNSLKPEDTAVYYCAVPLGYPKALDNEHYYWGQGTQVTVSS

SEQ ID NO: 32236 - protein, 117 aa, Artificial Sequence
  Chemically Synthesized
QVQLQESGGGLVQAGGSLRLSCAASGNISSTVMGWYRQAPGKEREFVAAIDVGAITNYADSVKGRFTISRDNAKNTVYLQMNSLKPEDTAVYYCAALYRGKESFYYWGQGTQVTVSS

SEQ ID NO: 32237 - protein, 122 aa, Artificial Sequence
  Chemically Synthesized
QVQLQESGGGLVQAGGSLRLSCAASGNISRRTIMGWYRQAPGKEREFVAAISFGAITNYADSVKGRFTISRDNAKNTVYLQMNSLKPEDTAVYYCAVVWGDRIGSSRYHYYWGQGTQVTVSS

SEQ ID NO: 32238 - protein, 122 aa, Artificial Sequence
  Chemically Synthesized
QVQLQESGGGLVQAGGSLRLSCAASGYIFGYTRMGWYRQAPGKERELVASINRGSNTYYADSVKGRFTISRDNAKNTVYLQMNSLKPEDTAVYYCAVFTIYSILYVTHHDYWGQGTQVTVSS

SEQ ID NO: 32239 - protein, 118 aa, Artificial Sequence
  Chemically Synthesized
QVQLQESGGGLVQAGGSLRLSCAASGNISSYRAMGWYRQAPGKERELVAGINTGSTTNYADSVKGRFTISRDNAKNTVYLQMNSLKPEDTAVYYCAAYGYSSGYFYYWGQGTQVTVSS

SEQ ID NO: 32240 - protein, 118 aa, Artificial Sequence
  Chemically Synthesized
QVQLQESGGGLVQAGGSLRLSCAASGYIFLRDPMGWYRQAPGKERELVAAINRGASTYYADSVKGRFTISRDNAKNTVYLQMNSLKPEDTAVYYCAAAYRDQAWHYYWGQGTQVTVSS

SEQ ID NO: 32241 - protein, 118 aa, Artificial Sequence
  Chemically Synthesized
QVQLQESGGGLVQAGGSLRLSCAASGNIFLPSLMGWYRQAPGKERELVATINGGGITYYADSVKGRFTISRDNAKNTVYLQMNSLKPEDTAVYYCAVPAVLLTALGYWGQGTQVTVSS

SEQ ID NO: 32242 - protein, 118 aa, Artificial Sequence
  Chemically Synthesized
QVQLQESGGGLVQAGGSLRLSCAASGTISTVGAMGWYRQAPGKEREFVATINAGGSTNYADSVKGRFTISRDNAKNTVYLQMNSLKPEDTAVYYCAATRYHGRWHYYWGQGTQVTVSS

SEQ ID NO: 32243 - protein, 118 aa, Artificial Sequence
  Chemically Synthesized
QVQLQESGGGLVQAGGSLRLSCAASGTISDAYAMGWYRQAPGKERELVASINIGGSTYYADSVKGRFTISRDNAKNTVYLQMNSLKPEDTAVYYCAVVWQDGSWHYYWGQGTQVTVSS

SEQ ID NO: 32244 - protein, 118 aa, Artificial Sequence
  Chemically Synthesized
QVQLQESGGGLVQAGGSLRLSCAASGNISRYKGMGWYRQAPGKEREFVAGIGPGGTTNYADSVKGRFTISRDNAKNTVYLQMNSLKPEDTAVYYCAVTYYADSWYYYWGQGTQVTVSS

SEQ ID NO: 32245 - protein, 116 aa, Artificial Sequence
  Chemically Synthesized
QVQLQESGGGLVQAGGSLRLSCAASGNIFGFTAMGWYRQAPGKEREFVAGISAGANTYYADSVKGRFTISRDNAKNTVYLQMNSLKPEDTAVYYCAAVVNARHYYWGQGTQVTVSS

SEQ ID NO: 32246 - protein, 118 aa, Artificial Sequence
  Chemically Synthesized
QVQLQESGGGLVQAGGSLRLSCAASGTISPQARMGWYRQAPGKEREFVASITDGAITYYADSVKGRFTISRDNAKNTVYLQMNSLKPEDTAVYYCAAAIYDDRWHAYWGQGTQVTVSS

SEQ ID NO: 32247 - protein, 118 aa, Artificial Sequence
  Chemically Synthesized
QVQLQESGGGLVQAGGSLRLSCAASGSISRYAIMGWYRQAPGKERELVAGIGYGGNTNYADSVKGRFTISRDNAKNTVYLQMNSLKPEDTAVYYCAVVWKAGRYLYYWGQGTQVTVSS

SEQ ID NO: 32248 - protein, 117 aa, Artificial Sequence
  Chemically Synthesized
QVQLQESGGGLVQAGGSLRLSCAASGNIFLSSMGWYRQAPGKEREFVAAISKGTSTNYADSVKGRFTISRDNAKNTVYLQMNSLKPEDTAVYYCAAVWRDKYWHDYWGQGTQVTVSS

SEQ ID NO: 32249 - protein, 118 aa, Artificial Sequence
  Chemically Synthesized
QVQLQESGGGLVQAGGSLRLSCAASGSISRRYAMGWYRQAPGKEREFVAAIGTGGITNYADSVKGRFTISRDNAKNTVYLQMNSLKPEDTAVYYCAAVYYTDARYYYWGQGTQVTVSS

SEQ ID NO: 32250 - protein, 117 aa, Artificial Sequence
  Chemically Synthesized
QVQLQESGGGLVQAGGSLRLSCAASGTIFSTSTMGWYRQAPGKEREFVAGITYGGTTYYADSVKGRFTISRDNAKNTVYLQMNSLKPEDTAVYYCAAYDKYAHHYYWGQGTQVTVSS

SEQ ID NO: 32251 - protein, 118 aa, Artificial Sequence
  Chemically Synthesized
QVQLQESGGGLVQAGGSLRLSCAASGYIFVRLRMGWYRQAPGKEREFVAGIGTGGSTNYADSVKGRFTISRDNAKNTVYLQMNSLKPEDTAVYYCAAAYRQDYWYYYWGQGTQVTVSS

SEQ ID NO: 32252 - protein, 122 aa, Artificial Sequence
  Chemically Synthesized
QVQLQESGGGLVQAGGSLRLSCAASGYISQIVRMGWYRQAPGKEREFVATIGYGAITYYADSVKGRFTISRDNAKNTVYLQMNSLKPEDTAVYYCAAVTYNDSNSSRYHAYWGQGTQVTVSS

SEQ ID NO: 32253 - protein, 126 aa, Artificial Sequence
  Chemically Synthesized
QVQLQESGGGLVQAGGSLRLSCAASGTISYRLIMGWYRQAPGKEREFVAGIGSGGTTNYADSVKGRFTISRDNAKNTVYLQMNSLKPEDTAVYYCAATYYDKQDTNGDRTGWHGYWGQGTQVTVSS

SEQ ID NO: 32254 - protein, 118 aa, Artificial Sequence
  Chemically Synthesized
QVQLQESGGGLVQAGGSLRLSCAASGYISPGQAMGWYRQAPGKERELVATIAIGGITNYADSVKGRFTISRDNAKNTVYLQMNSLKPEDTAVYYCAAPFIVEYGYDYWGQGTQVTVSS

SEQ ID NO: 32255 - protein, 122 aa, Artificial Sequence
  Chemically Synthesized
QVQLQESGGGLVQAGGSLRLSCAASGNIFDRRAMGWYRQAPGKEREFVAAINVGGSTYYADSVKGRFTISRDNAKNTVYLQMNSLKPEDTAVYYCAVDPVPYLRIYAHYAYWGQGTQVTVSS

SEQ ID NO: 32256 - protein, 118 aa, Artificial Sequence
  Chemically Synthesized
QVQLQESGGGLVQAGGSLRLSCAASGNISPSSYMGWYRQAPGKERELVAAISGGSNTNYADSVKGRFTISRDNAKNTVYLQMNSLKPEDTAVYYCAVGKRGDTSHGYWGQGTQVTVSS

SEQ ID NO: 32257 - protein, 118 aa, Artificial Sequence
  Chemically Synthesized
QVQLQESGGGLVQAGGSLRLSCAASGYISPTSNMGWYRQAPGKEREFVATIAGGATTNYADSVKGRFTISRDNAKNTVYLQMNSLKPEDTAVYYCAVDSLHDFFLLYWGQGTQVTVSS

SEQ ID NO: 32258 - protein, 118 aa, Artificial Sequence
  Chemically Synthesized
QVQLQESGGGLVQAGGSLRLSCAASGYISSYPVMGWYRQAPGKERELVAAISDGTTTNYADSVKGRFTISRDNAKNTVYLQMNSLKPEDTAVYYCAVGYFYRDGLPYWGQGTQVTVSS

SEQ ID NO: 32259 - protein, 116 aa, Artificial Sequence
  Chemically Synthesized
QVQLQESGGGLVQAGGSLRLSCAASGNISLQNYMGWYRQAPGKEREFVATNTNYADSVKGRFTISRDNAKNTVYLQMNSLKPEDTAVYYCAAQIDVAYYSTLTIYWGQGTQVTVSS

SEQ ID NO: 32260 - protein, 118 aa, Artificial Sequence
  Chemically Synthesized
QVQLQESGGGLVQAGGSLRLSCAASGNISAYQYMGWYRQAPGKEREFVATITSGGITNYADSVKGRFTISRDNAKNTVYLQMNSLKPEDTAVYYCAAQGLSDTEHAYWGQGTQVTVSS

SEQ ID NO: 32261 - protein, 122 aa, Artificial Sequence
  Chemically Synthesized
QVQLQESGGGLVQAGGSLRLSCAASGYISTIDSMGWYRQAPGKERELVAAIGDGGSTNYADSVKGRFTISRDNAKNTVYLQMNSLKPEDTAVYYCAVNYDDQRDTVIVLQYWGQGTQVTVSS

SEQ ID NO: 32262 - protein, 118 aa, Artificial Sequence
  Chemically Synthesized
QVQLQESGGGLVQAGGSLRLSCAASGSISAGRYMGWYRQAPGKEREFVASISTGTTTYYADSVKGRFTISRDNAKNTVYLQMNSLKPEDTAVYYCAVRYNTIDYYWYWGQGTQVTVSS

SEQ ID NO: 32263 - protein, 122 aa, Artificial Sequence
  Chemically Synthesized
QVQLQESGGGLVQAGGSLRLSCAASGNIFRYYLMGWYRQAPGKEREFVATITRGGTTNYADSVKGRFTISRDNAKNTVYLQMNSLKPEDTAVYYCAAYDAKRVGTPDHYRYWGQGTQVTVSS

SEQ ID NO: 32264 - protein, 122 aa, Artificial Sequence
  Chemically Synthesized
QVQLQESGGGLVQAGGSLRLSCAASGTISYLRDMGWYRQAPGKEREFVAAISTGSTTYYADSVKGRFTISRDNAKNTVYLQMNSLKPEDTAVYYCAVAYADRGGTTDDYSYWGQGTQVTVSS

SEQ ID NO: 32265 - protein, 118 aa, Artificial Sequence
  Chemically Synthesized
QVQLQESGGGLVQAGGSLRLSCAASGTIFNRILMGWYRQAPGKERELVASINLGATTYYADSVKGRFTISRDNAKNTVYLQMNSLKPEDTAVYYCAVFVYSYSRHDYWGQGTQVTVSS

SEQ ID NO: 32266 - protein, 122 aa, Artificial Sequence
  Chemically Synthesized
QVQLQESGGGLVQAGGSLRLSCAASGNISDASYMGWYRQAPGKEREFVAAIDDGTNTNYADSVKGRFTISRDNAKNTVYLQMNSLKPEDTAVYYCAVGALDGNPTGYGHSYWGQGTQVTVSS

SEQ ID NO: 32267 - protein, 118 aa, Artificial Sequence
  Chemically Synthesized
QVQLQESGGGLVQAGGSLRLSCAASGTIFSVHYMGWYRQAPGKEREFVAGIGDGGNTYYADSVKGRFTISRDNAKNTVYLQMNSLKPEDTAVYYCAVYYKRSESYRYWGQGTQVTVSS

SEQ ID NO: 32268 - protein, 118 aa, Artificial Sequence
  Chemically Synthesized
QVQLQESGGGLVQAGGSLRLSCAASGNIFYSGYMGWYRQAPGKEREFVAGISFGASTYYADSVKGRFTISRDNAKNTVYLQMNSLKPEDTAVYYCAVYIYLPATLYYWGQGTQVTVSS

SEQ ID NO: 32269 - protein, 122 aa, Artificial Sequence
  Chemically Synthesized
QVQLQESGGGLVQAGGSLRLSCAASGTIFISNTMGWYRQAPGKERELVASITRGTITNYADSVKGRFTISRDNAKNTVYLQMNSLKPEDTAVYYCAVYYALYGYLTKYHPYWGQGTQVTVSS

SEQ ID NO: 32270 - protein, 122 aa, Artificial Sequence
  Chemically Synthesized
QVQLQESGGGLVQAGGSLRLSCAASGYISKYAAMGWYRQAPGKEREFVATISDGTSTNYADSVKGRFTISRDNAKNTVYLQMNSLKPEDTAVYYCAVANYHGYWVLVLFVYWGQGTQVTVSS

SEQ ID NO: 32271 - protein, 118 aa, Artificial Sequence
  Chemically Synthesized
QVQLQESGGGLVQAGGSLRLSCAASGNIFAYEYMGWYRQAPGKERELVAAITQGSTTNYADSVKGRFTISRDNAKNTVYLQMNSLKPEDTAVYYCAVDSTIHYRLNYWGQGTQVTVSS

SEQ ID NO: 32272 - protein, 126 aa, Artificial Sequence
  Chemically Synthesized
QVQLQESGGGLVQAGGSLRLSCAASGTISPYPYMGWYRQAPGKERELVAAINAGGTTYYADSVKGRFTISRDNAKNTVYLQMNSLKPEDTAVYYCAAYVDPYDFFWFNTDYVHGYWGQGTQVTVSS

SEQ ID NO: 32273 - protein, 118 aa, Artificial Sequence
  Chemically Synthesized
QVQLQESGGGLVQAGGSLRLSCAASGSISRWIVMGWYRQAPGKEREFVASIDGGSTTYYADSVKGRFTISRDNAKNTVYLQMNSLKPEDTAVYYCAAYYVDPYGHVYWGQGTQVTVSS

SEQ ID NO: 32274 - protein, 124 aa, Artificial Sequence
  Chemically Synthesized
QVQLQESGGGLVQAGGSLRLSCAASGYFCFYLMGWYRQAPGKEREFVASIASVVIPYADSVKGRFTISRDNAKNTVYLQMNSLKPEDTAVYYCAVGDAVVVQRQDYLVTGFTYWGQGTQVTVSS

SEQ ID NO: 32275 - protein, 121 aa, Artificial Sequence
  Chemically Synthesized
QVQLQESGGGLVQAGGSLRLSCAASGYIFSPNAMGWYRQAPGKERELVAGIDDGANTNYADSVKGRFTISRDNAKNTVYLQMNSLKPEDTAVYYCAVDTSTVTLLFRFIYWGQGTQVTVSS

SEQ ID NO: 32276 - protein, 122 aa, Artificial Sequence
  Chemically Synthesized
QVQLQESGGGLVQAGGSLRLSCAASGTIFRYVQMGWYRQAPGKEREFVAAIDYGGNTYYADSVKGRFTISRDNAKNTVYLQMNSLKPEDTAVYYCAAAGNKPADVGYYYSYWGQGTQVTVSS

SEQ ID NO: 32277 - protein, 122 aa, Artificial Sequence
  Chemically Synthesized
QVQLQESGGGLVQAGGSLRLSCAASGNIFVSYYMGWYRQAPGKEREFVASIGRGGITYYADSVKGRFTISRDNAKNTVYLQMNSLKPEDTAVYYCAANVTLPGTDSASYLYWGQGTQVTVSS

SEQ ID NO: 32278 - protein, 117 aa, Artificial Sequence
  Chemically Synthesized
QVQLQESGGGLVQAGGSLRLSCAASGTISYGIMGWYRQAPGKERELVASIAFGAITYYADSVKGRFTISRDNAKNTVYLQMNSLKPEDTAVYYCAADGYYYLVHEYWGQGTQVTVSS

SEQ ID NO: 32279 - protein, 126 aa, Artificial Sequence
  Chemically Synthesized
QVQLQESGGGLVQAGGSLRLSCAASGTISAYRPMGWYRQAPGKERELVASIGTGSTTYYADSVKGRFTISRDNAKNTVYLQMNSLKPEDTAVYYCAALYIQSDGSRVDAPWWHDYWGQGTQVTVSS

SEQ ID NO: 32280 - protein, 126 aa, Artificial Sequence
  Chemically Synthesized
QVQLQESGGGLVQAGGSLRLSCAASGYIFAPWAMGWYRQAPGKERELVAAIGYGGTTNYADSVKGRFTISRDNAKNTVYLQMNSLKPEDTAVYYCAAYKIPTEGWATAHYPGPLYWGQGTQVTVSS

SEQ ID NO: 32281 - protein, 121 aa, Artificial Sequence
  Chemically Synthesized
QVQLQESGGGLVQAGGSLRLSCAASGNISTANRMGWYRQAPGKERELVATIGSVLIPYADSVKGRFTISRDNAKNTVYLQMNSLKPEDTAVYYCAVDTPAGAAADIDHDYWGQGTQVTVSS

SEQ ID NO: 32282 - protein, 118 aa, Artificial Sequence
  Chemically Synthesized
QVQLQESGGGLVQAGGSLRLSCAASGYISLYTYMGWYRQAPGKEREFVASITSGGSTYYADSVKGRFTISRDNAKNTVYLQMNSLKPEDTAVYYCAVLYGALHAYYYWGQGTQVTVSS

SEQ ID NO: 32283 - protein, 118 aa, Artificial Sequence
  Chemically Synthesized
QVQLQESGGGLVQAGGSLRLSCAASGSIFGPPYMGWYRQAPGKEREFVAGINGGSSTYYADSVKGRFTISRDNAKNTVYLQMNSLKPEDTAVYYCAAYGPDSDGHPYWGQGTQVTVSS

SEQ ID NO: 32284 - protein, 118 aa, Artificial Sequence
  Chemically Synthesized
QVQLQESGGGLVQAGGSLRLSCAASGSISYPQNMGWYRQAPGKERELVASITDGSSTYYADSVKGRFTISRDNAKNTVYLQMNSLKPEDTAVYYCAVDQDPYDLYYYWGQGTQVTVSS

SEQ ID NO: 32285 - protein, 122 aa, Artificial Sequence
  Chemically Synthesized
QVQLQESGGGLVQAGGSLRLSCAASGSISAQWFMGWYRQAPGKERELVAAITSGTTTYYADSVKGRFTISRDNAKNTVYLQMNSLKPEDTAVYYCAADPYYNQPPHRTLGYWGQGTQVTVSS

SEQ ID NO: 32286 - protein, 117 aa, Artificial Sequence
  Chemically Synthesized
QVQLQESGGGLVQAGGSLRLSCAASGYISGLVDMGWYRQAPGKEREFVATINYGTTTYYADSVKGRFTISRDNAKNTVYLQMNSLKPEDTAVYYCAAIPSSTTIIYWGQGTQVTVSS

SEQ ID NO: 32287 - protein, 118 aa, Artificial Sequence
  Chemically Synthesized
QVQLQESGGGLVQAGGSLRLSCAASGTIFSQDQMGWYRQAPGKEREFVASINYGATTYYADSVKGRFTISRDNAKNTVYLQMNSLKPEDTAVYYCAANWRAYATHPYWGQGTQVTVSS

SEQ ID NO: 32288 - protein, 118 aa, Artificial Sequence
  Chemically Synthesized
QVQLQESGGGLVQAGGSLRLSCAASGNIFYHTLMGWYRQAPGKERELVASIDYGSSTYYADSVKGRFTISRDNAKNTVYLQMNSLKPEDTAVYYCAAYADTKPYHDYWGQGTQVTVSS

SEQ ID NO: 32289 - protein, 117 aa, Artificial Sequence
  Chemically Synthesized
QVQLQESGGGLVQAGGSLRLSCAASGTISPRAYMGWYRQAPGKERELVATITSVVLPYADSVKGRFTISRDNAKNTVYLQMNSLKPEDTAVYYCAVLRGWTDLFIYWGQGTQVTVSS

SEQ ID NO: 32290 - protein, 117 aa, Artificial Sequence
  Chemically Synthesized
QVQLQESGGGLVQAGGSLRLSCAASGTISAYRMGWYRQAPGKEREFVAAISDGASTNYADSVKGRFTISRDNAKNTVYLQMNSLKPEDTAVYYCAAYLFYTTDYSYWGQGTQVTVSS

SEQ ID NO: 32291 - protein, 118 aa, Artificial Sequence
  Chemically Synthesized
QVQLQESGGGLVQAGGSLRLSCAASGSIFEGATMGWYRQAPGKEREFVAGIGRGSNTYYADSVKGRFTISRDNAKNTVYLQMNSLKPEDTAVYYCAADVAVDDYYLYWGQGTQVTVSS

SEQ ID NO: 32292 - protein, 122 aa, Artificial Sequence
  Chemically Synthesized
QVQLQESGGGLVQAGGSLRLSCAASGSISPWWLMGWYRQAPGKEREFVAAIAYGSNTYYADSVKGRFTISRDNAKNTVYLQMNSLKPEDTAVYYCAVQRYYRYAWRWRYVYWGQGTQVTVSS

SEQ ID NO: 32293 - protein, 122 aa, Artificial Sequence
  Chemically Synthesized
QVQLQESGGGLVQAGGSLRLSCAASGSISSYPYMGWYRQAPGKERELVASIDYGSNTNYADSVKGRFTISRDNAKNTVYLQMNSLKPEDTAVYYCAVKWRYEYYYSLWHYYWGQGTQVTVSS

SEQ ID NO: 32294 - protein, 118 aa, Artificial Sequence
  Chemically Synthesized
QVQLQESGGGLVQAGGSLRLSCAASGTISATAYMGWYRQAPGKEREFVAAINDGSTTNYADSVKGRFTISRDNAKNTVYLQMNSLKPEDTAVYYCAVGSYIKDTHHYWGQGTQVTVSS

SEQ ID NO: 32295 - protein, 122 aa, Artificial Sequence
  Chemically Synthesized
QVQLQESGGGLVQAGGSLRLSCAASGYIFGGNGMGWYRQAPGKEREFVATIGYGSITNYADSVKGRFTISRDNAKNTVYLQMNSLKPEDTAVYYCAADNLRDLRAYVVLDYWGQGTQVTVSS

SEQ ID NO: 32296 - protein, 118 aa, Artificial Sequence
  Chemically Synthesized
QVQLQESGGGLVQAGGSLRLSCAASGYIFSLLSMGWYRQAPGKEREFVAAISLGANTNYADSVKGRFTISRDNAKNTVYLQMNSLKPEDTAVYYCAVVSAWRTYFYYWGQGTQVTVSS

SEQ ID NO: 32297 - protein, 118 aa, Artificial Sequence
  Chemically Synthesized
QVQLQESGGGLVQAGGSLRLSCAASGYISEYYAMGWYRQAPGKERELVATISNGGSTYYADSVKGRFTISRDNAKNTVYLQMNSLKPEDTAVYYCAAHGTETGLHYYWGQGTQVTVSS

SEQ ID NO: 32298 - protein, 118 aa, Artificial Sequence
  Chemically Synthesized
QVQLQESGGGLVQAGGSLRLSCAASGSISDASNMGWYRQAPGKEREFVAAIGAGGTTNYADSVKGRFTISRDNAKNTVYLQMNSLKPEDTAVYYCAVDPDTAPSLSYWGQGTQVTVSS

SEQ ID NO: 32299 - protein, 118 aa, Artificial Sequence
  Chemically Synthesized
QVQLQESGGGLVQAGGSLRLSCAASGYISGYSYMGWYRQAPGKEREFVATIAYGATTNYADSVKGRFTISRDNAKNTVYLQMNSLKPEDTAVYYCAVYDSDATPHPYWGQGTQVTVSS

SEQ ID NO: 32300 - protein, 126 aa, Artificial Sequence
  Chemically Synthesized
QVQLQESGGGLVQAGGSLRLSCAASGSIFPGPFMGWYRQAPGKERELVAAIAGGGSTNYADSVKGRFTISRDNAKNTVYLQMNSLKPEDTAVYYCAAYGDVNLQKRAPHGYDHGYWGQGTQVTVSS

SEQ ID NO: 32301 - protein, 126 aa, Artificial Sequence
  Chemically Synthesized
QVQLQESGGGLVQAGGSLRLSCAASGNIFPTTGMGWYRQAPGKEREFVASIDDGGSTNYADSVKGRFTISRDNAKNTVYLQMNSLKPEDTAVYYCAAYYYGGVPYLYSKWPYHDYWGQGTQVTVSS

SEQ ID NO: 32302 - protein, 118 aa, Artificial Sequence
  Chemically Synthesized
QVQLQESGGGLVQAGGSLRLSCAASGYIFDQSLMGWYRQAPGKERELVAAISAGANTYYADSVKGRFTISRDNAKNTVYLQMNSLKPEDTAVYYCAASRTDGGYFLYWGQGTQVTVSS

SEQ ID NO: 32303 - protein, 122 aa, Artificial Sequence
  Chemically Synthesized
QVQLQESGGGLVQAGGSLRLSCAASGNISKFYPMGWYRQAPGKEREFVAGITWGTSTYYADSVKGRFTISRDNAKNTVYLQMNSLKPEDTAVYYCAAGGKRLGYLPGKHRYWGQGTQVTVSS

SEQ ID NO: 32304 - protein, 118 aa, Artificial Sequence
  Chemically Synthesized
QVQLQESGGGLVQAGGSLRLSCAASGNISPTDYMGWYRQAPGKERELVASIGYGGSTYYADSVKGRFTISRDNAKNTVYLQMNSLKPEDTAVYYCAVRSPYGTTHHYWGQGTQVTVSS

SEQ ID NO: 32305 - protein, 126 aa, Artificial Sequence
  Chemically Synthesized
QVQLQESGGGLVQAGGSLRLSCAASGTIFQADTMGWYRQAPGKEREFVAAIDTGSITYYADSVKGRFTISRDNAKNTVYLQMNSLKPEDTAVYYCAAYDAPYAKDFAGDEVGYWYWGQGTQVTVSS

SEQ ID NO: 32306 - protein, 121 aa, Artificial Sequence
  Chemically Synthesized
QVQLQESGGGLVQAGGSLRLSCAASGSIFDYYMGWYRQAPGKEREFVAGIAVGANTYYADSVKGRFTISRDNAKNTVYLQMNSLKPEDTAVYYCAAHPGGYAQGQYSHDYWGQGTQVTVSS

SEQ ID NO: 32307 - protein, 118 aa, Artificial Sequence
  Chemically Synthesized
QVQLQESGGGLVQAGGSLRLSCAASGYISVQSVMGWYRQAPGKERELVASIDDGTTTYYADSVKGRFTISRDNAKNTVYLQMNSLKPEDTAVYYCAAEDRSTFGYSYWGQGTQVTVSS

SEQ ID NO: 32308 - protein, 117 aa, Artificial Sequence
  Chemically Synthesized
QVQLQESGGGLVQAGGSLRLSCAASGYISGNRGMGWYRQAPGKERELVATIGQGLVPYADSVKGRFTISRDNAKNTVYLQMNSLKPEDTAVYYCAAYDYTQSSLVYWGQGTQVTVSS

SEQ ID NO: 32309 - protein, 118 aa, Artificial Sequence
  Chemically Synthesized
QVQLQESGGGLVQAGGSLRLSCAASGNISYGPYMGWYRQAPGKEREFVATIDDGATTNYADSVKGRFTISRDNAKNTVYLQMNSLKPEDTAVYYCAVDLSYDQKHVYWGQGTQVTVSS

SEQ ID NO: 32310 - protein, 118 aa, Artificial Sequence
  Chemically Synthesized
QVQLQESGGGLVQAGGSLRLSCAASGNIFDRDTMGWYRQAPGKEREFVATIGSGSNTNYADSVKGRFTISRDNAKNTVYLQMNSLKPEDTAVYYCAVGYDAYQYFRYWGQGTQVTVSS

SEQ ID NO: 32311 - protein, 126 aa, Artificial Sequence
  Chemically Synthesized
QVQLQESGGGLVQAGGSLRLSCAASGNISDYELMGWYRQAPGKERELVASIAIGSSTYYADSVKGRFTISRDNAKNTVYLQMNSLKPEDTAVYYCAVVRVEAYYDRYGYIHYFTYWGQGTQVTVSS

SEQ ID NO: 32312 - protein, 121 aa, Artificial Sequence
  Chemically Synthesized
QVQLQESGGGLVQAGGSLRLSCAASGTIFWFGMGWYRQAPGKEREFVATIDSGATTYYADSVKGRFTISRDNAKNTVYLQMNSLKPEDTAVYYCAVVETDDTGTSGRLDYWGQGTQVTVSS

SEQ ID NO: 32313 - protein, 118 aa, Artificial Sequence
  Chemically Synthesized
QVQLQESGGGLVQAGGSLRLSCAASGNISVKSWMGWYRQAPGKERELVAAIGGGGITNYADSVKGRFTISRDNAKNTVYLQMNSLKPEDTAVYYCAVYYIGHPGHLYWGQGTQVTVSS

SEQ ID NO: 32314 - protein, 125 aa, Artificial Sequence
  Chemically Synthesized
QVQLQESGGGLVQAGGSLRLSCAASGYIFPRGYMGWYRQAPGKEREFVATIAIGATTNYADSVKGRFTISRDNAKNTVYLQMNSLKPEDTAVYYCAADQYPYGRDWDTEYNTLYWGQGTQVTVSS

SEQ ID NO: 32315 - protein, 126 aa, Artificial Sequence
  Chemically Synthesized
QVQLQESGGGLVQAGGSLRLSCAASGSIFNDVYMGWYRQAPGKERELVAGIAYGATTYYADSVKGRFTISRDNAKNTVYLQMNSLKPEDTAVYYCAVTNERLDNWSYDDLSFYEYWGQGTQVTVSS

SEQ ID NO: 32316 - protein, 120 aa, Artificial Sequence
  Chemically Synthesized
QVQLQESGGGLVQAGGSLRLSCAASGYISIDYAMGWYRQAPGKERELPLLLVVVLPYADSVKGRFTISRDNAKNTVYLQMNSLKPEDTAVYYCAVTYTYGGAGYYYHYYWGQGTQVTVSS

SEQ ID NO: 32317 - protein, 117 aa, Artificial Sequence
  Chemically Synthesized
QVQLQESGGGLVQAGGSLRLSCAASGTISADASMGWYRQAPGKEREFVAAITYGTITNYADSVKGRFTISRDNAKNTVYLQMNSLKPEDTAVYYCAVSTTLLVFMYWGQGTQVTVSS

SEQ ID NO: 32318 - protein, 118 aa, Artificial Sequence
  Chemically Synthesized
QVQLQESGGGLVQAGGSLRLSCAASGNISGLSRMGWYRQAPGKERELVAGIAFGSITYYADSVKGRFTISRDNAKNTVYLQMNSLKPEDTAVYYCAVWIGVEGWFDYWGQGTQVTVSS

SEQ ID NO: 32319 - protein, 126 aa, Artificial Sequence
  Chemically Synthesized
QVQLQESGGGLVQAGGSLRLSCAASGTISFPAYMGWYRQAPGKERELVAAIGFGSTTNYADSVKGRFTISRDNAKNTVYLQMNSLKPEDTAVYYCAVWFYYYGAFTYVLLGSHNYWGQGTQVTVSS

SEQ ID NO: 32320 - protein, 118 aa, Artificial Sequence
  Chemically Synthesized
QVQLQESGGGLVQAGGSLRLSCAASGNIFAFLGMGWYRQAPGKEREFVAAIDGGSITYYADSVKGRFTISRDNAKNTVYLQMNSLKPEDTAVYYCAVWRSYPRYHSYWGQGTQVTVSS

SEQ ID NO: 32321 - protein, 118 aa, Artificial Sequence
  Chemically Synthesized
QVQLQESGGGLVQAGGSLRLSCAASGTISSEYKMGWYRQAPGKERELVAGITVGASTYYADSVKGRFTISRDNAKNTVYLQMNSLKPEDTAVYYCAVYTGRSPLLYYWGQGTQVTVSS

SEQ ID NO: 32322 - protein, 118 aa, Artificial Sequence
  Chemically Synthesized
QVQLQESGGGLVQAGGSLRLSCAASGNIFPYVYMGWYRQAPGKERELVASISYGAITNYADSVKGRFTISRDNAKNTVYLQMNSLKPEDTAVYYCAAEPGTDGDFVYWGQGTQVTVSS

SEQ ID NO: 32323 - protein, 122 aa, Artificial Sequence
  Chemically Synthesized
QVQLQESGGGLVQAGGSLRLSCAASGSISKTPQMGWYRQAPGKEREFVASIALGGITYYADSVKGRFTISRDNAKNTVYLQMNSLKPEDTAVYYCAASRYLGSDPWGIHDYWGQGTQVTVSS

SEQ ID NO: 32324 - protein, 122 aa, Artificial Sequence
  Chemically Synthesized
QVQLQESGGGLVQAGGSLRLSCAASGTISPVPYMGWYRQAPGKERELVAAIGSGASTYYADSVKGRFTISRDNAKNTVYLQMNSLKPEDTAVYYCAPDYGYGDADWYPHDYWGQGTQVTVSS

SEQ ID NO: 32325 - protein, 118 aa, Artificial Sequence
  Chemically Synthesized
QVQLQESGGGLVQAGGSLRLSCAASGTISYDPTMGWYRQAPGKERELVATIDIGANTYYADSVKGRFTISRDNAKNTVYLQMNSLKPEDTAVYYCAAYRGLIDYLAYWGQGTQVTVSS

SEQ ID NO: 32326 - protein, 121 aa, Artificial Sequence
  Chemically Synthesized
QVQLQESGGGLVQAGGSLRLSCAASGSISYVTYMGWYRQAPGKERELVAGINDGAITNYADSVKGRFTISRDNAKNTVYLQMNSLKPEDTAVYYCAVIGTTTLTMVRLIYWGQGTQVTVSS

SEQ ID NO: 32327 - protein, 117 aa, Artificial Sequence
  Chemically Synthesized
QVQLQESGGGLVQAGGSLRLSCAASGTISDLDDMGWYRQAPGKERELVALLLKVLLPYADSVKGRFTISRDNAKNTVYLQMNSLKPEDTAVYYCAVYRDAGVRHSYWGQGTQVTVSS

SEQ ID NO: 32328 - protein, 118 aa, Artificial Sequence
  Chemically Synthesized
QVQLQESGGGLVQAGGSLRLSCAASGTIFRDDLMGWYRQAPGKEREFVASISTGTNTNYADSVKGRFTISRDNAKNTVYLQMNSLKPEDTAVYYCAVYQTIVRRLVYWGQGTQVTVSS

SEQ ID NO: 32329 - protein, 126 aa, Artificial Sequence
  Chemically Synthesized
QVQLQESGGGLVQAGGSLRLSCAASGYIFTFEIMGWYRQAPGKERELVATISRGANTYYADSVKGRFTISRDNAKNTVYLQMNSLKPEDTAVYYCAVTYATYGSNTVQSSIEYLYWGQGTQVTVSS

SEQ ID NO: 32330 - protein, 125 aa, Artificial Sequence
  Chemically Synthesized
QVQLQESGGGLVQAGGSLRLSCAASGYISKRSMGWYRQAPGKERELVAGIGIGAITYYADSVKGRFTISRDNAKNTVYLQMNSLKPEDTAVYYCAVPGPASRYTDVYGDSLHRYWGQGTQVTVSS

SEQ ID NO: 32331 - protein, 118 aa, Artificial Sequence
  Chemically Synthesized
QVQLQESGGGLVQAGGSLRLSCAASGYIFRPSDMGWYRQAPGKERELVAAIAYGTITNYADSVKGRFTISRDNAKNTVYLQMNSLKPEDTAVYYCAAIRGVYNTFGYWGQGTQVTVSS

SEQ ID NO: 32332 - protein, 117 aa, Artificial Sequence
  Chemically Synthesized
QVQLQESGGGLVQAGGSLRLSCAASGYIFGTPSMGWYRQAPGKERELVAGIAFGAITNYADSVKGRFTISRDNAKNTVYLQMNSLKPEDTAVYYCAALAQFWALRYWGQGTQVTVSS

SEQ ID NO: 32333 - protein, 122 aa, Artificial Sequence
  Chemically Synthesized
QVQLQESGGGLVQAGGSLRLSCAASGTIFGVSDMGWYRQAPGKEREFVAGINRGAITNYADSVKGRFTISRDNAKNTVYLQMNSLKPEDTAVYYCAALDADWQAYVGGHDYWGQGTQVTVSS

SEQ ID NO: 32334 - protein, 115 aa, Artificial Sequence
  Chemically Synthesized
QVQLQESGGGLVQAGGSLRLSCAASGTIFRVVAMGWYRQAPGKERELVARLVVIPYADSVKGRFTISRDNAKNTVYLQMNSLKPEDTAVYYCAVDDYQYGGLYYWGQGTQVTVSS

SEQ ID NO: 32335 - protein, 126 aa, Artificial Sequence
  Chemically Synthesized
QVQLQESGGGLVQAGGSLRLSCAASGTISQIYYMGWYRQAPGKERELVAGIGHGGITNYADSVKGRFTISRDNAKNTVYLQMNSLKPEDTAVYYCAVDPLYPRKDHVEIHDSFYYWGQGTQVTVSS

SEQ ID NO: 32336 - protein, 113 aa, Artificial Sequence
  Chemically Synthesized
QVQLQESGGGLVQAGGSLRLSCAASGSISPVFMGWYRQAPGKERELVASINEGSNTYYADSVKGRFTISRDNAKNTVYLQMNSLKPEDTAVYYCAVRDSHFYWGQGTQVTVSS

SEQ ID NO: 32337 - protein, 118 aa, Artificial Sequence
  Chemically Synthesized
QVQLQESGGGLVQAGGSLRLSCAASGTISRGSRMGWYRQAPGKERELVAAISTGGTTNYADSVKGRFTISRDNAKNTVYLQMNSLKPEDTAVYYCAVRYSYSYFHYYWGQGTQVTVSS

SEQ ID NO: 32338 - protein, 118 aa, Artificial Sequence
  Chemically Synthesized
QVQLQESGGGLVQAGGSLRLSCAASGSISPYLDMGWYRQAPGKEREFVAGIDIGTTTYYADSVKGRFTISRDNAKNTVYLQMNSLKPEDTAVYYCAVAYDGDRYHRYWGQGTQVTVSS

SEQ ID NO: 32339 - protein, 118 aa, Artificial Sequence
  Chemically Synthesized
QVQLQESGGGLVQAGGSLRLSCAASGTISQRYSMGWYRQAPGKEREFVASISYGATTYYADSVKGRFTISRDNAKNTVYLQMNSLKPEDTAVYYCAVARHKYYWHRYWGQGTQVTVSS

SEQ ID NO: 32340 - protein, 120 aa, Artificial Sequence
  Chemically Synthesized
QVQLQESGGGLVQAGGSLRLSCAASGTIFTRMGWYRQAPGKEREFVAGITDGTSTNYADSVKGRFTISRDNAKNTVYLQMNSLKPEDTAVYYCAAQRSRGWSGSSTYRYWGQGTQVTVSS

SEQ ID NO: 32341 - protein, 118 aa, Artificial Sequence
  Chemically Synthesized
QVQLQESGGGLVQAGGSLRLSCAASGSIFTDIYMGWYRQAPGKERELVASITGGSNTNYADSVKGRFTISRDNAKNTVYLQMNSLKPEDTAVYYCAAGDADYARLGYWGQGTQVTVSS

SEQ ID NO: 32342 - protein, 122 aa, Artificial Sequence
  Chemically Synthesized
QVQLQESGGGLVQAGGSLRLSCAASGNISPAHGMGWYRQAPGKERELVAAISGGSITNYADSVKGRFTISRDNAKNTVYLQMNSLKPEDTAVYYCAANYLGNYLTYTALDYWGQGTQVTVSS

SEQ ID NO: 32343 - protein, 122 aa, Artificial Sequence
  Chemically Synthesized
QVQLQESGGGLVQAGGSLRLSCAASGYIFDWDQMGWYRQAPGKERELVAAIGLGTSTNYADSVKGRFTISRDNAKNTVYLQMNSLKPEDTAVYYCAVLDIRRDVGYVLLGYWGQGTQVTVSS

SEQ ID NO: 32344 - protein, 122 aa, Artificial Sequence
  Chemically Synthesized
QVQLQESGGGLVQAGGSLRLSCAASGYISDYDYMGWYRQAPGKERELVATIGDGSNTYYADSVKGRFTISRDNAKNTVYLQMNSLKPEDTAVYYCAVYYLYDSTLWQVFPYWGQGTQVTVSS

SEQ ID NO: 32345 - protein, 118 aa, Artificial Sequence
  Chemically Synthesized
QVQLQESGGGLVQAGGSLRLSCAASGSISSRLYMGWYRQAPGKEREFVAAIDNGANTYYADSVKGRFTISRDNAKNTVYLQMNSLKPEDTAVYYCAALFIDDSYLGYWGQGTQVTVSS

SEQ ID NO: 32346 - protein, 118 aa, Artificial Sequence
  Chemically Synthesized
QVQLQESGGGLVQAGGSLRLSCAASGTISSYDYMGWYRQAPGKERELVASIAYGGNTYYADSVKGRFTISRDNAKNTVYLQMNSLKPEDTAVYYCAVINSHPLYHSYWGQGTQVTVSS

SEQ ID NO: 32347 - protein, 118 aa, Artificial Sequence
  Chemically Synthesized
QVQLQESGGGLVQAGGSLRLSCAASGSIFDYTLMGWYRQAPGKEREFVAGIDQGTITYYADSVKGRFTISRDNAKNTVYLQMNSLKPEDTAVYYCAVYYSTIAGHFYWGQGTQVTVSS

SEQ ID NO: 32348 - protein, 126 aa, Artificial Sequence
  Chemically Synthesized
QVQLQESGGGLVQAGGSLRLSCAASGNIFGRGWMGWYRQAPGKEREFVAAIGYGGNTNYADSVKGRFTISRDNAKNTVYLQMNSLKPEDTAVYYCAVTADVDPSRGERRHYRFDYWGQGTQVTVSS

SEQ ID NO: 32349 - protein, 122 aa, Artificial Sequence
  Chemically Synthesized
QVQLQESGGGLVQAGGSLRLSCAASGSISWYIRMGWYRQAPGKEREFVAAIAWGSSTNYADSVKGRFTISRDNAKNTVYLQMNSLKPEDTAVYYCAAGLYSPKGPVLDYAYWGQGTQVTVSS

SEQ ID NO: 32350 - protein, 118 aa, Artificial Sequence
  Chemically Synthesized
QVQLQESGGGLVQAGGSLRLSCAASGSIFQNRYMGWYRQAPGKERELVAGISPGGNTYYADSVKGRFTISRDNAKNTVYLQMNSLKPEDTAVYYCAVVQSYPTAFYYWGQGTQVTVSS

SEQ ID NO: 32351 - protein, 118 aa, Artificial Sequence
  Chemically Synthesized
QVQLQESGGGLVQAGGSLRLSCAASGYISYYGHMGWYRQAPGKERELVATIDYGTTTNYADSVKGRFTISRDNAKNTVYLQMNSLKPEDTAVYYCAAWNGYADVLYYWGQGTQVTVSS

SEQ ID NO: 32352 - protein, 121 aa, Artificial Sequence
  Chemically Synthesized
QVQLQESGGGLVQAGGSLRLSCAASGSISTGTAMGWYRQAPGKEREFVPVLILVLLPYADSVKGRFTISRDNAKNTVYLQMNSLKPEDTAVYYCAVDVGYYDYFQLYHSYWGQGTQVTVSS

SEQ ID NO: 32353 - protein, 125 aa, Artificial Sequence
  Chemically Synthesized
QVQLQESGGGLVQAGGSLRLSCAASGSIFDRPDMGWYRQAPGKEREFVAAIARGTNTNYADSVKGRFTISRDNAKNTVYLQMNSLKPEDTAVYYCAAFDGGDLTLLTTFTLTLYWGQGTQVTVSS

SEQ ID NO: 32354 - protein, 121 aa, Artificial Sequence
  Chemically Synthesized
QVQLQESGGGLVQAGGSLRLSCAASGNIFRSYDMGWYRQAPGKERELVASIADGTNTNYADSVKGRFTISRDNAKNTVYLQMNSLKPEDTAVYYCAVSLTTVTLLVNGIYWGQGTQVTVSS

SEQ ID NO: 32355 - protein, 124 aa, Artificial Sequence
  Chemically Synthesized
QVQLQESGGGLVQAGGSLRLSCAASGSISDGSYMGWYRQAPGKERELVASINQGTTYYADSVKGRFTISRDNAKNTVYLQMNSLKPEDTAVYYCAALWVGLYIASSVSTLLMYWGQGTQVTVSS

SEQ ID NO: 32356 - protein, 118 aa, Artificial Sequence
  Chemically Synthesized
QVQLQESGGGLVQAGGSLRLSCAASGTIFNRDYMGWYRQAPGKEREFVASIDYGSTTYYADSVKGRFTISRDNAKNTVYLQMNSLKPEDTAVYYCAVVDQEYSRHFYWGQGTQVTVSS

SEQ ID NO: 32357 - protein, 126 aa, Artificial Sequence
  Chemically Synthesized
QVQLQESGGGLVQAGGSLRLSCAASGNIFRPRLMGWYRQAPGKERELVATIAYGASTNYADSVKGRFTISRDNAKNTVYLQMNSLKPEDTAVYYCAVYTWARPRGSGTYRDVHIYWGQGTQVTVSS

SEQ ID NO: 32358 - protein, 118 aa, Artificial Sequence
  Chemically Synthesized
QVQLQESGGGLVQAGGSLRLSCAASGNIFGSRFMGWYRQAPGKERELVATIGRGASTNYADSVKGRFTISRDNAKNTVYLQMNSLKPEDTAVYYCAVRGPSTQDHGYWGQGTQVTVSS

SEQ ID NO: 32359 - protein, 121 aa, Artificial Sequence
  Chemically Synthesized
QVQLQESGGGLVQAGGSLRLSCAASGTISRDGTMGWYRQAPGKERELVAGIDLGGNLYADSVKGRFTISRDNAKNTVYLQMNSLKPEDTAVYYCAVWRDSDERNSIVFRYWGQGTQVTVSS

SEQ ID NO: 32360 - protein, 122 aa, Artificial Sequence
  Chemically Synthesized
QVQLQESGGGLVQAGGSLRLSCAASGYIFWLYSMGWYRQAPGKEREFVASINDGATTNYADSVKGRFTISRDNAKNTVYLQMNSLKPEDTAVYYCAVDNDTSKRLATYHGYWGQGTQVTVSS

SEQ ID NO: 32361 - protein, 118 aa, Artificial Sequence
  Chemically Synthesized
QVQLQESGGGLVQAGGSLRLSCAASGYISYRGRMGWYRQAPGKERELVATIGRGANTYYADSVKGRFTISRDNAKNTVYLQMNSLKPEDTAVYYCAVPHYYARWHYYWGQGTQVTVSS

SEQ ID NO: 32362 - protein, 118 aa, Artificial Sequence
  Chemically Synthesized
QVQLQESGGGLVQAGGSLRLSCAASGNIFRYYKMGWYRQAPGKEREFVAAINVGANTNYADSVKGRFTISRDNAKNTVYLQMNSLKPEDTAVYYCAAYGRRARSFHYWGQGTQVTVSS

SEQ ID NO: 32363 - protein, 118 aa, Artificial Sequence
  Chemically Synthesized
QVQLQESGGGLVQAGGSLRLSCAASGSISGGSYMGWYRQAPGKERELVAGIAGGATTYYADSVKGRFTISRDNAKNTVYLQMNSLKPEDTAVYYCAVYVFRSYRHYYWGQGTQVTVSS

SEQ ID NO: 32364 - protein, 126 aa, Artificial Sequence
  Chemically Synthesized
QVQLQESGGGLVQAGGSLRLSCAASGTISLPDYMGWYRQAPGKEREFVATINYGTTTYYADSVKGRFTISRDNAKNTVYLQMNSLKPEDTAVYYCAAIDRDYYANVDTNRYYLWYWGQGTQVTVSS

SEQ ID NO: 32365 - protein, 126 aa, Artificial Sequence
  Chemically Synthesized
QVQLQESGGGLVQAGGSLRLSCAASGSISWYNDMGWYRQAPGKERELVAGIGYGANTNYADSVKGRFTISRDNAKNTVYLQMNSLKPEDTAVYYCAAYTVFTYASPYDTYGPYDYWGQGTQVTVSS

SEQ ID NO: 32366 - protein, 118 aa, Artificial Sequence
  Chemically Synthesized
QVQLQESGGGLVQAGGSLRLSCAASGTIFRRTIMGWYRQAPGKERELVAGINRGGTTYYADSVKGRFTISRDNAKNTVYLQMNSLKPEDTAVYYCAVYNYRYLTHGYWGQGTQVTVSS

SEQ ID NO: 32367 - protein, 118 aa, Artificial Sequence
  Chemically Synthesized
QVQLQESGGGLVQAGGSLRLSCAASGTIFWGGKMGWYRQAPGKEREFVATISGGGNTNYADSVKGRFTISRDNAKNTVYLQMNSLKPEDTAVYYCAAYQYRQADHLYWGQGTQVTVSS

SEQ ID NO: 32368 - protein, 122 aa, Artificial Sequence
  Chemically Synthesized
QVQLQESGGGLVQAGGSLRLSCAASGYISGTDYMGWYRQAPGKEREFVATIDTGTNTNYADSVKGRFTISRDNAKNTVYLQMNSLKPEDTAVYYCAADHWWGGDTIDYHRYWGQGTQVTVSS

SEQ ID NO: 32369 - protein, 113 aa, Artificial Sequence
  Chemically Synthesized
QVQLQESGGGLVQAGGSLRLSCAASGFLLKKMGWYRQAPGKEREFVATIDAGASTNYADSVKGRFTISRDNAKNTVYLQMNSLKPEDTAVYYCAITYYWLYYWGQGTQVTVSS

SEQ ID NO: 32370 - protein, 118 aa, Artificial Sequence
  Chemically Synthesized
QVQLQESGGGLVQAGGSLRLSCAASGYIFIRPTMGWYRQAPGKERELVASIAFGGTTYYADSVKGRFTISRDNAKNTVYLQMNSLKPEDTAVYYCAVVTSWSRYHRYWGQGTQVTVSS

SEQ ID NO: 32371 - protein, 113 aa, Artificial Sequence
  Chemically Synthesized
QVQLQESGGGLVQAGGSLRLSCAASGGPMGWYRQAPGKERELVATIASGTTTNYADSVKGRFTISRDNAKNTVYLQMNSLKPEDTAVYYCAVPLPYSSRYYYWGQGTQVTVSS

SEQ ID NO: 32372 - protein, 118 aa, Artificial Sequence
  Chemically Synthesized
QVQLQESGGGLVQAGGSLRLSCAASGSISDIDVMGWYRQAPGKERELVATIGTGAITNYADSVKGRFTISRDNAKNTVYLQMNSLKPEDTAVYYCAAYGDTSFDYHYWGQGTQVTVSS

SEQ ID NO: 32373 - protein, 119 aa, Artificial Sequence
  Chemically Synthesized
QVQLQESGGGLVQAGGSLRLSCAASGNIFNRTYMGWYRQAPGKEREFVATISYGASTYYADSVKGRFTISRDNAKNTVYLQMNSLKPEDTAVYYCAVGSGADYGSYRYWGQGTQVTVSS

SEQ ID NO: 32374 - protein, 117 aa, Artificial Sequence
  Chemically Synthesized
QVQLQESGGGLVQAGGSLRLSCAASGNISADWGMGWYRQAPGKERELVAAIGTGTSTNYADSVKGRFTISRDNAKNTVYLQMNSLKPEDTAVYYCAAVARSISTFYWGQGTQVTVSS

SEQ ID NO: 32375 - protein, 122 aa, Artificial Sequence
  Chemically Synthesized
QVQLQESGGGLVQAGGSLRLSCAASGTIFYDYRMGWYRQAPGKEREFVAGIARGGITYYADSVKGRFTISRDNAKNTVYLQMNSLKPEDTAVYYCAVVTVVGYGYRWVHTYWGQGTQVTVSS

SEQ ID NO: 32376 - protein, 120 aa, Artificial Sequence
  Chemically Synthesized
QVQLQESGGGLVQAGGSLRLSCAASGTIFDTIMGWYRQAPGKERELVAAIGTVLLPYADSVKGRFTISRDNAKNTVYLQMNSLKPEDTAVYYCAVPYLVQAQAYYGYPYWGQGTQVTVSS

SEQ ID NO: 32377 - protein, 122 aa, Artificial Sequence
  Chemically Synthesized
QVQLQESGGGLVQAGGSLRLSCAASGTISNVQTMGWYRQAPGKERELVASINTGSITYYADSVKGRFTISRDNAKNTVYLQMNSLKPEDTAVYYCAAYHQIWSHYIYFYRYWGQGTQVTVSS

SEQ ID NO: 32378 - protein, 118 aa, Artificial Sequence
  Chemically Synthesized
QVQLQESGGGLVQAGGSLRLSCAASGYIFRWHYMGWYRQAPGKEREFVAAIGQGSTTYYADSVKGRFTISRDNAKNTVYLQMNSLKPEDTAVYYCAAYTRYVQALAYWGQGTQVTVSS

SEQ ID NO: 32379 - protein, 118 aa, Artificial Sequence
  Chemically Synthesized
QVQLQESGGGLVQAGGSLRLSCAASGNISNAIQMGWYRQAPGKERELVAAITYGSTTYYADSVKGRFTISRDNAKNTVYLQMNSLKPEDTAVYYCAVFLSQIYGHAYWGQGTQVTVSS

SEQ ID NO: 32380 - protein, 118 aa, Artificial Sequence
  Chemically Synthesized
QVQLQESGGGLVQAGGSLRLSCAASGTIFPWIYMGWYRQAPGKERELVASIAYGGSTYYADSVKGRFTISRDNAKNTVYLQMNSLKPEDTAVYYCAVYEFAGPLFYYWGQGTQVTVSS

SEQ ID NO: 32381 - protein, 118 aa, Artificial Sequence
  Chemically Synthesized
QVQLQESGGGLVQAGGSLRLSCAASGNISVQGSMGWYRQAPGKEREFVASIGLGTTTYYADSVKGRFTISRDNAKNTVYLQMNSLKPEDTAVYYCAADDAKYQVYLYWGQGTQVTVSS

SEQ ID NO: 32382 - protein, 117 aa, Artificial Sequence
  Chemically Synthesized
QVQLQESGGGLVQAGGSLRLSCAASGYISVTYPMGWYRQAPGKERELVASIGYGGITYYADSVKGRFTISRDNAKNTVYLQMNSLKPEDTAVYYCAASTNGVWTLYWGQGTQVTVSS

SEQ ID NO: 32383 - protein, 121 aa, Artificial Sequence
  Chemically Synthesized
QVQLQESGGGLVQAGGSLRLSCAASGTIFYAQYMGWYRQAPGKEREFVASIGAGGITNYADSVKGRFTISRDNAKNTVYLQMNSLKPEDTAVYYCAVDDPVGLRSAFSSYWGQGTQVTVSS

SEQ ID NO: 32384 - protein, 122 aa, Artificial Sequence
  Chemically Synthesized
QVQLQESGGGLVQAGGSLRLSCAASGNISRLVYMGWYRQAPGKEREFVAGIGLGGNTNYADSVKGRFTISRDNAKNTVYLQMNSLKPEDTAVYYCAATQPYRYWYYGRHSYWGQGTQVTVSS

SEQ ID NO: 32385 - protein, 122 aa, Artificial Sequence
  Chemically Synthesized
QVQLQESGGGLVQAGGSLRLSCAASGTISYIVYMGWYRQAPGKEREFVAGISYGGSTYYADSVKGRFTISRDNAKNTVYLQMNSLKPEDTAVYYCAVQFANDGIRGGQLSYWGQGTQVTVSS

SEQ ID NO: 32386 - protein, 118 aa, Artificial Sequence
  Chemically Synthesized
QVQLQESGGGLVQAGGSLRLSCAASGSIFAQATMGWYRQAPGKERELVAAITLGSITYYADSVKGRFTISRDNAKNTVYLQMNSLKPEDTAVYYCAAYGDQKPGLYYWGQGTQVTVSS

SEQ ID NO: 32387 - protein, 114 aa, Artificial Sequence
  Chemically Synthesized
QVQLQESGGGLVQAGGSLRLSCAASGTIFRRGQMGWYRQAPGKEREFVAAIGRGANTNYADSVKGRFTISRDNAKNTVYLQMNSLKPEDTAVYYCARTYLYQYWGQGTQVTVSS

SEQ ID NO: 32388 - protein, 118 aa, Artificial Sequence
  Chemically Synthesized
QVQLQESGGGLVQAGGSLRLSCAASGTISLYDVMGWYRQAPGKERELVASINRGATTYYADSVKGRFTISRDNAKNTVYLQMNSLKPEDTAVYYCAAGYYVWFQYPYWGQGTQVTVSS

SEQ ID NO: 32389 - protein, 118 aa, Artificial Sequence
  Chemically Synthesized
QVQLQESGGGLVQAGGSLRLSCAASGNISRYRIMGWYRQAPGKEREFVAGINYGATTYYADSVKGRFTISRDNAKNTVYLQMNSLKPEDTAVYYCAAVTHRWVSYLYWGQGTQVTVSS

SEQ ID NO: 32390 - protein, 126 aa, Artificial Sequence
  Chemically Synthesized
QVQLQESGGGLVQAGGSLRLSCAASGYISDTGLMGWYRQAPGKERELVASISDGTNTNYADSVKGRFTISRDNAKNTVYLQMNSLKPEDTAVYYCAASGHRDSGSGPDYRPYHEYWGQGTQVTVSS

SEQ ID NO: 32391 - protein, 118 aa, Artificial Sequence
  Chemically Synthesized
QVQLQESGGGLVQAGGSLRLSCAASGTIFRVYRMGWYRQAPGKERELVAAIGIGTTTNYADSVKGRFTISRDNAKNTVYLQMNSLKPEDTAVYYCAVRRADRYGYGYWGQGTQVTVSS

SEQ ID NO: 32392 - protein, 117 aa, Artificial Sequence
  Chemically Synthesized
QVQLQESGGGLVQAGGSLRLSCAASGTISVAGSMGWYRQAPGKERELVASIGSGTTTYYADSVKGRFTISRDNAKNTVYLQMNSLKPEDTAVYYCAAAYTDEPHLYWGQGTQVTVSS

SEQ ID NO: 32393 - protein, 118 aa, Artificial Sequence
  Chemically Synthesized
QVQLQESGGGLVQAGGSLRLSCAASGSIFDDSFMGWYRQAPGKEREFVASIGHGSITYYADSVKGRFTISRDNAKNTVYLQMNSLKPEDTAVYYCAAGDIYYPYYAYWGQGTQVTVSS

SEQ ID NO: 32394 - protein, 122 aa, Artificial Sequence
  Chemically Synthesized
QVQLQESGGGLVQAGGSLRLSCAASGNISRPQGMGWYRQAPGKEREFVATITVGGNTYYADSVKGRFTISRDNAKNTVYLQMNSLKPEDTAVYYCAVDIGSYRRPGFSALYWGQGTQVTVSS

SEQ ID NO: 32395 - protein, 118 aa, Artificial Sequence
  Chemically Synthesized
QVQLQESGGGLVQAGGSLRLSCAASGNIFLKGWMGWYRQAPGKERELVATIDQGTTTNYADSVKGRFTISRDNAKNTVYLQMNSLKPEDTAVYYCAARYKYVDVYGYWGQGTQVTVSS

SEQ ID NO: 32396 - protein, 118 aa, Artificial Sequence
  Chemically Synthesized
QVQLQESGGGLVQAGGSLRLSCAASGSIFTTPYMGWYRQAPGKERELVASIAHGGSTNYADSVKGRFTISRDNAKNTVYLQMNSLKPEDTAVYYCAAVAKQRYYHRYWGQGTQVTVSS

SEQ ID NO: 32397 - protein, 122 aa, Artificial Sequence
  Chemically Synthesized
QVQLQESGGGLVQAGGSLRLSCAASGYIFAGTSMGWYRQAPGKERELVASIASGGTTNYADSVKGRFTISRDNAKNTVYLQMNSLKPEDTAVYYCAAWDHGHWYPDTDLGYWGQGTQVTVSS

SEQ ID NO: 32398 - protein, 117 aa, Artificial Sequence
  Chemically Synthesized
QVQLQESGGGLVQAGGSLRLSCAASGTISYSTMGWYRQAPGKERELVASIADGGSTYYADSVKGRFTISRDNAKNTVYLQMNSLKPEDTAVYYCAVPDKVDQGHGYWGQGTQVTVSS

SEQ ID NO: 32399 - protein, 118 aa, Artificial Sequence
  Chemically Synthesized
QVQLQESGGGLVQAGGSLRLSCAASGNISNYYAMGWYRQAPGKERELVAAIAYGGSTYYADSVKGRFTISRDNAKNTVYLQMNSLKPEDTAVYYCAVDTYTGADLYYWGQGTQVTVSS

SEQ ID NO: 32400 - protein, 118 aa, Artificial Sequence
  Chemically Synthesized
QVQLQESGGGLVQAGGSLRLSCAASGNISYGSGMGWYRQAPGKEREFVATIDYGANTNYADSVKGRFTISRDNAKNTVYLQMNSLKPEDTAVYYCAVADYGSSYFTYWGQGTQVTVSS

SEQ ID NO: 32401 - protein, 116 aa, Artificial Sequence
  Chemically Synthesized
QVQLQESGGGLVQAGGSLRLSCAASGYIFRYFMGWYRQAPGKEREFVAAITYGTNTYYADSVKGRFTISRDNAKNTVYLQMNSLKPEDTAVYYCAVRRLRPWFYYWGQGTQVTVSS

SEQ ID NO: 32402 - protein, 116 aa, Artificial Sequence
  Chemically Synthesized
QVQLQESGGGLVQAGGSLRLSCAASGSIFDPGNMGWYRQAPGKERELVPVLVLVLVPYADSVKGRFTISRDNAKNTVYLQMNSLKPEDTAVYYCAVYTTTRTTIYWGQGTQVTVSS

SEQ ID NO: 32403 - protein, 118 aa, Artificial Sequence
  Chemically Synthesized
QVQLQESGGGLVQAGGSLRLSCAASGSIFEFDDMGWYRQAPGKEREFVAGITSGSITNYADSVKGRFTISRDNAKNTVYLQMNSLKPEDTAVYYCAASSDWVESHFYWGQGTQVTVSS

SEQ ID NO: 32404 - protein, 118 aa, Artificial Sequence
  Chemically Synthesized
QVQLQESGGGLVQAGGSLRLSCAASGYISGGRVMGWYRQAPGKEREFVATIDYGTTTNYADSVKGRFTISRDNAKNTVYLQMNSLKPEDTAVYYCAATSYSVRRHLYWGQGTQVTVSS

SEQ ID NO: 32405 - protein, 118 aa, Artificial Sequence
  Chemically Synthesized
QVQLQESGGGLVQAGGSLRLSCAASGSIFDNYYMGWYRQAPGKERELVASIGWGASTNYADSVKGRFTISRDNAKNTVYLQMNSLKPEDTAVYYCAVYASALTWFPYWGQGTQVTVSS

SEQ ID NO: 32406 - protein, 122 aa, Artificial Sequence
  Chemically Synthesized
QVQLQESGGGLVQAGGSLRLSCAASGSISRRLAMGWYRQAPGKEREFVATIAPGSSTYYADSVKGRFTISRDNAKNTVYLQMNSLKPEDTAVYYCAAIPWWRVGTARRHAYWGQGTQVTVSS

SEQ ID NO: 32407 - protein, 118 aa, Artificial Sequence
  Chemically Synthesized
QVQLQESGGGLVQAGGSLRLSCAASGNISRWYAMGWYRQAPGKEREFVAGISSGSNTYYADSVKGRFTISRDNAKNTVYLQMNSLKPEDTAVYYCAAGNYRRPDHRYWGQGTQVTVSS

SEQ ID NO: 32408 - protein, 126 aa, Artificial Sequence
  Chemically Synthesized
QVQLQESGGGLVQAGGSLRLSCAASGYIFLSPFMGWYRQAPGKEREFVATITYGTITNYADSVKGRFTISRDNAKNTVYLQMNSLKPEDTAVYYCAVGVPYLYYYIRVPVDDHGYWGQGTQVTVSS

SEQ ID NO: 32409 - protein, 111 aa, Artificial Sequence
  Chemically Synthesized
QVQLQESGGGLVQAGGSLRLSCAASGNISAVLMGWYRQAPGKERELVAGIDDRYYYLYADSVKGRFTISRDNAKNTVYLQMNSLKPEDTAVYYCAVYYIYWGQGTQVTVSS

SEQ ID NO: 32410 - protein, 124 aa, Artificial Sequence
  Chemically Synthesized
QVQLQESGGGLVQAGGSLRLSCAASGTISTYGYMGWYRQAPGKEREFVASIDGGTITNYADSVKGRFTISRDNAKNTVYLQMNSLKPEDTAVYYCAVNSYWAYDGYALYIYYYWGQGTQVTVSS

SEQ ID NO: 32411 - protein, 118 aa, Artificial Sequence
  Chemically Synthesized
QVQLQESGGGLVQAGGSLRLSCAASGNISYGTSMGWYRQAPGKEREFVAGIAIGSNTYYADSVKGRFTISRDNAKNTVYLQMNSLKPEDTAVYYCAVAADYTGVLRYWGQGTQVTVSS

SEQ ID NO: 32412 - protein, 122 aa, Artificial Sequence
  Chemically Synthesized
QVQLQESGGGLVQAGGSLRLSCAASGSISWSGFMGWYRQAPGKERELVASISNGGNTYYADSVKGRFTISRDNAKNTVYLQMNSLKPEDTAVYYCAVVDQYGWQYEFAHPYWGQGTQVTVSS

SEQ ID NO: 32413 - protein, 118 aa, Artificial Sequence
  Chemically Synthesized
QVQLQESGGGLVQAGGSLRLSCAASGNISDHISMGWYRQAPGKEREFVASINQGTTTNYADSVKGRFTISRDNAKNTVYLQMNSLKPEDTAVYYCAVSFLPTTWYKYWGQGTQVTVSS

SEQ ID NO: 32414 - protein, 117 aa, Artificial Sequence
  Chemically Synthesized
QVQLQESGGGLVQAGGSLRLSCAASGYISQQTYMGWYRQAPGKEREFVAAIGGGGSTNYADSVKGRFTISRDNAKNTVYLQMNSLKPEDTAVYYCAALSITLRTLYWGQGTQVTVSS

SEQ ID NO: 32415 - protein, 118 aa, Artificial Sequence
  Chemically Synthesized
QVQLQESGGGLVQAGGSLRLSCAASGTIFWYSYMGWYRQAPGKERELVATIALGGITYYADSVKGRFTISRDNAKNTVYLQMNSLKPEDTAVYYCAATVDRPLVHGYWGQGTQVTVSS

SEQ ID NO: 32416 - protein, 121 aa, Artificial Sequence
  Chemically Synthesized
QVQLQESGGGLVQAGGSLRLSCAASGNISYRYQMGWYRQAPGKERELVATIAAGSSTNYADSVKGRFTISRDNAKNTVYLQMNSLKPEDTAVYYCAARGTSLLLTTVGIYWGQGTQVTVSS

SEQ ID NO: 32417 - protein, 126 aa, Artificial Sequence
  Chemically Synthesized
QVQLQESGGGLVQAGGSLRLSCAASGYIFVDVSMGWYRQAPGKERELVASIDGGTSTYYADSVKGRFTISRDNAKNTVYLQMNSLKPEDTAVYYCAVIRRGSYTSYQRTGYPHGYWGQGTQVTVSS

SEQ ID NO: 32418 - protein, 126 aa, Artificial Sequence
  Chemically Synthesized
QVQLQESGGGLVQAGGSLRLSCAASGYISRYYRMGWYRQAPGKERELVAAIALGSSTNYADSVKGRFTISRDNAKNTVYLQMNSLKPEDTAVYYCAAAGYDDKVYEDRGPPSLTYWGQGTQVTVSS

SEQ ID NO: 32419 - protein, 122 aa, Artificial Sequence
  Chemically Synthesized
QVQLQESGGGLVQAGGSLRLSCAASGTIFGRVKMGWYRQAPGKEREFVAGIDEGGTTYYADSVKGRFTISRDNAKNTVYLQMNSLKPEDTAVYYCAVDPSPSEVPDDGHSYWGQGTQVTVSS

SEQ ID NO: 32420 - protein, 122 aa, Artificial Sequence
  Chemically Synthesized
QVQLQESGGGLVQAGGSLRLSCAASGSIFYRDNMGWYRQAPGKERELVAAINDGANTYYADSVKGRFTISRDNAKNTVYLQMNSLKPEDTAVYYCAADDPEASSFGYWYDYWGQGTQVTVSS

SEQ ID NO: 32421 - protein, 118 aa, Artificial Sequence
  Chemically Synthesized
QVQLQESGGGLVQAGGSLRLSCAASGYISVGGYMGWYRQAPGKERELVAAIGSGSSTNYADSVKGRFTISRDNAKNTVYLQMNSLKPEDTAVYYCAAFPAVGRYLYYWGQGTQVTVSS

SEQ ID NO: 32422 - protein, 125 aa, Artificial Sequence
  Chemically Synthesized
QVQLQESGGGLVQAGGSLRLSCAASGYIFAWPSMGWYRQAPGKEREFVATITEVVLPYADSVKGRFTISRDNAKNTVYLQMNSLKPEDTAVYYCAADVTDPRQPSVTHYNVYRYWGQGTQVTVSS

SEQ ID NO: 32423 - protein, 119 aa, Artificial Sequence
  Chemically Synthesized
QVQLQESGGGLVQAGGSLRLSCAASGTISWGVFMGWYRQAPGKERELVASIADGGITYYADSVKGRFTISRDNAKNTVYLQMNSLKPEDTAVYYCAVYGDGRVDDYPYWGQGTQVTVSS

SEQ ID NO: 32424 - protein, 118 aa, Artificial Sequence
  Chemically Synthesized
QVQLQESGGGLVQAGGSLRLSCAASGYIFVYYYMGWYRQAPGKEREFVASITTGSITYYADSVKGRFTISRDNAKNTVYLQMNSLKPEDTAVYYCAVQPYIYTHFTYWGQGTQVTVSS

SEQ ID NO: 32425 - protein, 126 aa, Artificial Sequence
  Chemically Synthesized
QVQLQESGGGLVQAGGSLRLSCAASGTIFVIGGMGWYRQAPGKEREFVASIALGASTYYADSVKGRFTISRDNAKNTVYLQMNSLKPEDTAVYYCAAWRNRYAYRNPKDYWPYRYWGQGTQVTVSS

SEQ ID NO: 32426 - protein, 108 aa, Artificial Sequence
  Chemically Synthesized
QVQLQESGGGLVQAGGSLRLSCAASGNIFDDRYMGWYRQAPGKEREFVAGITSGAIPYADSVKGRFTISRDNAKNTVYLQMNSLKPEDTAVYYCAMYWGQGTQVTVSS

SEQ ID NO: 32427 - protein, 126 aa, Artificial Sequence
  Chemically Synthesized
QVQLQESGGGLVQAGGSLRLSCAASGNIFPVPSMGWYRQAPGKERELVAAIGFGSNTNYADSVKGRFTISRDNAKNTVYLQMNSLKPEDTAVYYCAVRAQPFYYGWGYHYRGLYYWGQGTQVTVSS

SEQ ID NO: 32428 - protein, 114 aa, Artificial Sequence
  Chemically Synthesized
QVQLQESGGGLVQAGGSLRLSCAASGNIFYAWSMGWYRQAPGKEREFVASIDYGSTTYYADSVKGRFTISRDNAKNTVYLQMNSLKPEDTAVYYCAAYTPHYYWGQGTQVTVSS

SEQ ID NO: 32429 - protein, 122 aa, Artificial Sequence
  Chemically Synthesized
QVQLQESGGGLVQAGGSLRLSCAASGTIFGGWYMGWYRQAPGKEREFVAGIAYGGITYYADSVKGRFTISRDNAKNTVYLQMNSLKPEDTAVYYCAVYGYVYDGYASYYRYWGQGTQVTVSS

SEQ ID NO: 32430 - protein, 117 aa, Artificial Sequence
  Chemically Synthesized
QVQLQESGGGLVQAGGSLRLSCAASGTISDAPFMGWYRQAPGKEREFVAGISGGSSTYYADSVKGRFTISRDNAKNTVYLQMNSLKPEDTAVYYCAAAASCTRPFYWGQGTQVTVSS

SEQ ID NO: 32431 - protein, 121 aa, Artificial Sequence
  Chemically Synthesized
QVQLQESGGGLVQAGGSLRLSCAASGSISVPDTMGWYRQAPGKEREFVATIAYGGIPYADSVKGRFTISRDNAKNTVYLQMNSLKPEDTAVYYCAATAEISWLPGYIHYYWGQGTQVTVSS

SEQ ID NO: 32432 - protein, 118 aa, Artificial Sequence
  Chemically Synthesized
QVQLQESGGGLVQAGGSLRLSCAASGYISWYDSMGWYRQAPGKERELVATIDPGTTTYYADSVKGRFTISRDNAKNTVYLQMNSLKPEDTAVYYCAVQLNYTVGYYYWGQGTQVTVSS

SEQ ID NO: 32433 - protein, 128 aa, Artificial Sequence
  Chemically Synthesized
QVQLQESGGGLVQAGGSLRLSCAASGTISPSYTMGWYRQAPGKERELVASISHGATTNYADSVKGRFTISRDNAKNTVYLQMNSLKPEDTAVYYCAVGPNNGPKRTWLVWRRYDFGYWGQGTQVTVSS

SEQ ID NO: 32434 - protein, 126 aa, Artificial Sequence
  Chemically Synthesized
QVQLQESGGGLVQAGGSLRLSCAASGTIFIDRFMGWYRQAPGKERELVAAISLGGTTYYADSVKGRFTISRDNAKNTVYLQMNSLKPEDTAVYYCAPISDTPWYYYTDIALHFYYWGQGTQVTVSS

SEQ ID NO: 32435 - protein, 118 aa, Artificial Sequence
  Chemically Synthesized
QVQLQESGGGLVQAGGSLRLSCAASGTIFASYAMGWYRQAPGKEREFVAAIAIGSTTYYADSVKGRFTISRDNAKNTVYLQMNSLKPEDTAVYYCAVWVAVSRPHWYWGQGTQVTVSS

SEQ ID NO: 32436 - protein, 118 aa, Artificial Sequence
  Chemically Synthesized
QVQLQESGGGLVQAGGSLRLSCAASGYIFGYYHMGWYRQAPGKEREFVASIGNGGNTNYADSVKGRFTISRDNAKNTVYLQMNSLKPEDTAVYYCAVSRKYYRYHRYWGQGTQVTVSS

SEQ ID NO: 32437 - protein, 124 aa, Artificial Sequence
  Chemically Synthesized
QVQLQESGGGLVQAGGSLRLSCAASGTIFGYTDMGWYRQAPGKERELVAAIAVVGATTNYADSVKGRFTISRDNAKNTVYLQMNSLKPEDTAVYYCAVYKWSYLSDLDDEHWYWGQGTQVTVSS

SEQ ID NO: 32438 - protein, 118 aa, Artificial Sequence
  Chemically Synthesized
QVQLQESGGGLVQAGGSLRLSCAASGNIFPVGGMGWYRQAPGKERELVASIAYGASTYYADSVKGRFTISRDNAKNTVYLQMNSLKPEDTAVYYCAVVPYPWDYLRYWGQGTQVTVSS

SEQ ID NO: 32439 - protein, 118 aa, Artificial Sequence
  Chemically Synthesized
QVQLQESGGGLVQAGGSLRLSCAASGNISLSYYMGWYRQAPGKEREFVAGIAGGTTTNYADSVKGRFTISRDNAKNTVYLQMNSLKPEDTAVYYCAVDGWGSRTHWYWGQGTQVTVSS

SEQ ID NO: 32440 - protein, 121 aa, Artificial Sequence
  Chemically Synthesized
QVQLQESGGGLVQAGGSLRLSCAASGNIFAGDTMGWYRQAPGKERELVAAISYGGNTNYADSVKGRFTISRDNAKNTVYLQMNSLKPEDTAVYYCAAGYNGPYDSVWTLYWGQGTQVTVSS

SEQ ID NO: 32441 - protein, 126 aa, Artificial Sequence
  Chemically Synthesized
QVQLQESGGGLVQAGGSLRLSCAASGYIFDYPIMGWYRQAPGKEREFVAGIDLGATTNYADSVKGRFTISRDNAKNTVYLQMNSLKPEDTAVYYCAVGFAYRWNNRYTDATAHVYWGQGTQVTVSS

SEQ ID NO: 32442 - protein, 118 aa, Artificial Sequence
  Chemically Synthesized
QVQLQESGGGLVQAGGSLRLSCAASGNIFPGVYMGWYRQAPGKEREFVATIARGGNTYYADSVKGRFTISRDNAKNTVYLQMNSLKPEDTAVYYCAAYRLYWRVFTYWGQGTQVTVSS

SEQ ID NO: 32443 - protein, 126 aa, Artificial Sequence
  Chemically Synthesized
QVQLQESGGGLVQAGGSLRLSCAASGSIFRYRDMGWYRQAPGKERELVAGIDNGASTNYADSVKGRFTISRDNAKNTVYLQMNSLKPEDTAVYYCAAAGRLLHLSTSDYQNPFGYWGQGTQVTVSS

SEQ ID NO: 32444 - protein, 118 aa, Artificial Sequence
  Chemically Synthesized
QVQLQESGGGLVQAGGSLRLSCAASGNIFTIFYMGWYRQAPGKERELVAGITRGSSTNYADSVKGRFTISRDNAKNTVYLQMNSLKPEDTAVYYCAVHQRWSRYHLYWGQGTQVTVSS

SEQ ID NO: 32445 - protein, 118 aa, Artificial Sequence
  Chemically Synthesized
QVQLQESGGGLVQAGGSLRLSCAASGNIFNTWSMGWYRQAPGKERELVASINYGGITYYADSVKGRFTISRDNAKNTVYLQMNSLKPEDTAVYYCAAYGYYDYIHYYWGQGTQVTVSS

SEQ ID NO: 32446 - protein, 117 aa, Artificial Sequence
  Chemically Synthesized
QVQLQESGGGLVQAGGSLRLSCAASGTIFVQYGMGWYRQAPGKEREFVAAISPGGNTYYADSVKGRFTISRDNAKNTVYLQMNSLKPEDTAVYYCAANITIRHYDYWGQGTQVTVSS

SEQ ID NO: 32447 - protein, 121 aa, Artificial Sequence
  Chemically Synthesized
QVQLQESGGGLVQAGGSLRLSCAASGNISGRTYMGWYRQAPGKERELVASISYGTSTYYADSVKGRFTISRDNAKNTVYLQMNSLKPEDTAVYYCAASTRDLVTGSTCMYWGQGTQVTVSS

SEQ ID NO: 32448 - protein, 118 aa, Artificial Sequence
  Chemically Synthesized
QVQLQESGGGLVQAGGSLRLSCAASGNISIGDDMGWYRQAPGKERELVASIDFGGTTNYADSVKGRFTISRDNAKNTVYLQMNSLKPEDTAVYYCAAADYGYTGLGYWGQGTQVTVSS

SEQ ID NO: 32449 - protein, 122 aa, Artificial Sequence
  Chemically Synthesized
QVQLQESGGGLVQAGGSLRLSCAASGYIFGYDVMGWYRQAPGKEREFVASISSGATTYYADSVKGRFTISRDNAKNTVYLQMNSLKPEDTAVYYCAVNYLARFRLWDAYQYWGQGTQVTVSS

SEQ ID NO: 32450 - protein, 118 aa, Artificial Sequence
  Chemically Synthesized
QVQLQESGGGLVQAGGSLRLSCAASGSIFVRHTMGWYRQAPGKEREFVAAIAKGSITYYADSVKGRFTISRDNAKNTVYLQMNSLKPEDTAVYYCAAVHARYVRYYYWGQGTQVTVSS

SEQ ID NO: 32451 - protein, 125 aa, Artificial Sequence
  Chemically Synthesized
QVQLQESGGGLVQAGGSLRLSCAASGNIFVPYYMGWYRQAPGKERELVASIASGGSTYYADSVKGRFTISRDNAKNTVYLQMNSLKPEDTAVYYCALVTKLRVNVLLTVPVPWYWGQGTQVTVSS

SEQ ID NO: 32452 - protein, 118 aa, Artificial Sequence
  Chemically Synthesized
QVQLQESGGGLVQAGGSLRLSCAASGSISRSKYMGWYRQAPGKERELVAGIGIGANTYYADSVKGRFTISRDNAKNTVYLQMNSLKPEDTAVYYCAAYYRSPFRYRYWGQGTQVTVSS

SEQ ID NO: 32453 - protein, 127 aa, Artificial Sequence
  Chemically Synthesized
QVQLQESGGGLVQAGGSLRLSCAASGTISWLYAMGWYRQAPGKEREFVATISQGATTNYADSVKGRFTISRDNAKNTVYLQMNSLKPEDTAVYYCAVDYGLAYTANWYYLSQFHQYWGQGTQVTVSS

SEQ ID NO: 32454 - protein, 122 aa, Artificial Sequence
  Chemically Synthesized
QVQLQESGGGLVQAGGSLRLSCAASGNIFAWPNMGWYRQAPGKEREFVAGIGYGGNTNYADSVKGRFTISRDNAKNTVYLQMNSLKPEDTAVYYCAVLAWEWRTYYLYHGYWGQGTQVTVSS

SEQ ID NO: 32455 - protein, 122 aa, Artificial Sequence
  Chemically Synthesized
QVQLQESGGGLVQAGGSLRLSCAASGSISPILRMGWYRQAPGKEREFVASIGPGTSTYYADSVKGRFTISRDNAKNTVYLQMNSLKPEDTAVYYCAVRTFRPHRGYAIFNYWGQGTQVTVSS

SEQ ID NO: 32456 - protein, 118 aa, Artificial Sequence
  Chemically Synthesized
QVQLQESGGGLVQAGGSLRLSCAASGSISFPYYMGWYRQAPGKEREFVAAINDGAITYYADSVKGRFTISRDNAKNTVYLQMNSLKPEDTAVYYCAAYLRDGEDFTYWGQGTQVTVSS

SEQ ID NO: 32457 - protein, 118 aa, Artificial Sequence
  Chemically Synthesized
QVQLQESGGGLVQAGGSLRLSCAASGTIFRPLFMGWYRQAPGKEREFVASITVGGTTNYADSVKGRFTISRDNAKNTVYLQMNSLKPEDTAVYYCAAYYWLNFIHKYWGQGTQVTVSS

SEQ ID NO: 32458 - protein, 125 aa, Artificial Sequence
  Chemically Synthesized
QVQLQESGGGLVQAGGSLRLSCAASGSISRYPYMGWYRQAPGKEREFVAGINGGGTTYYADSVKGRFTISRDNAKNTVYLQMNSLKPEDTAVYYCAVDQENYSFVVTTLSTTIYWGQGTQVTVSS

SEQ ID NO: 32459 - protein, 122 aa, Artificial Sequence
  Chemically Synthesized
QVQLQESGGGLVQAGGSLRLSCAASGYIFNTEYMGWYRQAPGKERELVAAITAGTSTYYADSVKGRFTISRDNAKNTVYLQMNSLKPEDTAVYYCAVYPIIRLLRYLETSYWGQGTQVTVSS

SEQ ID NO: 32460 - protein, 126 aa, Artificial Sequence
  Chemically Synthesized
QVQLQESGGGLVQAGGSLRLSCAASGNIFPLGNMGWYRQAPGKERELVASIGSGASTNYADSVKGRFTISRDNAKNTVYLQMNSLKPEDTAVYYCAVTQINILGFVGGGLRSHSYWGQGTQVTVSS

SEQ ID NO: 32461 - protein, 118 aa, Artificial Sequence
  Chemically Synthesized
QVQLQESGGGLVQAGGSLRLSCAASGYIFVSGYMGWYRQAPGKERELVATIGVGSITNYADSVKGRFTISRDNAKNTVYLQMNSLKPEDTAVYYCAAADEPYLPHYYWGQGTQVTVSS

SEQ ID NO: 32462 - protein, 118 aa, Artificial Sequence
  Chemically Synthesized
QVQLQESGGGLVQAGGSLRLSCAASGNIFRPRTMGWYRQAPGKEREFVATISYGATTYYADSVKGRFTISRDNAKNTVYLQMNSLKPEDTAVYYCAVFSIRGHGYRYWGQGTQVTVSS

SEQ ID NO: 32463 - protein, 121 aa, Artificial Sequence
  Chemically Synthesized
QVQLQESGGGLVQAGGSLRLSCAASGNIFDDAFMGWYRQAPGKEREFVAAITGGTTNYADSVKGRFTISRDNAKNTVYLQMNSLKPEDTAVYYCAVYTYYDEGLTGIYYYWGQGTQVTVSS

SEQ ID NO: 32464 - protein, 127 aa, Artificial Sequence
  Chemically Synthesized
QVQLQESGGGLVQAGGSLRLSCAASGSIFDLSDMGWYRQAPGKEREFVASITYGSNTNYADSVKGRFTISRDNAKNTVYLQMNSLKPEDTAVYYCAVYNVDGPYTADSYWQYPYYYWGQGTQVTVSS

SEQ ID NO: 32465 - protein, 126 aa, Artificial Sequence
  Chemically Synthesized
QVQLQESGGGLVQAGGSLRLSCAASGSISRWYLMGWYRQAPGKEREFVATITGGGSTNYADSVKGRFTISRDNAKNTVYLQMNSLKPEDTAVYYCAAYHRYIHNYAVVRWFNYRYWGQGTQVTVSS

SEQ ID NO: 32466 - protein, 118 aa, Artificial Sequence
  Chemically Synthesized
QVQLQESGGGLVQAGGSLRLSCAASGYIFSGYFMGWYRQAPGKERELVASINRGGNTYYADSVKGRFTISRDNAKNTVYLQMNSLKPEDTAVYYCAVSDAPYLTLPYWGQGTQVTVSS

SEQ ID NO: 32467 - protein, 110 aa, Artificial Sequence
  Chemically Synthesized
QVQLQESGGGLVQAGGSLRLSCAASGTISLYVMGWYRQAPGKERELVATIAYGTNTYYADSVKGRFTISRDNAKNTVYLQMNSLKPEDTAVYYCAVAWYWGQGTQVTVSS

SEQ ID NO: 32468 - protein, 118 aa, Artificial Sequence
  Chemically Synthesized
QVQLQESGGGLVQAGGSLRLSCAASGSIFVGNYMGWYRQAPGKERELVASIDRGGTTNYADSVKGRFTISRDNAKNTVYLQMNSLKPEDTAVYYCAVSQKNWSEFEYWGQGTQVTVSS

SEQ ID NO: 32469 - protein, 113 aa, Artificial Sequence
  Chemically Synthesized
QVQLQESGGGLVQAGGSLRLSCAASGYISGYSVMGWYRQAPGKERELVATIAIGASTYYADSVKGRFTISRDNAKNTVYLQMNSLKPEDTAVYYCALTTCIYWGQGTQVTVSS

SEQ ID NO: 32470 - protein, 118 aa, Artificial Sequence
  Chemically Synthesized
QVQLQESGGGLVQAGGSLRLSCAASGTIFRYGSMGWYRQAPGKEREFVAAIARGSITYYADSVKGRFTISRDNAKNTVYLQMNSLKPEDTAVYYCAASYYYGYRYRYWGQGTQVTVSS

SEQ ID NO: 32471 - protein, 118 aa, Artificial Sequence
  Chemically Synthesized
QVQLQESGGGLVQAGGSLRLSCAASGYISVARAMGWYRQAPGKERELVAGINYGANTYYADSVKGRFTISRDNAKNTVYLQMNSLKPEDTAVYYCAVADNYGVGLHYWGQGTQVTVSS

SEQ ID NO: 32472 - protein, 121 aa, Artificial Sequence
  Chemically Synthesized
QVQLQESGGGLVQAGGSLRLSCAASGNIFPTWNMGWYRQAPGKEREFVATIGGSNTYYADSVKGRFTISRDNAKNTVYLQMNSLKPEDTAVYYCAVYPSAAWWGVADYGYWGQGTQVTVSS

SEQ ID NO: 32473 - protein, 117 aa, Artificial Sequence
  Chemically Synthesized
QVQLQESGGGLVQAGGSLRLSCAASGTISPSVMGWYRQAPGKERELVASIATGTSTYYADSVKGRFTISRDNAKNTVYLQMNSLKPEDTAVYYCAAPYPYTAYHVYWGQGTQVTVSS

SEQ ID NO: 32474 - protein, 127 aa, Artificial Sequence
  Chemically Synthesized
QVQLQESGGGLVQAGGSLRLSCAASGSIFYTPGFMGWYRQAPGKEREFVATINLGATTYYADSVKGRFTISRDNAKNTVYLQMNSLKPEDTAVYYCAVTLPYYSWAHNVYPRPLDYWGQGTQVTVSS

SEQ ID NO: 32475 - protein, 118 aa, Artificial Sequence
  Chemically Synthesized
QVQLQESGGGLVQAGGSLRLSCAASGNISIFGVMGWYRQAPGKERELVAAIDQGGTTNYADSVKGRFTISRDNAKNTVYLQMNSLKPEDTAVYYCAVYTYRAYSFAYWGQGTQVTVSS

SEQ ID NO: 32476 - protein, 122 aa, Artificial Sequence
  Chemically Synthesized
QVQLQESGGGLVQAGGSLRLSCAASGYIFFRVRMGWYRQAPGKERELVAGITLGSSTNYADSVKGRFTISRDNAKNTVYLQMNSLKPEDTAVYYCAADYFTTYDYAGTHPYWGQGTQVTVSS

SEQ ID NO: 32477 - protein, 126 aa, Artificial Sequence
  Chemically Synthesized
QVQLQESGGGLVQAGGSLRLSCAASGTISEHARMGWYRQAPGKEREFVAAITSGTNTYYADSVKGRFTISRDNAKNTVYLQMNSLKPEDTAVYYCAVYDDYPFPRRSRWTPPYDYWGQGTQVTVSS

SEQ ID NO: 32478 - protein, 125 aa, Artificial Sequence
  Chemically Synthesized
QVQLQESGGGLVQAGGSLRLSCAASGNFDPNLMGWYRQAPGKERELVASITEGGSTNYADSVKGRFTISRDNAKNTVYLQMNSLKPEDTAVYYCAVWWEADRPDDVAAYPVYAYWGQGTQVTVSS

SEQ ID NO: 32479 - protein, 118 aa, Artificial Sequence
  Chemically Synthesized
QVQLQESGGGLVQAGGSLRLSCAASGTIFGYRRMGWYRQAPGKEREFVASIDWGGNTNYADSVKGRFTISRDNAKNTVYLQMNSLKPEDTAVYYCAVARDYYDGYYYWGQGTQVTVSS

SEQ ID NO: 32480 - protein, 122 aa, Artificial Sequence
  Chemically Synthesized
QVQLQESGGGLVQAGGSLRLSCAASGTIFSMGWYRQAPGKERELLPLLVLVLIPYADSVKGRFTISRDNAKNTVYLQMNSLKPEDTAVYYCAAEAEDADNVAGYVEYDHLYWGQGTQVTVSS

SEQ ID NO: 32481 - protein, 122 aa, Artificial Sequence
  Chemically Synthesized
QVQLQESGGGLVQAGGSLRLSCAASGSISRVRRMGWYRQAPGKEREFVAGINRGASTYYADSVKGRFTISRDNAKNTVYLQMNSLKPEDTAVYYCAAIRYWYLVPDPGHYYWGQGTQVTVSS

SEQ ID NO: 32482 - protein, 118 aa, Artificial Sequence
  Chemically Synthesized
QVQLQESGGGLVQAGGSLRLSCAASGSISDYLFMGWYRQAPGKERELVAGISRGATTYYADSVKGRFTISRDNAKNTVYLQMNSLKPEDTAVYYCAVTTYRDYLLTYWGQGTQVTVSS

SEQ ID NO: 32483 - protein, 122 aa, Artificial Sequence
  Chemically Synthesized
QVQLQESGGGLVQAGGSLRLSCAASGTISYRDDMGWYRQAPGKEREFVATIGRGTITNYADSVKGRFTISRDNAKNTVYLQMNSLKPEDTAVYYCAAFETDGSDDGPKLWYWGQGTQVTVSS

SEQ ID NO: 32484 - protein, 122 aa, Artificial Sequence
  Chemically Synthesized
QVQLQESGGGLVQAGGSLRLSCAASGNISDYYGMGWYRQAPGKERELVAGITYGSSTYYADSVKGRFTISRDNAKNTVYLQMNSLKPEDTAVYYCAAYDYTGYDSYTLFVYWGQGTQVTVSS

SEQ ID NO: 32485 - protein, 126 aa, Artificial Sequence
  Chemically Synthesized
QVQLQESGGGLVQAGGSLRLSCAASGNISTVYAMGWYRQAPGKEREFVAGITYGSNTYYADSVKGRFTISRDNAKNTVYLQMNSLKPEDTAVYYCAAIYSPPGGPDQYTYQLYWYWGQGTQVTVSS

SEQ ID NO: 32486 - protein, 126 aa, Artificial Sequence
  Chemically Synthesized
QVQLQESGGGLVQAGGSLRLSCAASGNISDYYGMGWYRQAPGKERERVAGITYGSSTYYADSVKGRFTISRDNAKNTVYLQMNSLKPEDTAVYYCAAIYSPPGGPDQYTYQLYWYWGQGTQVTVSS

SEQ ID NO: 32487 - protein, 126 aa, Artificial Sequence
  Chemically Synthesized
QVQLQESGGGLVQAGGSLRLSCAASGNISDYYGMGWYRQAPGKERELVAGLTYGSSTYYADSVKGRFTISRDNAKNTVYLQMNSLKPEDTAVYYCAAIYSPPGGPDQYTYQLYWYWGQGTQVTVSS

SEQ ID NO: 32488 - protein, 118 aa, Artificial Sequence
  Chemically Synthesized
QVQLQESGGGLVQAGGSLRLSCAASGNISDYYGMGWYRQAPGKERELVAGITYGSSTYYADSVKGRFTISRDNAKNTVYLQMNSLKPEDTAVYYCAAYIGRDTLYDYWGQGTQVTVSS

SEQ ID NO: 32489 - protein, 126 aa, Artificial Sequence
  Chemically Synthesized
QVQLQESGGGLVQAGGSLRLSCAASGTISAYRGMGWYRQAPGKEREFVVGITEGGSTYYADSVKGRFTISRDNAKNTVYLQMNSLKPEDTAVYYCAAIYSPPGGPDQYTYQLYWYWGQGTQVTVSS

SEQ ID NO: 32490 - protein, 122 aa, Artificial Sequence
  Chemically Synthesized
QVQLQESGGGLVQAGGSLRLSCAASGNISDYYGMGWYRQAPGKEREFVAGITYGSNTYYADSVKGRFTISRDNAKNTVYLQMNSLKPEDTAVYYCAAYDYTGYDSYTLFVYWGQGTQVTVSS

SEQ ID NO: 32491 - protein, 126 aa, Artificial Sequence
  Chemically Synthesized
QVQLQESGGGLVQAGGSLRLSCAASGNISTVYAMGWYRQAPGKERELVAGITYGSSTYYADSVKGRFTISRDNAKNTVYLQMNSLKPEDTAVYYCAAIYSPPGGPDQYTYQLYWYWGQGTQVTVSS

SEQ ID NO: 32492 - protein, 126 aa, Artificial Sequence
  Chemically Synthesized
QVQLQESGGGLVQAGGSLRLSCAASGSISRTPNMGWYRQAPGKEREFVAAINIGASTYYADSVKGRFTISRDNAKNTVYLQMNSLKPEDTAVYYCAVVRQYYANRDGWRYSRHPYWGQGTQVTVSS

SEQ ID NO: 32493 - protein, 122 aa, Artificial Sequence
  Chemically Synthesized
QVQLQESGGGLVQAGGSLRLSCAASGYISYENAMGWYRQAPGKERELVAAINVGTTTNYADSVKGRFTISRDNAKNTVYLQMNSLKPEDTAVYYCAVIYLYLASNAAKYAYWGQGTQVTVSS

SEQ ID NO: 32494 - protein, 121 aa, Artificial Sequence
  Chemically Synthesized
QVQLQESGGGLVQAGGSLRLSCAASGNISGYAAMGWYRQAPGKERELVAGIAKGSSTNYADSVKGRFTISRDNAKNTVYLQMNSLKPEDTAVYYCAVDVWSRYGGGTHDYWGQGTQVTVSS

SEQ ID NO: 32495 - protein, 118 aa, Artificial Sequence
  Chemically Synthesized
QVQLQESGGGLVQAGGSLRLSCAASGNISNIEQMGWYRQAPGKEREFVAGIAAGATTNYADSVKGRFTISRDNAKNTVYLQMNSLKPEDTAVYYCAVYDGYALVLVYWGQGTQVTVSS

SEQ ID NO: 32496 - protein, 122 aa, Artificial Sequence
  Chemically Synthesized
QVQLQESGGGLVQAGGSLRLSCAASGTIFLVSFMGWYRQAPGKERELVAGITVGTNTNYADSVKGRFTISRDNAKNTVYLQMNSLKPEDTAVYYCAVYLGFDDDNGDYHGYWGQGTQVTVSS

SEQ ID NO: 32497 - protein, 119 aa, Artificial Sequence
  Chemically Synthesized
QVQLQESGGGLVQAGGSLRLSCAASGTISHYWYMGWYRQAPGKERELVASINNGGITYYADSVKGRFTISRDNAKNTVYLQMNSLKPEDTAVYYCAVADLDSRSDHGYWGQGTQVTVSS

SEQ ID NO: 32498 - protein, 121 aa, Artificial Sequence
  Chemically Synthesized
QVQLQESGGGLVQAGGSLRLSCAASGTISYSTVMGWYRQAPGKEREFVAAIGLGGTTYYADSVKGRFTISRDNAKNTVYLQMNSLKPEDTAVYYCAVQYRQVYGRYRHAYWGQGTQVTVSS

SEQ ID NO: 32499 - protein, 118 aa, Artificial Sequence
  Chemically Synthesized
QVQLQESGGGLVQAGGSLRLSCAASGTISQLSSMGWYRQAPGKERELVAGIGYGTITNYADSVKGRFTISRDNAKNTVYLQMNSLKPEDTAVYYCAVKYDKDRYYSYWGQGTQVTVSS

SEQ ID NO: 32500 - protein, 118 aa, Artificial Sequence
  Chemically Synthesized
QVQLQESGGGLVQAGGSLRLSCAASGYIFATPLMGWYRQAPGKERELVAAIDYGGNTNYADSVKGRFTISRDNAKNTVYLQMNSLKPEDTAVYYCAVRRVYRYYFGYWGQGTQVTVSS

SEQ ID NO: 32501 - protein, 118 aa, Artificial Sequence
  Chemically Synthesized
QVQLQESGGGLVQAGGSLRLSCAASGSISYVYYMGWYRQAPGKERELVAAISVGGSTYYADSVKGRFTISRDNAKNTVYLQMNSLKPEDTAVYYCAVYNWYDYVHVYWGQGTQVTVSS

SEQ ID NO: 32502 - protein, 125 aa, Artificial Sequence
  Chemically Synthesized
QVQLQESGGGLVQAGGSLRLSCAASGTISVSFAMGWYRQAPGKEREFVAAITSVLLPYADSVKGRFTISRDNAKNTVYLQMNSLKPEDTAVYYCAVTRKQAWLNDAEGDYAFYYWGQGTQVTVSS

SEQ ID NO: 32503 - protein, 118 aa, Artificial Sequence
  Chemically Synthesized
QVQLQESGGGLVQAGGSLRLSCAASGYISSRLAMGWYRQAPGKEREFVAGITSGGNTYYADSVKGRFTISRDNAKNTVYLQMNSLKPEDTAVYYCAASHPRRANHGYWGQGTQVTVSS

SEQ ID NO: 32504 - protein, 120 aa, Artificial Sequence
  Chemically Synthesized
QVQLQESGGGLVQAGGSLRLSCAASGSISWSYRMGWYRQAPGKERELVAGIGGGSSTNYADSVKGRFTISRDNAKNTVYLQMNSLKPEDTAVYYCAVGNGVDGGSTRMYWGQGTQVTVSS

SEQ ID NO: 32505 - protein, 118 aa, Artificial Sequence
  Chemically Synthesized
QVQLQESGGGLVQAGGSLRLSCAASGYIFNGPYMGWYRQAPGKERELVASIGGGGTTYYADSVKGRFTISRDNAKNTVYLQMNSLKPEDTAVYYCAAYYDAYGPHSYWGQGTQVTVSS

SEQ ID NO: 32506 - protein, 118 aa, Artificial Sequence
  Chemically Synthesized
QVQLQESGGGLVQAGGSLRLSCAASGSIFRRYPMGWYRQAPGKERELVAAIGRGANTYYADSVKGRFTISRDNAKNTVYLQMNSLKPEDTAVYYCAVVRYDTRHFSYWGQGTQVTVSS

SEQ ID NO: 32507 - protein, 114 aa, Artificial Sequence
  Chemically Synthesized
QVQLQESGGGLVQAGGSLRLSCAASGYISWGYIMGWYRQAPGKERELVAAIGTGGITNYADSVKGRFTISRDNAKNTVYLQMNSLKPEDTAVYYCAAIRYHYYWGQGTQVTVSS

SEQ ID NO: 32508 - protein, 118 aa, Artificial Sequence
  Chemically Synthesized
QVQLQESGGGLVQAGGSLRLSCAASGTISDADGMGWYRQAPGKERELVAGIGLGSNTNYADSVKGRFTISRDNAKNTVYLQMNSLKPEDTAVYYCAVFASARYYHAYWGQGTQVTVSS

SEQ ID NO: 32509 - protein, 121 aa, Artificial Sequence
  Chemically Synthesized
QVQLQESGGGLVQAGGSLRLSCAASGTISQWQDMGWYRQAPGKERELVASIDAGGTTYYADSVKGRFTISRDNAKNTVYLQMNSLKPEDTAVYYCAADQAIVYKPDDLYYWGQGTQVTVSS

SEQ ID NO: 32510 - protein, 118 aa, Artificial Sequence
  Chemically Synthesized
QVQLQESGGGLVQAGGSLRLSCAASGNIFGTWYMGWYRQAPGKEREFVAAIGRGGTTYYADSVKGRFTISRDNAKNTVYLQMNSLKPEDTAVYYCAAIAYSFWIYDYWGQGTQVTVSS

SEQ ID NO: 32511 - protein, 117 aa, Artificial Sequence
  Chemically Synthesized
QVQLQESGGGLVQAGGSLRLSCAASGNIFQSDMGWYRQAPGKERELVASIATGATTNYADSVKGRFTISRDNAKNTVYLQMNSLKPEDTAVYYCAVYVGWITGYGYWGQGTQVTVSS

SEQ ID NO: 32512 - protein, 120 aa, Artificial Sequence
  Chemically Synthesized
QVQLQESGGGLVQAGGSLRLSCAASGNISGPITMGWYRQAPGKERELVASITDGATTYYADSVKGRFTISRDNAKNTVYLQMNSLKPEDTAVYYCAADEFPWDAHDHNYWGQGTQVTVSS

SEQ ID NO: 32513 - protein, 126 aa, Artificial Sequence
  Chemically Synthesized
QVQLQESGGGLVQAGGSLRLSCAASGSISGYYNMGWYRQAPGKEREFVATINYGTNTYYADSVKGRFTISRDNAKNTVYLQMNSLKPEDTAVYYCAARYSPRRADGYFKRLDYYYWGQGTQVTVSS

SEQ ID NO: 32514 - protein, 123 aa, Artificial Sequence
  Chemically Synthesized
QVQLQESGGGLVQAGGSLRLSCAASGTIFSDVAMGWYRQAPGKEREFVAGIDKGGITYYADSVKGRFTISRDNAKNTVYLQMNSLKPEDTAVYYCAAYEWDWQSWYSYVYDYWGQGTQVTVSS

SEQ ID NO: 32515 - protein, 115 aa, Artificial Sequence
  Chemically Synthesized
QVQLQESGGGLVQAGGSLRLSCAASGNISASERMGWYRQAPGKERELVAAIDTGGTTNYADSVKGRFTISRDNAKNTVYLQMNSLKPEDTAVYYCAAAYTVTFYWGQGTQVTVSS

SEQ ID NO: 32516 - protein, 122 aa, Artificial Sequence
  Chemically Synthesized
QVQLQESGGGLVQAGGSLRLSCAASGNIFGLVGMGWYRQAPGKEREFVAGIGGGANTYYADSVKGRFTISRDNAKNTVYLQMNSLKPEDTAVYYCAVPQYIRPRYVGRHVYWGQGTQVTVSS

SEQ ID NO: 32517 - protein, 126 aa, Artificial Sequence
  Chemically Synthesized
QVQLQESGGGLVQAGGSLRLSCAASGSIFDDVIMGWYRQAPGKEREFVAAIGYGGTTYYADSVKGRFTISRDNAKNTVYLQMNSLKPEDTAVYYCAAGQPYATSDRSLQKHAHTYWGQGTQVTVSS

SEQ ID NO: 32518 - protein, 120 aa, Artificial Sequence
  Chemically Synthesized
QVQLQESGGGLVQAGGSLRLSCAASGNISDYASMGWYRQAPGKEREFVSITNYADSVKGRFTISRDNAKNTVYLQMNSLKPEDTAVYYCAVLTDADGDISRGENVGHEYWGQGTQVTVSS

SEQ ID NO: 32519 - protein, 118 aa, Artificial Sequence
  Chemically Synthesized
QVQLQESGGGLVQAGGSLRLSCAASGNISLVRAMGWYRQAPGKEREFVAGIAYGTTTYYADSVKGRFTISRDNAKNTVYLQMNSLKPEDTAVYYCAAFSSVHNDHGYWGQGTQVTVSS

SEQ ID NO: 32520 - protein, 117 aa, Artificial Sequence
  Chemically Synthesized
QVQLQESGGGLVQAGGSLRLSCAASGSIFDLVYMGWYRQAPGKERELVATIATGGSTYYADSVKGRFTISRDNAKNTVYLQMNSLKPEDTAVYYCAADELYYYFVYWGQGTQVTVSS

SEQ ID NO: 32521 - protein, 118 aa, Artificial Sequence
  Chemically Synthesized
QVQLQESGGGLVQAGGSLRLSCAASGTIFYYDRMGWYRQAPGKERELVASITVGTITNYADSVKGRFTISRDNAKNTVYLQMNSLKPEDTAVYYCAAFYIGGGEHLYWGQGTQVTVSS

SEQ ID NO: 32522 - protein, 126 aa, Artificial Sequence
  Chemically Synthesized
QVQLQESGGGLVQAGGSLRLSCAASGSISRDGIMGWYRQAPGKERELVATIDGGGTTNYADSVKGRFTISRDNAKNTVYLQMNSLKPEDTAVYYCAAVDYNANHLVDGWLYYHTYWGQGTQVTVSS

SEQ ID NO: 32523 - protein, 122 aa, Artificial Sequence
  Chemically Synthesized
QVQLQESGGGLVQAGGSLRLSCAASGNISTLSYMGWYRQAPGKERELVASINGGSNTNYADSVKGRFTISRDNAKNTVYLQMNSLKPEDTAVYYCAATDGVPAPPTYLLSYWGQGTQVTVSS

SEQ ID NO: 32524 - protein, 117 aa, Artificial Sequence
  Chemically Synthesized
QVQLQESGGGLVQAGGSLRLSCAASGYIFPRPSMGWYRQAPGKEREFVATITPGATTNYADSVKGRFTISRDNAKNTVYLQMNSLKPEDTAVYYCAAATTLTTLLYWGQGTQVTVSS

SEQ ID NO: 32525 - protein, 122 aa, Artificial Sequence
  Chemically Synthesized
QVQLQESGGGLVQAGGSLRLSCAASGSISTIGYMGWYRQAPGKERELVAAIGYGGTTYYADSVKGRFTISRDNAKNTVYLQMNSLKPEDTAVYYCAVHYSYRYPDDIYHVYWGQGTQVTVSS

SEQ ID NO: 32526 - protein, 118 aa, Artificial Sequence
  Chemically Synthesized
QVQLQESGGGLVQAGGSLRLSCAASGTIFWWYTMGWYRQAPGKERELVAGIARGGTTYYADSVKGRFTISRDNAKNTVYLQMNSLKPEDTAVYYCAAISWGYYAHVYWGQGTQVTVSS

SEQ ID NO: 32527 - protein, 122 aa, Artificial Sequence
  Chemically Synthesized
QVQLQESGGGLVQAGGSLRLSCAASGNISYLYYMGWYRQAPGKERELVASIAAGGTTNYADSVKGRFTISRDNAKNTVYLQMNSLKPEDTAVYYCAVAVRDTTFLFVRLSYWGQGTQVTVSS

SEQ ID NO: 32528 - protein, 118 aa, Artificial Sequence
  Chemically Synthesized
QVQLQESGGGLVQAGGSLRLSCAASGNISSTAPMGWYRQAPGKEREFVAGITVGGNTYYADSVKGRFTISRDNAKNTVYLQMNSLKPEDTAVYYCAAHVAYDNKYGYWGQGTQVTVSS

SEQ ID NO: 32529 - protein, 118 aa, Artificial Sequence
  Chemically Synthesized
QVQLQESGGGLVQAGGSLRLSCAASGNISAPIYMGWYRQAPGKEREFVAGIGFGGNTNYADSVKGRFTISRDNAKNTVYLQMNSLKPEDTAVYYCAADTDYRANHPYWGQGTQVTVSS

SEQ ID NO: 32530 - protein, 118 aa, Artificial Sequence
  Chemically Synthesized
QVQLQESGGGLVQAGGSLRLSCAASGNIFLMGWYRQAPGKERELVAGIAYGSNTYYADSVKGRFTISRDNAKNTVYLQMNSLKPEDTAVYYCAVAQALGGNSTTTMYWGQGTQVTVSS

SEQ ID NO: 32531 - protein, 118 aa, Artificial Sequence
  Chemically Synthesized
QVQLQESGGGLVQAGGSLRLSCAASGYIFYNTYMGWYRQAPGKEREFVATIGGGTTTNYADSVKGRFTISRDNAKNTVYLQMNSLKPEDTAVYYCAVPSKGDFSLYYWGQGTQVTVSS

SEQ ID NO: 32532 - protein, 118 aa, Artificial Sequence
  Chemically Synthesized
QVQLQESGGGLVQAGGSLRLSCAASGTISAVYDMGWYRQAPGKERELVASIGGGANTNYADSVKGRFTISRDNAKNTVYLQMNSLKPEDTAVYYCAVDYLDAPDLTYWGQGTQVTVSS

SEQ ID NO: 32533 - protein, 118 aa, Artificial Sequence
  Chemically Synthesized
QVQLQESGGGLVQAGGSLRLSCAASGSIFPRHYMGWYRQAPGKERELVAGIGTGTNTNYADSVKGRFTISRDNAKNTVYLQMNSLKPEDTAVYYCAVSNRIYTSYAYWGQGTQVTVSS

SEQ ID NO: 32534 - protein, 122 aa, Artificial Sequence
  Chemically Synthesized
QVQLQESGGGLVQAGGSLRLSCAASGNIFPGYRMGWYRQAPGKERELVAGITWGSITNYADSVKGRFTISRDNAKNTVYLQMNSLKPEDTAVYYCAAFDSGDYYTVTIHLYWGQGTQVTVSS

SEQ ID NO: 32535 - protein, 117 aa, Artificial Sequence
  Chemically Synthesized
QVQLQESGGGLVQAGGSLRLSCAASGTISTAIAMGWYRQAPGKERELVAAITFVVLPYADSVKGRFTISRDNAKNTVYLQMNSLKPEDTAVYYCAVGYPSYPIYVYWGQGTQVTVSS

SEQ ID NO: 32536 - protein, 122 aa, Artificial Sequence
  Chemically Synthesized
QVQLQESGGGLVQAGGSLRLSCAASGSIFYDVYMGWYRQAPGKEREFVAAITPGGITYYADSVKGRFTISRDNAKNTVYLQMNSLKPEDTAVYYCAAIARDSYYTLSYFSYWGQGTQVTVSS

SEQ ID NO: 32537 - protein, 118 aa, Artificial Sequence
  Chemically Synthesized
QVQLQESGGGLVQAGGSLRLSCAASGNISITYRMGWYRQAPGKEREFVASINVGGTTYYADSVKGRFTISRDNAKNTVYLQMNSLKPEDTAVYYCAAYRPHRYYYNYWGQGTQVTVSS

SEQ ID NO: 32538 - protein, 121 aa, Artificial Sequence
  Chemically Synthesized
QVQLQESGGGLVQAGGSLRLSCAASGSISGAYGMGWYRQAPGKERELVAGITVGTNTNYADSVKGRFTISRDNAKNTVYLQMNSLKPEDTAVYYCAVDYAHYRRANRHYYWGQGTQVTVSS

SEQ ID NO: 32539 - protein, 118 aa, Artificial Sequence
  Chemically Synthesized
QVQLQESGGGLVQAGGSLRLSCAASGTISISSPMGWYRQAPGKEREFVASIDHGAITYYADSVKGRFTISRDNAKNTVYLQMNSLKPEDTAVYYCAAYPFDGSVHFYWGQGTQVTVSS

SEQ ID NO: 32540 - protein, 117 aa, Artificial Sequence
  Chemically Synthesized
QVQLQESGGGLVQAGGSLRLSCAASGNISQRNVMGWYRQAPGKERELVAGITLGATTNYADSVKGRFTISRDNAKNTVYLQMNSLKPEDTAVYYCAAGKDSTCGMYWGQGTQVTVSS

SEQ ID NO: 32541 - protein, 118 aa, Artificial Sequence
  Chemically Synthesized
QVQLQESGGGLVQAGGSLRLSCAASGYISWSRVMGWYRQAPGKEREFVAAIADGATTNYADSVKGRFTISRDNAKNTVYLQMNSLKPEDTAVYYCAVYLTRSIELGYWGQGTQVTVSS

SEQ ID NO: 32542 - protein, 115 aa, Artificial Sequence
  Chemically Synthesized
QVQLQESGGGLVQAGGSLRLSCAASGSISVDFYMGWYRQAPGKEREFVAAIDSGGITYYADSVKGRFTISRDNAKNTVYLQMNSLKPEDTAVYYCAVPDITFYYWGQGTQVTVSS

SEQ ID NO: 32543 - protein, 118 aa, Artificial Sequence
  Chemically Synthesized
QVQLQESGGGLVQAGGSLRLSCAASGYIFGTTDMGWYRQAPGKERELVASIAYGSNTYYADSVKGRFTISRDNAKNTVYLQMNSLKPEDTAVYYCAAPVSDSGAFSYWGQGTQVTVSS

SEQ ID NO: 32544 - protein, 117 aa, Artificial Sequence
  Chemically Synthesized
QVQLQESGGGLVQAGGSLRLSCAASGTISDDADMGWYRQAPGKERELVASISVGTSTNYADSVKGRFTISRDNAKNTVYLQMNSLKPEDTAVYYCAVSTLTGRTIYWGQGTQVTVSS

SEQ ID NO: 32545 - protein, 126 aa, Artificial Sequence
  Chemically Synthesized
QVQLQESGGGLVQAGGSLRLSCAASGSIFPWLTMGWYRQAPGKERELVASINYGATTNYADSVKGRFTISRDNAKNTVYLQMNSLKPEDTAVYYCAVSPLQSPRVGVTAGFLPLYWGQGTQVTVSS

SEQ ID NO: 32546 - protein, 124 aa, Artificial Sequence
  Chemically Synthesized
QVQLQESGGGLVQAGGSLRLSCAASGYIFGVLVMGWYRQAPGKERELVATIAGGGNTYYADSVKGRFTISRDNAKNTVYLQMNSLKPEDTAVYYCAVTSHISRYYFRPDHHNYWGQGTQVTVSS

SEQ ID NO: 32547 - protein, 118 aa, Artificial Sequence
  Chemically Synthesized
QVQLQESGGGLVQAGGSLRLSCAASGTIFDYYAMGWYRQAPGKEREFVATIGRGGNTYYADSVKGRFTISRDNAKNTVYLQMNSLKPEDTAVYYCAVYGQWKYILYYWGQGTQVTVSS

SEQ ID NO: 32548 - protein, 126 aa, Artificial Sequence
  Chemically Synthesized
QVQLQESGGGLVQAGGSLRLSCAASGTISYYGNMGWYRQAPGKERELVASIGDGTNTNYADSVKGRFTISRDNAKNTVYLQMNSLKPEDTAVYYCAVSHTEGGNYYAGVYPSYWYWGQGTQVTVSS

SEQ ID NO: 32549 - protein, 118 aa, Artificial Sequence
  Chemically Synthesized
QVQLQESGGGLVQAGGSLRLSCAASGNISLLRYMGWYRQAPGKEREFVASIDLGGTTYYADSVKGRFTISRDNAKNTVYLQMNSLKPEDTAVYYCAVTSEGYANLVYWGQGTQVTVSS

SEQ ID NO: 32550 - protein, 118 aa, Artificial Sequence
  Chemically Synthesized
QVQLQESGGGLVQAGGSLRLSCAASGYIFVILYMGWYRQAPGKERELVASIAFGSTTYYADSVKGRFTISRDNAKNTVYLQMNSLKPEDTAVYYCAAIQLYYGPYLYWGQGTQVTVSS

SEQ ID NO: 32551 - protein, 118 aa, Artificial Sequence
  Chemically Synthesized
QVQLQESGGGLVQAGGSLRLSCAASGTIFAPFVMGWYRQAPGKEREFVASINSGASTYYADSVKGRFTISRDNAKNTVYLQMNSLKPEDTAVYYCAAPWRGVTRYQYWGQGTQVTVSS

SEQ ID NO: 32552 - protein, 126 aa, Artificial Sequence
  Chemically Synthesized
QVQLQESGGGLVQAGGSLRLSCAASGTISRVPSMGWYRQAPGKEREFVATIGNGTITNYADSVKGRFTISRDNAKNTVYLQMNSLKPEDTAVYYCAANGYYIRSEPTVLTDVFAYWGQGTQVTVSS

SEQ ID NO: 32553 - protein, 118 aa, Artificial Sequence
  Chemically Synthesized
QVQLQESGGGLVQAGGSLRLSCAASGNISYSNMGWYRQAPGKERELVAAIGRGSTTNYADSVKGRFTISRDNAKNTVYLQMNSLKPEDTAVYYCALLVVVSSTTLLYWGQGTQVTVSS

SEQ ID NO: 32554 - protein, 122 aa, Artificial Sequence
  Chemically Synthesized
QVQLQESGGGLVQAGGSLRLSCAASGYFLLVMMGWYRQAPGKERELVASIGSGANTYYADSVKGRFTISRDNAKNTVYLQMNSLKPEDTAVYYCAVAPQFTNYYYTPVLDYWGQGTQVTVSS

SEQ ID NO: 32555 - protein, 126 aa, Artificial Sequence
  Chemically Synthesized
QVQLQESGGGLVQAGGSLRLSCAASGNIFALYYMGWYRQAPGKERELVAAIAVGSITNYADSVKGRFTISRDNAKNTVYLQMNSLKPEDTAVYYCAAGPLKWAKHAREQYTDHSYWGQGTQVTVSS

SEQ ID NO: 32556 - protein, 126 aa, Artificial Sequence
  Chemically Synthesized
QVQLQESGGGLVQAGGSLRLSCAASGNISASTMGWYRQAPGKEREFVASIAKGGITYYADSVKGRFTISRDNAKNTVYLQMNSLKPEDTAVYYCAVYQYGQAVYGDSIYGYPYAYWGQGTQVTVSS

SEQ ID NO: 32557 - protein, 120 aa, Artificial Sequence
  Chemically Synthesized
QVQLQESGGGLVQAGGSLRLSCAASGTISKWGLMGWYRQAPGKEREFVAAINLGGSTYYADSVKGRFTISRDNAKNTVYLQMNSLKPEDTAVYYCAVTTRTLRTSVLMYWGQGTQVTVSS

SEQ ID NO: 32558 - protein, 122 aa, Artificial Sequence
  Chemically Synthesized
QVQLQESGGGLVQAGGSLRLSCAASGSIFSFLYMGWYRQAPGKERELVASISVGGITYYADSVKGRFTISRDNAKNTVYLQMNSLKPEDTAVYYCAVSYYYTGQENGRHNYWGQGTQVTVSS

SEQ ID NO: 32559 - protein, 126 aa, Artificial Sequence
  Chemically Synthesized
QVQLQESGGGLVQAGGSLRLSCAASGSIFPWYYMGWYRQAPGKEREFVASITRGATTNYADSVKGRFTISRDNAKNTVYLQMNSLKPEDTAVYYCAVYYAGYIPYYQAYWILYDYWGQGTQVTVSS

SEQ ID NO: 32560 - protein, 121 aa, Artificial Sequence
  Chemically Synthesized
QVQLQESGGGLVQAGGSLRLSCAASGTIFYYGYMGWYRQAPGKEREFVAAIGYGGNTYYADSVKGRFTISRDNAKNTVYLQMNSLKPEDTAVYYCAASDGDVATSGYHVYWGQGTQVTVSS

SEQ ID NO: 32561 - protein, 110 aa, Artificial Sequence
  Chemically Synthesized
QVQLQESGGGLVQAGGSLRLSCAASGSISSTDDMGWYRQAPGKERELVVPYADSVKGRFTISRDNAKNTVYLQMNSLKPEDTAVYYCAVAYLGWLYLDYWGQGTQVTVSS

SEQ ID NO: 32562 - protein, 118 aa, Artificial Sequence
  Chemically Synthesized
QVQLQESGGGLVQAGGSLRLSCAASGTISGGYYMGWYRQAPGKEREFVAAIGSGASTYYADSVKGRFTISRDNAKNTVYLQMNSLKPEDTAVYYCAASDERYYIYPYWGQGTQVTVSS

SEQ ID NO: 32563 - protein, 126 aa, Artificial Sequence
  Chemically Synthesized
QVQLQESGGGLVQAGGSLRLSCAASGNISWQPYMGWYRQAPGKEREFVASIGEGATTYYADSVKGRFTISRDNAKNTVYLQMNSLKPEDTAVYYCAVDDGYDTTGVLHYHTDHRYWGQGTQVTVSS

SEQ ID NO: 32564 - protein, 118 aa, Artificial Sequence
  Chemically Synthesized
QVQLQESGGGLVQAGGSLRLSCAASGNIFYNGYMGWYRQAPGKERELVATINDGAITNYADSVKGRFTISRDNAKNTVYLQMNSLKPEDTAVYYCAAVLIDGYYHDYWGQGTQVTVSS

SEQ ID NO: 32565 - protein, 116 aa, Artificial Sequence
  Chemically Synthesized
QVQLQESGGGLVQAGGSLRLSCAASGTISDADYMGWYRQAPGKERELVATIGYGGTTYYADSVKGRFTISRDNAKNTVYLQMNSLKPEDTAVYYCAVVTTRVRMYWGQGTQVTVSS

SEQ ID NO: 32566 - protein, 124 aa, Artificial Sequence
  Chemically Synthesized
QVQLQESGGGLVQAGGSLRLSCAASGYIFRTGDMGWYRQAPGKEREFVATIASVLLPYADSVKGRFTISRDNAKNTVYLQMNSLKPEDTAVYYCAAVQPSYLTMTTTLLLTIYWGQGTQVTVSS

SEQ ID NO: 32567 - protein, 121 aa, Artificial Sequence
  Chemically Synthesized
QVQLQESGGGLVQAGGSLRLSCAASGSISPYRYMGWYRQAPGKEREFVASIGYGTITNYADSVKGRFTISRDNAKNTVYLQMNSLKPEDTAVYYCAVQYVYDGVIDRFFYWGQGTQVTVSS

SEQ ID NO: 32568 - protein, 118 aa, Artificial Sequence
  Chemically Synthesized
QVQLQESGGGLVQAGGSLRLSCAASGNIFQTWSMGWYRQAPGKEREFVASINHGTSTYYADSVKGRFTISRDNAKNTVYLQMNSLKPEDTAVYYCAVYGTGVPIHVYWGQGTQVTVSS

SEQ ID NO: 32569 - protein, 115 aa, Artificial Sequence
  Chemically Synthesized
QVQLQESGGGLVQAGGSLRLSCAASGTIFFTDAMGWYRQAPGKEREFVAAISLGTITNYADSVKGRFTISRDNAKNTVYLQMNSLKPEDTAVYYCAVLEAGFVYWGQGTQVTVSS

SEQ ID NO: 32570 - protein, 118 aa, Artificial Sequence
  Chemically Synthesized
QVQLQESGGGLVQAGGSLRLSCAASGSIFYPYAMGWYRQAPGKERELVASIGPGSSTNYADSVKGRFTISRDNAKNTVYLQMNSLKPEDTAVYYCAAFVYGQSSYSYWGQGTQVTVSS

SEQ ID NO: 32571 - protein, 116 aa, Artificial Sequence
  Chemically Synthesized
QVQLQESGGGLVQAGGSLRLSCAASGTIFIFGEMGWYRQAPGKEREFVAGITEVLIPYADSVKGRFTISRDNAKNTVYLQMNSLKPEDTAVYYCAAAFSSLLTIYWGQGTQVTVSS

SEQ ID NO: 32572 - protein, 111 aa, Artificial Sequence
  Chemically Synthesized
QVQLQESGGGLVQAGGSLRLSCAASGTISDLDSMGWYRQAPGKERELVASISYGTRPYADSVKGRFTISRDNAKNTVYLQMNSLKPEDTAVYYCAARLRYWGQGTQVTVSS

SEQ ID NO: 32573 - protein, 118 aa, Artificial Sequence
  Chemically Synthesized
QVQLQESGGGLVQAGGSLRLSCAASGSIFPTWSMGWYRQAPGKERELVASIASGSNTYYADSVKGRFTISRDNAKNTVYLQMNSLKPEDTAVYYCAAGYARVIYHYYWGQGTQVTVSS

SEQ ID NO: 32574 - protein, 122 aa, Artificial Sequence
  Chemically Synthesized
QVQLQESGGGLVQAGGSLRLSCAASGSISDGYAMGWYRQAPGKEREFVAGIDQGTTTYYADSVKGRFTISRDNAKNTVYLQMNSLKPEDTAVYYCAALWRYGDNYQGYHYYWGQGTQVTVSS

SEQ ID NO: 32575 - protein, 119 aa, Artificial Sequence
  Chemically Synthesized
QVQLQESGGGLVQAGGSLRLSCAASGSISNIVSMGWYRQAPGKERELVAAITGGSTTYYADSVKGRFTISRDNAKNTVYLQMNSLKPEDTAVYYCAAIYVDVRRDLDYWGQGTQVTVSS

SEQ ID NO: 32576 - protein, 122 aa, Artificial Sequence
  Chemically Synthesized
QVQLQESGGGLVQAGGSLRLSCAASGSISDGYAMGWYRQAPGKERELVAAITGGSTTYYADSVKGRFTISRDNAKNTVYLQMNSLKPEDTAVYYCAALWRYGDNYQGYHYYWGQGTQVTVSS

SEQ ID NO: 32577 - protein, 119 aa, Artificial Sequence
  Chemically Synthesized
QVQLQESGGGLVQAGGSLRLSCAASGSISNIVSMGWYRQAPGKEREFVAGIDQGTTTYYADSVKGRFTISRDNAKNTVYLQMNSLKPEDTAVYYCAAIYVDVRRDLDYWGQGTQVTVSS

SEQ ID NO: 32578 - protein, 122 aa, Artificial Sequence
  Chemically Synthesized
QVQLQESGGGLVQAGGSLRLSCAASGSISDGYAMGWYRQAPGKEREFVAGIDQGTTTYYADSVKGRFTISRDNAKNTVYLQMNSLKPEDTAVYYCAALYNYYSGQRPQHVYWGQGTQVTVSS

SEQ ID NO: 32579 - protein, 122 aa, Artificial Sequence
  Chemically Synthesized
QVQLQESGGGLVQAGGSLRLSCAASGNIFDEYNMGWYRQAPGKEREFVAGIAIGSTTYYADSVKGRFTISRDNAKNTVYLQMNSLKPEDTAVYYCAALWRYGDNYQGYHYYWGQGTQVTVSS

SEQ ID NO: 32580 - protein, 122 aa, Artificial Sequence
  Chemically Synthesized
QVQLQESGGGLVQAGGSLRLSCAASGSISNIVSMGWYRQAPGKERELVAAITGGSTTYYADSVKGRFTISRDNAKNTVYLQMNSLKPEDTAVYYCAALYNYYSGQRPQHVYWGQGTQVTVSS

SEQ ID NO: 32581 - protein, 126 aa, Artificial Sequence
  Chemically Synthesized
QVQLQESGGGLVQAGGSLRLSCAASGSISNIVSMGWYRQAPGKERELVAAITGGSTTYYADSVKGRFTISRDNAKNTVYLQMNSLKPEDTAVYYCAALYEVYRGDYTDRPKYHEYWGQGTQVTVSS

SEQ ID NO: 32582 - protein, 119 aa, Artificial Sequence
  Chemically Synthesized
QVQLQESGGGLVQAGGSLRLSCAASGNIFDEYNMGWYRQAPGKEREFVAGIAIGSTTYYADSVKGRFTISRDNAKNTVYLQMNSLKPEDTAVYYCAAIYVDVRRDLDYWGQGTQVTVSS

SEQ ID NO: 32583 - protein, 126 aa, Artificial Sequence
  Chemically Synthesized
QVQLQESGGGLVQAGGSLRLSCAASGSISDGYAMGWYRQAPGKEREFVAGIDQGTTTYYADSVKGRFTISRDNAKNTVYLQMNSLKPEDTAVYYCAALYEVYRGDYTDRPKYHEYWGQGTQVTVSS

SEQ ID NO: 32584 - protein, 122 aa, Artificial Sequence
  Chemically Synthesized
QVQLQESGGGLVQAGGSLRLSCAASGTISYYRGMGWYRQAPGKERELVAAITRGATTYYADSVKGRFTISRDNAKNTVYLQMNSLKPEDTAVYYCAALWRYGDNYQGYHYYWGQGTQVTVSS

SEQ ID NO: 32585 - protein, 122 aa, Artificial Sequence
  Chemically Synthesized
QVQLQESGGGLVQAGGSLRLSCAASGSISDGYAMGWYRQAPGKEREFVAGIDQGTTTYYADSVKGRFTISRDNAKNTVYLQMNSLKPEDTAVYYCAALYYAAVPDRRSHQYWGQGTQVTVSS

SEQ ID NO: 32586 - protein, 118 aa, Artificial Sequence
  Chemically Synthesized
QVQLQESGGGLVQAGGSLRLSCAASGTIFVVNAMGWYRQAPGKERELVAAITRGSTYYADSVKGRFTISRDNAKNTVYLQMNSLKPEDTAVYYCAAIYVDVRRDLDYWGQGTQVTVSS

SEQ ID NO: 32587 - protein, 121 aa, Artificial Sequence
  Chemically Synthesized
QVQLQESGGGLVQAGGSLRLSCAASGTIFVVNAMGWYRQAPGKERELVAAITRGSTYYADSVKGRFTISRDNAKNTVYLQMNSLKPEDTAVYYCAALWRYGDNYQGYHYYWGQGTQVTVSS

SEQ ID NO: 32588 - protein, 119 aa, Artificial Sequence
  Chemically Synthesized
QVQLQESGGGLVQAGGSLRLSCAASGTISYYRGMGWYRQAPGKERELVAAITRGATTYYADSVKGRFTISRDNAKNTVYLQMNSLKPEDTAVYYCAAIYVDVRRDLDYWGQGTQVTVSS

SEQ ID NO: 32589 - protein, 122 aa, Artificial Sequence
  Chemically Synthesized
QVQLQESGGGLVQAGGSLRLSCAASGSISNIVSMGWYRQAPGKERELVAAITGGSTTYYADSVKGRFTISRDNAKNTVYLQMNSLKPEDTAVYYCAALYYAAVPDRRSHQYWGQGTQVTVSS

SEQ ID NO: 32590 - protein, 119 aa, Artificial Sequence
  Chemically Synthesized
QVQLQESGGGLVQAGGSLRLSCAASGYISDVGAMGWYRQAPGKERELVAGIALGTTTYYADSVKGRFTISRDNAKNTVYLQMNSLKPEDTAVYYCAAIYVDVRRDLDYWGQGTQVTVSS

SEQ ID NO: 32591 - protein, 122 aa, Artificial Sequence
  Chemically Synthesized
QVQLQESGGGLVQAGGSLRLSCAASGNISRYVYMGWYRQAPGKEREFVAAINSGASTNYADSVKGRFTISRDNAKNTVYLQMNSLKPEDTAVYYCAVVLLYRYNPQFVYDYWGQGTQVTVSS

SEQ ID NO: 32592 - protein, 117 aa, Artificial Sequence
  Chemically Synthesized
QVQLQESGGGLVQAGGSLRLSCAASGNISRGRWMGWYRQAPGKERELVPLLVLVLIPYADSVKGRFTISRDNAKNTVYLQMNSLKPEDTAVYYCAAAWYAYERFSYWGQGTQVTVSS

SEQ ID NO: 32593 - protein, 118 aa, Artificial Sequence
  Chemically Synthesized
QVQLQESGGGLVQAGGSLRLSCAASGYISLYTDMGWYRQAPGKEREFVASIDTGGSTYYADSVKGRFTISRDNAKNTVYLQMNSLKPEDTAVYYCAVLLYYAVLHDYWGQGTQVTVSS

SEQ ID NO: 32594 - protein, 124 aa, Artificial Sequence
  Chemically Synthesized
QVQLQESGGGLVQAGGSLRLSCAASGTISLENPMGWYRQAPGKERELVATIDEGTTYADSVKGRFTISRDNAKNTVYLQMNSLKPEDTAVYYCAVGLPHASTTLEEIYWLHWYWGQGTQVTVSS

SEQ ID NO: 32595 - protein, 121 aa, Artificial Sequence
  Chemically Synthesized
QVQLQESGGGLVQAGGSLRLSCAASGNIFDISGMGWYRQAPGKEREFVAGIAIGTSTYYADSVKGRFTISRDNAKNTVYLQMNSLKPEDTAVYYCAALSYTYPRDNSYIYWGQGTQVTVSS

SEQ ID NO: 32596 - protein, 122 aa, Artificial Sequence
  Chemically Synthesized
QVQLQESGGGLVQAGGSLRLSCAASGYISARYKMGWYRQAPGKEREFVAGIADGANTYYADSVKGRFTISRDNAKNTVYLQMNSLKPEDTAVYYCAVDPRYDKTTDVVYAYWGQGTQVTVSS

SEQ ID NO: 32597 - protein, 118 aa, Artificial Sequence
  Chemically Synthesized
QVQLQESGGGLVQAGGSLRLSCAASGTISDAGIMGWYRQAPGKEREFVASIDRGGNTNYADSVKGRFTISRDNAKNTVYLQMNSLKPEDTAVYYCAVADYQSRDHVYWGQGTQVTVSS

SEQ ID NO: 32598 - protein, 118 aa, Artificial Sequence
  Chemically Synthesized
QVQLQESGGGLVQAGGSLRLSCAASGSISARANMGWYRQAPGKERELVASIAPGGITYYADSVKGRFTISRDNAKNTVYLQMNSLKPEDTAVYYCAARHDTIALHAYWGQGTQVTVSS

SEQ ID NO: 32599 - protein, 122 aa, Artificial Sequence
  Chemically Synthesized
QVQLQESGGGLVQAGGSLRLSCAASGYISARYKMGWYRQAPGKEREFVAGIADGANTYYADSVKGRFTISRDNAKNTVYLQMNSLKPEDTAVYYCAAISRGGTRRQGYLDYWGQGTQVTVSS

SEQ ID NO: 32600 - protein, 121 aa, Artificial Sequence
  Chemically Synthesized
QVQLQESGGGLVQAGGSLRLSCAASGSISYITGMGWYRQAPGKEREFVAGIARGSNTYYADSVKGRFTISRDNAKNTVYLQMNSLKPEDTAVYYCAALSYTYPRDNSYIYWGQGTQVTVSS

SEQ ID NO: 32601 - protein, 117 aa, Artificial Sequence
  Chemically Synthesized
QVQLQESGGGLVQAGGSLRLSCAASGSISTWEYMGWYRQAPGKERELLPLLVLVVLPYADSVKGRFTISRDNAKNTVYLQMNSLKPEDTAVYYCAAGRLKFQVHAYWGQGTQVTVSS

SEQ ID NO: 32602 - protein, 118 aa, Artificial Sequence
  Chemically Synthesized
QVQLQESGGGLVQAGGSLRLSCAASGSISYPEVMGWYRQAPGKEREFVAGISDGGNTYYADSVKGRFTISRDNAKNTVYLQMNSLKPEDTAVYYCAARFLIDVWYGYWGQGTQVTVSS

SEQ ID NO: 32603 - protein, 119 aa, Artificial Sequence
  Chemically Synthesized
QVQLQESGGGLVQAGGSLRLSCAASGSISYIANMGWYRQAPGKEREFVRYYYWWYYLYADSVKGRFTISRDNAKNTVYLQMNSLKPEDTAVYYCAVWPGTDLRDYLRYWGQGTQVTVSS

SEQ ID NO: 32604 - protein, 117 aa, Artificial Sequence
  Chemically Synthesized
QVQLQESGGGLVQAGGSLRLSCAASGTIFQPDDMGWYRQAPGKERELVATITSGTTTYYADSVKGRFTISRDNAKNTVYLQMNSLKPEDTAVYYCAADTLSSSRMYWGQGTQVTVSS

SEQ ID NO: 32605 - protein, 121 aa, Artificial Sequence
  Chemically Synthesized
QVQLQESGGGLVQAGGSLRLSCAASGTISSSMGWYRQAPGKERELVASIASGASTYYADSVKGRFTISRDNAKNTVYLQMNSLKPEDTAVYYCAVYLDTPYVPITSFLIYWGQGTQVTVSS

SEQ ID NO: 32606 - protein, 122 aa, Artificial Sequence
  Chemically Synthesized
QVQLQESGGGLVQAGGSLRLSCAASGYIFVDANMGWYRQAPGKEREFVAGITYGGSTNYADSVKGRFTISRDNAKNTVYLQMNSLKPEDTAVYYCAVDTYYGYYSWAVYYYWGQGTQVTVSS

SEQ ID NO: 32607 - protein, 117 aa, Artificial Sequence
  Chemically Synthesized
QVQLQESGGGLVQAGGSLRLSCAASGTISITHRMGWYRQAPGKERELVPVLITVLIPYADSVKGRFTISRDNAKNTVYLQMNSLKPEDTAVYYCAVYWYEIVALPYWGQGTQVTVSS

SEQ ID NO: 32608 - protein, 116 aa, Artificial Sequence
  Chemically Synthesized
QVQLQESGGGLVQAGGSLRLSCAASGTIFEFKYMGWYRQAPGKEREFVASIAAGTITYYADSVKGRFTISRDNAKNTVYLQMNSLKPEDTAVYYCAEWDDIDLVYWGQGTQVTVSS

SEQ ID NO: 32609 - protein, 122 aa, Artificial Sequence
  Chemically Synthesized
QVQLQESGGGLVQAGGSLRLSCAASGYISQIGFMGWYRQAPGKERELVAGIDDGSSTNYADSVKGRFTISRDNAKNTVYLQMNSLKPEDTAVYYCAVSHGASARIGSGFEYWGQGTQVTVSS

SEQ ID NO: 32610 - protein, 118 aa, Artificial Sequence
  Chemically Synthesized
QVQLQESGGGLVQAGGSLRLSCAASGTISNPYFMGWYRQAPGKEREFVAAIGYGGTTYYADSVKGRFTISRDNAKNTVYLQMNSLKPEDTAVYYCAVGIYYRWYHPYWGQGTQVTVSS

SEQ ID NO: 32611 - protein, 123 aa, Artificial Sequence
  Chemically Synthesized
QVQLQESGGGLVQAGGSLRLSCAASGTIFHAGDMGWYRQAPGKEREFVAGISHGGTTTNYADSVKGRFTISRDNAKNTVYLQMNSLKPEDTAVYYCAVGGAVDADPGYYHYYWGQGTQVTVSS

SEQ ID NO: 32612 - protein, 118 aa, Artificial Sequence
  Chemically Synthesized
QVQLQESGGGLVQAGGSLRLSCAASGSISWLYGMGWYRQAPGKEREFVAAIGIGTNTYYADSVKGRFTISRDNAKNTVYLQMNSLKPEDTAVYYCAAGKYVYAYYRYWGQGTQVTVSS

SEQ ID NO: 32613 - protein, 116 aa, Artificial Sequence
  Chemically Synthesized
QVQLQESGGGLVQAGGSLRLSCAASGTIFSVCMGWYRQAPGKERELVATIGWGGTTYYADSVKGRFTISRDNAKNTVYLQMNSLKPEDTAVYYCAATYDTSDSLYWGQGTQVTVSS

SEQ ID NO: 32614 - protein, 122 aa, Artificial Sequence
  Chemically Synthesized
QVQLQESGGGLVQAGGSLRLSCAASGNISNRFGMGWYRQAPGKEREFVAAINGGTSTNYADSVKGRFTISRDNAKNTVYLQMNSLKPEDTAVYYCAARATWFGIWYRAHYYWGQGTQVTVSS

SEQ ID NO: 32615 - protein, 122 aa, Artificial Sequence
  Chemically Synthesized
QVQLQESGGGLVQAGGSLRLSCAASGSIFRARAMGWYRQAPGKERELVATISHGASTNYADSVKGRFTISRDNAKNTVYLQMNSLKPEDTAVYYCAAPDRTADTDIQDHGYWGQGTQVTVSS

SEQ ID NO: 32616 - protein, 118 aa, Artificial Sequence
  Chemically Synthesized
QVQLQESGGGLVQAGGSLRLSCAASGTIFYIIYMGWYRQAPGKERELVAGISDGANTNYADSVKGRFTISRDNAKNTVYLQMNSLKPEDTAVYYCAANQKRPGDLNYWGQGTQVTVSS

SEQ ID NO: 32617 - protein, 118 aa, Artificial Sequence
  Chemically Synthesized
QVQLQESGGGLVQAGGSLRLSCAASGTISRLFGMGWYRQAPGKEREFVAGIAAGGNTYYADSVKGRFTISRDNAKNTVYLQMNSLKPEDTAVYYCAVGRYAYVGYTYWGQGTQVTVSS

SEQ ID NO: 32618 - protein, 119 aa, Artificial Sequence
  Chemically Synthesized
QVQLQESGGGLVQAGGSLRLSCAASGSISRVRMGWYRQAPGKERELVATIGPVLLPYADSVKGRFTISRDNAKNTVYLQMNSLKPEDTAVYYCAAYTGQDLSGSDHDYWGQGTQVTVSS

SEQ ID NO: 32619 - protein, 119 aa, Artificial Sequence
  Chemically Synthesized
QVQLQESGGGLVQAGGSLRLSCAASGSISYSLMGWYRQAPGKERELVAAISIGAITNYADSVKGRFTISRDNAKNTVYLQMNSLKPEDTAVYYCAAITDTDGYLPYAYWGQGTQVTVSS

SEQ ID NO: 32620 - protein, 122 aa, Artificial Sequence
  Chemically Synthesized
QVQLQESGGGLVQAGGSLRLSCAASGTIFPYYVMGWYRQAPGKERELVAGITYGGITYYADSVKGRFTISRDNAKNTVYLQMNSLKPEDTAVYYCAVRRYPSYWRHYDLSYWGQGTQVTVSS

SEQ ID NO: 32621 - protein, 122 aa, Artificial Sequence
  Chemically Synthesized
QVQLQESGGGLVQAGGSLRLSCAASGNISRGLVMGWYRQAPGKEREFVAAIDAGTNTYYADSVKGRFTISRDNAKNTVYLQMNSLKPEDTAVYYCAVWPRRYRWYTWDYAYWGQGTQVTVSS

SEQ ID NO: 32622 - protein, 118 aa, Artificial Sequence
  Chemically Synthesized
QVQLQESGGGLVQAGGSLRLSCAASGTISRAYKMGWYRQAPGKERELVAAIAHGGNTYYADSVKGRFTISRDNAKNTVYLQMNSLKPEDTAVYYCAVLANSYPEHRYWGQGTQVTVSS

SEQ ID NO: 32623 - protein, 118 aa, Artificial Sequence
  Chemically Synthesized
QVQLQESGGGLVQAGGSLRLSCAASGYISDRNRMGWYRQAPGKERELVASIASGGTTYYADSVKGRFTISRDNAKNTVYLQMNSLKPEDTAVYYCAAPGITSYLLAYWGQGTQVTVSS

SEQ ID NO: 32624 - protein, 122 aa, Artificial Sequence
  Chemically Synthesized
QVQLQESGGGLVQAGGSLRLSCAASGTIFVAGFMGWYRQAPGKERELVATIDDGTSTNYADSVKGRFTISRDNAKNTVYLQMNSLKPEDTAVYYCAVAVGVRLGLSHDYDYWGQGTQVTVSS

SEQ ID NO: 32625 - protein, 122 aa, Artificial Sequence
  Chemically Synthesized
QVQLQESGGGLVQAGGSLRLSCAASGSIFRHTAMGWYRQAPGKEREFVASIGLGGSTNYADSVKGRFTISRDNAKNTVYLQMNSLKPEDTAVYYCAVTYQYGQSPHWGFEYWGQGTQVTVSS

SEQ ID NO: 32626 - protein, 119 aa, Artificial Sequence
  Chemically Synthesized
QVQLQESGGGLVQAGGSLRLSCAASGTISYVGYMGWYRQAPGKERELVAGIDYGTTTYYADSVKGRFTISRDNAKNTVYLQMNSLKPEDTAVYYCAVAQWWDDRGLGYWGQGTQVTVSS

SEQ ID NO: 32627 - protein, 125 aa, Artificial Sequence
  Chemically Synthesized
QVQLQESGGGLVQAGGSLRLSCAASGSIFRPYYMGWYRQAPGKERELVATIATGGSTYYADSVKGRFTISRDNAKNTVYLQMNSLKPEDTAVYYCAVWDYAYYGWQTPDFVYFYWGQGTQVTVSS

SEQ ID NO: 32628 - protein, 117 aa, Artificial Sequence
  Chemically Synthesized
QVQLQESGGGLVQAGGSLRLSCAASGNILLLLMGWYRQAPGKEREFVAAIDRGATTYYADSVKGRFTISRDNAKNTVYLQMNSLKPEDTAVYYCAADSRYYVVYLYWGQGTQVTVSS

SEQ ID NO: 32629 - protein, 118 aa, Artificial Sequence
  Chemically Synthesized
QVQLQESGGGLVQAGGSLRLSCAASGYIFGIDIMGWYRQAPGKEREFVASIAIGGTTNYADSVKGRFTISRDNAKNTVYLQMNSLKPEDTAVYYCAAGGYYTGAYDYWGQGTQVTVSS

SEQ ID NO: 32630 - protein, 109 aa, Artificial Sequence
  Chemically Synthesized
QVQLQESGGGLVQAGGSLRLSCAASGYISLTGGMGWYRQAPGKEREFVAGIGHGTITYYADSVKGRFTISRDNAKNTVYLQMNSLKPEDTAVYYCAVYWGQGTQVTVSS

SEQ ID NO: 32631 - protein, 118 aa, Artificial Sequence
  Chemically Synthesized
QVQLQESGGGLVQAGGSLRLSCAASGSIFASAYMGWYRQAPGKEREFVAAITLGTSTNYADSVKGRFTISRDNAKNTVYLQMNSLKPEDTAVYYCAAYGDYTDSHRYWGQGTQVTVSS

SEQ ID NO: 32632 - protein, 118 aa, Artificial Sequence
  Chemically Synthesized
QVQLQESGGGLVQAGGSLRLSCAASGSISYAYDMGWYRQAPGKERELVASIGYGATTNYADSVKGRFTISRDNAKNTVYLQMNSLKPEDTAVYYCAAYYADQTGLPYWGQGTQVTVSS

SEQ ID NO: 32633 - protein, 118 aa, Artificial Sequence
  Chemically Synthesized
QVQLQESGGGLVQAGGSLRLSCAASGTISRNYNMGWYRQAPGKEREFVAGISLGANTYYADSVKGRFTISRDNAKNTVYLQMNSLKPEDTAVYYCAVGDTYRRNLTYWGQGTQVTVSS

SEQ ID NO: 32634 - protein, 119 aa, Artificial Sequence
  Chemically Synthesized
QVQLQESGGGLVQAGGSLRLSCAASGTIFWYSAMGWYRQAPGKEREFVAGIASGGGNTNYADSVKGRFTISRDNAKNTVYLQMNSLKPEDTAVYYCAAWVGARIAFYYWGQGTQVTVSS

SEQ ID NO: 32635 - protein, 117 aa, Artificial Sequence
  Chemically Synthesized
QVQLQESGGGLVQAGGSLRLSCAASGYIFAQSMGWYRQAPGKEREFVAGINDGGITYYADSVKGRFTISRDNAKNTVYLQMNSLKPEDTAVYYCAAGDVYDYPYWYWGQGTQVTVSS

SEQ ID NO: 32636 - protein, 118 aa, Artificial Sequence
  Chemically Synthesized
QVQLQESGGGLVQAGGSLRLSCAASGNISYLDYMGWYRQAPGKEREFVAAITGGASTNYADSVKGRFTISRDNAKNTVYLQMNSLKPEDTAVYYCAAYTNYYAWFQYWGQGTQVTVSS

SEQ ID NO: 32637 - protein, 126 aa, Artificial Sequence
  Chemically Synthesized
QVQLQESGGGLVQAGGSLRLSCAASGYISWAGYMGWYRQAPGKERELVAAISRGATTYYADSVKGRFTISRDNAKNTVYLQMNSLKPEDTAVYYCAVRPPSNGQAYYLYQRRHGYWGQGTQVTVSS

SEQ ID NO: 32638 - protein, 118 aa, Artificial Sequence
  Chemically Synthesized
QVQLQESGGGLVQAGGSLRLSCAASGSISELYWMGWYRQAPGKEREFVASITLGTITYYADSVKGRFTISRDNAKNTVYLQMNSLKPEDTAVYYCAATEYGAYIYQYWGQGTQVTVSS

SEQ ID NO: 32639 - protein, 125 aa, Artificial Sequence
  Chemically Synthesized
QVQLQESGGGLVQAGGSLRLSCAASGNISLFQNMGWYRQAPGKEREFVAAIADGGNTYADSVKGRFTISRDNAKNTVYLQMNSLKPEDTAVYYCAAQGGSFPGRKFFYDTILFYWGQGTQVTVSS

SEQ ID NO: 32640 - protein, 119 aa, Artificial Sequence
  Chemically Synthesized
QVQLQESGGGLVQAGGSLRLSCAASGSIFFNFSVMGWYRQAPGKEREFVATIASGSNTYYADSVKGRFTISRDNAKNTVYLQMNSLKPEDTAVYYCAVALTYDQSYDYWGQGTQVTVSS

SEQ ID NO: 32641 - protein, 118 aa, Artificial Sequence
  Chemically Synthesized
QVQLQESGGGLVQAGGSLRLSCAASGTIFNYLIMGWYRQAPGKEREFVAGIAYGTITNYADSVKGRFTISRDNAKNTVYLQMNSLKPEDTAVYYCAVPYTFQSGHVYWGQGTQVTVSS

SEQ ID NO: 32642 - protein, 117 aa, Artificial Sequence
  Chemically Synthesized
QVQLQESGGGLVQAGGSLRLSCAASGYIFYWNYMGWYRQAPGKERELVATIGTVVIPYADSVKGRFTISRDNAKNTVYLQMNSLKPEDTAVYYCAARVQDWSNLLYWGQGTQVTVSS

SEQ ID NO: 32643 - protein, 116 aa, Artificial Sequence
  Chemically Synthesized
QVQLQESGGGLVQAGGSLRLSCAASGNIFWTRTMGWYRQAPGKEREFVAAIGRGGITNYADSVKGRFTISRDNAKNTVYLQMNSLKPEDTAVYYCAFDTDGGHIYWGQGTQVTVSS

SEQ ID NO: 32644 - protein, 118 aa, Artificial Sequence
  Chemically Synthesized
QVQLQESGGGLVQAGGSLRLSCAASGNIFERTGMGWYRQAPGKEREFVAGIGPGGITYYADSVKGRFTISRDNAKNTVYLQMNSLKPEDTAVYYCAVGSYHGINHSYWGQGTQVTVSS

SEQ ID NO: 32645 - protein, 115 aa, Artificial Sequence
  Chemically Synthesized
QVQLQESGGGLVQAGGSLRLSCAASGNIFYYDYMGWYRQAPGKEREFVAGIGIGSITNYADSVKGRFTISRDNAKNTVYLQMNSLKPEDTAVYYCATLTVLVFYWGQGTQVTVSS

SEQ ID NO: 32646 - protein, 126 aa, Artificial Sequence
  Chemically Synthesized
QVQLQESGGGLVQAGGSLRLSCAASGNIFARLYMGWYRQAPGKEREFVAGITYGSSTYYADSVKGRFTISRDNAKNTVYLQMNSLKPEDTAVYYCAVQRYFLTGYGYYRYSYHRYWGQGTQVTVSS

SEQ ID NO: 32647 - protein, 121 aa, Artificial Sequence
  Chemically Synthesized
QVQLQESGGGLVQAGGSLRLSCAASGYISYVGRMGWYRQAPGKERELVAAINLGSITNYADSVKGRFTISRDNAKNTVYLQMNSLKPEDTAVYYCAAGYSYTRGRFHLLYWGQGTQVTVSS

SEQ ID NO: 32648 - protein, 124 aa, Artificial Sequence
  Chemically Synthesized
QVQLQESGGGLVQAGGSLRLSCAASGYFLTLLMGWYRQAPGKEREFVAAIGGGGTTYADSVKGRFTISRDNAKNTVYLQMNSLKPEDTAVYYCAVQYYWLERYTYGYYQYYPYWGQGTQVTVSS

SEQ ID NO: 32649 - protein, 126 aa, Artificial Sequence
  Chemically Synthesized
QVQLQESGGGLVQAGGSLRLSCAASGTIFAVDDMGWYRQAPGKERELVAGIAAGATTYYADSVKGRFTISRDNAKNTVYLQMNSLKPEDTAVYYCAADWWQDNEYGHRWTYPHQYWGQGTQVTVSS

SEQ ID NO: 32650 - protein, 118 aa, Artificial Sequence
  Chemically Synthesized
QVQLQESGGGLVQAGGSLRLSCAASGTIFYYRWMGWYRQAPGKEREFVATINRGANTNYADSVKGRFTISRDNAKNTVYLQMNSLKPEDTAVYYCAVTPVRYRNLAYWGQGTQVTVSS

SEQ ID NO: 32651 - protein, 118 aa, Artificial Sequence
  Chemically Synthesized
QVQLQESGGGLVQAGGSLRLSCAASGYISYVLIMGWYRQAPGKEREFVAGIADGSSTYYADSVKGRFTISRDNAKNTVYLQMNSLKPEDTAVYYCAAYPYDDFPHVYWGQGTQVTVSS

SEQ ID NO: 32652 - protein, 118 aa, Artificial Sequence
  Chemically Synthesized
QVQLQESGGGLVQAGGSLRLSCAASGSIFPPWWMGWYRQAPGKERELVAGIGYGGTTNYADSVKGRFTISRDNAKNTVYLQMNSLKPEDTAVYYCAVTLVLSDGHYYWGQGTQVTVSS

SEQ ID NO: 32653 - protein, 118 aa, Artificial Sequence
  Chemically Synthesized
QVQLQESGGGLVQAGGSLRLSCAASGNISSGLWMGWYRQAPGKEREFVASIGGGSITNYADSVKGRFTISRDNAKNTVYLQMNSLKPEDTAVYYCAVWDYSGADYYYWGQGTQVTVSS

SEQ ID NO: 32654 - protein, 122 aa, Artificial Sequence
  Chemically Synthesized
QVQLQESGGGLVQAGGSLRLSCAASGTIFWDDFMGWYRQAPGKEREFVATIGYGGSTYYADSVKGRFTISRDNAKNTVYLQMNSLKPEDTAVYYCAVEFGSVYEYYVDLDYWGQGTQVTVSS

SEQ ID NO: 32655 - protein, 117 aa, Artificial Sequence
  Chemically Synthesized
QVQLQESGGGLVQAGGSLRLSCAASGNISAYGYMGWYRQAPGKERELVAGINPGTSTYYADSVKGRFTISRDNAKNTVYLQMNSLKPEDTAVYYCAVLPAGEDSFYWGQGTQVTVSS

SEQ ID NO: 32656 - protein, 116 aa, Artificial Sequence
  Chemically Synthesized
QVQLQESGGGLVQAGGSLRLSCAASGTISSASLMGWYRQAPGKERELVATISYGGSTNYADSVKGRFTISRDNAKNTVYLQMNSLKPEDTAVYYCAAGADFQHVYWGQGTQVTVSS

SEQ ID NO: 32657 - protein, 122 aa, Artificial Sequence
  Chemically Synthesized
QVQLQESGGGLVQAGGSLRLSCAASGNISQLTVMGWYRQAPGKERELVAAISRGAITYYADSVKGRFTISRDNAKNTVYLQMNSLKPEDTAVYYCAARSPTWLVYPRWYGYWGQGTQVTVSS

SEQ ID NO: 32658 - protein, 118 aa, Artificial Sequence
  Chemically Synthesized
QVQLQESGGGLVQAGGSLRLSCAASGSISYRIVMGWYRQAPGKERELVASIAYGSTTNYADSVKGRFTISRDNAKNTVYLQMNSLKPEDTAVYYCAVTTAGTYDFGYWGQGTQVTVSS

SEQ ID NO: 32659 - protein, 118 aa, Artificial Sequence
  Chemically Synthesized
QVQLQESGGGLVQAGGSLRLSCAASGTISGAPGMGWYRQAPGKEREFVASNYFRWYYLYADSVKGRFTISRDNAKNTVYLQMNSLKPEDTAVYYCAVVDDILLRLIYWGQGTQVTVSS

SEQ ID NO: 32660 - protein, 121 aa, Artificial Sequence
  Chemically Synthesized
QVQLQESGGGLVQAGGSLRLSCAASGNIFAAGYMGWYRQAPGKERELVATIADGATTNYADSVKGRFTISRDNAKNTVYLQMNSLKPEDTAVYYCAAYTETYSDITDSIYWGQGTQVTVSS

SEQ ID NO: 32661 - protein, 117 aa, Artificial Sequence
  Chemically Synthesized
QVQLQESGGGLVQAGGSLRLSCAASGNIFAYYMGWYRQAPGKEREFVASITAGGTTYYADSVKGRFTISRDNAKNTVYLQMNSLKPEDTAVYYCAVDGAIGYNHYYWGQGTQVTVSS

SEQ ID NO: 32662 - protein, 122 aa, Artificial Sequence
  Chemically Synthesized
QVQLQESGGGLVQAGGSLRLSCAASGTISDYIYMGWYRQAPGKEREFVAAITYGTTTYYADSVKGRFTISRDNAKNTVYLQMNSLKPEDTAVYYCAVGEPSGGYYYEIHEYWGQGTQVTVSS

SEQ ID NO: 32663 - protein, 110 aa, Artificial Sequence
  Chemically Synthesized
QVQLQESGGGLVQAGGSLRLSCAASGTIFDGTAMGWYRQAPGKERELVAAIALGGNTNYADSVKGRFTISRDNAKNTVYLQMNSLKPEDTAVYYCAVKYWGQGTQVTVSS

SEQ ID NO: 32664 - protein, 122 aa, Artificial Sequence
  Chemically Synthesized
QVQLQESGGGLVQAGGSLRLSCAASGYISQTNDMGWYRQAPGKERETVATIAAGTNTNYADSVKGRFTISRDNAKNTVYLQMNSLKPEDTAVYYCAADTQYLRPFDGGYYYWGQGTQVTVSS

SEQ ID NO: 32665 - protein, 120 aa, Artificial Sequence
  Chemically Synthesized
QVQLQESGGGLVQAGGSLRLSCAASGNIFYTSIMGWYRQAPGKERELVATIDGGGTTNYADSVKGRFTISRDNAKNTVYLQMNSLKPEDTAVYYCAVEYGDAQQPHHDYWGQGTQVTVSS

SEQ ID NO: 32666 - protein, 118 aa, Artificial Sequence
  Chemically Synthesized
QVQLQESGGGLVQAGGSLRLSCAASGTISGWRTMGWYRQAPGKERELVASIGVGTSTNYADSVKGRFTISRDNAKNTVYLQMNSLKPEDTAVYYCAATWGLLHYFSYWGQGTQVTVSS

SEQ ID NO: 32667 - protein, 125 aa, Artificial Sequence
  Chemically Synthesized
QVQLQESGGGLVQAGGSLRLSCAASGNISSDGYMGWYRQAPGKEREFVASINQGSNTNYADSVKGRFTISRDNAKNTVYLQMNSLKPEDTAVYYCAVYYPYSPYEWITSQASMYWGQGTQVTVSS

SEQ ID NO: 32668 - protein, 118 aa, Artificial Sequence
  Chemically Synthesized
QVQLQESGGGLVQAGGSLRLSCAASGNISVYQSMGWYRQAPGKEREFVATINQGGTTYYADSVKGRFTISRDNAKNTVYLQMNSLKPEDTAVYYCAVDYRPNQSHAYWGQGTQVTVSS

SEQ ID NO: 32669 - protein, 118 aa, Artificial Sequence
  Chemically Synthesized
QVQLQESGGGLVQAGGSLRLSCAASGTISRRLRMGWYRQAPGKEREFVAGINYGASTNYADSVKGRFTISRDNAKNTVYLQMNSLKPEDTAVYYCAAGPRRTRYFVYWGQGTQVTVSS

SEQ ID NO: 32670 - protein, 113 aa, Artificial Sequence
  Chemically Synthesized
QVQLQESGGGLVQAGGSLRLSCAASGSIGDVMGWYRQAPGKERELVAGISDGASTYYADSVKGRFTISRDNAKNTVYLQMNSLKPEDTAVYYCAAIPPTYDYWGQGTQVTVSS

SEQ ID NO: 32671 - protein, 118 aa, Artificial Sequence
  Chemically Synthesized
QVQLQESGGGLVQAGGSLRLSCAASGSIFRPRFMGWYRQAPGKERELVAAITVGTSTYYADSVKGRFTISRDNAKNTVYLQMNSLKPEDTAVYYCAAGRSLWYRHGYWGQGTQVTVSS

SEQ ID NO: 32672 - protein, 126 aa, Artificial Sequence
  Chemically Synthesized
QVQLQESGGGLVQAGGSLRLSCAASGTISGGGGMGWYRQAPGKEREFVAGIGRGSITNYADSVKGRFTISRDNAKNTVYLQMNSLKPEDTAVYYCAASRYSWAGKYPRWRDRHGYWGQGTQVTVSS

SEQ ID NO: 32673 - protein, 118 aa, Artificial Sequence
  Chemically Synthesized
QVQLQESGGGLVQAGGSLRLSCAASGSIFPRRYMGWYRQAPGKEREFVATITFGANTYYADSVKGRFTISRDNAKNTVYLQMNSLKPEDTAVYYCAVVGKRTAGHHYWGQGTQVTVSS

SEQ ID NO: 32674 - protein, 118 aa, Artificial Sequence
  Chemically Synthesized
QVQLQESGGGLVQAGGSLRLSCAASGYISLASGMGWYRQAPGKEREFVATITYGATTYYADSVKGRFTISRDNAKNTVYLQMNSLKPEDTAVYYCAASRRIWDVFPYWGQGTQVTVSS

SEQ ID NO: 32675 - protein, 117 aa, Artificial Sequence
  Chemically Synthesized
QVQLQESGGGLVQAGGSLRLSCAASGTISQAQVMGWYRQAPGKEREFVATIALGAITYYADSVKGRFTISRDNAKNTVYLQMNSLKPEDTAVYYCAAQNSLYSFLYWGQGTQVTVSS

SEQ ID NO: 32676 - protein, 118 aa, Artificial Sequence
  Chemically Synthesized
QVQLQESGGGLVQAGGSLRLSCAASGSISAVRRMGWYRQAPGKEREFVASIAFGTSTYYADSVKGRFTISRDNAKNTVYLQMNSLKPEDTAVYYCAARPYWRIRHDYWGQGTQVTVSS

SEQ ID NO: 32677 - protein, 118 aa, Artificial Sequence
  Chemically Synthesized
QVQLQESGGGLVQAGGSLRLSCAASGSIFPDRFMGWYRQAPGKERELVATINYGSTTNYADSVKGRFTISRDNAKNTVYLQMNSLKPEDTAVYYCAVYELHAEDLDYWGQGTQVTVSS

SEQ ID NO: 32678 - protein, 122 aa, Artificial Sequence
  Chemically Synthesized
QVQLQESGGGLVQAGGSLRLSCAASGTIFNGAYMGWYRQAPGKERELVATISDGGTTNYADSVKGRFTISRDNAKNTVYLQMNSLKPEDTAVYYCAAGSKDPYLDYYDHPYWGQGTQVTVSS

SEQ ID NO: 32679 - protein, 122 aa, Artificial Sequence
  Chemically Synthesized
QVQLQESGGGLVQAGGSLRLSCAASGYIFATGLMGWYRQAPGKEREFVAAIARGGITYYADSVKGRFTISRDNAKNTVYLQMNSLKPEDTAVYYCAAGLYYIYDGAAGHRYWGQGTQVTVSS

SEQ ID NO: 32680 - protein, 115 aa, Artificial Sequence
  Chemically Synthesized
QVQLQESGGGLVQAGGSLRLSCAASGSISYYPMGWYRQAPGKERELGGITYYADSVKGRFTISRDNAKNTVYLQMNSLKPEDTAVYYCAADAYQSDFQSDDYNYWGQGTQVTVSS

SEQ ID NO: 32681 - protein, 117 aa, Artificial Sequence
  Chemically Synthesized
QVQLQESGGGLVQAGGSLRLSCAASGTISHASDMGWYRQAPGKERELVAAITYGSNTYADSVKGRFTISRDNAKNTVYLQMNSLKPEDTAVYYCAVGFYIVDQYYYWGQGTQVTVSS

SEQ ID NO: 32682 - protein, 121 aa, Artificial Sequence
  Chemically Synthesized
QVQLQESGGGLVQAGGSLRLSCAASGTIFYYAEMGWYRQAPGKERELVAAIAWGGSTNYADSVKGRFTISRDNAKNTVYLQMNSLKPEDTAVYYCAVFDYQTQRQWGHVYWGQGTQVTVSS

SEQ ID NO: 32683 - protein, 115 aa, Artificial Sequence
  Chemically Synthesized
QVQLQESGGGLVQAGGSLRLSCAASGTIFAPARMGWYRQAPGKERELVAGIARGGNTYYADSVKGRFTISRDNAKNTVYLQMNSLKPEDTAVYYCAYYRYRYGYWGQGTQVTVSS

SEQ ID NO: 32684 - protein, 118 aa, Artificial Sequence
  Chemically Synthesized
QVQLQESGGGLVQAGGSLRLSCAASGNISRWANMGWYRQAPGKEREFVASISYGGSTNYADSVKGRFTISRDNAKNTVYLQMNSLKPEDTAVYYCAVRRRYVYYHRYWGQGTQVTVSS

SEQ ID NO: 32685 - protein, 118 aa, Artificial Sequence
  Chemically Synthesized
QVQLQESGGGLVQAGGSLRLSCAASGTISSRIDMGWYRQAPGKEREFVAAIAYGGSTYYADSVKGRFTISRDNAKNTVYLQMNSLKPEDTAVYYCAVLRRWYTGFRYWGQGTQVTVSS

SEQ ID NO: 32686 - protein, 122 aa, Artificial Sequence
  Chemically Synthesized
QVQLQESGGGLVQAGGSLRLSCAASGNISVGVWMGWYRQAPGKEREFVAGIGYGANTNYADSVKGRFTISRDNAKNTVYLQMNSLKPEDTAVYYCAAYRTWYLARGGLYRYWGQGTQVTVSS

SEQ ID NO: 32687 - protein, 118 aa, Artificial Sequence
  Chemically Synthesized
QVQLQESGGGLVQAGGSLRLSCAASGYIFGIVGMGWYRQAPGKERELVAGITRGGSTNYADSVKGRFTISRDNAKNTVYLQMNSLKPEDTAVYYCAASSRWRTYHYYWGQGTQVTVSS

SEQ ID NO: 32688 - protein, 122 aa, Artificial Sequence
  Chemically Synthesized
QVQLQESGGGLVQAGGSLRLSCAASGTISRFVIMGWYRQAPGKEREFVASINTGTTTNYADSVKGRFTISRDNAKNTVYLQMNSLKPEDTAVYYCAVSPRLTWLPYPSYYYWGQGTQVTVSS

SEQ ID NO: 32689 - protein, 121 aa, Artificial Sequence
  Chemically Synthesized
QVQLQESGGGLVQAGGSLRLSCAASGNISIGNNMGWYRQAPGKEREFVATISGGGTTNYADSVKGRFTISRDNAKNTVYLQMNSLKPEDTAVYYCALSTVVLTILGRTLYWGQGTQVTVSS

SEQ ID NO: 32690 - protein, 118 aa, Artificial Sequence
  Chemically Synthesized
QVQLQESGGGLVQAGGSLRLSCAASGTISFGATMGWYRQAPGKERELVATIGRGGNTNYADSVKGRFTISRDNAKNTVYLQMNSLKPEDTAVYYCAATTAWDYYHGYWGQGTQVTVSS

SEQ ID NO: 32691 - protein, 121 aa, Artificial Sequence
  Chemically Synthesized
QVQLQESGGGLVQAGGSLRLSCAASGNISDAYLMGWYRQAPGKEREFVATIGDGSTYYADSVKGRFTISRDNAKNTVYLQMNSLKPEDTAVYYCAVIVGDYYYYVLYHYYWGQGTQVTVSS

SEQ ID NO: 32692 - protein, 121 aa, Artificial Sequence
  Chemically Synthesized
QVQLQESGGGLVQAGGSLRLSCAASGTISGRARMGWYRQAPGKEREFVAAISRGASTYYADSVKGRFTISRDNAKNTVYLQMNSLKPEDTAVYYCAARRYYYAQERYYYYWGQGTQVTVSS

SEQ ID NO: 32693 - protein, 118 aa, Artificial Sequence
  Chemically Synthesized
QVQLQESGGGLVQAGGSLRLSCAASGNIFSVDYMGWYRQAPGKEREFVAGIAWGGNTYYADSVKGRFTISRDNAKNTVYLQMNSLKPEDTAVYYCAAYAYYDTHHRYWGQGTQVTVSS

SEQ ID NO: 32694 - protein, 118 aa, Artificial Sequence
  Chemically Synthesized
QVQLQESGGGLVQAGGSLRLSCAASGTIFYPRVMGWYRQAPGKEREFVATIAFGSSTYYADSVKGRFTISRDNAKNTVYLQMNSLKPEDTAVYYCAVNLFLRWNHIYWGQGTQVTVSS

SEQ ID NO: 32695 - protein, 122 aa, Artificial Sequence
  Chemically Synthesized
QVQLQESGGGLVQAGGSLRLSCAASGNIFRRWEMGWYRQAPGKEREFVAGISRGGNTYYADSVKGRFTISRDNAKNTVYLQMNSLKPEDTAVYYCAVPLRSTVSGGYGYWYWGQGTQVTVSS

SEQ ID NO: 32696 - protein, 122 aa, Artificial Sequence
  Chemically Synthesized
QVQLQESGGGLVQAGGSLRLSCAASGTISDTYAMGWYRQAPGKEREFVAAIGDGSITYYADSVKGRFTISRDNAKNTVYLQMNSLKPEDTAVYYCAVWVWNSVTYYYSHSYWGQGTQVTVSS

SEQ ID NO: 32697 - protein, 118 aa, Artificial Sequence
  Chemically Synthesized
QVQLQESGGGLVQAGGSLRLSCAASGYIFARRYMGWYRQAPGKEREFVAGIGLGATTYYADSVKGRFTISRDNAKNTVYLQMNSLKPEDTAVYYCAAYRTAPRYLGYWGQGTQVTVSS

SEQ ID NO: 32698 - protein, 122 aa, Artificial Sequence
  Chemically Synthesized
QVQLQESGGGLVQAGGSLRLSCAASGYIFITAYMGWYRQAPGKERELVATIGSGSSTNYADSVKGRFTISRDNAKNTVYLQMNSLKPEDTAVYYCAVRYAYRRDRSKWYIYWGQGTQVTVSS

SEQ ID NO: 32699 - protein, 118 aa, Artificial Sequence
  Chemically Synthesized
QVQLQESGGGLVQAGGSLRLSCAASGTIFVHAAMGWYRQAPGKEREFVAGIDTGGTTYYADSVKGRFTISRDNAKNTVYLQMNSLKPEDTAVYYCAVRLSPWTTFWYWGQGTQVTVSS

SEQ ID NO: 32700 - protein, 122 aa, Artificial Sequence
  Chemically Synthesized
QVQLQESGGGLVQAGGSLRLSCAASGTISRQRYMGWYRQAPGKERELVASIGYGAITYYADSVKGRFTISRDNAKNTVYLQMNSLKPEDTAVYYCAVSVYRRYYYRYPHYYWGQGTQVTVSS

SEQ ID NO: 32701 - protein, 118 aa, Artificial Sequence
  Chemically Synthesized
QVQLQESGGGLVQAGGSLRLSCAASGTISSDENMGWYRQAPGKEREFVAGIGAGGITYYADSVKGRFTISRDNAKNTVYLQMNSLKPEDTAVYYCAAQWYDYRGLGYWGQGTQVTVSS

SEQ ID NO: 32702 - protein, 117 aa, Artificial Sequence
  Chemically Synthesized
QVQLQESGGGLVQAGGSLRLSCAASGTIFIRDMGWYRQAPGKERELSWGANTYYADSVKGRFTISRDNAKNTVYLQMNSLKPEDTAVYYCAVYYSPPPGVPDLFQYWGQGTQVTVSS

SEQ ID NO: 32703 - protein, 122 aa, Artificial Sequence
  Chemically Synthesized
QVQLQESGGGLVQAGGSLRLSCAASGYIFTRTVMGWYRQAPGKERELVATIALGGTTNYADSVKGRFTISRDNAKNTVYLQMNSLKPEDTAVYYCAVDYVWWQFWYTGHIYWGQGTQVTVSS

SEQ ID NO: 32704 - protein, 119 aa, Artificial Sequence
  Chemically Synthesized
QVQLQESGGGLVQAGGSLRLSCAASGSISKRSWMGWYRQAPGKEREFVATISQGGITYYADSVKGRFTISRDNAKNTVYLQMNSLKPEDTAVYYCAVDYSRYSTVLFYWGQGTQVTVSS

SEQ ID NO: 32705 - protein, 118 aa, Artificial Sequence
  Chemically Synthesized
QVQLQESGGGLVQAGGSLRLSCAASGNIFTWTAMGWYRQAPGKEREFVAAITGGTNTYYADSVKGRFTISRDNAKNTVYLQMNSLKPEDTAVYYCAVHSWRYWPLRYWGQGTQVTVSS

SEQ ID NO: 32706 - protein, 122 aa, Artificial Sequence
  Chemically Synthesized
QVQLQESGGGLVQAGGSLRLSCAASGSISRKIYMGWYRQAPGKERELVAGIAYGGITNYADSVKGRFTISRDNAKNTVYLQMNSLKPEDTAVYYCAVAHRYGNLWRYGYPYWGQGTQVTVSS

SEQ ID NO: 32707 - protein, 125 aa, Artificial Sequence
  Chemically Synthesized
QVQLQESGGGLVQAGGSLRLSCAASGYIFSRFMGWYRQAPGKERELVAAINDGGITYYADSVKGRFTISRDNAKNTVYLQMNSLKPEDTAVYYCAATYRPVAAYTRGPTRWHGYWGQGTQVTVSS

SEQ ID NO: 32708 - protein, 122 aa, Artificial Sequence
  Chemically Synthesized
QVQLQESGGGLVQAGGSLRLSCAASGNIFGQKGMGWYRQAPGKEREFVASITRGTTTYYADSVKGRFTISRDNAKNTVYLQMNSLKPEDTAVYYCAAYRYDYPYRYGHHRYWGQGTQVTVSS

SEQ ID NO: 32709 - protein, 118 aa, Artificial Sequence
  Chemically Synthesized
QVQLQESGGGLVQAGGSLRLSCAASGNIFYRYFMGWYRQAPGKEREFVAGISWGSSTYYADSVKGRFTISRDNAKNTVYLQMNSLKPEDTAVYYCAARDDGYGGFYYWGQGTQVTVSS

SEQ ID NO: 32710 - protein, 122 aa, Artificial Sequence
  Chemically Synthesized
QVQLQESGGGLVQAGGSLRLSCAASGSIFAWLGMGWYRQAPGKERELVAAIDTGSTTNYADSVKGRFTISRDNAKNTVYLQMNSLKPEDTAVYYCAAGQDGPFNIEQGLHYWGQGTQVTVSS

SEQ ID NO: 32711 - protein, 118 aa, Artificial Sequence
  Chemically Synthesized
QVQLQESGGGLVQAGGSLRLSCAASGTISYVGYMGWYRQAPGKERELVATIAYGGNTNYADSVKGRFTISRDNAKNTVYLQMNSLKPEDTAVYYCAVRYYRRQRYIYWGQGTQVTVSS

SEQ ID NO: 32712 - protein, 126 aa, Artificial Sequence
  Chemically Synthesized
QVQLQESGGGLVQAGGSLRLSCAASGTISLFYLMGWYRQAPGKEREFVATINLGGTTNYADSVKGRFTISRDNAKNTVYLQMNSLKPEDTAVYYCAVARNQVYAYPYKADDDHKYWGQGTQVTVSS

SEQ ID NO: 32713 - protein, 118 aa, Artificial Sequence
  Chemically Synthesized
QVQLQESGGGLVQAGGSLRLSCAASGYIFPYRFMGWYRQAPGKEREFVATINYGATTYYADSVKGRFTISRDNAKNTVYLQMNSLKPEDTAVYYCAVAWSRGLKHRYWGQGTQVTVSS

SEQ ID NO: 32714 - protein, 118 aa, Artificial Sequence
  Chemically Synthesized
QVQLQESGGGLVQAGGSLRLSCAASGNIFWNSDMGWYRQAPGKEREFVATIDVGGITYYADSVKGRFTISRDNAKNTVYLQMNSLKPEDTAVYYCAARYSYWLTHRYWGQGTQVTVSS

SEQ ID NO: 32715 - protein, 126 aa, Artificial Sequence
  Chemically Synthesized
QVQLQESGGGLVQAGGSLRLSCAASGNISGRRDMGWYRQAPGKEREFVASITYGANTNYADSVKGRFTISRDNAKNTVYLQMNSLKPEDTAVYYCAAYRWWTPRTTPANRRFYVYWGQGTQVTVSS

SEQ ID NO: 32716 - protein, 118 aa, Artificial Sequence
  Chemically Synthesized
QVQLQESGGGLVQAGGSLRLSCAASGNISYWFKMGWYRQAPGKEREFVAAIGHGSNTYYADSVKGRFTISRDNAKNTVYLQMNSLKPEDTAVYYCAVTYRWRYYYRYWGQGTQVTVSS

SEQ ID NO: 32717 - protein, 126 aa, Artificial Sequence
  Chemically Synthesized
QVQLQESGGGLVQAGGSLRLSCAASGNISYRKVMGWYRQAPGKEREFVAGIARGSITNYADSVKGRFTISRDNAKNTVYLQMNSLKPEDTAVYYCAAYRYRQYGRTYFQTGRHTYWGQGTQVTVSS

SEQ ID NO: 32718 - protein, 121 aa, Artificial Sequence
  Chemically Synthesized
QVQLQESGGGLVQAGGSLRLSCAASGSISDSPYMGWYRQAPGKERELVAGISWGATTYADSVKGRFTISRDNAKNTVYLQMNSLKPEDTAVYYCAVEHDGDLGIYDSHFYWGQGTQVTVSS

SEQ ID NO: 32719 - protein, 118 aa, Artificial Sequence
  Chemically Synthesized
QVQLQESGGGLVQAGGSLRLSCAASGNIFYRRNMGWYRQAPGKERELVATIARGSITYYADSVKGRFTISRDNAKNTVYLQMNSLKPEDTAVYYCAVGWHLYRDHYYWGQGTQVTVSS

SEQ ID NO: 32720 - protein, 122 aa, Artificial Sequence
  Chemically Synthesized
QVQLQESGGGLVQAGGSLRLSCAASGNISGSRIMGWYRQAPGKERELVAGIDRGTNTYYADSVKGRFTISRDNAKNTVYLQMNSLKPEDTAVYYCAVYIARRFLAQGGHLYWGQGTQVTVSS

SEQ ID NO: 32721 - protein, 122 aa, Artificial Sequence
  Chemically Synthesized
QVQLQESGGGLVQAGGSLRLSCAASGNISARRVMGWYRQAPGKERELVAGITRGSTTYYADSVKGRFTISRDNAKNTVYLQMNSLKPEDTAVYYCAAYGRGYSSAVNTHGYWGQGTQVTVSS

SEQ ID NO: 32722 - protein, 120 aa, Artificial Sequence
  Chemically Synthesized
QVQLQESGGGLVQAGGSLRLSCAASGNISVDLDMGWYRQAPGKEREFVAAIDTVVLPYADSVKGRFTISRDNAKNTVYLQMNSLKPEDTAVYYCAVTREVGVRYDIHPYWGQGTQVTVSS

SEQ ID NO: 32723 - protein, 117 aa, Artificial Sequence
  Chemically Synthesized
QVQLQESGGGLVQAGGSLRLSCAASGNIFDSTMGWYRQAPGKEREFVAGIAFGSNTNYADSVKGRFTISRDNAKNTVYLQMNSLKPEDTAVYYCAVPRDIYPNLYYWGQGTQVTVSS

SEQ ID NO: 32724 - protein, 118 aa, Artificial Sequence
  Chemically Synthesized
QVQLQESGGGLVQAGGSLRLSCAASGNISEGDEMGWYRQAPGKERELVATITLGTSTNYADSVKGRFTISRDNAKNTVYLQMNSLKPEDTAVYYCAVQYTDLLPYAYWGQGTQVTVSS

SEQ ID NO: 32725 - protein, 121 aa, Artificial Sequence
  Chemically Synthesized
QVQLQESGGGLVQAGGSLRLSCAASGNIFVLYWMGWYRQAPGKERELVATIGGGASTYADSVKGRFTISRDNAKNTVYLQMNSLKPEDTAVYYCAVGYDDGRWDGSDHYYWGQGTQVTVSS

SEQ ID NO: 32726 - protein, 121 aa, Artificial Sequence
  Chemically Synthesized
QVQLQESGGGLVQAGGSLRLSCAASGYIFRTTMGWYRQAPGKEREFVAGIGSGANTYYADSVKGRFTISRDNAKNTVYLQMNSLKPEDTAVYYCAAREAVYSDLVNYHKYWGQGTQVTVSS

SEQ ID NO: 32727 - protein, 117 aa, Artificial Sequence
  Chemically Synthesized
QVQLQESGGGLVQAGGSLRLSCAASGTISHWIYMGWYRQAPGKEREFVAAIAEVLIPYADSVKGRFTISRDNAKNTVYLQMNSLKPEDTAVYYCAAYYFGASGLTYWGQGTQVTVSS

SEQ ID NO: 32728 - protein, 118 aa, Artificial Sequence
  Chemically Synthesized
QVQLQESGGGLVQAGGSLRLSCAASGTIFYESAMGWYRQAPGKERELVATINAGGNYQYADSVKGRFTISRDNAKNTVYLQMNSLKPEDTAVYYCAAAVSATKYHAYWGQGTQVTVSS

SEQ ID NO: 32729 - protein, 110 aa, Artificial Sequence
  Chemically Synthesized
QVQLQESGGGLVQAGGSLRLSCAASGTIFDGSIMGWYRQAPGKERELVAGIAYGAITNYADSVKGRFTISRDNAKNTVYLQMNSLKPEDTAVYYCAAWYWGQGTQVTVSS

SEQ ID NO: 32730 - protein, 117 aa, Artificial Sequence
  Chemically Synthesized
QVQLQESGGGLVQAGGSLRLSCAASGYIFLYTDMGWYRQAPGKEREFVATINPGTNTNYADSVKGRFTISRDNAKNTVYLQMNSLKPEDTAVYYCAAHYLGVGILYWGQGTQVTVSS

SEQ ID NO: 32731 - protein, 118 aa, Artificial Sequence
  Chemically Synthesized
QVQLQESGGGLVQAGGSLRLSCAASGTIFRAGPMGWYRQAPGKERELVAGIAQGAITNYADSVKGRFTISRDNAKNTVYLQMNSLKPEDTAVYYCAVVGGRYVDFSYWGQGTQVTVSS

SEQ ID NO: 32732 - protein, 126 aa, Artificial Sequence
  Chemically Synthesized
QVQLQESGGGLVQAGGSLRLSCAASGTISYESYMGWYRQAPGKERELVATIDSGANTYYADSVKGRFTISRDNAKNTVYLQMNSLKPEDTAVYYCAAWRVIGLYVWRIGRYPYAYWGQGTQVTVSS

SEQ ID NO: 32733 - protein, 126 aa, Artificial Sequence
  Chemically Synthesized
QVQLQESGGGLVQAGGSLRLSCAASGTISARTTMGWYRQAPGKEREFVATINYGASTYYADSVKGRFTISRDNAKNTVYLQMNSLKPEDTAVYYCAASPYRLQKYLYYRGSALRYWGQGTQVTVSS

SEQ ID NO: 32734 - protein, 118 aa, Artificial Sequence
  Chemically Synthesized
QVQLQESGGGLVQAGGSLRLSCAASGTISSDLYMGWYRQAPGKERELVAAIGYGATTYYADSVKGRFTISRDNAKNTVYLQMNSLKPEDTAVYYCAVITARTTYFDYWGQGTQVTVSS

SEQ ID NO: 32735 - protein, 117 aa, Artificial Sequence
  Chemically Synthesized
QVQLQESGGGLVQAGGSLRLSCAASGSISRPYTMGWYRQAPGKEREFVAGLITVLIPYADSVKGRFTISRDNAKNTVYLQMNSLKPEDTAVYYCAVAFYDPLYYLYWGQGTQVTVSS

SEQ ID NO: 32736 - protein, 121 aa, Artificial Sequence
  Chemically Synthesized
QVQLQESGGGLVQAGGSLRLSCAASGTISFPIYMGWYRQAPGKERELVATINYVVVPYADSVKGRFTISRDNAKNTVYLQMNSLKPEDTAVYYCAVIVREYGLQYKGLTYWGQGTQVTVSS

SEQ ID NO: 32737 - protein, 122 aa, Artificial Sequence
  Chemically Synthesized
QVQLQESGGGLVQAGGSLRLSCAASGSIFWLVGMGWYRQAPGKEREFVAGIGDGSSTNYADSVKGRFTISRDNAKNTVYLQMNSLKPEDTAVYYCAAYFGTDDVYYQYLAYWGQGTQVTVSS

SEQ ID NO: 32738 - protein, 118 aa, Artificial Sequence
  Chemically Synthesized
QVQLQESGGGLVQAGGSLRLSCAASGSIFYPYAMGWYRQAPGKERELVASIGWGTITYYADSVKGRFTISRDNAKNTVYLQMNSLKPEDTAVYYCAVPYLYRDQHYYWGQGTQVTVSS

SEQ ID NO: 32739 - protein, 117 aa, Artificial Sequence
  Chemically Synthesized
QVQLQESGGGLVQAGGSLRLSCAASGNISLITMGWYRQAPGKEREFVAAIDVGGTTNYADSVKGRFTISRDNAKNTVYLQMNSLKPEDTAVYYCAAWAVLRPDYSYWGQGTQVTVSS

SEQ ID NO: 32740 - protein, 122 aa, Artificial Sequence
  Chemically Synthesized
QVQLQESGGGLVQAGGSLRLSCAASGNISYLILMGWYRQAPGKEREFVATITYGATTYYADSVKGRFTISRDNAKNTVYLQMNSLKPEDTAVYYCAVSLYSRAGYRSRFNYWGQGTQVTVSS

SEQ ID NO: 32741 - protein, 118 aa, Artificial Sequence
  Chemically Synthesized
QVQLQESGGGLVQAGGSLRLSCAASGNISFYTQMGWYRQAPGKEREFVATISHGASTYYADSVKGRFTISRDNAKNTVYLQMNSLKPEDTAVYYCAAYFFYFPGHGYWGQGTQVTVSS

SEQ ID NO: 32742 - protein, 125 aa, Artificial Sequence
  Chemically Synthesized
QVQLQESGGGLVQAGGSLRLSCAASGTISYGGLMGWYRQAPGKERELVAGINYGSNTYYADSVKGRFTISRDNAKNTVYLQMNSLKPEDTAVYYCAAVFRVQLDDDSDYSSYYYWGQGTQVTVSS

SEQ ID NO: 32743 - protein, 122 aa, Artificial Sequence
  Chemically Synthesized
QVQLQESGGGLVQAGGSLRLSCAASGTIFLHYDMGWYRQAPGKEREFVAAIGVGTNTNYADSVKGRFTISRDNAKNTVYLQMNSLKPEDTAVYYCAVYVPNKARWGAGHRYWGQGTQVTVSS

SEQ ID NO: 32744 - protein, 122 aa, Artificial Sequence
  Chemically Synthesized
QVQLQESGGGLVQAGGSLRLSCAASGNISGTRPMGWYRQAPGKERELVATIGWGATTNYADSVKGRFTISRDNAKNTVYLQMNSLKPEDTAVYYCAVYRQVWYRYRPILGYWGQGTQVTVSS

SEQ ID NO: 32745 - protein, 118 aa, Artificial Sequence
  Chemically Synthesized
QVQLQESGGGLVQAGGSLRLSCAASGTISWYAVMGWYRQAPGKEREFVASITYGGNTNYADSVKGRFTISRDNAKNTVYLQMNSLKPEDTAVYYCAASRRWPYRLDYWGQGTQVTVSS

SEQ ID NO: 32746 - protein, 122 aa, Artificial Sequence
  Chemically Synthesized
QVQLQESGGGLVQAGGSLRLSCAASGSIFYYIGMGWYRQAPGKERELVATIDPGSITNYADSVKGRFTISRDNAKNTVYLQMNSLKPEDTAVYYCAVDDLEWFTPYLYFRYWGQGTQVTVSS

SEQ ID NO: 32747 - protein, 126 aa, Artificial Sequence
  Chemically Synthesized
QVQLQESGGGLVQAGGSLRLSCAASGYISRGSQMGWYRQAPGKEREFVAGITYGGNTNYADSVKGRFTISRDNAKNTVYLQMNSLKPEDTAVYYCAVIRYPKPYSYFAPRSRHAYWGQGTQVTVSS

SEQ ID NO: 32748 - protein, 118 aa, Artificial Sequence
  Chemically Synthesized
QVQLQESGGGLVQAGGSLRLSCAASGTIFSDALMGWYRQAPGKERELVATINVGSSTYYADSVKGRFTISRDNAKNTVYLQMNSLKPEDTAVYYCAAEHIADGDYLYWGQGTQVTVSS

SEQ ID NO: 32749 - protein, 118 aa, Artificial Sequence
  Chemically Synthesized
QVQLQESGGGLVQAGGSLRLSCAASGNIFPRYSMGWYRQAPGKERELVAGISHGSITYYADSVKGRFTISRDNAKNTVYLQMNSLKPEDTAVYYCAATYGLYIDYNYWGQGTQVTVSS

SEQ ID NO: 32750 - protein, 122 aa, Artificial Sequence
  Chemically Synthesized
QVQLQESGGGLVQAGGSLRLSCAASGNISSAYTMGWYRQAPGKEREFVASISYGGSTNYADSVKGRFTISRDNAKNTVYLQMNSLKPEDTAVYYCAAYVKSQDATRRDYIYWGQGTQVTVSS

SEQ ID NO: 32751 - protein, 113 aa, Artificial Sequence
  Chemically Synthesized
QVQLQESGGGLVQAGGSLRLSCAASGNISYFVPMGWYRQAPGKERELVATIGIGGSTNYADSVKGRFTISRDNAKNTVYLQMNSLKPEDTAVYYCAFGLTFYWGQGTQVTVSS

SEQ ID NO: 32752 - protein, 118 aa, Artificial Sequence
  Chemically Synthesized
QVQLQESGGGLVQAGGSLRLSCAASGTISIRRIMGWYRQAPGKEREFVATINYGGNTYYADSVKGRFTISRDNAKNTVYLQMNSLKPEDTAVYYCAVWSLLLLSVCYWGQGTQVTVSS

SEQ ID NO: 32753 - protein, 118 aa, Artificial Sequence
  Chemically Synthesized
QVQLQESGGGLVQAGGSLRLSCAASGSISRYYAMGWYRQAPGKERELVASINRGGNTNYADSVKGRFTISRDNAKNTVYLQMNSLKPEDTAVYYCAVWFYYGKRHVYWGQGTQVTVSS

SEQ ID NO: 32754 - protein, 118 aa, Artificial Sequence
  Chemically Synthesized
QVQLQESGGGLVQAGGSLRLSCAASGNISPYYIMGWYRQAPGKERELVAAIDDGGSTYYADSVKGRFTISRDNAKNTVYLQMNSLKPEDTAVYYCAAYYYYPYDLDYWGQGTQVTVSS

SEQ ID NO: 32755 - protein, 122 aa, Artificial Sequence
  Chemically Synthesized
QVQLQESGGGLVQAGGSLRLSCAASGNIFERNRMGWYRQAPGKEREFVAAISSGSNTYYADSVKGRFTISRDNAKNTVYLQMNSLKPEDTAVYYCAVGRIYWYYLGGAYRYWGQGTQVTVSS

SEQ ID NO: 32756 - protein, 118 aa, Artificial Sequence
  Chemically Synthesized
QVQLQESGGGLVQAGGSLRLSCAASGNIFVLRIMGWYRQAPGKERELVAAISHGTTTNYADSVKGRFTISRDNAKNTVYLQMNSLKPEDTAVYYCAALGYAWGRHQYWGQGTQVTVSS

SEQ ID NO: 32757 - protein, 118 aa, Artificial Sequence
  Chemically Synthesized
QVQLQESGGGLVQAGGSLRLSCAASGTIFRVYAMGWYRQAPGKERELVAAINYGTITYYADSVKGRFTISRDNAKNTVYLQMNSLKPEDTAVYYCAVYQYYHRRHIYWGQGTQVTVSS

SEQ ID NO: 32758 - protein, 118 aa, Artificial Sequence
  Chemically Synthesized
QVQLQESGGGLVQAGGSLRLSCAASGSIFDYADMGWYRQAPGKEREFVAAISNGGITNYADSVKGRFTISRDNAKNTVYLQMNSLKPEDTAVYYCAADNDLSGVLWYWGQGTQVTVSS

SEQ ID NO: 32759 - protein, 122 aa, Artificial Sequence
  Chemically Synthesized
QVQLQESGGGLVQAGGSLRLSCAASGNISVPLVMGWYRQAPGKEREFVAGITRGAITYYADSVKGRFTISRDNAKNTVYLQMNSLKPEDTAVYYCAAGRGWLTYFRRPHYYWGQGTQVTVSS

SEQ ID NO: 32760 - protein, 120 aa, Artificial Sequence
  Chemically Synthesized
QVQLQESGGGLVQAGGSLRLSCAASGNIFRKLVMGWYRQAPGKERELVAAIDRGGNTYYADSVKGRFTISRDNAKNTVYLQMNSLKPEDTAVYYCAVSRYRQNRPAYWYWGQGTQVTVSS

SEQ ID NO: 32761 - protein, 117 aa, Artificial Sequence
  Chemically Synthesized
QVQLQESGGGLVQAGGSLRLSCAASGNISYLTSMGWYRQAPGKERELVATIGYGGNTNYADSVKGRFTISRDNAKNTVYLQMNSLKPEDTAVYYCAADPPRLDSFYWGQGTQVTVSS

SEQ ID NO: 32762 - protein, 126 aa, Artificial Sequence
  Chemically Synthesized
QVQLQESGGGLVQAGGSLRLSCAASGSISRPYWMGWYRQAPGKEREFVASIAYGAITNYADSVKGRFTISRDNAKNTVYLQMNSLKPEDTAVYYCAAGPRYISVRLDTPYDDYPYWGQGTQVTVSS

SEQ ID NO: 32763 - protein, 121 aa, Artificial Sequence
  Chemically Synthesized
QVQLQESGGGLVQAGGSLRLSCAASGTIFFYGMGWYRQAPGKEREFVASIGYGGSTNYADSVKGRFTISRDNAKNTVYLQMNSLKPEDTAVYYCAVVPYYSRFRGTFYYYWGQGTQVTVSS

SEQ ID NO: 32764 - protein, 118 aa, Artificial Sequence
  Chemically Synthesized
QVQLQESGGGLVQAGGSLRLSCAASGSISAQDDMGWYRQAPGKERELVAAITAGTTTYYADSVKGRFTISRDNAKNTVYLQMNSLKPEDTAVYYCAAVVRETNTFVYWGQGTQVTVSS

SEQ ID NO: 32765 - protein, 122 aa, Artificial Sequence
  Chemically Synthesized
QVQLQESGGGLVQAGGSLRLSCAASGYIFDSRAMGWYRQAPGKEREFVAGINTGSNTYYADSVKGRFTISRDNAKNTVYLQMNSLKPEDTAVYYCAAFTYVKPSRVGRHRYWGQGTQVTVSS

SEQ ID NO: 32766 - protein, 118 aa, Artificial Sequence
  Chemically Synthesized
QVQLQESGGGLVQAGGSLRLSCAASGSISAYYNMGWYRQAPGKERELVAAITYGANTNYADSVKGRFTISRDNAKNTVYLQMNSLKPEDTAVYYCAAVRTQRSRHRYWGQGTQVTVSS

SEQ ID NO: 32767 - protein, 118 aa, Artificial Sequence
  Chemically Synthesized
QVQLQESGGGLVQAGGSLRLSCAASGSISYYVYMGWYRQAPGKERELVATITFGATTNYADSVKGRFTISRDNAKNTVYLQMNSLKPEDTAVYYCAVHYNSLERFGYWGQGTQVTVSS

SEQ ID NO: 32768 - protein, 119 aa, Artificial Sequence
  Chemically Synthesized
QVQLQESGGGLVQAGGSLRLSCAASGYISLGDTMGWYRQAPGKERELVASIAAGSNTNYADSVKGRFTISRDNAKNTVYLQMNSLKPEDTAVYYCAVYTAYWYDPFGYWGQGTQVTVSS

SEQ ID NO: 32769 - protein, 125 aa, Artificial Sequence
  Chemically Synthesized
QVQLQESGGGLVQAGGSLRLSCAASGTISIWYHMGWYRQAPGKEREFVAGIDQGASTNYADSVKGRFTISRDNAKNTVYLQMNSLKPEDTAVYYCAAYDTYLYTYGYSVYSTLYWGQGTQVTVSS

SEQ ID NO: 32770 - protein, 121 aa, Artificial Sequence
  Chemically Synthesized
QVQLQESGGGLVQAGGSLRLSCAASGTISTFTMGWYRQAPGKERELVATINYGGSTYYADSVKGRFTISRDNAKNTVYLQMNSLKPEDTAVYYCAVIIYPDYTEGDALGYWGQGTQVTVSS

SEQ ID NO: 32771 - protein, 116 aa, Artificial Sequence
  Chemically Synthesized
QVQLQESGGGLVQAGGSLRLSCAASGSIFLPIRMGWYRQAPGKEREFVAGIGKGGNTYYADSVKGRFTISRDNAKNTVYLQMNSLKPEDTAVYYCAAYRRYYLHYWGQGTQVTVSS

SEQ ID NO: 32772 - protein, 118 aa, Artificial Sequence
  Chemically Synthesized
QVQLQESGGGLVQAGGSLRLSCAASGSISPVRAMGWYRQAPGKERELVAAITFGTNTYYADSVKGRFTISRDNAKNTVYLQMNSLKPEDTAVYYCAVVRYGSRIHNYWGQGTQVTVSS

SEQ ID NO: 32773 - protein, 117 aa, Artificial Sequence
  Chemically Synthesized
QVQLQESGGGLVQAGGSLRLSCAASGTISRGKIMGWYRQAPGKERELVAAIARGGNTNYADSVKGRFTISRDNAKNTVYLQMNSLKPEDTAVYYCAVPLRRGYHYYWGQGTQVTVSS

SEQ ID NO: 32774 - protein, 122 aa, Artificial Sequence
  Chemically Synthesized
QVQLQESGGGLVQAGGSLRLSCAASGNISYLRDMGWYRQAPGKERELVASIGDGTNTYYADSVKGRFTISRDNAKNTVYLQMNSLKPEDTAVYYCAAQAYRYPWYVRKHVYWGQGTQVTVSS

SEQ ID NO: 32775 - protein, 122 aa, Artificial Sequence
  Chemically Synthesized
QVQLQESGGGLVQAGGSLRLSCAASGNISRLRVMGWYRQAPGKERELVASIAIGGSTNYADSVKGRFTISRDNAKNTVYLQMNSLKPEDTAVYYCAVTARPHGSRYYYFRYWGQGTQVTVSS

SEQ ID NO: 32776 - protein, 124 aa, Artificial Sequence
  Chemically Synthesized
QVQLQESGGGLVQAGGSLRLSCAASGYIFPRYRMGWYRQAPGKERELVATIGNGANTNYADSVKGRFTISRDNAKNTVYLQMNSLKPEDTAVYYCAVVRTPAGAPVVRIGHWYWGQGTQVTVSS

SEQ ID NO: 32777 - protein, 118 aa, Artificial Sequence
  Chemically Synthesized
QVQLQESGGGLVQAGGSLRLSCAASGTIFYVRRMGWYRQAPGKERELVATITRGSITNYADSVKGRFTISRDNAKNTVYLQMNSLKPEDTAVYYCAARLSRRYQYTYWGQGTQVTVSS

SEQ ID NO: 32778 - protein, 122 aa, Artificial Sequence
  Chemically Synthesized
QVQLQESGGGLVQAGGSLRLSCAASGNISRYTRMGWYRQAPGKERELVATITYGGSTYYADSVKGRFTISRDNAKNTVYLQMNSLKPEDTAVYYCAVRYRYSYATLYRYAYWGQGTQVTVSS

SEQ ID NO: 32779 - protein, 122 aa, Artificial Sequence
  Chemically Synthesized
QVQLQESGGGLVQAGGSLRLSCAASGTISTIYLMGWYRQAPGKERELVATIGAGGSTYYADSVKGRFTISRDNAKNTVYLQMNSLKPEDTAVYYCAVRYYAGIYYVRLFYYWGQGTQVTVSS

SEQ ID NO: 32780 - protein, 118 aa, Artificial Sequence
  Chemically Synthesized
QVQLQESGGGLVQAGGSLRLSCAASGTIFYARYMGWYRQAPGKEREFVAAIGTGGTTYYADSVKGRFTISRDNAKNTVYLQMNSLKPEDTAVYYCAARNYGQRYHRYWGQGTQVTVSS

SEQ ID NO: 32781 - protein, 126 aa, Artificial Sequence
  Chemically Synthesized
QVQLQESGGGLVQAGGSLRLSCAASGNISARRYMGWYRQAPGKEREFVAGIASGGSTNYADSVKGRFTISRDNAKNTVYLQMNSLKPEDTAVYYCAAYRARRYEYHTPIRWVHPYWGQGTQVTVSS

SEQ ID NO: 32782 - protein, 118 aa, Artificial Sequence
  Chemically Synthesized
QVQLQESGGGLVQAGGSLRLSCAASGNIFWPYTMGWYRQAPGKERELVAAISLGANTYYADSVKGRFTISRDNAKNTVYLQMNSLKPEDTAVYYCAARFARWYRHDYWGQGTQVTVSS

SEQ ID NO: 32783 - protein, 121 aa, Artificial Sequence
  Chemically Synthesized
QVQLQESGGGLVQAGGSLRLSCAASGSIFYLRAMGWYRQAPGKEREFVAGINRGGITYYADSVKGRFTISRDNAKNTVYLQMNSLKPEDTAVYYCAVRQYLGYARGYLRYWGQGTQVTVSS

SEQ ID NO: 32784 - protein, 126 aa, Artificial Sequence
  Chemically Synthesized
QVQLQESGGGLVQAGGSLRLSCAASGTISGGKRMGWYRQAPGKEREFVASIDTGTITNYADSVKGRFTISRDNAKNTVYLQMNSLKPEDTAVYYCAVLVLYRYLHGHPYHARFTYWGQGTQVTVSS

SEQ ID NO: 32785 - protein, 118 aa, Artificial Sequence
  Chemically Synthesized
QVQLQESGGGLVQAGGSLRLSCAASGTIFRNKLMGWYRQAPGKERELVAAIANGGSTYYADSVKGRFTISRDNAKNTVYLQMNSLKPEDTAVYYCAVVRRYKNRHDYWGQGTQVTVSS

SEQ ID NO: 32786 - protein, 122 aa, Artificial Sequence
  Chemically Synthesized
QVQLQESGGGLVQAGGSLRLSCAASGNISRTFAMGWYRQAPGKERELVATIGHGANTNYADSVKGRFTISRDNAKNTVYLQMNSLKPEDTAVYYCAARRDSAYVYRYRHYYWGQGTQVTVSS

SEQ ID NO: 32787 - protein, 118 aa, Artificial Sequence
  Chemically Synthesized
QVQLQESGGGLVQAGGSLRLSCAASGTISAYDVMGWYRQAPGKERELVAGISYGANTYYADSVKGRFTISRDNAKNTVYLQMNSLKPEDTAVYYCAVRPAWRYRHDYWGQGTQVTVSS

SEQ ID NO: 32788 - protein, 122 aa, Artificial Sequence
  Chemically Synthesized
QVQLQESGGGLVQAGGSLRLSCAASGTIFRIAYMGWYRQAPGKERELVASINWGASTNYADSVKGRFTISRDNAKNTVYLQMNSLKPEDTAVYYCAVRRGYHKYIPTLYYYWGQGTQVTVSS

SEQ ID NO: 32789 - protein, 126 aa, Artificial Sequence
  Chemically Synthesized
QVQLQESGGGLVQAGGSLRLSCAASGTIFLSRGMGWYRQAPGKERELVAGITVGGNTYYADSVKGRFTISRDNAKNTVYLQMNSLKPEDTAVYYCAALFRLYTYAYRTGYFPHYYWGQGTQVTVSS

SEQ ID NO: 32790 - protein, 118 aa, Artificial Sequence
  Chemically Synthesized
QVQLQESGGGLVQAGGSLRLSCAASGTIFGYGAMGWYRQAPGKERELVAAIARGGTTYYADSVKGRFTISRDNAKNTVYLQMNSLKPEDTAVYYCAAGTRRRRPYYYWGQGTQVTVSS

SEQ ID NO: 32791 - protein, 120 aa, Artificial Sequence
  Chemically Synthesized
QVQLQESGGGLVQAGGSLRLSCAASGTIFVFCMGWYRQAPGKERELVAAIGDGGNTNYADSVKGRFTISRDNAKNTVYLQMNSLKPEDTAVYYCAVDTGTPYGTTYYVYWGQGTQVTVSS

SEQ ID NO: 32792 - protein, 122 aa, Artificial Sequence
  Chemically Synthesized
QVQLQESGGGLVQAGGSLRLSCAASGNISRYTGMGWYRQAPGKEREFVATIGRGTTTNYADSVKGRFTISRDNAKNTVYLQMNSLKPEDTAVYYCAAYAGRSLFSHYVHYYWGQGTQVTVSS

SEQ ID NO: 32793 - protein, 118 aa, Artificial Sequence
  Chemically Synthesized
QVQLQESGGGLVQAGGSLRLSCAASGYIFEYRRMGWYRQAPGKERELVASITTGASTNYADSVKGRFTISRDNAKNTVYLQMNSLKPEDTAVYYCAANADSYPLLGYWGQGTQVTVSS

SEQ ID NO: 32794 - protein, 125 aa, Artificial Sequence
  Chemically Synthesized
QVQLQESGGGLVQAGGSLRLSCAASGNISPWYYMGWYRQAPGKEREFASINFGAITNYADSVKGRFTISRDNAKNTVYLQMNSLKPEDTAVYYCAVSFTTTVCWVLFGCLLTLYWGQGTQVTVSS

SEQ ID NO: 32795 - protein, 122 aa, Artificial Sequence
  Chemically Synthesized
QVQLQESGGGLVQAGGSLRLSCAASGNIFGYYYMGWYRQAPGKEREFVASISWGGTTNYADSVKGRFTISRDNAKNTVYLQMNSLKPEDTAVYYCAAWWWYLIEYVGVLPYWGQGTQVTVSS

SEQ ID NO: 32796 - protein, 118 aa, Artificial Sequence
  Chemically Synthesized
QVQLQESGGGLVQAGGSLRLSCAASGNISYLLAMGWYRQAPGKEREFVATIATGSTTYYADSVKGRFTISRDNAKNTVYLQMNSLKPEDTAVYYCAATAYNDVDFGYWGQGTQVTVSS

SEQ ID NO: 32797 - protein, 126 aa, Artificial Sequence
  Chemically Synthesized
QVQLQESGGGLVQAGGSLRLSCAASGNIFSDDDMGWYRQAPGKERELVATIGQGGITNYADSVKGRFTISRDNAKNTVYLQMNSLKPEDTAVYYCAAYYYDSGLSAGDDSTYYSYWGQGTQVTVSS

SEQ ID NO: 32798 - protein, 122 aa, Artificial Sequence
  Chemically Synthesized
QVQLQESGGGLVQAGGSLRLSCAASGNIFQEYYMGWYRQAPGKERELVAGIDYGGITNYADSVKGRFTISRDNAKNTVYLQMNSLKPEDTAVYYCAAARYYQTDYKGYHKYWGQGTQVTVSS

SEQ ID NO: 32799 - protein, 121 aa, Artificial Sequence
  Chemically Synthesized
QVQLQESGGGLVQAGGSLRLSCAASGTIFLNNYMGWYRQAPGKEREFVAVLLPYADSVKGRFTISRDNAKNTVYLQMNSLKPEDTAVYYCAVNQSYYFQGYYPYTYVHPYWGQGTQVTVSS

SEQ ID NO: 32800 - protein, 118 aa, Artificial Sequence
  Chemically Synthesized
QVQLQESGGGLVQAGGSLRLSCAASGSISAYTWMGWYRQAPGKEREFVAGITDGASTNYADSVKGRFTISRDNAKNTVYLQMNSLKPEDTAVYYCAVRDYIVVYLFYWGQGTQVTVSS

SEQ ID NO: 32801 - protein, 113 aa, Artificial Sequence
  Chemically Synthesized
QVQLQESGGGLVQAGGSLRLSCAASGSDLMGWYRQAPGKERELVAAISNGGNTNYADSVKGRFTISRDNAKNTVYLQMNSLKPEDTAVYYCAAESLKVLRMYWGQGTQVTVSS

SEQ ID NO: 32802 - protein, 121 aa, Artificial Sequence
  Chemically Synthesized
QVQLQESGGGLVQAGGSLRLSCAASGYISYDTMGWYRQAPGKERELVATITYGASTNYADSVKGRFTISRDNAKNTVYLQMNSLKPEDTAVYYCAAYDHSSQYRYVGYQYWGQGTQVTVSS

SEQ ID NO: 32803 - protein, 120 aa, Artificial Sequence
  Chemically Synthesized
QVQLQESGGGLVQAGGSLRLSCAASGYILVTVMGWYRQAPGKEREFVASIDYGGTTYYADSVKGRFTISRDNAKNTVYLQMNSLKPEDTAVYYCAAQLRYSVSKTLLLYWGQGTQVTVSS

SEQ ID NO: 32804 - protein, 112 aa, Artificial Sequence
  Chemically Synthesized
QVQLQESGGGLVQAGGSLRLSCAASGNIFGYPTMGWYRQAPGKEREFVASITYGGSTYYADSVKGRFTISRDNAKNTVYLQMNSLKPEDTAVYYCAVGLYYWGQGTQVTVSS

SEQ ID NO: 32805 - protein, 118 aa, Artificial Sequence
  Chemically Synthesized
QVQLQESGGGLVQAGGSLRLSCAASGSIFGGPHMGWYRQAPGKERELVASITDGTSTNYADSVKGRFTISRDNAKNTVYLQMNSLKPEDTAVYYCAANPDHLIRYIYWGQGTQVTVSS

SEQ ID NO: 32806 - protein, 118 aa, Artificial Sequence
  Chemically Synthesized
QVQLQESGGGLVQAGGSLRLSCAASGSISSSGYMGWYRQAPGKEREFVAAIGRGSITYYADSVKGRFTISRDNAKNTVYLQMNSLKPEDTAVYYCAVFVIPWYYLFYWGQGTQVTVSS

SEQ ID NO: 32807 - protein, 118 aa, Artificial Sequence
  Chemically Synthesized
QVQLQESGGGLVQAGGSLRLSCAASGTIFDGPDMGWYRQAPGKEREFVAAINKGTTTNYADSVKGRFTISRDNAKNTVYLQMNSLKPEDTAVYYCAVGFDTYYYYGYWGQGTQVTVSS

SEQ ID NO: 32808 - protein, 118 aa, Artificial Sequence
  Chemically Synthesized
QVQLQESGGGLVQAGGSLRLSCAASGNISRASAMGWYRQAPGKERELVAAIDTGSSTYYADSVKGRFTISRDNAKNTVYLQMNSLKPEDTAVYYCAVYDSLAIALVYWGQGTQVTVSS

SEQ ID NO: 32809 - protein, 122 aa, Artificial Sequence
  Chemically Synthesized
QVQLQESGGGLVQAGGSLRLSCAASGTISFEEYMGWYRQAPGKERELVAAIDWGSINQYADSVKGRFTISRDNAKNTVYLQMNSLKPEDTAVYYCAADYYRYDKDYVTFAYWGQGTQVTVSS

SEQ ID NO: 32810 - protein, 113 aa, Artificial Sequence
  Chemically Synthesized
QVQLQESGGGLVQAGGSLRLSCAASGNIFVLSYMGWYRQAPGKERELVASITDGTTTYYADSVKGRFTISRDNAKNTVYLQMNSLKPEDTAVYYCAFPRLAYWGQGTQVTVSS

SEQ ID NO: 32811 - protein, 118 aa, Artificial Sequence
  Chemically Synthesized
QVQLQESGGGLVQAGGSLRLSCAASGNISIYHAMGWYRQAPGKERELVAAITVGSNTNYADSVKGRFTISRDNAKNTVYLQMNSLKPEDTAVYYCAAGNGPVAIHNYWGQGTQVTVSS

SEQ ID NO: 32812 - protein, 118 aa, Artificial Sequence
  Chemically Synthesized
QVQLQESGGGLVQAGGSLRLSCAASGSISLYDDMGWYRQAPGKERELVAGIARGANTNYADSVKGRFTISRDNAKNTVYLQMNSLKPEDTAVYYCAVDYRDFELFEYWGQGTQVTVSS

SEQ ID NO: 32813 - protein, 122 aa, Artificial Sequence
  Chemically Synthesized
QVQLQESGGGLVQAGGSLRLSCAASGTIFPYVGMGWYRQAPGKERELVASIDPGATTYYADSVKGRFTISRDNAKNTVYLQMNSLKPEDTAVYYCAANQIGELQRQDDLRYWGQGTQVTVSS

SEQ ID NO: 32814 - protein, 118 aa, Artificial Sequence
  Chemically Synthesized
QVQLQESGGGLVQAGGSLRLSCAASGNISGGNGMGWYRQAPGKERELVAAISVGANTYYADSVKGRFTISRDNAKNTVYLQMNSLKPEDTAVYYCAVSVGTAYDLPYWGQGTQVTVSS

SEQ ID NO: 32815 - protein, 118 aa, Artificial Sequence
  Chemically Synthesized
QVQLQESGGGLVQAGGSLRLSCAASGNISTDIQMGWYRQAPGKERELVATISTGGSTNYADSVKGRFTISRDNAKNTVYLQMNSLKPEDTAVYYCAAPEPTYRGLYYWGQGTQVTVSS

SEQ ID NO: 32816 - protein, 122 aa, Artificial Sequence
  Chemically Synthesized
QVQLQESGGGLVQAGGSLRLSCAASGYISPTDFMGWYRQAPGKERELVAGISPGAITYYADSVKGRFTISRDNAKNTVYLQMNSLKPEDTAVYYCAAGWTGKPYYAQSHRYWGQGTQVTVSS

SEQ ID NO: 32817 - protein, 118 aa, Artificial Sequence
  Chemically Synthesized
QVQLQESGGGLVQAGGSLRLSCAASGTISDKWTMGWYRQAPGKERELVATINYGGITNYADSVKGRFTISRDNAKNTVYLQMNSLKPEDTAVYYCAVEGAGNESYPYWGQGTQVTVSS

SEQ ID NO: 32818 - protein, 118 aa, Artificial Sequence
  Chemically Synthesized
QVQLQESGGGLVQAGGSLRLSCAASGTISRSDPMGWYRQAPGKEREFVAAINRGSSTYYADSVKGRFTISRDNAKNTVYLQMNSLKPEDTAVYYCAAVWSYYGILGYWGQGTQVTVSS

SEQ ID NO: 32819 - protein, 122 aa, Artificial Sequence
  Chemically Synthesized
QVQLQESGGGLVQAGGSLRLSCAASGYIFLGDWMGWYRQAPGKERELVASISVGTNTNYADSVKGRFTISRDNAKNTVYLQMNSLKPEDTAVYYCAAYLDSLWQQNTFSSYWGQGTQVTVSS

SEQ ID NO: 32820 - protein, 117 aa, Artificial Sequence
  Chemically Synthesized
QVQLQESGGGLVQAGGSLRLSCAASGNISEYDDMGWYRQAPGKERELVASIITVLVPYADSVKGRFTISRDNAKNTVYLQMNSLKPEDTAVYYCAVGGDWQDQHNYWGQGTQVTVSS

SEQ ID NO: 32821 - protein, 126 aa, Artificial Sequence
  Chemically Synthesized
QVQLQESGGGLVQAGGSLRLSCAASGTISQTFLMGWYRQAPGKERELVATINAGGTTYYADSVKGRFTISRDNAKNTVYLQMNSLKPEDTAVYYCAVYWYRGSQETFPDTEYHAYWGQGTQVTVSS

SEQ ID NO: 32822 - protein, 124 aa, Artificial Sequence
  Chemically Synthesized
QVQLQESGGGLVQAGGSLRLSCAASGSISWGDYMGWYRQAPGKEREFVATINLGSTTNYADSVKGRFTISRDNAKNTVYLQMNSLKPEDTAVYYCAASGPYSTLTTLTLTTFYWGQGTQVTVSS

SEQ ID NO: 32823 - protein, 118 aa, Artificial Sequence
  Chemically Synthesized
QVQLQESGGGLVQAGGSLRLSCAASGTISVPIHMGWYRQAPGKERELVAGITAGATTYYADSVKGRFTISRDNAKNTVYLQMNSLKPEDTAVYYCAAYYSSDDLYFYWGQGTQVTVSS

SEQ ID NO: 32824 - protein, 122 aa, Artificial Sequence
  Chemically Synthesized
QVQLQESGGGLVQAGGSLRLSCAASGTISLYVLMGWYRQAPGKEREFVAAIGSGANTNYADSVKGRFTISRDNAKNTVYLQMNSLKPEDTAVYYCAAIDRHDHSDNSFLLYWGQGTQVTVSS

SEQ ID NO: 32825 - protein, 126 aa, Artificial Sequence
  Chemically Synthesized
QVQLQESGGGLVQAGGSLRLSCAASGTISSLQQMGWYRQAPGKEREFVATISAGSITYYADSVKGRFTISRDNAKNTVYLQMNSLKPEDTAVYYCAVLQQGYKDTGNQQPDHLYYWGQGTQVTVSS

SEQ ID NO: 32826 - protein, 125 aa, Artificial Sequence
  Chemically Synthesized
QVQLQESGGGLVQAGGSLRLSCAASGNIFTPYYMGWYRQAPGKEREFVASISPGASTNYADSVKGRFTISRDNAKNTVYLQMNSLKPEDTAVYYCAVGRDTRDRIGSTLVVSIYWGQGTQVTVSS

SEQ ID NO: 32827 - protein, 118 aa, Artificial Sequence
  Chemically Synthesized
QVQLQESGGGLVQAGGSLRLSCAASGNIFDITSMGWYRQAPGKERELVAGIGEGSSTQYADSVKGRFTISRDNAKNTVYLQMNSLKPEDTAVYYCAVNHGTAWTYGYWGQGTQVTVSS

SEQ ID NO: 32828 - protein, 122 aa, Artificial Sequence
  Chemically Synthesized
QVQLQESGGGLVQAGGSLRLSCAASGTISAYPYMGWYRQAPGKEREFVAAIGPGGNTNYADSVKGRFTISRDNAKNTVYLQMNSLKPEDTAVYYCAASEYAVAGVTYPYLYWGQGTQVTVSS

SEQ ID NO: 32829 - protein, 126 aa, Artificial Sequence
  Chemically Synthesized
QVQLQESGGGLVQAGGSLRLSCAASGTISYNLDMGWYRQAPGKEREFVATITDGAITNYADSVKGRFTISRDNAKNTVYLQMNSLKPEDTAVYYCAVLDRTYVDEYVSRAVYHIYWGQGTQVTVSS

SEQ ID NO: 32830 - protein, 109 aa, Artificial Sequence
  Chemically Synthesized
QVQLQESGGGLVQAGGSLRLSCAASGTISRISMGWYRQAPGKERELVASITSGTSTNYADSVKGRFTISRDNAKNTVYLQMNSLKPEDTAVYYCALYYWGQGTQVTVSS

SEQ ID NO: 32831 - protein, 118 aa, Artificial Sequence
  Chemically Synthesized
QVQLQESGGGLVQAGGSLRLSCAASGSISVKYGMGWYRQAPGKEREFVASIGYGATTYYADSVKGRFTISRDNAKNTVYLQMNSLKPEDTAVYYCAVYAHDIEAFGYWGQGTQVTVSS

SEQ ID NO: 32832 - protein, 118 aa, Artificial Sequence
  Chemically Synthesized
QVQLQESGGGLVQAGGSLRLSCAASGSISPYGIMGWYRQAPGKERELVAAIGYGTSTNYADSVKGRFTISRDNAKNTVYLQMNSLKPEDTAVYYCAAPFPYEVDYQYWGQGTQVTVSS

SEQ ID NO: 32833 - protein, 118 aa, Artificial Sequence
  Chemically Synthesized
QVQLQESGGGLVQAGGSLRLSCAASGTISTARTMGWYRQAPGKERELVATIGHGSNTYYADSVKGRFTISRDNAKNTVYLQMNSLKPEDTAVYYCAAGSGYWSDLTYWGQGTQVTVSS

SEQ ID NO: 32834 - protein, 117 aa, Artificial Sequence
  Chemically Synthesized
QVQLQESGGGLVQAGGSLRLSCAASGTIFAFHYMGWYRQAPGKEREFVASINYVLLPYADSVKGRFTISRDNAKNTVYLQMNSLKPEDTAVYYCAVRRYSWRTYFYWGQGTQVTVSS

SEQ ID NO: 32835 - protein, 118 aa, Artificial Sequence
  Chemically Synthesized
QVQLQESGGGLVQAGGSLRLSCAASGTIFSRTYMGWYRQAPGKERELVATITGGANTYYADSVKGRFTISRDNAKNTVYLQMNSLKPEDTAVYYCAADRPYGAVLRYWGQGTQVTVSS

SEQ ID NO: 32836 - protein, 118 aa, Artificial Sequence
  Chemically Synthesized
QVQLQESGGGLVQAGGSLRLSCAASGSIFIPTKMGWYRQAPGKERELVAAIGRGGTTYYADSVKGRFTISRDNAKNTVYLQMNSLKPEDTAVYYCAATRRGLLVLRYWGQGTQVTVSS

SEQ ID NO: 32837 - protein, 125 aa, Artificial Sequence
  Chemically Synthesized
QVQLQESGGGLVQAGGSLRLSCAASGTISIQSLMGWYRQAPGKERELVAAIAYGASTYYADSVKGRFTISRDNAKNTVYLQMNSLKPEDTAVYYCAVRYVHQLYARRAHAYHDYWGQGTQVTVSS

SEQ ID NO: 32838 - protein, 118 aa, Artificial Sequence
  Chemically Synthesized
QVQLQESGGGLVQAGGSLRLSCAASGTIFSYYYMGWYRQAPGKEREFVASITGGGTTYYADSVKGRFTISRDNAKNTVYLQMNSLKPEDTAVYYCAVKRFSFRVYPYWGQGTQVTVSS

SEQ ID NO: 32839 - protein, 118 aa, Artificial Sequence
  Chemically Synthesized
QVQLQESGGGLVQAGGSLRLSCAASGTIFDTATMGWYRQAPGKERELVAAIDYGTSTYYADSVKGRFTISRDNAKNTVYLQMNSLKPEDTAVYYCAVDRDLSGDYGYWGQGTQVTVSS

SEQ ID NO: 32840 - protein, 118 aa, Artificial Sequence
  Chemically Synthesized
QVQLQESGGGLVQAGGSLRLSCAASGSISLQRVMGWYRQAPGKEREFVAGINVGSSTYYADSVKGRFTISRDNAKNTVYLQMNSLKPEDTAVYYCAVRPFRLFRFSYWGQGTQVTVSS

SEQ ID NO: 32841 - protein, 117 aa, Artificial Sequence
  Chemically Synthesized
QVQLQESGGGLVQAGGSLRLSCAASGSIFGTTVMGWYRQAPGKERELAAINEGTTTNYADSVKGRFTISRDNAKNTVYLQMNSLKPEDTAVYYCAVPGDDYYDLPYWGQGTQVTVSS

SEQ ID NO: 32842 - protein, 118 aa, Artificial Sequence
  Chemically Synthesized
QVQLQESGGGLVQAGGSLRLSCAASGYIFGDYAMGWYRQAPGKERELVASIGYGGTTYYADSVKGRFTISRDNAKNTVYLQMNSLKPEDTAVYYCAVSGPHDDGHSYWGQGTQVTVSS

SEQ ID NO: 32843 - protein, 122 aa, Artificial Sequence
  Chemically Synthesized
QVQLQESGGGLVQAGGSLRLSCAASGTISFPDFMGWYRQAPGKERELVAAIAYGSNTYYADSVKGRFTISRDNAKNTVYLQMNSLKPEDTAVYYCAVTGRYENVYGYVLTYWGQGTQVTVSS

SEQ ID NO: 32844 - protein, 118 aa, Artificial Sequence
  Chemically Synthesized
QVQLQESGGGLVQAGGSLRLSCAASGYISYRYNMGWYRQAPGKEREFVASISLGGTTNYADSVKGRFTISRDNAKNTVYLQMNSLKPEDTAVYYCAVYYLPDEALLYWGQGTQVTVSS

SEQ ID NO: 32845 - protein, 117 aa, Artificial Sequence
  Chemically Synthesized
QVQLQESGGGLVQAGGSLRLSCAASGTIFRYRTMGWYRQAPGKERELVAAIALGSSTYYADSVKGRFTISRDNAKNTVYLQMNSLKPEDTAVYYCAAVLYYGRHGYWGQGTQVTVSS

SEQ ID NO: 32846 - protein, 118 aa, Artificial Sequence
  Chemically Synthesized
QVQLQESGGGLVQAGGSLRLSCAASGNISITFYMGWYRQAPGKERELVAAINWGGNTYYADSVKGRFTISRDNAKNTVYLQMNSLKPEDTAVYYCAVAFFDVDYHGYWGQGTQVTVSS

SEQ ID NO: 32847 - protein, 118 aa, Artificial Sequence
  Chemically Synthesized
QVQLQESGGGLVQAGGSLRLSCAASGNIFYDDIMGWYRQAPGKEREFVATIDLGATTNYADSVKGRFTISRDNAKNTVYLQMNSLKPEDTAVYYCAVAGRDYNDHAYWGQGTQVTVSS

SEQ ID NO: 32848 - protein, 118 aa, Artificial Sequence
  Chemically Synthesized
QVQLQESGGGLVQAGGSLRLSCAASGNIFRLRYMGWYRQAPGKERELVAAIADGTNTNYADSVKGRFTISRDNAKNTVYLQMNSLKPEDTAVYYCAVLWRFWRNHHYWGQGTQVTVSS

SEQ ID NO: 32849 - protein, 113 aa, Artificial Sequence
  Chemically Synthesized
QVQLQESGGGLVQAGGSLRLSCAASGTISYFYDMGWYRQAPGKEREFVATITYGGNTYYADSVKGRFTISRDNAKNTVYLQMNSLKPEDTAVYYCAADGHNYWGQGTQVTVSS

SEQ ID NO: 32850 - protein, 118 aa, Artificial Sequence
  Chemically Synthesized
QVQLQESGGGLVQAGGSLRLSCAASGTIFDGSPMGWYRQAPGKEREFVATIGVGGITNYADSVKGRFTISRDNAKNTVYLQMNSLKPEDTAVYYCAASDTRPASHNYWGQGTQVTVSS

SEQ ID NO: 32851 - protein, 117 aa, Artificial Sequence
  Chemically Synthesized
QVQLQESGGGLVQAGGSLRLSCAASGNISSAYWMGWYRQAPGKEREFVAAIDQGGITNYADSVKGRFTISRDNAKNTVYLQMNSLKPEDTAVYYCAVDWSYQSVIYWGQGTQVTVSS

SEQ ID NO: 32852 - protein, 110 aa, Artificial Sequence
  Chemically Synthesized
QVQLQESGGGLVQAGGSLRLSCAASGYISGRAMGWYRQAPGKEREFVAGINYGSNTYYADSVKGRFTISRDNAKNTVYLQMNSLKPEDTAVYYCAVHGYWGQGTQVTVSS

SEQ ID NO: 32853 - protein, 118 aa, Artificial Sequence
  Chemically Synthesized
QVQLQESGGGLVQAGGSLRLSCAASGSIFGGTDMGWYRQAPGKEREFVATIGPGTSTNYADSVKGRFTISRDNAKNTVYLQMNSLKPEDTAVYYCAVGSSGGIAYFYWGQGTQVTVSS

SEQ ID NO: 32854 - protein, 125 aa, Artificial Sequence
  Chemically Synthesized
QVQLQESGGGLVQAGGSLRLSCAASGNISTVVGMGWYRQAPGKERELVAGIALGGSTNYADSVKGRFTISRDNAKNTVYLQMNSLKPEDTAVYYCAVAHGYAVYDYSVLVGTFYWGQGTQVTVSS

SEQ ID NO: 32855 - protein, 118 aa, Artificial Sequence
  Chemically Synthesized
QVQLQESGGGLVQAGGSLRLSCAASGYIFASRFMGWYRQAPGKEREFVAAIGRGASTYYADSVKGRFTISRDNAKNTVYLQMNSLKPEDTAVYYCAANRYRYQTFGYWGQGTQVTVSS

SEQ ID NO: 32856 - protein, 121 aa, Artificial Sequence
  Chemically Synthesized
QVQLQESGGGLVQAGGSLRLSCAASGTIFQGPDMGWYRQAPGKEREFVAAIAVGTNTYYADSVKGRFTISRDNAKNTVYLQMNSLKPEDTAVYYCAVYDALHPLLGDYHYWGQGTQVTVSS

SEQ ID NO: 32857 - protein, 117 aa, Artificial Sequence
  Chemically Synthesized
QVQLQESGGGLVQAGGSLRLSCAASGNISDSLSMGWYRQAPGKEREFVASIGTGSIPYADSVKGRFTISRDNAKNTVYLQMNSLKPEDTAVYYCAVYQDDLTTLGYWGQGTQVTVSS

SEQ ID NO: 32858 - protein, 110 aa, Artificial Sequence
  Chemically Synthesized
QVQLQESGGGLVQAGGSLRLSCAASGTISNAPKMGWYRQAPGKEREFVASITYGTSTYYADSVKGRFTISRDNAKNTVYLQMNSLKPEDTAVYYCADPYWGQGTQVTVSS

SEQ ID NO: 32859 - protein, 118 aa, Artificial Sequence
  Chemically Synthesized
QVQLQESGGGLVQAGGSLRLSCAASGNISRRVYMGWYRQAPGKERELVAAIDDGANTYYADSVKGRFTISRDNAKNTVYLQMNSLKPEDTAVYYCAVYRDQGTGHYYWGQGTQVTVSS

SEQ ID NO: 32860 - protein, 118 aa, Artificial Sequence
  Chemically Synthesized
QVQLQESGGGLVQAGGSLRLSCAASGSIFPRRYMGWYRQAPGKEREFVAGINSGTTTYYADSVKGRFTISRDNAKNTVYLQMNSLKPEDTAVYYCAAIFTYKTRHRYWGQGTQVTVSS

SEQ ID NO: 32861 - protein, 121 aa, Artificial Sequence
  Chemically Synthesized
QVQLQESGGGLVQAGGSLRLSCAASGTIFGYYTMGWYRQAPGKEREFVAGIAKGTNTYYADSVKGRFTISRDNAKNTVYLQMNSLKPEDTAVYYCAARTEYRYWWRDFHYWGQGTQVTVSS

SEQ ID NO: 32862 - protein, 118 aa, Artificial Sequence
  Chemically Synthesized
QVQLQESGGGLVQAGGSLRLSCAASGYISPWRAMGWYRQAPGKEREFVATIAFGTTTYYADSVKGRFTISRDNAKNTVYLQMNSLKPEDTAVYYCAAWYRRNREHYYWGQGTQVTVSS

SEQ ID NO: 32863 - protein, 115 aa, Artificial Sequence
  Chemically Synthesized
QVQLQESGGGLVQAGGSLRLSCAASGTISTGPYMGWYRQAPGKEREFVASIDSGSSTYYADSVKGRFTISRDNAKNTVYLQMNSLKPEDTAVYYCAARSTTVIYWGQGTQVTVSS

SEQ ID NO: 32864 - protein, 118 aa, Artificial Sequence
  Chemically Synthesized
QVQLQESGGGLVQAGGSLRLSCAASGNIFPQDAMGWYRQAPGKEREFVATIAFGSTTNYADSVKGRFTISRDNAKNTVYLQMNSLKPEDTAVYYCAAYHGGYQRHPYWGQGTQVTVSS

SEQ ID NO: 32865 - protein, 122 aa, Artificial Sequence
  Chemically Synthesized
QVQLQESGGGLVQAGGSLRLSCAASGTIFPHYDMGWYRQAPGKEREFVAGIAVGTITYYADSVKGRFTISRDNAKNTVYLQMNSLKPEDTAVYYCAAYYHGDYFVRYYLTYWGQGTQVTVSS

SEQ ID NO: 32866 - protein, 117 aa, Artificial Sequence
  Chemically Synthesized
QVQLQESGGGLVQAGGSLRLSCAASGSIFAHPYMGWYRQAPGKERELVAGISFGTNTNYADSVKGRFTISRDNAKNTVYLQMNSLKPEDTAVYYCAVVGDSPYPHYWGQGTQVTVSS

SEQ ID NO: 32867 - protein, 122 aa, Artificial Sequence
  Chemically Synthesized
QVQLQESGGGLVQAGGSLRLSCAASGTISPYGYMGWYRQAPGKERELVAAIGQGTTTYYADSVKGRFTISRDNAKNTVYLQMNSLKPEDTAVYYCAVYYSTLDTHGQVLVYWGQGTQVTVSS

SEQ ID NO: 32868 - protein, 118 aa, Artificial Sequence
  Chemically Synthesized
QVQLQESGGGLVQAGGSLRLSCAASGSIFWFQYMGWYRQAPGKERELVASIDYGSTTYYADSVKGRFTISRDNAKNTVYLQMNSLKPEDTAVYYCAVTAELYYLLGYWGQGTQVTVSS

SEQ ID NO: 32869 - protein, 122 aa, Artificial Sequence
  Chemically Synthesized
QVQLQESGGGLVQAGGSLRLSCAASGNISVSNGMGWYRQAPGKERELVAAIAGGGITYYADSVKGRFTISRDNAKNTVYLQMNSLKPEDTAVYYCAVYRIEANTPDHPHAYWGQGTQVTVSS

SEQ ID NO: 32870 - protein, 118 aa, Artificial Sequence
  Chemically Synthesized
QVQLQESGGGLVQAGGSLRLSCAASGTISGLFSMGWYRQAPGKERELVAGITSGGNTYYADSVKGRFTISRDNAKNTVYLQMNSLKPEDTAVYYCAVSPDTTYTLTYWGQGTQVTVSS

SEQ ID NO: 32871 - protein, 118 aa, Artificial Sequence
  Chemically Synthesized
QVQLQESGGGLVQAGGSLRLSCAASGTISDASAMGWYRQAPGKEREFVATINIGGNTNYADSVKGRFTISRDNAKNTVYLQMNSLKPEDTAVYYCAAYLDVVDQHTYWGQGTQVTVSS

SEQ ID NO: 32872 - protein, 118 aa, Artificial Sequence
  Chemically Synthesized
QVQLQESGGGLVQAGGSLRLSCAASGYIFVVYVMGWYRQAPGKERELVATIGYGSSTYYADSVKGRFTISRDNAKNTVYLQMNSLKPEDTAVYYCAAYDLYLPYFPYWGQGTQVTVSS

SEQ ID NO: 32873 - protein, 118 aa, Artificial Sequence
  Chemically Synthesized
QVQLQESGGGLVQAGGSLRLSCAASGTIFASYYMGWYRQAPGKERELVAAITGGGITYYADSVKGRFTISRDNAKNTVYLQMNSLKPEDTAVYYCAVLGQWGDDYGYWGQGTQVTVSS

SEQ ID NO: 32874 - protein, 121 aa, Artificial Sequence
  Chemically Synthesized
QVQLQESGGGLVQAGGSLRLSCAASGTIFIEPSMGWYRQAPGKERELVATIVRWYYQYADSVKGRFTISRDNAKNTVYLQMNSLKPEDTAVYYCAAALSTFVGPLPFHYYWGQGTQVTVSS

SEQ ID NO: 32875 - protein, 112 aa, Artificial Sequence
  Chemically Synthesized
QVQLQESGGGLVQAGGSLRLSCAASGTISSYRIMGWYRQAPGKEREFVASISDGGNTYYADSVKGRFTISRDNAKNTVYLQMNSLKPEDTAVYYCAATLYYWGQGTQVTVSS

SEQ ID NO: 32876 - protein, 116 aa, Artificial Sequence
  Chemically Synthesized
QVQLQESGGGLVQAGGSLRLSCAASGSISQWRDMGWYRQAPGKERELVAAIDDGSNTNYADSVKGRFTISRDNAKNTVYLQMNSLKPEDTAVYYCAAVADLGLRYWGQGTQVTVSS

SEQ ID NO: 32877 - protein, 118 aa, Artificial Sequence
  Chemically Synthesized
QVQLQESGGGLVQAGGSLRLSCAASGNISVLKRMGWYRQAPGKEREFVATISVGSTTNYADSVKGRFTISRDNAKNTVYLQMNSLKPEDTAVYYCAVYSYRWGWLTYWGQGTQVTVSS

SEQ ID NO: 32878 - protein, 125 aa, Artificial Sequence
  Chemically Synthesized
QVQLQESGGGLVQAGGSLRLSCAASGTIFASLMGWYRQAPGKERELVASINTGANTNYADSVKGRFTISRDNAKNTVYLQMNSLKPEDTAVYYCAADVPQLWAVTDIVPSPHYYWGQGTQVTVSS

SEQ ID NO: 32879 - protein, 122 aa, Artificial Sequence
  Chemically Synthesized
QVQLQESGGGLVQAGGSLRLSCAASGNISDWQRMGWYRQAPGKERELVASITSGATTYYADSVKGRFTISRDNAKNTVYLQMNSLKPEDTAVYYCAVTADDNVGYARRHRYWGQGTQVTVSS

SEQ ID NO: 32880 - protein, 118 aa, Artificial Sequence
  Chemically Synthesized
QVQLQESGGGLVQAGGSLRLSCAASGSIFRIGDMGWYRQAPGKERELVASIGRGGSTNYADSVKGRFTISRDNAKNTVYLQMNSLKPEDTAVYYCAAYYPRYFGHGYWGQGTQVTVSS

SEQ ID NO: 32881 - protein, 118 aa, Artificial Sequence
  Chemically Synthesized
QVQLQESGGGLVQAGGSLRLSCAASGSISADYMGWYRQAPGKEREFVASISSGGNTYYADSVKGRFTISRDNAKNTVYLQMNSLKPEDTAVYYCAVGVLYDWSRLGYWGQGTQVTVSS

SEQ ID NO: 32882 - protein, 118 aa, Artificial Sequence
  Chemically Synthesized
QVQLQESGGGLVQAGGSLRLSCAASGTIFRGNLMGWYRQAPGKEREFVAAIGRGGSTYYADSVKGRFTISRDNAKNTVYLQMNSLKPEDTAVYYCAALRRTYQRYRYWGQGTQVTVSS

SEQ ID NO: 32883 - protein, 113 aa, Artificial Sequence
  Chemically Synthesized
QVQLQESGGGLVQAGGSLRLSCAASGSIFFGAPMGWYRQAPGKERELVAGISYGSTTYYADSVKGRFTISRDNAKNTVYLQMNSLKPEDTAVYYCAWVLLDYWGQGTQVTVSS

SEQ ID NO: 32884 - protein, 121 aa, Artificial Sequence
  Chemically Synthesized
QVQLQESGGGLVQAGGSLRLSCAASGTISSSDIMGWYRQAPGKEREFVASIDSGSTYYADSVKGRFTISRDNAKNTVYLQMNSLKPEDTAVYYCAAKDFRNYFGIGRYPYWGQGTQVTVSS

SEQ ID NO: 32885 - protein, 122 aa, Artificial Sequence
  Chemically Synthesized
QVQLQESGGGLVQAGGSLRLSCAASGNIFRVRYMGWYRQAPGKEREFVAAINGGTTTNYADSVKGRFTISRDNAKNTVYLQMNSLKPEDTAVYYCAVYRNKYVAYPVYHRYWGQGTQVTVSS

SEQ ID NO: 32886 - protein, 118 aa, Artificial Sequence
  Chemically Synthesized
QVQLQESGGGLVQAGGSLRLSCAASGSIFRVRYMGWYRQAPGKERELVAGITHGSITNYADSVKGRFTISRDNAKNTVYLQMNSLKPEDTAVYYCAAKPYRARNLYYWGQGTQVTVSS

SEQ ID NO: 32887 - protein, 118 aa, Artificial Sequence
  Chemically Synthesized
QVQLQESGGGLVQAGGSLRLSCAASGNIFVPKYMGWYRQAPGKERELVAAIGHGTTTNYADSVKGRFTISRDNAKNTVYLQMNSLKPEDTAVYYCAATFYGRTRYAYWGQGTQVTVSS

SEQ ID NO: 32888 - protein, 118 aa, Artificial Sequence
  Chemically Synthesized
QVQLQESGGGLVQAGGSLRLSCAASGYIFHGGGMGWYRQAPGKEREFVAAINYGGITYYADSVKGRFTISRDNAKNTVYLQMNSLKPEDTAVYYCAVTWRYVYGFLYWGQGTQVTVSS

SEQ ID NO: 32889 - protein, 122 aa, Artificial Sequence
  Chemically Synthesized
QVQLQESGGGLVQAGGSLRLSCAASGYISYLLVMGWYRQAPGKEREFVAAINSGTITNYADSVKGRFTISRDNAKNTVYLQMNSLKPEDTAVYYCAVSYTYDTRVDFDYGYWGQGTQVTVSS

SEQ ID NO: 32890 - protein, 118 aa, Artificial Sequence
  Chemically Synthesized
QVQLQESGGGLVQAGGSLRLSCAASGTIFSGGTMGWYRQAPGKEREFVAGINDGAITNYADSVKGRFTISRDNAKNTVYLQMNSLKPEDTAVYYCAAGTPTLDRLDYWGQGTQVTVSS

SEQ ID NO: 32891 - protein, 118 aa, Artificial Sequence
  Chemically Synthesized
QVQLQESGGGLVQAGGSLRLSCAASGTIFPGDTMGWYRQAPGKERELVASIDVGASTYYADSVKGRFTISRDNAKNTVYLQMNSLKPEDTAVYYCAARPRYAWVHYYWGQGTQVTVSS

SEQ ID NO: 32892 - protein, 118 aa, Artificial Sequence
  Chemically Synthesized
QVQLQESGGGLVQAGGSLRLSCAASGTIFTSWIMGWYRQAPGKEREFVAGIDIGAITYYADSVKGRFTISRDNAKNTVYLQMNSLKPEDTAVYYCAVFVLPYDVLPYWGQGTQVTVSS

SEQ ID NO: 32893 - protein, 122 aa, Artificial Sequence
  Chemically Synthesized
QVQLQESGGGLVQAGGSLRLSCAASGNIFRGRSMGWYRQAPGKEREFVATIARGTNTYYADSVKGRFTISRDNAKNTVYLQMNSLKPEDTAVYYCAVEVHRRDAYYRYFYYWGQGTQVTVSS

SEQ ID NO: 32894 - protein, 122 aa, Artificial Sequence
  Chemically Synthesized
QVQLQESGGGLVQAGGSLRLSCAASGSIFQLHGMGWYRQAPGKEREFVASITAGANTNYADSVKGRFTISRDNAKNTVYLQMNSLKPEDTAVYYCAAYRYYNNTFSNSHWYWGQGTQVTVSS

SEQ ID NO: 32895 - protein, 118 aa, Artificial Sequence
  Chemically Synthesized
QVQLQESGGGLVQAGGSLRLSCAASGSIFRYSWMGWYRQAPGKEREFVAGIAYGAITNYADSVKGRFTISRDNAKNTVYLQMNSLKPEDTAVYYCAVNTRFFVKHVYWGQGTQVTVSS

SEQ ID NO: 32896 - protein, 118 aa, Artificial Sequence
  Chemically Synthesized
QVQLQESGGGLVQAGGSLRLSCAASGNISDYWAMGWYRQAPGKEREFVAAINQGGTTYYADSVKGRFTISRDNAKNTVYLQMNSLKPEDTAVYYCAVRIQAAGEYAYWGQGTQVTVSS

SEQ ID NO: 32897 - protein, 118 aa, Artificial Sequence
  Chemically Synthesized
QVQLQESGGGLVQAGGSLRLSCAASGNISYRRAMGWYRQAPGKEREFVAAISQGSNTNYADSVKGRFTISRDNAKNTVYLQMNSLKPEDTAVYYCAATYRWHPYFAYWGQGTQVTVSS

SEQ ID NO: 32898 - protein, 126 aa, Artificial Sequence
  Chemically Synthesized
QVQLQESGGGLVQAGGSLRLSCAASGYISRSAGMGWYRQAPGKEREFVAAINRGATTYYADSVKGRFTISRDNAKNTVYLQMNSLKPEDTAVYYCAVGGRPVAQGHRPTHYSHRYWGQGTQVTVSS

SEQ ID NO: 32899 - protein, 122 aa, Artificial Sequence
  Chemically Synthesized
QVQLQESGGGLVQAGGSLRLSCAASGNIFSGDYMGWYRQAPGKEREFVAAIGGGATTYYADSVKGRFTISRDNAKNTVYLQMNSLKPEDTAVYYCAVVRLDYSGASVKHVYWGQGTQVTVSS

SEQ ID NO: 32900 - protein, 117 aa, Artificial Sequence
  Chemically Synthesized
QVQLQESGGGLVQAGGSLRLSCAASGNIFVLSGMGWYRQAPGKERELVAGISTGSSTYYADSVKGRFTISRDNAKNTVYLQMNSLKPEDTAVYYCALTTTTLTTFYWGQGTQVTVSS

SEQ ID NO: 32901 - protein, 126 aa, Artificial Sequence
  Chemically Synthesized
QVQLQESGGGLVQAGGSLRLSCAASGNIFQFIPMGWYRQAPGKEREFVAAIGYGSITYYADSVKGRFTISRDNAKNTVYLQMNSLKPEDTAVYYCAAYDLYYSRRYWASGVTHSYWGQGTQVTVSS

SEQ ID NO: 32902 - protein, 125 aa, Artificial Sequence
  Chemically Synthesized
QVQLQESGGGLVQAGGSLRLSCAASGSISYYVPMGWYRQAPGKEREFVATITSGVIPYADSVKGRFTISRDNAKNTVYLQMNSLKPEDTAVYYCAVRPIVVDRPYRDGYYLFKYWGQGTQVTVSS

SEQ ID NO: 32903 - protein, 126 aa, Artificial Sequence
  Chemically Synthesized
QVQLQESGGGLVQAGGSLRLSCAASGTISADYFMGWYRQAPGKEREFVASIGVGGITNYADSVKGRFTISRDNAKNTVYLQMNSLKPEDTAVYYCAAVPYPYYGVYKYSGQYHEYWGQGTQVTVSS

SEQ ID NO: 32904 - protein, 114 aa, Artificial Sequence
  Chemically Synthesized
QVQLQESGGGLVQAGGSLRLSCAASGNIYMGWYRQAPGKERELVAAIGLGASTYYADSVKGRFTISRDNAKNTVYLQMNSLKPEDTAVYYCAVNLRYSWTHYYWGQGTQVTVSS

SEQ ID NO: 32905 - protein, 117 aa, Artificial Sequence
  Chemically Synthesized
QVQLQESGGGLVQAGGSLRLSCAASGNISSRNMGWYRQAPGKERELVAGIDDGATTNYADSVKGRFTISRDNAKNTVYLQMNSLKPEDTAVYYCAVGLYLGPALYYWGQGTQVTVSS

SEQ ID NO: 32906 - protein, 118 aa, Artificial Sequence
  Chemically Synthesized
QVQLQESGGGLVQAGGSLRLSCAASGTISRWTIMGWYRQAPGKERELVAAIAQGGSTYYADSVKGRFTISRDNAKNTVYLQMNSLKPEDTAVYYCAAGPYRFSYHGYWGQGTQVTVSS

SEQ ID NO: 32907 - protein, 118 aa, Artificial Sequence
  Chemically Synthesized
QVQLQESGGGLVQAGGSLRLSCAASGYISEYVHMGWYRQAPGKEREFVAAIGRGTTTYYADSVKGRFTISRDNAKNTVYLQMNSLKPEDTAVYYCAVWSRRYRLHLYWGQGTQVTVSS

SEQ ID NO: 32908 - protein, 118 aa, Artificial Sequence
  Chemically Synthesized
QVQLQESGGGLVQAGGSLRLSCAASGTIFRSVYMGWYRQAPGKERELVASITYGTTTYYADSVKGRFTISRDNAKNTVYLQMNSLKPEDTAVYYCAVGTTYILNLRYWGQGTQVTVSS

SEQ ID NO: 32909 - protein, 123 aa, Artificial Sequence
  Chemically Synthesized
QVQLQESGGGLVQAGGSLRLSCAASGYISLYLNMGWYRQAPGKEREFVASIATGSTTYYADSVKGRFTISRDNAKNTVYLQMNSLKPEDTAVYYCAAYVYDYDYYDVTDLRYWGQGTQVTVSS

SEQ ID NO: 32910 - protein, 122 aa, Artificial Sequence
  Chemically Synthesized
QVQLQESGGGLVQAGGSLRLSCAASGTIFGLGTMGWYRQAPGKERELVAAINRGGSTYYADSVKGRFTISRDNAKNTVYLQMNSLKPEDTAVYYCAVTYFSEYWPQHSYLYWGQGTQVTVSS

SEQ ID NO: 32911 - protein, 121 aa, Artificial Sequence
  Chemically Synthesized
QVQLQESGGGLVQAGGSLRLSCAASGNISVRGYMGWYRQAPGKEREFVASINGGNTYYADSVKGRFTISRDNAKNTVYLQMNSLKPEDTAVYYCAAPYVYAYRRPFRFYYWGQGTQVTVSS

SEQ ID NO: 32912 - protein, 118 aa, Artificial Sequence
  Chemically Synthesized
QVQLQESGGGLVQAGGSLRLSCAASGYISALSTMGWYRQAPGKEREFVAAITIGATTYYADSVKGRFTISRDNAKNTVYLQMNSLKPEDTAVYYCAAATTYLSGFYYWGQGTQVTVSS

SEQ ID NO: 32913 - protein, 125 aa, Artificial Sequence
  Chemically Synthesized
QVQLQESGGGLVQAGGSLRLSCAASGYISADYDMGWYRQAPGKEREFVASIGHGAITNYADSVKGRFTISRDNAKNTVYLQMNSLKPEDTAVYYCAAYEGDGLDEYIYGDPLPYWGQGTQVTVSS

SEQ ID NO: 32914 - protein, 115 aa, Artificial Sequence
  Chemically Synthesized
QVQLQESGGGLVQAGGSLRLSCAASGNIFAYSYMGWYRQAPGKERELVASITVGGNTNYADSVKGRFTISRDNAKNTVYLQMNSLKPEDTAVYYCAVLNYDHSYWGQGTQVTVSS

SEQ ID NO: 32915 - protein, 122 aa, Artificial Sequence
  Chemically Synthesized
QVQLQESGGGLVQAGGSLRLSCAASGNIFIRYYMGWYRQAPGKERELVATIDIGGNTYYADSVKGRFTISRDNAKNTVYLQMNSLKPEDTAVYYCAVLDYDSRGFDDVHRYWGQGTQVTVSS

SEQ ID NO: 32916 - protein, 120 aa, Artificial Sequence
  Chemically Synthesized
QVQLQESGGGLVQAGGSLRLSCAASGTIFRYAMGWYRQAPGKERELVAGIDQGATTYYADSVKGRFTISRDNAKNTVYLQMNSLKPEDTAVYYCAAQRARPALYRQHAYWGQGTQVTVSS

SEQ ID NO: 32917 - protein, 120 aa, Artificial Sequence
  Chemically Synthesized
QVQLQESGGGLVQAGGSLRLSCAASGTIFYLYVMGWYRQAPGKERELVAGIDLGGNTNYADSVKGRFTISRDNAKNTVYLQMNSLKPEDTAVYYCAVRSYDLGWTIHLYWGQGTQVTVSS

SEQ ID NO: 32918 - protein, 118 aa, Artificial Sequence
  Chemically Synthesized
QVQLQESGGGLVQAGGSLRLSCAASGSIFATNSMGWYRQAPGKEREFVASIDKGGNTYYADSVKGRFTISRDNAKNTVYLQMNSLKPEDTAVYYCAAYLWLSYGHQYWGQGTQVTVSS

SEQ ID NO: 32919 - protein, 122 aa, Artificial Sequence
  Chemically Synthesized
QVQLQESGGGLVQAGGSLRLSCAASGSISGRRNMGWYRQAPGKEREFVATITGGTITNYADSVKGRFTISRDNAKNTVYLQMNSLKPEDTAVYYCAVEIDYRGSSYYIYTYWGQGTQVTVSS

SEQ ID NO: 32920 - protein, 118 aa, Artificial Sequence
  Chemically Synthesized
QVQLQESGGGLVQAGGSLRLSCAASGYISTDNVMGWYRQAPGKERELVAAIDDGTSTYYADSVKGRFTISRDNAKNTVYLQMNSLKPEDTAVYYCAAEGGYDYPYYYWGQGTQVTVSS

SEQ ID NO: 32921 - protein, 118 aa, Artificial Sequence
  Chemically Synthesized
QVQLQESGGGLVQAGGSLRLSCAASGSIFGLFYMGWYRQAPGKERELVAAIAYGSTTNYADSVKGRFTISRDNAKNTVYLQMNSLKPEDTAVYYCAVYLKKDTAFRYWGQGTQVTVSS

SEQ ID NO: 32922 - protein, 122 aa, Artificial Sequence
  Chemically Synthesized
QVQLQESGGGLVQAGGSLRLSCAASGSIFAPKYMGWYRQAPGKERELVAAINRGSTTYYADSVKGRFTISRDNAKNTVYLQMNSLKPEDTAVYYCAVELSPSYYKGYILTYWGQGTQVTVSS

SEQ ID NO: 32923 - protein, 121 aa, Artificial Sequence
  Chemically Synthesized
QVQLQESGGGLVQAGGSLRLSCAASGNISFATMGWYRQAPGKEREFVATITPGATTNYADSVKGRFTISRDNAKNTVYLQMNSLKPEDTAVYYCAALYTAYQDFTRAYWYWGQGTQVTVSS

SEQ ID NO: 32924 - protein, 118 aa, Artificial Sequence
  Chemically Synthesized
QVQLQESGGGLVQAGGSLRLSCAASGSIFYDANMGWYRQAPGKEREFVASIADGASTYYADSVKGRFTISRDNAKNTVYLQMNSLKPEDTAVYYCAVDNRTAYYHDYWGQGTQVTVSS

SEQ ID NO: 32925 - protein, 122 aa, Artificial Sequence
  Chemically Synthesized
QVQLQESGGGLVQAGGSLRLSCAASGYIFGKLEMGWYRQAPGKERELVATINSGSITNYADSVKGRFTISRDNAKNTVYLQMNSLKPEDTAVYYCAVVYWRTSPLLGLHWYWGQGTQVTVSS

SEQ ID NO: 32926 - protein, 126 aa, Artificial Sequence
  Chemically Synthesized
QVQLQESGGGLVQAGGSLRLSCAASGTISYYRNMGWYRQAPGKEREFVAAITRGASTYYADSVKGRFTISRDNAKNTVYLQMNSLKPEDTAVYYCAAIIWQGDQRQFNRGGDFDYWGQGTQVTVSS

SEQ ID NO: 32927 - protein, 126 aa, Artificial Sequence
  Chemically Synthesized
QVQLQESGGGLVQAGGSLRLSCAASGNIFSRGYMGWYRQAPGKEREFVAGIGLGGSTNYADSVKGRFTISRDNAKNTVYLQMNSLKPEDTAVYYCAAKRWKYGNSNDRWRYRLDYWGQGTQVTVSS

SEQ ID NO: 32928 - protein, 118 aa, Artificial Sequence
  Chemically Synthesized
QVQLQESGGGLVQAGGSLRLSCAASGYISYYYWMGWYRQAPGKEREFVASINYGSNTYYADSVKGRFTISRDNAKNTVYLQMNSLKPEDTAVYYCAATTYWYYWYYYWGQGTQVTVSS

SEQ ID NO: 32929 - protein, 119 aa, Artificial Sequence
  Chemically Synthesized
QVQLQESGGGLVQAGGSLRLSCAASGNILLLTMGWYRQAPGKERELVATRRWYYLYADSVKGRFTISRDNAKNTVYLQMNSLKPEDTAVYYCAVTSWYQGWFSRPYDYWGQGTQVTVSS

SEQ ID NO: 32930 - protein, 108 aa, Artificial Sequence
  Chemically Synthesized
QVQLQESGGGLVQAGGSLRLSCAASGNISLYVHMGWYRQAPGKERELPYADSVKGRFTISRDNAKNTVYLQMNSLKPEDTAVYYCAVGPDGIDTLSYWGQGTQVTVSS

SEQ ID NO: 32931 - protein, 126 aa, Artificial Sequence
  Chemically Synthesized
QVQLQESGGGLVQAGGSLRLSCAASGNISQVANMGWYRQAPGKEREFVAAIASGGTTYYADSVKGRFTISRDNAKNTVYLQMNSLKPEDTAVYYCAVLTPYNSTRAVLGRVDYRYWGQGTQVTVSS

SEQ ID NO: 32932 - protein, 126 aa, Artificial Sequence
  Chemically Synthesized
QVQLQESGGGLVQAGGSLRLSCAASGYISGFFDMGWYRQAPGKERELVASIGDGANTNYADSVKGRFTISRDNAKNTVYLQMNSLKPEDTAVYYCAVDWSYEWWPRESWAAEHGYWGQGTQVTVSS

SEQ ID NO: 32933 - protein, 118 aa, Artificial Sequence
  Chemically Synthesized
QVQLQESGGGLVQAGGSLRLSCAASGYISYYRRMGWYRQAPGKEREFVASIARGTTTYYADSVKGRFTISRDNAKNTVYLQMNSLKPEDTAVYYCAAGYDHRYLHGYWGQGTQVTVSS

SEQ ID NO: 32934 - protein, 122 aa, Artificial Sequence
  Chemically Synthesized
QVQLQESGGGLVQAGGSLRLSCAASGTISYRDVMGWYRQAPGKERELVAAITPGSITNYADSVKGRFTISRDNAKNTVYLQMNSLKPEDTAVYYCAAVPYTGYVSQGTLIYWGQGTQVTVSS

SEQ ID NO: 32935 - protein, 121 aa, Artificial Sequence
  Chemically Synthesized
QVQLQESGGGLVQAGGSLRLSCAASGNIFLYIHMGWYRQAPGKERELVASIDLGTNTYYADSVKGRFTISRDNAKNTVYLQMNSLKPEDTAVYYCAAYTYSYWYLPVHTYWGQGTQVTVSS

SEQ ID NO: 32936 - protein, 115 aa, Artificial Sequence
  Chemically Synthesized
QVQLQESGGGLVQAGGSLRLSCAASGTIFADIQMGWYRQAPGKEREFVAAINIGSNTNYADSVKGRFTISRDNAKNTVYLQMNSLKPEDTAVYYCAVTVLSVTYWGQGTQVTVSS

SEQ ID NO: 32937 - protein, 118 aa, Artificial Sequence
  Chemically Synthesized
QVQLQESGGGLVQAGGSLRLSCAASGNIFEYDLMGWYRQAPGKERELVASIDIGTITNYADSVKGRFTISRDNAKNTVYLQMNSLKPEDTAVYYCAVYKYNVFKFGYWGQGTQVTVSS

SEQ ID NO: 32938 - protein, 121 aa, Artificial Sequence
  Chemically Synthesized
QVQLQESGGGLVQAGGSLRLSCAASGTISQSGSMGWYRQAPGKERELVASINYGSITNYADSVKGRFTISRDNAKNTVYLQMNSLKPEDTAVYYCAADRGRSLTTLFLMYWGQGTQVTVSS

SEQ ID NO: 32939 - protein, 118 aa, Artificial Sequence
  Chemically Synthesized
QVQLQESGGGLVQAGGSLRLSCAASGYIFWYKGMGWYRQAPGKEREFVAAISWGSSTNYADSVKGRFTISRDNAKNTVYLQMNSLKPEDTAVYYCAVYAAWGRKLHYWGQGTQVTVSS

SEQ ID NO: 32940 - protein, 117 aa, Artificial Sequence
  Chemically Synthesized
QVQLQESGGGLVQAGGSLRLSCAASGYIFSLVMGWYRQAPGKEREFVAGIDDGSNTNYADSVKGRFTISRDNAKNTVYLQMNSLKPEDTAVYYCAAWYDTPYYHLYWGQGTQVTVSS

SEQ ID NO: 32941 - protein, 118 aa, Artificial Sequence
  Chemically Synthesized
QVQLQESGGGLVQAGGSLRLSCAASGYIFYPVLMGWYRQAPGKEREFVAAISYGTSTYYADSVKGRFTISRDNAKNTVYLQMNSLKPEDTAVYYCAADYWSVYVYSYWGQGTQVTVSS

SEQ ID NO: 32942 - protein, 122 aa, Artificial Sequence
  Chemically Synthesized
QVQLQESGGGLVQAGGSLRLSCAASGSISTAHEMGWYRQAPGKERELVAAITYGGSTYYADSVKGRFTISRDNAKNTVYLQMNSLKPEDTAVYYCAVYTYRGEGRTVYYTYWGQGTQVTVSS

SEQ ID NO: 32943 - protein, 118 aa, Artificial Sequence
  Chemically Synthesized
QVQLQESGGGLVQAGGSLRLSCAASGTIFVGVYMGWYRQAPGKERELVAGITPGGITYYADSVKGRFTISRDNAKNTVYLQMNSLKPEDTAVYYCAVRVHNYGWHDYWGQGTQVTVSS

SEQ ID NO: 32944 - protein, 126 aa, Artificial Sequence
  Chemically Synthesized
QVQLQESGGGLVQAGGSLRLSCAASGNIFSHRNMGWYRQAPGKERELVAGISDGANTYYADSVKGRFTISRDNAKNTVYLQMNSLKPEDTAVYYCAAHEDYGYFDYYERRRGHYYWGQGTQVTVSS

SEQ ID NO: 32945 - protein, 118 aa, Artificial Sequence
  Chemically Synthesized
QVQLQESGGGLVQAGGSLRLSCAASGSISSGHSMGWYRQAPGKERELVAAIASGGTTYYADSVKGRFTISRDNAKNTVYLQMNSLKPEDTAVYYCAADWLYGWFFLYWGQGTQVTVSS

SEQ ID NO: 32946 - protein, 118 aa, Artificial Sequence
  Chemically Synthesized
QVQLQESGGGLVQAGGSLRLSCAASGNISRTYHMGWYRQAPGKEREFVAGISQGGTTYYADSVKGRFTISRDNAKNTVYLQMNSLKPEDTAVYYCAAYYVDYWYFNYWGQGTQVTVSS

SEQ ID NO: 32947 - protein, 110 aa, Artificial Sequence
  Chemically Synthesized
QVQLQESGGGLVQAGGSLRLSCAASGTISAGGQLMGWYRQAPGKERELVAGISTVVLPYADSVKGRFTISRDNAKNTVYLQMNSLKPEDTAVYYCAVGYWGQGTQVTVSS

SEQ ID NO: 32948 - protein, 116 aa, Artificial Sequence
  Chemically Synthesized
QVQLQESGGGLVQAGGSLRLSCAASGCMGWYRQAPGKERELVATISVGGTTNYADSVKGRFTISRDNAKNTVYLQMNSLKPEDTAVYYCAVKVVLLAGVDGIYDYWGQGTQVTVSS

SEQ ID NO: 32949 - protein, 118 aa, Artificial Sequence
  Chemically Synthesized
QVQLQESGGGLVQAGGSLRLSCAASGSISADSRMGWYRQAPGKERELVAAIAVGAITNYADSVKGRFTISRDNAKNTVYLQMNSLKPEDTAVYYCAVGSYYRVDHTYWGQGTQVTVSS

SEQ ID NO: 32950 - protein, 122 aa, Artificial Sequence
  Chemically Synthesized
QVQLQESGGGLVQAGGSLRLSCAASGSIFSSYDMGWYRQAPGKEREFVATISRGAITYYADSVKGRFTISRDNAKNTVYLQMNSLKPEDTAVYYCAAFTYPSVPIYLQHSYWGQGTQVTVSS

SEQ ID NO: 32951 - protein, 117 aa, Artificial Sequence
  Chemically Synthesized
QVQLQESGGGLVQAGGSLRLSCAASGTISVYDPMGWYRQAPGKEREFVAGIGRGTNTYADSVKGRFTISRDNAKNTVYLQMNSLKPEDTAVYYCAAGTYGDNFLQYWGQGTQVTVSS

SEQ ID NO: 32952 - protein, 122 aa, Artificial Sequence
  Chemically Synthesized
QVQLQESGGGLVQAGGSLRLSCAASGSISEQWRMGWYRQAPGKERELVAGIGYGTNTNYADSVKGRFTISRDNAKNTVYLQMNSLKPEDTAVYYCAVQQNYYGVRYRQFRYWGQGTQVTVSS

SEQ ID NO: 32953 - protein, 126 aa, Artificial Sequence
  Chemically Synthesized
QVQLQESGGGLVQAGGSLRLSCAASGNIFQPRIMGWYRQAPGKEREFVATINYGANTNYADSVKGRFTISRDNAKNTVYLQMNSLKPEDTAVYYCAVDHKYAYATLVGSNYEHTYWGQGTQVTVSS

SEQ ID NO: 32954 - protein, 122 aa, Artificial Sequence
  Chemically Synthesized
QVQLQESGGGLVQAGGSLRLSCAASGNISADVWMGWYRQAPGKERELVAAITSGGNTNYADSVKGRFTISRDNAKNTVYLQMNSLKPEDTAVYYCAVYVFPGDVAYPRYYYWGQGTQVTVSS

SEQ ID NO: 32955 - protein, 118 aa, Artificial Sequence
  Chemically Synthesized
QVQLQESGGGLVQAGGSLRLSCAASGNIFRLFDMGWYRQAPGKERELVASIAPGSITNYADSVKGRFTISRDNAKNTVYLQMNSLKPEDTAVYYCAVYPDRYLDLYYWGQGTQVTVSS

SEQ ID NO: 32956 - protein, 118 aa, Artificial Sequence
  Chemically Synthesized
QVQLQESGGGLVQAGGSLRLSCAASGTIFQNYYMGWYRQAPGKEREFVASIGPGTNTNYADSVKGRFTISRDNAKNTVYLQMNSLKPEDTAVYYCAVGDDYFVPLGYWGQGTQVTVSS

SEQ ID NO: 32957 - protein, 118 aa, Artificial Sequence
  Chemically Synthesized
QVQLQESGGGLVQAGGSLRLSCAASGTISYYYDMGWYRQAPGKERELVAGITGGAITNYADSVKGRFTISRDNAKNTVYLQMNSLKPEDTAVYYCAVGWARRQPYSYWGQGTQVTVSS

SEQ ID NO: 32958 - protein, 125 aa, Artificial Sequence
  Chemically Synthesized
QVQLQESGGGLVQAGGSLRLSCAASGYILLLGMGWYRQAPGKEREFVASISYGSNTYYADSVKGRFTISRDNAKNTVYLQMNSLKPEDTAVYYCAADLEYGYIPTLEVYIPHWYWGQGTQVTVSS

SEQ ID NO: 32959 - protein, 118 aa, Artificial Sequence
  Chemically Synthesized
QVQLQESGGGLVQAGGSLRLSCAASGTIFWGSYMGWYRQAPGKERELVAGIGDGSNTNYADSVKGRFTISRDNAKNTVYLQMNSLKPEDTAVYYCAVAGVDVPDHEYWGQGTQVTVSS

SEQ ID NO: 32960 - protein, 126 aa, Artificial Sequence
  Chemically Synthesized
QVQLQESGGGLVQAGGSLRLSCAASGTISSGPFMGWYRQAPGKEREFVASIAQGSSTYYADSVKGRFTISRDNAKNTVYLQMNSLKPEDTAVYYCAVAINTYRYFYTGGWVRLYYWGQGTQVTVSS

SEQ ID NO: 32961 - protein, 118 aa, Artificial Sequence
  Chemically Synthesized
QVQLQESGGGLVQAGGSLRLSCAASGSIFGGIYMGWYRQAPGKEREFVASITTGGTTNYADSVKGRFTISRDNAKNTVYLQMNSLKPEDTAVYYCAVRIPERSDYAYWGQGTQVTVSS

SEQ ID NO: 32962 - protein, 118 aa, Artificial Sequence
  Chemically Synthesized
QVQLQESGGGLVQAGGSLRLSCAASGTIFYSRRMGWYRQAPGKERELVATIGQGTTTYYADSVKGRFTISRDNAKNTVYLQMNSLKPEDTAVYYCAAYPYATDRFDYWGQGTQVTVSS

SEQ ID NO: 32963 - protein, 122 aa, Artificial Sequence
  Chemically Synthesized
QVQLQESGGGLVQAGGSLRLSCAASGYIFPYDWMGWYRQAPGKERELVATIDQGANTNYADSVKGRFTISRDNAKNTVYLQMNSLKPEDTAVYYCAVYLTSIDSPGYYLTYWGQGTQVTVSS

SEQ ID NO: 32964 - protein, 110 aa, Artificial Sequence
  Chemically Synthesized
QVQLQESGGGLVQAGGSLRLSCAASGNIFPTSYMGWYRQAPGKEREFVATINVGTSTNYADSVKGRFTISRDNAKNTVYLQMNSLKPEDTAVYYCALDYWGQGTQVTVSS

SEQ ID NO: 32965 - protein, 118 aa, Artificial Sequence
  Chemically Synthesized
QVQLQESGGGLVQAGGSLRLSCAASGSISRDRVMGWYRQAPGKEREFVASITAGTITNYADSVKGRFTISRDNAKNTVYLQMNSLKPEDTAVYYCAVAAEGDHDHSYWGQGTQVTVSS

SEQ ID NO: 32966 - protein, 118 aa, Artificial Sequence
  Chemically Synthesized
QVQLQESGGGLVQAGGSLRLSCAASGYIFRVPTMGWYRQAPGKEREFVAAIATGGITYYADSVKGRFTISRDNAKNTVYLQMNSLKPEDTAVYYCAAIGGRINHYRYWGQGTQVTVSS

SEQ ID NO: 32967 - protein, 118 aa, Artificial Sequence
  Chemically Synthesized
QVQLQESGGGLVQAGGSLRLSCAASGSISTYIQMGWYRQAPGKERELVATIAIGTITNYADSVKGRFTISRDNAKNTVYLQMNSLKPEDTAVYYCAAAGYPYVLLPYWGQGTQVTVSS

SEQ ID NO: 32968 - protein, 122 aa, Artificial Sequence
  Chemically Synthesized
QVQLQESGGGLVQAGGSLRLSCAASGNISTTDYMGWYRQAPGKEREFVAAINYGAITNYADSVKGRFTISRDNAKNTVYLQMNSLKPEDTAVYYCAVHWYDYLVSALRYYYWGQGTQVTVSS

SEQ ID NO: 32969 - protein, 118 aa, Artificial Sequence
  Chemically Synthesized
QVQLQESGGGLVQAGGSLRLSCAASGLFLSLLMGWYRQAPGKEREFVAGISAGSNTNYADSVKGRFTISRDNAKNTVYLQMNSLKPEDTAVYYCALLLTTLTTTLLYWGQGTQVTVSS

SEQ ID NO: 32970 - protein, 111 aa, Artificial Sequence
  Chemically Synthesized
QVQLQESGGGLVQAGGSLRLSCAASGYIFDSYNMGWYRQAPGKERELVATIAYGSSTNYADSVKGRFTISRDNAKNTVYLQMNSLKPEDTAVYYCAALTYWGQGTQVTVSS

SEQ ID NO: 32971 - protein, 127 aa, Artificial Sequence
  Chemically Synthesized
QVQLQESGGGLVQAGGSLRLSCAASGSIFWTSPMGWYRQAPGKERELVATITRGATTNYADSVKGRFTISRDNAKNTVYLQMNSLKPEDTAVYYCAVFAYGTETHYLRVAYYSYGYWGQGTQVTVSS

SEQ ID NO: 32972 - protein, 112 aa, Artificial Sequence
  Chemically Synthesized
QVQLQESGGGLVQAGGSLRLSCAASGYISLYANMGWYRQAPGKEREFVATISAGANTNYADSVKGRFTISRDNAKNTVYLQMNSLKPEDTAVYYCAVPETYWGQGTQVTVSS

SEQ ID NO: 32973 - protein, 121 aa, Artificial Sequence
  Chemically Synthesized
QVQLQESGGGLVQAGGSLRLSCAASGSISGLDLMGWYRQAPGKEREFVAAITAGSSTYYADSVKGRFTISRDNAKNTVYLQMNSLKPEDTAVYYCAAVPWSSTTNCVRIYWGQGTQVTVSS

SEQ ID NO: 32974 - protein, 120 aa, Artificial Sequence
  Chemically Synthesized
QVQLQESGGGLVQAGGSLRLSCAASGSISAYRDMGWYRQAPGKEREFVASITLGASTYYADSVKGRFTISRDNAKNTVYLQMNSLKPEDTAVYYCATKRYGGDGAAYEYWGQGTQVTVSS

SEQ ID NO: 32975 - protein, 122 aa, Artificial Sequence
  Chemically Synthesized
QVQLQESGGGLVQAGGSLRLSCAASGNISTGYYMGWYRQAPGKEREFVAAIALGGTTNYADSVKGRFTISRDNAKNTVYLQMNSLKPEDTAVYYCAVGQNDYYFEDDYLDYWGQGTQVTVSS

SEQ ID NO: 32976 - protein, 121 aa, Artificial Sequence
  Chemically Synthesized
QVQLQESGGGLVQAGGSLRLSCAASGNIFSLTMGWYRQAPGKEREFVATIAYGTTTNYADSVKGRFTISRDNAKNTVYLQMNSLKPEDTAVYYCAADRDDPRNGYYWLSYWGQGTQVTVSS

SEQ ID NO: 32977 - protein, 118 aa, Artificial Sequence
  Chemically Synthesized
QVQLQESGGGLVQAGGSLRLSCAASGSISRGDFMGWYRQAPGKEREFVATITAGGTTYYADSVKGRFTISRDNAKNTVYLQMNSLKPEDTAVYYCAAVYAGDEDHFYWGQGTQVTVSS

SEQ ID NO: 32978 - protein, 118 aa, Artificial Sequence
  Chemically Synthesized
QVQLQESGGGLVQAGGSLRLSCAASGTISGNRDMGWYRQAPGKEREFVATISIGGSTYYADSVKGRFTISRDNAKNTVYLQMNSLKPEDTAVYYCAVYRGYDPDFTYWGQGTQVTVSS

SEQ ID NO: 32979 - protein, 121 aa, Artificial Sequence
  Chemically Synthesized
QVQLQESGGGLVQAGGSLRLSCAASGSISLGSDMGWYRQAPGKERELVASIAYGSSTNYADSVKGRFTISRDNAKNTVYLQMNSLKPEDTAVYYCAVYWRLGALTTTTFYWGQGTQVTVSS

SEQ ID NO: 32980 - protein, 118 aa, Artificial Sequence
  Chemically Synthesized
QVQLQESGGGLVQAGGSLRLSCAASGTIFPIRYMGWYRQAPGKERELVASIADGGTTYYADSVKGRFTISRDNAKNTVYLQMNSLKPEDTAVYYCAVTLWPVWPLLYWGQGTQVTVSS

SEQ ID NO: 32981 - protein, 122 aa, Artificial Sequence
  Chemically Synthesized
QVQLQESGGGLVQAGGSLRLSCAASGYIFPSPYMGWYRQAPGKERELVAAIGPGTITYYADSVKGRFTISRDNAKNTVYLQMNSLKPEDTAVYYCAVRVYSYSVALSYHEYWGQGTQVTVSS

SEQ ID NO: 32982 - protein, 125 aa, Artificial Sequence
  Chemically Synthesized
QVQLQESGGGLVQAGGSLRLSCAASGYISYELGMGWYRQAPGKERELVATIGKGSTTYADSVKGRFTISRDNAKNTVYLQMNSLKPEDTAVYYCAAYISGDDWGYDFYAYPHAYWGQGTQVTVSS

SEQ ID NO: 32983 - protein, 121 aa, Artificial Sequence
  Chemically Synthesized
QVQLQESGGGLVQAGGSLRLSCAASGSIFALIAMGWYRQAPGKERELVATIAHGSNTYYADSVKGRFTISRDNAKNTVYLQMNSLKPEDTAVYYCAFTTRVRVLTTTTIYWGQGTQVTVSS

SEQ ID NO: 32984 - protein, 122 aa, Artificial Sequence
  Chemically Synthesized
QVQLQESGGGLVQAGGSLRLSCAASGYIFQGLRMGWYRQAPGKERELVAGIDNGSTTNYADSVKGRFTISRDNAKNTVYLQMNSLKPEDTAVYYCAARDYTDPNIHWDHDYWGQGTQVTVSS

SEQ ID NO: 32985 - protein, 126 aa, Artificial Sequence
  Chemically Synthesized
QVQLQESGGGLVQAGGSLRLSCAASGYISPRRYMGWYRQAPGKERELVASISYGSSTNYADSVKGRFTISRDNAKNTVYLQMNSLKPEDTAVYYCAADGYDRYVGLDWLDYEFDYWGQGTQVTVSS

SEQ ID NO: 32986 - protein, 117 aa, Artificial Sequence
  Chemically Synthesized
QVQLQESGGGLVQAGGSLRLSCAASGSISRRDHMGWYRQAPGKEREFVPVLVTVVVPYADSVKGRFTISRDNAKNTVYLQMNSLKPEDTAVYYCAVRPLSTWWHGYWGQGTQVTVSS

SEQ ID NO: 32987 - protein, 125 aa, Artificial Sequence
  Chemically Synthesized
QVQLQESGGGLVQAGGSLRLSCAASGYISLYTSMGWYRQAPGKERELVATIGGGITNYADSVKGRFTISRDNAKNTVYLQMNSLKPEDTAVYYCAVSYWDPRYNPVYAVIWYYYWGQGTQVTVSS

SEQ ID NO: 32988 - protein, 122 aa, Artificial Sequence
  Chemically Synthesized
QVQLQESGGGLVQAGGSLRLSCAASGTIFAYGTMGWYRQAPGKEREFVATIASGAITNYADSVKGRFTISRDNAKNTVYLQMNSLKPEDTAVYYCAVPYNTPYIYDSLFSYWGQGTQVTVSS

SEQ ID NO: 32989 - protein, 126 aa, Artificial Sequence
  Chemically Synthesized
QVQLQESGGGLVQAGGSLRLSCAASGSISDWYAMGWYRQAPGKEREFVATISDGAITYYADSVKGRFTISRDNAKNTVYLQMNSLKPEDTAVYYCAVDATKPRRTDRRYQYLLAYWGQGTQVTVSS

SEQ ID NO: 32990 - protein, 121 aa, Artificial Sequence
  Chemically Synthesized
QVQLQESGGGLVQAGGSLRLSCAASGNIFYDDFMGWYRQAPGKEREFVASIDYGGSTNYADSVKGRFTISRDNAKNTVYLQMNSLKPEDTAVYYCAVPYDESIDTTRCIYWGQGTQVTVSS

SEQ ID NO: 32991 - protein, 122 aa, Artificial Sequence
  Chemically Synthesized
QVQLQESGGGLVQAGGSLRLSCAASGNIFRTDFMGWYRQAPGKEREFVATINSGTTTYYADSVKGRFTISRDNAKNTVYLQMNSLKPEDTAVYYCAVGTRNGIDHAYEHTYWGQGTQVTVSS

SEQ ID NO: 32992 - protein, 118 aa, Artificial Sequence
  Chemically Synthesized
QVQLQESGGGLVQAGGSLRLSCAASGNISPITFMGWYRQAPGKEREFVAGIDYGSNTYYADSVKGRFTISRDNAKNTVYLQMNSLKPEDTAVYYCAADLGGATSLDYWGQGTQVTVSS

SEQ ID NO: 32993 - protein, 122 aa, Artificial Sequence
  Chemically Synthesized
QVQLQESGGGLVQAGGSLRLSCAASGTIFDSKYMGWYRQAPGKEREFVATIARGTSTNYADSVKGRFTISRDNAKNTVYLQMNSLKPEDTAVYYCAARGTPYYYPGAGFTYWGQGTQVTVSS

SEQ ID NO: 32994 - protein, 118 aa, Artificial Sequence
  Chemically Synthesized
QVQLQESGGGLVQAGGSLRLSCAASGYIFNVYTMGWYRQAPGKEREFVASIAYGANTNYADSVKGRFTISRDNAKNTVYLQMNSLKPEDTAVYYCAADDTTYSSFTYWGQGTQVTVSS

SEQ ID NO: 32995 - protein, 122 aa, Artificial Sequence
  Chemically Synthesized
QVQLQESGGGLVQAGGSLRLSCAASGNISVLGTMGWYRQAPGKEREFVASISGGSSTNYADSVKGRFTISRDNAKNTVYLQMNSLKPEDTAVYYCALYVNDSYYQDGYYDYWGQGTQVTVSS

SEQ ID NO: 32996 - protein, 126 aa, Artificial Sequence
  Chemically Synthesized
QVQLQESGGGLVQAGGSLRLSCAASGYIFDYKLMGWYRQAPGKEREFVATINIGGTTNYADSVKGRFTISRDNAKNTVYLQMNSLKPEDTAVYYCAAYPRDNLYVVYVRAVGHLYWGQGTQVTVSS

SEQ ID NO: 32997 - protein, 121 aa, Artificial Sequence
  Chemically Synthesized
QVQLQESGGGLVQAGGSLRLSCAASGYISTNGAMGWYRQAPGKEREFVAGIDPVLIPYADSVKGRFTISRDNAKNTVYLQMNSLKPEDTAVYYCAAYHNVQAYTRYSHYYWGQGTQVTVSS

SEQ ID NO: 32998 - protein, 126 aa, Artificial Sequence
  Chemically Synthesized
QVQLQESGGGLVQAGGSLRLSCAASGTISNYPDMGWYRQAPGKERELVASISLGANTYYADSVKGRFTISRDNAKNTVYLQMNSLKPEDTAVYYCAATATDYRTLLNGDPTQFVYWGQGTQVTVSS

SEQ ID NO: 32999 - protein, 126 aa, Artificial Sequence
  Chemically Synthesized
QVQLQESGGGLVQAGGSLRLSCAASGSISDIKSMGWYRQAPGKEREFVASIDFGGITNYADSVKGRFTISRDNAKNTVYLQMNSLKPEDTAVYYCAAYSYYYLPLEGTAVYVHDYWGQGTQVTVSS

SEQ ID NO: 33000 - protein, 117 aa, Artificial Sequence
  Chemically Synthesized
QVQLQESGGGLVQAGGSLRLSCAASGTIFTFDRMGWYRQAPGKEREFVAGITDGTITNYADSVKGRFTISRDNAKNTVYLQMNSLKPEDTAVYYCAAIRGYDDNLYWGQGTQVTVSS

SEQ ID NO: 33001 - protein, 116 aa, Artificial Sequence
  Chemically Synthesized
QVQLQESGGGLVQAGGSLRLSCAASGSIFQPYGMGWYRQAPGKERELVASIGTGANTNYADSVKGRFTISRDNAKNTVYLQMNSLKPEDTAVYYCAAGVTPPFTYWGQGTQVTVSS

SEQ ID NO: 33002 - protein, 111 aa, Artificial Sequence
  Chemically Synthesized
QVQLQESGGGLVQAGGSLRLSCAASGSIFDPHTMGWYRQAPGKEREFVAAITYGANTNYADSVKGRFTISRDNAKNTVYLQMNSLKPEDTAVYYCATHGYWGQGTQVTVSS

SEQ ID NO: 33003 - protein, 117 aa, Artificial Sequence
  Chemically Synthesized
QVQLQESGGGLVQAGGSLRLSCAASGSISRDPMGWYRQAPGKERELVAAIASGGSTNYADSVKGRFTISRDNAKNTVYLQMNSLKPEDTAVYYCAVYYGGNFLLGYWGQGTQVTVSS

SEQ ID NO: 33004 - protein, 118 aa, Artificial Sequence
  Chemically Synthesized
QVQLQESGGGLVQAGGSLRLSCAASGSISPIGIMGWYRQAPGKEREFVASITVGGITNYADSVKGRFTISRDNAKNTVYLQMNSLKPEDTAVYYCAAAGGVPYTYGYWGQGTQVTVSS

SEQ ID NO: 33005 - protein, 122 aa, Artificial Sequence
  Chemically Synthesized
QVQLQESGGGLVQAGGSLRLSCAASGTIFDSQDMGWYRQAPGKERELVATIGRGSTTNYADSVKGRFTISRDNAKNTVYLQMNSLKPEDTAVYYCAVTDGGALNRIDVHPYWGQGTQVTVSS

SEQ ID NO: 33006 - protein, 120 aa, Artificial Sequence
  Chemically Synthesized
QVQLQESGGGLVQAGGSLRLSCAASGYISNRPLMGWYRQAPGKERELVAAIAYGGSTYYADSVKGRFTISRDNAKNTVYLQMNSLKPEDTAVYYCAVAYLYYTDAPLIYWGQGTQVTVSS

SEQ ID NO: 33007 - protein, 118 aa, Artificial Sequence
  Chemically Synthesized
QVQLQESGGGLVQAGGSLRLSCAASGSISPADPMGWYRQAPGKERELVAGITGGGTTYYADSVKGRFTISRDNAKNTVYLQMNSLKPEDTAVYYCAAGYYVGYLFTYWGQGTQVTVSS

SEQ ID NO: 33008 - protein, 118 aa, Artificial Sequence
  Chemically Synthesized
QVQLQESGGGLVQAGGSLRLSCAASGTISGQRTMGWYRQAPGKEREFVATNCLRYYYLYADSVKGRFTISRDNAKNTVYLQMNSLKPEDTAVYYCAVPHRDYDYHRYWGQGTQVTVSS

SEQ ID NO: 33009 - protein, 122 aa, Artificial Sequence
  Chemically Synthesized
QVQLQESGGGLVQAGGSLRLSCAASGNISRYWVMGWYRQAPGKEREFVAGISSGTNTYYADSVKGRFTISRDNAKNTVYLQMNSLKPEDTAVYYCAVVRRVTRPALIGHPYWGQGTQVTVSS

SEQ ID NO: 33010 - protein, 113 aa, Artificial Sequence
  Chemically Synthesized
QVQLQESGGGLVQAGGSLRLSCAASGYIFRPDEMGWYRQAPGKERELVATIDYNYADSVKGRFTISRDNAKNTVYLQMNSLKPEDTAVYYCAAYAVDWTASYWGQGTQVTVSS

SEQ ID NO: 33011 - protein, 118 aa, Artificial Sequence
  Chemically Synthesized
QVQLQESGGGLVQAGGSLRLSCAASGTISEQDGMGWYRQAPGKERELVASITAGSITYYADSVKGRFTISRDNAKNTVYLQMNSLKPEDTAVYYCAVASPFRGSFGYWGQGTQVTVSS

SEQ ID NO: 33012 - protein, 122 aa, Artificial Sequence
  Chemically Synthesized
QVQLQESGGGLVQAGGSLRLSCAASGTISPRPDMGWYRQAPGKERELVAGIDYGSITNYADSVKGRFTISRDNAKNTVYLQMNSLKPEDTAVYYCAVDSYTPPSRVNDHQYWGQGTQVTVSS

SEQ ID NO: 33013 - protein, 118 aa, Artificial Sequence
  Chemically Synthesized
QVQLQESGGGLVQAGGSLRLSCAASGYISWDFYMGWYRQAPGKEREFVAGIAYGANTYYADSVKGRFTISRDNAKNTVYLQMNSLKPEDTAVYYCAVYQNRFGQHYYWGQGTQVTVSS

SEQ ID NO: 33014 - protein, 118 aa, Artificial Sequence
  Chemically Synthesized
QVQLQESGGGLVQAGGSLRLSCAASGNISPYIVMGWYRQAPGKERELVASITYGASTYYADSVKGRFTISRDNAKNTVYLQMNSLKPEDTAVYYCAVSRYFKYQHYYWGQGTQVTVSS

SEQ ID NO: 33015 - protein, 125 aa, Artificial Sequence
  Chemically Synthesized
QVQLQESGGGLVQAGGSLRLSCAASGSISYDSTMGWYRQAPGKERELVAAITSGSNTNYADSVKGRFTISRDNAKNTVYLQMNSLKPEDTAVYYCAVYRSTRPGLFAGTTTGIYWGQGTQVTVSS

SEQ ID NO: 33016 - protein, 118 aa, Artificial Sequence
  Chemically Synthesized
QVQLQESGGGLVQAGGSLRLSCAASGTISAYQPMGWYRQAPGKEREFVASISGGGTTNYADSVKGRFTISRDNAKNTVYLQMNSLKPEDTAVYYCAVDIWYSSDFLYWGQGTQVTVSS

SEQ ID NO: 33017 - protein, 118 aa, Artificial Sequence
  Chemically Synthesized
QVQLQESGGGLVQAGGSLRLSCAASGSISDRYNMGWYRQAPGKERELVATIDFGSSTYYADSVKGRFTISRDNAKNTVYLQMNSLKPEDTAVYYCAAVDAAEVGLPYWGQGTQVTVSS

SEQ ID NO: 33018 - protein, 118 aa, Artificial Sequence
  Chemically Synthesized
QVQLQESGGGLVQAGGSLRLSCAASGNIFSNGKMGWYRQAPGKEREFVATISTGTSTNYADSVKGRFTISRDNAKNTVYLQMNSLKPEDTAVYYCAVSSVSTDDYYYWGQGTQVTVSS

SEQ ID NO: 33019 - protein, 117 aa, Artificial Sequence
  Chemically Synthesized
QVQLQESGGGLVQAGGSLRLSCAASGTISAVGYMGWYRQAPGKEREFVAGINDGGTTYYADSVKGRFTISRDNAKNTVYLQMNSLKPEDTAVYYCAAYLPSYSTMYWGQGTQVTVSS

SEQ ID NO: 33020 - protein, 119 aa, Artificial Sequence
  Chemically Synthesized
QVQLQESGGGLVQAGGSLRLSCAASGNIFEDRNMGWYRQAPGKERELVASITRGGSTYYADSVKGRFTISRDNAKNTVYLQMNSLKPEDTAVYYCAAPYYRDVDVHRYWGQGTQVTVSS

SEQ ID NO: 33021 - protein, 122 aa, Artificial Sequence
  Chemically Synthesized
QVQLQESGGGLVQAGGSLRLSCAASGNISSYPIMGWYRQAPGKEREFVAAIDDGTNTYYADSVKGRFTISRDNAKNTVYLQMNSLKPEDTAVYYCAVSFYPGWTFYQYFAYWGQGTQVTVSS

SEQ ID NO: 33022 - protein, 117 aa, Artificial Sequence
  Chemically Synthesized
QVQLQESGGGLVQAGGSLRLSCAASGTISVGRSMGWYRQAPGKEREFVATINYGGNTNYADSVKGRFTISRDNAKNTVYLQMNSLKPEDTAVYYCALIPAWFRPLYWGQGTQVTVSS

SEQ ID NO: 33023 - protein, 117 aa, Artificial Sequence
  Chemically Synthesized
QVQLQESGGGLVQAGGSLRLSCAASGYIMGWYRQAPGKERELVATIGDGGTTYYADSVKGRFTISRDNAKNTVYLQMNSLKPEDTAVYYCAAELDGREIDVIGLEYWGQGTQVTVSS

SEQ ID NO: 33024 - protein, 123 aa, Artificial Sequence
  Chemically Synthesized
QVQLQESGGGLVQAGGSLRLSCAASGYISRAGRMGWYRQAPGKERELVAAISYGSTTYYADSVKGRFTISRDNAKNTVYLQMNSLKPEDTAVYYCAPVYTDITYASSTTTMYWGQGTQVTVSS

SEQ ID NO: 33025 - protein, 122 aa, Artificial Sequence
  Chemically Synthesized
QVQLQESGGGLVQAGGSLRLSCAASGTISISRYMGWYRQAPGKEREFVAGITVGSITNYADSVKGRFTISRDNAKNTVYLQMNSLKPEDTAVYYCAAPVQDPIRSDVPLLYWGQGTQVTVSS

SEQ ID NO: 33026 - protein, 117 aa, Artificial Sequence
  Chemically Synthesized
QVQLQESGGGLVQAGGSLRLSCAASGTISDSYLMGWYRQAPGKEREFVAAITKGSTTNYADSVKGRFTISRDNAKNTVYLQMNSLKPEDTAVYYCAVGYRFYEHVYWGQGTQVTVSS

SEQ ID NO: 33027 - protein, 122 aa, Artificial Sequence
  Chemically Synthesized
QVQLQESGGGLVQAGGSLRLSCAASGSIFDWFIMGWYRQAPGKEREFVAGINTGGTTYYADSVKGRFTISRDNAKNTVYLQMNSLKPEDTAVYYCAVDYLFTAYTPRHHIYWGQGTQVTVSS

SEQ ID NO: 33028 - protein, 118 aa, Artificial Sequence
  Chemically Synthesized
QVQLQESGGGLVQAGGSLRLSCAASGNIFEYYTMGWYRQAPGKEREFVASINYGSSTYYADSVKGRFTISRDNAKNTVYLQMNSLKPEDTAVYYCAVGYDQHRLHDYWGQGTQVTVSS

SEQ ID NO: 33029 - protein, 117 aa, Artificial Sequence
  Chemically Synthesized
QVQLQESGGGLVQAGGSLRLSCAASGNIFYFASMGWYRQAPGKEREFVAGITFGSITYYADSVKGRFTISRDNAKNTVYLQMNSLKPEDTAVYYCAVAYWLPLLTYWGQGTQVTVSS

SEQ ID NO: 33030 - protein, 118 aa, Artificial Sequence
  Chemically Synthesized
QVQLQESGGGLVQAGGSLRLSCAASGYISGLDAMGWYRQAPGKEREFVATIDQGGTTYYADSVKGRFTISRDNAKNTVYLQMNSLKPEDTAVYYCAVYFALYRSFWYWGQGTQVTVSS

SEQ ID NO: 33031 - protein, 126 aa, Artificial Sequence
  Chemically Synthesized
QVQLQESGGGLVQAGGSLRLSCAASGYISQYGAMGWYRQAPGKEREFVASITYGGNTYYADSVKGRFTISRDNAKNTVYLQMNSLKPEDTAVYYCAVYDRHRHWGYRYDEYQLYYWGQGTQVTVSS

SEQ ID NO: 33032 - protein, 126 aa, Artificial Sequence
  Chemically Synthesized
QVQLQESGGGLVQAGGSLRLSCAASGNIFGRWYMGWYRQAPGKEREFVATISAGTSTYYADSVKGRFTISRDNAKNTVYLQMNSLKPEDTAVYYCAADDGWSQVWYRESYVSHEYWGQGTQVTVSS

SEQ ID NO: 33033 - protein, 118 aa, Artificial Sequence
  Chemically Synthesized
QVQLQESGGGLVQAGGSLRLSCAASGTISGAGDMGWYRQAPGKERELVAGIDHGSNTNYADSVKGRFTISRDNAKNTVYLQMNSLKPEDTAVYYCAALEGDHYPFYYWGQGTQVTVSS

SEQ ID NO: 33034 - protein, 117 aa, Artificial Sequence
  Chemically Synthesized
QVQLQESGGGLVQAGGSLRLSCAASGNIFTLAAMGWYRQAPGKEREFVAAIGPGTNTNYADSVKGRFTISRDNAKNTVYLQMNSLKPEDTAVYYCAASLSSCCRMYWGQGTQVTVSS

SEQ ID NO: 33035 - protein, 113 aa, Artificial Sequence
  Chemically Synthesized
QVQLQESGGGLVQAGGSLRLSCAASGSISSQDGMGWYRQAPGKERELVPVLVTVVIPYADSVKGRFTISRDNAKNTVYLQMNSLKPEDTAVYYCAPYYSDFYWGQGTQVTVSS

SEQ ID NO: 33036 - protein, 122 aa, Artificial Sequence
  Chemically Synthesized
QVQLQESGGGLVQAGGSLRLSCAASGNISPGTYMGWYRQAPGKEREFVASITYGGSTYYADSVKGRFTISRDNAKNTVYLQMNSLKPEDTAVYYCAVGDNLPQYDYHALYYWGQGTQVTVSS

SEQ ID NO: 33037 - protein, 118 aa, Artificial Sequence
  Chemically Synthesized
QVQLQESGGGLVQAGGSLRLSCAASGTIFVTTAMGWYRQAPGKEREFVAAIAAGATTNYADSVKGRFTISRDNAKNTVYLQMNSLKPEDTAVYYCAVVVHNLRFYAYWGQGTQVTVSS

SEQ ID NO: 33038 - protein, 121 aa, Artificial Sequence
  Chemically Synthesized
QVQLQESGGGLVQAGGSLRLSCAASGNISAYIYMGWYRQAPGKEREFVAAIAYGSNTYYADSVKGRFTISRDNAKNTVYLQMNSLKPEDTAVYYCAVYYDGLYDGDGFVYWGQGTQVTVSS

SEQ ID NO: 33039 - protein, 126 aa, Artificial Sequence
  Chemically Synthesized
QVQLQESGGGLVQAGGSLRLSCAASGSIFLYRYMGWYRQAPGKEREFVASIAYGGITNYADSVKGRFTISRDNAKNTVYLQMNSLKPEDTAVYYCAAPFQKNYVNDYELSILHDYWGQGTQVTVSS

SEQ ID NO: 33040 - protein, 122 aa, Artificial Sequence
  Chemically Synthesized
QVQLQESGGGLVQAGGSLRLSCAASGTIFIGVSMGWYRQAPGKEREFVAGIAPGTNTNYADSVKGRFTISRDNAKNTVYLQMNSLKPEDTAVYYCAAYVQYPYAIYDPHYYWGQGTQVTVSS

SEQ ID NO: 33041 - protein, 118 aa, Artificial Sequence
  Chemically Synthesized
QVQLQESGGGLVQAGGSLRLSCAASGYISITVLMGWYRQAPGKERELVATIDYGAITNYADSVKGRFTISRDNAKNTVYLQMNSLKPEDTAVYYCAADFYNSTRHNYWGQGTQVTVSS

SEQ ID NO: 33042 - protein, 122 aa, Artificial Sequence
  Chemically Synthesized
QVQLQESGGGLVQAGGSLRLSCAASGSIFASDGMGWYRQAPGKEREFVATIGSGGITYYADSVKGRFTISRDNAKNTVYLQMNSLKPEDTAVYYCAVDTKRYEIPYGRHRYWGQGTQVTVSS

SEQ ID NO: 33043 - protein, 122 aa, Artificial Sequence
  Chemically Synthesized
QVQLQESGGGLVQAGGSLRLSCAASGSIFYLYAMGWYRQAPGKEREFVATIADGGSTYYADSVKGRFTISRDNAKNTVYLQMNSLKPEDTAVYYCAAAGRDHGAPRWSLVYWGQGTQVTVSS

SEQ ID NO: 33044 - protein, 126 aa, Artificial Sequence
  Chemically Synthesized
QVQLQESGGGLVQAGGSLRLSCAASGTISYDGYMGWYRQAPGKERELVATITRGTSTNYADSVKGRFTISRDNAKNTVYLQMNSLKPEDTAVYYCAVTYNTYFEGNLNTRYRYDYWGQGTQVTVSS

SEQ ID NO: 33045 - protein, 118 aa, Artificial Sequence
  Chemically Synthesized
QVQLQESGGGLVQAGGSLRLSCAASGTIFGTVTMGWYRQAPGKERELVATIAAGTITYYADSVKGRFTISRDNAKNTVYLQMNSLKPEDTAVYYCAVGRYYDHYLGYWGQGTQVTVSS

SEQ ID NO: 33046 - protein, 126 aa, Artificial Sequence
  Chemically Synthesized
QVQLQESGGGLVQAGGSLRLSCAASGTIFYGALMGWYRQAPGKEREFVAGIDRGANTNYADSVKGRFTISRDNAKNTVYLQMNSLKPEDTAVYYCAVPPSNTYSTYGWALGKHSYWGQGTQVTVSS

SEQ ID NO: 33047 - protein, 118 aa, Artificial Sequence
  Chemically Synthesized
QVQLQESGGGLVQAGGSLRLSCAASGTIFSKVGMGWYRQAPGKEREFVAAISLGTSTYYADSVKGRFTISRDNAKNTVYLQMNSLKPEDTAVYYCAVTDVGFTDLLYWGQGTQVTVSS

SEQ ID NO: 33048 - protein, 122 aa, Artificial Sequence
  Chemically Synthesized
QVQLQESGGGLVQAGGSLRLSCAASGTISAGAWMGWYRQAPGKERELVASIDTGTTTYYADSVKGRFTISRDNAKNTVYLQMNSLKPEDTAVYYCAVANYLWRYKYWDHDYWGQGTQVTVSS

SEQ ID NO: 33049 - protein, 118 aa, Artificial Sequence
  Chemically Synthesized
QVQLQESGGGLVQAGGSLRLSCAASGNIFPVYYMGWYRQAPGKEREFVASIGTGASTNYADSVKGRFTISRDNAKNTVYLQMNSLKPEDTAVYYCAADDIGSWWFYYWGQGTQVTVSS

SEQ ID NO: 33050 - protein, 128 aa, Artificial Sequence
  Chemically Synthesized
QVQLQESGGGLVQAGGSLRLSCAASGTIFTRTMGWYRQAPGKERELVAAIADGSTYLYADSVKGRFTISRDNAKNTVYLQMNSLKPEDTAVYYCAAEHFTSRHDPTDAASIHYYFRYWGQGTQVTVSS

SEQ ID NO: 33051 - protein, 125 aa, Artificial Sequence
  Chemically Synthesized
QVQLQESGGGLVQAGGSLRLSCAASGYISHWNYMGWYRQAPGKEREFVAAIDWGAITYADSVKGRFTISRDNAKNTVYLQMNSLKPEDTAVYYCAVYAYEYGGYTRSWCSVLLYWGQGTQVTVSS

SEQ ID NO: 33052 - protein, 117 aa, Artificial Sequence
  Chemically Synthesized
QVQLQESGGGLVQAGGSLRLSCAASGNIFAYIMGWYRQAPGKERELVAAITLGTSTYYADSVKGRFTISRDNAKNTVYLQMNSLKPEDTAVYYCAANDVYLLDLYYWGQGTQVTVSS

SEQ ID NO: 33053 - protein, 121 aa, Artificial Sequence
  Chemically Synthesized
QVQLQESGGGLVQAGGSLRLSCAASGSIFATSSMGWYRQAPGKERELVAAINWGGITYYADSVKGRFTISRDNAKNTVYLQMNSLKPEDTAVYYCAVENDELFSRTRRMYWGQGTQVTVSS

SEQ ID NO: 33054 - protein, 125 aa, Artificial Sequence
  Chemically Synthesized
QVQLQESGGGLVQAGGSLRLSCAASGTISGGQFMGWYRQAPGKERELVATIAPGTNTNYADSVKGRFTISRDNAKNTVYLQMNSLKPEDTAVYYCAVYYIQSRFLQFIVASPLYWGQGTQVTVSS

SEQ ID NO: 33055 - protein, 122 aa, Artificial Sequence
  Chemically Synthesized
QVQLQESGGGLVQAGGSLRLSCAASGNISYGLEMGWYRQAPGKERELVAGITYGGNTNYADSVKGRFTISRDNAKNTVYLQMNSLKPEDTAVYYCAVVYYYDYFETARYLYWGQGTQVTVSS

SEQ ID NO: 33056 - protein, 118 aa, Artificial Sequence
  Chemically Synthesized
QVQLQESGGGLVQAGGSLRLSCAASGYIFDNVYMGWYRQAPGKERELVAGINRGATTYYADSVKGRFTISRDNAKNTVYLQMNSLKPEDTAVYYCAAGIPVGRTHSYWGQGTQVTVSS

SEQ ID NO: 33057 - protein, 122 aa, Artificial Sequence
  Chemically Synthesized
QVQLQESGGGLVQAGGSLRLSCAASGNISGPVQMGWYRQAPGKERELVASISDGTNTYYADSVKGRFTISRDNAKNTVYLQMNSLKPEDTAVYYCAVYLPDNWPYYSHHYYWGQGTQVTVSS

SEQ ID NO: 33058 - protein, 118 aa, Artificial Sequence
  Chemically Synthesized
QVQLQESGGGLVQAGGSLRLSCAASGYISRWADMGWYRQAPGKERELVAGIAAGGITNYADSVKGRFTISRDNAKNTVYLQMNSLKPEDTAVYYCAVRGFYRYRHYYWGQGTQVTVSS

SEQ ID NO: 33059 - protein, 118 aa, Artificial Sequence
  Chemically Synthesized
QVQLQESGGGLVQAGGSLRLSCAASGNISGDSGMGWYRQAPGKERELVASITYGSNTYYADSVKGRFTISRDNAKNTVYLQMNSLKPEDTAVYYCAAYYKKYPSYWYWGQGTQVTVSS

SEQ ID NO: 33060 - protein, 118 aa, Artificial Sequence
  Chemically Synthesized
QVQLQESGGGLVQAGGSLRLSCAASGNIFDREGMGWYRQAPGKEREFVATIGYGATTNYADSVKGRFTISRDNAKNTVYLQMNSLKPEDTAVYYCAAWSNTGKDHDYWGQGTQVTVSS

SEQ ID NO: 33061 - protein, 125 aa, Artificial Sequence
  Chemically Synthesized
QVQLQESGGGLVQAGGSLRLSCAASGSISRAYMGWYRQAPGKERELVAGINIGGITNYADSVKGRFTISRDNAKNTVYLQMNSLKPEDTAVYYCAAHSQDGGDPRRQSIVDHGYWGQGTQVTVSS

SEQ ID NO: 33062 - protein, 118 aa, Artificial Sequence
  Chemically Synthesized
QVQLQESGGGLVQAGGSLRLSCAASGTISVASQMGWYRQAPGKEREFVAAITGGSNTYYADSVKGRFTISRDNAKNTVYLQMNSLKPEDTAVYYCAVYYGWSYYFKYWGQGTQVTVSS

SEQ ID NO: 33063 - protein, 118 aa, Artificial Sequence
  Chemically Synthesized
QVQLQESGGGLVQAGGSLRLSCAASGTIFSTSAMGWYRQAPGKEREFVAGINTGTSTYYADSVKGRFTISRDNAKNTVYLQMNSLKPEDTAVYYCAVYFDDSRYFLYWGQGTQVTVSS

SEQ ID NO: 33064 - protein, 113 aa, Artificial Sequence
  Chemically Synthesized
QVQLQESGGGLVQAGGSLRLSCAASGYISRATTMGWYRQAPGKERELVAAISGGGNTNYADSVKGRFTISRDNAKNTVYLQMNSLKPEDTAVYYCAVNAHSYWGQGTQVTVSS

SEQ ID NO: 33065 - protein, 118 aa, Artificial Sequence
  Chemically Synthesized
QVQLQESGGGLVQAGGSLRLSCAASGNISPGRDMGWYRQAPGKERELVATITEGTSTYYADSVKGRFTISRDNAKNTVYLQMNSLKPEDTAVYYCAAYAIHDRQLVYWGQGTQVTVSS

SEQ ID NO: 33066 - protein, 118 aa, Artificial Sequence
  Chemically Synthesized
QVQLQESGGGLVQAGGSLRLSCAASGSISDIYYMGWYRQAPGKERELVAGIDEGSNTYYADSVKGRFTISRDNAKNTVYLQMNSLKPEDTAVYYCAAVTPVYNRYPYWGQGTQVTVSS

SEQ ID NO: 33067 - protein, 122 aa, Artificial Sequence
  Chemically Synthesized
QVQLQESGGGLVQAGGSLRLSCAASGYISPQSYMGWYRQAPGKERELVATIDGGGNTNYADSVKGRFTISRDNAKNTVYLQMNSLKPEDTAVYYCAVNQRLADGTAYDHDYWGQGTQVTVSS

SEQ ID NO: 33068 - protein, 118 aa, Artificial Sequence
  Chemically Synthesized
QVQLQESGGGLVQAGGSLRLSCAASGNISYRLDMGWYRQAPGKEREFVAGIDYGGSTNYADSVKGRFTISRDNAKNTVYLQMNSLKPEDTAVYYCAAIASSRSLFAYWGQGTQVTVSS

SEQ ID NO: 33069 - protein, 122 aa, Artificial Sequence
  Chemically Synthesized
QVQLQESGGGLVQAGGSLRLSCAASGSIFEYGYMGWYRQAPGKERELVAGINGGGITNYADSVKGRFTISRDNAKNTVYLQMNSLKPEDTAVYYCAVWTGPVQSVYGYFVYWGQGTQVTVSS

SEQ ID NO: 33070 - protein, 116 aa, Artificial Sequence
  Chemically Synthesized
QVQLQESGGGLVQAGGSLRLSCAASGNISYDSMGWYRQAPGKEREFVAGITFGTSTNYADSVKGRFTISRDNAKNTVYLQMNSLKPEDTAVYYCAVVTRLVTGMYWGQGTQVTVSS

SEQ ID NO: 33071 - protein, 122 aa, Artificial Sequence
  Chemically Synthesized
QVQLQESGGGLVQAGGSLRLSCAASGNISSRYAMGWYRQAPGKERELVAGIARGAITNYADSVKGRFTISRDNAKNTVYLQMNSLKPEDTAVYYCAAVVPGYVHRDYPHYYWGQGTQVTVSS

SEQ ID NO: 33072 - protein, 122 aa, Artificial Sequence
  Chemically Synthesized
QVQLQESGGGLVQAGGSLRLSCAASGTIFTSGYMGWYRQAPGKERELVATIDSGTSTYYADSVKGRFTISRDNAKNTVYLQMNSLKPEDTAVYYCAVWLYAGYGDYPQHLYWGQGTQVTVSS

SEQ ID NO: 33073 - protein, 118 aa, Artificial Sequence
  Chemically Synthesized
QVQLQESGGGLVQAGGSLRLSCAASGTISAAGWMGWYRQAPGKEREFVAAISWGANTYYADSVKGRFTISRDNAKNTVYLQMNSLKPEDTAVYYCAAYRDRTYSHGYWGQGTQVTVSS

SEQ ID NO: 33074 - protein, 118 aa, Artificial Sequence
  Chemically Synthesized
QVQLQESGGGLVQAGGSLRLSCAASGNIFISSYMGWYRQAPGKERELVATINSGGTTNYADSVKGRFTISRDNAKNTVYLQMNSLKPEDTAVYYCAAGYYNYPVHDYWGQGTQVTVSS

SEQ ID NO: 33075 - protein, 122 aa, Artificial Sequence
  Chemically Synthesized
QVQLQESGGGLVQAGGSLRLSCAASGTISATTFMGWYRQAPGKERELVAGIGAGTNTNYADSVKGRFTISRDNAKNTVYLQMNSLKPEDTAVYYCAAGAYITAKVYDGFQYWGQGTQVTVSS

SEQ ID NO: 33076 - protein, 122 aa, Artificial Sequence
  Chemically Synthesized
QVQLQESGGGLVQAGGSLRLSCAASGNISVAWYMGWYRQAPGKEREFVASIGSGAITNYADSVKGRFTISRDNAKNTVYLQMNSLKPEDTAVYYCAAAADKRDRTFGYFLYWGQGTQVTVSS

SEQ ID NO: 33077 - protein, 117 aa, Artificial Sequence
  Chemically Synthesized
QVQLQESGGGLVQAGGSLRLSCAASGYISAYRRMGWYRQAPGKEREFVATIDSGGTTYYADSVKGRFTISRDNAKNTVYLQMNSLKPEDTAVYYCAAFEVTAHLWYWGQGTQVTVSS

SEQ ID NO: 33078 - protein, 113 aa, Artificial Sequence
  Chemically Synthesized
QVQLQESGGGLVQAGGSLRLSCAASGTIFTWTMGWYRQAPGKERELVATITAGANTNYADSVKGRFTISRDNAKNTVYLQMNSLKPEDTAVYYCAVSTLITYWGQGTQVTVSS

SEQ ID NO: 33079 - protein, 122 aa, Artificial Sequence
  Chemically Synthesized
QVQLQESGGGLVQAGGSLRLSCAASGTIFYGRDMGWYRQAPGKEREFVATIGRGGNTYYADSVKGRFTISRDNAKNTVYLQMNSLKPEDTAVYYCAVYRQTRGAGHRPFGYWGQGTQVTVSS

SEQ ID NO: 33080 - protein, 126 aa, Artificial Sequence
  Chemically Synthesized
QVQLQESGGGLVQAGGSLRLSCAASGSIFESATMGWYRQAPGKEREFVAGISPGTTTYYADSVKGRFTISRDNAKNTVYLQMNSLKPEDTAVYYCAVRHLIAVGPLGLRQDPSLYWGQGTQVTVSS

SEQ ID NO: 33081 - protein, 118 aa, Artificial Sequence
  Chemically Synthesized
QVQLQESGGGLVQAGGSLRLSCAASGTISYTFLMGWYRQAPGKERELVAAIGNGSSTNYADSVKGRFTISRDNAKNTVYLQMNSLKPEDTAVYYCAVIRVWGQSLHYWGQGTQVTVSS

SEQ ID NO: 33082 - protein, 126 aa, Artificial Sequence
  Chemically Synthesized
QVQLQESGGGLVQAGGSLRLSCAASGYISTVNNMGWYRQAPGKERELVAGIDVGGSTYYADSVKGRFTISRDNAKNTVYLQMNSLKPEDTAVYYCAADADWAYGVFFDYAVEHYYWGQGTQVTVSS

SEQ ID NO: 33083 - protein, 125 aa, Artificial Sequence
  Chemically Synthesized
QVQLQESGGGLVQAGGSLRLSCAASGSISPPFFMGWYRQAPGKERELVASIDGGNTYYADSVKGRFTISRDNAKNTVYLQMNSLKPEDTAVYYCAVRYLKSRHSPYDIVGPFDYWGQGTQVTVSS

SEQ ID NO: 33084 - protein, 122 aa, Artificial Sequence
  Chemically Synthesized
QVQLQESGGGLVQAGGSLRLSCAASGTISGHYVMGWYRQAPGKERELVATITIGGTTYYADSVKGRFTISRDNAKNTVYLQMNSLKPEDTAVYYCAVDVKYEGDLNAGLDYWGQGTQVTVSS

SEQ ID NO: 33085 - protein, 122 aa, Artificial Sequence
  Chemically Synthesized
QVQLQESGGGLVQAGGSLRLSCAASGYISYRSTMGWYRQAPGKERELVAGISKGSITYYADSVKGRFTISRDNAKNTVYLQMNSLKPEDTAVYYCAVRRPGAYGARYSYYYWGQGTQVTVSS

SEQ ID NO: 33086 - protein, 122 aa, Artificial Sequence
  Chemically Synthesized
QVQLQESGGGLVQAGGSLRLSCAASGYIFDPEQMGWYRQAPGKEREFVATIAPGGSTNYADSVKGRFTISRDNAKNTVYLQMNSLKPEDTAVYYCAATSPDDLWSYDYHDYWGQGTQVTVSS

SEQ ID NO: 33087 - protein, 118 aa, Artificial Sequence
  Chemically Synthesized
QVQLQESGGGLVQAGGSLRLSCAASGYISYYDHMGWYRQAPGKERELVAGIGAGTITYYADSVKGRFTISRDNAKNTVYLQMNSLKPEDTAVYYCAAVWLSSSQHSYWGQGTQVTVSS

SEQ ID NO: 33088 - protein, 117 aa, Artificial Sequence
  Chemically Synthesized
QVQLQESGGGLVQAGGSLRLSCAASGTISWDYWMGWYRQAPGKERELVAGINGGSSTYYADSVKGRFTISRDNAKNTVYLQMNSLKPEDTAVYYCAVLGLDSTSLYWGQGTQVTVSS

SEQ ID NO: 33089 - protein, 118 aa, Artificial Sequence
  Chemically Synthesized
QVQLQESGGGLVQAGGSLRLSCAASGNIFDGVAMGWYRQAPGKEREFVATITLGASTNYADSVKGRFTISRDNAKNTVYLQMNSLKPEDTAVYYCAADYYLYEPYGYWGQGTQVTVSS

SEQ ID NO: 33090 - protein, 122 aa, Artificial Sequence
  Chemically Synthesized
QVQLQESGGGLVQAGGSLRLSCAASGSISLWSYMGWYRQAPGKEREFVAGIDNGANTNYADSVKGRFTISRDNAKNTVYLQMNSLKPEDTAVYYCAVAAVSTYTNRTPLGYWGQGTQVTVSS

SEQ ID NO: 33091 - protein, 118 aa, Artificial Sequence
  Chemically Synthesized
QVQLQESGGGLVQAGGSLRLSCAASGSIFHRGSMGWYRQAPGKEREFVASIDGGGNTYYADSVKGRFTISRDNAKNTVYLQMNSLKPEDTAVYYCAAVDIAQSYYAYWGQGTQVTVSS

SEQ ID NO: 33092 - protein, 122 aa, Artificial Sequence
  Chemically Synthesized
QVQLQESGGGLVQAGGSLRLSCAASGTISVDYVMGWYRQAPGKERELVATINGGASTNYADSVKGRFTISRDNAKNTVYLQMNSLKPEDTAVYYCAVDGWGSYYEFGEHDYWGQGTQVTVSS

SEQ ID NO: 33093 - protein, 118 aa, Artificial Sequence
  Chemically Synthesized
QVQLQESGGGLVQAGGSLRLSCAASGTISGYQNMGWYRQAPGKEREFVAGIDYGGITYYADSVKGRFTISRDNAKNTVYLQMNSLKPEDTAVYYCAATPGPPVYHGYWGQGTQVTVSS

SEQ ID NO: 33094 - protein, 126 aa, Artificial Sequence
  Chemically Synthesized
QVQLQESGGGLVQAGGSLRLSCAASGTISEHRTMGWYRQAPGKERELVAGIGIGGNTYYADSVKGRFTISRDNAKNTVYLQMNSLKPEDTAVYYCAVAVAYDGQATDIAWALHTYWGQGTQVTVSS

SEQ ID NO: 33095 - protein, 115 aa, Artificial Sequence
  Chemically Synthesized
QVQLQESGGGLVQAGGSLRLSCAASGNISGLVMGWYRQAPGKEREFVASIAYGGTTNYADSVKGRFTISRDNAKNTVYLQMNSLKPEDTAVYYCAYKYSEEYDYWGQGTQVTVSS

SEQ ID NO: 33096 - protein, 125 aa, Artificial Sequence
  Chemically Synthesized
QVQLQESGGGLVQAGGSLRLSCAASGSISDGYYMGWYRQAPGKEREFVAGIGYGGTTYYADSVKGRFTISRDNAKNTVYLQMNSLKPEDTAVYYCAVYSYYFWGWSLTSYDHSYWGQGTQVTVSS

SEQ ID NO: 33097 - protein, 124 aa, Artificial Sequence
  Chemically Synthesized
QVQLQESGGGLVQAGGSLRLSCAASGNIFSGFMGWYRQAPGKEREFVAAIGHGSTTYYADSVKGRFTISRDNAKNTVYLQMNSLKPEDTAVYYCAAGLGDYQLAIWPSGDYWYWGQGTQVTVSS

SEQ ID NO: 33098 - protein, 122 aa, Artificial Sequence
  Chemically Synthesized
QVQLQESGGGLVQAGGSLRLSCAASGTISRFNYMGWYRQAPGKEREFVAAIGSGAITYYADSVKGRFTISRDNAKNTVYLQMNSLKPEDTAVYYCAVVIDLVADSDRTYSYWGQGTQVTVSS

SEQ ID NO: 33099 - protein, 122 aa, Artificial Sequence
  Chemically Synthesized
QVQLQESGGGLVQAGGSLRLSCAASGTISRLAYMGWYRQAPGKERELVAAIGNGSITYYADSVKGRFTISRDNAKNTVYLQMNSLKPEDTAVYYCAVVSDPSGGTNGNHDYWGQGTQVTVSS

SEQ ID NO: 33100 - protein, 118 aa, Artificial Sequence
  Chemically Synthesized
QVQLQESGGGLVQAGGSLRLSCAASGSISAAATMGWYRQAPGKEREFVATISYGGNTNYADSVKGRFTISRDNAKNTVYLQMNSLKPEDTAVYYCAVATIATASHDYWGQGTQVTVSS

SEQ ID NO: 33101 - protein, 118 aa, Artificial Sequence
  Chemically Synthesized
QVQLQESGGGLVQAGGSLRLSCAASGSIFDTLYMGWYRQAPGKEREFVATINYGGITYYADSVKGRFTISRDNAKNTVYLQMNSLKPEDTAVYYCAAQTLYSRPFAYWGQGTQVTVSS

SEQ ID NO: 33102 - protein, 118 aa, Artificial Sequence
  Chemically Synthesized
QVQLQESGGGLVQAGGSLRLSCAASGTIFGIWGMGWYRQAPGKERELVAAIDRGGNTYYADSVKGRFTISRDNAKNTVYLQMNSLKPEDTAVYYCAAGDYWIGDFYYWGQGTQVTVSS

SEQ ID NO: 33103 - protein, 122 aa, Artificial Sequence
  Chemically Synthesized
QVQLQESGGGLVQAGGSLRLSCAASGSISRFDVMGWYRQAPGKERELVAAISYGSTTNYADSVKGRFTISRDNAKNTVYLQMNSLKPEDTAVYYCAVVAQDNDVRLGVLVYWGQGTQVTVSS

SEQ ID NO: 33104 - protein, 122 aa, Artificial Sequence
  Chemically Synthesized
QVQLQESGGGLVQAGGSLRLSCAASGYIFPNVLDMGWYRQAPGKERELVAAIDIGSNTYYADSVKGRFTISRDNAKNTVYLQMNSLKPEDTAVYYCAAARSRYQRSVNHGYWGQGTQVTVSS

SEQ ID NO: 33105 - protein, 122 aa, Artificial Sequence
  Chemically Synthesized
QVQLQESGGGLVQAGGSLRLSCAASGYISAFLRMGWYRQAPGKEREFVAAIGYGANTNYADSVKGRFTISRDNAKNTVYLQMNSLKPEDTAVYYCAAGAPYIAQYHWAYAYWGQGTQVTVSS

SEQ ID NO: 33106 - protein, 122 aa, Artificial Sequence
  Chemically Synthesized
QVQLQESGGGLVQAGGSLRLSCAASGTISDYGGMGWYRQAPGKERELVAAINYGGITYYADSVKGRFTISRDNAKNTVYLQMNSLKPEDTAVYYCAVDYRLAARRTDLYSYWGQGTQVTVSS

SEQ ID NO: 33107 - protein, 126 aa, Artificial Sequence
  Chemically Synthesized
QVQLQESGGGLVQAGGSLRLSCAASGSIFDGYIMGWYRQAPGKERELVASIGGGTTTNYADSVKGRFTISRDNAKNTVYLQMNSLKPEDTAVYYCAVHPDVQDLTIAGKRVYLLYWGQGTQVTVSS

SEQ ID NO: 33108 - protein, 118 aa, Artificial Sequence
  Chemically Synthesized
QVQLQESGGGLVQAGGSLRLSCAASGYIFAANGMGWYRQAPGKERELVAGINGGSITNYADSVKGRFTISRDNAKNTVYLQMNSLKPEDTAVYYCAAYYGRGYIHGYWGQGTQVTVSS

SEQ ID NO: 33109 - protein, 121 aa, Artificial Sequence
  Chemically Synthesized
QVQLQESGGGLVQAGGSLRLSCAASGNIFAIAYMGWYRQAPGKERELVAGIAHGANTNYADSVKGRFTISRDNAKNTVYLQMNSLKPEDTAVYYCALVCLLLLVRLTNFYWGQGTQVTVSS

SEQ ID NO: 33110 - protein, 118 aa, Artificial Sequence
  Chemically Synthesized
QVQLQESGGGLVQAGGSLRLSCAASGNISQASRMGWYRQAPGKEREFVATIDYGATTYYADSVKGRFTISRDNAKNTVYLQMNSLKPEDTAVYYCAVWTFSAQKHTYWGQGTQVTVSS

SEQ ID NO: 33111 - protein, 126 aa, Artificial Sequence
  Chemically Synthesized
QVQLQESGGGLVQAGGSLRLSCAASGTIFQPYSMGWYRQAPGKEREFVASINNGSITNYADSVKGRFTISRDNAKNTVYLQMNSLKPEDTAVYYCAALYAGDTYSDIRDNRYYFYWGQGTQVTVSS

SEQ ID NO: 33112 - protein, 118 aa, Artificial Sequence
  Chemically Synthesized
QVQLQESGGGLVQAGGSLRLSCAASGTIFVADGMGWYRQAPGKEREFVAGISDGATTYYADSVKGRFTISRDNAKNTVYLQMNSLKPEDTAVYYCAVIVGSTKYHVYWGQGTQVTVSS

SEQ ID NO: 33113 - protein, 119 aa, Artificial Sequence
  Chemically Synthesized
QVQLQESGGGLVQAGGSLRLSCAASGNISYSLYMGWYRQAPGKERELVATIDRDQYADSVKGRFTISRDNAKNTVYLQMNSLKPEDTAVYYCAVRDAFTTGDTYALRYWGQGTQVTVSS

SEQ ID NO: 33114 - protein, 122 aa, Artificial Sequence
  Chemically Synthesized
QVQLQESGGGLVQAGGSLRLSCAASGYISLSAAMGWYRQAPGKERELVASISAGTSTNYADSVKGRFTISRDNAKNTVYLQMNSLKPEDTAVYYCAALPNYDIFRYGEFDYWGQGTQVTVSS

SEQ ID NO: 33115 - protein, 122 aa, Artificial Sequence
  Chemically Synthesized
QVQLQESGGGLVQAGGSLRLSCAASGTISQGYYMGWYRQAPGKERELVASIGPGTTTNYADSVKGRFTISRDNAKNTVYLQMNSLKPEDTAVYYCAAVDKRGDVYRNHHGYWGQGTQVTVSS

SEQ ID NO: 33116 - protein, 117 aa, Artificial Sequence
  Chemically Synthesized
QVQLQESGGGLVQAGGSLRLSCAASGSISLTLMGWYRQAPGKEREFVAGISAGTITNYADSVKGRFTISRDNAKNTVYLQMNSLKPEDTAVYYCAAYYRYITGYLYWGQGTQVTVSS

SEQ ID NO: 33117 - protein, 126 aa, Artificial Sequence
  Chemically Synthesized
QVQLQESGGGLVQAGGSLRLSCAASGYIFGSVQMGWYRQAPGKERELVASINQGTSTYYADSVKGRFTISRDNAKNTVYLQMNSLKPEDTAVYYCAAHSDLDYGDSLSYNVAHWYWGQGTQVTVSS

SEQ ID NO: 33118 - protein, 116 aa, Artificial Sequence
  Chemically Synthesized
QVQLQESGGGLVQAGGSLRLSCAASGNISSAGDMGWYRQAPGKERELVATINGGGITNYADSVKGRFTISRDNAKNTVYLQMNSLKPEDTAVYYCAAHAGDYFAYWGQGTQVTVSS

SEQ ID NO: 33119 - protein, 118 aa, Artificial Sequence
  Chemically Synthesized
QVQLQESGGGLVQAGGSLRLSCAASGYISLRRYMGWYRQAPGKEREFVAGISSGATTYYADSVKGRFTISRDNAKNTVYLQMNSLKPEDTAVYYCAADDKGDYYLAYWGQGTQVTVSS

SEQ ID NO: 33120 - protein, 118 aa, Artificial Sequence
  Chemically Synthesized
QVQLQESGGGLVQAGGSLRLSCAASGTIFAYDRMGWYRQAPGKEREFVAGIGYGAYYQYADSVKGRFTISRDNAKNTVYLQMNSLKPEDTAVYYCAADDGNDQYFGYWGQGTQVTVSS

SEQ ID NO: 33121 - protein, 111 aa, Artificial Sequence
  Chemically Synthesized
QVQLQESGGGLVQAGGSLRLSCAASGSIFLLSMGWYRQAPGKERELVASITYGSSTNYADSVKGRFTISRDNAKNTVYLQMNSLKPEDTAVYYCAVSSLYWGQGTQVTVSS

SEQ ID NO: 33122 - protein, 126 aa, Artificial Sequence
  Chemically Synthesized
QVQLQESGGGLVQAGGSLRLSCAASGSISTWPSMGWYRQAPGKERELVATIDRGGNTYYADSVKGRFTISRDNAKNTVYLQMNSLKPEDTAVYYCAVYYTPYYGYVADVYYFFSYWGQGTQVTVSS

SEQ ID NO: 33123 - protein, 119 aa, Artificial Sequence
  Chemically Synthesized
QVQLQESGGGLVQAGGSLRLSCAASGNISGSYVDMGWYRQAPGKEREFVAAIDYGATTNYADSVKGRFTISRDNAKNTVYLQMNSLKPEDTAVYYCAVSDRNLYDFDYWGQGTQVTVSS

SEQ ID NO: 33124 - protein, 123 aa, Artificial Sequence
  Chemically Synthesized
QVQLQESGGGLVQAGGSLRLSCAASGTISPSHYMGWYRQAPGKEREFVAGINDGGTTNYADSVKGRFTISRDNAKNTVYLQMNSLKPEDTAVYYCAAALWGALVYGRQRHRYWGQGTQVTVSS

SEQ ID NO: 33125 - protein, 118 aa, Artificial Sequence
  Chemically Synthesized
QVQLQESGGGLVQAGGSLRLSCAASGNIFYRPSMGWYRQAPGKEREFVAGIASGATTNYADSVKGRFTISRDNAKNTVYLQMNSLKPEDTAVYYCAAKYYWTDGLYYWGQGTQVTVSS

SEQ ID NO: 33126 - protein, 115 aa, Artificial Sequence
  Chemically Synthesized
QVQLQESGGGLVQAGGSLRLSCAASGYISHDRNMGWYRQAPGKERELVAGINVGANTNYADSVKGRFTISRDNAKNTVYLQMNSLKPEDTAVYYCAVPGLPHYYWGQGTQVTVSS

SEQ ID NO: 33127 - protein, 117 aa, Artificial Sequence
  Chemically Synthesized
QVQLQESGGGLVQAGGSLRLSCAASGNIFTFRMGWYRQAPGKERELVASISTGGTTNYADSVKGRFTISRDNAKNTVYLQMNSLKPEDTAVYYCAVQGRGAASHRYWGQGTQVTVSS

SEQ ID NO: 33128 - protein, 121 aa, Artificial Sequence
  Chemically Synthesized
QVQLQESGGGLVQAGGSLRLSCAASGIFLLSLMGWYRQAPGKERELVAGITGGGTTNYADSVKGRFTISRDNAKNTVYLQMNSLKPEDTAVYYCAAYGYVYPLAADDLGYWGQGTQVTVSS

SEQ ID NO: 33129 - protein, 120 aa, Artificial Sequence
  Chemically Synthesized
QVQLQESGGGLVQAGGSLRLSCAASGSISALYDMGWYRQAPGKERELVASIDYGGITNYADSVKGRFTISRDNAKNTVYLQMNSLKPEDTAVYYCAADPTYYFDDDTGYWGQGTQVTVSS

SEQ ID NO: 33130 - protein, 111 aa, Artificial Sequence
  Chemically Synthesized
QVQLQESGGGLVQAGGSLRLSCAASGNIFFWSMGWYRQAPGKEREFVASIDGGTNTNYADSVKGRFTISRDNAKNTVYLQMNSLKPEDTAVYYCAVDLRYWGQGTQVTVSS

SEQ ID NO: 33131 - protein, 119 aa, Artificial Sequence
  Chemically Synthesized
QVQLQESGGGLVQAGGSLRLSCAASGYIFFPYVMGWYRQAPGKERELVAGINEGAITNYADSVKGRFTISRDNAKNTVYLQMNSLKPEDTAVYYCAVPWYYSYRSLDYWGQGTQVTVSS

SEQ ID NO: 33132 - protein, 122 aa, Artificial Sequence
  Chemically Synthesized
QVQLQESGGGLVQAGGSLRLSCAASGNIFRRDVMGWYRQAPGKERELVAGIATGASTNYADSVKGRFTISRDNAKNTVYLQMNSLKPEDTAVYYCAADNEYASRQSYRHQYWGQGTQVTVSS

SEQ ID NO: 33133 - protein, 118 aa, Artificial Sequence
  Chemically Synthesized
QVQLQESGGGLVQAGGSLRLSCAASGTISLRELMGWYRQAPGKERELVAGIDDGTNTYYADSVKGRFTISRDNAKNTVYLQMNSLKPEDTAVYYCAAPASTDYAHPYWGQGTQVTVSS

SEQ ID NO: 33134 - protein, 118 aa, Artificial Sequence
  Chemically Synthesized
QVQLQESGGGLVQAGGSLRLSCAASGNIFQDALMGWYRQAPGKERELVAGINWGGTTYYADSVKGRFTISRDNAKNTVYLQMNSLKPEDTAVYYCAVGQEDIRQLPYWGQGTQVTVSS

SEQ ID NO: 33135 - protein, 122 aa, Artificial Sequence
  Chemically Synthesized
QVQLQESGGGLVQAGGSLRLSCAASGTISYVAEMGWYRQAPGKEREFVAGIGPGGSTYYADSVKGRFTISRDNAKNTVYLQMNSLKPEDTAVYYCAAATLHYSAIYLSHWYWGQGTQVTVSS

SEQ ID NO: 33136 - protein, 118 aa, Artificial Sequence
  Chemically Synthesized
QVQLQESGGGLVQAGGSLRLSCAASGNISSGYLMGWYRQAPGKERELVAGISTGSTTYYADSVKGRFTISRDNAKNTVYLQMNSLKPEDTAVYYCAAGAADRRAHPYWGQGTQVTVSS

SEQ ID NO: 33137 - protein, 118 aa, Artificial Sequence
  Chemically Synthesized
QVQLQESGGGLVQAGGSLRLSCAASGTIFGARLMGWYRQAPGKEREFVAGISPGANTYYADSVKGRFTISRDNAKNTVYLQMNSLKPEDTAVYYCAVHNPWADYHPYWGQGTQVTVSS

SEQ ID NO: 33138 - protein, 118 aa, Artificial Sequence
  Chemically Synthesized
QVQLQESGGGLVQAGGSLRLSCAASGNIFAAGIMGWYRQAPGKEREFVAGIGFGAITYYADSVKGRFTISRDNAKNTVYLQMNSLKPEDTAVYYCAAAEFHRRQHPYWGQGTQVTVSS

SEQ ID NO: 33139 - protein, 118 aa, Artificial Sequence
  Chemically Synthesized
QVQLQESGGGLVQAGGSLRLSCAASGTISQDVTMGWYRQAPGKEREFVAAIDRGGSTYYADSVKGRFTISRDNAKNTVYLQMNSLKPEDTAVYYCAVGYREPYLHKYWGQGTQVTVSS

SEQ ID NO: 33140 - protein, 118 aa, Artificial Sequence
  Chemically Synthesized
QVQLQESGGGLVQAGGSLRLSCAASGYISPYSDMGWYRQAPGKERELVATISGGGITNYADSVKGRFTISRDNAKNTVYLQMNSLKPEDTAVYYCAAGRTYTGRHGYWGQGTQVTVSS

SEQ ID NO: 33141 - protein, 121 aa, Artificial Sequence
  Chemically Synthesized
QVQLQESGGGLVQAGGSLRLSCAASGYISDEGYMGWYRQAPGKERELVASISAGSNTYYADSVKGRFTISRDNAKNTVYLQMNSLKPEDTAVYYCAVGGRDGYSDNWALYWGQGTQVTVSS

SEQ ID NO: 33142 - protein, 122 aa, Artificial Sequence
  Chemically Synthesized
QVQLQESGGGLVQAGGSLRLSCAASGNISYVYAMGWYRQAPGKEREFVAGIAGGGNTYYADSVKGRFTISRDNAKNTVYLQMNSLKPEDTAVYYCAAYDLYVGQGDGLYAYWGQGTQVTVSS

SEQ ID NO: 33143 - protein, 118 aa, Artificial Sequence
  Chemically Synthesized
QVQLQESGGGLVQAGGSLRLSCAASGTIFYTSLMGWYRQAPGKEREFVAGIAGGGITYYADSVKGRFTISRDNAKNTVYLQMNSLKPEDTAVYYCAAGSETYPTHPYWGQGTQVTVSS

SEQ ID NO: 33144 - protein, 118 aa, Artificial Sequence
  Chemically Synthesized
QVQLQESGGGLVQAGGSLRLSCAASGSISIGDDMGWYRQAPGKERELVAGISAGTSTYYADSVKGRFTISRDNAKNTVYLQMNSLKPEDTAVYYCAARIVLVYAHFYWGQGTQVTVSS

SEQ ID NO: 33145 - protein, 118 aa, Artificial Sequence
  Chemically Synthesized
QVQLQESGGGLVQAGGSLRLSCAASGTISDWYLMGWYRQAPGKEREFVAGIALGGNTYYADSVKGRFTISRDNAKNTVYLQMNSLKPEDTAVYYCAASKARDRYFPYWGQGTQVTVSS

SEQ ID NO: 33146 - protein, 122 aa, Artificial Sequence
  Chemically Synthesized
QVQLQESGGGLVQAGGSLRLSCAASGNISSYSFMGWYRQAPGKERELVASIATGTSTYYADSVKGRFTISRDNAKNTVYLQMNSLKPEDTAVYYCAVFLRDLYQYDYQYSYWGQGTQVTVSS

SEQ ID NO: 33147 - protein, 118 aa, Artificial Sequence
  Chemically Synthesized
QVQLQESGGGLVQAGGSLRLSCAASGTIFESRLMGWYRQAPGKEREFVAGIAYGTNTYYADSVKGRFTISRDNAKNTVYLQMNSLKPEDTAVYYCAVDQDGRSRYPYWGQGTQVTVSS

SEQ ID NO: 33148 - protein, 122 aa, Artificial Sequence
  Chemically Synthesized
QVQLQESGGGLVQAGGSLRLSCAASGTISQQEDMGWYRQAPGKEREFVAGINDGSSTYYADSVKGRFTISRDNAKNTVYLQMNSLKPEDTAVYYCAVSYGPLADEGPYYPYWGQGTQVTVSS

SEQ ID NO: 33149 - protein, 126 aa, Artificial Sequence
  Chemically Synthesized
QVQLQESGGGLVQAGGSLRLSCAASGNIFWPGFMGWYRQAPGKERELVASIATGGITNYADSVKGRFTISRDNAKNTVYLQMNSLKPEDTAVYYCAVWLIVEDLDRTYVKYVHHYWGQGTQVTVSS

SEQ ID NO: 33150 - protein, 113 aa, Artificial Sequence
  Chemically Synthesized
QVQLQESGGGLVQAGGSLRLSCAASGNISTTFDMGWYRQAPGKERELVAPYADSVKGRFTISRDNAKNTVYLQMNSLKPEDTAVYYCAADQDDTDSLLTTIYWGQGTQVTVSS

SEQ ID NO: 33151 - protein, 117 aa, Artificial Sequence
  Chemically Synthesized
QVQLQESGGGLVQAGGSLRLSCAASGSISTATQMGWYRQAPGKERELVAGIDTGSTTYYADSVKGRFTISRDNAKNTVYLQMNSLKPEDTAVYYCAADYYPYYHLYWGQGTQVTVSS

SEQ ID NO: 33152 - protein, 117 aa, Artificial Sequence
  Chemically Synthesized
QVQLQESGGGLVQAGGSLRLSCAASGNISTADYMGWYRQAPGKEREFVAGINTVVLPYADSVKGRFTISRDNAKNTVYLQMNSLKPEDTAVYYCAAVPDADLRHPYWGQGTQVTVSS

SEQ ID NO: 33153 - protein, 121 aa, Artificial Sequence
  Chemically Synthesized
QVQLQESGGGLVQAGGSLRLSCAASGYISQAYDMGWYRQAPGKERELVAAITYGGSTNYADSVKGRFTISRDNAKNTVYLQMNSLKPEDTAVYYCAVATYYDGGVGYSIYWGQGTQVTVSS

SEQ ID NO: 33154 - protein, 122 aa, Artificial Sequence
  Chemically Synthesized
QVQLQESGGGLVQAGGSLRLSCAASGYISAYPSMGWYRQAPGKERELVAGINAGGSTYYADSVKGRFTISRDNAKNTVYLQMNSLKPEDTAVYYCAADRYGPYYDYYAYAYWGQGTQVTVSS

SEQ ID NO: 33155 - protein, 111 aa, Artificial Sequence
  Chemically Synthesized
QVQLQESGGGLVQAGGSLRLSCAASGSIFLYASMGWYRQAPGKERELVLVPYADSVKGRFTISRDNAKNTVYLQMNSLKPEDTAVYYCAVQEHSVSWSLYWGQGTQVTVSS

SEQ ID NO: 33156 - protein, 117 aa, Artificial Sequence
  Chemically Synthesized
QVQLQESGGGLVQAGGSLRLSCAASGTILLRTMGWYRQAPGKEREFVATITNGGITYYADSVKGRFTISRDNAKNTVYLQMNSLKPEDTAVYYCAVQVTGARQHGYWGQGTQVTVSS

SEQ ID NO: 33157 - protein, 118 aa, Artificial Sequence
  Chemically Synthesized
QVQLQESGGGLVQAGGSLRLSCAASGSIFTLSIMGWYRQAPGKEREFVAAITNGASTYYADSVKGRFTISRDNAKNTVYLQMNSLKPEDTAVYYCAAVIRNVAVHLYWGQGTQVTVSS

SEQ ID NO: 33158 - protein, 122 aa, Artificial Sequence
  Chemically Synthesized
QVQLQESGGGLVQAGGSLRLSCAASGNISDYPIMGWYRQAPGKEREFVAAIAVGTNTYYADSVKGRFTISRDNAKNTVYLQMNSLKPEDTAVYYCAVDSVYGTYDYDPYGYWGQGTQVTVSS

SEQ ID NO: 33159 - protein, 122 aa, Artificial Sequence
  Chemically Synthesized
QVQLQESGGGLVQAGGSLRLSCAASGYISPEPRMGWYRQAPGKERELVAGISIGASTNYADSVKGRFTISRDNAKNTVYLQMNSLKPEDTAVYYCAVVQTSLGYYDDSYDYWGQGTQVTVSS

SEQ ID NO: 33160 - protein, 118 aa, Artificial Sequence
  Chemically Synthesized
QVQLQESGGGLVQAGGSLRLSCAASGTIFGRWLMGWYRQAPGKEREFVAGISNGGNTYYADSVKGRFTISRDNAKNTVYLQMNSLKPEDTAVYYCAVGLYPYITHPYWGQGTQVTVSS

SEQ ID NO: 33161 - protein, 125 aa, Artificial Sequence
  Chemically Synthesized
QVQLQESGGGLVQAGGSLRLSCAASGSISYLYYMGWYRQAPGKERELVAGLVVVVIPYADSVKGRFTISRDNAKNTVYLQMNSLKPEDTAVYYCAVRIQRPDPWYILEDAIHDYWGQGTQVTVSS

SEQ ID NO: 33162 - protein, 121 aa, Artificial Sequence
  Chemically Synthesized
QVQLQESGGGLVQAGGSLRLSCAASGSIFRQFNMGWYRQAPGKEREFVATIGNGANYLYADSVKGRFTISRDNAKNTVYLQMNSLKPEDTAVYYCAVTVTVTLGFVTLLYWGQGTQVTVSS

SEQ ID NO: 33163 - protein, 118 aa, Artificial Sequence
  Chemically Synthesized
QVQLQESGGGLVQAGGSLRLSCAASGTIFDSSYMGWYRQAPGKEREFVASIAEGATTNYADSVKGRFTISRDNAKNTVYLQMNSLKPEDTAVYYCAALYDDDYSLTYWGQGTQVTVSS

SEQ ID NO: 33164 - protein, 122 aa, Artificial Sequence
  Chemically Synthesized
QVQLQESGGGLVQAGGSLRLSCAASGYIFLTRRMGWYRQAPGKEREFVAAITTGASTNYADSVKGRFTISRDNAKNTVYLQMNSLKPEDTAVYYCAVYPGTSNGTDGDHGYWGQGTQVTVSS

SEQ ID NO: 33165 - protein, 120 aa, Artificial Sequence
  Chemically Synthesized
QVQLQESGGGLVQAGGSLRLSCAASGSIFAYGGMGWYRQAPGKEREFVATISDGSTTNYADSVKGRFTISRDNAKNTVYLQMNSLKPEDTAVYYCAASSQEGNPYDHPYWGQGTQVTVSS

SEQ ID NO: 33166 - protein, 125 aa, Artificial Sequence
  Chemically Synthesized
QVQLQESGGGLVQAGGSLRLSCAASGSISYIAAMGWYRQAPGKEREFVATITYGGNTYYADSVKGRFTISRDNAKNTVYLQMNSLKPEDTAVYYCAVNAYYTLTGAYSLTTTLYWGQGTQVTVSS

SEQ ID NO: 33167 - protein, 118 aa, Artificial Sequence
  Chemically Synthesized
QVQLQESGGGLVQAGGSLRLSCAASGNISGPLLMGWYRQAPGKERELVAGISHGANTYYADSVKGRFTISRDNAKNTVYLQMNSLKPEDTAVYYCAAERYSDLFHPYWGQGTQVTVSS

SEQ ID NO: 33168 - protein, 126 aa, Artificial Sequence
  Chemically Synthesized
QVQLQESGGGLVQAGGSLRLSCAASGTISHDTTMGWYRQAPGKERELVATIAFGTTTNYADSVKGRFTISRDNAKNTVYLQMNSLKPEDTAVYYCAAGRVRPDREQQQTATALDYWGQGTQVTVSS

SEQ ID NO: 33169 - protein, 118 aa, Artificial Sequence
  Chemically Synthesized
QVQLQESGGGLVQAGGSLRLSCAASGNIFYPVLMGWYRQAPGKERELVAGITDGSTTYYADSVKGRFTISRDNAKNTVYLQMNSLKPEDTAVYYCAANVDYAYGLEYWGQGTQVTVSS

SEQ ID NO: 33170 - protein, 121 aa, Artificial Sequence
  Chemically Synthesized
QVQLQESGGGLVQAGGSLRLSCAASGYIFDIYLMGWYRQAPGKERELVAGITGSSTYYADSVKGRFTISRDNAKNTVYLQMNSLKPEDTAVYYCAAVAKGERADLNQHVYWGQGTQVTVSS

SEQ ID NO: 33171 - protein, 117 aa, Artificial Sequence
  Chemically Synthesized
QVQLQESGGGLVQAGGSLRLSCAASGSIFVRRYMGWYRQAPGKEREFVAAITAGLVPYADSVKGRFTISRDNAKNTVYLQMNSLKPEDTAVYYCANITSTNTLRFYWGQGTQVTVSS

SEQ ID NO: 33172 - protein, 119 aa, Artificial Sequence
  Chemically Synthesized
QVQLQESGGGLVQAGGSLRLSCAASGYIFTYFMGWYRQAPGKEREFVATIDRGTITNYADSVKGRFTISRDNAKNTVYLQMNSLKPEDTAVYYCAVWLVVLLTSVTLYWGQGTQVTVSS

SEQ ID NO: 33173 - protein, 126 aa, Artificial Sequence
  Chemically Synthesized
QVQLQESGGGLVQAGGSLRLSCAASGSIFLPIYMGWYRQAPGKEREFVASISYGTNTNYADSVKGRFTISRDNAKNTVYLQMNSLKPEDTAVYYCAVSDYSYDRYYYQRTDGHAYWGQGTQVTVSS

SEQ ID NO: 33174 - protein, 126 aa, Artificial Sequence
  Chemically Synthesized
QVQLQESGGGLVQAGGSLRLSCAASGNISYLYYMGWYRQAPGKEREFVAAIGAGSSTYYADSVKGRFTISRDNAKNTVYLQMNSLKPEDTAVYYCAVWTTVPYNTVLDYYTNHGYWGQGTQVTVSS

SEQ ID NO: 33175 - protein, 118 aa, Artificial Sequence
  Chemically Synthesized
QVQLQESGGGLVQAGGSLRLSCAASGTISRQIVMGWYRQAPGKERELVAAISGGGITYYADSVKGRFTISRDNAKNTVYLQMNSLKPEDTAVYYCAVVSVADRTHQYWGQGTQVTVSS

SEQ ID NO: 33176 - protein, 122 aa, Artificial Sequence
  Chemically Synthesized
QVQLQESGGGLVQAGGSLRLSCAASGNISYDWGMGWYRQAPGKERELVASINIGTITNYADSVKGRFTISRDNAKNTVYLQMNSLKPEDTAVYYCAADRNDYVYYATLFGYWGQGTQVTVSS

SEQ ID NO: 33177 - protein, 115 aa, Artificial Sequence
  Chemically Synthesized
QVQLQESGGGLVQAGGSLRLSCAASGYISRRSQMGWYRQAPGKERELVAAIGDGGITNYADSVKGRFTISRDNAKNTVYLQMNSLKPEDTAVYYCATTNTSTIYWGQGTQVTVSS

SEQ ID NO: 33178 - protein, 121 aa, Artificial Sequence
  Chemically Synthesized
QVQLQESGGGLVQAGGSLRLSCAASGYISYDTVMGWYRQAPGKERELVASISRGTSTYYADSVKGRFTISRDNAKNTVYLQMNSLKPEDTAVYYCAASSLVTLLLVTRFYWGQGTQVTVSS

SEQ ID NO: 33179 - protein, 118 aa, Artificial Sequence
  Chemically Synthesized
QVQLQESGGGLVQAGGSLRLSCAASGNIFYDYVMGWYRQAPGKERELVAAITQGTTTYYADSVKGRFTISRDNAKNTVYLQMNSLKPEDTAVYYCAVIYIWRSQLGYWGQGTQVTVSS

SEQ ID NO: 33180 - protein, 119 aa, Artificial Sequence
  Chemically Synthesized
QVQLQESGGGLVQAGGSLRLSCAASGTISLRPFMGWYRQAPGKEREFVASIAWGSPYADSVKGRFTISRDNAKNTVYLQMNSLKPEDTAVYYCAATRYVGPITSFVIYWGQGTQVTVSS

SEQ ID NO: 33181 - protein, 118 aa, Artificial Sequence
  Chemically Synthesized
QVQLQESGGGLVQAGGSLRLSCAASGNISVTWGMGWYRQAPGKERELVATIGTGGSTNYADSVKGRFTISRDNAKNTVYLQMNSLKPEDTAVYYCAARYVNVLRHSYWGQGTQVTVSS

SEQ ID NO: 33182 - protein, 118 aa, Artificial Sequence
  Chemically Synthesized
QVQLQESGGGLVQAGGSLRLSCAASGSISIGGAMGWYRQAPGKERELVATIDTGANTYYADSVKGRFTISRDNAKNTVYLQMNSLKPEDTAVYYCAANRQGRYYLGYWGQGTQVTVSS

SEQ ID NO: 33183 - protein, 125 aa, Artificial Sequence
  Chemically Synthesized
QVQLQESGGGLVQAGGSLRLSCAASGSIFYRDDMGWYRQAPGKERELVAGINSGTTTNYADSVKGRFTISRDNAKNTVYLQMNSLKPEDTAVYYCAARSWYARINQYDYTYLSYWGQGTQVTVSS

SEQ ID NO: 33184 - protein, 118 aa, Artificial Sequence
  Chemically Synthesized
QVQLQESGGGLVQAGGSLRLSCAASGNISPKDQMGWYRQAPGKERELVASISLGGNTNYADSVKGRFTISRDNAKNTVYLQMNSLKPEDTAVYYCAATNGGRYTHDYWGQGTQVTVSS

SEQ ID NO: 33185 - protein, 121 aa, Artificial Sequence
  Chemically Synthesized
QVQLQESGGGLVQAGGSLRLSCAASGYISIELYMGWYRQAPGKEREFVATIDNGTTTYADSVKGRFTISRDNAKNTVYLQMNSLKPEDTAVYYCAVDPYRKYPASSGHDYWGQGTQVTVSS

SEQ ID NO: 33186 - protein, 126 aa, Artificial Sequence
  Chemically Synthesized
QVQLQESGGGLVQAGGSLRLSCAASGTISLRDIMGWYRQAPGKERELVAGIDSGSNTYYADSVKGRFTISRDNAKNTVYLQMNSLKPEDTAVYYCAAPDKGNLHRALYFTHPLPYWGQGTQVTVSS

SEQ ID NO: 33187 - protein, 122 aa, Artificial Sequence
  Chemically Synthesized
QVQLQESGGGLVQAGGSLRLSCAASGYIFYFRDMGWYRQAPGKEREFVATISYGGNTNYADSVKGRFTISRDNAKNTVYLQMNSLKPEDTAVYYCAVWTSYIYDAIFPFQYWGQGTQVTVSS

SEQ ID NO: 33188 - protein, 126 aa, Artificial Sequence
  Chemically Synthesized
QVQLQESGGGLVQAGGSLRLSCAASGYISRIQAMGWYRQAPGKERELVAAIGQGASTNYADSVKGRFTISRDNAKNTVYLQMNSLKPEDTAVYYCAVVQEYPVQSYRGLWTYHEYWGQGTQVTVSS

SEQ ID NO: 33189 - protein, 122 aa, Artificial Sequence
  Chemically Synthesized
QVQLQESGGGLVQAGGSLRLSCAASGNISDYPIMGWYRQAPGKEREFVAAIGPGSTTNYADSVKGRFTISRDNAKNTVYLQMNSLKPEDTAVYYCAVRAIVEYPYVPNFRYWGQGTQVTVSS

SEQ ID NO: 33190 - protein, 126 aa, Artificial Sequence
  Chemically Synthesized
QVQLQESGGGLVQAGGSLRLSCAASGTISVSLIMGWYRQAPGKERELVASIGRGGTTYYADSVKGRFTISRDNAKNTVYLQMNSLKPEDTAVYYCAARVLREYTWDTDGDVAHRYWGQGTQVTVSS

SEQ ID NO: 33191 - protein, 126 aa, Artificial Sequence
  Chemically Synthesized
QVQLQESGGGLVQAGGSLRLSCAASGSIFPGVRMGWYRQAPGKEREFVAAISTGSITYYADSVKGRFTISRDNAKNTVYLQMNSLKPEDTAVYYCAADPPYTWIWPYTDNTPYSYWGQGTQVTVSS

SEQ ID NO: 33192 - protein, 118 aa, Artificial Sequence
  Chemically Synthesized
QVQLQESGGGLVQAGGSLRLSCAASGNISRRGRMGWYRQAPGKERELVASIGYGTITYYADSVKGRFTISRDNAKNTVYLQMNSLKPEDTAVYYCAADLVYGRSLYYWGQGTQVTVSS

SEQ ID NO: 33193 - protein, 121 aa, Artificial Sequence
  Chemically Synthesized
QVQLQESGGGLVQAGGSLRLSCAASGNIFPKDFMGWYRQAPGKEREFVAGISSVVVPYADSVKGRFTISRDNAKNTVYLQMNSLKPEDTAVYYCAVRYPSYSDQVVNYLYWGQGTQVTVSS

SEQ ID NO: 33194 - protein, 125 aa, Artificial Sequence
  Chemically Synthesized
QVQLQESGGGLVQAGGSLRLSCAASGTISAYDYMGWYRQAPGKEREFVATAGTSTYYADSVKGRFTISRDNAKNTVYLQMNSLKPEDTAVYYCAVVAYWNIQYGLRYHNIVYLYWGQGTQVTVSS

SEQ ID NO: 33195 - protein, 110 aa, Artificial Sequence
  Chemically Synthesized
QVQLQESGGGLVQAGGSLRLSCAASGTISPYGDMGWYRQAPGKEREFVAAITWGATTNYADSVKGRFTISRDNAKNTVYLQMNSLKPEDTAVYYCAALYWGQGTQVTVSS

SEQ ID NO: 33196 - protein, 118 aa, Artificial Sequence
  Chemically Synthesized
QVQLQESGGGLVQAGGSLRLSCAASGTIFAYTAMGWYRQAPGKERELVASIGPGAITNYADSVKGRFTISRDNAKNTVYLQMNSLKPEDTAVYYCAVPTDKSYSVLYWGQGTQVTVSS

SEQ ID NO: 33197 - protein, 117 aa, Artificial Sequence
  Chemically Synthesized
QVQLQESGGGLVQAGGSLRLSCAASGYIFADYRMGWYRQAPGKEREFVAAINWGASTYYADSVKGRFTISRDNAKNTVYLQMNSLKPEDTAVYYCAVPYTTPSVFYWGQGTQVTVSS

SEQ ID NO: 33198 - protein, 122 aa, Artificial Sequence
  Chemically Synthesized
QVQLQESGGGLVQAGGSLRLSCAASGNISYYDYMGWYRQAPGKEREFVATINAGASTYYADSVKGRFTISRDNAKNTVYLQMNSLKPEDTAVYYCAVLQYQIQSADDYYWYWGQGTQVTVSS

SEQ ID NO: 33199 - protein, 118 aa, Artificial Sequence
  Chemically Synthesized
QVQLQESGGGLVQAGGSLRLSCAASGTISGDVGMGWYRQAPGKERELVASIGYGTTTYYADSVKGRFTISRDNAKNTVYLQMNSLKPEDTAVYYCAAATNYVTEFAYWGQGTQVTVSS

SEQ ID NO: 33200 - protein, 117 aa, Artificial Sequence
  Chemically Synthesized
QVQLQESGGGLVQAGGSLRLSCAASGNIFRDSRMGWYRQAPGKERELVATITYGIVPYADSVKGRFTISRDNAKNTVYLQMNSLKPEDTAVYYCAAWYPFYTDHRYWGQGTQVTVSS

SEQ ID NO: 33201 - protein, 118 aa, Artificial Sequence
  Chemically Synthesized
QVQLQESGGGLVQAGGSLRLSCAASGTISDGPYMGWYRQAPGKEREFVAGIDDGGTTNYADSVKGRFTISRDNAKNTVYLQMNSLKPEDTAVYYCAAQLYVALEYHYWGQGTQVTVSS

SEQ ID NO: 33202 - protein, 125 aa, Artificial Sequence
  Chemically Synthesized
QVQLQESGGGLVQAGGSLRLSCAASGTISVVEGMGWYRQAPGKERELVATISVGSTTYYADSVKGRFTISRDNAKNTVYLQMNSLKPEDTAVYYCAVSVSVSTVVLSVLVRLMYWGQGTQVTVSS

SEQ ID NO: 33203 - protein, 116 aa, Artificial Sequence
  Chemically Synthesized
QVQLQESGGGLVQAGGSLRLSCAASGTIFEAYDIMGWYRQAPGKERELVATIAGGATTNYADSVKGRFTISRDNAKNTVYLQMNSLKPEDTAVYYCAVTFTPALYWGQGTQVTVSS

SEQ ID NO: 33204 - protein, 125 aa, Artificial Sequence
  Chemically Synthesized
QVQLQESGGGLVQAGGSLRLSCAASGSIFYGDIMGWYRQAPGKERELVASIGNGTTTNYADSVKGRFTISRDNAKNTVYLQMNSLKPEDTAVYYCAVADAYVLEQGTQSLCTFYWGQGTQVTVSS

SEQ ID NO: 33205 - protein, 122 aa, Artificial Sequence
  Chemically Synthesized
QVQLQESGGGLVQAGGSLRLSCAASGNIFWLYIMGWYRQAPGKEREFVAGIDYGTTTYYADSVKGRFTISRDNAKNTVYLQMNSLKPEDTAVYYCAAWVREPLVLGDAHVYWGQGTQVTVSS

SEQ ID NO: 33206 - protein, 113 aa, Artificial Sequence
  Chemically Synthesized
QVQLQESGGGLVQAGGSLRLSCAASGYISYLLWMGWYRQAPGKERELVAAVVVPYADSVKGRFTISRDNAKNTVYLQMNSLKPEDTAVYYCAVYQYAPDHGYWGQGTQVTVSS

SEQ ID NO: 33207 - protein, 122 aa, Artificial Sequence
  Chemically Synthesized
QVQLQESGGGLVQAGGSLRLSCAASGSIFYGDDMGWYRQAPGKEREFVASIAQGTITNYADSVKGRFTISRDNAKNTVYLQMNSLKPEDTAVYYCAVGRVRYPYVLVSFWYWGQGTQVTVSS

SEQ ID NO: 33208 - protein, 118 aa, Artificial Sequence
  Chemically Synthesized
QVQLQESGGGLVQAGGSLRLSCAASGSISGSPQMGWYRQAPGKERELVAGIGPGGITYYADSVKGRFTISRDNAKNTVYLQMNSLKPEDTAVYYCAVPGYYDSRHGYWGQGTQVTVSS

SEQ ID NO: 33209 - protein, 118 aa, Artificial Sequence
  Chemically Synthesized
QVQLQESGGGLVQAGGSLRLSCAASGSISYFNNMGWYRQAPGKEREFVATINYGTTTNYADSVKGRFTISRDNAKNTVYLQMNSLKPEDTAVYYCAVHLRITDDLVYWGQGTQVTVSS

SEQ ID NO: 33210 - protein, 109 aa, Artificial Sequence
  Chemically Synthesized
QVQLQESGGGLVQAGGSLRLSCAASGSIFDRPDMGWYRQAPGKERELVASISGGTSTNYADSVKGRFTISRDNAKNTVYLQMNSLKPEDTAVYYCACYWGQGTQVTVSS

SEQ ID NO: 33211 - protein, 117 aa, Artificial Sequence
  Chemically Synthesized
QVQLQESGGGLVQAGGSLRLSCAASGYIFTYDLMGWYRQAPGKERELVATIANGGNTYYADSVKGRFTISRDNAKNTVYLQMNSLKPEDTAVYYCAVLYSVNISMYWGQGTQVTVSS

SEQ ID NO: 33212 - protein, 117 aa, Artificial Sequence
  Chemically Synthesized
QVQLQESGGGLVQAGGSLRLSCAASGSISNGTDMGWYRQAPGKERELVATISIGSITYYADSVKGRFTISRDNAKNTVYLQMNSLKPEDTAVYYCAVDDPSLTVMYWGQGTQVTVSS

SEQ ID NO: 33213 - protein, 118 aa, Artificial Sequence
  Chemically Synthesized
QVQLQESGGGLVQAGGSLRLSCAASGSISTYFYMGWYRQAPGKERELVAAITWGTTTNYADSVKGRFTISRDNAKNTVYLQMNSLKPEDTAVYYCAASTTRYTPYIYWGQGTQVTVSS

SEQ ID NO: 33214 - protein, 117 aa, Artificial Sequence
  Chemically Synthesized
QVQLQESGGGLVQAGGSLRLSCAASGYISVDDFMGWYRQAPGKEREFVASIAGGGITYYADSVKGRFTISRDNAKNTVYLQMNSLKPEDTAVYYCAVAYDSKSFMYWGQGTQVTVSS

SEQ ID NO: 33215 - protein, 118 aa, Artificial Sequence
  Chemically Synthesized
QVQLQESGGGLVQAGGSLRLSCAASGNIFAAGYMGWYRQAPGKEREFVAAIGRGTTTYYADSVKGRFTISRDNAKNTVYLQMNSLKPEDTAVYYCAVGSAGVDPYAYWGQGTQVTVSS

SEQ ID NO: 33216 - protein, 118 aa, Artificial Sequence
  Chemically Synthesized
QVQLQESGGGLVQAGGSLRLSCAASGTISARVYMGWYRQAPGKEREFVASIGYGSITNYADSVKGRFTISRDNAKNTVYLQMNSLKPEDTAVYYCAVLHSDDNDHLYWGQGTQVTVSS

SEQ ID NO: 33217 - protein, 122 aa, Artificial Sequence
  Chemically Synthesized
QVQLQESGGGLVQAGGSLRLSCAASGTIFYTIYMGWYRQAPGKERELVAYWYYLYADSVKGRFTISRDNAKNTVYLQMNSLKPEDTAVYYCAVIYLRLTAWKWQHQAEYDYWGQGTQVTVSS

SEQ ID NO: 33218 - protein, 118 aa, Artificial Sequence
  Chemically Synthesized
QVQLQESGGGLVQAGGSLRLSCAASGYISAYGVMGWYRQAPGKEREFVATISSGATTYYADSVKGRFTISRDNAKNTVYLQMNSLKPEDTAVYYCAVDHPPYQYHSYWGQGTQVTVSS

SEQ ID NO: 33219 - protein, 118 aa, Artificial Sequence
  Chemically Synthesized
QVQLQESGGGLVQAGGSLRLSCAASGTISFPVLMGWYRQAPGKEREFVAAISQGSNTYYADSVKGRFTISRDNAKNTVYLQMNSLKPEDTAVYYCAVPYRDINRLYYWGQGTQVTVSS

SEQ ID NO: 33220 - protein, 117 aa, Artificial Sequence
  Chemically Synthesized
QVQLQESGGGLVQAGGSLRLSCAASGTIFGVTMGWYRQAPGKERELVAAITHGGTTYYADSVKGRFTISRDNAKNTVYLQMNSLKPEDTAVYYCAANYPQYWTFLYWGQGTQVTVSS

SEQ ID NO: 33221 - protein, 118 aa, Artificial Sequence
  Chemically Synthesized
QVQLQESGGGLVQAGGSLRLSCAASGYISYSPAMGWYRQAPGKERELVATIDIGSTTYYADSVKGRFTISRDNAKNTVYLQMNSLKPEDTAVYYCAVIGPGNLTHEYWGQGTQVTVSS

SEQ ID NO: 33222 - protein, 118 aa, Artificial Sequence
  Chemically Synthesized
QVQLQESGGGLVQAGGSLRLSCAASGSISYVDVMGWYRQAPGKERELVASISYGSITYYADSVKGRFTISRDNAKNTVYLQMNSLKPEDTAVYYCAAESYTDGKFYYWGQGTQVTVSS

SEQ ID NO: 33223 - protein, 117 aa, Artificial Sequence
  Chemically Synthesized
QVQLQESGGGLVQAGGSLRLSCAASGNIFPYGYMGWYRQAPGKEREFVAAITSGTTTNYADSVKGRFTISRDNAKNTVYLQMNSLKPEDTAVYYCAVSTTVVVVIYWGQGTQVTVSS

SEQ ID NO: 33224 - protein, 126 aa, Artificial Sequence
  Chemically Synthesized
QVQLQESGGGLVQAGGSLRLSCAASGTISYDRTMGWYRQAPGKERELVAAIGFGSNTYYADSVKGRFTISRDNAKNTVYLQMNSLKPEDTAVYYCAAIIFYQHSYLYFGYGPLDYWGQGTQVTVSS

SEQ ID NO: 33225 - protein, 118 aa, Artificial Sequence
  Chemically Synthesized
QVQLQESGGGLVQAGGSLRLSCAASGYISVRRRMGWYRQAPGKEREFVAAIGRGSNTNYADSVKGRFTISRDNAKNTVYLQMNSLKPEDTAVYYCAAGLYTAYGYEYWGQGTQVTVSS

SEQ ID NO: 33226 - protein, 113 aa, Artificial Sequence
  Chemically Synthesized
QVQLQESGGGLVQAGGSLRLSCAASGNIFYSYGMGWYRQAPGKERELVAGIDGGSTYYADSVKGRFTISRDNAKNTVYLQMNSLKPEDTAVYYCAVLLTSMYWGQGTQVTVSS

SEQ ID NO: 33227 - protein, 122 aa, Artificial Sequence
  Chemically Synthesized
QVQLQESGGGLVQAGGSLRLSCAASGTISWTDVMGWYRQAPGKERELVAAIGYGTITNYADSVKGRFTISRDNAKNTVYLQMNSLKPEDTAVYYCAVRSPSNSWHYNWLGYWGQGTQVTVSS

SEQ ID NO: 33228 - protein, 122 aa, Artificial Sequence
  Chemically Synthesized
QVQLQESGGGLVQAGGSLRLSCAASGTIFLLYDMGWYRQAPGKEREFVAAIGTGGTTYYADSVKGRFTISRDNAKNTVYLQMNSLKPEDTAVYYCAADSPLGDKGIATHPYWGQGTQVTVSS

SEQ ID NO: 33229 - protein, 119 aa, Artificial Sequence
  Chemically Synthesized
QVQLQESGGGLVQAGGSLRLSCAASGSISPWWIMGWYRQAPGKEREFVAGIDPGSNTYYADSVKGRFTISRDNAKNTVYLQMNSLKPEDTAVYYCAADHIASYSVTMYWGQGTQVTVSS

SEQ ID NO: 33230 - protein, 121 aa, Artificial Sequence
  Chemically Synthesized
QVQLQESGGGLVQAGGSLRLSCAASGSISDYDYMGWYRQAPGKERELVAALLTVLLPYADSVKGRFTISRDNAKNTVYLQMNSLKPEDTAVYYCAADILQDGYDDTKYDYWGQGTQVTVSS

SEQ ID NO: 33231 - protein, 118 aa, Artificial Sequence
  Chemically Synthesized
QVQLQESGGGLVQAGGSLRLSCAASGSIFGLTAMGWYRQAPGKEREFVAGITPGGTTYYADSVKGRFTISRDNAKNTVYLQMNSLKPEDTAVYYCAVGNTDHQGLPYWGQGTQVTVSS

SEQ ID NO: 33232 - protein, 118 aa, Artificial Sequence
  Chemically Synthesized
QVQLQESGGGLVQAGGSLRLSCAASGTIFVPVLMGWYRQAPGKEREFVAGINDGTNTYYADSVKGRFTISRDNAKNTVYLQMNSLKPEDTAVYYCAAQRSRVTDFPYWGQGTQVTVSS

SEQ ID NO: 33233 - protein, 118 aa, Artificial Sequence
  Chemically Synthesized
QVQLQESGGGLVQAGGSLRLSCAASGNISWADDMGWYRQAPGKERELVAGIGAGASTYYADSVKGRFTISRDNAKNTVYLQMNSLKPEDTAVYYCAAYDYHPDDFYYWGQGTQVTVSS

SEQ ID NO: 33234 - protein, 118 aa, Artificial Sequence
  Chemically Synthesized
QVQLQESGGGLVQAGGSLRLSCAASGNIFSLIAMGWYRQAPGKEREFVAGITGGATTYYADSVKGRFTISRDNAKNTVYLQMNSLKPEDTAVYYCAAVAQDTRALDYWGQGTQVTVSS

SEQ ID NO: 33235 - protein, 114 aa, Artificial Sequence
  Chemically Synthesized
QVQLQESGGGLVQAGGSLRLSCAASGYIFPDLDMGWYRQAPGKERELVASIDSVLVPYADSVKGRFTISRDNAKNTVYLQMNSLKPEDTAVYYCADKSDDYYYWGQGTQVTVSS

SEQ ID NO: 33236 - protein, 117 aa, Artificial Sequence
  Chemically Synthesized
QVQLQESGGGLVQAGGSLRLSCAASGNISDSDYMGWYRQAPGKEREFVAGIAGGTTTNYADSVKGRFTISRDNAKNTVYLQMNSLKPEDTAVYYCALTLLLMLLFYWGQGTQVTVSS

SEQ ID NO: 33237 - protein, 118 aa, Artificial Sequence
  Chemically Synthesized
QVQLQESGGGLVQAGGSLRLSCAASGTIFGSRDMGWYRQAPGKERELVAGIAEGTNTYYADSVKGRFTISRDNAKNTVYLQMNSLKPEDTAVYYCAVRTQDGRELSYWGQGTQVTVSS

SEQ ID NO: 33238 - protein, 122 aa, Artificial Sequence
  Chemically Synthesized
QVQLQESGGGLVQAGGSLRLSCAASGTISGWSVMGWYRQAPGKEREFVAGIAYGATTYYADSVKGRFTISRDNAKNTVYLQMNSLKPEDTAVYYCAVILPQSNTGHRYLAYWGQGTQVTVSS

SEQ ID NO: 33239 - protein, 113 aa, Artificial Sequence
  Chemically Synthesized
QVQLQESGGGLVQAGGSLRLSCAASGSISYDVDMGWYRQAPGKERELVATISSGGTTYYADSVKGRFTISRDNAKNTVYLQMNSLKPEDTAVYYCAATNVLYWGQGTQVTVSS

SEQ ID NO: 33240 - protein, 118 aa, Artificial Sequence
  Chemically Synthesized
QVQLQESGGGLVQAGGSLRLSCAASGYIFHWSLMGWYRQAPGKEREFVAGIAPGSNTYYADSVKGRFTISRDNAKNTVYLQMNSLKPEDTAVYYCAVGTITAPSYPYWGQGTQVTVSS

SEQ ID NO: 33241 - protein, 122 aa, Artificial Sequence
  Chemically Synthesized
QVQLQESGGGLVQAGGSLRLSCAASGNISIWYTMGWYRQAPGKERELVAAIDTGSTTYYADSVKGRFTISRDNAKNTVYLQMNSLKPEDTAVYYCAVDDHSRYSFDYGLRYWGQGTQVTVSS

SEQ ID NO: 33242 - protein, 126 aa, Artificial Sequence
  Chemically Synthesized
QVQLQESGGGLVQAGGSLRLSCAASGYIFVDNRMGWYRQAPGKERELVATIDAGGTTNYADSVKGRFTISRDNAKNTVYLQMNSLKPEDTAVYYCAVVTGFLGDYAVIQYETHVYWGQGTQVTVSS

SEQ ID NO: 33243 - protein, 122 aa, Artificial Sequence
  Chemically Synthesized
QVQLQESGGGLVQAGGSLRLSCAASGSISYAPDMGWYRQAPGKEREFVATIAGGGITYYADSVKGRFTISRDNAKNTVYLQMNSLKPEDTAVYYCAAYRANLSAEQYVHDYWGQGTQVTVSS

SEQ ID NO: 33244 - protein, 118 aa, Artificial Sequence
  Chemically Synthesized
QVQLQESGGGLVQAGGSLRLSCAASGTISVLGLMGWYRQAPGKEREFVAGIAAGSTTYYADSVKGRFTISRDNAKNTVYLQMNSLKPEDTAVYYCAAPSQLNHRHPYWGQGTQVTVSS

SEQ ID NO: 33245 - protein, 117 aa, Artificial Sequence
  Chemically Synthesized
QVQLQESGGGLVQAGGSLRLSCAASGTIFYFGDMGWYRQAPGKERELVATLVWVLLPYADSVKGRFTISRDNAKNTVYLQMNSLKPEDTAVYYCAVRSVYAWYHQYWGQGTQVTVSS

SEQ ID NO: 33246 - protein, 122 aa, Artificial Sequence
  Chemically Synthesized
QVQLQESGGGLVQAGGSLRLSCAASGSIFYYAYMGWYRQAPGKERELVAGIDRGGNTYYADSVKGRFTISRDNAKNTVYLQMNSLKPEDTAVYYCAVSYADESGYTYTLYYWGQGTQVTVSS

SEQ ID NO: 33247 - protein, 117 aa, Artificial Sequence
  Chemically Synthesized
QVQLQESGGGLVQAGGSLRLSCAASGYIFDPFYMGWYRQAPGKERELVAAIAIGTTTNYADSVKGRFTISRDNAKNTVYLQMNSLKPEDTAVYYCAVFTFETTSFYWGQGTQVTVSS

SEQ ID NO: 33248 - protein, 122 aa, Artificial Sequence
  Chemically Synthesized
QVQLQESGGGLVQAGGSLRLSCAASGTISAYASMGWYRQAPGKEREFVAGIAIGGSTYYADSVKGRFTISRDNAKNTVYLQMNSLKPEDTAVYYCAVDVPDTDHAALFYVYWGQGTQVTVSS

SEQ ID NO: 33249 - protein, 118 aa, Artificial Sequence
  Chemically Synthesized
QVQLQESGGGLVQAGGSLRLSCAASGTISFLSLMGWYRQAPGKEREFVAGINDGTTTYYADSVKGRFTISRDNAKNTVYLQMNSLKPEDTAVYYCAVGQAKSGVHPYWGQGTQVTVSS

SEQ ID NO: 33250 - protein, 118 aa, Artificial Sequence
  Chemically Synthesized
QVQLQESGGGLVQAGGSLRLSCAASGTISDPFIMGWYRQAPGKEREFVAAIGRGGNTYYADSVKGRFTISRDNAKNTVYLQMNSLKPEDTAVYYCAAGHAGEVVHPYWGQGTQVTVSS

SEQ ID NO: 33251 - protein, 121 aa, Artificial Sequence
  Chemically Synthesized
QVQLQESGGGLVQAGGSLRLSCAASGSIFGALVMGWYRQAPGKERELVAAIDSGGSTNYADSVKGRFTISRDNAKNTVYLQMNSLKPEDTAVYYCAVYNQFYKRDVYSLYWGQGTQVTVSS

SEQ ID NO: 33252 - protein, 126 aa, Artificial Sequence
  Chemically Synthesized
QVQLQESGGGLVQAGGSLRLSCAASGTISYYIVMGWYRQAPGKEREFVAAISSGGTTNYADSVKGRFTISRDNAKNTVYLQMNSLKPEDTAVYYCAVYTDSPDTFAYIILRTHEYWGQGTQVTVSS

SEQ ID NO: 33253 - protein, 122 aa, Artificial Sequence
  Chemically Synthesized
QVQLQESGGGLVQAGGSLRLSCAASGTIFYTDIMGWYRQAPGKERELVASIDPGGITYYADSVKGRFTISRDNAKNTVYLQMNSLKPEDTAVYYCAVYQYITDDDVAYLEYWGQGTQVTVSS

SEQ ID NO: 33254 - protein, 118 aa, Artificial Sequence
  Chemically Synthesized
QVQLQESGGGLVQAGGSLRLSCAASGSISIYRGMGWYRQAPGKERELVASIAFGGITYYADSVKGRFTISRDNAKNTVYLQMNSLKPEDTAVYYCAAGVRKRKYFGYWGQGTQVTVSS

SEQ ID NO: 33255 - protein, 119 aa, Artificial Sequence
  Chemically Synthesized
QVQLQESGGGLVQAGGSLRLSCAASGNISTAYLMGWYRQAPGKEREFVAGIALGSSTYYADSVKGRFTISRDNAKNTVYLQMNSLKPEDTAVYYCAAPLRYPVDSHAYWGQGTQVTVSS

SEQ ID NO: 33256 - protein, 121 aa, Artificial Sequence
  Chemically Synthesized
QVQLQESGGGLVQAGGSLRLSCAASGTISSGAGMGWYRQAPGKERELVASIDSVVIPYADSVKGRFTISRDNAKNTVYLQMNSLKPEDTAVYYCAVGGEYNTYILPAYTYWGQGTQVTVSS

SEQ ID NO: 33257 - protein, 121 aa, Artificial Sequence
  Chemically Synthesized
QVQLQESGGGLVQAGGSLRLSCAASGTIFIRSWMGWYRQAPGKEREFVASIASGTTTNYADSVKGRFTISRDNAKNTVYLQMNSLKPEDTAVYYCAVDAAGAEGYDSNFYWGQGTQVTVSS

SEQ ID NO: 33258 - protein, 122 aa, Artificial Sequence
  Chemically Synthesized
QVQLQESGGGLVQAGGSLRLSCAASGTIFSGPTMGWYRQAPGKERELVASIAHGGSTNYADSVKGRFTISRDNAKNTVYLQMNSLKPEDTAVYYCAAGYYAVYARPDNFYYWGQGTQVTVSS

SEQ ID NO: 33259 - protein, 118 aa, Artificial Sequence
  Chemically Synthesized
QVQLQESGGGLVQAGGSLRLSCAASGSIFLPSEMGWYRQAPGKERELVAAIGYGTSTYYADSVKGRFTISRDNAKNTVYLQMNSLKPEDTAVYYCAVYAQDGYRLGYWGQGTQVTVSS

SEQ ID NO: 33260 - protein, 117 aa, Artificial Sequence
  Chemically Synthesized
QVQLQESGGGLVQAGGSLRLSCAASGYISANSTMGWYRQAPGKERELVAGITDGASTYYADSVKGRFTISRDNAKNTVYLQMNSLKPEDTAVYYCADRPSGRWSLYWGQGTQVTVSS

SEQ ID NO: 33261 - protein, 120 aa, Artificial Sequence
  Chemically Synthesized
QVQLQESGGGLVQAGGSLRLSCAASGNISGRYTMGWYRQAPGKERELVAGIGSGSSTYYADSVKGRFTISRDNAKNTVYLQMNSLKPEDTAVYYCAPRYHLFEYDAHAYWGQGTQVTVSS

SEQ ID NO: 33262 - protein, 117 aa, Artificial Sequence
  Chemically Synthesized
QVQLQESGGGLVQAGGSLRLSCAASGTIFYTAYMGWYRQAPGKERELVATINEGSTTYYADSVKGRFTISRDNAKNTVYLQMNSLKPEDTAVYYCAALFYHISTMYWGQGTQVTVSS

SEQ ID NO: 33263 - protein, 118 aa, Artificial Sequence
  Chemically Synthesized
QVQLQESGGGLVQAGGSLRLSCAASGTIFNATYMGWYRQAPGKEREFVAGINYGGSTYYADSVKGRFTISRDNAKNTVYLQMNSLKPEDTAVYYCAVEDDYYYLFTYWGQGTQVTVSS

SEQ ID NO: 33264 - protein, 126 aa, Artificial Sequence
  Chemically Synthesized
QVQLQESGGGLVQAGGSLRLSCAASGSISRRYDMGWYRQAPGKEREFVAAIGDGSNTNYADSVKGRFTISRDNAKNTVYLQMNSLKPEDTAVYYCAARAHYWYIGGYTDDDKHDYWGQGTQVTVSS

SEQ ID NO: 33265 - protein, 118 aa, Artificial Sequence
  Chemically Synthesized
QVQLQESGGGLVQAGGSLRLSCAASGTISAPYWMGWYRQAPGKEREFVAGISRGSSTYYADSVKGRFTISRDNAKNTVYLQMNSLKPEDTAVYYCAAGSGTGYYLDYWGQGTQVTVSS

SEQ ID NO: 33266 - protein, 118 aa, Artificial Sequence
  Chemically Synthesized
QVQLQESGGGLVQAGGSLRLSCAASGTISGLTLMGWYRQAPGKEREFVAGISVGANTYYADSVKGRFTISRDNAKNTVYLQMNSLKPEDTAVYYCAVGKGTYGEYPYWGQGTQVTVSS

SEQ ID NO: 33267 - protein, 122 aa, Artificial Sequence
  Chemically Synthesized
QVQLQESGGGLVQAGGSLRLSCAASGSISDAAYMGWYRQAPGKERELVAGITLGTSTYYADSVKGRFTISRDNAKNTVYLQMNSLKPEDTAVYYCAVDGYGYVHPYDTLGYWGQGTQVTVSS

SEQ ID NO: 33268 - protein, 122 aa, Artificial Sequence
  Chemically Synthesized
QVQLQESGGGLVQAGGSLRLSCAASGSIFPLIRMGWYRQAPGKEREFVAAIDQGTITYYADSVKGRFTISRDNAKNTVYLQMNSLKPEDTAVYYCAAALADYSPQRDQHDYWGQGTQVTVSS

SEQ ID NO: 33269 - protein, 120 aa, Artificial Sequence
  Chemically Synthesized
QVQLQESGGGLVQAGGSLRLSCAASGYISWWMGWYRQAPGKEREFVAGISYGSTTNYADSVKGRFTISRDNAKNTVYLQMNSLKPEDTAVYYCAAQYDTNQVGYDYLYYWGQGTQVTVSS

SEQ ID NO: 33270 - protein, 118 aa, Artificial Sequence
  Chemically Synthesized
QVQLQESGGGLVQAGGSLRLSCAASGNISYVDFMGWYRQAPGKEREFVATIANGGTTYYADSVKGRFTISRDNAKNTVYLQMNSLKPEDTAVYYCAVYFQDRAYFTYWGQGTQVTVSS

SEQ ID NO: 33271 - protein, 116 aa, Artificial Sequence
  Chemically Synthesized
QVQLQESGGGLVQAGGSLRLSCAASGSISIVDQMGWYRQAPGKEREFVATILTVLVPYADSVKGRFTISRDNAKNTVYLQMNSLKPEDTAVYYCAVPVPYIDYLYWGQGTQVTVSS

SEQ ID NO: 33272 - protein, 125 aa, Artificial Sequence
  Chemically Synthesized
QVQLQESGGGLVQAGGSLRLSCAASGNISIPGNMGWYRQAPGKERELVASIGLGGNTNYADSVKGRFTISRDNAKNTVYLQMNSLKPEDTAVYYCAALYDATVLDYGYRRAHPYWGQGTQVTVSS

SEQ ID NO: 33273 - protein, 122 aa, Artificial Sequence
  Chemically Synthesized
QVQLQESGGGLVQAGGSLRLSCAASGSIFSPFQMGWYRQAPGKEREFVATIGLGGNTNYADSVKGRFTISRDNAKNTVYLQMNSLKPEDTAVYYCAAYTLLYGDPISRYYYWGQGTQVTVSS

SEQ ID NO: 33274 - protein, 121 aa, Artificial Sequence
  Chemically Synthesized
QVQLQESGGGLVQAGGSLRLSCAASGYISADSGMGWYRQAPGKERELVASISAGSSTNYADSVKGRFTISRDNAKNTVYLQMNSLKPEDTAVYYCAAYGVGVARQTVVMYWGQGTQVTVSS

SEQ ID NO: 33275 - protein, 118 aa, Artificial Sequence
  Chemically Synthesized
QVQLQESGGGLVQAGGSLRLSCAASGYIFTPWLMGWYRQAPGKEREFVAGITDGSSTYYADSVKGRFTISRDNAKNTVYLQMNSLKPEDTAVYYCAAGGRYYGAYPYWGQGTQVTVSS

SEQ ID NO: 33276 - protein, 118 aa, Artificial Sequence
  Chemically Synthesized
QVQLQESGGGLVQAGGSLRLSCAASGTIFALYSMGWYRQAPGKERELVASIGSGSITYYADSVKGRFTISRDNAKNTVYLQMNSLKPEDTAVYYCAARYDRDTYHSYWGQGTQVTVSS

SEQ ID NO: 33277 - protein, 121 aa, Artificial Sequence
  Chemically Synthesized
QVQLQESGGGLVQAGGSLRLSCAASGTISDSLMGWYRQAPGKERELVAAIAGGTSTYYADSVKGRFTISRDNAKNTVYLQMNSLKPEDTAVYYCAVYLYLTRQDGEPYRYWGQGTQVTVSS

SEQ ID NO: 33278 - protein, 118 aa, Artificial Sequence
  Chemically Synthesized
QVQLQESGGGLVQAGGSLRLSCAASGNIFWYDSMGWYRQAPGKEREFVATISQGTNTNYADSVKGRFTISRDNAKNTVYLQMNSLKPEDTAVYYCAVGQNADTYLDYWGQGTQVTVSS

SEQ ID NO: 33279 - protein, 122 aa, Artificial Sequence
  Chemically Synthesized
QVQLQESGGGLVQAGGSLRLSCAASGTIFSTYGMGWYRQAPGKEREFVAAIGGGSSTNYADSVKGRFTISRDNAKNTVYLQMNSLKPEDTAVYYCAAAYLYVAAVARLLGYWGQGTQVTVSS

SEQ ID NO: 33280 - protein, 117 aa, Artificial Sequence
  Chemically Synthesized
QVQLQESGGGLVQAGGSLRLSCAASGNIFHYDNMGWYRQAPGKERELVASIGGGGRPYADSVKGRFTISRDNAKNTVYLQMNSLKPEDTAVYYCAADDAYSDQFGYWGQGTQVTVSS

SEQ ID NO: 33281 - protein, 122 aa, Artificial Sequence
  Chemically Synthesized
QVQLQESGGGLVQAGGSLRLSCAASGTISRYAYMGWYRQAPGKERELVAAINYGGSTYYADSVKGRFTISRDNAKNTVYLQMNSLKPEDTAVYYCAAYKRRYSPFVLPYLYWGQGTQVTVSS

SEQ ID NO: 33282 - protein, 122 aa, Artificial Sequence
  Chemically Synthesized
QVQLQESGGGLVQAGGSLRLSCAASGNIFYTGPMGWYRQAPGKERELVATIASGTTTYYADSVKGRFTISRDNAKNTVYLQMNSLKPEDTAVYYCAASRARNDYNRSRYAYWGQGTQVTVSS

SEQ ID NO: 33283 - protein, 118 aa, Artificial Sequence
  Chemically Synthesized
QVQLQESGGGLVQAGGSLRLSCAASGTIFRNWDMGWYRQAPGKERELVATITLGGNTNYADSVKGRFTISRDNAKNTVYLQMNSLKPEDTAVYYCAVVNNYSRSLYYWGQGTQVTVSS

SEQ ID NO: 33284 - protein, 117 aa, Artificial Sequence
  Chemically Synthesized
QVQLQESGGGLVQAGGSLRLSCAASGSIFYAWYMGWYRQAPGKEREFVASIDSVLIPYADSVKGRFTISRDNAKNTVYLQMNSLKPEDTAVYYCAATSEYYYPHWYWGQGTQVTVSS

SEQ ID NO: 33285 - protein, 122 aa, Artificial Sequence
  Chemically Synthesized
QVQLQESGGGLVQAGGSLRLSCAASGYISGPRRMGWYRQAPGKERELVAAITQGGITYYADSVKGRFTISRDNAKNTVYLQMNSLKPEDTAVYYCAVPSGDYDREDPYLQYWGQGTQVTVSS

SEQ ID NO: 33286 - protein, 126 aa, Artificial Sequence
  Chemically Synthesized
QVQLQESGGGLVQAGGSLRLSCAASGTIFHSRNMGWYRQAPGKEREFVAAIGGGSTTNYADSVKGRFTISRDNAKNTVYLQMNSLKPEDTAVYYCAVTYGPKIEYTPYDYPWHRYWGQGTQVTVSS

SEQ ID NO: 33287 - protein, 118 aa, Artificial Sequence
  Chemically Synthesized
QVQLQESGGGLVQAGGSLRLSCAASGSIFYSQYMGWYRQAPGKEREFVAAIDAGSSTYYADSVKGRFTISRDNAKNTVYLQMNSLKPEDTAVYYCAVYAINSHNYGYWGQGTQVTVSS

SEQ ID NO: 33288 - protein, 122 aa, Artificial Sequence
  Chemically Synthesized
QVQLQESGGGLVQAGGSLRLSCAASGTISRDGFMGWYRQAPGKERELVAGITPGGTTYYADSVKGRFTISRDNAKNTVYLQMNSLKPEDTAVYYCAALSKALTDGYDLYGYWGQGTQVTVSS

SEQ ID NO: 33289 - protein, 121 aa, Artificial Sequence
  Chemically Synthesized
QVQLQESGGGLVQAGGSLRLSCAASGSISREGVMGWYRQAPGKERELVATINNGGNTYYADSVKGRFTISRDNAKNTVYLQMNSLKPEDTAVYYCAASTKLTTLRLLTFYWGQGTQVTVSS

SEQ ID NO: 33290 - protein, 121 aa, Artificial Sequence
  Chemically Synthesized
QVQLQESGGGLVQAGGSLRLSCAASGTIFTRLMGWYRQAPGKEREFVAAIGQGTTTNYADSVKGRFTISRDNAKNTVYLQMNSLKPEDTAVYYCAVGYYESNTPYRRYGYWGQGTQVTVSS

SEQ ID NO: 33291 - protein, 122 aa, Artificial Sequence
  Chemically Synthesized
QVQLQESGGGLVQAGGSLRLSCAASGSISGDGYMGWYRQAPGKERELVAAIDPGGNTYYADSVKGRFTISRDNAKNTVYLQMNSLKPEDTAVYYCAAWYAGWQEIPWQYPYWGQGTQVTVSS

SEQ ID NO: 33292 - protein, 118 aa, Artificial Sequence
  Chemically Synthesized
QVQLQESGGGLVQAGGSLRLSCAASGNIFGWLQMGWYRQAPGKEREFVATIALGATTNYADSVKGRFTISRDNAKNTVYLQMNSLKPEDTAVYYCAVLNTQYEWYQYWGQGTQVTVSS

SEQ ID NO: 33293 - protein, 117 aa, Artificial Sequence
  Chemically Synthesized
QVQLQESGGGLVQAGGSLRLSCAASGNISWYDVMGWYRQAPGKEREFVAAITYGTSTNYADSVKGRFTISRDNAKNTVYLQMNSLKPEDTAVYYCAVYYDDPFLRYWGQGTQVTVSS

SEQ ID NO: 33294 - protein, 118 aa, Artificial Sequence
  Chemically Synthesized
QVQLQESGGGLVQAGGSLRLSCAASGTIFQNRVMGWYRQAPGKERELVAGIGFGGTTNYADSVKGRFTISRDNAKNTVYLQMNSLKPEDTAVYYCAAYVHAYDDYHYWGQGTQVTVSS

SEQ ID NO: 33295 - protein, 117 aa, Artificial Sequence
  Chemically Synthesized
QVQLQESGGGLVQAGGSLRLSCAASGSISGSAYMGWYRQAPGKEREFVASIAPGSTTNYADSVKGRFTISRDNAKNTVYLQMNSLKPEDTAVYYCAFVTLLVLLLYWGQGTQVTVSS

SEQ ID NO: 33296 - protein, 122 aa, Artificial Sequence
  Chemically Synthesized
QVQLQESGGGLVQAGGSLRLSCAASGTIFDGDDMGWYRQAPGKEREFVAAITVGATTNYADSVKGRFTISRDNAKNTVYLQMNSLKPEDTAVYYCAADGADISTQSGQHRYWGQGTQVTVSS

SEQ ID NO: 33297 - protein, 126 aa, Artificial Sequence
  Chemically Synthesized
QVQLQESGGGLVQAGGSLRLSCAASGNIFAGDGMGWYRQAPGKEREFVAGINYGGTTYYADSVKGRFTISRDNAKNTVYLQMNSLKPEDTAVYYCAVRRDDEVIGLGGARVRLGYWGQGTQVTVSS

SEQ ID NO: 33298 - protein, 116 aa, Artificial Sequence
  Chemically Synthesized
QVQLQESGGGLVQAGGSLRLSCAASGYISRNSYMGWYRQAPGKERELVASITSGGRPYADSVKGRFTISRDNAKNTVYLQMNSLKPEDTAVYYCAAWGLYSTVIYWGQGTQVTVSS

SEQ ID NO: 33299 - protein, 118 aa, Artificial Sequence
  Chemically Synthesized
QVQLQESGGGLVQAGGSLRLSCAASGYISSHYVMGWYRQAPGKEREFVAAIAVGTITNYADSVKGRFTISRDNAKNTVYLQMNSLKPEDTAVYYCAVAYYHSGSLDYWGQGTQVTVSS

SEQ ID NO: 33300 - protein, 118 aa, Artificial Sequence
  Chemically Synthesized
QVQLQESGGGLVQAGGSLRLSCAASGTIFDNYGMGWYRQAPGKERELVAAINTGGSTYYADSVKGRFTISRDNAKNTVYLQMNSLKPEDTAVYYCAVATYVDATFLYWGQGTQVTVSS

SEQ ID NO: 33301 - protein, 118 aa, Artificial Sequence
  Chemically Synthesized
QVQLQESGGGLVQAGGSLRLSCAASGTISYTGDMGWYRQAPGKEREFVAAISIGTNTYYADSVKGRFTISRDNAKNTVYLQMNSLKPEDTAVYYCAVGYGFDRNLRYWGQGTQVTVSS

SEQ ID NO: 33302 - protein, 118 aa, Artificial Sequence
  Chemically Synthesized
QVQLQESGGGLVQAGGSLRLSCAASGTISLGQIMGWYRQAPGKEREFVAAIDTGAITYYADSVKGRFTISRDNAKNTVYLQMNSLKPEDTAVYYCAVKNTGLLYHDYWGQGTQVTVSS

SEQ ID NO: 33303 - protein, 122 aa, Artificial Sequence
  Chemically Synthesized
QVQLQESGGGLVQAGGSLRLSCAASGYISIDGSMGWYRQAPGKERELVAGIATGGSTNYADSVKGRFTISRDNAKNTVYLQMNSLKPEDTAVYYCAADSPYTNRTREYLEYWGQGTQVTVSS

SEQ ID NO: 33304 - protein, 118 aa, Artificial Sequence
  Chemically Synthesized
QVQLQESGGGLVQAGGSLRLSCAASGSISSPLVMGWYRQAPGKEREFVAGISYGATTYYADSVKGRFTISRDNAKNTVYLQMNSLKPEDTAVYYCAAYDYDSQGLDYWGQGTQVTVSS

SEQ ID NO: 33305 - protein, 126 aa, Artificial Sequence
  Chemically Synthesized
QVQLQESGGGLVQAGGSLRLSCAASGSISAITVMGWYRQAPGKEREFVAGIAGGGTTYYADSVKGRFTISRDNAKNTVYLQMNSLKPEDTAVYYCAAESSTGYVGFRGDGVRFRYWGQGTQVTVSS

SEQ ID NO: 33306 - protein, 117 aa, Artificial Sequence
  Chemically Synthesized
QVQLQESGGGLVQAGGSLRLSCAASGSISYTSHMGWYRQAPGKERELVATIGDGSSTNYADSVKGRFTISRDNAKNTVYLQMNSLKPEDTAVYYCAADSRSRFHDYWGQGTQVTVSS

SEQ ID NO: 33307 - protein, 125 aa, Artificial Sequence
  Chemically Synthesized
QVQLQESGGGLVQAGGSLRLSCAASGTILTRRMGWYRQAPGKERELVATISNGSNTNYADSVKGRFTISRDNAKNTVYLQMNSLKPEDTAVYYCAADWYYNVALDYSVQWELAYWGQGTQVTVSS

SEQ ID NO: 33308 - protein, 118 aa, Artificial Sequence
  Chemically Synthesized
QVQLQESGGGLVQAGGSLRLSCAASGTIFYEHYMGWYRQAPGKERELVASIAGGSTTYYADSVKGRFTISRDNAKNTVYLQMNSLKPEDTAVYYCAAYEVVVRVHAYWGQGTQVTVSS

SEQ ID NO: 33309 - protein, 117 aa, Artificial Sequence
  Chemically Synthesized
QVQLQESGGGLVQAGGSLRLSCAASGTISPGYTMGWYRQAPGKEREFVPLLVLVLLPYADSVKGRFTISRDNAKNTVYLQMNSLKPEDTAVYYCAAILSSGVRHGYWGQGTQVTVSS

SEQ ID NO: 33310 - protein, 117 aa, Artificial Sequence
  Chemically Synthesized
QVQLQESGGGLVQAGGSLRLSCAASGNISWGLFMGWYRQAPGKERELVAAIAAGSTTNYADSVKGRFTISRDNAKNTVYLQMNSLKPEDTAVYYCAVTTLVVVIMYWGQGTQVTVSS

SEQ ID NO: 33311 - protein, 118 aa, Artificial Sequence
  Chemically Synthesized
QVQLQESGGGLVQAGGSLRLSCAASGNIFYIYQMGWYRQAPGKERELVATINDGSITYYADSVKGRFTISRDNAKNTVYLQMNSLKPEDTAVYYCAVYIARRYFLYYWGQGTQVTVSS

SEQ ID NO: 33312 - protein, 121 aa, Artificial Sequence
  Chemically Synthesized
QVQLQESGGGLVQAGGSLRLSCAASGTISTAFFMGWYRQAPGKERELVASITYGATTYYADSVKGRFTISRDNAKNTVYLQMNSLKPEDTAVYYCAVYDWPNYAYHYFYYWGQGTQVTVSS

SEQ ID NO: 33313 - protein, 118 aa, Artificial Sequence
  Chemically Synthesized
QVQLQESGGGLVQAGGSLRLSCAASGNISGDVRMGWYRQAPGKEREFVAAINPGGITYYADSVKGRFTISRDNAKNTVYLQMNSLKPEDTAVYYCAVAVQPYEYYQYWGQGTQVTVSS

SEQ ID NO: 33314 - protein, 118 aa, Artificial Sequence
  Chemically Synthesized
QVQLQESGGGLVQAGGSLRLSCAASGTIFRTIYMGWYRQAPGKEREFVATINYGGNTNYADSVKGRFTISRDNAKNTVYLQMNSLKPEDTAVYYCAVVWVAEGIHYYWGQGTQVTVSS

SEQ ID NO: 33315 - protein, 122 aa, Artificial Sequence
  Chemically Synthesized
QVQLQESGGGLVQAGGSLRLSCAASGNIFGDAYMGWYRQAPGKEREFVATIGPGANTNYADSVKGRFTISRDNAKNTVYLQMNSLKPEDTAVYYCAVAIYRRYRSPAYHAYWGQGTQVTVSS

SEQ ID NO: 33316 - protein, 126 aa, Artificial Sequence
  Chemically Synthesized
QVQLQESGGGLVQAGGSLRLSCAASGNIFLLGVMGWYRQAPGKEREFVASITYGGNTNYADSVKGRFTISRDNAKNTVYLQMNSLKPEDTAVYYCAALSYDSGPTRNYYHQWHYYWGQGTQVTVSS

SEQ ID NO: 33317 - protein, 118 aa, Artificial Sequence
  Chemically Synthesized
QVQLQESGGGLVQAGGSLRLSCAASGYISPPDYMGWYRQAPGKEREFVAGINFGTSTNYADSVKGRFTISRDNAKNTVYLQMNSLKPEDTAVYYCAALQYTDKYHYYWGQGTQVTVSS

SEQ ID NO: 33318 - protein, 119 aa, Artificial Sequence
  Chemically Synthesized
QVQLQESGGGLVQAGGSLRLSCAASGYIFPYASMGWYRQAPGKERELVAAIAPGGTTNYADSVKGRFTISRDNAKNTVYLQMNSLKPEDTAVYYCAAAYHAVDAWFGYWGQGTQVTVSS

SEQ ID NO: 33319 - protein, 122 aa, Artificial Sequence
  Chemically Synthesized
QVQLQESGGGLVQAGGSLRLSCAASGSISGTSSMGWYRQAPGKEREFVAAIAPGGTTNYADSVKGRFTISRDNAKNTVYLQMNSLKPEDTAVYYCAVDDYDRNKGWNLHAYWGQGTQVTVSS

SEQ ID NO: 33320 - protein, 118 aa, Artificial Sequence
  Chemically Synthesized
QVQLQESGGGLVQAGGSLRLSCAASGYISYDAPMGWYRQAPGKEREFVAGITIGGNTNYADSVKGRFTISRDNAKNTVYLQMNSLKPEDTAVYYCAAVSGKGPFHGYWGQGTQVTVSS

SEQ ID NO: 33321 - protein, 121 aa, Artificial Sequence
  Chemically Synthesized
QVQLQESGGGLVQAGGSLRLSCAASGTISRVWYMGWYRQAPGKEREFVASIAPGTTNYADSVKGRFTISRDNAKNTVYLQMNSLKPEDTAVYYCAAYLYYATADDIGLPYWGQGTQVTVSS

SEQ ID NO: 33322 - protein, 118 aa, Artificial Sequence
  Chemically Synthesized
QVQLQESGGGLVQAGGSLRLSCAASGTIFPANGMGWYRQAPGKEREFVAAISPGGNTNYADSVKGRFTISRDNAKNTVYLQMNSLKPEDTAVYYCAALYYYGGYHAYWGQGTQVTVSS

SEQ ID NO: 33323 - protein, 125 aa, Artificial Sequence
  Chemically Synthesized
QVQLQESGGGLVQAGGSLRLSCAASGNISWGERMGWYRQAPGKERELLPVLVTVLVPYADSVKGRFTISRDNAKNTVYLQMNSLKPEDTAVYYCAVYTITVHAIDLPFYTFLVYWGQGTQVTVSS

SEQ ID NO: 33324 - protein, 122 aa, Artificial Sequence
  Chemically Synthesized
QVQLQESGGGLVQAGGSLRLSCAASGTIFLDGDMGWYRQAPGKERELVAGIDTGATTYYADSVKGRFTISRDNAKNTVYLQMNSLKPEDTAVYYCAADTYRYNYHYWWHQYWGQGTQVTVSS

SEQ ID NO: 33325 - protein, 118 aa, Artificial Sequence
  Chemically Synthesized
QVQLQESGGGLVQAGGSLRLSCAASGTIFRPGPMGWYRQAPGKEREFVATISEGGSTYYADSVKGRFTISRDNAKNTVYLQMNSLKPEDTAVYYCAVTKTPSDDLRYWGQGTQVTVSS

SEQ ID NO: 33326 - protein, 126 aa, Artificial Sequence
  Chemically Synthesized
QVQLQESGGGLVQAGGSLRLSCAASGNIFTYEGMGWYRQAPGKERELVAAIAIGTITYYADSVKGRFTISRDNAKNTVYLQMNSLKPEDTAVYYCAAYDTFSPDVKYDWRDGYGYWGQGTQVTVSS

SEQ ID NO: 33327 - protein, 117 aa, Artificial Sequence
  Chemically Synthesized
QVQLQESGGGLVQAGGSLRLSCAASGTISDYYVMGWYRQAPGKEREFVATIGHGSNTNYADSVKGRFTISRDNAKNTVYLQMNSLKPEDTAVYYCAAPYGWGTFGYWGQGTQVTVSS

SEQ ID NO: 33328 - protein, 119 aa, Artificial Sequence
  Chemically Synthesized
QVQLQESGGGLVQAGGSLRLSCAASGNIFLYRGMGWYRQAPGKEREFVASISHGGTTNYADSVKGRFTISRDNAKNTVYLQMNSLKPEDTAVYYCASHRNVREWFYGYWGQGTQVTVSS

SEQ ID NO: 33329 - protein, 117 aa, Artificial Sequence
  Chemically Synthesized
QVQLQESGGGLVQAGGSLRLSCAASGTILLTFMGWYRQAPGKEREFVATITYGASTNYADSVKGRFTISRDNAKNTVYLQMNSLKPEDTAVYYCAAEIPSSDQFGYWGQGTQVTVSS

SEQ ID NO: 33330 - protein, 118 aa, Artificial Sequence
  Chemically Synthesized
QVQLQESGGGLVQAGGSLRLSCAASGTISLVYAMGWYRQAPGKEREFVAGISAGTTTNYADSVKGRFTISRDNAKNTVYLQMNSLKPEDTAVYYCAVVYSKYPYHSYWGQGTQVTVSS

SEQ ID NO: 33331 - protein, 125 aa, Artificial Sequence
  Chemically Synthesized
QVQLQESGGGLVQAGGSLRLSCAASGTISRPYYMGWYRQAPGKEREFVAGINRGTITYYADSVKGRFTISRDNAKNTVYLQMNSLKPEDTAVYYCAVDYSYYSWEEGYQASDHYWGQGTQVTVSS

SEQ ID NO: 33332 - protein, 126 aa, Artificial Sequence
  Chemically Synthesized
QVQLQESGGGLVQAGGSLRLSCAASGNISQEDNMGWYRQAPGKEREFVATIANGTSTNYADSVKGRFTISRDNAKNTVYLQMNSLKPEDTAVYYCAAITRADRGYSDFLSGYHSYWGQGTQVTVSS

SEQ ID NO: 33333 - protein, 118 aa, Artificial Sequence
  Chemically Synthesized
QVQLQESGGGLVQAGGSLRLSCAASGTISYYLAMGWYRQAPGKEREFVAAITAGTSTYYADSVKGRFTISRDNAKNTVYLQMNSLKPEDTAVYYCAVGYREYPQLAYWGQGTQVTVSS

SEQ ID NO: 33334 - protein, 118 aa, Artificial Sequence
  Chemically Synthesized
QVQLQESGGGLVQAGGSLRLSCAASGNISRPRSMGWYRQAPGKEREFVAGISDGGTTYYADSVKGRFTISRDNAKNTVYLQMNSLKPEDTAVYYCAVEGFFPYDYYYWGQGTQVTVSS

SEQ ID NO: 33335 - protein, 118 aa, Artificial Sequence
  Chemically Synthesized
QVQLQESGGGLVQAGGSLRLSCAASGYISYVAYMGWYRQAPGKERELVASIDYGATTYYADSVKGRFTISRDNAKNTVYLQMNSLKPEDTAVYYCAAYRRWRGRHFYWGQGTQVTVSS

SEQ ID NO: 33336 - protein, 118 aa, Artificial Sequence
  Chemically Synthesized
QVQLQESGGGLVQAGGSLRLSCAASGNIFNPYVMGWYRQAPGKEREFVAGIAKGTTTNYADSVKGRFTISRDNAKNTVYLQMNSLKPEDTAVYYCAVLVDGTQYHYYWGQGTQVTVSS

SEQ ID NO: 33337 - protein, 122 aa, Artificial Sequence
  Chemically Synthesized
QVQLQESGGGLVQAGGSLRLSCAASGNIFSSQSMGWYRQAPGKERELVAAIDEGSNTYYADSVKGRFTISRDNAKNTVYLQMNSLKPEDTAVYYCAVIDQYYFDDTGYHAYWGQGTQVTVSS

SEQ ID NO: 33338 - protein, 118 aa, Artificial Sequence
  Chemically Synthesized
QVQLQESGGGLVQAGGSLRLSCAASGTISPGQNMGWYRQAPGKEREFVAAIGHGANTNYADSVKGRFTISRDNAKNTVYLQMNSLKPEDTAVYYCAAVRKQYGYHAYWGQGTQVTVSS

SEQ ID NO: 33339 - protein, 117 aa, Artificial Sequence
  Chemically Synthesized
QVQLQESGGGLVQAGGSLRLSCAASGTIFGPAAMGWYRQAPGKEREFVAAITWGSTTNYADSVKGRFTISRDNAKNTVYLQMNSLKPEDTAVYYCAAYYFDDAKYYWGQGTQVTVSS

SEQ ID NO: 33340 - protein, 122 aa, Artificial Sequence
  Chemically Synthesized
QVQLQESGGGLVQAGGSLRLSCAASGNISPGPPMGWYRQAPGKERELVATIAVGASTNYADSVKGRFTISRDNAKNTVYLQMNSLKPEDTAVYYCAVSTYGYTYTYNGHRYWGQGTQVTVSS

SEQ ID NO: 33341 - protein, 117 aa, Artificial Sequence
  Chemically Synthesized
QVQLQESGGGLVQAGGSLRLSCAASGYISAQRDMGWYRQAPGKERELVAGIGPVLVPYADSVKGRFTISRDNAKNTVYLQMNSLKPEDTAVYYCAAYEKTHYGLLYWGQGTQVTVSS

SEQ ID NO: 33342 - protein, 116 aa, Artificial Sequence
  Chemically Synthesized
QVQLQESGGGLVQAGGSLRLSCAASGSISPGYPMGWYRQAPGKEREFVAGINLGGITYYADSVKGRFTISRDNAKNTVYLQMNSLKPEDTAVYYCAAYDGRDHWYWGQGTQVTVSS

SEQ ID NO: 33343 - protein, 126 aa, Artificial Sequence
  Chemically Synthesized
QVQLQESGGGLVQAGGSLRLSCAASGTISDPIIMGWYRQAPGKEREFVASIGYGGTTNYADSVKGRFTISRDNAKNTVYLQMNSLKPEDTAVYYCAAIKYKDTATYTGTRGDYYYWGQGTQVTVSS

SEQ ID NO: 33344 - protein, 122 aa, Artificial Sequence
  Chemically Synthesized
QVQLQESGGGLVQAGGSLRLSCAASGSIFREYWMGWYRQAPGKEREFVASINNGAITNYADSVKGRFTISRDNAKNTVYLQMNSLKPEDTAVYYCAVIYRTYAHGQYTFWYWGQGTQVTVSS

SEQ ID NO: 33345 - protein, 117 aa, Artificial Sequence
  Chemically Synthesized
QVQLQESGGGLVQAGGSLRLSCAASGNIFDPAAMGWYRQAPGKERELVATISSVVLPYADSVKGRFTISRDNAKNTVYLQMNSLKPEDTAVYYCAVSYSYGRLHGYWGQGTQVTVSS

SEQ ID NO: 33346 - protein, 114 aa, Artificial Sequence
  Chemically Synthesized
QVQLQESGGGLVQAGGSLRLSCAASGIRSMGWYRQAPGKERELVASIGGGSNTNYADSVKGRFTISRDNAKNTVYLQMNSLKPEDTAVYYCAAKGYATTHYAYWGQGTQVTVSS

SEQ ID NO: 33347 - protein, 126 aa, Artificial Sequence
  Chemically Synthesized
QVQLQESGGGLVQAGGSLRLSCAASGTISAGGSMGWYRQAPGKEREFVAAITPGGNTNYADSVKGRFTISRDNAKNTVYLQMNSLKPEDTAVYYCAAGLQYDQAREAPWYLYHDYWGQGTQVTVSS

SEQ ID NO: 33348 - protein, 122 aa, Artificial Sequence
  Chemically Synthesized
QVQLQESGGGLVQAGGSLRLSCAASGTISSGYTMGWYRQAPGKEREFVAGIANGGSTYYADSVKGRFTISRDNAKNTVYLQMNSLKPEDTAVYYCAAVSSRRQTGNVLHYYWGQGTQVTVSS

SEQ ID NO: 33349 - protein, 118 aa, Artificial Sequence
  Chemically Synthesized
QVQLQESGGGLVQAGGSLRLSCAASGSISTTDDMGWYRQAPGKERELVAAIDYGGITYYADSVKGRFTISRDNAKNTVYLQMNSLKPEDTAVYYCAVYADDTWDYGYWGQGTQVTVSS

SEQ ID NO: 33350 - protein, 118 aa, Artificial Sequence
  Chemically Synthesized
QVQLQESGGGLVQAGGSLRLSCAASGSISPLLYMGWYRQAPGKEREFVAAIGYGTTTNYADSVKGRFTISRDNAKNTVYLQMNSLKPEDTAVYYCAAIAWSSTRHYYWGQGTQVTVSS

SEQ ID NO: 33351 - protein, 122 aa, Artificial Sequence
  Chemically Synthesized
QVQLQESGGGLVQAGGSLRLSCAASGNIFAVIQMGWYRQAPGKEREFVAGIGKGGTTNYADSVKGRFTISRDNAKNTVYLQMNSLKPEDTAVYYCAVIGDIYRQYHAYFYYWGQGTQVTVSS

SEQ ID NO: 33352 - protein, 118 aa, Artificial Sequence
  Chemically Synthesized
QVQLQESGGGLVQAGGSLRLSCAASGSISSISAMGWYRQAPGKERELVAGIARGTSTNYADSVKGRFTISRDNAKNTVYLQMNSLKPEDTAVYYCAVVLHHEAYYWYWGQGTQVTVSS

SEQ ID NO: 33353 - protein, 126 aa, Artificial Sequence
  Chemically Synthesized
QVQLQESGGGLVQAGGSLRLSCAASGNISGFYAMGWYRQAPGKERELVAAIGGGTITNYADSVKGRFTISRDNAKNTVYLQMNSLKPEDTAVYYCAVRYRVDPYKRIYRFEAFGYWGQGTQVTVSS

SEQ ID NO: 33354 - protein, 118 aa, Artificial Sequence
  Chemically Synthesized
QVQLQESGGGLVQAGGSLRLSCAASGTIFRAAYMGWYRQAPGKEREFVASIGTGSNTNYADSVKGRFTISRDNAKNTVYLQMNSLKPEDTAVYYCAAVYPRSTYLYYWGQGTQVTVSS

SEQ ID NO: 33355 - protein, 124 aa, Artificial Sequence
  Chemically Synthesized
QVQLQESGGGLVQAGGSLRLSCAASGNLSVVMGWYRQAPGKEREFVATITYGGSTNYADSVKGRFTISRDNAKNTVYLQMNSLKPEDTAVYYCAAEPGAQVYHRQSNSPEHYYWGQGTQVTVSS

SEQ ID NO: 33356 - protein, 118 aa, Artificial Sequence
  Chemically Synthesized
QVQLQESGGGLVQAGGSLRLSCAASGSISPDPLMGWYRQAPGKEREFVAGIGSGANTNYADSVKGRFTISRDNAKNTVYLQMNSLKPEDTAVYYCAVVQRYGFYHYYWGQGTQVTVSS

SEQ ID NO: 33357 - protein, 118 aa, Artificial Sequence
  Chemically Synthesized
QVQLQESGGGLVQAGGSLRLSCAASGTIFIPVAMGWYRQAPGKEREFVATIGAGGSTYYADSVKGRFTISRDNAKNTVYLQMNSLKPEDTAVYYCAAYYWIHLVLGYWGQGTQVTVSS

SEQ ID NO: 33358 - protein, 118 aa, Artificial Sequence
  Chemically Synthesized
QVQLQESGGGLVQAGGSLRLSCAASGTISPLTVMGWYRQAPGKEREFVASINLGGNTNYADSVKGRFTISRDNAKNTVYLQMNSLKPEDTAVYYCAATRKQVYWHGYWGQGTQVTVSS

SEQ ID NO: 33359 - protein, 118 aa, Artificial Sequence
  Chemically Synthesized
QVQLQESGGGLVQAGGSLRLSCAASGNIFPYAGMGWYRQAPGKEREFVAGIGSGSSTNYADSVKGRFTISRDNAKNTVYLQMNSLKPEDTAVYYCAAVQYGLSYHYYWGQGTQVTVSS

SEQ ID NO: 33360 - protein, 118 aa, Artificial Sequence
  Chemically Synthesized
QVQLQESGGGLVQAGGSLRLSCAASGNISATAPMGWYRQAPGKEREFVASINGGGTTNYADSVKGRFTISRDNAKNTVYLQMNSLKPEDTAVYYCAVYHRHDDDHTYWGQGTQVTVSS

SEQ ID NO: 33361 - protein, 112 aa, Artificial Sequence
  Chemically Synthesized
QVQLQESGGGLVQAGGSLRLSCAASGTISFNHRMGWYRQAPGKEREFVASITAGASTNYADSVKGRFTISRDNAKNTVYLQMNSLKPEDTAVYYCAVPSSYWGQGTQVTVSS

SEQ ID NO: 33362 - protein, 118 aa, Artificial Sequence
  Chemically Synthesized
QVQLQESGGGLVQAGGSLRLSCAASGNISTYPRMGWYRQAPGKEREFVATISGGGTTNYADSVKGRFTISRDNAKNTVYLQMNSLKPEDTAVYYCAAVQQKKAWFGYWGQGTQVTVSS

SEQ ID NO: 33363 - protein, 122 aa, Artificial Sequence
  Chemically Synthesized
QVQLQESGGGLVQAGGSLRLSCAASGTISLQGNMGWYRQAPGKERELVASISKGTNTYYADSVKGRFTISRDNAKNTVYLQMNSLKPEDTAVYYCAVYVRKADWYPDDLSYWGQGTQVTVSS

SEQ ID NO: 33364 - protein, 122 aa, Artificial Sequence
  Chemically Synthesized
QVQLQESGGGLVQAGGSLRLSCAASGNISYRYWMGWYRQAPGKERELVAAIDSGANTNYADSVKGRFTISRDNAKNTVYLQMNSLKPEDTAVYYCAVDIRYLWPLYLTYQYWGQGTQVTVSS

SEQ ID NO: 33365 - protein, 122 aa, Artificial Sequence
  Chemically Synthesized
QVQLQESGGGLVQAGGSLRLSCAASGNISQIYVMGWYRQAPGKEREFVAAIADGSTTNYADSVKGRFTISRDNAKNTVYLQMNSLKPEDTAVYYCAVRVGERYYYTPNHRYWGQGTQVTVSS

SEQ ID NO: 33366 - protein, 122 aa, Artificial Sequence
  Chemically Synthesized
QVQLQESGGGLVQAGGSLRLSCAASGSISPVRSMGWYRQAPGKEREFVATINYGGTTNYADSVKGRFTISRDNAKNTVYLQMNSLKPEDTAVYYCAVLLYNDRKRDLYHYYWGQGTQVTVSS

SEQ ID NO: 33367 - protein, 122 aa, Artificial Sequence
  Chemically Synthesized
QVQLQESGGGLVQAGGSLRLSCAASGNISTPWGMGWYRQAPGKERELVATITDGTSTYYADSVKGRFTISRDNAKNTVYLQMNSLKPEDTAVYYCAAVTPYGYHSSYTFIYWGQGTQVTVSS

SEQ ID NO: 33368 - protein, 126 aa, Artificial Sequence
  Chemically Synthesized
QVQLQESGGGLVQAGGSLRLSCAASGSISTYIGMGWYRQAPGKEREFVAGINPGTSTYYADSVKGRFTISRDNAKNTVYLQMNSLKPEDTAVYYCAAYDWFDYARYYGFLQYHDYWGQGTQVTVSS

SEQ ID NO: 33369 - protein, 117 aa, Artificial Sequence
  Chemically Synthesized
QVQLQESGGGLVQAGGSLRLSCAASGYISYDYAMGWYRQAPGKEREFVASISRGASTNYADSVKGRFTISRDNAKNTVYLQMNSLKPEDTAVYYCAVWGVRRLVFYWGQGTQVTVSS

SEQ ID NO: 33370 - protein, 118 aa, Artificial Sequence
  Chemically Synthesized
QVQLQESGGGLVQAGGSLRLSCAASGNISWPYYMGWYRQAPGKEREFVAAIDPGAITNYADSVKGRFTISRDNAKNTVYLQMNSLKPEDTAVYYCAVIWTKSYVHYYWGQGTQVTVSS

SEQ ID NO: 33371 - protein, 122 aa, Artificial Sequence
  Chemically Synthesized
QVQLQESGGGLVQAGGSLRLSCAASGYISRYLGMGWYRQAPGKEREFVASITWGSSTYYADSVKGRFTISRDNAKNTVYLQMNSLKPEDTAVYYCAVVLAHWSGSGTRHYYWGQGTQVTVSS

SEQ ID NO: 33372 - protein, 122 aa, Artificial Sequence
  Chemically Synthesized
QVQLQESGGGLVQAGGSLRLSCAASGSIFRPEYMGWYRQAPGKEREFVASISSGTNTNYADSVKGRFTISRDNAKNTVYLQMNSLKPEDTAVYYCAVRSDGVQEWTKVHGYWGQGTQVTVSS

SEQ ID NO: 33373 - protein, 118 aa, Artificial Sequence
  Chemically Synthesized
QVQLQESGGGLVQAGGSLRLSCAASGNISYPWTMGWYRQAPGKEREFVAGINYGSNTYYADSVKGRFTISRDNAKNTVYLQMNSLKPEDTAVYYCAVISYDLGWHYYWGQGTQVTVSS

SEQ ID NO: 33374 - protein, 122 aa, Artificial Sequence
  Chemically Synthesized
QVQLQESGGGLVQAGGSLRLSCAASGSISQYPLMGWYRQAPGKEREFVAAIAAGSSTNYADSVKGRFTISRDNAKNTVYLQMNSLKPEDTAVYYCAVTSYEYSKTNGYHYYWGQGTQVTVSS

SEQ ID NO: 33375 - protein, 126 aa, Artificial Sequence
  Chemically Synthesized
QVQLQESGGGLVQAGGSLRLSCAASGYISYSEYMGWYRQAPGKERELVAAISYGANTYYADSVKGRFTISRDNAKNTVYLQMNSLKPEDTAVYYCAAVEGSRDDNDYNTASALRYWGQGTQVTVSS

SEQ ID NO: 33376 - protein, 122 aa, Artificial Sequence
  Chemically Synthesized
QVQLQESGGGLVQAGGSLRLSCAASGNISWSATMGWYRQAPGKEREFVAAIAGGSNTYYADSVKGRFTISRDNAKNTVYLQMNSLKPEDTAVYYCAAVYARNDPARYYHYYWGQGTQVTVSS

SEQ ID NO: 33377 - protein, 121 aa, Artificial Sequence
  Chemically Synthesized
QVQLQESGGGLVQAGGSLRLSCAASGSISAPSFMGWYRQAPGKEREFVAAITDGTSTYYADSVKGRFTISRDNAKNTVYLQMNSLKPEDTAVYYCAVPAYGDTDYQRLAYWGQGTQVTVSS

SEQ ID NO: 33378 - protein, 118 aa, Artificial Sequence
  Chemically Synthesized
QVQLQESGGGLVQAGGSLRLSCAASGNIFYTNTMGWYRQAPGKEREFVAAIAAGANTNYADSVKGRFTISRDNAKNTVYLQMNSLKPEDTAVYYCAALYWGANRHFYWGQGTQVTVSS

SEQ ID NO: 33379 - protein, 122 aa, Artificial Sequence
  Chemically Synthesized
QVQLQESGGGLVQAGGSLRLSCAASGTISQRLYMGWYRQAPGKEREFVAGIADGSNTNYADSVKGRFTISRDNAKNTVYLQMNSLKPEDTAVYYCAALKRGSPNPYAYHYYWGQGTQVTVSS

SEQ ID NO: 33380 - protein, 119 aa, Artificial Sequence
  Chemically Synthesized
QVQLQESGGGLVQAGGSLRLSCAASGTISVMGWYRQAPGKEREFVAGIAHGANTNYADSVKGRFTISRDNAKNTVYLQMNSLKPEDTAVYYCAAVRWSPEDARLKHYYWGQGTQVTVSS

SEQ ID NO: 33381 - protein, 125 aa, Artificial Sequence
  Chemically Synthesized
QVQLQESGGGLVQAGGSLRLSCAASGNISEYTTMGWYRQAPGKEREFVATIGYGTSTYYADSVKGRFTISRDNAKNTVYLQMNSLKPEDTAVYYCAVESLLFLLLTVLLTLSIYWGQGTQVTVSS

SEQ ID NO: 33382 - protein, 122 aa, Artificial Sequence
  Chemically Synthesized
QVQLQESGGGLVQAGGSLRLSCAASGTIFPTHVMGWYRQAPGKEREFVAGIGNGGSTNYADSVKGRFTISRDNAKNTVYLQMNSLKPEDTAVYYCAVNRIGLSFWITRHYYWGQGTQVTVSS

SEQ ID NO: 33383 - protein, 126 aa, Artificial Sequence
  Chemically Synthesized
QVQLQESGGGLVQAGGSLRLSCAASGYIFTQSRMGWYRQAPGKERELVAAIDRGSTTYYADSVKGRFTISRDNAKNTVYLQMNSLKPEDTAVYYCAVDYVIDAEDGETAVDSFAYWGQGTQVTVSS

SEQ ID NO: 33384 - protein, 126 aa, Artificial Sequence
  Chemically Synthesized
QVQLQESGGGLVQAGGSLRLSCAASGTIFGVGTMGWYRQAPGKEREFVAGISDGGITYYADSVKGRFTISRDNAKNTVYLQMNSLKPEDTAVYYCAARGYYTAVDYSQDSYALDYWGQGTQVTVSS

SEQ ID NO: 33385 - protein, 109 aa, Artificial Sequence
  Chemically Synthesized
QVQLQESGGGLVQAGGSLRLSCAASGTIFLLRMGWYRQAPGKEREFVASISNGATTNYADSVKGRFTISRDNAKNTVYLQMNSLKPEDTAVYYCAYGYWGQGTQVTVSS

SEQ ID NO: 33386 - protein, 122 aa, Artificial Sequence
  Chemically Synthesized
QVQLQESGGGLVQAGGSLRLSCAASGNISGWHAMGWYRQAPGKEREFVAGIAIGATTNYADSVKGRFTISRDNAKNTVYLQMNSLKPEDTAVYYCAAYVGVTQTDSRPHYYWGQGTQVTVSS

SEQ ID NO: 33387 - protein, 117 aa, Artificial Sequence
  Chemically Synthesized
QVQLQESGGGLVQAGGSLRLSCAASGSIFYRDSMGWYRQAPGKERELVPVLVRVLVPYADSVKGRFTISRDNAKNTVYLQMNSLKPEDTAVYYCAAGYYWTRPYPYWGQGTQVTVSS

SEQ ID NO: 33388 - protein, 122 aa, Artificial Sequence
  Chemically Synthesized
QVQLQESGGGLVQAGGSLRLSCAASGNISYIQAMGWYRQAPGKEREFVASISLGGNTNYADSVKGRFTISRDNAKNTVYLQMNSLKPEDTAVYYCAAYEYGKTRVYGYHGYWGQGTQVTVSS

SEQ ID NO: 33389 - protein, 118 aa, Artificial Sequence
  Chemically Synthesized
QVQLQESGGGLVQAGGSLRLSCAASGTISAYKTMGWYRQAPGKEREFVAGIGGGASTNYADSVKGRFTISRDNAKNTVYLQMNSLKPEDTAVYYCAVLYYDHQWLFYWGQGTQVTVSS

SEQ ID NO: 33390 - protein, 118 aa, Artificial Sequence
  Chemically Synthesized
QVQLQESGGGLVQAGGSLRLSCAASGTISDLVAMGWYRQAPGKEREFVAAITDGASTNYADSVKGRFTISRDNAKNTVYLQMNSLKPEDTAVYYCAVVTYTSAYHSYWGQGTQVTVSS

SEQ ID NO: 33391 - protein, 118 aa, Artificial Sequence
  Chemically Synthesized
QVQLQESGGGLVQAGGSLRLSCAASGNISQRARMGWYRQAPGKERELVASIADGTSTYYADSVKGRFTISRDNAKNTVYLQMNSLKPEDTAVYYCAAVAYQTFWYFYWGQGTQVTVSS

SEQ ID NO: 33392 - protein, 118 aa, Artificial Sequence
  Chemically Synthesized
QVQLQESGGGLVQAGGSLRLSCAASGNISEQYLMGWYRQAPGKEREFVAGINPGATTNYADSVKGRFTISRDNAKNTVYLQMNSLKPEDTAVYYCAVIYYYVVWHYYWGQGTQVTVSS

SEQ ID NO: 33393 - protein, 122 aa, Artificial Sequence
  Chemically Synthesized
QVQLQESGGGLVQAGGSLRLSCAASGTIFYRSIMGWYRQAPGKEREFVAAIAYGTSTNYADSVKGRFTISRDNAKNTVYLQMNSLKPEDTAVYYCAVVLLGQDVRTVRHYYWGQGTQVTVSS

SEQ ID NO: 33394 - protein, 119 aa, Artificial Sequence
  Chemically Synthesized
QVQLQESGGGLVQAGGSLRLSCAASGTISYRTVMGWYRQAPGKEREFVAGIGYGGTTTNYADSVKGRFTISRDNAKNTVYLQMNSLKPEDTAVYYCAVLYRGYKGYYYWGQGTQVTVSS

SEQ ID NO: 33395 - protein, 118 aa, Artificial Sequence
  Chemically Synthesized
QVQLQESGGGLVQAGGSLRLSCAASGTIFDPLGMGWYRQAPGKEREFVASIGNGGNTNYADSVKGRFTISRDNAKNTVYLQMNSLKPEDTAVYYCAVVAKGTPRLYYWGQGTQVTVSS

SEQ ID NO: 33396 - protein, 118 aa, Artificial Sequence
  Chemically Synthesized
QVQLQESGGGLVQAGGSLRLSCAASGTIFGIVAMGWYRQAPGKEREFVAAINSGGTTNYADSVKGRFTISRDNAKNTVYLQMNSLKPEDTAVYYCAVVTHRYDTHYYWGQGTQVTVSS

SEQ ID NO: 33397 - protein, 118 aa, Artificial Sequence
  Chemically Synthesized
QVQLQESGGGLVQAGGSLRLSCAASGSISGHSLMGWYRQAPGKEREFVAAINHGTTTNYADSVKGRFTISRDNAKNTVYLQMNSLKPEDTAVYYCAAIYYSYRRLYYWGQGTQVTVSS

SEQ ID NO: 33398 - protein, 122 aa, Artificial Sequence
  Chemically Synthesized
QVQLQESGGGLVQAGGSLRLSCAASGYISEGRLMGWYRQAPGKERELVAAINTGATTNYADSVKGRFTISRDNAKNTVYLQMNSLKPEDTAVYYCAALDVLGYSRKRFLYYWGQGTQVTVSS

SEQ ID NO: 33399 - protein, 122 aa, Artificial Sequence
  Chemically Synthesized
QVQLQESGGGLVQAGGSLRLSCAASGTISDSSLMGWYRQAPGKEREFVATIDVGANTNYADSVKGRFTISRDNAKNTVYLQMNSLKPEDTAVYYCAADPDFYAYYDYNHVYWGQGTQVTVSS

SEQ ID NO: 33400 - protein, 118 aa, Artificial Sequence
  Chemically Synthesized
QVQLQESGGGLVQAGGSLRLSCAASGTISGSVVMGWYRQAPGKEREFVASIGTGGITNYADSVKGRFTISRDNAKNTVYLQMNSLKPEDTAVYYCAAITYGQPYHYYWGQGTQVTVSS

SEQ ID NO: 33401 - protein, 118 aa, Artificial Sequence
  Chemically Synthesized
QVQLQESGGGLVQAGGSLRLSCAASGNISYAAAMGWYRQAPGKEREFVASIGHGAITNYADSVKGRFTISRDNAKNTVYLQMNSLKPEDTAVYYCAAAYYDTYWYGYWGQGTQVTVSS

SEQ ID NO: 33402 - protein, 118 aa, Artificial Sequence
  Chemically Synthesized
QVQLQESGGGLVQAGGSLRLSCAASGTISEYSYMGWYRQAPGKEREFVAAIGRGATTNYADSVKGRFTISRDNAKNTVYLQMNSLKPEDTAVYYCAVVQWSSRWYYYWGQGTQVTVSS

SEQ ID NO: 33403 - protein, 121 aa, Artificial Sequence
  Chemically Synthesized
QVQLQESGGGLVQAGGSLRLSCAASGYISSRVAMGWYRQAPGKEREFVAAISKGTITNYADSVKGRFTISRDNAKNTVYLQMNSLKPEDTAVYYCAAVDESRNRDFTHYYWGQGTQVTVSS

SEQ ID NO: 33404 - protein, 116 aa, Artificial Sequence
  Chemically Synthesized
QVQLQESGGGLVQAGGSLRLSCAASGNIFGPIIMGWYRQAPGKEREFVAGIARGGNTYYADSVKGRFTISRDNAKNTVYLQMNSLKPEDTAVYYCAVVIKQSRYYWGQGTQVTVSS

SEQ ID NO: 33405 - protein, 122 aa, Artificial Sequence
  Chemically Synthesized
QVQLQESGGGLVQAGGSLRLSCAASGNIFDRPNMGWYRQAPGKERELVAAITAGGNTNYADSVKGRFTISRDNAKNTVYLQMNSLKPEDTAVYYCAAVVTSPLGVRRYHAYWGQGTQVTVSS

SEQ ID NO: 33406 - protein, 118 aa, Artificial Sequence
  Chemically Synthesized
QVQLQESGGGLVQAGGSLRLSCAASGNISSKLAMGWYRQAPGKEREFVAGIGDGTITYYADSVKGRFTISRDNAKNTVYLQMNSLKPEDTAVYYCAALVYNDISYYYWGQGTQVTVSS

SEQ ID NO: 33407 - protein, 118 aa, Artificial Sequence
  Chemically Synthesized
QVQLQESGGGLVQAGGSLRLSCAASGYISGGDIMGWYRQAPGKEREFVASITTGGNTNYADSVKGRFTISRDNAKNTVYLQMNSLKPEDTAVYYCAVKVPAYSPLPYWGQGTQVTVSS

SEQ ID NO: 33408 - protein, 126 aa, Artificial Sequence
  Chemically Synthesized
QVQLQESGGGLVQAGGSLRLSCAASGNIFYFHRMGWYRQAPGKEREFVAGIAAGATTNYADSVKGRFTISRDNAKNTVYLQMNSLKPEDTAVYYCAAISSAPTGGRAYGGAILYYWGQGTQVTVSS

SEQ ID NO: 33409 - protein, 121 aa, Artificial Sequence
  Chemically Synthesized
QVQLQESGGGLVQAGGSLRLSCAASGTIFDIDLMGWYRQAPGKERELVATIAYGASTNYADSVKGRFTISRDNAKNTVYLQMNSLKPEDTAVYYCAADTYYVTRRRHPYYWGQGTQVTVSS

SEQ ID NO: 33410 - protein, 126 aa, Artificial Sequence
  Chemically Synthesized
QVQLQESGGGLVQAGGSLRLSCAASGYIFPYNYMGWYRQAPGKEREFVASIAGGAITNYADSVKGRFTISRDNAKNTVYLQMNSLKPEDTAVYYCAVRRYRPDYDPNDSVNYYSYWGQGTQVTVSS

SEQ ID NO: 33411 - protein, 122 aa, Artificial Sequence
  Chemically Synthesized
QVQLQESGGGLVQAGGSLRLSCAASGYIFYSSYMGWYRQAPGKEREFVASIDGGATTNYADSVKGRFTISRDNAKNTVYLQMNSLKPEDTAVYYCAVYAVYQRYGDYYLVYWGQGTQVTVSS

SEQ ID NO: 33412 - protein, 122 aa, Artificial Sequence
  Chemically Synthesized
QVQLQESGGGLVQAGGSLRLSCAASGSIFGRPDMGWYRQAPGKERELVASINRGTNTNYADSVKGRFTISRDNAKNTVYLQMNSLKPEDTAVYYCAARGTRDDDETGSHYYWGQGTQVTVSS

SEQ ID NO: 33413 - protein, 122 aa, Artificial Sequence
  Chemically Synthesized
QVQLQESGGGLVQAGGSLRLSCAASGTISAFYSMGWYRQAPGKERELVASIDTGGNTYYADSVKGRFTISRDNAKNTVYLQMNSLKPEDTAVYYCAVLLRRRQPDRRYLYYWGQGTQVTVSS

SEQ ID NO: 33414 - protein, 118 aa, Artificial Sequence
  Chemically Synthesized
QVQLQESGGGLVQAGGSLRLSCAASGTISAIYYMGWYRQAPGKEREFVATINSGSNTNYADSVKGRFTISRDNAKNTVYLQMNSLKPEDTAVYYCAAVSWDGHWHGYWGQGTQVTVSS

SEQ ID NO: 33415 - protein, 116 aa, Artificial Sequence
  Chemically Synthesized
QVQLQESGGGLVQAGGSLRLSCAASGYIFVDSIMGWYRQAPGKEREFVASISGGSITNYADSVKGRFTISRDNAKNTVYLQMNSLKPEDTAVYYCAAYISAYHYYWGQGTQVTVSS

SEQ ID NO: 33416 - protein, 122 aa, Artificial Sequence
  Chemically Synthesized
QVQLQESGGGLVQAGGSLRLSCAASGTISYIYYMGWYRQAPGKEREFVAGITYGTNTNYADSVKGRFTISRDNAKNTVYLQMNSLKPEDTAVYYCAALRSRYSFRYWAHAYWGQGTQVTVSS

SEQ ID NO: 33417 - protein, 121 aa, Artificial Sequence
  Chemically Synthesized
QVQLQESGGGLVQAGGSLRLSCAASGTIFEPEQMGWYRQAPGKERELVAAISIGGNTNYADSVKGRFTISRDNAKNTVYLQMNSLKPEDTAVYYCAAWLLSTTTLSVTFYWGQGTQVTVSS

SEQ ID NO: 33418 - protein, 126 aa, Artificial Sequence
  Chemically Synthesized
QVQLQESGGGLVQAGGSLRLSCAASGTIFPYYDMGWYRQAPGKERELVASIGFGGTTNYADSVKGRFTISRDNAKNTVYLQMNSLKPEDTAVYYCAAHFAGINETGRLRWYRFGYWGQGTQVTVSS

SEQ ID NO: 33419 - protein, 111 aa, Artificial Sequence
  Chemically Synthesized
QVQLQESGGGLVQAGGSLRLSCAASGNISGGAIMGWYRQAPGKEREFVAAIGQGTLPYADSVKGRFTISRDNAKNTVYLQMNSLKPEDTAVYYCAVDHAYWGQGTQVTVSS

SEQ ID NO: 33420 - protein, 117 aa, Artificial Sequence
  Chemically Synthesized
QVQLQESGGGLVQAGGSLRLSCAASGNISSRWVMGWYRQAPGKEREFVASIAQGATTNYADSVKGRFTISRDNAKNTVYLQMNSLKPEDTAVYYCAVLDHVYWLYYWGQGTQVTVSS

SEQ ID NO: 33421 - protein, 118 aa, Artificial Sequence
  Chemically Synthesized
QVQLQESGGGLVQAGGSLRLSCAASGSIFDASTMGWYRQAPGKEREFVAGIAQGTSTNYADSVKGRFTISRDNAKNTVYLQMNSLKPEDTAVYYCAAVSRYPVLLYYWGQGTQVTVSS

SEQ ID NO: 33422 - protein, 118 aa, Artificial Sequence
  Chemically Synthesized
QVQLQESGGGLVQAGGSLRLSCAASGTISQEPYMGWYRQAPGKERELVAAISYGATTNYADSVKGRFTISRDNAKNTVYLQMNSLKPEDTAVYYCAALYTDGNWHWYWGQGTQVTVSS

SEQ ID NO: 33423 - protein, 125 aa, Artificial Sequence
  Chemically Synthesized
QVQLQESGGGLVQAGGSLRLSCAASGTISTPPVMGWYRQAPGKEREFVASIGRGGTTNYADSVKGRFTISRDNAKNTVYLQMNSLKPEDTAVYYCAVRGAYPYSRAYYRIAHYYWGQGTQVTVSS

SEQ ID NO: 33424 - protein, 118 aa, Artificial Sequence
  Chemically Synthesized
QVQLQESGGGLVQAGGSLRLSCAASGSIFDGGIMGWYRQAPGKEREFVAAINEGTTTNYADSVKGRFTISRDNAKNTVYLQMNSLKPEDTAVYYCAVLVSGNYWYYYWGQGTQVTVSS

SEQ ID NO: 33425 - protein, 118 aa, Artificial Sequence
  Chemically Synthesized
QVQLQESGGGLVQAGGSLRLSCAASGSISVLDYMGWYRQAPGKEREFVASIALGGNTNYADSVKGRFTISRDNAKNTVYLQMNSLKPEDTAVYYCAAVLRTTKTHGYWGQGTQVTVSS

SEQ ID NO: 33426 - protein, 118 aa, Artificial Sequence
  Chemically Synthesized
QVQLQESGGGLVQAGGSLRLSCAASGTISDTLRMGWYRQAPGKEREFVASITEGSSTNYADSVKGRFTISRDNAKNTVYLQMNSLKPEDTAVYYCAVVSARWRHHYYWGQGTQVTVSS

SEQ ID NO: 33427 - protein, 118 aa, Artificial Sequence
  Chemically Synthesized
QVQLQESGGGLVQAGGSLRLSCAASGTIFSSWSMGWYRQAPGKERELVATITTGSNTNYADSVKGRFTISRDNAKNTVYLQMNSLKPEDTAVYYCAALSRTDNVLYYWGQGTQVTVSS

SEQ ID NO: 33428 - protein, 123 aa, Artificial Sequence
  Chemically Synthesized
QVQLQESGGGLVQAGGSLRLSCAASGSIFVRYKMGWYRQAPGKEREFVAAINGGGSTTYYADSVKGRFTISRDNAKNTVYLQMNSLKPEDTAVYYCAADLDEGYPTYPDLYYWGQGTQVTVSS

SEQ ID NO: 33429 - protein, 118 aa, Artificial Sequence
  Chemically Synthesized
QVQLQESGGGLVQAGGSLRLSCAASGTISSDYKMGWYRQAPGKEREFVAGINGGGTTNYADSVKGRFTISRDNAKNTVYLQMNSLKPEDTAVYYCAVVRLVAPYLWYWGQGTQVTVSS

SEQ ID NO: 33430 - protein, 122 aa, Artificial Sequence
  Chemically Synthesized
QVQLQESGGGLVQAGGSLRLSCAASGNISQWIAMGWYRQAPGKEREFVATIAYGSSTNYADSVKGRFTISRDNAKNTVYLQMNSLKPEDTAVYYCAVVHRGYTKVPVYHYYWGQGTQVTVSS

SEQ ID NO: 33431 - protein, 118 aa, Artificial Sequence
  Chemically Synthesized
QVQLQESGGGLVQAGGSLRLSCAASGTISGDPYMGWYRQAPGKEREFVASIDKGSNTNYADSVKGRFTISRDNAKNTVYLQMNSLKPEDTAVYYCAAAWRSYRYHYYWGQGTQVTVSS

SEQ ID NO: 33432 - protein, 120 aa, Artificial Sequence
  Chemically Synthesized
QVQLQESGGGLVQAGGSLRLSCAASGTISDYAGMGWYRQAPGKEREFVAGITRGTTTNYADSVKGRFTISRDNAKNTVYLQMNSLKPEDTAVYYCAAIGPRDTVGYLYYWGQGTQVTVSS

SEQ ID NO: 33433 - protein, 119 aa, Artificial Sequence
  Chemically Synthesized
QVQLQESGGGLVQAGGSLRLSCAASGTISPDYRMGWYRQAPGKEREFVAAINPGTITNYADSVKGRFTISRDNAKNTVYLQMNSLKPEDTAVYYCAVLDFGDEGYYWYWGQGTQVTVSS

SEQ ID NO: 33434 - protein, 118 aa, Artificial Sequence
  Chemically Synthesized
QVQLQESGGGLVQAGGSLRLSCAASGTISGLVIMGWYRQAPGKEREFVASISDGSTTNYADSVKGRFTISRDNAKNTVYLQMNSLKPEDTAVYYCAVVWWRNGYLSYWGQGTQVTVSS

SEQ ID NO: 33435 - protein, 122 aa, Artificial Sequence
  Chemically Synthesized
QVQLQESGGGLVQAGGSLRLSCAASGNIFRVDYMGWYRQAPGKEREFVASIDAGTNTNYADSVKGRFTISRDNAKNTVYLQMNSLKPEDTAVYYCAVIYTYYRARDERHYYWGQGTQVTVSS

SEQ ID NO: 33436 - protein, 126 aa, Artificial Sequence
  Chemically Synthesized
QVQLQESGGGLVQAGGSLRLSCAASGTISTVYIMGWYRQAPGKEREFVASINEGGITNYADSVKGRFTISRDNAKNTVYLQMNSLKPEDTAVYYCAAIYYVGRDRLSAGTHYHYYWGQGTQVTVSS

SEQ ID NO: 33437 - protein, 117 aa, Artificial Sequence
  Chemically Synthesized
QVQLQESGGGLVQAGGSLRLSCAASGSIFPYKVMGWYRQAPGKEREFVASISGGGNTYYADSVKGRFTISRDNAKNTVYLQMNSLKPEDTAVYYCAVWYWAKRFSYWGQGTQVTVSS

SEQ ID NO: 33438 - protein, 122 aa, Artificial Sequence
  Chemically Synthesized
QVQLQESGGGLVQAGGSLRLSCAASGTIFYGRYMGWYRQAPGKEREFVAAIAGGSSTNYADSVKGRFTISRDNAKNTVYLQMNSLKPEDTAVYYCAVYERYQDSRRRWHSYWGQGTQVTVSS

SEQ ID NO: 33439 - protein, 118 aa, Artificial Sequence
  Chemically Synthesized
QVQLQESGGGLVQAGGSLRLSCAASGTISSNLTMGWYRQAPGKEREFVAGITYGSTTNYADSVKGRFTISRDNAKNTVYLQMNSLKPEDTAVYYCAAASYVRRWLGYWGQGTQVTVSS

SEQ ID NO: 33440 - protein, 118 aa, Artificial Sequence
  Chemically Synthesized
QVQLQESGGGLVQAGGSLRLSCAASGYISTRLQMGWYRQAPGKERELVAGIAYGGNTNYADSVKGRFTISRDNAKNTVYLQMNSLKPEDTAVYYCAALARYNRWYYYWGQGTQVTVSS

SEQ ID NO: 33441 - protein, 122 aa, Artificial Sequence
  Chemically Synthesized
QVQLQESGGGLVQAGGSLRLSCAASGTISDSANMGWYRQAPGKEREFVASIGGGSNTNYADSVKGRFTISRDNAKNTVYLQMNSLKPEDTAVYYCAAVAYSSTDRRNVHGYWGQGTQVTVSS

SEQ ID NO: 33442 - protein, 119 aa, Artificial Sequence
  Chemically Synthesized
QVQLQESGGGLVQAGGSLRLSCAASGYIFYAYYMGWYRQAPGKERELVAGITPGSTTNYADSVKGRFTISRDNAKNTVYLQMNSLKPEDTAVYYCAVVGNIHYTSFYYWGQGTQVTVSS

SEQ ID NO: 33443 - protein, 122 aa, Artificial Sequence
  Chemically Synthesized
QVQLQESGGGLVQAGGSLRLSCAASGSIFYYRYMGWYRQAPGKEREFVASIGSGTSTYYADSVKGRFTISRDNAKNTVYLQMNSLKPEDTAVYYCAVGEPYDSYYDWYYYYWGQGTQVTVSS

SEQ ID NO: 33444 - protein, 118 aa, Artificial Sequence
  Chemically Synthesized
QVQLQESGGGLVQAGGSLRLSCAASGSISPTTNMGWYRQAPGKEREFVAGIDSGTSTNYADSVKGRFTISRDNAKNTVYLQMNSLKPEDTAVYYCAAVDDAYPYLHYWGQGTQVTVSS

SEQ ID NO: 33445 - protein, 118 aa, Artificial Sequence
  Chemically Synthesized
QVQLQESGGGLVQAGGSLRLSCAASGSISVPDYMGWYRQAPGKEREFVAAIGWGAITNYADSVKGRFTISRDNAKNTVYLQMNSLKPEDTAVYYCAALIYRDLWYYYWGQGTQVTVSS

SEQ ID NO: 33446 - protein, 122 aa, Artificial Sequence
  Chemically Synthesized
QVQLQESGGGLVQAGGSLRLSCAASGTISRYYAMGWYRQAPGKEREFVASINSGAITYYADSVKGRFTISRDNAKNTVYLQMNSLKPEDTAVYYCAAVGRARGYHYGYLDYWGQGTQVTVSS

SEQ ID NO: 33447 - protein, 118 aa, Artificial Sequence
  Chemically Synthesized
QVQLQESGGGLVQAGGSLRLSCAASGTIFYSDPMGWYRQAPGKEREFVAAINNGTITYYADSVKGRFTISRDNAKNTVYLQMNSLKPEDTAVYYCAALSYGPTYLWYWGQGTQVTVSS

SEQ ID NO: 33448 - protein, 126 aa, Artificial Sequence
  Chemically Synthesized
QVQLQESGGGLVQAGGSLRLSCAASGNISNIGYMGWYRQAPGKEREFVAAITGGSNTNYADSVKGRFTISRDNAKNTVYLQMNSLKPEDTAVYYCAALTIKDRGQDGTRALYHGYWGQGTQVTVSS

SEQ ID NO: 33449 - protein, 118 aa, Artificial Sequence
  Chemically Synthesized
QVQLQESGGGLVQAGGSLRLSCAASGTIFDFGGMGWYRQAPGKEREFVAAIDYGGITNYADSVKGRFTISRDNAKNTVYLQMNSLKPEDTAVYYCAAITNYGPRHAYWGQGTQVTVSS

SEQ ID NO: 33450 - protein, 122 aa, Artificial Sequence
  Chemically Synthesized
QVQLQESGGGLVQAGGSLRLSCAASGSIFRDGVMGWYRQAPGKEREFVAAIDPGASTNYADSVKGRFTISRDNAKNTVYLQMNSLKPEDTAVYYCAAYVQYNSRYYSHHYYWGQGTQVTVSS

SEQ ID NO: 33451 - protein, 118 aa, Artificial Sequence
  Chemically Synthesized
QVQLQESGGGLVQAGGSLRLSCAASGTISYATIMGWYRQAPGKEREFVASIDPGSNTNYADSVKGRFTISRDNAKNTVYLQMNSLKPEDTAVYYCAALSYYRSYHFYWGQGTQVTVSS

SEQ ID NO: 33452 - protein, 122 aa, Artificial Sequence
  Chemically Synthesized
QVQLQESGGGLVQAGGSLRLSCAASGYIFLNYAMGWYRQAPGKEREFVAGIGAGTSTNYADSVKGRFTISRDNAKNTVYLQMNSLKPEDTAVYYCAVVGRRDLTEARRLYYWGQGTQVTVSS

SEQ ID NO: 33453 - protein, 122 aa, Artificial Sequence
  Chemically Synthesized
QVQLQESGGGLVQAGGSLRLSCAASGSISREINMGWYRQAPGKEREFVAGIGYGGSTYYADSVKGRFTISRDNAKNTVYLQMNSLKPEDTAVYYCAAGDGTGYGDATRYYYWGQGTQVTVSS

SEQ ID NO: 33454 - protein, 118 aa, Artificial Sequence
  Chemically Synthesized
QVQLQESGGGLVQAGGSLRLSCAASGTISKRDSMGWYRQAPGKEREFVAAITSGTNTNYADSVKGRFTISRDNAKNTVYLQMNSLKPEDTAVYYCAALGYYAPYHYYWGQGTQVTVSS

SEQ ID NO: 33455 - protein, 118 aa, Artificial Sequence
  Chemically Synthesized
QVQLQESGGGLVQAGGSLRLSCAASGSIFLSYDMGWYRQAPGKEREFVASIAQGGNTNYADSVKGRFTISRDNAKNTVYLQMNSLKPEDTAVYYCAAADPFFSWYRYWGQGTQVTVSS

SEQ ID NO: 33456 - protein, 126 aa, Artificial Sequence
  Chemically Synthesized
QVQLQESGGGLVQAGGSLRLSCAASGSISGGWLMGWYRQAPGKEREFVAGIAHGGITNYADSVKGRFTISRDNAKNTVYLQMNSLKPEDTAVYYCAAIKVHQRVDAGGRVALYYYWGQGTQVTVSS

SEQ ID NO: 33457 - protein, 122 aa, Artificial Sequence
  Chemically Synthesized
QVQLQESGGGLVQAGGSLRLSCAASGNIFWDDWMGWYRQAPGKERELVATITSGTSTNYADSVKGRFTISRDNAKNTVYLQMNSLKPEDTAVYYCAVPYPYGLRGPYLYDYWGQGTQVTVSS

SEQ ID NO: 33458 - protein, 122 aa, Artificial Sequence
  Chemically Synthesized
QVQLQESGGGLVQAGGSLRLSCAASGNIFAGAGMGWYRQAPGKEREFVAGINDGASTNYADSVKGRFTISRDNAKNTVYLQMNSLKPEDTAVYYCAAVTYPYRDIRKLLYYWGQGTQVTVSS

SEQ ID NO: 33459 - protein, 118 aa, Artificial Sequence
  Chemically Synthesized
QVQLQESGGGLVQAGGSLRLSCAASGSIFPENHMGWYRQAPGKEREFVAAIAYGSITYYADSVKGRFTISRDNAKNTVYLQMNSLKPEDTAVYYCAAGRRLQHGFPYWGQGTQVTVSS

SEQ ID NO: 33460 - protein, 118 aa, Artificial Sequence
  Chemically Synthesized
QVQLQESGGGLVQAGGSLRLSCAASGSISGGVAMGWYRQAPGKERELVASITRGGNTYYADSVKGRFTISRDNAKNTVYLQMNSLKPEDTAVYYCAAYYGEQYRYYYWGQGTQVTVSS

SEQ ID NO: 33461 - protein, 122 aa, Artificial Sequence
  Chemically Synthesized
QVQLQESGGGLVQAGGSLRLSCAASGTISASPVMGWYRQAPGKEREFVAGIAAGGITNYADSVKGRFTISRDNAKNTVYLQMNSLKPEDTAVYYCAALIRYYADHGIYYYYWGQGTQVTVSS

SEQ ID NO: 33462 - protein, 118 aa, Artificial Sequence
  Chemically Synthesized
QVQLQESGGGLVQAGGSLRLSCAASGSIFPDYIMGWYRQAPGKEREFVAGIAPGSNTNYADSVKGRFTISRDNAKNTVYLQMNSLKPEDTAVYYCAAVGTYRAVHYYWGQGTQVTVSS

SEQ ID NO: 33463 - protein, 122 aa, Artificial Sequence
  Chemically Synthesized
QVQLQESGGGLVQAGGSLRLSCAASGSISTLDAMGWYRQAPGKEREFVAAIAAGGNTNYADSVKGRFTISRDNAKNTVYLQMNSLKPEDTAVYYCAAIHQDTRSRYFVYYYWGQGTQVTVSS

SEQ ID NO: 33464 - protein, 118 aa, Artificial Sequence
  Chemically Synthesized
QVQLQESGGGLVQAGGSLRLSCAASGTIFYQVSMGWYRQAPGKERELVAGISTGSITNYADSVKGRFTISRDNAKNTVYLQMNSLKPEDTAVYYCAALYYGKKYHAYWGQGTQVTVSS

SEQ ID NO: 33465 - protein, 122 aa, Artificial Sequence
  Chemically Synthesized
QVQLQESGGGLVQAGGSLRLSCAASGTIFPWVRMGWYRQAPGKERELVAGIGDGASTYYADSVKGRFTISRDNAKNTVYLQMNSLKPEDTAVYYCAALTRAPRQTPRLHYYWGQGTQVTVSS

SEQ ID NO: 33466 - protein, 117 aa, Artificial Sequence
  Chemically Synthesized
QVQLQESGGGLVQAGGSLRLSCAASGNIFSANVMGWYRQAPGKERELVAGITDGSSTYYADSVKGRFTISRDNAKNTVYLQMNSLKPEDTAVYYCAATPAFYPSFYWGQGTQVTVSS

SEQ ID NO: 33467 - protein, 118 aa, Artificial Sequence
  Chemically Synthesized
QVQLQESGGGLVQAGGSLRLSCAASGSISVDQSMGWYRQAPGKEREFVASIANGSTTNYADSVKGRFTISRDNAKNTVYLQMNSLKPEDTAVYYCAALYKGDRYYWYWGQGTQVTVSS

SEQ ID NO: 33468 - protein, 118 aa, Artificial Sequence
  Chemically Synthesized
QVQLQESGGGLVQAGGSLRLSCAASGYISSYRYMGWYRQAPGKEREFVAAIDYGGTTNYADSVKGRFTISRDNAKNTVYLQMNSLKPEDTAVYYCAALGYDDGWLGYWGQGTQVTVSS

SEQ ID NO: 33469 - protein, 118 aa, Artificial Sequence
  Chemically Synthesized
QVQLQESGGGLVQAGGSLRLSCAASGSISWYYAMGWYRQAPGKEREFVAGIGDGTTTNYADSVKGRFTISRDNAKNTVYLQMNSLKPEDTAVYYCAAIVSVQRTHGYWGQGTQVTVSS

SEQ ID NO: 33470 - protein, 118 aa, Artificial Sequence
  Chemically Synthesized
QVQLQESGGGLVQAGGSLRLSCAASGNISADFIMGWYRQAPGKEREFVASIAVGTTTNYADSVKGRFTISRDNAKNTVYLQMNSLKPEDTAVYYCAALTRQYYYFWYWGQGTQVTVSS

SEQ ID NO: 33471 - protein, 118 aa, Artificial Sequence
  Chemically Synthesized
QVQLQESGGGLVQAGGSLRLSCAASGYISRYYGMGWYRQAPGKEREFVAAIGVGGTTNYADSVKGRFTISRDNAKNTVYLQMNSLKPEDTAVYYCAVVFRLDRLHWYWGQGTQVTVSS

SEQ ID NO: 33472 - protein, 126 aa, Artificial Sequence
  Chemically Synthesized
QVQLQESGGGLVQAGGSLRLSCAASGSISTSRGMGWYRQAPGKEREFVAGIAHGATTNYADSVKGRFTISRDNAKNTVYLQMNSLKPEDTAVYYCAALYGPSFPTGQSRSLYYTYWGQGTQVTVSS

SEQ ID NO: 33473 - protein, 118 aa, Artificial Sequence
  Chemically Synthesized
QVQLQESGGGLVQAGGSLRLSCAASGYISPPSGMGWYRQAPGKEREFVATIDAGGSTNYADSVKGRFTISRDNAKNTVYLQMNSLKPEDTAVYYCAVLLWDTYYYYYWGQGTQVTVSS

SEQ ID NO: 33474 - protein, 118 aa, Artificial Sequence
  Chemically Synthesized
QVQLQESGGGLVQAGGSLRLSCAASGTISAQSTMGWYRQAPGKEREFVAGIGYGANTNYADSVKGRFTISRDNAKNTVYLQMNSLKPEDTAVYYCAAAGRSPSRHYYWGQGTQVTVSS

SEQ ID NO: 33475 - protein, 126 aa, Artificial Sequence
  Chemically Synthesized
QVQLQESGGGLVQAGGSLRLSCAASGNIFRVGYMGWYRQAPGKERELVATIASGATTNYADSVKGRFTISRDNAKNTVYLQMNSLKPEDTAVYYCAAQQRGWVGYIFWGDVQYFYWGQGTQVTVSS

SEQ ID NO: 33476 - protein, 122 aa, Artificial Sequence
  Chemically Synthesized
QVQLQESGGGLVQAGGSLRLSCAASGNIFYIAYMGWYRQAPGKERELVASISKGGNTNYADSVKGRFTISRDNAKNTVYLQMNSLKPEDTAVYYCAVKRVYYWRTYYTFAYWGQGTQVTVSS

SEQ ID NO: 33477 - protein, 118 aa, Artificial Sequence
  Chemically Synthesized
QVQLQESGGGLVQAGGSLRLSCAASGNIFGSYDMGWYRQAPGKERELVASIGSGGTTYYADSVKGRFTISRDNAKNTVYLQMNSLKPEDTAVYYCAVDTGATVYLSYWGQGTQVTVSS

SEQ ID NO: 33478 - protein, 122 aa, Artificial Sequence
  Chemically Synthesized
QVQLQESGGGLVQAGGSLRLSCAASGYISASSDMGWYRQAPGKERELVATIAYGTSTNYADSVKGRFTISRDNAKNTVYLQMNSLKPEDTAVYYCAASPYVRYYDTLALVYWGQGTQVTVSS

SEQ ID NO: 33479 - protein, 118 aa, Artificial Sequence
  Chemically Synthesized
QVQLQESGGGLVQAGGSLRLSCAASGYISYYFIMGWYRQAPGKEREFVAGINRGATTNYADSVKGRFTISRDNAKNTVYLQMNSLKPEDTAVYYCAAVTISGTLHYYWGQGTQVTVSS

SEQ ID NO: 33480 - protein, 122 aa, Artificial Sequence
  Chemically Synthesized
QVQLQESGGGLVQAGGSLRLSCAASGNISDIVVMGWYRQAPGKERELVAGIGTGSTTNYADSVKGRFTISRDNAKNTVYLQMNSLKPEDTAVYYCAVIYQNDIVVTRYHYYWGQGTQVTVSS

SEQ ID NO: 33481 - protein, 118 aa, Artificial Sequence
  Chemically Synthesized
QVQLQESGGGLVQAGGSLRLSCAASGSIFGDGAMGWYRQAPGKERELVAAIGAGANTNYADSVKGRFTISRDNAKNTVYLQMNSLKPEDTAVYYCAVVYVAYPYHYYWGQGTQVTVSS

SEQ ID NO: 33482 - protein, 118 aa, Artificial Sequence
  Chemically Synthesized
QVQLQESGGGLVQAGGSLRLSCAASGNIFHVQSMGWYRQAPGKEREFVAAINQGTSTNYADSVKGRFTISRDNAKNTVYLQMNSLKPEDTAVYYCAVIVYSHRYLGYWGQGTQVTVSS

SEQ ID NO: 33483 - protein, 118 aa, Artificial Sequence
  Chemically Synthesized
QVQLQESGGGLVQAGGSLRLSCAASGTIFLNAIMGWYRQAPGKEREFVASISLGGTTYYADSVKGRFTISRDNAKNTVYLQMNSLKPEDTAVYYCAVGLFSLAYYVYWGQGTQVTVSS

SEQ ID NO: 33484 - protein, 122 aa, Artificial Sequence
  Chemically Synthesized
QVQLQESGGGLVQAGGSLRLSCAASGTIFPPWYMGWYRQAPGKERELVAGITDGATTNYADSVKGRFTISRDNAKNTVYLQMNSLKPEDTAVYYCAADLKTYQKADDIHRYWGQGTQVTVSS

SEQ ID NO: 33485 - protein, 123 aa, Artificial Sequence
  Chemically Synthesized
QVQLQESGGGLVQAGGSLRLSCAASGYISGGIAMGWYRQAPGKEREFVAAINAGSITNYADSVKGRFTISRDNAKNTVYLQMNSLKPEDTAVYYCAALVYSRTLAGHPYHAYWGQGTQVTVSS

SEQ ID NO: 33486 - protein, 117 aa, Artificial Sequence
  Chemically Synthesized
QVQLQESGGGLVQAGGSLRLSCAASGNIFTLRAMGWYRQAPGKEREFVAAIGYGSITNYADSVKGRFTISRDNAKNTVYLQMNSLKPEDTAVYYCAAIRRSQYLAYWGQGTQVTVSS

SEQ ID NO: 33487 - protein, 118 aa, Artificial Sequence
  Chemically Synthesized
QVQLQESGGGLVQAGGSLRLSCAASGTISVLDTMGWYRQAPGKERELVAGINVGGTTNYADSVKGRFTISRDNAKNTVYLQMNSLKPEDTAVYYCAAIAYRRVYYYYWGQGTQVTVSS

SEQ ID NO: 33488 - protein, 117 aa, Artificial Sequence
  Chemically Synthesized
QVQLQESGGGLVQAGGSLRLSCAASGSIFRHYYMGWYRQAPGKEREFVASIAAGTTTNYADSVKGRFTISRDNAKNTVYLQMNSLKPEDTAVYYCAALRIGGLDFYWGQGTQVTVSS

SEQ ID NO: 33489 - protein, 122 aa, Artificial Sequence
  Chemically Synthesized
QVQLQESGGGLVQAGGSLRLSCAASGTIFTRANMGWYRQAPGKEREFVAGIGSGGSTNYADSVKGRFTISRDNAKNTVYLQMNSLKPEDTAVYYCAAVIFVTDRVPYYHGYWGQGTQVTVSS

SEQ ID NO: 33490 - protein, 122 aa, Artificial Sequence
  Chemically Synthesized
QVQLQESGGGLVQAGGSLRLSCAASGNISPRDAMGWYRQAPGKEREFVATINYGSNTNYADSVKGRFTISRDNAKNTVYLQMNSLKPEDTAVYYCAALVLRHYYEGADHYYWGQGTQVTVSS

SEQ ID NO: 33491 - protein, 118 aa, Artificial Sequence
  Chemically Synthesized
QVQLQESGGGLVQAGGSLRLSCAASGNIFTYQLMGWYRQAPGKEREFVAGIDIGATTNYADSVKGRFTISRDNAKNTVYLQMNSLKPEDTAVYYCAAVGRQYGWFYYWGQGTQVTVSS

SEQ ID NO: 33492 - protein, 118 aa, Artificial Sequence
  Chemically Synthesized
QVQLQESGGGLVQAGGSLRLSCAASGNISQGAFMGWYRQAPGKEREFVASIGVGGTTNYADSVKGRFTISRDNAKNTVYLQMNSLKPEDTAVYYCAAVWRNHHYFWYWGQGTQVTVSS

SEQ ID NO: 33493 - protein, 126 aa, Artificial Sequence
  Chemically Synthesized
QVQLQESGGGLVQAGGSLRLSCAASGTISTDNGMGWYRQAPGKEREFVAGISVGGNTNYADSVKGRFTISRDNAKNTVYLQMNSLKPEDTAVYYCAAIVVSDEYSTGPRYKYLYYWGQGTQVTVSS

SEQ ID NO: 33494 - protein, 118 aa, Artificial Sequence
  Chemically Synthesized
QVQLQESGGGLVQAGGSLRLSCAASGNISFSGVMGWYRQAPGKEREFVAGITYGTTTNYADSVKGRFTISRDNAKNTVYLQMNSLKPEDTAVYYCAVVHYIDVYFWYWGQGTQVTVSS

SEQ ID NO: 33495 - protein, 118 aa, Artificial Sequence
  Chemically Synthesized
QVQLQESGGGLVQAGGSLRLSCAASGTISDWTSMGWYRQAPGKERELVAAIGHGATTNYADSVKGRFTISRDNAKNTVYLQMNSLKPEDTAVYYCAALRYNARYYAYWGQGTQVTVSS

SEQ ID NO: 33496 - protein, 118 aa, Artificial Sequence
  Chemically Synthesized
QVQLQESGGGLVQAGGSLRLSCAASGSIFYSLAMGWYRQAPGKEREFVAAIGVGTSTNYADSVKGRFTISRDNAKNTVYLQMNSLKPEDTAVYYCAAVTIYQPIFYYWGQGTQVTVSS

SEQ ID NO: 33497 - protein, 118 aa, Artificial Sequence
  Chemically Synthesized
QVQLQESGGGLVQAGGSLRLSCAASGSIFYGAYMGWYRQAPGKEREFVASINAGTNTNYADSVKGRFTISRDNAKNTVYLQMNSLKPEDTAVYYCAAVIYTYAYHFYWGQGTQVTVSS

SEQ ID NO: 33498 - protein, 118 aa, Artificial Sequence
  Chemically Synthesized
QVQLQESGGGLVQAGGSLRLSCAASGTISGQLYMGWYRQAPGKEREFVASINQGTNTNYADSVKGRFTISRDNAKNTVYLQMNSLKPEDTAVYYCAAVILAGYYHYYWGQGTQVTVSS

SEQ ID NO: 33499 - protein, 122 aa, Artificial Sequence
  Chemically Synthesized
QVQLQESGGGLVQAGGSLRLSCAASGSIFFPYGMGWYRQAPGKEREFVAGIAVGTITNYADSVKGRFTISRDNAKNTVYLQMNSLKPEDTAVYYCAAVVKKIQGDVRYHVYWGQGTQVTVSS

SEQ ID NO: 33500 - protein, 122 aa, Artificial Sequence
  Chemically Synthesized
QVQLQESGGGLVQAGGSLRLSCAASGTIFDLGIMGWYRQAPGKERELVATINGGGSTNYADSVKGRFTISRDNAKNTVYLQMNSLKPEDTAVYYCAVYIKNDGYLRIELGYWGQGTQVTVSS

SEQ ID NO: 33501 - protein, 118 aa, Artificial Sequence
  Chemically Synthesized
QVQLQESGGGLVQAGGSLRLSCAASGNIFASAAMGWYRQAPGKEREFVAAIAGGGNTNYADSVKGRFTISRDNAKNTVYLQMNSLKPEDTAVYYCAAVYATDGFHYYWGQGTQVTVSS

SEQ ID NO: 33502 - protein, 118 aa, Artificial Sequence
  Chemically Synthesized
QVQLQESGGGLVQAGGSLRLSCAASGNIFETAVMGWYRQAPGKEREFVAGINAGANTNYADSVKGRFTISRDNAKNTVYLQMNSLKPEDTAVYYCAAIGLYKVWHAYWGQGTQVTVSS

SEQ ID NO: 33503 - protein, 118 aa, Artificial Sequence
  Chemically Synthesized
QVQLQESGGGLVQAGGSLRLSCAASGNISRGSRMGWYRQAPGKEREFVAGISQGASTYYADSVKGRFTISRDNAKNTVYLQMNSLKPEDTAVYYCAAITSHPAYLYYWGQGTQVTVSS

SEQ ID NO: 33504 - protein, 118 aa, Artificial Sequence
  Chemically Synthesized
QVQLQESGGGLVQAGGSLRLSCAASGNIFVIYSMGWYRQAPGKERELVAGITGGSTTYYADSVKGRFTISRDNAKNTVYLQMNSLKPEDTAVYYCAAVQRRITWHGYWGQGTQVTVSS

SEQ ID NO: 33505 - protein, 118 aa, Artificial Sequence
  Chemically Synthesized
QVQLQESGGGLVQAGGSLRLSCAASGYISYTYYMGWYRQAPGKEREFVATIGGGASTNYADSVKGRFTISRDNAKNTVYLQMNSLKPEDTAVYYCAAIQGRRPYHPYWGQGTQVTVSS

SEQ ID NO: 33506 - protein, 118 aa, Artificial Sequence
  Chemically Synthesized
QVQLQESGGGLVQAGGSLRLSCAASGTISDTYAMGWYRQAPGKERELVASITSGANTNYADSVKGRFTISRDNAKNTVYLQMNSLKPEDTAVYYCAVLRSTVTDHWYWGQGTQVTVSS

SEQ ID NO: 33507 - protein, 118 aa, Artificial Sequence
  Chemically Synthesized
QVQLQESGGGLVQAGGSLRLSCAASGYISYGVDMGWYRQAPGKEREFVAGITGGGNTNYADSVKGRFTISRDNAKNTVYLQMNSLKPEDTAVYYCAVNGRSPYQLRYWGQGTQVTVSS

SEQ ID NO: 33508 - protein, 126 aa, Artificial Sequence
  Chemically Synthesized
QVQLQESGGGLVQAGGSLRLSCAASGYISWYAYMGWYRQAPGKEREFVASITAGGSTYYADSVKGRFTISRDNAKNTVYLQMNSLKPEDTAVYYCAVYPIRSGYATGKRFPRYWYWGQGTQVTVSS

SEQ ID NO: 33509 - protein, 122 aa, Artificial Sequence
  Chemically Synthesized
QVQLQESGGGLVQAGGSLRLSCAASGTISPLNPMGWYRQAPGKERELVAGIGNGTSTNYADSVKGRFTISRDNAKNTVYLQMNSLKPEDTAVYYCAAVTSRVARGGGYHGYWGQGTQVTVSS

SEQ ID NO: 33510 - protein, 117 aa, Artificial Sequence
  Chemically Synthesized
QVQLQESGGGLVQAGGSLRLSCAASGTISQSYYMGWYRQAPGKEREFVAAINWGTITNYADSVKGRFTISRDNAKNTVYLQMNSLKPEDTAVYYCAWVHTTAHHYYWGQGTQVTVSS

SEQ ID NO: 33511 - protein, 117 aa, Artificial Sequence
  Chemically Synthesized
QVQLQESGGGLVQAGGSLRLSCAASGTIFRAGYMGWYRQAPGKEREFVAGINPGSNTYYADSVKGRFTISRDNAKNTVYLQMNSLKPEDTAVYYCAAAPSVNTLFYWGQGTQVTVSS

SEQ ID NO: 33512 - protein, 118 aa, Artificial Sequence
  Chemically Synthesized
QVQLQESGGGLVQAGGSLRLSCAASGYISNKFYMGWYRQAPGKERELVAGIGRGSTTYYADSVKGRFTISRDNAKNTVYLQMNSLKPEDTAVYYCAVGRYRYVYFLYWGQGTQVTVSS

SEQ ID NO: 33513 - protein, 112 aa, Artificial Sequence
  Chemically Synthesized
QVQLQESGGGLVQAGGSLRLSCAASGYISEPGSMGWYRQAPGKERELVATITFGTIYQYADSVKGRFTISRDNAKNTVYLQMNSLKPEDTAVYYCAVILMYWGQGTQVTVSS

SEQ ID NO: 33514 - protein, 117 aa, Artificial Sequence
  Chemically Synthesized
QVQLQESGGGLVQAGGSLRLSCAASGTISKRFRMGWYRQAPGKEREFVAGIDSGSTTNYADSVKGRFTISRDNAKNTVYLQMNSLKPEDTAVYYCAAVDRGGRYYYWGQGTQVTVSS

SEQ ID NO: 33515 - protein, 126 aa, Artificial Sequence
  Chemically Synthesized
QVQLQESGGGLVQAGGSLRLSCAASGYISNYASMGWYRQAPGKERELVASITSGSSTNYADSVKGRFTISRDNAKNTVYLQMNSLKPEDTAVYYCAVTPYYYLRAGWVYYRIHGYWGQGTQVTVSS

SEQ ID NO: 33516 - protein, 118 aa, Artificial Sequence
  Chemically Synthesized
QVQLQESGGGLVQAGGSLRLSCAASGNISNPSSMGWYRQAPGKEREFVAGIGYGGSTNYADSVKGRFTISRDNAKNTVYLQMNSLKPEDTAVYYCAVLAYSSSWYYYWGQGTQVTVSS

SEQ ID NO: 33517 - protein, 118 aa, Artificial Sequence
  Chemically Synthesized
QVQLQESGGGLVQAGGSLRLSCAASGYISEYSAMGWYRQAPGKEREFVAAISHGATTNYADSVKGRFTISRDNAKNTVYLQMNSLKPEDTAVYYCAAVYYQAIYHHYWGQGTQVTVSS

SEQ ID NO: 33518 - protein, 118 aa, Artificial Sequence
  Chemically Synthesized
QVQLQESGGGLVQAGGSLRLSCAASGTIFQPIDMGWYRQAPGKERELVATIGDGGITNYADSVKGRFTISRDNAKNTVYLQMNSLKPEDTAVYYCAVDPSYYAVLPYWGQGTQVTVSS

SEQ ID NO: 33519 - protein, 118 aa, Artificial Sequence
  Chemically Synthesized
QVQLQESGGGLVQAGGSLRLSCAASGNISGWGGMGWYRQAPGKEREFVAGISAGAITNYADSVKGRFTISRDNAKNTVYLQMNSLKPEDTAVYYCAAVYTYVGRHYYWGQGTQVTVSS

SEQ ID NO: 33520 - protein, 118 aa, Artificial Sequence
  Chemically Synthesized
QVQLQESGGGLVQAGGSLRLSCAASGSISLLYVMGWYRQAPGKEREFVAAIDLGTTTNYADSVKGRFTISRDNAKNTVYLQMNSLKPEDTAVYYCAALASKKYDHGYWGQGTQVTVSS

SEQ ID NO: 33521 - protein, 122 aa, Artificial Sequence
  Chemically Synthesized
QVQLQESGGGLVQAGGSLRLSCAASGNISPDTYMGWYRQAPGKERELVASIDDGAITNYADSVKGRFTISRDNAKNTVYLQMNSLKPEDTAVYYCAVNVIGYSPPFLAYGYWGQGTQVTVSS

SEQ ID NO: 33522 - protein, 118 aa, Artificial Sequence
  Chemically Synthesized
QVQLQESGGGLVQAGGSLRLSCAASGYISFRSYMGWYRQAPGKERELVAGISEGGTTNYADSVKGRFTISRDNAKNTVYLQMNSLKPEDTAVYYCAAYPSNYPDFGYWGQGTQVTVSS

SEQ ID NO: 33523 - protein, 118 aa, Artificial Sequence
  Chemically Synthesized
QVQLQESGGGLVQAGGSLRLSCAASGTISFYSDMGWYRQAPGKERELVATITVGASTYYADSVKGRFTISRDNAKNTVYLQMNSLKPEDTAVYYCAVGDDLTYGHQYWGQGTQVTVSS

SEQ ID NO: 33524 - protein, 118 aa, Artificial Sequence
  Chemically Synthesized
QVQLQESGGGLVQAGGSLRLSCAASGTIFHFKGMGWYRQAPGKEREFVAGIGRGTITNYADSVKGRFTISRDNAKNTVYLQMNSLKPEDTAVYYCAVLTRVSDYYYYWGQGTQVTVSS

SEQ ID NO: 33525 - protein, 118 aa, Artificial Sequence
  Chemically Synthesized
QVQLQESGGGLVQAGGSLRLSCAASGSISSEYAMGWYRQAPGKEREFVAGIGRGSSTNYADSVKGRFTISRDNAKNTVYLQMNSLKPEDTAVYYCAAVIVRGGLHAYWGQGTQVTVSS

SEQ ID NO: 33526 - protein, 118 aa, Artificial Sequence
  Chemically Synthesized
QVQLQESGGGLVQAGGSLRLSCAASGSISYDYHMGWYRQAPGKEREFVASIADGGITNYADSVKGRFTISRDNAKNTVYLQMNSLKPEDTAVYYCAALLRRRPLLYYWGQGTQVTVSS

SEQ ID NO: 33527 - protein, 118 aa, Artificial Sequence
  Chemically Synthesized
QVQLQESGGGLVQAGGSLRLSCAASGSIFGRSFMGWYRQAPGKEREFVAAINGGSTTNYADSVKGRFTISRDNAKNTVYLQMNSLKPEDTAVYYCAALGNPAQYYYYWGQGTQVTVSS

SEQ ID NO: 33528 - protein, 118 aa, Artificial Sequence
  Chemically Synthesized
QVQLQESGGGLVQAGGSLRLSCAASGNISRAYYMGWYRQAPGKEREFVATINSGTTTNYADSVKGRFTISRDNAKNTVYLQMNSLKPEDTAVYYCAALTLHANYLYYWGQGTQVTVSS

SEQ ID NO: 33529 - protein, 122 aa, Artificial Sequence
  Chemically Synthesized
QVQLQESGGGLVQAGGSLRLSCAASGTISELDHMGWYRQAPGKERELVATITDGTTTNYADSVKGRFTISRDNAKNTVYLQMNSLKPEDTAVYYCAVGKADLDYYPDAHAYWGQGTQVTVSS

SEQ ID NO: 33530 - protein, 127 aa, Artificial Sequence
  Chemically Synthesized
QVQLQESGGGLVQAGGSLRLSCAASGSISGQLRIMGWYRQAPGKEREFVASINRGAITYYADSVKGRFTISRDNAKNTVYLQMNSLKPEDTAVYYCAALYDIEPDYGSTSKRYYYYWGQGTQVTVSS

SEQ ID NO: 33531 - protein, 118 aa, Artificial Sequence
  Chemically Synthesized
QVQLQESGGGLVQAGGSLRLSCAASGNISRVTAMGWYRQAPGKEREFVASIAGGSSTNYADSVKGRFTISRDNAKNTVYLQMNSLKPEDTAVYYCAAIYWSSVYHYYWGQGTQVTVSS

SEQ ID NO: 33532 - protein, 118 aa, Artificial Sequence
  Chemically Synthesized
QVQLQESGGGLVQAGGSLRLSCAASGTISGLLIMGWYRQAPGKEREFVAAIALGGTTNYADSVKGRFTISRDNAKNTVYLQMNSLKPEDTAVYYCAVLARVGPYHYYWGQGTQVTVSS

SEQ ID NO: 33533 - protein, 117 aa, Artificial Sequence
  Chemically Synthesized
QVQLQESGGGLVQAGGSLRLSCAASGTISNSASMGWYRQAPGKEREFVASIAYGTTTNYADSVKGRFTISRDNAKNTVYLQMNSLKPEDTAVYYCAAPSTGTTCLYWGQGTQVTVSS

SEQ ID NO: 33534 - protein, 122 aa, Artificial Sequence
  Chemically Synthesized
QVQLQESGGGLVQAGGSLRLSCAASGSISLPDVMGWYRQAPGKEREFVAGINAGGITNYADSVKGRFTISRDNAKNTVYLQMNSLKPEDTAVYYCAAIARTVLDGIAWHGYWGQGTQVTVSS

SEQ ID NO: 33535 - protein, 122 aa, Artificial Sequence
  Chemically Synthesized
QVQLQESGGGLVQAGGSLRLSCAASGTISDVYNMGWYRQAPGKEREFVAGITFGGTTYYADSVKGRFTISRDNAKNTVYLQMNSLKPEDTAVYYCAAIGKFTTDYRRYFYYWGQGTQVTVSS

SEQ ID NO: 33536 - protein, 118 aa, Artificial Sequence
  Chemically Synthesized
QVQLQESGGGLVQAGGSLRLSCAASGNIFVYGNMGWYRQAPGKERELVASITTGTSTNYADSVKGRFTISRDNAKNTVYLQMNSLKPEDTAVYYCAVAWIDGGPHWYWGQGTQVTVSS

SEQ ID NO: 33537 - protein, 126 aa, Artificial Sequence
  Chemically Synthesized
QVQLQESGGGLVQAGGSLRLSCAASGNISYVRYMGWYRQAPGKEREFVAAIGGGTNTNYADSVKGRFTISRDNAKNTVYLQMNSLKPEDTAVYYCAALYGTARTASRGTIDYHYYWGQGTQVTVSS

SEQ ID NO: 33538 - protein, 118 aa, Artificial Sequence
  Chemically Synthesized
QVQLQESGGGLVQAGGSLRLSCAASGSISADGAMGWYRQAPGKEREFVAGITAGGSTNYADSVKGRFTISRDNAKNTVYLQMNSLKPEDTAVYYCAVLDLHRPYHWYWGQGTQVTVSS

SEQ ID NO: 33539 - protein, 118 aa, Artificial Sequence
  Chemically Synthesized
QVQLQESGGGLVQAGGSLRLSCAASGSISDLVVMGWYRQAPGKEREFVAGITRGAITNYADSVKGRFTISRDNAKNTVYLQMNSLKPEDTAVYYCAAVIRATYVHHYWGQGTQVTVSS

SEQ ID NO: 33540 - protein, 118 aa, Artificial Sequence
  Chemically Synthesized
QVQLQESGGGLVQAGGSLRLSCAASGTISSAYVMGWYRQAPGKEREFVAGIGGGTTTNYADSVKGRFTISRDNAKNTVYLQMNSLKPEDTAVYYCAVLVYDRNYHYYWGQGTQVTVSS

SEQ ID NO: 33541 - protein, 118 aa, Artificial Sequence
  Chemically Synthesized
QVQLQESGGGLVQAGGSLRLSCAASGSISGTEAMGWYRQAPGKEREFVATIGSGTNTYYADSVKGRFTISRDNAKNTVYLQMNSLKPEDTAVYYCAALKKRYNLYYYWGQGTQVTVSS

SEQ ID NO: 33542 - protein, 122 aa, Artificial Sequence
  Chemically Synthesized
QVQLQESGGGLVQAGGSLRLSCAASGTIFYFDYMGWYRQAPGKERELVAAIGTGGITNYADSVKGRFTISRDNAKNTVYLQMNSLKPEDTAVYYCAVGRRLLTGPLVDHLYWGQGTQVTVSS

SEQ ID NO: 33543 - protein, 118 aa, Artificial Sequence
  Chemically Synthesized
QVQLQESGGGLVQAGGSLRLSCAASGSISRHYIMGWYRQAPGKEREFVAAITPGANTNYADSVKGRFTISRDNAKNTVYLQMNSLKPEDTAVYYCAVVWVWSKTHYYWGQGTQVTVSS

SEQ ID NO: 33544 - protein, 126 aa, Artificial Sequence
  Chemically Synthesized
QVQLQESGGGLVQAGGSLRLSCAASGNISDADNMGWYRQAPGKEREFVAGIGGGTITYYADSVKGRFTISRDNAKNTVYLQMNSLKPEDTAVYYCAVNEPYDVQRFVTYSPYHAYWGQGTQVTVSS

SEQ ID NO: 33545 - protein, 118 aa, Artificial Sequence
  Chemically Synthesized
QVQLQESGGGLVQAGGSLRLSCAASGYIFTYLYMGWYRQAPGKEREFVAAIAAGSNTNYADSVKGRFTISRDNAKNTVYLQMNSLKPEDTAVYYCAAVDGSGPYHGYWGQGTQVTVSS

SEQ ID NO: 33546 - protein, 121 aa, Artificial Sequence
  Chemically Synthesized
QVQLQESGGGLVQAGGSLRLSCAASGTIFHTSRMGWYRQAPGKEREFVAGIGGATTNYADSVKGRFTISRDNAKNTVYLQMNSLKPEDTAVYYCAAVYFRISGRYGSHSYWGQGTQVTVSS

SEQ ID NO: 33547 - protein, 122 aa, Artificial Sequence
  Chemically Synthesized
QVQLQESGGGLVQAGGSLRLSCAASGYISQPLIMGWYRQAPGKEREFVAAIGPGSSTNYADSVKGRFTISRDNAKNTVYLQMNSLKPEDTAVYYCAVVYDDFSVLYLKHDYWGQGTQVTVSS

SEQ ID NO: 33548 - protein, 116 aa, Artificial Sequence
  Chemically Synthesized
QVQLQESGGGLVQAGGSLRLSCAASGSIFRDIIMGWYRQAPGKEREFVASISGGAITYYADSVKGRFTISRDNAKNTVYLQMNSLKPEDTAVYYCAAVLSYYHYYWGQGTQVTVSS

SEQ ID NO: 33549 - protein, 122 aa, Artificial Sequence
  Chemically Synthesized
QVQLQESGGGLVQAGGSLRLSCAASGTIFDTYNMGWYRQAPGKERELVAAIGYGSSTNYADSVKGRFTISRDNAKNTVYLQMNSLKPEDTAVYYCAALTVTSTGITRWHYYWGQGTQVTVSS

SEQ ID NO: 33550 - protein, 118 aa, Artificial Sequence
  Chemically Synthesized
QVQLQESGGGLVQAGGSLRLSCAASGYIFSEYYMGWYRQAPGKEREFVAGIDGGANTNYADSVKGRFTISRDNAKNTVYLQMNSLKPEDTAVYYCAALYGKYPYLWYWGQGTQVTVSS

SEQ ID NO: 33551 - protein, 118 aa, Artificial Sequence
  Chemically Synthesized
QVQLQESGGGLVQAGGSLRLSCAASGNISYSYQMGWYRQAPGKEREFVAAISTGSITNYADSVKGRFTISRDNAKNTVYLQMNSLKPEDTAVYYCAALVHTGVWLAYWGQGTQVTVSS

SEQ ID NO: 33552 - protein, 118 aa, Artificial Sequence
  Chemically Synthesized
QVQLQESGGGLVQAGGSLRLSCAASGNISGLYDMGWYRQAPGKERELVASIDRGTSTYYADSVKGRFTISRDNAKNTVYLQMNSLKPEDTAVYYCAAGLHKFPVLIYWGQGTQVTVSS

SEQ ID NO: 33553 - protein, 118 aa, Artificial Sequence
  Chemically Synthesized
QVQLQESGGGLVQAGGSLRLSCAASGNISQPGNMGWYRQAPGKERELVASIGVGGNTNYADSVKGRFTISRDNAKNTVYLQMNSLKPEDTAVYYCAALYRFGRYFSYWGQGTQVTVSS

SEQ ID NO: 33554 - protein, 122 aa, Artificial Sequence
  Chemically Synthesized
QVQLQESGGGLVQAGGSLRLSCAASGSIFTGGSMGWYRQAPGKERELVATIASGGNTNYADSVKGRFTISRDNAKNTVYLQMNSLKPEDTAVYYCAVNDRLDRETYVRLQYWGQGTQVTVSS

SEQ ID NO: 33555 - protein, 118 aa, Artificial Sequence
  Chemically Synthesized
QVQLQESGGGLVQAGGSLRLSCAASGTISPTAFMGWYRQAPGKERELVAGINTGSITNYADSVKGRFTISRDNAKNTVYLQMNSLKPEDTAVYYCAVTIPGYSHYFYWGQGTQVTVSS

SEQ ID NO: 33556 - protein, 122 aa, Artificial Sequence
  Chemically Synthesized
QVQLQESGGGLVQAGGSLRLSCAASGNISHNWDMGWYRQAPGKERELVATINSGGITNYADSVKGRFTISRDNAKNTVYLQMNSLKPEDTAVYYCAAYDYVIGYIPPLFTYWGQGTQVTVSS

SEQ ID NO: 33557 - protein, 118 aa, Artificial Sequence
  Chemically Synthesized
QVQLQESGGGLVQAGGSLRLSCAASGSISYPVVMGWYRQAPGKERELVAGIGAGSNTNYADSVKGRFTISRDNAKNTVYLQMNSLKPEDTAVYYCAVIAYRRSWLYYWGQGTQVTVSS

SEQ ID NO: 33558 - protein, 118 aa, Artificial Sequence
  Chemically Synthesized
QVQLQESGGGLVQAGGSLRLSCAASGTISVRDTMGWYRQAPGKEREFVAGIADGTNTNYADSVKGRFTISRDNAKNTVYLQMNSLKPEDTAVYYCAAVWFQQRVYYYWGQGTQVTVSS

SEQ ID NO: 33559 - protein, 118 aa, Artificial Sequence
  Chemically Synthesized
QVQLQESGGGLVQAGGSLRLSCAASGNISNRYPMGWYRQAPGKEREFVASIDRGGSTYYADSVKGRFTISRDNAKNTVYLQMNSLKPEDTAVYYCAVGWYQVEYHTYWGQGTQVTVSS

SEQ ID NO: 33560 - protein, 118 aa, Artificial Sequence
  Chemically Synthesized
QVQLQESGGGLVQAGGSLRLSCAASGSISGYYRMGWYRQAPGKERELVAGINAGGSTNYADSVKGRFTISRDNAKNTVYLQMNSLKPEDTAVYYCAVLAHGVQWHYYWGQGTQVTVSS

SEQ ID NO: 33561 - protein, 118 aa, Artificial Sequence
  Chemically Synthesized
QVQLQESGGGLVQAGGSLRLSCAASGYISQIKYMGWYRQAPGKEREFVATIGGGTSTNYADSVKGRFTISRDNAKNTVYLQMNSLKPEDTAVYYCAVRRGRYTNHQYWGQGTQVTVSS

SEQ ID NO: 33562 - protein, 118 aa, Artificial Sequence
  Chemically Synthesized
QVQLQESGGGLVQAGGSLRLSCAASGNISVRATMGWYRQAPGKEREFVAGINVGGSTNYADSVKGRFTISRDNAKNTVYLQMNSLKPEDTAVYYCAVVYYQDAYHSYWGQGTQVTVSS

SEQ ID NO: 33563 - protein, 122 aa, Artificial Sequence
  Chemically Synthesized
QVQLQESGGGLVQAGGSLRLSCAASGNISGEGNMGWYRQAPGKEREFVAAISVGGSTNYADSVKGRFTISRDNAKNTVYLQMNSLKPEDTAVYYCAVVARYGYSPRAYHFYWGQGTQVTVSS

SEQ ID NO: 33564 - protein, 118 aa, Artificial Sequence
  Chemically Synthesized
QVQLQESGGGLVQAGGSLRLSCAASGYIFLWYLMGWYRQAPGKEREFVATIDAGSNTNYADSVKGRFTISRDNAKNTVYLQMNSLKPEDTAVYYCAVGDEFGWSFLYWGQGTQVTVSS

SEQ ID NO: 33565 - protein, 118 aa, Artificial Sequence
  Chemically Synthesized
QVQLQESGGGLVQAGGSLRLSCAASGNISWYIWMGWYRQAPGKERELVAGIARGSTTYYADSVKGRFTISRDNAKNTVYLQMNSLKPEDTAVYYCAANDDGIGQLVYWGQGTQVTVSS

SEQ ID NO: 33566 - protein, 122 aa, Artificial Sequence
  Chemically Synthesized
QVQLQESGGGLVQAGGSLRLSCAASGYISYPSAMGWYRQAPGKEREFVAAINLGTSTNYADSVKGRFTISRDNAKNTVYLQMNSLKPEDTAVYYCAVIARIADEAPGYHWYWGQGTQVTVSS

SEQ ID NO: 33567 - protein, 118 aa, Artificial Sequence
  Chemically Synthesized
QVQLQESGGGLVQAGGSLRLSCAASGTISPIYSMGWYRQAPGKEREFVAAIGDGGNTNYADSVKGRFTISRDNAKNTVYLQMNSLKPEDTAVYYCAALGYFVNFHYYWGQGTQVTVSS

SEQ ID NO: 33568 - protein, 118 aa, Artificial Sequence
  Chemically Synthesized
QVQLQESGGGLVQAGGSLRLSCAASGTISSAWVMGWYRQAPGKEREFVAGISRGTSTNYADSVKGRFTISRDNAKNTVYLQMNSLKPEDTAVYYCAAIYYSFGYHHYWGQGTQVTVSS

SEQ ID NO: 33569 - protein, 122 aa, Artificial Sequence
  Chemically Synthesized
QVQLQESGGGLVQAGGSLRLSCAASGYIFLQDDMGWYRQAPGKEREFVAAINSGSTTNYADSVKGRFTISRDNAKNTVYLQMNSLKPEDTAVYYCAADYTGTFDPTGYLPYWGQGTQVTVSS

SEQ ID NO: 33570 - protein, 126 aa, Artificial Sequence
  Chemically Synthesized
QVQLQESGGGLVQAGGSLRLSCAASGSISYGGVMGWYRQAPGKEREFVAGITTGGNTNYADSVKGRFTISRDNAKNTVYLQMNSLKPEDTAVYYCAVVAYDGSNGGYRGSRYHGYWGQGTQVTVSS

SEQ ID NO: 33571 - protein, 115 aa, Artificial Sequence
  Chemically Synthesized
QVQLQESGGGLVQAGGSLRLSCAASGTIFTARYMGWYRQAPGKEREFVAGINRGTITYYADSVKGRFTISRDNAKNTVYLQMNSLKPEDTAVYYCAAAYHRHDYWGQGTQVTVSS

SEQ ID NO: 33572 - protein, 118 aa, Artificial Sequence
  Chemically Synthesized
QVQLQESGGGLVQAGGSLRLSCAASGSIFYYIKMGWYRQAPGKEREFVAGISDGANTNYADSVKGRFTISRDNAKNTVYLQMNSLKPEDTAVYYCAAIYHVEGYHYYWGQGTQVTVSS

SEQ ID NO: 33573 - protein, 117 aa, Artificial Sequence
  Chemically Synthesized
QVQLQESGGGLVQAGGSLRLSCAASGYIFGYPSMGWYRQAPGKERELVASISHGASTYYADSVKGRFTISRDNAKNTVYLQMNSLKPEDTAVYYCAVWYRDVGFKYWGQGTQVTVSS

SEQ ID NO: 33574 - protein, 118 aa, Artificial Sequence
  Chemically Synthesized
QVQLQESGGGLVQAGGSLRLSCAASGNIFYYTRMGWYRQAPGKERELVAAITYGAITYYADSVKGRFTISRDNAKNTVYLQMNSLKPEDTAVYYCAVYPSATADHYYWGQGTQVTVSS

SEQ ID NO: 33575 - protein, 118 aa, Artificial Sequence
  Chemically Synthesized
QVQLQESGGGLVQAGGSLRLSCAASGNISGYYIMGWYRQAPGKEREFVAAIAYGGITNYADSVKGRFTISRDNAKNTVYLQMNSLKPEDTAVYYCAVQVRLGPRLYYWGQGTQVTVSS

SEQ ID NO: 33576 - protein, 125 aa, Artificial Sequence
  Chemically Synthesized
QVQLQESGGGLVQAGGSLRLSCAASGYIFDGDDMGWYRQAPGKEREFVAGITAGTSTNYADSVKGRFTISRDNAKNTVYLQMNSLKPEDTAVYYCAVYRYVYPTWSTFRLTCLYWGQGTQVTVSS

SEQ ID NO: 33577 - protein, 125 aa, Artificial Sequence
  Chemically Synthesized
QVQLQESGGGLVQAGGSLRLSCAASGNISHAYGMGWYRQAPGKEREFVAGIDSGGITNYADSVKGRFTISRDNAKNTVYLQMNSLKPEDTAVYYCAVRGHYWTGTSLFGLTSMYWGQGTQVTVSS

SEQ ID NO: 33578 - protein, 118 aa, Artificial Sequence
  Chemically Synthesized
QVQLQESGGGLVQAGGSLRLSCAASGNISYIDSMGWYRQAPGKERELVAGIAAGSTTYYADSVKGRFTISRDNAKNTVYLQMNSLKPEDTAVYYCAAQNWGRTALRYWGQGTQVTVSS

SEQ ID NO: 33579 - protein, 118 aa, Artificial Sequence
  Chemically Synthesized
QVQLQESGGGLVQAGGSLRLSCAASGTISYDYVMGWYRQAPGKEREFVASIAYGATTNYADSVKGRFTISRDNAKNTVYLQMNSLKPEDTAVYYCAAYYTGRHPYPYWGQGTQVTVSS

SEQ ID NO: 33580 - protein, 112 aa, Artificial Sequence
  Chemically Synthesized
QVQLQESGGGLVQAGGSLRLSCAASGTISTRYTMGWYRQAPGKERELVATISDGTNTNYADSVKGRFTISRDNAKNTVYLQMNSLKPEDTAVYYCAFTTIYWGQGTQVTVSS

SEQ ID NO: 33581 - protein, 121 aa, Artificial Sequence
  Chemically Synthesized
QVQLQESGGGLVQAGGSLRLSCAASGNISYGYSMGWYRQAPGKEREFVASIAGGSITYYADSVKGRFTISRDNAKNTVYLQMNSLKPEDTAVYYCAVDYSLYPRRAPTLYWGQGTQVTVSS

SEQ ID NO: 33582 - protein, 118 aa, Artificial Sequence
  Chemically Synthesized
QVQLQESGGGLVQAGGSLRLSCAASGTISYTQSMGWYRQAPGKEREFVAGIDQGGTTYYADSVKGRFTISRDNAKNTVYLQMNSLKPEDTAVYYCAALYDRLKALVYWGQGTQVTVSS

SEQ ID NO: 33583 - protein, 122 aa, Artificial Sequence
  Chemically Synthesized
QVQLQESGGGLVQAGGSLRLSCAASGSISQGDWMGWYRQAPGKERELVAGINTGASTNYADSVKGRFTISRDNAKNTVYLQMNSLKPEDTAVYYCAAETVLNTRVDTNHWYWGQGTQVTVSS

SEQ ID NO: 33584 - protein, 124 aa, Artificial Sequence
  Chemically Synthesized
QVQLQESGGGLVQAGGSLRLSCAASGNIFGSGYDYMGWYRQAPGKEREFVATISPGGSTNYADSVKGRFTISRDNAKNTVYLQMNSLKPEDTAVYYCAAGYSSLPKYDANHRYWGQGTQVTVSS

SEQ ID NO: 33585 - protein, 118 aa, Artificial Sequence
  Chemically Synthesized
QVQLQESGGGLVQAGGSLRLSCAASGTIFPAWGMGWYRQAPGKEREFVATIDTGATTYYADSVKGRFTISRDNAKNTVYLQMNSLKPEDTAVYYCAVQYVRHGYFSYWGQGTQVTVSS

SEQ ID NO: 33586 - protein, 122 aa, Artificial Sequence
  Chemically Synthesized
QVQLQESGGGLVQAGGSLRLSCAASGSISLHAPMGWYRQAPGKERELVAGIAGGATTNYADSVKGRFTISRDNAKNTVYLQMNSLKPEDTAVYYCAAYYDVHDPYVDAHPYWGQGTQVTVSS

SEQ ID NO: 33587 - protein, 125 aa, Artificial Sequence
  Chemically Synthesized
QVQLQESGGGLVQAGGSLRLSCAASGNIFASVMGWYRQAPGKEREFVASINLGTTTYYADSVKGRFTISRDNAKNTVYLQMNSLKPEDTAVYYCAAYVLYSSDRIHDDAYPLSYWGQGTQVTVSS

SEQ ID NO: 33588 - protein, 116 aa, Artificial Sequence
  Chemically Synthesized
QVQLQESGGGLVQAGGSLRLSCAASGTISPYVSMGWYRQAPGKERELVAGITFGSSTYYADSVKGRFTISRDNAKNTVYLQMNSLKPEDTAVYYCAADPQLDHNYWGQGTQVTVSS

SEQ ID NO: 33589 - protein, 118 aa, Artificial Sequence
  Chemically Synthesized
QVQLQESGGGLVQAGGSLRLSCAASGNISSGDAMGWYRQAPGKEREFVATIDRGGNTNYADSVKGRFTISRDNAKNTVYLQMNSLKPEDTAVYYCAVVTGYRRKYQYWGQGTQVTVSS

SEQ ID NO: 33590 - protein, 118 aa, Artificial Sequence
  Chemically Synthesized
QVQLQESGGGLVQAGGSLRLSCAASGNISSYPYMGWYRQAPGKEREFVASIDTGGTTYYADSVKGRFTISRDNAKNTVYLQMNSLKPEDTAVYYCAAYPDQGGILQYWGQGTQVTVSS

SEQ ID NO: 33591 - protein, 125 aa, Artificial Sequence
  Chemically Synthesized
QVQLQESGGGLVQAGGSLRLSCAASGTISTDAMGWYRQAPGKEREFVAAINAGGITNYADSVKGRFTISRDNAKNTVYLQMNSLKPEDTAVYYCAVPNGPYRYLGAYGDGYHYYWGQGTQVTVSS

SEQ ID NO: 33592 - protein, 122 aa, Artificial Sequence
  Chemically Synthesized
QVQLQESGGGLVQAGGSLRLSCAASGYISLSDIMGWYRQAPGKEREFVASIAYGAITYYADSVKGRFTISRDNAKNTVYLQMNSLKPEDTAVYYCAVYGRIAGSVLPFHVYWGQGTQVTVSS

SEQ ID NO: 33593 - protein, 119 aa, Artificial Sequence
  Chemically Synthesized
QVQLQESGGGLVQAGGSLRLSCAASGTISYEAVYMGWYRQAPGKEREFVAGISYGTNTYYADSVKGRFTISRDNAKNTVYLQMNSLKPEDTAVYYCAVAWPKYRDYRYWGQGTQVTVSS

SEQ ID NO: 33594 - protein, 118 aa, Artificial Sequence
  Chemically Synthesized
QVQLQESGGGLVQAGGSLRLSCAASGSISVYYTMGWYRQAPGKEREFVAGITYGGNTYYADSVKGRFTISRDNAKNTVYLQMNSLKPEDTAVYYCAADHDPDTRYKYWGQGTQVTVSS

SEQ ID NO: 33595 - protein, 118 aa, Artificial Sequence
  Chemically Synthesized
QVQLQESGGGLVQAGGSLRLSCAASGNISDYVIMGWYRQAPGKERELVAGISPGSITYYADSVKGRFTISRDNAKNTVYLQMNSLKPEDTAVYYCAAPRWIWRSFSYWGQGTQVTVSS

SEQ ID NO: 33596 - protein, 122 aa, Artificial Sequence
  Chemically Synthesized
QVQLQESGGGLVQAGGSLRLSCAASGTIFYSDSMGWYRQAPGKERELVAGIASGTTTYYADSVKGRFTISRDNAKNTVYLQMNSLKPEDTAVYYCAVKSKSRGQYGYYHSYWGQGTQVTVSS

SEQ ID NO: 33597 - protein, 126 aa, Artificial Sequence
  Chemically Synthesized
QVQLQESGGGLVQAGGSLRLSCAASGNISDIVDMGWYRQAPGKERELVAGIGPGTNTYYADSVKGRFTISRDNAKNTVYLQMNSLKPEDTAVYYCAVRLAAESTWYGFYYFVYYYWGQGTQVTVSS

SEQ ID NO: 33598 - protein, 117 aa, Artificial Sequence
  Chemically Synthesized
QVQLQESGGGLVQAGGSLRLSCAASGTISYSGVMGWYRQAPGKEREFVATIDQGSTTNYADSVKGRFTISRDNAKNTVYLQMNSLKPEDTAVYYCAVLLGSWLVLYWGQGTQVTVSS

SEQ ID NO: 33599 - protein, 118 aa, Artificial Sequence
  Chemically Synthesized
QVQLQESGGGLVQAGGSLRLSCAASGTIFGGDYMGWYRQAPGKEREFVASINDGTSTNYADSVKGRFTISRDNAKNTVYLQMNSLKPEDTAVYYCAATYGHRHQFWYWGQGTQVTVSS

SEQ ID NO: 33600 - protein, 122 aa, Artificial Sequence
  Chemically Synthesized
QVQLQESGGGLVQAGGSLRLSCAASGSIFYEAVMGWYRQAPGKEREFVATITVGTTTNYADSVKGRFTISRDNAKNTVYLQMNSLKPEDTAVYYCAADIVKFDLHGLRHGYWGQGTQVTVSS

SEQ ID NO: 33601 - protein, 126 aa, Artificial Sequence
  Chemically Synthesized
QVQLQESGGGLVQAGGSLRLSCAASGNIFGYRRMGWYRQAPGKERELVAGINVGSTTNYADSVKGRFTISRDNAKNTVYLQMNSLKPEDTAVYYCAVRTWRRDGPRDRHWGGYYYWGQGTQVTVSS

SEQ ID NO: 33602 - protein, 118 aa, Artificial Sequence
  Chemically Synthesized
QVQLQESGGGLVQAGGSLRLSCAASGSIFALLAMGWYRQAPGKERELVAAITLGSNTYYADSVKGRFTISRDNAKNTVYLQMNSLKPEDTAVYYCAAKPIPGAQYDYWGQGTQVTVSS

SEQ ID NO: 33603 - protein, 118 aa, Artificial Sequence
  Chemically Synthesized
QVQLQESGGGLVQAGGSLRLSCAASGTISDYGSMGWYRQAPGKERELVATIANGTTTYYADSVKGRFTISRDNAKNTVYLQMNSLKPEDTAVYYCAVLITGQLLLYYWGQGTQVTVSS

SEQ ID NO: 33604 - protein, 122 aa, Artificial Sequence
  Chemically Synthesized
QVQLQESGGGLVQAGGSLRLSCAASGTIFGTIYMGWYRQAPGKEREFVASISDGSTTYYADSVKGRFTISRDNAKNTVYLQMNSLKPEDTAVYYCAVTEDTDQSVVSQYYYWGQGTQVTVSS

SEQ ID NO: 33605 - protein, 118 aa, Artificial Sequence
  Chemically Synthesized
QVQLQESGGGLVQAGGSLRLSCAASGSISARPVMGWYRQAPGKEREFVAGITTGTTTYYADSVKGRFTISRDNAKNTVYLQMNSLKPEDTAVYYCAAYGDGYGAYHYWGQGTQVTVSS

SEQ ID NO: 33606 - protein, 122 aa, Artificial Sequence
  Chemically Synthesized
QVQLQESGGGLVQAGGSLRLSCAASGTIFDSSDMGWYRQAPGKERELVATITVGGSTNYADSVKGRFTISRDNAKNTVYLQMNSLKPEDTAVYYCAAQVAADQEGGRDLGYWGQGTQVTVSS

SEQ ID NO: 33607 - protein, 118 aa, Artificial Sequence
  Chemically Synthesized
QVQLQESGGGLVQAGGSLRLSCAASGTISWDEWMGWYRQAPGKERELVATIDKGANTNYADSVKGRFTISRDNAKNTVYLQMNSLKPEDTAVYYCAVYRDSTNYLWYWGQGTQVTVSS

SEQ ID NO: 33608 - protein, 126 aa, Artificial Sequence
  Chemically Synthesized
QVQLQESGGGLVQAGGSLRLSCAASGNIFPSEYMGWYRQAPGKERELVAGIGWGGTTYYADSVKGRFTISRDNAKNTVYLQMNSLKPEDTAVYYCAVYPQEYVASPYYYADAHTYWGQGTQVTVSS

SEQ ID NO: 33609 - protein, 122 aa, Artificial Sequence
  Chemically Synthesized
QVQLQESGGGLVQAGGSLRLSCAASGSIFGIRRMGWYRQAPGKERELVASIARGGSTYYADSVKGRFTISRDNAKNTVYLQMNSLKPEDTAVYYCAAPYFNAYGGAGPHYYWGQGTQVTVSS

SEQ ID NO: 33610 - protein, 122 aa, Artificial Sequence
  Chemically Synthesized
QVQLQESGGGLVQAGGSLRLSCAASGSIFHPNFMGWYRQAPGKERELVAGITRGTTTNYADSVKGRFTISRDNAKNTVYLQMNSLKPEDTAVYYCAARFYRLFYWYKDFGYWGQGTQVTVSS

SEQ ID NO: 33611 - protein, 118 aa, Artificial Sequence
  Chemically Synthesized
QVQLQESGGGLVQAGGSLRLSCAASGNIFDPDYMGWYRQAPGKERELVAAIAPGGTTYYADSVKGRFTISRDNAKNTVYLQMNSLKPEDTAVYYCAVPGPYYGYYVYWGQGTQVTVSS

SEQ ID NO: 33612 - protein, 118 aa, Artificial Sequence
  Chemically Synthesized
QVQLQESGGGLVQAGGSLRLSCAASGSISEGAAMGWYRQAPGKEREFVAGIGPGGNTNYADSVKGRFTISRDNAKNTVYLQMNSLKPEDTAVYYCAVLWTYFGSHDYWGQGTQVTVSS

SEQ ID NO: 33613 - protein, 126 aa, Artificial Sequence
  Chemically Synthesized
QVQLQESGGGLVQAGGSLRLSCAASGTISDPVDMGWYRQAPGKERELVATIGYGTNTNYADSVKGRFTISRDNAKNTVYLQMNSLKPEDTAVYYCAAYYDDIGYQSYLYFRDLYYWGQGTQVTVSS

SEQ ID NO: 33614 - protein, 117 aa, Artificial Sequence
  Chemically Synthesized
QVQLQESGGGLVQAGGSLRLSCAASGYISYVAYMGWYRQAPGKERELVAGMLLVVVPYADSVKGRFTISRDNAKNTVYLQMNSLKPEDTAVYYCAVVSSAVVDLYYWGQGTQVTVSS

SEQ ID NO: 33615 - protein, 125 aa, Artificial Sequence
  Chemically Synthesized
QVQLQESGGGLVQAGGSLRLSCAASGNIFDYPMGWYRQAPGKEREFVAGIGNGANTYYADSVKGRFTISRDNAKNTVYLQMNSLKPEDTAVYYCAVGIGDWDLYPRRFPQLHDYWGQGTQVTVSS

SEQ ID NO: 33616 - protein, 121 aa, Artificial Sequence
  Chemically Synthesized
QVQLQESGGGLVQAGGSLRLSCAASGTISPYSIMGWYRQAPGKEREFVAAIAGGATTYYADSVKGRFTISRDNAKNTVYLQMNSLKPEDTAVYYCAVYSTRKLTLVLTMYWGQGTQVTVSS

SEQ ID NO: 33617 - protein, 127 aa, Artificial Sequence
  Chemically Synthesized
QVQLQESGGGLVQAGGSLRLSCAASGTIFYDWIMGWYRQAPGKERELVASIATGTNTNYADSVKGRFTISRDNAKNTVYLQMNSLKPEDTAVYYCAVDAKSQYVIHYVRGGVDYFYWGQGTQVTVSS

SEQ ID NO: 33618 - protein, 126 aa, Artificial Sequence
  Chemically Synthesized
QVQLQESGGGLVQAGGSLRLSCAASGNISGQSYMGWYRQAPGKEREFVAAIDAGGTTNYADSVKGRFTISRDNAKNTVYLQMNSLKPEDTAVYYCAVHNAGQYEGAQPSDVSHTYWGQGTQVTVSS

SEQ ID NO: 33619 - protein, 118 aa, Artificial Sequence
  Chemically Synthesized
QVQLQESGGGLVQAGGSLRLSCAASGNIFFGATMGWYRQAPGKERELVAAISDGGITNYADSVKGRFTISRDNAKNTVYLQMNSLKPEDTAVYYCAALPKRYDGYFYWGQGTQVTVSS

SEQ ID NO: 33620 - protein, 118 aa, Artificial Sequence
  Chemically Synthesized
QVQLQESGGGLVQAGGSLRLSCAASGYISPGYQMGWYRQAPGKERELVAAIGDGTTTNYADSVKGRFTISRDNAKNTVYLQMNSLKPEDTAVYYCAVVFRDHYAHVYWGQGTQVTVSS

SEQ ID NO: 33621 - protein, 120 aa, Artificial Sequence
  Chemically Synthesized
QVQLQESGGGLVQAGGSLRLSCAASGNIFVDSYMGWYRQAPGKERELVAAIGFGGNTYYADSVKGRFTISRDNAKNTVYLQMNSLKPEDTAVYYCAAVRYTGLTGVTIYWGQGTQVTVSS

SEQ ID NO: 33622 - protein, 126 aa, Artificial Sequence
  Chemically Synthesized
QVQLQESGGGLVQAGGSLRLSCAASGSISADLTMGWYRQAPGKEREFVAGITLGGITNYADSVKGRFTISRDNAKNTVYLQMNSLKPEDTAVYYCAVYYLQEDTTVTYNGAGLSYWGQGTQVTVSS

SEQ ID NO: 33623 - protein, 118 aa, Artificial Sequence
  Chemically Synthesized
QVQLQESGGGLVQAGGSLRLSCAASGYISQTFDMGWYRQAPGKERELVAGITWGTITYYADSVKGRFTISRDNAKNTVYLQMNSLKPEDTAVYYCAVSNSASSTHGYWGQGTQVTVSS

SEQ ID NO: 33624 - protein, 118 aa, Artificial Sequence
  Chemically Synthesized
QVQLQESGGGLVQAGGSLRLSCAASGNIFPFTLMGWYRQAPGKEREFVAAIGAGTSTNYADSVKGRFTISRDNAKNTVYLQMNSLKPEDTAVYYCAVARRRHVYLEYWGQGTQVTVSS

SEQ ID NO: 33625 - protein, 117 aa, Artificial Sequence
  Chemically Synthesized
QVQLQESGGGLVQAGGSLRLSCAASGNIFYPYGMGWYRQAPGKERELLPLLMVVLVPYADSVKGRFTISRDNAKNTVYLQMNSLKPEDTAVYYCAASYNTGYPLYYWGQGTQVTVSS

SEQ ID NO: 33626 - protein, 119 aa, Artificial Sequence
  Chemically Synthesized
QVQLQESGGGLVQAGGSLRLSCAASGSISAESRMGWYRQAPGKEREFVAGIALGTSTYYADSVKGRFTISRDNAKNTVYLQMNSLKPEDTAVYYCAAGSLSWRTPEGYWGQGTQVTVSS

SEQ ID NO: 33627 - protein, 119 aa, Artificial Sequence
  Chemically Synthesized
QVQLQESGGGLVQAGGSLRLSCAASGNISRARRAMGWYRQAPGKERELVAAIGWGSNTYYADSVKGRFTISRDNAKNTVYLQMNSLKPEDTAVYYCAAGHRYSPGHSYWGQGTQVTVSS

SEQ ID NO: 33628 - protein, 126 aa, Artificial Sequence
  Chemically Synthesized
QVQLQESGGGLVQAGGSLRLSCAASGTISGLHRMGWYRQAPGKERELVASISVGANTYYADSVKGRFTISRDNAKNTVYLQMNSLKPEDTAVYYCAVNIAYAPEDDYRYWANHAYWGQGTQVTVSS

SEQ ID NO: 33629 - protein, 118 aa, Artificial Sequence
  Chemically Synthesized
QVQLQESGGGLVQAGGSLRLSCAASGNIFDYALMGWYRQAPGKEREFVATIGGGSNTYYADSVKGRFTISRDNAKNTVYLQMNSLKPEDTAVYYCAVWYLQLDDLYYWGQGTQVTVSS

SEQ ID NO: 33630 - protein, 117 aa, Artificial Sequence
  Chemically Synthesized
QVQLQESGGGLVQAGGSLRLSCAASGNIFLRGDMGWYRQAPGKEREFVAAIDGVLIPYADSVKGRFTISRDNAKNTVYLQMNSLKPEDTAVYYCAATGGVTYIHGYWGQGTQVTVSS

SEQ ID NO: 33631 - protein, 126 aa, Artificial Sequence
  Chemically Synthesized
QVQLQESGGGLVQAGGSLRLSCAASGNIFVDAAMGWYRQAPGKERELVASIDGGGITYYADSVKGRFTISRDNAKNTVYLQMNSLKPEDTAVYYCAVGINEVPGQLQLSLAYHTYWGQGTQVTVSS

SEQ ID NO: 33632 - protein, 121 aa, Artificial Sequence
  Chemically Synthesized
QVQLQESGGGLVQAGGSLRLSCAASGTISPIPSMGWYRQAPGKERELVAAISQGANTNYADSVKGRFTISRDNAKNTVYLQMNSLKPEDTAVYYCAVDNALNCTFTLTMYWGQGTQVTVSS

SEQ ID NO: 33633 - protein, 118 aa, Artificial Sequence
  Chemically Synthesized
QVQLQESGGGLVQAGGSLRLSCAASGTISTDLDMGWYRQAPGKERELVAGIGQGGITNYADSVKGRFTISRDNAKNTVYLQMNSLKPEDTAVYYCAVYWWTYPDFAYWGQGTQVTVSS

SEQ ID NO: 33634 - protein, 118 aa, Artificial Sequence
  Chemically Synthesized
QVQLQESGGGLVQAGGSLRLSCAASGTISGHGAMGWYRQAPGKEREFVATINDGSNTNYADSVKGRFTISRDNAKNTVYLQMNSLKPEDTAVYYCAVRVYVPRWHYYWGQGTQVTVSS

SEQ ID NO: 33635 - protein, 117 aa, Artificial Sequence
  Chemically Synthesized
QVQLQESGGGLVQAGGSLRLSCAASGNISQAVVMGWYRQAPGKEREFVAAIGVGAITNYADSVKGRFTISRDNAKNTVYLQMNSLKPEDTAVYYCAAVGYYKDSLYWGQGTQVTVSS

SEQ ID NO: 33636 - protein, 117 aa, Artificial Sequence
  Chemically Synthesized
QVQLQESGGGLVQAGGSLRLSCAASGTISYYYIMGWYRQAPGKERELVASIDSVLLPYADSVKGRFTISRDNAKNTVYLQMNSLKPEDTAVYYCAVYTLDGDIYIYWGQGTQVTVSS

SEQ ID NO: 33637 - protein, 121 aa, Artificial Sequence
  Chemically Synthesized
QVQLQESGGGLVQAGGSLRLSCAASGNISYRVQMGWYRQAPGKEREFVASINIGGTTYADSVKGRFTISRDNAKNTVYLQMNSLKPEDTAVYYCAAERDSDYDTHVTHYYWGQGTQVTVSS

SEQ ID NO: 33638 - protein, 118 aa, Artificial Sequence
  Chemically Synthesized
QVQLQESGGGLVQAGGSLRLSCAASGYISRRPRMGWYRQAPGKEREFVAGIARGSNTYYADSVKGRFTISRDNAKNTVYLQMNSLKPEDTAVYYCAVFDRVYWSHAYWGQGTQVTVSS

SEQ ID NO: 33639 - protein, 118 aa, Artificial Sequence
  Chemically Synthesized
QVQLQESGGGLVQAGGSLRLSCAASGNIFGEVYMGWYRQAPGKERELVASISYGSTTYYADSVKGRFTISRDNAKNTVYLQMNSLKPEDTAVYYCAVDVSAYTGFDYWGQGTQVTVSS

SEQ ID NO: 33640 - protein, 126 aa, Artificial Sequence
  Chemically Synthesized
QVQLQESGGGLVQAGGSLRLSCAASGTIFLHETMGWYRQAPGKERELVATIDGGTTTNYADSVKGRFTISRDNAKNTVYLQMNSLKPEDTAVYYCAVGPYGGDHDDYPYYWYLTYWGQGTQVTVSS

SEQ ID NO: 33641 - protein, 122 aa, Artificial Sequence
  Chemically Synthesized
QVQLQESGGGLVQAGGSLRLSCAASGNIFWDVTMGWYRQAPGKERELVATIDDGTITNYADSVKGRFTISRDNAKNTVYLQMNSLKPEDTAVYYCAAAYSTDDAFIASLRYWGQGTQVTVSS

SEQ ID NO: 33642 - protein, 122 aa, Artificial Sequence
  Chemically Synthesized
QVQLQESGGGLVQAGGSLRLSCAASGTIFIIDVMGWYRQAPGKEREFVAAISYGTITNYADSVKGRFTISRDNAKNTVYLQMNSLKPEDTAVYYCAADDNDGYDRAYSFRYWGQGTQVTVSS

SEQ ID NO: 33643 - protein, 126 aa, Artificial Sequence
  Chemically Synthesized
QVQLQESGGGLVQAGGSLRLSCAASGSIFDDVYMGWYRQAPGKERELVATIDSGASTYYADSVKGRFTISRDNAKNTVYLQMNSLKPEDTAVYYCAVAYSYPLRQRAFPYNTFDYWGQGTQVTVSS

SEQ ID NO: 33644 - protein, 126 aa, Artificial Sequence
  Chemically Synthesized
QVQLQESGGGLVQAGGSLRLSCAASGSISAAYAMGWYRQAPGKERELVASINDGTTTYYADSVKGRFTISRDNAKNTVYLQMNSLKPEDTAVYYCAVATYDPYQQSTYKYAGYEYWGQGTQVTVSS

SEQ ID NO: 33645 - protein, 118 aa, Artificial Sequence
  Chemically Synthesized
QVQLQESGGGLVQAGGSLRLSCAASGYIFQYGYMGWYRQAPGKERELVATIGEGASTYYADSVKGRFTISRDNAKNTVYLQMNSLKPEDTAVYYCAAGYRPDWFLHYWGQGTQVTVSS

SEQ ID NO: 33646 - protein, 126 aa, Artificial Sequence
  Chemically Synthesized
QVQLQESGGGLVQAGGSLRLSCAASGSISADYYMGWYRQAPGKEREFVASIGDGSNTNYADSVKGRFTISRDNAKNTVYLQMNSLKPEDTAVYYCAAGYIRTDGDGDRFGRGLSYWGQGTQVTVSS

SEQ ID NO: 33647 - protein, 118 aa, Artificial Sequence
  Chemically Synthesized
QVQLQESGGGLVQAGGSLRLSCAASGNIFPYRSMGWYRQAPGKERELVAAISYGSITNYADSVKGRFTISRDNAKNTVYLQMNSLKPEDTAVYYCAAWYWRSRIHDYWGQGTQVTVSS

SEQ ID NO: 33648 - protein, 117 aa, Artificial Sequence
  Chemically Synthesized
QVQLQESGGGLVQAGGSLRLSCAASGTIFHESMGWYRQAPGKERELVATINQGSTTNYADSVKGRFTISRDNAKNTVYLQMNSLKPEDTAVYYCAVNGYQYLIYVYWGQGTQVTVSS

SEQ ID NO: 33649 - protein, 118 aa, Artificial Sequence
  Chemically Synthesized
QVQLQESGGGLVQAGGSLRLSCAASGYIFVDADMGWYRQAPGKEREFVAGIGTGTITNYADSVKGRFTISRDNAKNTVYLQMNSLKPEDTAVYYCAALGDYEVPLYYWGQGTQVTVSS

SEQ ID NO: 33650 - protein, 113 aa, Artificial Sequence
  Chemically Synthesized
QVQLQESGGGLVQAGGSLRLSCAASGSIFDAYRMGWYRQAPGKEREFVAGITYGSITNYADSVKGRFTISRDNAKNTVYLQMNSLKPEDTAVYYCAFTTLSYWGQGTQVTVSS

SEQ ID NO: 33651 - protein, 121 aa, Artificial Sequence
  Chemically Synthesized
QVQLQESGGGLVQAGGSLRLSCAASGSIFPDTYMGWYRQAPGKERELVAAIDSVLLPYADSVKGRFTISRDNAKNTVYLQMNSLKPEDTAVYYCAAYERDLYDITLSYDYWGQGTQVTVSS

SEQ ID NO: 33652 - protein, 118 aa, Artificial Sequence
  Chemically Synthesized
QVQLQESGGGLVQAGGSLRLSCAASGYISYESWMGWYRQAPGKERELVASIGNGSNTYYADSVKGRFTISRDNAKNTVYLQMNSLKPEDTAVYYCAVTRPGAFGLAYWGQGTQVTVSS

SEQ ID NO: 33653 - protein, 118 aa, Artificial Sequence
  Chemically Synthesized
QVQLQESGGGLVQAGGSLRLSCAASGYISHYSYMGWYRQAPGKERELVAAISYGASTYYADSVKGRFTISRDNAKNTVYLQMNSLKPEDTAVYYCAVIYARYPHLPYWGQGTQVTVSS

SEQ ID NO: 33654 - protein, 116 aa, Artificial Sequence
  Chemically Synthesized
QVQLQESGGGLVQAGGSLRLSCAASGYNSDHMGWYRQAPGKERELVATIAYGATTNYADSVKGRFTISRDNAKNTVYLQMNSLKPEDTAVYYCAAGGDIYPYLWYWGQGTQVTVSS

SEQ ID NO: 33655 - protein, 118 aa, Artificial Sequence
  Chemically Synthesized
QVQLQESGGGLVQAGGSLRLSCAASGNIFFSDLMGWYRQAPGKERELVATIASGASTNYADSVKGRFTISRDNAKNTVYLQMNSLKPEDTAVYYCAVRDQTVTVLGYWGQGTQVTVSS

SEQ ID NO: 33656 - protein, 113 aa, Artificial Sequence
  Chemically Synthesized
QVQLQESGGGLVQAGGSLRLSCAASGNIFRPSYMGWYRQAPGKERELVAGISAGATTNYADSVKGRFTISRDNAKNTVYLQMNSLKPEDTAVYYCAATSAFYWGQGTQVTVSS

SEQ ID NO: 33657 - protein, 120 aa, Artificial Sequence
  Chemically Synthesized
QVQLQESGGGLVQAGGSLRLSCAASGYIFSRRMGWYRQAPGKERELVASIGYGANTNYADSVKGRFTISRDNAKNTVYLQMNSLKPEDTAVYYCALGNLVNPSDLSELYWGQGTQVTVSS

SEQ ID NO: 33658 - protein, 118 aa, Artificial Sequence
  Chemically Synthesized
QVQLQESGGGLVQAGGSLRLSCAASGTISYTSDMGWYRQAPGKEREFVASISGGTSTNYADSVKGRFTISRDNAKNTVYLQMNSLKPEDTAVYYCAVRYYAGGWFDYWGQGTQVTVSS

SEQ ID NO: 33659 - protein, 118 aa, Artificial Sequence
  Chemically Synthesized
QVQLQESGGGLVQAGGSLRLSCAASGSISTRSVMGWYRQAPGKERELVAAIDQGASTYYADSVKGRFTISRDNAKNTVYLQMNSLKPEDTAVYYCAVDRDRTPDHRYWGQGTQVTVSS

SEQ ID NO: 33660 - protein, 118 aa, Artificial Sequence
  Chemically Synthesized
QVQLQESGGGLVQAGGSLRLSCAASGNISADINMGWYRQAPGKEREFVASISEGSNTNYADSVKGRFTISRDNAKNTVYLQMNSLKPEDTAVYYCAVSASAGYWHPYWGQGTQVTVSS

SEQ ID NO: 33661 - protein, 118 aa, Artificial Sequence
  Chemically Synthesized
QVQLQESGGGLVQAGGSLRLSCAASGTIFYEGAMGWYRQAPGKEREFVATIGDGASTNYADSVKGRFTISRDNAKNTVYLQMNSLKPEDTAVYYCAVTWYDVPSHFYWGQGTQVTVSS

SEQ ID NO: 33662 - protein, 116 aa, Artificial Sequence
  Chemically Synthesized
QVQLQESGGGLVQAGGSLRLSCAASGNIFRDLMGWYRQAPGKERELVAAISVGASTYADSVKGRFTISRDNAKNTVYLQMNSLKPEDTAVYYCAAYEDSRTTFGYWGQGTQVTVSS

SEQ ID NO: 33663 - protein, 122 aa, Artificial Sequence
  Chemically Synthesized
QVQLQESGGGLVQAGGSLRLSCAASGSIFSNRRMGWYRQAPGKERELVAGIDRGGNTYYADSVKGRFTISRDNAKNTVYLQMNSLKPEDTAVYYCAVRAGKYVQSYQKYQYWGQGTQVTVSS

SEQ ID NO: 33664 - protein, 118 aa, Artificial Sequence
  Chemically Synthesized
QVQLQESGGGLVQAGGSLRLSCAASGSISDNGGMGWYRQAPGKERELVAGINVGGTTNYADSVKGRFTISRDNAKNTVYLQMNSLKPEDTAVYYCAVNVVYFGTHYYWGQGTQVTVSS

SEQ ID NO: 33665 - protein, 126 aa, Artificial Sequence
  Chemically Synthesized
QVQLQESGGGLVQAGGSLRLSCAASGSIFWSLSMGWYRQAPGKERELVASINIGGSTNYADSVKGRFTISRDNAKNTVYLQMNSLKPEDTAVYYCAVPYTGAYTYDINFGYDHAYWGQGTQVTVSS

SEQ ID NO: 33666 - protein, 118 aa, Artificial Sequence
  Chemically Synthesized
QVQLQESGGGLVQAGGSLRLSCAASGNISTLYKMGWYRQAPGKERELVATIALGTNTNYADSVKGRFTISRDNAKNTVYLQMNSLKPEDTAVYYCAAYEYYFVALSYWGQGTQVTVSS

SEQ ID NO: 33667 - protein, 118 aa, Artificial Sequence
  Chemically Synthesized
QVQLQESGGGLVQAGGSLRLSCAASGYISLGLGMGWYRQAPGKERELVATIGYGGITNYADSVKGRFTISRDNAKNTVYLQMNSLKPEDTAVYYCAVDGIGHTTFRYWGQGTQVTVSS

SEQ ID NO: 33668 - protein, 118 aa, Artificial Sequence
  Chemically Synthesized
QVQLQESGGGLVQAGGSLRLSCAASGYIFYSTYMGWYRQAPGKERELVAAIAPGSSTNYADSVKGRFTISRDNAKNTVYLQMNSLKPEDTAVYYCAVGYRWWTSHRYWGQGTQVTVSS

SEQ ID NO: 33669 - protein, 120 aa, Artificial Sequence
  Chemically Synthesized
QVQLQESGGGLVQAGGSLRLSCAASGSISSTSMGWYRQAPGKERELVAAIDDGGSTYYADSVKGRFTISRDNAKNTVYLQMNSLKPEDTAVYYCAFMNTVVTSVTLSFYWGQGTQVTVSS

SEQ ID NO: 33670 - protein, 116 aa, Artificial Sequence
  Chemically Synthesized
QVQLQESGGGLVQAGGSLRLSCAASGYISYEYTMGWYRQAPGKEREFVASIDRGTTYADSVKGRFTISRDNAKNTVYLQMNSLKPEDTAVYYCAVGTWYDDDFRYWGQGTQVTVSS

SEQ ID NO: 33671 - protein, 118 aa, Artificial Sequence
  Chemically Synthesized
QVQLQESGGGLVQAGGSLRLSCAASGYIFTHRRMGWYRQAPGKEREFVATISYGATTNYADSVKGRFTISRDNAKNTVYLQMNSLKPEDTAVYYCAAGSYRYRNLYYWGQGTQVTVSS

SEQ ID NO: 33672 - protein, 118 aa, Artificial Sequence
  Chemically Synthesized
QVQLQESGGGLVQAGGSLRLSCAASGTIFRIRYMGWYRQAPGKEREFVAAIGGGTNTYYADSVKGRFTISRDNAKNTVYLQMNSLKPEDTAVYYCAVYSPTYRQYRYWGQGTQVTVSS

SEQ ID NO: 33673 - protein, 121 aa, Artificial Sequence
  Chemically Synthesized
QVQLQESGGGLVQAGGSLRLSCAASGNIFGTYYMGWYRQAPGKERELVATIDTGTTTYYADSVKGRFTISRDNAKNTVYLQMNSLKPEDTAVYYCAADYSSSVVSRLFMYWGQGTQVTVSS

SEQ ID NO: 33674 - protein, 125 aa, Artificial Sequence
  Chemically Synthesized
QVQLQESGGGLVQAGGSLRLSCAASGSISTTSMGWYRQAPGKERELVATIDVGTTTYYADSVKGRFTISRDNAKNTVYLQMNSLKPEDTAVYYCAVYVIGNTYTEVYSGAGYLYWGQGTQVTVSS

SEQ ID NO: 33675 - protein, 122 aa, Artificial Sequence
  Chemically Synthesized
QVQLQESGGGLVQAGGSLRLSCAASGNIFSSSVMGWYRQAPGKERELVAGIAYGATTNYADSVKGRFTISRDNAKNTVYLQMNSLKPEDTAVYYCAVSRLNWGYRSYVHSYWGQGTQVTVSS

SEQ ID NO: 33676 - protein, 126 aa, Artificial Sequence
  Chemically Synthesized
QVQLQESGGGLVQAGGSLRLSCAASGNIFGYNGMGWYRQAPGKEREFVASIGDGANTNYADSVKGRFTISRDNAKNTVYLQMNSLKPEDTAVYYCAVDYDDVDAHFDGYPDQHAYWGQGTQVTVSS

SEQ ID NO: 33677 - protein, 122 aa, Artificial Sequence
  Chemically Synthesized
QVQLQESGGGLVQAGGSLRLSCAASGNIFKVADMGWYRQAPGKERELVAGIGWGSITYYADSVKGRFTISRDNAKNTVYLQMNSLKPEDTAVYYCAAYDRSGPYPDEPYYYWGQGTQVTVSS

SEQ ID NO: 33678 - protein, 122 aa, Artificial Sequence
  Chemically Synthesized
QVQLQESGGGLVQAGGSLRLSCAASGSIFDFGYMGWYRQAPGKERELVATITAGASTYYADSVKGRFTISRDNAKNTVYLQMNSLKPEDTAVYYCAVYLYAVYDYFSYHAYWGQGTQVTVSS

SEQ ID NO: 33679 - protein, 126 aa, Artificial Sequence
  Chemically Synthesized
QVQLQESGGGLVQAGGSLRLSCAASGNISDPRVMGWYRQAPGKEREFVAAIATGSITYYADSVKGRFTISRDNAKNTVYLQMNSLKPEDTAVYYCAAGNWYNDIKGRYAYYYHEYWGQGTQVTVSS

SEQ ID NO: 33680 - protein, 115 aa, Artificial Sequence
  Chemically Synthesized
QVQLQESGGGLVQAGGSLRLSCAASGTIFYRLPMGWYRQAPGKERELVATINRGTSTNYADSVKGRFTISRDNAKNTVYLQMNSLKPEDTAVYYCAARTKYFIYWGQGTQVTVSS

SEQ ID NO: 33681 - protein, 117 aa, Artificial Sequence
  Chemically Synthesized
QVQLQESGGGLVQAGGSLRLSCAASGTISGSWGMGWYRQAPGKERELLPLLVLVLIPYADSVKGRFTISRDNAKNTVYLQMNSLKPEDTAVYYCAVETADGFALQYWGQGTQVTVSS

SEQ ID NO: 33682 - protein, 126 aa, Artificial Sequence
  Chemically Synthesized
QVQLQESGGGLVQAGGSLRLSCAASGSISSSVYMGWYRQAPGKEREFVASIDYGGTTNYADSVKGRFTISRDNAKNTVYLQMNSLKPEDTAVYYCAVVYYFRIVGHPAQYYVLAYWGQGTQVTVSS

SEQ ID NO: 33683 - protein, 118 aa, Artificial Sequence
  Chemically Synthesized
QVQLQESGGGLVQAGGSLRLSCAASGNIFASYKMGWYRQAPGKERELVAAISSGGITNYADSVKGRFTISRDNAKNTVYLQMNSLKPEDTAVYYCAVTSVDVRFHDYWGQGTQVTVSS

SEQ ID NO: 33684 - protein, 126 aa, Artificial Sequence
  Chemically Synthesized
QVQLQESGGGLVQAGGSLRLSCAASGTIFRDSNMGWYRQAPGKERELVASITPGGTTYYADSVKGRFTISRDNAKNTVYLQMNSLKPEDTAVYYCAAYAGIQYAKSLSLLVSYPYWGQGTQVTVSS

SEQ ID NO: 33685 - protein, 122 aa, Artificial Sequence
  Chemically Synthesized
QVQLQESGGGLVQAGGSLRLSCAASGSIFGFRAMGWYRQAPGKEREFVAAISRGGNTNYADSVKGRFTISRDNAKNTVYLQMNSLKPEDTAVYYCAARAKYGKYDGRKLVYWGQGTQVTVSS

SEQ ID NO: 33686 - protein, 117 aa, Artificial Sequence
  Chemically Synthesized
QVQLQESGGGLVQAGGSLRLSCAASGTIFNDSYMGWYRQAPGKEREFVATIADGTITYYADSVKGRFTISRDNAKNTVYLQMNSLKPEDTAVYYCAVFYWPYLHGYWGQGTQVTVSS

SEQ ID NO: 33687 - protein, 118 aa, Artificial Sequence
  Chemically Synthesized
QVQLQESGGGLVQAGGSLRLSCAASGTISRSYYMGWYRQAPGKERELVATIDVGAITNYADSVKGRFTISRDNAKNTVYLQMNSLKPEDTAVYYCAVHGAGPPSLFYWGQGTQVTVSS

SEQ ID NO: 33688 - protein, 118 aa, Artificial Sequence
  Chemically Synthesized
QVQLQESGGGLVQAGGSLRLSCAASGTISYEIQMGWYRQAPGKEREFVAGITIGGTTNYADSVKGRFTISRDNAKNTVYLQMNSLKPEDTAVYYCAVVTGQVGLFYYWGQGTQVTVSS

SEQ ID NO: 33689 - protein, 118 aa, Artificial Sequence
  Chemically Synthesized
QVQLQESGGGLVQAGGSLRLSCAASGTISWLNTMGWYRQAPGKERELVATIDSGSTTNYADSVKGRFTISRDNAKNTVYLQMNSLKPEDTAVYYCAARWHPYRSYVYWGQGTQVTVSS

SEQ ID NO: 33690 - protein, 122 aa, Artificial Sequence
  Chemically Synthesized
QVQLQESGGGLVQAGGSLRLSCAASGNISDGTYMGWYRQAPGKEREFVAGIAYGGNTYYADSVKGRFTISRDNAKNTVYLQMNSLKPEDTAVYYCAAGIEVLDHWAIFHRYWGQGTQVTVSS

SEQ ID NO: 33691 - protein, 112 aa, Artificial Sequence
  Chemically Synthesized
QVQLQESGGGLVQAGGSLRLSCAASGNISWYAPMGWYRQAPGKERELVATISRGANTYYADSVKGRFTISRDNAKNTVYLQMNSLKPEDTAVYYCAAYHTYWGQGTQVTVSS

SEQ ID NO: 33692 - protein, 126 aa, Artificial Sequence
  Chemically Synthesized
QVQLQESGGGLVQAGGSLRLSCAASGTISYHDVMGWYRQAPGKERELVATINGGGNTYYADSVKGRFTISRDNAKNTVYLQMNSLKPEDTAVYYCAANVPDAPYFVRGYDYGFDYWGQGTQVTVSS

SEQ ID NO: 33693 - protein, 117 aa, Artificial Sequence
  Chemically Synthesized
QVQLQESGGGLVQAGGSLRLSCAASGYIFETSVMGWYRQAPGKEREFVAGIGYGGNTYYADSVKGRFTISRDNAKNTVYLQMNSLKPEDTAVYYCAAYSSVLLTLYWGQGTQVTVSS

SEQ ID NO: 33694 - protein, 121 aa, Artificial Sequence
  Chemically Synthesized
QVQLQESGGGLVQAGGSLRLSCAASGSIFGSLMGWYRQAPGKERELVASIGYGGNTYYADSVKGRFTISRDNAKNTVYLQMNSLKPEDTAVYYCAVLRQYSPDDQWQHVYWGQGTQVTVSS

SEQ ID NO: 33695 - protein, 118 aa, Artificial Sequence
  Chemically Synthesized
QVQLQESGGGLVQAGGSLRLSCAASGSIFGIHTMGWYRQAPGKERELVAAIANGTITYYADSVKGRFTISRDNAKNTVYLQMNSLKPEDTAVYYCAARQGRYYGHGYWGQGTQVTVSS

SEQ ID NO: 33696 - protein, 117 aa, Artificial Sequence
  Chemically Synthesized
QVQLQESGGGLVQAGGSLRLSCAASGTIFTLNIMGWYRQAPGKEREFVATITRGSTTYYADSVKGRFTISRDNAKNTVYLQMNSLKPEDTAVYYCAVNSARGDKLYWGQGTQVTVSS

SEQ ID NO: 33697 - protein, 118 aa, Artificial Sequence
  Chemically Synthesized
QVQLQESGGGLVQAGGSLRLSCAASGTIFYAADMGWYRQAPGKERELVASIAPGTSTNYADSVKGRFTISRDNAKNTVYLQMNSLKPEDTAVYYCAADGSTNQRHSYWGQGTQVTVSS

SEQ ID NO: 33698 - protein, 113 aa, Artificial Sequence
  Chemically Synthesized
QVQLQESGGGLVQAGGSLRLSCAASGNISLYVYMGWYRQAPGKEREFVAAIDDGSSTNYADSVKGRFTISRDNAKNTVYLQMNSLKPEDTAVYYCAAWGYEYWGQGTQVTVSS

SEQ ID NO: 33699 - protein, 116 aa, Artificial Sequence
  Chemically Synthesized
QVQLQESGGGLVQAGGSLRLSCAASGYISYSALMGWYRQAPGKERELVAAIGRGATNYADSVKGRFTISRDNAKNTVYLQMNSLKPEDTAVYYCAATDEVWDHGYWGQGTQVTVSS

SEQ ID NO: 33700 - protein, 122 aa, Artificial Sequence
  Chemically Synthesized
QVQLQESGGGLVQAGGSLRLSCAASGSISNDLGMGWYRQAPGKERELVAAIAYGTNTYYADSVKGRFTISRDNAKNTVYLQMNSLKPEDTAVYYCAVLSHLRVNTDAIFVYWGQGTQVTVSS

SEQ ID NO: 33701 - protein, 118 aa, Artificial Sequence
  Chemically Synthesized
QVQLQESGGGLVQAGGSLRLSCAASGSISSTRDMGWYRQAPGKERELVATIDGGASTYYADSVKGRFTISRDNAKNTVYLQMNSLKPEDTAVYYCAAYNHPNGGFQYWGQGTQVTVSS

SEQ ID NO: 33702 - protein, 117 aa, Artificial Sequence
  Chemically Synthesized
QVQLQESGGGLVQAGGSLRLSCAASGTIFARPYMGWYRQAPGKERELVAGISPGSNTYYADSVKGRFTISRDNAKNTVYLQMNSLKPEDTAVYYCAADGSSHPTYYWGQGTQVTVSS

SEQ ID NO: 33703 - protein, 126 aa, Artificial Sequence
  Chemically Synthesized
QVQLQESGGGLVQAGGSLRLSCAASGNIFARSTMGWYRQAPGKERELVASISDGAITNYADSVKGRFTISRDNAKNTVYLQMNSLKPEDTAVYYCAVKSFRRHDFRSASLRNHEYWGQGTQVTVSS

SEQ ID NO: 33704 - protein, 117 aa, Artificial Sequence
  Chemically Synthesized
QVQLQESGGGLVQAGGSLRLSCAASGSISRRLMGWYRQAPGKEREFVAAIDSGTTTNYADSVKGRFTISRDNAKNTVYLQMNSLKPEDTAVYYCAVRYSYVGAYSYWGQGTQVTVSS

SEQ ID NO: 33705 - protein, 118 aa, Artificial Sequence
  Chemically Synthesized
QVQLQESGGGLVQAGGSLRLSCAASGTIFDFSTMGWYRQAPGKERELVATIAAGSSTNYADSVKGRFTISRDNAKNTVYLQMNSLKPEDTAVYYCAAQYDASSYLAYWGQGTQVTVSS

SEQ ID NO: 33706 - protein, 117 aa, Artificial Sequence
  Chemically Synthesized
QVQLQESGGGLVQAGGSLRLSCAASGNIFQPYAMGWYRQAPGKEREFVAAIDPGSSTYYADSVKGRFTISRDNAKNTVYLQMNSLKPEDTAVYYCAADLGYYEHRYWGQGTQVTVSS

SEQ ID NO: 33707 - protein, 118 aa, Artificial Sequence
  Chemically Synthesized
QVQLQESGGGLVQAGGSLRLSCAASGSISYYTVMGWYRQAPGKERELVAGITHGTNTYYADSVKGRFTISRDNAKNTVYLQMNSLKPEDTAVYYCAVWAGDVLDLGYWGQGTQVTVSS

SEQ ID NO: 33708 - protein, 126 aa, Artificial Sequence
  Chemically Synthesized
QVQLQESGGGLVQAGGSLRLSCAASGNIFDDWGMGWYRQAPGKEREFVAGIDAGSTTYYADSVKGRFTISRDNAKNTVYLQMNSLKPEDTAVYYCAADGYISYYAGYALYYYLDYWGQGTQVTVSS

SEQ ID NO: 33709 - protein, 118 aa, Artificial Sequence
  Chemically Synthesized
QVQLQESGGGLVQAGGSLRLSCAASGNIFVFRTMGWYRQAPGKEREFVATISYGGITNYADSVKGRFTISRDNAKNTVYLQMNSLKPEDTAVYYCAASNWGHLGHRYWGQGTQVTVSS

SEQ ID NO: 33710 - protein, 118 aa, Artificial Sequence
  Chemically Synthesized
QVQLQESGGGLVQAGGSLRLSCAASGTIFPTSRMGWYRQAPGKEREFVAGIGRGATTYYADSVKGRFTISRDNAKNTVYLQMNSLKPEDTAVYYCAAGLYGYARLVYWGQGTQVTVSS

SEQ ID NO: 33711 - protein, 126 aa, Artificial Sequence
  Chemically Synthesized
QVQLQESGGGLVQAGGSLRLSCAASGNISGGDVMGWYRQAPGKERELVAAINGGSSTYYADSVKGRFTISRDNAKNTVYLQMNSLKPEDTAVYYCAAWVGGYWYDAGDERYPYNYWGQGTQVTVSS

SEQ ID NO: 33712 - protein, 118 aa, Artificial Sequence
  Chemically Synthesized
QVQLQESGGGLVQAGGSLRLSCAASGTISRDYYMGWYRQAPGKERELVAAIDDGANTYYADSVKGRFTISRDNAKNTVYLQMNSLKPEDTAVYYCAVKDIFLGSLLYWGQGTQVTVSS

SEQ ID NO: 33713 - protein, 118 aa, Artificial Sequence
  Chemically Synthesized
QVQLQESGGGLVQAGGSLRLSCAASGYISYYEVMGWYRQAPGKERELVAGISLGGNTYYADSVKGRFTISRDNAKNTVYLQMNSLKPEDTAVYYCAVWPTRIWYHRYWGQGTQVTVSS

SEQ ID NO: 33714 - protein, 118 aa, Artificial Sequence
  Chemically Synthesized
QVQLQESGGGLVQAGGSLRLSCAASGNIFAYRYMGWYRQAPGKERELVATIAIGTSTYYADSVKGRFTISRDNAKNTVYLQMNSLKPEDTAVYYCAAYKPYYYRHIYWGQGTQVTVSS

SEQ ID NO: 33715 - protein, 118 aa, Artificial Sequence
  Chemically Synthesized
QVQLQESGGGLVQAGGSLRLSCAASGNISYDDVMGWYRQAPGKERELVAGIAYGATTYYADSVKGRFTISRDNAKNTVYLQMNSLKPEDTAVYYCAAWLGGLYEFYYWGQGTQVTVSS

SEQ ID NO: 33716 - protein, 118 aa, Artificial Sequence
  Chemically Synthesized
QVQLQESGGGLVQAGGSLRLSCAASGTISRWQYMGWYRQAPGKERELVAGITGGASTYYADSVKGRFTISRDNAKNTVYLQMNSLKPEDTAVYYCAAGPAGDQYHSYWGQGTQVTVSS

SEQ ID NO: 33717 - protein, 115 aa, Artificial Sequence
  Chemically Synthesized
QVQLQESGGGLVQAGGSLRLSCAASGSIFYWQWMGWYRQAPGKERELVAGINIGTNTYYADSVKGRFTISRDNAKNTVYLQMNSLKPEDTAVYYCAVVDYVSIYWGQGTQVTVSS

SEQ ID NO: 33718 - protein, 118 aa, Artificial Sequence
  Chemically Synthesized
QVQLQESGGGLVQAGGSLRLSCAASGSISYYPVMGWYRQAPGKERELVAGINLGTSTYYADSVKGRFTISRDNAKNTVYLQMNSLKPEDTAVYYCAVWPTDFLTLLYWGQGTQVTVSS

SEQ ID NO: 33719 - protein, 122 aa, Artificial Sequence
  Chemically Synthesized
QVQLQESGGGLVQAGGSLRLSCAASGSISQRLYMGWYRQAPGKERELVAAITPGATTNYADSVKGRFTISRDNAKNTVYLQMNSLKPEDTAVYYCAVVYADDFYGVGKFYYWGQGTQVTVSS

SEQ ID NO: 33720 - protein, 118 aa, Artificial Sequence
  Chemically Synthesized
QVQLQESGGGLVQAGGSLRLSCAASGNIFRYFYMGWYRQAPGKERELVAAITRGASTYYADSVKGRFTISRDNAKNTVYLQMNSLKPEDTAVYYCAAQIYRSYNLGYWGQGTQVTVSS

SEQ ID NO: 33721 - protein, 117 aa, Artificial Sequence
  Chemically Synthesized
QVQLQESGGGLVQAGGSLRLSCAASGNIFHDRYMGWYRQAPGKERELVAGISYGGNTYYADSVKGRFTISRDNAKNTVYLQMNSLKPEDTAVYYCAVAYYADDHTYWGQGTQVTVSS

SEQ ID NO: 33722 - protein, 114 aa, Artificial Sequence
  Chemically Synthesized
QVQLQESGGGLVQAGGSLRLSCAASGTIFRRRYMGWYRQAPGKERELVAAITGGGNTNYADSVKGRFTISRDNAKNTVYLQMNSLKPEDTAVYYCAVTGYYPYWGQGTQVTVSS

SEQ ID NO: 33723 - protein, 113 aa, Artificial Sequence
  Chemically Synthesized
QVQLQESGGGLVQAGGSLRLSCAASGTISAYYYMGWYRQAPGKERELVASISGGGNTYYADSVKGRFTISRDNAKNTVYLQMNSLKPEDTAVYYCAARVHYYWGQGTQVTVSS

SEQ ID NO: 33724 - protein, 118 aa, Artificial Sequence
  Chemically Synthesized
QVQLQESGGGLVQAGGSLRLSCAASGNISSLYIMGWYRQAPGKERELVAGIDQGTSTYYADSVKGRFTISRDNAKNTVYLQMNSLKPEDTAVYYCAAWPDSTYDFGYWGQGTQVTVSS

SEQ ID NO: 33725 - protein, 118 aa, Artificial Sequence
  Chemically Synthesized
QVQLQESGGGLVQAGGSLRLSCAASGNISVYPIMGWYRQAPGKERELVAAITSGAITYYADSVKGRFTISRDNAKNTVYLQMNSLKPEDTAVYYCAVWPHLVYDYRYWGQGTQVTVSS

SEQ ID NO: 33726 - protein, 118 aa, Artificial Sequence
  Chemically Synthesized
QVQLQESGGGLVQAGGSLRLSCAASGYISTVRDMGWYRQAPGKEREFVAGIAVGATTNYADSVKGRFTISRDNAKNTVYLQMNSLKPEDTAVYYCAAGIWTWYGYGYWGQGTQVTVSS

SEQ ID NO: 33727 - protein, 118 aa, Artificial Sequence
  Chemically Synthesized
QVQLQESGGGLVQAGGSLRLSCAASGTISNFIDMGWYRQAPGKERELVASIARGTTTNYADSVKGRFTISRDNAKNTVYLQMNSLKPEDTAVYYCAAYDGSPGGLNYWGQGTQVTVSS

SEQ ID NO: 33728 - protein, 118 aa, Artificial Sequence
  Chemically Synthesized
QVQLQESGGGLVQAGGSLRLSCAASGNISNDYIMGWYRQAPGKERELVATITAGGNTYYADSVKGRFTISRDNAKNTVYLQMNSLKPEDTAVYYCAATRDGNPYFDYWGQGTQVTVSS

SEQ ID NO: 33729 - protein, 118 aa, Artificial Sequence
  Chemically Synthesized
QVQLQESGGGLVQAGGSLRLSCAASGSISQYLDMGWYRQAPGKEREFVATIGVGTNTYYADSVKGRFTISRDNAKNTVYLQMNSLKPEDTAVYYCAASYYYVRYLQYWGQGTQVTVSS

SEQ ID NO: 33730 - protein, 126 aa, Artificial Sequence
  Chemically Synthesized
QVQLQESGGGLVQAGGSLRLSCAASGTIFYIRYMGWYRQAPGKERELVAAISRGASTYYADSVKGRFTISRDNAKNTVYLQMNSLKPEDTAVYYCAANRAYQNVLRYDVGWSHRYWGQGTQVTVSS

SEQ ID NO: 33731 - protein, 126 aa, Artificial Sequence
  Chemically Synthesized
QVQLQESGGGLVQAGGSLRLSCAASGTIFERGRMGWYRQAPGKEREFVAGITGGGNTNYADSVKGRFTISRDNAKNTVYLQMNSLKPEDTAVYYCAAYQPGNAYVDLVDQWTLVYWGQGTQVTVSS

SEQ ID NO: 33732 - protein, 118 aa, Artificial Sequence
  Chemically Synthesized
QVQLQESGGGLVQAGGSLRLSCAASGTIFWVSWMGWYRQAPGKEREFVAGINVGAITYYADSVKGRFTISRDNAKNTVYLQMNSLKPEDTAVYYCAVISYYYSGHAYWGQGTQVTVSS

SEQ ID NO: 33733 - protein, 126 aa, Artificial Sequence
  Chemically Synthesized
QVQLQESGGGLVQAGGSLRLSCAASGYISVVGRMGWYRQAPGKERELVAAIDIGGTTYYADSVKGRFTISRDNAKNTVYLQMNSLKPEDTAVYYCAAPKQSQDSVDHVYYPSYQYWGQGTQVTVSS

SEQ ID NO: 33734 - protein, 110 aa, Artificial Sequence
  Chemically Synthesized
QVQLQESGGGLVQAGGSLRLSCAASGTISRTYLMGWYRQAPGKEREFVPLLLTVVVPYADSVKGRFTISRDNAKNTVYLQMNSLKPEDTAVYYCAVYLYWGQGTQVTVSS

SEQ ID NO: 33735 - protein, 111 aa, Artificial Sequence
  Chemically Synthesized
QVQLQESGGGLVQAGGSLRLSCAASGTIFGYTYMGWYRQAPGKERELVAAISSGASTNYADSVKGRFTISRDNAKNTVYLQMNSLKPEDTAVYYCAVGIYWGQGTQVTVSS

SEQ ID NO: 33736 - protein, 124 aa, Artificial Sequence
  Chemically Synthesized
QVQLQESGGGLVQAGGSLRLSCAASGYIFYNYLMGWYRQAPGKEREFVATIRVLVPYADSVKGRFTISRDNAKNTVYLQMNSLKPEDTAVYYCAAPKFYADAIRGNGYNDYYYWGQGTQVTVSS

SEQ ID NO: 33737 - protein, 118 aa, Artificial Sequence
  Chemically Synthesized
QVQLQESGGGLVQAGGSLRLSCAASGTIFPQAWMGWYRQAPGKERELVASISGGANTYYADSVKGRFTISRDNAKNTVYLQMNSLKPEDTAVYYCAVSGRGRSTYYYWGQGTQVTVSS

SEQ ID NO: 33738 - protein, 118 aa, Artificial Sequence
  Chemically Synthesized
QVQLQESGGGLVQAGGSLRLSCAASGSIFRAAIMGWYRQAPGKERELVAAINVGANTYYADSVKGRFTISRDNAKNTVYLQMNSLKPEDTAVYYCAAWLTPYYEHPYWGQGTQVTVSS

SEQ ID NO: 33739 - protein, 118 aa, Artificial Sequence
  Chemically Synthesized
QVQLQESGGGLVQAGGSLRLSCAASGYISIIYYMGWYRQAPGKEREFVATIGGGGTTNYADSVKGRFTISRDNAKNTVYLQMNSLKPEDTAVYYCAVTTDDPTLHIYWGQGTQVTVSS

SEQ ID NO: 33740 - protein, 121 aa, Artificial Sequence
  Chemically Synthesized
QVQLQESGGGLVQAGGSLRLSCAASGYISYYPSMGWYRQAPGKEREFVATIGVGTNTNYADSVKGRFTISRDNAKNTVYLQMNSLKPEDTAVYYCAAPTSGPSRLVNIMYWGQGTQVTVSS

SEQ ID NO: 33741 - protein, 118 aa, Artificial Sequence
  Chemically Synthesized
QVQLQESGGGLVQAGGSLRLSCAASGYISRPLVMGWYRQAPGKERELVAAIAYGATTNYADSVKGRFTISRDNAKNTVYLQMNSLKPEDTAVYYCAVRRYYGAYLRYWGQGTQVTVSS

SEQ ID NO: 33742 - protein, 126 aa, Artificial Sequence
  Chemically Synthesized
QVQLQESGGGLVQAGGSLRLSCAASGSIFWGDAMGWYRQAPGKERELVAGIAAGASTNYADSVKGRFTISRDNAKNTVYLQMNSLKPEDTAVYYCAASQTDYPRPQHYAPGVHDYWGQGTQVTVSS

SEQ ID NO: 33743 - protein, 122 aa, Artificial Sequence
  Chemically Synthesized
QVQLQESGGGLVQAGGSLRLSCAASGSIFSEAYMGWYRQAPGKERELVAGINDGTSTYYADSVKGRFTISRDNAKNTVYLQMNSLKPEDTAVYYCAAQWYYAESYIVAHDYWGQGTQVTVSS

SEQ ID NO: 33744 - protein, 118 aa, Artificial Sequence
  Chemically Synthesized
QVQLQESGGGLVQAGGSLRLSCAASGSIFDYWGMGWYRQAPGKEREFVATIDVGTTTYYADSVKGRFTISRDNAKNTVYLQMNSLKPEDTAVYYCAVNVRYRDALRYWGQGTQVTVSS

SEQ ID NO: 33745 - protein, 122 aa, Artificial Sequence
  Chemically Synthesized
QVQLQESGGGLVQAGGSLRLSCAASGYISTTSVMGWYRQAPGKERELVAAISDGTTTYYADSVKGRFTISRDNAKNTVYLQMNSLKPEDTAVYYCAARTQTPYLVPGGHQYWGQGTQVTVSS

SEQ ID NO: 33746 - protein, 117 aa, Artificial Sequence
  Chemically Synthesized
QVQLQESGGGLVQAGGSLRLSCAASGYISDLYPMGWYRQAPGKEREFVAAITYGSSTYYADSVKGRFTISRDNAKNTVYLQMNSLKPEDTAVYYCAVYYLEFSPHYWGQGTQVTVSS

SEQ ID NO: 33747 - protein, 121 aa, Artificial Sequence
  Chemically Synthesized
QVQLQESGGGLVQAGGSLRLSCAASGNIFHLGGMGWYRQAPGKEREFVASITGSSTNYADSVKGRFTISRDNAKNTVYLQMNSLKPEDTAVYYCAVYLYYTGPLYDAFSYWGQGTQVTVSS

SEQ ID NO: 33748 - protein, 118 aa, Artificial Sequence
  Chemically Synthesized
QVQLQESGGGLVQAGGSLRLSCAASGNIFYSSYMGWYRQAPGKERELVASIDPGTSTNYADSVKGRFTISRDNAKNTVYLQMNSLKPEDTAVYYCAVVYYAGTWFEYWGQGTQVTVSS

SEQ ID NO: 33749 - protein, 121 aa, Artificial Sequence
  Chemically Synthesized
QVQLQESGGGLVQAGGSLRLSCAASGSIFYKDGMGWYRQAPGKERELVAGIADGTNTNYADSVKGRFTISRDNAKNTVYLQMNSLKPEDTAVYYCAVDVGSLGTRVTLLYWGQGTQVTVSS

SEQ ID NO: 33750 - protein, 123 aa, Artificial Sequence
  Chemically Synthesized
QVQLQESGGGLVQAGGSLRLSCAASGNIFLDATMGWYRQAPGKERELVATISDGTTTNYADSVKGRFTISRDNAKNTVYLQMNSLKPEDTAVYYCAAIDVGQVDGKVYAYDYWGQGTQVTVSS

SEQ ID NO: 33751 - protein, 122 aa, Artificial Sequence
  Chemically Synthesized
QVQLQESGGGLVQAGGSLRLSCAASGNISGGFDMGWYRQAPGKERELVAAIATGTSTNYADSVKGRFTISRDNAKNTVYLQMNSLKPEDTAVYYCAVWVGDVDDARLVHRYWGQGTQVTVSS

SEQ ID NO: 33752 - protein, 118 aa, Artificial Sequence
  Chemically Synthesized
QVQLQESGGGLVQAGGSLRLSCAASGNIFYVIPMGWYRQAPGKERELVAGITFGSTTYYADSVKGRFTISRDNAKNTVYLQMNSLKPEDTAVYYCAVPVYYRLQLVYWGQGTQVTVSS

SEQ ID NO: 33753 - protein, 118 aa, Artificial Sequence
  Chemically Synthesized
QVQLQESGGGLVQAGGSLRLSCAASGNIFTSYIMGWYRQAPGKEREFVAAIAYGSTTYYADSVKGRFTISRDNAKNTVYLQMNSLKPEDTAVYYCAVSDNVADVFYYWGQGTQVTVSS

SEQ ID NO: 33754 - protein, 117 aa, Artificial Sequence
  Chemically Synthesized
QVQLQESGGGLVQAGGSLRLSCAASGTISTATEMGWYRQAPGKERELVAAINGGTNTYYADSVKGRFTISRDNAKNTVYLQMNSLKPEDTAVYYCAVLYDTYYHYYWGQGTQVTVSS

SEQ ID NO: 33755 - protein, 118 aa, Artificial Sequence
  Chemically Synthesized
QVQLQESGGGLVQAGGSLRLSCAASGNIFGYIIMGWYRQAPGKEREFVATIDQGSTTYYADSVKGRFTISRDNAKNTVYLQMNSLKPEDTAVYYCAVRFNTYPYFAYWGQGTQVTVSS

SEQ ID NO: 33756 - protein, 118 aa, Artificial Sequence
  Chemically Synthesized
QVQLQESGGGLVQAGGSLRLSCAASGSISLTYGMGWYRQAPGKERELVATINDGANTYYADSVKGRFTISRDNAKNTVYLQMNSLKPEDTAVYYCAVRTYRAYYFLYWGQGTQVTVSS

SEQ ID NO: 33757 - protein, 110 aa, Artificial Sequence
  Chemically Synthesized
QVQLQESGGGLVQAGGSLRLSCAASGYISHYDTMGWYRQAPGKEREFVASISLGATTYYADSVKGRFTISRDNAKNTVYLQMNSLKPEDTAVYYCAVWYWGQGTQVTVSS

SEQ ID NO: 33758 - protein, 118 aa, Artificial Sequence
  Chemically Synthesized
QVQLQESGGGLVQAGGSLRLSCAASGSISAYVYMGWYRQAPGKEREFVATIDDGTITNYADSVKGRFTISRDNAKNTVYLQMNSLKPEDTAVYYCAVATDFVASHDYWGQGTQVTVSS

SEQ ID NO: 33759 - protein, 122 aa, Artificial Sequence
  Chemically Synthesized
QVQLQESGGGLVQAGGSLRLSCAASGNIFRAIRMGWYRQAPGKEREFVAGIAYGATTYYADSVKGRFTISRDNAKNTVYLQMNSLKPEDTAVYYCAVDRFIGDNTGNVYGYWGQGTQVTVSS

SEQ ID NO: 33760 - protein, 118 aa, Artificial Sequence
  Chemically Synthesized
QVQLQESGGGLVQAGGSLRLSCAASGTISRYWYMGWYRQAPGKERELVATIAYGGSTYYADSVKGRFTISRDNAKNTVYLQMNSLKPEDTAVYYCAADGYYWYWLRYWGQGTQVTVSS

SEQ ID NO: 33761 - protein, 116 aa, Artificial Sequence
  Chemically Synthesized
QVQLQESGGGLVQAGGSLRLSCAASGTISGRGWMGWYRQAPGKERELAGIGEGSNTYADSVKGRFTISRDNAKNTVYLQMNSLKPEDTAVYYCAAAAAIRGGYVYWGQGTQVTVSS

SEQ ID NO: 33762 - protein, 118 aa, Artificial Sequence
  Chemically Synthesized
QVQLQESGGGLVQAGGSLRLSCAASGTISYDAVMGWYRQAPGKERELVATIDFGANTYYADSVKGRFTISRDNAKNTVYLQMNSLKPEDTAVYYCAVDYSDDASYLYWGQGTQVTVSS

SEQ ID NO: 33763 - protein, 118 aa, Artificial Sequence
  Chemically Synthesized
QVQLQESGGGLVQAGGSLRLSCAASGNIFDEDDMGWYRQAPGKEREFVAAINYGGITNYADSVKGRFTISRDNAKNTVYLQMNSLKPEDTAVYYCAVREADFSIHGYWGQGTQVTVSS

SEQ ID NO: 33764 - protein, 118 aa, Artificial Sequence
  Chemically Synthesized
QVQLQESGGGLVQAGGSLRLSCAASGNIFGHRGMGWYRQAPGKEREFVAGITYGTSTYYADSVKGRFTISRDNAKNTVYLQMNSLKPEDTAVYYCAADYQFRGVHTYWGQGTQVTVSS

SEQ ID NO: 33765 - protein, 118 aa, Artificial Sequence
  Chemically Synthesized
QVQLQESGGGLVQAGGSLRLSCAASGTIFRDDNMGWYRQAPGKEREFVAAIGYGSTTNYADSVKGRFTISRDNAKNTVYLQMNSLKPEDTAVYYCAVRNTYWNLLQYWGQGTQVTVSS

SEQ ID NO: 33766 - protein, 118 aa, Artificial Sequence
  Chemically Synthesized
QVQLQESGGGLVQAGGSLRLSCAASGTIFKLGYMGWYRQAPGKEREFVATITTGATTYYADSVKGRFTISRDNAKNTVYLQMNSLKPEDTAVYYCAADTYGPWAYSYWGQGTQVTVSS

SEQ ID NO: 33767 - protein, 118 aa, Artificial Sequence
  Chemically Synthesized
QVQLQESGGGLVQAGGSLRLSCAASGNISVLVYMGWYRQAPGKERELVAAITTGTSTYYADSVKGRFTISRDNAKNTVYLQMNSLKPEDTAVYYCAADYYGPWYHQYWGQGTQVTVSS

SEQ ID NO: 33768 - protein, 122 aa, Artificial Sequence
  Chemically Synthesized
QVQLQESGGGLVQAGGSLRLSCAASGTISGGYNMGWYRQAPGKEREFVATIGDGSSTYYADSVKGRFTISRDNAKNTVYLQMNSLKPEDTAVYYCAAFNSAQYWYESPFRYWGQGTQVTVSS

SEQ ID NO: 33769 - protein, 122 aa, Artificial Sequence
  Chemically Synthesized
QVQLQESGGGLVQAGGSLRLSCAASGSISYETTMGWYRQAPGKEREFVATINVGGSTNYADSVKGRFTISRDNAKNTVYLQMNSLKPEDTAVYYCAVLDKYAYFFKAPLFYWGQGTQVTVSS

SEQ ID NO: 33770 - protein, 118 aa, Artificial Sequence
  Chemically Synthesized
QVQLQESGGGLVQAGGSLRLSCAASGYISNPEVMGWYRQAPGKERELVAGIGVGGSTNYADSVKGRFTISRDNAKNTVYLQMNSLKPEDTAVYYCAVADPDYDRHPYWGQGTQVTVSS

SEQ ID NO: 33771 - protein, 118 aa, Artificial Sequence
  Chemically Synthesized
QVQLQESGGGLVQAGGSLRLSCAASGTISPPTYMGWYRQAPGKERELVAGIGPGTITYYADSVKGRFTISRDNAKNTVYLQMNSLKPEDTAVYYCAADIYGPWYHAYWGQGTQVTVSS

SEQ ID NO: 33772 - protein, 122 aa, Artificial Sequence
  Chemically Synthesized
QVQLQESGGGLVQAGGSLRLSCAASGSISEFAYMGWYRQAPGKEREFVASITPGGTTYYADSVKGRFTISRDNAKNTVYLQMNSLKPEDTAVYYCAADVIREFYTYPIHIYWGQGTQVTVSS

SEQ ID NO: 33773 - protein, 118 aa, Artificial Sequence
  Chemically Synthesized
QVQLQESGGGLVQAGGSLRLSCAASGSISGAAYMGWYRQAPGKERELVAAIAHGTTTYYADSVKGRFTISRDNAKNTVYLQMNSLKPEDTAVYYCAADADGPWYHSYWGQGTQVTVSS

SEQ ID NO: 33774 - protein, 118 aa, Artificial Sequence
  Chemically Synthesized
QVQLQESGGGLVQAGGSLRLSCAASGSISYVQYMGWYRQAPGKERELVATIDLGASTYYADSVKGRFTISRDNAKNTVYLQMNSLKPEDTAVYYCAADGYGPWSHSYWGQGTQVTVSS

SEQ ID NO: 33775 - protein, 118 aa, Artificial Sequence
  Chemically Synthesized
QVQLQESGGGLVQAGGSLRLSCAASGNISYWPYMGWYRQAPGKERELVAGIATGSITYYADSVKGRFTISRDNAKNTVYLQMNSLKPEDTAVYYCAADSYGPFYHSYWGQGTQVTVSS

SEQ ID NO: 33776 - protein, 122 aa, Artificial Sequence
  Chemically Synthesized
QVQLQESGGGLVQAGGSLRLSCAASGTISPVDYMGWYRQAPGKERELVAAINPGANTYYADSVKGRFTISRDNAKNTVYLQMNSLKPEDTAVYYCAVYSQYIHATYDYHYYWGQGTQVTVSS

SEQ ID NO: 33777 - protein, 118 aa, Artificial Sequence
  Chemically Synthesized
QVQLQESGGGLVQAGGSLRLSCAASGSIFQYLNMGWYRQAPGKERELVATIDYGTITNYADSVKGRFTISRDNAKNTVYLQMNSLKPEDTAVYYCAADYDGVWYFTYWGQGTQVTVSS

SEQ ID NO: 33778 - protein, 122 aa, Artificial Sequence
  Chemically Synthesized
QVQLQESGGGLVQAGGSLRLSCAASGSIFLRRGMGWYRQAPGKEREFVATIGYGGITYYADSVKGRFTISRDNAKNTVYLQMNSLKPEDTAVYYCAAKRNYYGQAKYWHPYWGQGTQVTVSS

SEQ ID NO: 33779 - protein, 118 aa, Artificial Sequence
  Chemically Synthesized
QVQLQESGGGLVQAGGSLRLSCAASGTISLDTYMGWYRQAPGKERELVASIAFGSSTYYADSVKGRFTISRDNAKNTVYLQMNSLKPEDTAVYYCAADQYGPWAHAYWGQGTQVTVSS

SEQ ID NO: 33780 - protein, 118 aa, Artificial Sequence
  Chemically Synthesized
QVQLQESGGGLVQAGGSLRLSCAASGSISYPYYMGWYRQAPGKERELVATIAEGTSTYYADSVKGRFTISRDNAKNTVYLQMNSLKPEDTAVYYCAAGFDGPWYHYYWGQGTQVTVSS

SEQ ID NO: 33781 - protein, 122 aa, Artificial Sequence
  Chemically Synthesized
QVQLQESGGGLVQAGGSLRLSCAASGYIFGLLYMGWYRQAPGKEREFVAAIGNGSTTYYADSVKGRFTISRDNAKNTVYLQMNSLKPEDTAVYYCAATGPEDTTSSYRLPYWGQGTQVTVSS

SEQ ID NO: 33782 - protein, 118 aa, Artificial Sequence
  Chemically Synthesized
QVQLQESGGGLVQAGGSLRLSCAASGSISYLTYMGWYRQAPGKEREFVASITAGGITNYADSVKGRFTISRDNAKNTVYLQMNSLKPEDTAVYYCAVGDIGRYRHNYWGQGTQVTVSS

SEQ ID NO: 33783 - protein, 121 aa, Artificial Sequence
  Chemically Synthesized
QVQLQESGGGLVQAGGSLRLSCAASGNIFEVRYMGWYRQAPGKERELVAGINTGAIPYADSVKGRFTISRDNAKNTVYLQMNSLKPEDTAVYYCAAPHALYFRDGPYHLYWGQGTQVTVSS

SEQ ID NO: 33784 - protein, 118 aa, Artificial Sequence
  Chemically Synthesized
QVQLQESGGGLVQAGGSLRLSCAASGTISDPSSMGWYRQAPGKEREFVASIGIGATTNYADSVKGRFTISRDNAKNTVYLQMNSLKPEDTAVYYCAVLRYRRYGLQYWGQGTQVTVSS

SEQ ID NO: 33785 - protein, 122 aa, Artificial Sequence
  Chemically Synthesized
QVQLQESGGGLVQAGGSLRLSCAASGSIFAWLDMGWYRQAPGKERELVAGIAIGSTTYYADSVKGRFTISRDNAKNTVYLQMNSLKPEDTAVYYCAAGTYKAGDYGSSLPYWGQGTQVTVSS

SEQ ID NO: 33786 - protein, 118 aa, Artificial Sequence
  Chemically Synthesized
QVQLQESGGGLVQAGGSLRLSCAASGYISDSSSMGWYRQAPGKEREFVATIDVGTITNYADSVKGRFTISRDNAKNTVYLQMNSLKPEDTAVYYCAAALRYLQTYWYWGQGTQVTVSS

SEQ ID NO: 33787 - protein, 122 aa, Artificial Sequence
  Chemically Synthesized
QVQLQESGGGLVQAGGSLRLSCAASGYIFTAAGMGWYRQAPGKERELVAAIGLGSITYYADSVKGRFTISRDNAKNTVYLQMNSLKPEDTAVYYCAALSRYPADNRVDYAYWGQGTQVTVSS

SEQ ID NO: 33788 - protein, 127 aa, Artificial Sequence
  Chemically Synthesized
QVQLQESGGGLVQAGGSLRLSCAASGSISFYRTMGWYRQAPGKERELVATIAPGGITNYADSVKGRFTISRDNAKNTVYLQMNSLKPEDTAVYYCAAFLFTPRGRTRVQRGDPYYYWGQGTQVTVSS

SEQ ID NO: 33789 - protein, 118 aa, Artificial Sequence
  Chemically Synthesized
QVQLQESGGGLVQAGGSLRLSCAASGYIFITNEMGWYRQAPGKEREFVASIDIGTNTNYADSVKGRFTISRDNAKNTVYLQMNSLKPEDTAVYYCAAYDLHHGPHRYWGQGTQVTVSS

SEQ ID NO: 33790 - protein, 118 aa, Artificial Sequence
  Chemically Synthesized
QVQLQESGGGLVQAGGSLRLSCAASGSIFRTRYMGWYRQAPGKERELVAGIAPGASTNYADSVKGRFTISRDNAKNTVYLQMNSLKPEDTAVYYCAAQAIGEEPHYYWGQGTQVTVSS

SEQ ID NO: 33791 - protein, 126 aa, Artificial Sequence
  Chemically Synthesized
QVQLQESGGGLVQAGGSLRLSCAASGNISGTGRMGWYRQAPGKERELVASITGGSTTNYADSVKGRFTISRDNAKNTVYLQMNSLKPEDTAVYYCAAQEDVAGVDGRRYGDAHRYWGQGTQVTVSS

SEQ ID NO: 33792 - protein, 118 aa, Artificial Sequence
  Chemically Synthesized
QVQLQESGGGLVQAGGSLRLSCAASGNIFRYLTMGWYRQAPGKEREFVAAIDDGSNTNYADSVKGRFTISRDNAKNTVYLQMNSLKPEDTAVYYCAADLFGPWDYAYWGQGTQVTVSS

SEQ ID NO: 33793 - protein, 126 aa, Artificial Sequence
  Chemically Synthesized
QVQLQESGGGLVQAGGSLRLSCAASGSISGGRAMGWYRQAPGKERELVAGIASGGNTNYADSVKGRFTISRDNAKNTVYLQMNSLKPEDTAVYYCAVDPHPVESLGGQLYGRHVYWGQGTQVTVSS

SEQ ID NO: 33794 - protein, 117 aa, Artificial Sequence
  Chemically Synthesized
QVQLQESGGGLVQAGGSLRLSCAASGYIFGTYSMGWYRQAPGKERELVATIARGTTTYYADSVKGRFTISRDNAKNTVYLQMNSLKPEDTAVYYCAAYDQYHYHTYWGQGTQVTVSS

SEQ ID NO: 33795 - protein, 122 aa, Artificial Sequence
  Chemically Synthesized
QVQLQESGGGLVQAGGSLRLSCAASGYIFVPTEMGWYRQAPGKEREFVAAIGIGGITNYADSVKGRFTISRDNAKNTVYLQMNSLKPEDTAVYYCAVQRDWWDTWARELYYWGQGTQVTVSS

SEQ ID NO: 33796 - protein, 122 aa, Artificial Sequence
  Chemically Synthesized
QVQLQESGGGLVQAGGSLRLSCAASGSISYTVDMGWYRQAPGKERELVAAIDDGGSTYYADSVKGRFTISRDNAKNTVYLQMNSLKPEDTAVYYCAADFYLFPPRFPYHGYWGQGTQVTVSS

SEQ ID NO: 33797 - protein, 126 aa, Artificial Sequence
  Chemically Synthesized
QVQLQESGGGLVQAGGSLRLSCAASGYIFLGWYMGWYRQAPGKEREFVAAIDEGTTTNYADSVKGRFTISRDNAKNTVYLQMNSLKPEDTAVYYCAVDVFGPAGDDDVDFSYLGYWGQGTQVTVSS

SEQ ID NO: 33798 - protein, 122 aa, Artificial Sequence
  Chemically Synthesized
QVQLQESGGGLVQAGGSLRLSCAASGSISDGLAMGWYRQAPGKERELVATITYGGTTNYADSVKGRFTISRDNAKNTVYLQMNSLKPEDTAVYYCAAAVYADARGAYEYVYWGQGTQVTVSS

SEQ ID NO: 33799 - protein, 122 aa, Artificial Sequence
  Chemically Synthesized
QVQLQESGGGLVQAGGSLRLSCAASGSISYGAAMGWYRQAPGKEREFVASIGTGGSTNYADSVKGRFTISRDNAKNTVYLQMNSLKPEDTAVYYCAPGQYNDSYGPRYHVYWGQGTQVTVSS

SEQ ID NO: 33800 - protein, 126 aa, Artificial Sequence
  Chemically Synthesized
QVQLQESGGGLVQAGGSLRLSCAASGYIFPTRKMGWYRQAPGKERELVASIGGGASTNYADSVKGRFTISRDNAKNTVYLQMNSLKPEDTAVYYCAATVPWDPVRVGQYDYAHSYWGQGTQVTVSS

SEQ ID NO: 33801 - protein, 118 aa, Artificial Sequence
  Chemically Synthesized
QVQLQESGGGLVQAGGSLRLSCAASGNISPTRFMGWYRQAPGKEREFVAAIDLGTTTNYADSVKGRFTISRDNAKNTVYLQMNSLKPEDTAVYYCAADWNGPWSFWYWGQGTQVTVSS

SEQ ID NO: 33802 - protein, 122 aa, Artificial Sequence
  Chemically Synthesized
QVQLQESGGGLVQAGGSLRLSCAASGNISDVVVMGWYRQAPGKEREFVATINVGATTYYADSVKGRFTISRDNAKNTVYLQMNSLKPEDTAVYYCAARVDDYASTQARHYYWGQGTQVTVSS

SEQ ID NO: 33803 - protein, 117 aa, Artificial Sequence
  Chemically Synthesized
QVQLQESGGGLVQAGGSLRLSCAASGYILTLCMGWYRQAPGKERELVAAIGRGTSTYYADSVKGRFTISRDNAKNTVYLQMNSLKPEDTAVYYCAAVTKDRASHQYWGQGTQVTVSS

SEQ ID NO: 33804 - protein, 118 aa, Artificial Sequence
  Chemically Synthesized
QVQLQESGGGLVQAGGSLRLSCAASGYISPPFQMGWYRQAPGKERELVASISDGSNTYYADSVKGRFTISRDNAKNTVYLQMNSLKPEDTAVYYCAVNEFLATYFHYWGQGTQVTVSS

SEQ ID NO: 33805 - protein, 118 aa, Artificial Sequence
  Chemically Synthesized
QVQLQESGGGLVQAGGSLRLSCAASGNISYIYRMGWYRQAPGKERELVATISDGTTTNYADSVKGRFTISRDNAKNTVYLQMNSLKPEDTAVYYCAVSYGDSAYLDYWGQGTQVTVSS

SEQ ID NO: 33806 - protein, 119 aa, Artificial Sequence
  Chemically Synthesized
QVQLQESGGGLVQAGGSLRLSCAASGNISSDYYMGWYRQAPGKERELVATINAGSSTYYADSVKGRFTISRDNAKNTVYLQMNSLKPEDTAVYYCAVGEWTPVGPLTYWGQGTQVTVSS

SEQ ID NO: 33807 - protein, 126 aa, Artificial Sequence
  Chemically Synthesized
QVQLQESGGGLVQAGGSLRLSCAASGNISSYLRMGWYRQAPGKEREFVAAINYGSNTNYADSVKGRFTISRDNAKNTVYLQMNSLKPEDTAVYYCAAYGGGSNPGAQHVGPQHVYWGQGTQVTVSS

SEQ ID NO: 33808 - protein, 118 aa, Artificial Sequence
  Chemically Synthesized
QVQLQESGGGLVQAGGSLRLSCAASGSISPEGAMGWYRQAPGKERELVATIGPGAITYYADSVKGRFTISRDNAKNTVYLQMNSLKPEDTAVYYCAAVYADAYIHWYWGQGTQVTVSS

SEQ ID NO: 33809 - protein, 119 aa, Artificial Sequence
  Chemically Synthesized
QVQLQESGGGLVQAGGSLRLSCAASGYIFIAYVMGWYRQAPGKEREFVAGIAYVGASTYYADSVKGRFTISRDNAKNTVYLQMNSLKPEDTAVYYCAVDRVYATSYNYWGQGTQVTVSS

SEQ ID NO: 33810 - protein, 126 aa, Artificial Sequence
  Chemically Synthesized
QVQLQESGGGLVQAGGSLRLSCAASGTIFRLQYMGWYRQAPGKERELVAAIAIGGSTYYADSVKGRFTISRDNAKNTVYLQMNSLKPEDTAVYYCAVRGQTFSYWRRYPFEVHGYWGQGTQVTVSS

SEQ ID NO: 33811 - protein, 122 aa, Artificial Sequence
  Chemically Synthesized
QVQLQESGGGLVQAGGSLRLSCAASGSISVRTIMGWYRQAPGKERELVAGINFGGITNYADSVKGRFTISRDNAKNTVYLQMNSLKPEDTAVYYCAADGDNIYEDLITHDYWGQGTQVTVSS

SEQ ID NO: 33812 - protein, 118 aa, Artificial Sequence
  Chemically Synthesized
QVQLQESGGGLVQAGGSLRLSCAASGNISAKVGMGWYRQAPGKEREFVASIARGANTNYADSVKGRFTISRDNAKNTVYLQMNSLKPEDTAVYYCAVTKGRSGRHNYWGQGTQVTVSS

SEQ ID NO: 33813 - protein, 118 aa, Artificial Sequence
  Chemically Synthesized
QVQLQESGGGLVQAGGSLRLSCAASGYISDSVYMGWYRQAPGKERELVAAINVGATTYYADSVKGRFTISRDNAKNTVYLQMNSLKPEDTAVYYCAAQDYPVLPFSYWGQGTQVTVSS

SEQ ID NO: 33814 - protein, 118 aa, Artificial Sequence
  Chemically Synthesized
QVQLQESGGGLVQAGGSLRLSCAASGNISRTERMGWYRQAPGKEREFVAAITDGAKYQYADSVKGRFTISRDNAKNTVYLQMNSLKPEDTAVYYCAAYSVDWDYFTYWGQGTQVTVSS

SEQ ID NO: 33815 - protein, 118 aa, Artificial Sequence
  Chemically Synthesized
QVQLQESGGGLVQAGGSLRLSCAASGSIFLSEFMGWYRQAPGKERELVAAITFGSSTYYADSVKGRFTISRDNAKNTVYLQMNSLKPEDTAVYYCAVRGAYYRYHVYWGQGTQVTVSS

SEQ ID NO: 33816 - protein, 117 aa, Artificial Sequence
  Chemically Synthesized
QVQLQESGGGLVQAGGSLRLSCAASGNIFYYYMGWYRQAPGKEREFVASISPGTITYYADSVKGRFTISRDNAKNTVYLQMNSLKPEDTAVYYCAVDYVGPWYFAYWGQGTQVTVSS

SEQ ID NO: 33817 - protein, 118 aa, Artificial Sequence
  Chemically Synthesized
QVQLQESGGGLVQAGGSLRLSCAASGTIFGRPYMGWYRQAPGKERELVAAIAQGGTTNYADSVKGRFTISRDNAKNTVYLQMNSLKPEDTAVYYCAAWLEDTVGLAYWGQGTQVTVSS

SEQ ID NO: 33818 - protein, 118 aa, Artificial Sequence
  Chemically Synthesized
QVQLQESGGGLVQAGGSLRLSCAASGSISDLPYMGWYRQAPGKERELVAGIDAGATTYYADSVKGRFTISRDNAKNTVYLQMNSLKPEDTAVYYCAADIYGPWSHVYWGQGTQVTVSS

SEQ ID NO: 33819 - protein, 117 aa, Artificial Sequence
  Chemically Synthesized
QVQLQESGGGLVQAGGSLRLSCAASGNIFYTPSMGWYRQAPGKEREFVAVLMVVLVPYADSVKGRFTISRDNAKNTVYLQMNSLKPEDTAVYYCAVPYDDTRHYGYWGQGTQVTVSS

SEQ ID NO: 33820 - protein, 118 aa, Artificial Sequence
  Chemically Synthesized
QVQLQESGGGLVQAGGSLRLSCAASGNIFDRQVMGWYRQAPGKEREFVAGINSGTNTNYADSVKGRFTISRDNAKNTVYLQMNSLKPEDTAVYYCAVGYDWLSGYEYWGQGTQVTVSS

SEQ ID NO: 33821 - protein, 118 aa, Artificial Sequence
  Chemically Synthesized
QVQLQESGGGLVQAGGSLRLSCAASGTISPLYYMGWYRQAPGKERELVATIDDGATTYYADSVKGRFTISRDNAKNTVYLQMNSLKPEDTAVYYCAADVPGNVGLRYWGQGTQVTVSS

SEQ ID NO: 33822 - protein, 126 aa, Artificial Sequence
  Chemically Synthesized
QVQLQESGGGLVQAGGSLRLSCAASGTISEKSTMGWYRQAPGKERELVAAIGLGTTTYYADSVKGRFTISRDNAKNTVYLQMNSLKPEDTAVYYCAVGYWWSYDRAPHYIRSYAYWGQGTQVTVSS

SEQ ID NO: 33823 - protein, 118 aa, Artificial Sequence
  Chemically Synthesized
QVQLQESGGGLVQAGGSLRLSCAASGYISRIQYMGWYRQAPGKERELVATITFGSNTYYADSVKGRFTISRDNAKNTVYLQMNSLKPEDTAVYYCAVGFRWRLHHSYWGQGTQVTVSS

SEQ ID NO: 33824 - protein, 109 aa, Artificial Sequence
  Chemically Synthesized
QVQLQESGGGLVQAGGSLRLSCAASGSIFGLPYMGWYRQAPGKEREFVATINEVLLPYADSVKGRFTISRDNAKNTVYLQMNSLKPEDTAVYYCAASYWGQGTQVTVSS

SEQ ID NO: 33825 - protein, 115 aa, Artificial Sequence
  Chemically Synthesized
QVQLQESGGGLVQAGGSLRLSCAASGYISTNYMGWYRQAPGKERELVAWYYLYADSVKGRFTISRDNAKNTVYLQMNSLKPEDTAVYYCAAARWANDPRNYHYYWGQGTQVTVSS

SEQ ID NO: 33826 - protein, 110 aa, Artificial Sequence
  Chemically Synthesized
QVQLQESGGGLVQAGGSLRLSCAASGSIFAWVMGWYRQAPGKEREFVASITDGSITNYADSVKGRFTISRDNAKNTVYLQMNSLKPEDTAVYYCAARIYWGQGTQVTVSS

SEQ ID NO: 33827 - protein, 125 aa, Artificial Sequence
  Chemically Synthesized
QVQLQESGGGLVQAGGSLRLSCAASGTISQDSIMGWYRQAPGKEREFVASISQGSSTYYADSVKGRFTISRDNAKNTVYLQMNSLKPEDTAVYYCAADGYDSLTVWFGTTNLFYWGQGTQVTVSS

SEQ ID NO: 33828 - protein, 118 aa, Artificial Sequence
  Chemically Synthesized
QVQLQESGGGLVQAGGSLRLSCAASGNISRIVYMGWYRQAPGKEREFVAAITPGGITYYADSVKGRFTISRDNAKNTVYLQMNSLKPEDTAVYYCAVWDYKSDYLVYWGQGTQVTVSS

SEQ ID NO: 33829 - protein, 118 aa, Artificial Sequence
  Chemically Synthesized
QVQLQESGGGLVQAGGSLRLSCAASGSISPRYYMGWYRQAPGKEREFVATITAGSITYYADSVKGRFTISRDNAKNTVYLQMNSLKPEDTAVYYCAADDDGPWAHKYWGQGTQVTVSS

SEQ ID NO: 33830 - protein, 124 aa, Artificial Sequence
  Chemically Synthesized
QVQLQESGGGLVQAGGSLRLSCAASGTISSSTMGWYRQAPGKEREFVASIGYGASTYYADSVKGRFTISRDNAKNTVYLQMNSLKPEDTAVYYCAVHDDIPYYTDTPITSVIYWGQGTQVTVSS

SEQ ID NO: 33831 - protein, 118 aa, Artificial Sequence
  Chemically Synthesized
QVQLQESGGGLVQAGGSLRLSCAASGNISWGLDMGWYRQAPGKERELVASINDGASTNYADSVKGRFTISRDNAKNTVYLQMNSLKPEDTAVYYCAARTRDAYLFGYWGQGTQVTVSS

SEQ ID NO: 33832 - protein, 118 aa, Artificial Sequence
  Chemically Synthesized
QVQLQESGGGLVQAGGSLRLSCAASGSIFVDSEMGWYRQAPGKEREFVAGIGGGANYQYADSVKGRFTISRDNAKNTVYLQMNSLKPEDTAVYYCAVSRDAAAGYDYWGQGTQVTVSS

SEQ ID NO: 33833 - protein, 119 aa, Artificial Sequence
  Chemically Synthesized
QVQLQESGGGLVQAGGSLRLSCAASGNISHGWAMGWYRQAPGKERELVAAIAVGGTTYYADSVKGRFTISRDNAKNTVYLQMNSLKPEDTAVYYCAVYDASEPGAYAYWGQGTQVTVSS

SEQ ID NO: 33834 - protein, 122 aa, Artificial Sequence
  Chemically Synthesized
QVQLQESGGGLVQAGGSLRLSCAASGYIFTPPDMGWYRQAPGKERELVAAINLGANTNYADSVKGRFTISRDNAKNTVYLQMNSLKPEDTAVYYCAAGRTYARGAAEDYAYWGQGTQVTVSS

SEQ ID NO: 33835 - protein, 118 aa, Artificial Sequence
  Chemically Synthesized
QVQLQESGGGLVQAGGSLRLSCAASGTIFRGGYMGWYRQAPGKERELVASIGRGGSTYYADSVKGRFTISRDNAKNTVYLQMNSLKPEDTAVYYCAVGYYGPWDYEYWGQGTQVTVSS

SEQ ID NO: 33836 - protein, 121 aa, Artificial Sequence
  Chemically Synthesized
QVQLQESGGGLVQAGGSLRLSCAASGYIFVADGMGWYRQAPGKEREFVAGIAQGGNTYYADSVKGRFTISRDNAKNTVYLQMNSLKPEDTAVYYCAVSFLTTRIPFCLCYWGQGTQVTVSS

SEQ ID NO: 33837 - protein, 118 aa, Artificial Sequence
  Chemically Synthesized
QVQLQESGGGLVQAGGSLRLSCAASGSIFPNLYMGWYRQAPGKEREFVAAIDAGTSTYYADSVKGRFTISRDNAKNTVYLQMNSLKPEDTAVYYCAVNEYDDAYHTYWGQGTQVTVSS

SEQ ID NO: 33838 - protein, 118 aa, Artificial Sequence
  Chemically Synthesized
QVQLQESGGGLVQAGGSLRLSCAASGSIFPPQVMGWYRQAPGKEREFVASINGGAITNYADSVKGRFTISRDNAKNTVYLQMNSLKPEDTAVYYCAADGIRWKWHWYWGQGTQVTVSS

SEQ ID NO: 33839 - protein, 117 aa, Artificial Sequence
  Chemically Synthesized
QVQLQESGGGLVQAGGSLRLSCAASGTISYYNTMGWYRQAPGKEREFVAAISYGSSTNYADSVKGRFTISRDNAKNTVYLQMNSLKPEDTAVYYCAANESDSLIIYWGQGTQVTVSS

SEQ ID NO: 33840 - protein, 122 aa, Artificial Sequence
  Chemically Synthesized
QVQLQESGGGLVQAGGSLRLSCAASGTIFDAADMGWYRQAPGKEREFVAAITGGTITNYADSVKGRFTISRDNAKNTVYLQMNSLKPEDTAVYYCAALSPWSYKSDPFYDYWGQGTQVTVSS

SEQ ID NO: 33841 - protein, 117 aa, Artificial Sequence
  Chemically Synthesized
QVQLQESGGGLVQAGGSLRLSCAASGSISTPFMGWYRQAPGKERELVATIDIGGTTYYADSVKGRFTISRDNAKNTVYLQMNSLKPEDTAVYYCAAIADGSYDYPYWGQGTQVTVSS

SEQ ID NO: 33842 - protein, 125 aa, Artificial Sequence
  Chemically Synthesized
QVQLQESGGGLVQAGGSLRLSCAASGTIFRGYIMGWYRQAPGKERELVASINYGGSTNYADSVKGRFTISRDNAKNTVYLQMNSLKPEDTAVYYCAVSGPYGSQSEPVTYTYHYWGQGTQVTVSS

SEQ ID NO: 33843 - protein, 121 aa, Artificial Sequence
  Chemically Synthesized
QVQLQESGGGLVQAGGSLRLSCAASGSISHYYAMGWYRQAPGKEREFVATIGAGSSTNYADSVKGRFTISRDNAKNTVYLQMNSLKPEDTAVYYCAAYYIQRIRSLLLIYWGQGTQVTVSS

SEQ ID NO: 33844 - protein, 121 aa, Artificial Sequence
  Chemically Synthesized
QVQLQESGGGLVQAGGSLRLSCAASGTISYGHNMGWYRQAPGKEREFVAAIDYGSTTNYADSVKGRFTISRDNAKNTVYLQMNSLKPEDTAVYYCAASITGTTNRLTTLYWGQGTQVTVSS

SEQ ID NO: 33845 - protein, 126 aa, Artificial Sequence
  Chemically Synthesized
QVQLQESGGGLVQAGGSLRLSCAASGSIFLGYGMGWYRQAPGKEREFVASIATGTNTNYADSVKGRFTISRDNAKNTVYLQMNSLKPEDTAVYYCAVGLIYYYKDEFADIAIHDYWGQGTQVTVSS

SEQ ID NO: 33846 - protein, 117 aa, Artificial Sequence
  Chemically Synthesized
QVQLQESGGGLVQAGGSLRLSCAASGSISYHWVMGWYRQAPGKEREFVAGINSGSTTNYADSVKGRFTISRDNAKNTVYLQMNSLKPEDTAVYYCAVYSFTSTTMYWGQGTQVTVSS

SEQ ID NO: 33847 - protein, 122 aa, Artificial Sequence
  Chemically Synthesized
QVQLQESGGGLVQAGGSLRLSCAASGSIFGYYEMGWYRQAPGKERELVATINYGSITNYADSVKGRFTISRDNAKNTVYLQMNSLKPEDTAVYYCAVWAYPGRYTVEYHRYWGQGTQVTVSS

SEQ ID NO: 33848 - protein, 122 aa, Artificial Sequence
  Chemically Synthesized
QVQLQESGGGLVQAGGSLRLSCAASGYIFHYVVMGWYRQAPGKEREFVAAINWGSSTNYADSVKGRFTISRDNAKNTVYLQMNSLKPEDTAVYYCAVYNSYTSSYYYYLYYWGQGTQVTVSS

SEQ ID NO: 33849 - protein, 117 aa, Artificial Sequence
  Chemically Synthesized
QVQLQESGGGLVQAGGSLRLSCAASGNIFLVYMGWYRQAPGKERELVATINGGSTTYYADSVKGRFTISRDNAKNTVYLQMNSLKPEDTAVYYCAAWAVWPSYHDYWGQGTQVTVSS

SEQ ID NO: 33850 - protein, 118 aa, Artificial Sequence
  Chemically Synthesized
QVQLQESGGGLVQAGGSLRLSCAASGTIFRTYAMGWYRQAPGKERELVAAIGAGSITYYADSVKGRFTISRDNAKNTVYLQMNSLKPEDTAVYYCAAYEYSSPGHTYWGQGTQVTVSS

SEQ ID NO: 33851 - protein, 118 aa, Artificial Sequence
  Chemically Synthesized
QVQLQESGGGLVQAGGSLRLSCAASGYIFDPGDMGWYRQAPGKERELVAGIDYGGITYYADSVKGRFTISRDNAKNTVYLQMNSLKPEDTAVYYCAVHHYKYGQHEYWGQGTQVTVSS

SEQ ID NO: 33852 - protein, 121 aa, Artificial Sequence
  Chemically Synthesized
QVQLQESGGGLVQAGGSLRLSCAASGNISRWSYMGWYRQAPGKERELVAAINYGGNTNYADSVKGRFTISRDNAKNTVYLQMNSLKPEDTAVYYCAATSSTLTLFWLLIYWGQGTQVTVSS

SEQ ID NO: 33853 - protein, 116 aa, Artificial Sequence
  Chemically Synthesized
QVQLQESGGGLVQAGGSLRLSCAASGTISAPNYMGWYRQAPGKEREFVAAIADGSNTNYADSVKGRFTISRDNAKNTVYLQMNSLKPEDTAVYYCAVDSVTSVLYWGQGTQVTVSS

SEQ ID NO: 33854 - protein, 121 aa, Artificial Sequence
  Chemically Synthesized
QVQLQESGGGLVQAGGSLRLSCAASGSISYTGYMGWYRQAPGKEREFVAGINHGGNTYYADSVKGRFTISRDNAKNTVYLQMNSLKPEDTAVYYCAAYGRPRNESCCSMYWGQGTQVTVSS

SEQ ID NO: 33855 - protein, 118 aa, Artificial Sequence
  Chemically Synthesized
QVQLQESGGGLVQAGGSLRLSCAASGTIFVYRYMGWYRQAPGKERELVATIDYGASTNYADSVKGRFTISRDNAKNTVYLQMNSLKPEDTAVYYCAAVYGFTPRHAYWGQGTQVTVSS

SEQ ID NO: 33856 - protein, 118 aa, Artificial Sequence
  Chemically Synthesized
QVQLQESGGGLVQAGGSLRLSCAASGNISLDSYMGWYRQAPGKERELVAAITGGSNTYYADSVKGRFTISRDNAKNTVYLQMNSLKPEDTAVYYCAVIVAYLDDFFYWGQGTQVTVSS

SEQ ID NO: 33857 - protein, 118 aa, Artificial Sequence
  Chemically Synthesized
QVQLQESGGGLVQAGGSLRLSCAASGNIFYYLAMGWYRQAPGKEREFVASINGGANTNYADSVKGRFTISRDNAKNTVYLQMNSLKPEDTAVYYCAVDGYYPQVYYYWGQGTQVTVSS

SEQ ID NO: 33858 - protein, 125 aa, Artificial Sequence
  Chemically Synthesized
QVQLQESGGGLVQAGGSLRLSCAASGYIFRRYFMGWYRQAPGKERELVAAISFGAITYYADSVKGRFTISRDNAKNTVYLQMNSLKPEDTAVYYCAVYDYSLDYYSRARVDHAYWGQGTQVTVSS

SEQ ID NO: 33859 - protein, 118 aa, Artificial Sequence
  Chemically Synthesized
QVQLQESGGGLVQAGGSLRLSCAASGYIFRFTYMGWYRQAPGKEREFVAAITGGTTTNYADSVKGRFTISRDNAKNTVYLQMNSLKPEDTAVYYCAVYWQILRKHAYWGQGTQVTVSS

SEQ ID NO: 33860 - protein, 118 aa, Artificial Sequence
  Chemically Synthesized
QVQLQESGGGLVQAGGSLRLSCAASGTIFDFGGMGWYRQAPGKERELVASIDFGTTTYYADSVKGRFTISRDNAKNTVYLQMNSLKPEDTAVYYCAVIPRGVYPHGYWGQGTQVTVSS

SEQ ID NO: 33861 - protein, 117 aa, Artificial Sequence
  Chemically Synthesized
QVQLQESGGGLVQAGGSLRLSCAASGTIFPYYIMGWYRQAPGKEREFVAGISSGTTTNYADSVKGRFTISRDNAKNTVYLQMNSLKPEDTAVYYCAARVVGSLCLYWGQGTQVTVSS

SEQ ID NO: 33862 - protein, 118 aa, Artificial Sequence
  Chemically Synthesized
QVQLQESGGGLVQAGGSLRLSCAASGYIFASSYMGWYRQAPGKEREFVASISAGGITYYADSVKGRFTISRDNAKNTVYLQMNSLKPEDTAVYYCAVDGGIPVNHPYWGQGTQVTVSS

SEQ ID NO: 33863 - protein, 118 aa, Artificial Sequence
  Chemically Synthesized
QVQLQESGGGLVQAGGSLRLSCAASGTIFDAVEMGWYRQAPGKERELVAAITTWWYYQYADSVKGRFTISRDNAKNTVYLQMNSLKPEDTAVYYCAVGNEGTTTYGYWGQGTQVTVSS

SEQ ID NO: 33864 - protein, 117 aa, Artificial Sequence
  Chemically Synthesized
QVQLQESGGGLVQAGGSLRLSCAASGSISPPLRMGWYRQAPGKERELVASIGYGSNPYADSVKGRFTISRDNAKNTVYLQMNSLKPEDTAVYYCAVDNNGWDYLLYWGQGTQVTVSS

SEQ ID NO: 33865 - protein, 117 aa, Artificial Sequence
  Chemically Synthesized
QVQLQESGGGLVQAGGSLRLSCAASGNIFTTTMGWYRQAPGKEREFVASIGQGGTTNYADSVKGRFTISRDNAKNTVYLQMNSLKPEDTAVYYCAVLQESRLSLYYWGQGTQVTVSS

SEQ ID NO: 33866 - protein, 118 aa, Artificial Sequence
  Chemically Synthesized
QVQLQESGGGLVQAGGSLRLSCAASGNIFSFYYMGWYRQAPGKERELVAGIAYGATTYYADSVKGRFTISRDNAKNTVYLQMNSLKPEDTAVYYCAVYYTRYDYHIYWGQGTQVTVSS

SEQ ID NO: 33867 - protein, 118 aa, Artificial Sequence
  Chemically Synthesized
QVQLQESGGGLVQAGGSLRLSCAASGSISSYPYMGWYRQAPGKERELVASIASGTNTYYADSVKGRFTISRDNAKNTVYLQMNSLKPEDTAVYYCAADSTGPWSHVYWGQGTQVTVSS

SEQ ID NO: 33868 - protein, 121 aa, Artificial Sequence
  Chemically Synthesized
QVQLQESGGGLVQAGGSLRLSCAASGTISWQYVMGWYRQAPGKEREFVASIDAGASTYYADSVKGRFTISRDNAKNTVYLQMNSLKPEDTAVYYCAADRNVYTVYQNTHYWGQGTQVTVSS

SEQ ID NO: 33869 - protein, 118 aa, Artificial Sequence
  Chemically Synthesized
QVQLQESGGGLVQAGGSLRLSCAASGTIFGYEVMGWYRQAPGKERELVATIDGGTNTNYADSVKGRFTISRDNAKNTVYLQMNSLKPEDTAVYYCAVPIWSRYEHGYWGQGTQVTVSS

SEQ ID NO: 33870 - protein, 122 aa, Artificial Sequence
  Chemically Synthesized
QVQLQESGGGLVQAGGSLRLSCAASGYIFERLYMGWYRQAPGKERELVAAISYGATTNYADSVKGRFTISRDNAKNTVYLQMNSLKPEDTAVYYCAVSKWFVIDLLAQFDYWGQGTQVTVSS

SEQ ID NO: 33871 - protein, 126 aa, Artificial Sequence
  Chemically Synthesized
QVQLQESGGGLVQAGGSLRLSCAASGSIFRTLYMGWYRQAPGKEREFVAAINGGTNTYYADSVKGRFTISRDNAKNTVYLQMNSLKPEDTAVYYCAADAGFPADRYRYNQTIYPYWGQGTQVTVSS

SEQ ID NO: 33872 - protein, 125 aa, Artificial Sequence
  Chemically Synthesized
QVQLQESGGGLVQAGGSLRLSCAASGTIFDPYNMGWYRQAPGKERELVAGIASGTITNYADSVKGRFTISRDNAKNTVYLQMNSLKPEDTAVYYCAVTVTRSLTLLVTVTRTMYWGQGTQVTVSS

SEQ ID NO: 33873 - protein, 121 aa, Artificial Sequence
  Chemically Synthesized
QVQLQESGGGLVQAGGSLRLSCAASGTISDDDRMGWYRQAPGKERELVASIASVVVPYADSVKGRFTISRDNAKNTVYLQMNSLKPEDTAVYYCAANGRLGLQFYTLHNYWGQGTQVTVSS

SEQ ID NO: 33874 - protein, 117 aa, Artificial Sequence
  Chemically Synthesized
QVQLQESGGGLVQAGGSLRLSCAASGYIFTVIMGWYRQAPGKEREFVATITDGGTTYYADSVKGRFTISRDNAKNTVYLQMNSLKPEDTAVYYCAVRDTGDYSFLYWGQGTQVTVSS

SEQ ID NO: 33875 - protein, 121 aa, Artificial Sequence
  Chemically Synthesized
QVQLQESGGGLVQAGGSLRLSCAASGSISFVYGMGWYRQAPGKEREFVASIGEGSTTNYADSVKGRFTISRDNAKNTVYLQMNSLKPEDTAVYYCAVQTYVDWDSSSTFYWGQGTQVTVSS

SEQ ID NO: 33876 - protein, 123 aa, Artificial Sequence
  Chemically Synthesized
QVQLQESGGGLVQAGGSLRLSCAASGTISWAYSMGWYRQAPGKERELVATISVGGTNTNYADSVKGRFTISRDNAKNTVYLQMNSLKPEDTAVYYCAAYQRIQAWLYDHYAYWGQGTQVTVSS

SEQ ID NO: 33877 - protein, 120 aa, Artificial Sequence
  Chemically Synthesized
QVQLQESGGGLVQAGGSLRLSCAASGNISQLDMGWYRQAPGKERELVASIARGAITYADSVKGRFTISRDNAKNTVYLQMNSLKPEDTAVYYCAAGVDLYDDGYYNHNYWGQGTQVTVSS

SEQ ID NO: 33878 - protein, 112 aa, Artificial Sequence
  Chemically Synthesized
QVQLQESGGGLVQAGGSLRLSCAASGYIFYVPMGWYRQAPGKEREFVAGITVVVLPYADSVKGRFTISRDNAKNTVYLQMNSLKPEDTAVYYCALLLLCCYWGQGTQVTVSS

SEQ ID NO: 33879 - protein, 121 aa, Artificial Sequence
  Chemically Synthesized
QVQLQESGGGLVQAGGSLRLSCAASGTILTTTMGWYRQAPGKEREFVAAISTGSSTNYADSVKGRFTISRDNAKNTVYLQMNSLKPEDTAVYYCAVEYDVGRYVGWYLTYWGQGTQVTVSS

SEQ ID NO: 33880 - protein, 112 aa, Artificial Sequence
  Chemically Synthesized
QVQLQESGGGLVQAGGSLRLSCAASGNISDDGSMGWYRQAPGKEREFVAAIAYGGNTNYADSVKGRFTISRDNAKNTVYLQMNSLKPEDTAVYYCAATTMYWGQGTQVTVSS

SEQ ID NO: 33881 - protein, 118 aa, Artificial Sequence
  Chemically Synthesized
QVQLQESGGGLVQAGGSLRLSCAASGYISRRQYMGWYRQAPGKEREFVASIGYGATTNYADSVKGRFTISRDNAKNTVYLQMNSLKPEDTAVYYCAVSVGLSVPACYWGQGTQVTVSS

SEQ ID NO: 33882 - protein, 125 aa, Artificial Sequence
  Chemically Synthesized
QVQLQESGGGLVQAGGSLRLSCAASGNISYTGVMGWYRQAPGKERELVATIDGGGNTYYADSVKGRFTISRDNAKNTVYLQMNSLKPEDTAVYYCAVGRGWWVTDDAFRYAFYYWGQGTQVTVSS

SEQ ID NO: 33883 - protein, 116 aa, Artificial Sequence
  Chemically Synthesized
QVQLQESGGGLVQAGGSLRLSCAASGTISYFNTMGWYRQAPGKERELVAILLTVLVPYADSVKGRFTISRDNAKNTVYLQMNSLKPEDTAVYYCAADAQRYTSIYWGQGTQVTVSS

SEQ ID NO: 33884 - protein, 119 aa, Artificial Sequence
  Chemically Synthesized
QVQLQESGGGLVQAGGSLRLSCAASGSIFQADKMGWYRQAPGKERELVASIDYGSSTYYADSVKGRFTISRDNAKNTVYLQMNSLKPEDTAVYYCAAVYYYYLLYYDYWGQGTQVTVSS

SEQ ID NO: 33885 - protein, 117 aa, Artificial Sequence
  Chemically Synthesized
QVQLQESGGGLVQAGGSLRLSCAASGNIFDSAGMGWYRQAPGKERELVALLVVVLVPYADSVKGRFTISRDNAKNTVYLQMNSLKPEDTAVYYCAAYPTDGRIHFYWGQGTQVTVSS

SEQ ID NO: 33886 - protein, 121 aa, Artificial Sequence
  Chemically Synthesized
QVQLQESGGGLVQAGGSLRLSCAASGYIFVTVMGWYRQAPGKERELVASISQGSITYYADSVKGRFTISRDNAKNTVYLQMNSLKPEDTAVYYCAAVVGHTTYSTAWYDYWGQGTQVTVSS

SEQ ID NO: 33887 - protein, 109 aa, Artificial Sequence
  Chemically Synthesized
QVQLQESGGGLVQAGGSLRLSCAASGNIFGLPWMGWYRQAPGKERELVAGIGEGASTYYADSVKGRFTISRDNAKNTVYLQMNSLKPEDTAVYYCAVYWGQGTQVTVSS

SEQ ID NO: 33888 - protein, 118 aa, Artificial Sequence
  Chemically Synthesized
QVQLQESGGGLVQAGGSLRLSCAASGYISYYKIMGWYRQAPGKEREFVASINYGASTNYADSVKGRFTISRDNAKNTVYLQMNSLKPEDTAVYYCAVPSIYIERLLYWGQGTQVTVSS

SEQ ID NO: 33889 - protein, 117 aa, Artificial Sequence
  Chemically Synthesized
QVQLQESGGGLVQAGGSLRLSCAASGTIFSRELMGWYRQAPGKERELVATINQGTTTYYADSVKGRFTISRDNAKNTVYLQMNSLKPEDTAVYYCALVRTRSLVMYWGQGTQVTVSS

SEQ ID NO: 33890 - protein, 118 aa, Artificial Sequence
  Chemically Synthesized
QVQLQESGGGLVQAGGSLRLSCAASGNISPCSGMGWYRQAPGKERELVAGITTGASTNYADSVKGRFTISRDNAKNTVYLQMNSLKPEDTAVYYCAVDYPYVSDFGYWGQGTQVTVSS

SEQ ID NO: 33891 - protein, 118 aa, Artificial Sequence
  Chemically Synthesized
QVQLQESGGGLVQAGGSLRLSCAASGNIFGNAYMGWYRQAPGKERELVAAIGAGGNTYYADSVKGRFTISRDNAKNTVYLQMNSLKPEDTAVYYCAAVKADTLVYWYWGQGTQVTVSS

SEQ ID NO: 33892 - protein, 122 aa, Artificial Sequence
  Chemically Synthesized
QVQLQESGGGLVQAGGSLRLSCAASGYISGHGEMGWYRQAPGKEREFVATIAGGTSTNYADSVKGRFTISRDNAKNTVYLQMNSLKPEDTAVYYCAVNEEYITRYYWQFLYWGQGTQVTVSS

SEQ ID NO: 33893 - protein, 122 aa, Artificial Sequence
  Chemically Synthesized
QVQLQESGGGLVQAGGSLRLSCAASGNISWWDHMGWYRQAPGKEREFVASIGFGGSTYYADSVKGRFTISRDNAKNTVYLQMNSLKPEDTAVYYCAADTPADANEKYTLYYWGQGTQVTVSS

SEQ ID NO: 33894 - protein, 122 aa, Artificial Sequence
  Chemically Synthesized
QVQLQESGGGLVQAGGSLRLSCAASGYISPDDGMGWYRQAPGKEREFVATIDDGSNTNYADSVKGRFTISRDNAKNTVYLQMNSLKPEDTAVYYCAAEYEPEELYTDRFPYWGQGTQVTVSS

SEQ ID NO: 33895 - protein, 118 aa, Artificial Sequence
  Chemically Synthesized
QVQLQESGGGLVQAGGSLRLSCAASGSIFYIFLMGWYRQAPGKERELVATIAPGAITYYADSVKGRFTISRDNAKNTVYLQMNSLKPEDTAVYYCAAREGVGISYAYWGQGTQVTVSS

SEQ ID NO: 33896 - protein, 118 aa, Artificial Sequence
  Chemically Synthesized
QVQLQESGGGLVQAGGSLRLSCAASGTIFYFLSMGWYRQAPGKERELVASITHGATTNYADSVKGRFTISRDNAKNTVYLQMNSLKPEDTAVYYCAVDYRFDSVFSYWGQGTQVTVSS

SEQ ID NO: 33897 - protein, 118 aa, Artificial Sequence
  Chemically Synthesized
QVQLQESGGGLVQAGGSLRLSCAASGTISYLSGMGWYRQAPGKERELVAGIGYGGITNYADSVKGRFTISRDNAKNTVYLQMNSLKPEDTAVYYCAVYTVYVAELTYWGQGTQVTVSS

SEQ ID NO: 33898 - protein, 122 aa, Artificial Sequence
  Chemically Synthesized
QVQLQESGGGLVQAGGSLRLSCAASGTIFRPTGMGWYRQAPGKERELVAGITDGTSTNYADSVKGRFTISRDNAKNTVYLQMNSLKPEDTAVYYCAAGVRHSDWYYLVHSYWGQGTQVTVSS

SEQ ID NO: 33899 - protein, 118 aa, Artificial Sequence
  Chemically Synthesized
QVQLQESGGGLVQAGGSLRLSCAASGTISPSYIMGWYRQAPGKEREFVATITYGATTYYADSVKGRFTISRDNAKNTVYLQMNSLKPEDTAVYYCAVTYDDYGDYSYWGQGTQVTVSS

SEQ ID NO: 33900 - protein, 118 aa, Artificial Sequence
  Chemically Synthesized
QVQLQESGGGLVQAGGSLRLSCAASGNIFDGRVMGWYRQAPGKEREFVATITAGAITNYADSVKGRFTISRDNAKNTVYLQMNSLKPEDTAVYYCAAYGPFTINLAYWGQGTQVTVSS

SEQ ID NO: 33901 - protein, 118 aa, Artificial Sequence
  Chemically Synthesized
QVQLQESGGGLVQAGGSLRLSCAASGSISNYVTMGWYRQAPGKEREFVAAIGPGTTTNYADSVKGRFTISRDNAKNTVYLQMNSLKPEDTAVYYCAALPDVYFAHEYWGQGTQVTVSS

SEQ ID NO: 33902 - protein, 118 aa, Artificial Sequence
  Chemically Synthesized
QVQLQESGGGLVQAGGSLRLSCAASGTIFLYFVMGWYRQAPGKERELVAAINYGGITNYADSVKGRFTISRDNAKNTVYLQMNSLKPEDTAVYYCAVEERGDDAHRYWGQGTQVTVSS

SEQ ID NO: 33903 - protein, 124 aa, Artificial Sequence
  Chemically Synthesized
QVQLQESGGGLVQAGGSLRLSCAASGTISPDYFMGWYRQAPGKERELVAAIDNGSNTYYADSVKGRFTISRDNAKNTVYLQMNSLKPEDTAVYYCAALGYAPNSRGRASDHPYWGQGTQVTVSS

SEQ ID NO: 33904 - protein, 122 aa, Artificial Sequence
  Chemically Synthesized
QVQLQESGGGLVQAGGSLRLSCAASGTISPYGEMGWYRQAPGKERELVAAIATGGTTNYADSVKGRFTISRDNAKNTVYLQMNSLKPEDTAVYYCAAGREYEDHQAVAYYYWGQGTQVTVSS

SEQ ID NO: 33905 - protein, 118 aa, Artificial Sequence
  Chemically Synthesized
QVQLQESGGGLVQAGGSLRLSCAASGNIFYSYRMGWYRQAPGKEREFVASINEGGITNYADSVKGRFTISRDNAKNTVYLQMNSLKPEDTAVYYCAALYRIGDYHLYWGQGTQVTVSS

SEQ ID NO: 33906 - protein, 126 aa, Artificial Sequence
  Chemically Synthesized
QVQLQESGGGLVQAGGSLRLSCAASGTIFHNDDMGWYRQAPGKERELVAGISTWYYYQYADSVKGRFTISRDNAKNTVYLQMNSLKPEDTAVYYCAVGVGHYQAGRYGFDEYLQYWGQGTQVTVSS

SEQ ID NO: 33907 - protein, 125 aa, Artificial Sequence
  Chemically Synthesized
QVQLQESGGGLVQAGGSLRLSCAASGYISTFRYMGWYRQAPGKEREFVPLLMVVVVPYADSVKGRFTISRDNAKNTVYLQMNSLKPEDTAVYYCAADSPPWYRRYGTYHYYHFYWGQGTQVTVSS

SEQ ID NO: 33908 - protein, 116 aa, Artificial Sequence
  Chemically Synthesized
QVQLQESGGGLVQAGGSLRLSCAASGTISASYIMGWYRQAPGKEREFVASITYGGITNYADSVKGRFTISRDNAKNTVYLQMNSLKPEDTAVYYCAVYYRYYHGYWGQGTQVTVSS

SEQ ID NO: 33909 - protein, 118 aa, Artificial Sequence
  Chemically Synthesized
QVQLQESGGGLVQAGGSLRLSCAASGTISTYPFMGWYRQAPGKERELVATITTGAITYYADSVKGRFTISRDNAKNTVYLQMNSLKPEDTAVYYCAVSVLTAPYYYYWGQGTQVTVSS

SEQ ID NO: 33910 - protein, 125 aa, Artificial Sequence
  Chemically Synthesized
QVQLQESGGGLVQAGGSLRLSCAASGSISAFAYMGWYRQAPGKEREFVAGIGGGGSTYYADSVKGRFTISRDNAKNTVYLQMNSLKPEDTAVYYCAAPSTPYFETTLTTSLPSYWGQGTQVTVSS

SEQ ID NO: 33911 - protein, 118 aa, Artificial Sequence
  Chemically Synthesized
QVQLQESGGGLVQAGGSLRLSCAASGYIFYSTFMGWYRQAPGKERELVAAIAYGTSTYYADSVKGRFTISRDNAKNTVYLQMNSLKPEDTAVYYCAVDYPVDLLHNYWGQGTQVTVSS

SEQ ID NO: 33912 - protein, 122 aa, Artificial Sequence
  Chemically Synthesized
QVQLQESGGGLVQAGGSLRLSCAASGNISYVDYMGWYRQAPGKERELVASIGYGGNTNYADSVKGRFTISRDNAKNTVYLQMNSLKPEDTAVYYCAANALRIYAGRTEHNYWGQGTQVTVSS

SEQ ID NO: 33913 - protein, 117 aa, Artificial Sequence
  Chemically Synthesized
QVQLQESGGGLVQAGGSLRLSCAASGYISLYQGMGWYRQAPGKERELVASIGAGGNTNYADSVKGRFTISRDNAKNTVYLQMNSLKPEDTAVYYCAAIVTYTDYLYWGQGTQVTVSS

SEQ ID NO: 33914 - protein, 125 aa, Artificial Sequence
  Chemically Synthesized
QVQLQESGGGLVQAGGSLRLSCAASGNIFRSNFMGWYRQAPGKEREFVAGINYGTITNYADSVKGRFTISRDNAKNTVYLQMNSLKPEDTAVYYCAVGYRNYPSYLDQSRSCFYWGQGTQVTVSS

SEQ ID NO: 33915 - protein, 117 aa, Artificial Sequence
  Chemically Synthesized
QVQLQESGGGLVQAGGSLRLSCAASGTISRYSYMGWYRQAPGKERELVATIGYGANTNYADSVKGRFTISRDNAKNTVYLQMNSLKPEDTAVYYCAVDSEQRSTLYWGQGTQVTVSS

SEQ ID NO: 33916 - protein, 118 aa, Artificial Sequence
  Chemically Synthesized
QVQLQESGGGLVQAGGSLRLSCAASGYFSNPPEMGWYRQAPGKEREFVAAIAEGGTTNYADSVKGRFTISRDNAKNTVYLQMNSLKPEDTAVYYCAVQHAEGRDHGYWGQGTQVTVSS

SEQ ID NO: 33917 - protein, 117 aa, Artificial Sequence
  Chemically Synthesized
QVQLQESGGGLVQAGGSLRLSCAASGSIFYQIYMGWYRQAPGKERELVASINTGGITYYADSVKGRFTISRDNAKNTVYLQMNSLKPEDTAVYYCASTLLAVWLYYWGQGTQVTVSS

SEQ ID NO: 33918 - protein, 114 aa, Artificial Sequence
  Chemically Synthesized
QVQLQESGGGLVQAGGSLRLSCAASGYIFWYYVMGWYRQAPGKEREFVASISDGTSTNYADSVKGRFTISRDNAKNTVYLQMNSLKPEDTAVYYCAAEDRYQYWGQGTQVTVSS

SEQ ID NO: 33919 - protein, 118 aa, Artificial Sequence
  Chemically Synthesized
QVQLQESGGGLVQAGGSLRLSCAASGSIFGPPYMGWYRQAPGKEREFVASIAGGAITNYADSVKGRFTISRDNAKNTVYLQMNSLKPEDTAVYYCAVLHRAVGVLAYWGQGTQVTVSS

SEQ ID NO: 33920 - protein, 125 aa, Artificial Sequence
  Chemically Synthesized
QVQLQESGGGLVQAGGSLRLSCAASGNISRLYNMGWYRQAPGKERELVAAITVGTTTNYADSVKGRFTISRDNAKNTVYLQMNSLKPEDTAVYYCAVGRYGLIQYDYSYTDHWYWGQGTQVTVSS

SEQ ID NO: 33921 - protein, 122 aa, Artificial Sequence
  Chemically Synthesized
QVQLQESGGGLVQAGGSLRLSCAASGNISGQGIMGWYRQAPGKEREFVAGIGNGGITYYADSVKGRFTISRDNAKNTVYLQMNSLKPEDTAVYYCAVGYYDWHGVTAGYDYWGQGTQVTVSS

SEQ ID NO: 33922 - protein, 125 aa, Artificial Sequence
  Chemically Synthesized
QVQLQESGGGLVQAGGSLRLSCAASGNISRDGMGWYRQAPGKERELVASITNGTNTNYADSVKGRFTISRDNAKNTVYLQMNSLKPEDTAVYYCAADDRNSAHRYWYRYVSFWYWGQGTQVTVSS

SEQ ID NO: 33923 - protein, 118 aa, Artificial Sequence
  Chemically Synthesized
QVQLQESGGGLVQAGGSLRLSCAASGSISSPSAMGWYRQAPGKERELVATISYGGSTNYADSVKGRFTISRDNAKNTVYLQMNSLKPEDTAVYYCAVADYWSDYYDYWGQGTQVTVSS

SEQ ID NO: 33924 - protein, 118 aa, Artificial Sequence
  Chemically Synthesized
QVQLQESGGGLVQAGGSLRLSCAASGYIFYIPSMGWYRQAPGKERELVASINYGATTYYADSVKGRFTISRDNAKNTVYLQMNSLKPEDTAVYYCAALVTYVYVHGYWGQGTQVTVSS

SEQ ID NO: 33925 - protein, 122 aa, Artificial Sequence
  Chemically Synthesized
QVQLQESGGGLVQAGGSLRLSCAASGTIFPSYYMGWYRQAPGKEREFVASITFGGSTYYADSVKGRFTISRDNAKNTVYLQMNSLKPEDTAVYYCAALHHGSRRAIGSHLYWGQGTQVTVSS

SEQ ID NO: 33926 - protein, 126 aa, Artificial Sequence
  Chemically Synthesized
QVQLQESGGGLVQAGGSLRLSCAASGTIFPVAAMGWYRQAPGKERELVAAINDGANTYYADSVKGRFTISRDNAKNTVYLQMNSLKPEDTAVYYCAAVDGAYYYGWDGRYAGHAYWGQGTQVTVSS

SEQ ID NO: 33927 - protein, 116 aa, Artificial Sequence
  Chemically Synthesized
QVQLQESGGGLVQAGGSLRLSCAASGNISSRKAMGWYRQAPGKERELVATINDGSNTYADSVKGRFTISRDNAKNTVYLQMNSLKPEDTAVYYCAALLYAWEHSYWGQGTQVTVSS

SEQ ID NO: 33928 - protein, 118 aa, Artificial Sequence
  Chemically Synthesized
QVQLQESGGGLVQAGGSLRLSCAASGNISVAVYMGWYRQAPGKERELVAAITSGTTTYYADSVKGRFTISRDNAKNTVYLQMNSLKPEDTAVYYCAVGLYYDVTHYYWGQGTQVTVSS

SEQ ID NO: 33929 - protein, 118 aa, Artificial Sequence
  Chemically Synthesized
QVQLQESGGGLVQAGGSLRLSCAASGNISPFDDMGWYRQAPGKERELVASIDDGGYYLYADSVKGRFTISRDNAKNTVYLQMNSLKPEDTAVYYCAVDAQPNWTLDYWGQGTQVTVSS

SEQ ID NO: 33930 - protein, 118 aa, Artificial Sequence
  Chemically Synthesized
QVQLQESGGGLVQAGGSLRLSCAASGNISGDGPMGWYRQAPGKEREFVAGIDDGASTNYADSVKGRFTISRDNAKNTVYLQMNSLKPEDTAVYYCAVVRNYHDAYYYWGQGTQVTVSS

SEQ ID NO: 33931 - protein, 115 aa, Artificial Sequence
  Chemically Synthesized
QVQLQESGGGLVQAGGSLRLSCAASGSISEAIDMGWYRQAPGKEREFVLVPYADSVKGRFTISRDNAKNTVYLQMNSLKPEDTAVYYCAAWVENGGLASTWYRYWGQGTQVTVSS

SEQ ID NO: 33932 - protein, 122 aa, Artificial Sequence
  Chemically Synthesized
QVQLQESGGGLVQAGGSLRLSCAASGTIFGTPQMGWYRQAPGKERELVAGITYGGTTNYADSVKGRFTISRDNAKNTVYLQMNSLKPEDTAVYYCAVEPEDGQEIGTRYQYWGQGTQVTVSS

SEQ ID NO: 33933 - protein, 122 aa, Artificial Sequence
  Chemically Synthesized
QVQLQESGGGLVQAGGSLRLSCAASGTISKDYYMGWYRQAPGKEREFVAAIDQGGNTNYADSVKGRFTISRDNAKNTVYLQMNSLKPEDTAVYYCAVGSYDQVDFGGGHGYWGQGTQVTVSS

SEQ ID NO: 33934 - protein, 122 aa, Artificial Sequence
  Chemically Synthesized
QVQLQESGGGLVQAGGSLRLSCAASGYISGYSSMGWYRQAPGKEREFVATIATGGTTNYADSVKGRFTISRDNAKNTVYLQMNSLKPEDTAVYYCAVYYYVYLQRTRVYSYWGQGTQVTVSS

SEQ ID NO: 33935 - protein, 111 aa, Artificial Sequence
  Chemically Synthesized
QVQLQESGGGLVQAGGSLRLSCAASGTISDVWRMGWYRQAPGKEREFVAAIGDGTSTYYADSVKGRFTISRDNAKNTVYLQMNSLKPEDTAVYYCAYHTYWGQGTQVTVSS

SEQ ID NO: 33936 - protein, 127 aa, Artificial Sequence
  Chemically Synthesized
QVQLQESGGGLVQAGGSLRLSCAASGTISDFPDMGWYRQAPGKERELVAAITRGASTYYADSVKGRFTISRDNAKNTVYLQMNSLKPEDTAVYYCAVLNDAGLLGLYVDPFYKHVYWGQGTQVTVSS

SEQ ID NO: 33937 - protein, 126 aa, Artificial Sequence
  Chemically Synthesized
QVQLQESGGGLVQAGGSLRLSCAASGNISLTVYMGWYRQAPGKERELVAAIATGGITNYADSVKGRFTISRDNAKNTVYLQMNSLKPEDTAVYYCAADLGYYYDGDWAKGSDFRYWGQGTQVTVSS

SEQ ID NO: 33938 - protein, 118 aa, Artificial Sequence
  Chemically Synthesized
QVQLQESGGGLVQAGGSLRLSCAASGNISPYLDMGWYRQAPGKEREFVAAISSGGSTYYADSVKGRFTISRDNAKNTVYLQMNSLKPEDTAVYYCAAGYDPQYIFIYWGQGTQVTVSS

SEQ ID NO: 33939 - protein, 118 aa, Artificial Sequence
  Chemically Synthesized
QVQLQESGGGLVQAGGSLRLSCAASGSIFRTGYMGWYRQAPGKERELVATISYGASTYYADSVKGRFTISRDNAKNTVYLQMNSLKPEDTAVYYCAVWDHSHYGYYYWGQGTQVTVSS

SEQ ID NO: 33940 - protein, 110 aa, Artificial Sequence
  Chemically Synthesized
QVQLQESGGGLVQAGGSLRLSCAASGYIFDTPGMGWYRQAPGKEREFVAAISYGASTYYADSVKGRFTISRDNAKNTVYLQMNSLKPEDTAVYYCAVLYWGQGTQVTVSS

SEQ ID NO: 33941 - protein, 122 aa, Artificial Sequence
  Chemically Synthesized
QVQLQESGGGLVQAGGSLRLSCAASGSISTGTDMGWYRQAPGKEREFVAAISSGASTYYADSVKGRFTISRDNAKNTVYLQMNSLKPEDTAVYYCAVARRTRWVTWRRHNYWGQGTQVTVSS

SEQ ID NO: 33942 - protein, 122 aa, Artificial Sequence
  Chemically Synthesized
QVQLQESGGGLVQAGGSLRLSCAASGYISPVTAMGWYRQAPGKEREFVAAINVGGTTNYADSVKGRFTISRDNAKNTVYLQMNSLKPEDTAVYYCAVNHVRHATGYSPHYYWGQGTQVTVSS

SEQ ID NO: 33943 - protein, 122 aa, Artificial Sequence
  Chemically Synthesized
QVQLQESGGGLVQAGGSLRLSCAASGNIFAVDGMGWYRQAPGKEREFVAAIDYGTNTNYADSVKGRFTISRDNAKNTVYLQMNSLKPEDTAVYYCAATWYIYAYDDTYYDYWGQGTQVTVSS

SEQ ID NO: 33944 - protein, 122 aa, Artificial Sequence
  Chemically Synthesized
QVQLQESGGGLVQAGGSLRLSCAASGYISTRTVMGWYRQAPGKERELVAAINAGTNTYYADSVKGRFTISRDNAKNTVYLQMNSLKPEDTAVYYCAVLPDYGTARAVGHAYWGQGTQVTVSS

SEQ ID NO: 33945 - protein, 118 aa, Artificial Sequence
  Chemically Synthesized
QVQLQESGGGLVQAGGSLRLSCAASGTIFARAAMGWYRQAPGKEREFVAAIGSGGNTYYADSVKGRFTISRDNAKNTVYLQMNSLKPEDTAVYYCAVKRDDNARHVYWGQGTQVTVSS

SEQ ID NO: 33946 - protein, 118 aa, Artificial Sequence
  Chemically Synthesized
QVQLQESGGGLVQAGGSLRLSCAASGYISRRGGFMGWYRQAPGKEREFVAAIGPGGSTYYADSVKGRFTISRDNAKNTVYLQMNSLKPEDTAVYYCAAGYANRALRYWGQGTQVTVSS

SEQ ID NO: 33947 - protein, 122 aa, Artificial Sequence
  Chemically Synthesized
QVQLQESGGGLVQAGGSLRLSCAASGSIFTTYAMGWYRQAPGKERELVAAIGYGSTTYYADSVKGRFTISRDNAKNTVYLQMNSLKPEDTAVYYCAVSYYLYGTDSGVYVYWGQGTQVTVSS

SEQ ID NO: 33948 - protein, 118 aa, Artificial Sequence
  Chemically Synthesized
QVQLQESGGGLVQAGGSLRLSCAASGTIFGYYVMGWYRQAPGKERELVAGIGWGGITYYADSVKGRFTISRDNAKNTVYLQMNSLKPEDTAVYYCAAVRTTSGSYWYWGQGTQVTVSS

SEQ ID NO: 33949 - protein, 118 aa, Artificial Sequence
  Chemically Synthesized
QVQLQESGGGLVQAGGSLRLSCAASGTIFGTDAMGWYRQAPGKEREFVATITNGASTNYADSVKGRFTISRDNAKNTVYLQMNSLKPEDTAVYYCAAGDYSNNPLAYWGQGTQVTVSS

SEQ ID NO: 33950 - protein, 118 aa, Artificial Sequence
  Chemically Synthesized
QVQLQESGGGLVQAGGSLRLSCAASGTIFYRKTMGWYRQAPGKERELVAAIAGGAITNYADSVKGRFTISRDNAKNTVYLQMNSLKPEDTAVYYCAADDRSYGGHGYWGQGTQVTVSS

SEQ ID NO: 33951 - protein, 122 aa, Artificial Sequence
  Chemically Synthesized
QVQLQESGGGLVQAGGSLRLSCAASGNIFDELDMGWYRQAPGKERELVATITSGTTTYYADSVKGRFTISRDNAKNTVYLQMNSLKPEDTAVYYCAVWGEGDAATYEILPYWGQGTQVTVSS

SEQ ID NO: 33952 - protein, 118 aa, Artificial Sequence
  Chemically Synthesized
QVQLQESGGGLVQAGGSLRLSCAASGSIFTDYVMGWYRQAPGKERELVAAINSGSSTYYADSVKGRFTISRDNAKNTVYLQMNSLKPEDTAVYYCAVPVYATIRYLYWGQGTQVTVSS

SEQ ID NO: 33953 - protein, 126 aa, Artificial Sequence
  Chemically Synthesized
QVQLQESGGGLVQAGGSLRLSCAASGTISGPYTMGWYRQAPGKEREFVAGIGGGSNTNYADSVKGRFTISRDNAKNTVYLQMNSLKPEDTAVYYCAVYLLGLAGPDAHGGWPYRYWGQGTQVTVSS

SEQ ID NO: 33954 - protein, 120 aa, Artificial Sequence
  Chemically Synthesized
QVQLQESGGGLVQAGGSLRLSCAASGTIFFDFMGWYRQAPGKEREFVASIGYGASTNYADSVKGRFTISRDNAKNTVYLQMNSLKPEDTAVYYCAAYAEAALDASLSLYWGQGTQVTVSS

SEQ ID NO: 33955 - protein, 122 aa, Artificial Sequence
  Chemically Synthesized
QVQLQESGGGLVQAGGSLRLSCAASGYIFAYTYMGWYRQAPGKEREFVAAIDQGTNTYYADSVKGRFTISRDNAKNTVYLQMNSLKPEDTAVYYCAVFGFWPYFTRTYLRYWGQGTQVTVSS

SEQ ID NO: 33956 - protein, 117 aa, Artificial Sequence
  Chemically Synthesized
QVQLQESGGGLVQAGGSLRLSCAASGNISNYTDMGWYRQAPGKERELVASISSVVIPYADSVKGRFTISRDNAKNTVYLQMNSLKPEDTAVYYCAVQARWDAGLRYWGQGTQVTVSS

SEQ ID NO: 33957 - protein, 118 aa, Artificial Sequence
  Chemically Synthesized
QVQLQESGGGLVQAGGSLRLSCAASGSISDSYSMGWYRQAPGKERELVAAITHGASTYYADSVKGRFTISRDNAKNTVYLQMNSLKPEDTAVYYCAVDVFALVPHQYWGQGTQVTVSS

SEQ ID NO: 33958 - protein, 122 aa, Artificial Sequence
  Chemically Synthesized
QVQLQESGGGLVQAGGSLRLSCAASGSIFDDLPMGWYRQAPGKERELVASISYGGITNYADSVKGRFTISRDNAKNTVYLQMNSLKPEDTAVYYCAVYYPFDYYIALSHTYWGQGTQVTVSS

SEQ ID NO: 33959 - protein, 126 aa, Artificial Sequence
  Chemically Synthesized
QVQLQESGGGLVQAGGSLRLSCAASGYIFHDVVMGWYRQAPGKEREFVAGIAYGATTNYADSVKGRFTISRDNAKNTVYLQMNSLKPEDTAVYYCAAEGDFYYRNPANDTLPYGYWGQGTQVTVSS

SEQ ID NO: 33960 - protein, 118 aa, Artificial Sequence
  Chemically Synthesized
QVQLQESGGGLVQAGGSLRLSCAASGNIFQKKAMGWYRQAPGKERELVAAITTGTNTYYADSVKGRFTISRDNAKNTVYLQMNSLKPEDTAVYYCAAGRAYSYRLGYWGQGTQVTVSS

SEQ ID NO: 33961 - protein, 116 aa, Artificial Sequence
  Chemically Synthesized
QVQLQESGGGLVQAGGSLRLSCAASGTISNLWTMGWYRQAPGKEREFVAAISYGGITNYADSVKGRFTISRDNAKNTVYLQMNSLKPEDTAVYYCAAAYLVLYYYWGQGTQVTVSS

SEQ ID NO: 33962 - protein, 118 aa, Artificial Sequence
  Chemically Synthesized
QVQLQESGGGLVQAGGSLRLSCAASGSIFGAIAMGWYRQAPGKEREFVATIGDGSSTYYADSVKGRFTISRDNAKNTVYLQMNSLKPEDTAVYYCAVYIVNLDYLLYWGQGTQVTVSS

SEQ ID NO: 33963 - protein, 122 aa, Artificial Sequence
  Chemically Synthesized
QVQLQESGGGLVQAGGSLRLSCAASGSIFYWAYMGWYRQAPGKEREFVASINVGTITNYADSVKGRFTISRDNAKNTVYLQMNSLKPEDTAVYYCAVYYPLDTGRRLDHIYWGQGTQVTVSS

SEQ ID NO: 33964 - protein, 122 aa, Artificial Sequence
  Chemically Synthesized
QVQLQESGGGLVQAGGSLRLSCAASGYIFYYGSMGWYRQAPGKERELVATIDYGAITYYADSVKGRFTISRDNAKNTVYLQMNSLKPEDTAVYYCAVYRRTRVGDDVYFSYWGQGTQVTVSS

SEQ ID NO: 33965 - protein, 118 aa, Artificial Sequence
  Chemically Synthesized
QVQLQESGGGLVQAGGSLRLSCAASGYISYIQYMGWYRQAPGKEREFVAAIDPGGNTYYADSVKGRFTISRDNAKNTVYLQMNSLKPEDTAVYYCAVRRGWRYNFGYWGQGTQVTVSS

SEQ ID NO: 33966 - protein, 126 aa, Artificial Sequence
  Chemically Synthesized
QVQLQESGGGLVQAGGSLRLSCAASGSISPAYSMGWYRQAPGKEREFVATIGQGTNTYYADSVKGRFTISRDNAKNTVYLQMNSLKPEDTAVYYCAAGNRLSDYLWDYWYSAHYYWGQGTQVTVSS

SEQ ID NO: 33967 - protein, 122 aa, Artificial Sequence
  Chemically Synthesized
QVQLQESGGGLVQAGGSLRLSCAASGYISEDGPMGWYRQAPGKEREFVAAIAYGSITNYADSVKGRFTISRDNAKNTVYLQMNSLKPEDTAVYYCAVSAPAGDGPDGDHLYWGQGTQVTVSS

SEQ ID NO: 33968 - protein, 122 aa, Artificial Sequence
  Chemically Synthesized
QVQLQESGGGLVQAGGSLRLSCAASGSISSDYFMGWYRQAPGKEREFVASIGLGSSTNYADSVKGRFTISRDNAKNTVYLQMNSLKPEDTAVYYCAALIDGADGLVAYYYYWGQGTQVTVSS

SEQ ID NO: 33969 - protein, 126 aa, Artificial Sequence
  Chemically Synthesized
QVQLQESGGGLVQAGGSLRLSCAASGYISDYAYMGWYRQAPGKERELVAAISVGTITYYADSVKGRFTISRDNAKNTVYLQMNSLKPEDTAVYYCAVDNAGLYIENAAWVYNHVYWGQGTQVTVSS

SEQ ID NO: 33970 - protein, 126 aa, Artificial Sequence
  Chemically Synthesized
QVQLQESGGGLVQAGGSLRLSCAASGSISRYSLMGWYRQAPGKERELVAGIAQGANTNYADSVKGRFTISRDNAKNTVYLQMNSLKPEDTAVYYCAVRPAWGGNYYRWDDSGYSYWGQGTQVTVSS

SEQ ID NO: 33971 - protein, 119 aa, Artificial Sequence
  Chemically Synthesized
QVQLQESGGGLVQAGGSLRLSCAASGSIFSYTYMGWYRQAPGKERELVASIAFGGTTNYADSVKGRFTISRDNAKNTVYLQMNSLKPEDTAVYYCAVNTNGYADYSFYWGQGTQVTVSS

SEQ ID NO: 33972 - protein, 122 aa, Artificial Sequence
  Chemically Synthesized
QVQLQESGGGLVQAGGSLRLSCAASGYISQGTDMGWYRQAPGKERELVAGIAEGANTNYADSVKGRFTISRDNAKNTVYLQMNSLKPEDTAVYYCAATALTDYIHYAIYNYWGQGTQVTVSS

SEQ ID NO: 33973 - protein, 118 aa, Artificial Sequence
  Chemically Synthesized
QVQLQESGGGLVQAGGSLRLSCAASGYISSPLAMGWYRQAPGKERELVAGIGYGSITYYADSVKGRFTISRDNAKNTVYLQMNSLKPEDTAVYYCAVSSYRYQFYFYWGQGTQVTVSS

SEQ ID NO: 33974 - protein, 121 aa, Artificial Sequence
  Chemically Synthesized
QVQLQESGGGLVQAGGSLRLSCAASGNISPHANMGWYRQAPGKERELVATRYYQYADSVKGRFTISRDNAKNTVYLQMNSLKPEDTAVYYCAARDSDDPGYLIRKVLLLYWGQGTQVTVSS

SEQ ID NO: 33975 - protein, 127 aa, Artificial Sequence
  Chemically Synthesized
QVQLQESGGGLVQAGGSLRLSCAASGTISGVYDMGWYRQAPGKEREFVATISRGSNTNYADSVKGRFTISRDNAKNTVYLQMNSLKPEDTAVYYCAAYGYVLTYRYLGHYPFTFAYWGQGTQVTVSS

SEQ ID NO: 33976 - protein, 122 aa, Artificial Sequence
  Chemically Synthesized
QVQLQESGGGLVQAGGSLRLSCAASGYISVYAYMGWYRQAPGKEREFVAGITFGATTYYADSVKGRFTISRDNAKNTVYLQMNSLKPEDTAVYYCAAYSQEDYPQYVHLYYWGQGTQVTVSS

SEQ ID NO: 33977 - protein, 118 aa, Artificial Sequence
  Chemically Synthesized
QVQLQESGGGLVQAGGSLRLSCAASGSISTYGVMGWYRQAPGKEREFVAGINTGGSTNYADSVKGRFTISRDNAKNTVYLQMNSLKPEDTAVYYCAVVFWLIIYHVYWGQGTQVTVSS

SEQ ID NO: 33978 - protein, 122 aa, Artificial Sequence
  Chemically Synthesized
QVQLQESGGGLVQAGGSLRLSCAASGTISATYYMGWYRQAPGKERELVASIGYGGTTYYADSVKGRFTISRDNAKNTVYLQMNSLKPEDTAVYYCAAQSGYTSERYSIYSYWGQGTQVTVSS

SEQ ID NO: 33979 - protein, 118 aa, Artificial Sequence
  Chemically Synthesized
QVQLQESGGGLVQAGGSLRLSCAASGYISRAATMGWYRQAPGKEREFVAAMVLLPYADSVKGRFTISRDNAKNTVYLQMNSLKPEDTAVYYCAATSGFSTLTVLTIYWGQGTQVTVSS

SEQ ID NO: 33980 - protein, 118 aa, Artificial Sequence
  Chemically Synthesized
QVQLQESGGGLVQAGGSLRLSCAASGNISYGILMGWYRQAPGKERELVATINIGASTYYADSVKGRFTISRDNAKNTVYLQMNSLKPEDTAVYYCAAPPSANSPFYYWGQGTQVTVSS

SEQ ID NO: 33981 - protein, 122 aa, Artificial Sequence
  Chemically Synthesized
QVQLQESGGGLVQAGGSLRLSCAASGNIFNDGDMGWYRQAPGKERELVAGIAYGTSTYYADSVKGRFTISRDNAKNTVYLQMNSLKPEDTAVYYCAVDQEYIWYYSDYLYYWGQGTQVTVSS

SEQ ID NO: 33982 - protein, 122 aa, Artificial Sequence
  Chemically Synthesized
QVQLQESGGGLVQAGGSLRLSCAASGYIFRYEYMGWYRQAPGKERELVATIGYGSNTNYADSVKGRFTISRDNAKNTVYLQMNSLKPEDTAVYYCAAKVDTNGSDAGDYGYWGQGTQVTVSS

SEQ ID NO: 33983 - protein, 120 aa, Artificial Sequence
  Chemically Synthesized
QVQLQESGGGLVQAGGSLRLSCAASGTIFASVMGWYRQAPGKERELVAGIGTGSITNYADSVKGRFTISRDNAKNTVYLQMNSLKPEDTAVYYCAASRDVDYHRYSFDYWGQGTQVTVSS

SEQ ID NO: 33984 - protein, 126 aa, Artificial Sequence
  Chemically Synthesized
QVQLQESGGGLVQAGGSLRLSCAASGYISSWSAMGWYRQAPGKEREFVASISGGATTNYADSVKGRFTISRDNAKNTVYLQMNSLKPEDTAVYYCAVSSTTVSYRRPYDLLGYYYWGQGTQVTVSS

SEQ ID NO: 33985 - protein, 126 aa, Artificial Sequence
  Chemically Synthesized
QVQLQESGGGLVQAGGSLRLSCAASGTIFGPTRMGWYRQAPGKEREFVAGIANGTSTYYADSVKGRFTISRDNAKNTVYLQMNSLKPEDTAVYYCAVHVLAPYDVVYVYYRYHVYWGQGTQVTVSS

SEQ ID NO: 33986 - protein, 122 aa, Artificial Sequence
  Chemically Synthesized
QVQLQESGGGLVQAGGSLRLSCAASGSISPYVTMGWYRQAPGKERELVAGITTGGTTYYADSVKGRFTISRDNAKNTVYLQMNSLKPEDTAVYYCAAGWRGRYYYGSGYRYWGQGTQVTVSS

SEQ ID NO: 33987 - protein, 126 aa, Artificial Sequence
  Chemically Synthesized
QVQLQESGGGLVQAGGSLRLSCAASGYISVYAYMGWYRQAPGKERELVAGITDGSNTYYADSVKGRFTISRDNAKNTVYLQMNSLKPEDTAVYYCAVLYPPTERGKYYSATRYRYWGQGTQVTVSS

SEQ ID NO: 33988 - protein, 117 aa, Artificial Sequence
  Chemically Synthesized
QVQLQESGGGLVQAGGSLRLSCAASGNISYYTAMGWYRQAPGKERELVASITDGSNTNYADSVKGRFTISRDNAKNTVYLQMNSLKPEDTAVYYCAAYSVKFTSFYWGQGTQVTVSS

SEQ ID NO: 33989 - protein, 118 aa, Artificial Sequence
  Chemically Synthesized
QVQLQESGGGLVQAGGSLRLSCAASGTIFLYYYMGWYRQAPGKEREFVAAIGPGSTTNYADSVKGRFTISRDNAKNTVYLQMNSLKPEDTAVYYCAADEIYYVALEYWGQGTQVTVSS

SEQ ID NO: 33990 - protein, 122 aa, Artificial Sequence
  Chemically Synthesized
QVQLQESGGGLVQAGGSLRLSCAASGTISYYRTMGWYRQAPGKEREFVATISNGASTYYADSVKGRFTISRDNAKNTVYLQMNSLKPEDTAVYYCAVRRRRYPRLPYYHVYWGQGTQVTVSS

SEQ ID NO: 33991 - protein, 118 aa, Artificial Sequence
  Chemically Synthesized
QVQLQESGGGLVQAGGSLRLSCAASGTISQPGDMGWYRQAPGKERELVATIGYGTTTYYADSVKGRFTISRDNAKNTVYLQMNSLKPEDTAVYYCAASQPSQDLFVYWGQGTQVTVSS

SEQ ID NO: 33992 - protein, 118 aa, Artificial Sequence
  Chemically Synthesized
QVQLQESGGGLVQAGGSLRLSCAASGYIFPSYIMGWYRQAPGKERELVAAIGYGGNTYYADSVKGRFTISRDNAKNTVYLQMNSLKPEDTAVYYCAAAYRWWNAYSYWGQGTQVTVSS

SEQ ID NO: 33993 - protein, 118 aa, Artificial Sequence
  Chemically Synthesized
QVQLQESGGGLVQAGGSLRLSCAASGTIFRGDGMGWYRQAPGKERELVAAINSGSSTNYADSVKGRFTISRDNAKNTVYLQMNSLKPEDTAVYYCAAATVYGYVLGYWGQGTQVTVSS

SEQ ID NO: 33994 - protein, 122 aa, Artificial Sequence
  Chemically Synthesized
QVQLQESGGGLVQAGGSLRLSCAASGTISREVNMGWYRQAPGKERELVAGISNGTTTYYADSVKGRFTISRDNAKNTVYLQMNSLKPEDTAVYYCAAPQPYADDRASSHLYWGQGTQVTVSS

SEQ ID NO: 33995 - protein, 118 aa, Artificial Sequence
  Chemically Synthesized
QVQLQESGGGLVQAGGSLRLSCAASGTISYFHTMGWYRQAPGKERELVAGIGTGGNTNYADSVKGRFTISRDNAKNTVYLQMNSLKPEDTAVYYCAVRTDYVRPYRYWGQGTQVTVSS

SEQ ID NO: 33996 - protein, 126 aa, Artificial Sequence
  Chemically Synthesized
QVQLQESGGGLVQAGGSLRLSCAASGSISRYSYMGWYRQAPGKEREFVAAIAGGASTYYADSVKGRFTISRDNAKNTVYLQMNSLKPEDTAVYYCAARGDERSTAPSYHLGVHWYWGQGTQVTVSS

SEQ ID NO: 33997 - protein, 118 aa, Artificial Sequence
  Chemically Synthesized
QVQLQESGGGLVQAGGSLRLSCAASGYISLTDDMGWYRQAPGKERELVAAITRGGTTYYADSVKGRFTISRDNAKNTVYLQMNSLKPEDTAVYYCAVENHSAPSLNYWGQGTQVTVSS

SEQ ID NO: 33998 - protein, 118 aa, Artificial Sequence
  Chemically Synthesized
QVQLQESGGGLVQAGGSLRLSCAASGSISYSAPMGWYRQAPGKERELVAGIDIGASTYYADSVKGRFTISRDNAKNTVYLQMNSLKPEDTAVYYCAVTYEWLPFHPYWGQGTQVTVSS

SEQ ID NO: 33999 - protein, 125 aa, Artificial Sequence
  Chemically Synthesized
QVQLQESGGGLVQAGGSLRLSCAASGYISYTLYMGWYRQAPGKERELVAAIGLGGITYYADSVKGRFTISRDNAKNTVYLQMNSLKPEDTAVYYCAAIYPSVPYQWKYYLHFAYWGQGTQVTVSS

SEQ ID NO: 34000 - protein, 126 aa, Artificial Sequence
  Chemically Synthesized
QVQLQESGGGLVQAGGSLRLSCAASGTIFTDWYMGWYRQAPGKERELVAAINDGANTNYADSVKGRFTISRDNAKNTVYLQMNSLKPEDTAVYYCAAIGWTYADALVVIDYYLWYWGQGTQVTVSS

SEQ ID NO: 34001 - protein, 122 aa, Artificial Sequence
  Chemically Synthesized
QVQLQESGGGLVQAGGSLRLSCAASGYIFDDVGMGWYRQAPGKERELVAGISQGSSTNYADSVKGRFTISRDNAKNTVYLQMNSLKPEDTAVYYCAVGFPYAIGTGYYLGYWGQGTQVTVSS

SEQ ID NO: 34002 - protein, 126 aa, Artificial Sequence
  Chemically Synthesized
QVQLQESGGGLVQAGGSLRLSCAASGTIFWSYIMGWYRQAPGKEREFVAGIALGAITYYADSVKGRFTISRDNAKNTVYLQMNSLKPEDTAVYYCAAGYYYKRYAEWETYRGFDYWGQGTQVTVSS

SEQ ID NO: 34003 - protein, 120 aa, Artificial Sequence
  Chemically Synthesized
QVQLQESGGGLVQAGGSLRLSCAASGTISTGYFMGWYRQAPGKERELVAGIGDGTSTYYADSVKGRFTISRDNAKNTVYLQMNSLKPEDTAVYYCAVRYYRHWSRHYGYWGQGTQVTVSS

SEQ ID NO: 34004 - protein, 122 aa, Artificial Sequence
  Chemically Synthesized
QVQLQESGGGLVQAGGSLRLSCAASGTIFPRGYMGWYRQAPGKERELVAAISGGANTYYADSVKGRFTISRDNAKNTVYLQMNSLKPEDTAVYYCAADDHPYAGESYYHLYWGQGTQVTVSS

SEQ ID NO: 34005 - protein, 126 aa, Artificial Sequence
  Chemically Synthesized
QVQLQESGGGLVQAGGSLRLSCAASGNISWRRNMGWYRQAPGKERELVATITDGGNTNYADSVKGRFTISRDNAKNTVYLQMNSLKPEDTAVYYCAVDYIRDDLIWAFYVHYHPYWGQGTQVTVSS

SEQ ID NO: 34006 - protein, 122 aa, Artificial Sequence
  Chemically Synthesized
QVQLQESGGGLVQAGGSLRLSCAASGYIFTHATMGWYRQAPGKERELVAAITNGTSTYYADSVKGRFTISRDNAKNTVYLQMNSLKPEDTAVYYCAAQRPWLWRPYRYHFYWGQGTQVTVSS

SEQ ID NO: 34007 - protein, 111 aa, Artificial Sequence
  Chemically Synthesized
QVQLQESGGGLVQAGGSLRLSCAASGNIFYSPIMGWYRQAPGKERELVATIALGASTYYADSVKGRFTISRDNAKNTVYLQMNSLKPEDTAVYYCAVYYYWGQGTQVTVSS

SEQ ID NO: 34008 - protein, 125 aa, Artificial Sequence
  Chemically Synthesized
QVQLQESGGGLVQAGGSLRLSCAASGYISYTYMGWYRQAPGKEREFVAAIADGTNTYYADSVKGRFTISRDNAKNTVYLQMNSLKPEDTAVYYCAATDKRYWTYVRRFLQGHSYWGQGTQVTVSS

SEQ ID NO: 34009 - protein, 118 aa, Artificial Sequence
  Chemically Synthesized
QVQLQESGGGLVQAGGSLRLSCAASGTIFPNYVMGWYRQAPGKEREFVASIGIGTNTYYADSVKGRFTISRDNAKNTVYLQMNSLKPEDTAVYYCAATDSYFDYHTYWGQGTQVTVSS

SEQ ID NO: 34010 - protein, 117 aa, Artificial Sequence
  Chemically Synthesized
QVQLQESGGGLVQAGGSLRLSCAASGTISPPYYMGWYRQAPGKERELVAGIGSVLIPYADSVKGRFTISRDNAKNTVYLQMNSLKPEDTAVYYCAVNAWDDTAFDYWGQGTQVTVSS

SEQ ID NO: 34011 - protein, 116 aa, Artificial Sequence
  Chemically Synthesized
QVQLQESGGGLVQAGGSLRLSCAASGSISDRNDMGWYRQAPGKERELVAGIDDGSNTNYADSVKGRFTISRDNAKNTVYLQMNSLKPEDTAVYYCALDTDLNFPYWGQGTQVTVSS

SEQ ID NO: 34012 - protein, 118 aa, Artificial Sequence
  Chemically Synthesized
QVQLQESGGGLVQAGGSLRLSCAASGTIFRSWSMGWYRQAPGKEREFVAAITGGTITYYADSVKGRFTISRDNAKNTVYLQMNSLKPEDTAVYYCAVDTYLFISFRYWGQGTQVTVSS

SEQ ID NO: 34013 - protein, 117 aa, Artificial Sequence
  Chemically Synthesized
QVQLQESGGGLVQAGGSLRLSCAASGSIFSVKDMGWYRQAPGKEREFVAVLIVVVVPYADSVKGRFTISRDNAKNTVYLQMNSLKPEDTAVYYCAARQLSNQYHDYWGQGTQVTVSS

SEQ ID NO: 34014 - protein, 117 aa, Artificial Sequence
  Chemically Synthesized
QVQLQESGGGLVQAGGSLRLSCAASGNIFLDSMGWYRQAPGKEREFVAAIAGGTSTYYADSVKGRFTISRDNAKNTVYLQMNSLKPEDTAVYYCAVVRWTKYQFDYWGQGTQVTVSS

SEQ ID NO: 34015 - protein, 117 aa, Artificial Sequence
  Chemically Synthesized
QVQLQESGGGLVQAGGSLRLSCAASGNIFHRYPMGWYRQAPGKEREFVASINRGANTYYADSVKGRFTISRDNAKNTVYLQMNSLKPEDTAVYYCAVSSRKLVTLYWGQGTQVTVSS

SEQ ID NO: 34016 - protein, 118 aa, Artificial Sequence
  Chemically Synthesized
QVQLQESGGGLVQAGGSLRLSCAASGTIFDTSGMGWYRQAPGKEREFVATIGFGGNTNYADSVKGRFTISRDNAKNTVYLQMNSLKPEDTAVYYCAVDTGYIDHYDYWGQGTQVTVSS

SEQ ID NO: 34017 - protein, 118 aa, Artificial Sequence
  Chemically Synthesized
QVQLQESGGGLVQAGGSLRLSCAASGNIFVVLYMGWYRQAPGKEREFVAAIAYGTTTYYADSVKGRFTISRDNAKNTVYLQMNSLKPEDTAVYYCAVAYWETRHHTYWGQGTQVTVSS

SEQ ID NO: 34018 - protein, 117 aa, Artificial Sequence
  Chemically Synthesized
QVQLQESGGGLVQAGGSLRLSCAASGYISGYYGMGWYRQAPGKEREFVATISYGSSTYYADSVKGRFTISRDNAKNTVYLQMNSLKPEDTAVYYCAVSSTNVTTIYWGQGTQVTVSS

SEQ ID NO: 34019 - protein, 125 aa, Artificial Sequence
  Chemically Synthesized
QVQLQESGGGLVQAGGSLRLSCAASGNIFDAGGMGWYRQAPGKERELVAAINYGSIPYADSVKGRFTISRDNAKNTVYLQMNSLKPEDTAVYYCAALQGSDAYAHQVGVDAHYYWGQGTQVTVSS

SEQ ID NO: 34020 - protein, 117 aa, Artificial Sequence
  Chemically Synthesized
QVQLQESGGGLVQAGGSLRLSCAASGSIFVVRMGWYRQAPGKEREFVAAIDAGATTYYADSVKGRFTISRDNAKNTVYLQMNSLKPEDTAVYYCAAINRIDETFVYWGQGTQVTVSS

SEQ ID NO: 34021 - protein, 122 aa, Artificial Sequence
  Chemically Synthesized
QVQLQESGGGLVQAGGSLRLSCAASGSISYRPTMGWYRQAPGKERELVASIASGGSTYYADSVKGRFTISRDNAKNTVYLQMNSLKPEDTAVYYCAVLTNYDDEYSQYHPYWGQGTQVTVSS

SEQ ID NO: 34022 - protein, 118 aa, Artificial Sequence
  Chemically Synthesized
QVQLQESGGGLVQAGGSLRLSCAASGSIFFGHQMGWYRQAPGKEREFVAGISYGGITYYADSVKGRFTISRDNAKNTVYLQMNSLKPEDTAVYYCAVDYVYAVDFDYWGQGTQVTVSS

SEQ ID NO: 34023 - protein, 118 aa, Artificial Sequence
  Chemically Synthesized
QVQLQESGGGLVQAGGSLRLSCAASGYISGSWRMGWYRQAPGKEREFVATIDTGASTNYADSVKGRFTISRDNAKNTVYLQMNSLKPEDTAVYYCAVLLYDRDAYPYWGQGTQVTVSS

SEQ ID NO: 34024 - protein, 122 aa, Artificial Sequence
  Chemically Synthesized
QVQLQESGGGLVQAGGSLRLSCAASGNISDDLPMGWYRQAPGKERELVATINVGANTNYADSVKGRFTISRDNAKNTVYLQMNSLKPEDTAVYYCAADTNTVDRPYLPFGYWGQGTQVTVSS

SEQ ID NO: 34025 - protein, 121 aa, Artificial Sequence
  Chemically Synthesized
QVQLQESGGGLVQAGGSLRLSCAASGNISSGFDMGWYRQAPGKERELVAAINDGGTTYYADSVKGRFTISRDNAKNTVYLQMNSLKPEDTAVYYCAAYQGGHSRRTVSLYWGQGTQVTVSS

SEQ ID NO: 34026 - protein, 117 aa, Artificial Sequence
  Chemically Synthesized
QVQLQESGGGLVQAGGSLRLSCAASGNIFAPSTMGWYRQAPGKERELLPVLLLVVVPYADSVKGRFTISRDNAKNTVYLQMNSLKPEDTAVYYCAVAATYGGGLSYWGQGTQVTVSS

SEQ ID NO: 34027 - protein, 122 aa, Artificial Sequence
  Chemically Synthesized
QVQLQESGGGLVQAGGSLRLSCAASGNISGIVYMGWYRQAPGKEREFVAGIGLGGSTNYADSVKGRFTISRDNAKNTVYLQMNSLKPEDTAVYYCAVGWENTRTYDERHGYWGQGTQVTVSS

SEQ ID NO: 34028 - protein, 122 aa, Artificial Sequence
  Chemically Synthesized
QVQLQESGGGLVQAGGSLRLSCAASGNISRAELMGWYRQAPGKEREFVAGIGSGSSTYYADSVKGRFTISRDNAKNTVYLQMNSLKPEDTAVYYCAAQVDHAYRNYGGHGYWGQGTQVTVSS

SEQ ID NO: 34029 - protein, 118 aa, Artificial Sequence
  Chemically Synthesized
QVQLQESGGGLVQAGGSLRLSCAASGSIFRTSHMGWYRQAPGKEREFVATISDGTSTYYADSVKGRFTISRDNAKNTVYLQMNSLKPEDTAVYYCAAFAGYFSYHGYWGQGTQVTVSS

SEQ ID NO: 34030 - protein, 110 aa, Artificial Sequence
  Chemically Synthesized
QVQLQESGGGLVQAGGSLRLSCAASGNIFTSLHMGWYRQAPGKERELVASISSGGTTNYADSVKGRFTISRDNAKNTVYLQMNSLKPEDTAVYYCAHGYWGQGTQVTVSS

SEQ ID NO: 34031 - protein, 117 aa, Artificial Sequence
  Chemically Synthesized
QVQLQESGGGLVQAGGSLRLSCAASGNIFTDCMGWYRQAPGKERELVASISVGGITYYADSVKGRFTISRDNAKNTVYLQMNSLKPEDTAVYYCAVPSYGASGLYYWGQGTQVTVSS

SEQ ID NO: 34032 - protein, 122 aa, Artificial Sequence
  Chemically Synthesized
QVQLQESGGGLVQAGGSLRLSCAASGNISGAGYMGWYRQAPGKERELVAAIAAGATTNYADSVKGRFTISRDNAKNTVYLQMNSLKPEDTAVYYCAVRVYRGLYGVDAHLYWGQGTQVTVSS

SEQ ID NO: 34033 - protein, 118 aa, Artificial Sequence
  Chemically Synthesized
QVQLQESGGGLVQAGGSLRLSCAASGSIFDRHGMGWYRQAPGKEREFVATIADGTNTYYADSVKGRFTISRDNAKNTVYLQMNSLKPEDTAVYYCAVAQQLGSQFAYWGQGTQVTVSS

SEQ ID NO: 34034 - protein, 118 aa, Artificial Sequence
  Chemically Synthesized
QVQLQESGGGLVQAGGSLRLSCAASGNISTRWAMGWYRQAPGKEREFVASIDDGGNTYYADSVKGRFTISRDNAKNTVYLQMNSLKPEDTAVYYCAADWYEYTHLVYWGQGTQVTVSS

SEQ ID NO: 34035 - protein, 117 aa, Artificial Sequence
  Chemically Synthesized
QVQLQESGGGLVQAGGSLRLSCAASGNIFDPDMGWYRQAPGKERELVAGITDGSNTNYADSVKGRFTISRDNAKNTVYLQMNSLKPEDTAVYYCAAYAVPARGYPYWGQGTQVTVSS

SEQ ID NO: 34036 - protein, 118 aa, Artificial Sequence
  Chemically Synthesized
QVQLQESGGGLVQAGGSLRLSCAASGSIFTWPRMGWYRQAPGKERELVASITFGGNTYYADSVKGRFTISRDNAKNTVYLQMNSLKPEDTAVYYCAAYYRHIIPYLYWGQGTQVTVSS

SEQ ID NO: 34037 - protein, 121 aa, Artificial Sequence
  Chemically Synthesized
QVQLQESGGGLVQAGGSLRLSCAASGNISHIVAMGWYRQAPGKEREFVATIGVGSTTNYADSVKGRFTISRDNAKNTVYLQMNSLKPEDTAVYYCANYQDWYYDIFDYVYWGQGTQVTVSS

SEQ ID NO: 34038 - protein, 122 aa, Artificial Sequence
  Chemically Synthesized
QVQLQESGGGLVQAGGSLRLSCAASGNISPPDRMGWYRQAPGKEREFVAAISRGTSTNYADSVKGRFTISRDNAKNTVYLQMNSLKPEDTAVYYCAAYDDEDYVRDISYPYWGQGTQVTVSS

SEQ ID NO: 34039 - protein, 121 aa, Artificial Sequence
  Chemically Synthesized
QVQLQESGGGLVQAGGSLRLSCAASGTISLRYVMGWYRQAPGKERELVAGIGAGSTTNYADSVKGRFTISRDNAKNTVYLQMNSLKPEDTAVYYCAAPYGIRDVYYRSFYWGQGTQVTVSS

SEQ ID NO: 34040 - protein, 118 aa, Artificial Sequence
  Chemically Synthesized
QVQLQESGGGLVQAGGSLRLSCAASGTISYSVYMGWYRQAPGKEREFVASITGGTITNYADSVKGRFTISRDNAKNTVYLQMNSLKPEDTAVYYCAVVVRYRWAYVYWGQGTQVTVSS

SEQ ID NO: 34041 - protein, 118 aa, Artificial Sequence
  Chemically Synthesized
QVQLQESGGGLVQAGGSLRLSCAASGSISLGPTMGWYRQAPGKERELVAGIASGGNTNYADSVKGRFTISRDNAKNTVYLQMNSLKPEDTAVYYCAVYYLYDFDLDYWGQGTQVTVSS

SEQ ID NO: 34042 - protein, 117 aa, Artificial Sequence
  Chemically Synthesized
QVQLQESGGGLVQAGGSLRLSCAASGSFFSTVMGWYRQAPGKERELVAAIAYGAITYYADSVKGRFTISRDNAKNTVYLQMNSLKPEDTAVYYCAVGDTDYQLFTYWGQGTQVTVSS

SEQ ID NO: 34043 - protein, 118 aa, Artificial Sequence
  Chemically Synthesized
QVQLQESGGGLVQAGGSLRLSCAASGNISWFYYMGWYRQAPGKEREFVASIALGGTTYYADSVKGRFTISRDNAKNTVYLQMNSLKPEDTAVYYCAAYYAYYAGHWYWGQGTQVTVSS

SEQ ID NO: 34044 - protein, 121 aa, Artificial Sequence
  Chemically Synthesized
QVQLQESGGGLVQAGGSLRLSCAASGNILLRLMGWYRQAPGKERELVASITAGTSTNYADSVKGRFTISRDNAKNTVYLQMNSLKPEDTAVYYCAASYYTSWVGKYGLTYWGQGTQVTVSS

SEQ ID NO: 34045 - protein, 120 aa, Artificial Sequence
  Chemically Synthesized
QVQLQESGGGLVQAGGSLRLSCAASGNIFDVPNMGWYRQAPGKERELVAAIAEGGNTNYADSVKGRFTISRDNAKNTVYLQMNSLKPEDTAVYYCAVYWQDTYGRYHYYWGQGTQVTVSS

SEQ ID NO: 34046 - protein, 118 aa, Artificial Sequence
  Chemically Synthesized
QVQLQESGGGLVQAGGSLRLSCAASGNISQALGMGWYRQAPGKERELVATISDGGNTNYADSVKGRFTISRDNAKNTVYLQMNSLKPEDTAVYYCAVATLSGDKLTYWGQGTQVTVSS

SEQ ID NO: 34047 - protein, 121 aa, Artificial Sequence
  Chemically Synthesized
QVQLQESGGGLVQAGGSLRLSCAASGNIFHYYLMGWYRQAPGKEREFVAAIADGGNTYYADSVKGRFTISRDNAKNTVYLQMNSLKPEDTAVYYCAVLHYSTFTISTVLYWGQGTQVTVSS

SEQ ID NO: 34048 - protein, 118 aa, Artificial Sequence
  Chemically Synthesized
QVQLQESGGGLVQAGGSLRLSCAASGTISVYDIMGWYRQAPGKERELVATIDPGGTTYYADSVKGRFTISRDNAKNTVYLQMNSLKPEDTAVYYCAVALHYGGSHRYWGQGTQVTVSS

SEQ ID NO: 34049 - protein, 118 aa, Artificial Sequence
  Chemically Synthesized
QVQLQESGGGLVQAGGSLRLSCAASGNISAPDYMGWYRQAPGKERELVATITDGSTTYYADSVKGRFTISRDNAKNTVYLQMNSLKPEDTAVYYCAATRVGDDYHDYWGQGTQVTVSS

SEQ ID NO: 34050 - protein, 126 aa, Artificial Sequence
  Chemically Synthesized
QVQLQESGGGLVQAGGSLRLSCAASGTISDDADMGWYRQAPGKEREFVAGISRGTSTYYADSVKGRFTISRDNAKNTVYLQMNSLKPEDTAVYYCAAAGVGAPYQTYWYDQVLYYWGQGTQVTVSS

SEQ ID NO: 34051 - protein, 118 aa, Artificial Sequence
  Chemically Synthesized
QVQLQESGGGLVQAGGSLRLSCAASGTIFDRAYMGWYRQAPGKEREFVAGITTGASTYYADSVKGRFTISRDNAKNTVYLQMNSLKPEDTAVYYCAVYDGYANGLYYWGQGTQVTVSS

SEQ ID NO: 34052 - protein, 118 aa, Artificial Sequence
  Chemically Synthesized
QVQLQESGGGLVQAGGSLRLSCAASGSIFQDDGMGWYRQAPGKERELVATIGEGSSTYYADSVKGRFTISRDNAKNTVYLQMNSLKPEDTAVYYCAVQRYQSQSYDYWGQGTQVTVSS

SEQ ID NO: 34053 - protein, 122 aa, Artificial Sequence
  Chemically Synthesized
QVQLQESGGGLVQAGGSLRLSCAASGYISLSGPMGWYRQAPGKERELVAGIAGGSSTNYADSVKGRFTISRDNAKNTVYLQMNSLKPEDTAVYYCAAYILDRTSDEASFEYWGQGTQVTVSS

SEQ ID NO: 34054 - protein, 113 aa, Artificial Sequence
  Chemically Synthesized
QVQLQESGGGLVQAGGSLRLSCAASGNIFGYYDMGWYRQAPGKEREFVATINDGAITNYADSVKGRFTISRDNAKNTVYLQMNSLKPEDTAVYYCAAYYDWYWGQGTQVTVSS

SEQ ID NO: 34055 - protein, 120 aa, Artificial Sequence
  Chemically Synthesized
QVQLQESGGGLVQAGGSLRLSCAASGTIFGSYIMGWYRQAPGKEREFVAGITIGGITYYADSVKGRFTISRDNAKNTVYLQMNSLKPEDTAVYYCAATYNDGTAPSFAYWGQGTQVTVSS

SEQ ID NO: 34056 - protein, 122 aa, Artificial Sequence
  Chemically Synthesized
QVQLQESGGGLVQAGGSLRLSCAASGYIFLPTAMGWYRQAPGKERELVAGITYRWYYLYADSVKGRFTISRDNAKNTVYLQMNSLKPEDTAVYYCAVFAPWEFYQWKTHPYWGQGTQVTVSS

SEQ ID NO: 34057 - protein, 118 aa, Artificial Sequence
  Chemically Synthesized
QVQLQESGGGLVQAGGSLRLSCAASGSISDNGQMGWYRQAPGKERELVAAISTGTTTNYADSVKGRFTISRDNAKNTVYLQMNSLKPEDTAVYYCAAEHRGDWYLKYWGQGTQVTVSS

SEQ ID NO: 34058 - protein, 117 aa, Artificial Sequence
  Chemically Synthesized
QVQLQESGGGLVQAGGSLRLSCAASGTILVKLMGWYRQAPGKERELVAGITTGSNTYYADSVKGRFTISRDNAKNTVYLQMNSLKPEDTAVYYCAVPYYYWTDHLYWGQGTQVTVSS

SEQ ID NO: 34059 - protein, 121 aa, Artificial Sequence
  Chemically Synthesized
QVQLQESGGGLVQAGGSLRLSCAASGLFFCLLMGWYRQAPGKERELVASISAGATTYYADSVKGRFTISRDNAKNTVYLQMNSLKPEDTAVYYCAAGRPDLVYAVQKHTYWGQGTQVTVSS

SEQ ID NO: 34060 - protein, 117 aa, Artificial Sequence
  Chemically Synthesized
QVQLQESGGGLVQAGGSLRLSCAASGTISEDVNMGWYRQAPGKEREFVASIAAGANTNYADSVKGRFTISRDNAKNTVYLQMNSLKPEDTAVYYCAVISTRLLNMYWGQGTQVTVSS

SEQ ID NO: 34061 - protein, 117 aa, Artificial Sequence
  Chemically Synthesized
QVQLQESGGGLVQAGGSLRLSCAASGNIFYYDYMGWYRQAPGKERELVASIGIGTTTNYADSVKGRFTISRDNAKNTVYLQMNSLKPEDTAVYYCAVGQRGDAVYYWGQGTQVTVSS

SEQ ID NO: 34062 - protein, 116 aa, Artificial Sequence
  Chemically Synthesized
QVQLQESGGGLVQAGGSLRLSCAASGTIFLTMGWYRQAPGKERELVAGIAWGASTNYADSVKGRFTISRDNAKNTVYLQMNSLKPEDTAVYYCAVYPYYYDELYYWGQGTQVTVSS

SEQ ID NO: 34063 - protein, 117 aa, Artificial Sequence
  Chemically Synthesized
QVQLQESGGGLVQAGGSLRLSCAASGYIFPPYDMGWYRQAPGKERELVASLMLVLLPYADSVKGRFTISRDNAKNTVYLQMNSLKPEDTAVYYCAARPVDAYPHYYWGQGTQVTVSS

SEQ ID NO: 34064 - protein, 112 aa, Artificial Sequence
  Chemically Synthesized
QVQLQESGGGLVQAGGSLRLSCAASGSISYFLNMGWYRQAPGKEREFVAAIAYGANTNYADSVKGRFTISRDNAKNTVYLQMNSLKPEDTAVYYCAVYADYWGQGTQVTVSS

SEQ ID NO: 34065 - protein, 121 aa, Artificial Sequence
  Chemically Synthesized
QVQLQESGGGLVQAGGSLRLSCAASGYILCVRMGWYRQAPGKERELVAGINYGTTTNYADSVKGRFTISRDNAKNTVYLQMNSLKPEDTAVYYCAAYWQEGRDIGARHQYWGQGTQVTVSS

SEQ ID NO: 34066 - protein, 118 aa, Artificial Sequence
  Chemically Synthesized
QVQLQESGGGLVQAGGSLRLSCAASGNISPFYRMGWYRQAPGKERELVASITRGSTTNYADSVKGRFTISRDNAKNTVYLQMNSLKPEDTAVYYCAAVRYLSYVHAYWGQGTQVTVSS

SEQ ID NO: 34067 - protein, 118 aa, Artificial Sequence
  Chemically Synthesized
QVQLQESGGGLVQAGGSLRLSCAASGSISPDGTMGWYRQAPGKEREFVATIGPGTTTNYADSVKGRFTISRDNAKNTVYLQMNSLKPEDTAVYYCAAYNVWLHPYFYWGQGTQVTVSS

SEQ ID NO: 34068 - protein, 118 aa, Artificial Sequence
  Chemically Synthesized
QVQLQESGGGLVQAGGSLRLSCAASGNIFHANFMGWYRQAPGKERELVASISYGGTTYYADSVKGRFTISRDNAKNTVYLQMNSLKPEDTAVYYCAAALRFWGLYYYWGQGTQVTVSS

SEQ ID NO: 34069 - protein, 125 aa, Artificial Sequence
  Chemically Synthesized
QVQLQESGGGLVQAGGSLRLSCAASGTISVYGLMGWYRQAPGKEREFVAGIGYGSNTNYADSVKGRFTISRDNAKNTVYLQMNSLKPEDTAVYYCAAYYSLYPARIPYDGVVFYWGQGTQVTVSS

SEQ ID NO: 34070 - protein, 118 aa, Artificial Sequence
  Chemically Synthesized
QVQLQESGGGLVQAGGSLRLSCAASGSIFFYDFMGWYRQAPGKERELVAAIDTGSNTNYADSVKGRFTISRDNAKNTVYLQMNSLKPEDTAVYYCAAIVVDPGSVSYWGQGTQVTVSS

SEQ ID NO: 34071 - protein, 118 aa, Artificial Sequence
  Chemically Synthesized
QVQLQESGGGLVQAGGSLRLSCAASGYIFGLPRMGWYRQAPGKERELVASISSGSNTNYADSVKGRFTISRDNAKNTVYLQMNSLKPEDTAVYYCAVDPYYYNALWYWGQGTQVTVSS

SEQ ID NO: 34072 - protein, 118 aa, Artificial Sequence
  Chemically Synthesized
QVQLQESGGGLVQAGGSLRLSCAASGTISLDTDMGWYRQAPGKEREFVASIDQGTTTYYADSVKGRFTISRDNAKNTVYLQMNSLKPEDTAVYYCAVAAGVRSDHGYWGQGTQVTVSS

SEQ ID NO: 34073 - protein, 122 aa, Artificial Sequence
  Chemically Synthesized
QVQLQESGGGLVQAGGSLRLSCAASGTISVASLMGWYRQAPGKEREFVASIGSGATTNYADSVKGRFTISRDNAKNTVYLQMNSLKPEDTAVYYCAALVIYYDWSDNYLYYWGQGTQVTVSS

SEQ ID NO: 34074 - protein, 114 aa, Artificial Sequence
  Chemically Synthesized
QVQLQESGGGLVQAGGSLRLSCAASGYIFYSDKMGWYRQAPGKERELVASITKGSSTYYADSVKGRFTISRDNAKNTVYLQMNSLKPEDTAVYYCAVDGDHYYWGQGTQVTVSS

SEQ ID NO: 34075 - protein, 122 aa, Artificial Sequence
  Chemically Synthesized
QVQLQESGGGLVQAGGSLRLSCAASGYISHGTVMGWYRQAPGKERELVAGIGAGGSTYYADSVKGRFTISRDNAKNTVYLQMNSLKPEDTAVYYCAVYVVSTDDRTHGHVYWGQGTQVTVSS

SEQ ID NO: 34076 - protein, 122 aa, Artificial Sequence
  Chemically Synthesized
QVQLQESGGGLVQAGGSLRLSCAASGNISHWGYMGWYRQAPGKEREFVAGIAGGGNTNYADSVKGRFTISRDNAKNTVYLQMNSLKPEDTAVYYCAVTWAVNPYGDHYLSYWGQGTQVTVSS

SEQ ID NO: 34077 - protein, 125 aa, Artificial Sequence
  Chemically Synthesized
QVQLQESGGGLVQAGGSLRLSCAASGSIFHYRDMGWYRQAPGKERELVATISRGGSTYYADSVKGRFTISRDNAKNTVYLQMNSLKPEDTAVYYCAASRETADPLRGPATKSMYWGQGTQVTVSS

SEQ ID NO: 34078 - protein, 118 aa, Artificial Sequence
  Chemically Synthesized
QVQLQESGGGLVQAGGSLRLSCAASGYISSQYYMGWYRQAPGKEREFVAAISGGSSTYYADSVKGRFTISRDNAKNTVYLQMNSLKPEDTAVYYCAVVYFGASQLRYWGQGTQVTVSS

SEQ ID NO: 34079 - protein, 122 aa, Artificial Sequence
  Chemically Synthesized
QVQLQESGGGLVQAGGSLRLSCAASGSISYSDGMGWYRQAPGKERELVATIATGSNTYYADSVKGRFTISRDNAKNTVYLQMNSLKPEDTAVYYCAVSGGVPYVHHPAHLYWGQGTQVTVSS

SEQ ID NO: 34080 - protein, 118 aa, Artificial Sequence
  Chemically Synthesized
QVQLQESGGGLVQAGGSLRLSCAASGSISSDTNMGWYRQAPGKEREFVAGIGDGAITYYADSVKGRFTISRDNAKNTVYLQMNSLKPEDTAVYYCAVDYQYAFLLGYWGQGTQVTVSS

SEQ ID NO: 34081 - protein, 118 aa, Artificial Sequence
  Chemically Synthesized
QVQLQESGGGLVQAGGSLRLSCAASGSISEYPIMGWYRQAPGKEREFVATIAGGTSTNYADSVKGRFTISRDNAKNTVYLQMNSLKPEDTAVYYCAVYGSTNQWLDYWGQGTQVTVSS

SEQ ID NO: 34082 - protein, 112 aa, Artificial Sequence
  Chemically Synthesized
QVQLQESGGGLVQAGGSLRLSCAASGSIFAYSMGWYRQAPGKERELVASINYGVVPYADSVKGRFTISRDNAKNTVYLQMNSLKPEDTAVYYCAVLLLTIYWGQGTQVTVSS

SEQ ID NO: 34083 - protein, 110 aa, Artificial Sequence
  Chemically Synthesized
QVQLQESGGGLVQAGGSLRLSCAASGTIFANLDMGWYRQAPGKERELVASIGRGSSTYYADSVKGRFTISRDNAKNTVYLQMNSLKPEDTAVYYCALDYWGQGTQVTVSS

SEQ ID NO: 34084 - protein, 122 aa, Artificial Sequence
  Chemically Synthesized
QVQLQESGGGLVQAGGSLRLSCAASGYIFPRTGMGWYRQAPGKEREFVASITRGGSTYYADSVKGRFTISRDNAKNTVYLQMNSLKPEDTAVYYCAAQGNDDDNSLWTLGYWGQGTQVTVSS

SEQ ID NO: 34085 - protein, 122 aa, Artificial Sequence
  Chemically Synthesized
QVQLQESGGGLVQAGGSLRLSCAASGNISGTYYMGWYRQAPGKEREFVATIDDGSITNYADSVKGRFTISRDNAKNTVYLQMNSLKPEDTAVYYCAVRYAIGGRSPYFYRYWGQGTQVTVSS

SEQ ID NO: 34086 - protein, 118 aa, Artificial Sequence
  Chemically Synthesized
QVQLQESGGGLVQAGGSLRLSCAASGNIFPESDMGWYRQAPGKERELVAAIDDGGSTYYADSVKGRFTISRDNAKNTVYLQMNSLKPEDTAVYYCAVNPYYRNPYYYWGQGTQVTVSS

SEQ ID NO: 34087 - protein, 118 aa, Artificial Sequence
  Chemically Synthesized
QVQLQESGGGLVQAGGSLRLSCAASGTIFRHGGMGWYRQAPGKEREFVAGISYGTITYYADSVKGRFTISRDNAKNTVYLQMNSLKPEDTAVYYCAVGVGADRYFFYWGQGTQVTVSS

SEQ ID NO: 34088 - protein, 122 aa, Artificial Sequence
  Chemically Synthesized
QVQLQESGGGLVQAGGSLRLSCAASGSIFFRGPMGWYRQAPGKERELVAAIAYGSNTYYADSVKGRFTISRDNAKNTVYLQMNSLKPEDTAVYYCAAIWAYTPYTPQKLSYWGQGTQVTVSS

SEQ ID NO: 34089 - protein, 122 aa, Artificial Sequence
  Chemically Synthesized
QVQLQESGGGLVQAGGSLRLSCAASGTISGGVGMGWYRQAPGKERELVATINTGATTNYADSVKGRFTISRDNAKNTVYLQMNSLKPEDTAVYYCAVEIRFSEHDYRYYYYWGQGTQVTVSS

SEQ ID NO: 34090 - protein, 118 aa, Artificial Sequence
  Chemically Synthesized
QVQLQESGGGLVQAGGSLRLSCAASGTISEPKDMGWYRQAPGKERELVATIAGGTSTNYADSVKGRFTISRDNAKNTVYLQMNSLKPEDTAVYYCAAGAYNRGYLIYWGQGTQVTVSS

SEQ ID NO: 34091 - protein, 118 aa, Artificial Sequence
  Chemically Synthesized
QVQLQESGGGLVQAGGSLRLSCAASGSIFGDRDMGWYRQAPGKERELVASISQGGSTYYADSVKGRFTISRDNAKNTVYLQMNSLKPEDTAVYYCAVDLYVPYYLLYWGQGTQVTVSS

SEQ ID NO: 34092 - protein, 117 aa, Artificial Sequence
  Chemically Synthesized
QVQLQESGGGLVQAGGSLRLSCAASGSIFRGTAMGWYRQAPGKEREFVAAIDYGGNTNYADSVKGRFTISRDNAKNTVYLQMNSLKPEDTAVYYCAASSRWVTLFYWGQGTQVTVSS

SEQ ID NO: 34093 - protein, 117 aa, Artificial Sequence
  Chemically Synthesized
QVQLQESGGGLVQAGGSLRLSCAASGNIFGAFDMGWYRQAPGKERELLPVLMTVVLPYADSVKGRFTISRDNAKNTVYLQMNSLKPEDTAVYYCAVVDVDARYFFYWGQGTQVTVSS

SEQ ID NO: 34094 - protein, 122 aa, Artificial Sequence
  Chemically Synthesized
QVQLQESGGGLVQAGGSLRLSCAASGYISYITIMGWYRQAPGKERELVAAIARGGSTYYADSVKGRFTISRDNAKNTVYLQMNSLKPEDTAVYYCAVVYAYYGNETITLHYWGQGTQVTVSS

SEQ ID NO: 34095 - protein, 117 aa, Artificial Sequence
  Chemically Synthesized
QVQLQESGGGLVQAGGSLRLSCAASGSIFWISSMGWYRQAPGKEREFVASIDGGSTYYADSVKGRFTISRDNAKNTVYLQMNSLKPEDTAVYYCAVGDYDHVAYRYWGQGTQVTVSS

SEQ ID NO: 34096 - protein, 122 aa, Artificial Sequence
  Chemically Synthesized
QVQLQESGGGLVQAGGSLRLSCAASGSISDTGLMGWYRQAPGKERELVASIGYGGTTYYADSVKGRFTISRDNAKNTVYLQMNSLKPEDTAVYYCAAFTIAYRVPSGLLDYWGQGTQVTVSS

SEQ ID NO: 34097 - protein, 118 aa, Artificial Sequence
  Chemically Synthesized
QVQLQESGGGLVQAGGSLRLSCAASGSIFDTSPMGWYRQAPGKEREFVATIDQGASTNYADSVKGRFTISRDNAKNTVYLQMNSLKPEDTAVYYCAAYYYAYSYLGYWGQGTQVTVSS

SEQ ID NO: 34098 - protein, 122 aa, Artificial Sequence
  Chemically Synthesized
QVQLQESGGGLVQAGGSLRLSCAASGTIFKYLYMGWYRQAPGKEREFVAGITAGGNTNYADSVKGRFTISRDNAKNTVYLQMNSLKPEDTAVYYCAADGAYGVVASSDHDYWGQGTQVTVSS

SEQ ID NO: 34099 - protein, 122 aa, Artificial Sequence
  Chemically Synthesized
QVQLQESGGGLVQAGGSLRLSCAASGTISSADYMGWYRQAPGKERELVAGIADGSNTYYADSVKGRFTISRDNAKNTVYLQMNSLKPEDTAVYYCAAPDHDWGQVPEWFRYWGQGTQVTVSS

SEQ ID NO: 34100 - protein, 122 aa, Artificial Sequence
  Chemically Synthesized
QVQLQESGGGLVQAGGSLRLSCAASGSIFNSFVMGWYRQAPGKEREFVASISPGGNTNYADSVKGRFTISRDNAKNTVYLQMNSLKPEDTAVYYCAVPYRLRYYVRQPFYYWGQGTQVTVSS

SEQ ID NO: 34101 - protein, 126 aa, Artificial Sequence
  Chemically Synthesized
QVQLQESGGGLVQAGGSLRLSCAASGYISVRVEMGWYRQAPGKEREFVAGIGYGAITNYADSVKGRFTISRDNAKNTVYLQMNSLKPEDTAVYYCAVYNSQVDVDYPGSEYPLGYWGQGTQVTVSS

SEQ ID NO: 34102 - protein, 118 aa, Artificial Sequence
  Chemically Synthesized
QVQLQESGGGLVQAGGSLRLSCAASGSIFLTYNMGWYRQAPGKERELVASITGGSITNYADSVKGRFTISRDNAKNTVYLQMNSLKPEDTAVYYCAVSYYDAILYWYWGQGTQVTVSS

SEQ ID NO: 34103 - protein, 122 aa, Artificial Sequence
  Chemically Synthesized
QVQLQESGGGLVQAGGSLRLSCAASGYISQPWNMGWYRQAPGKEREFVAGIDTGATTNYADSVKGRFTISRDNAKNTVYLQMNSLKPEDTAVYYCAAGYFLPQAGTGLYPYWGQGTQVTVSS

SEQ ID NO: 34104 - protein, 118 aa, Artificial Sequence
  Chemically Synthesized
QVQLQESGGGLVQAGGSLRLSCAASGNISHWVYMGWYRQAPGKEREFVAAINYGGITNYADSVKGRFTISRDNAKNTVYLQMNSLKPEDTAVYYCAVAYADYLRHYYWGQGTQVTVSS

SEQ ID NO: 34105 - protein, 121 aa, Artificial Sequence
  Chemically Synthesized
QVQLQESGGGLVQAGGSLRLSCAASGTISRSTMGWYRQAPGKERELVATIGAGGNTNYADSVKGRFTISRDNAKNTVYLQMNSLKPEDTAVYYCAADYGPPVDADFTLGYWGQGTQVTVSS

SEQ ID NO: 34106 - protein, 122 aa, Artificial Sequence
  Chemically Synthesized
QVQLQESGGGLVQAGGSLRLSCAASGYISPFSIMGWYRQAPGKEREFVAGIADGSSTYYADSVKGRFTISRDNAKNTVYLQMNSLKPEDTAVYYCAVSEYGEQYWYNYLPYWGQGTQVTVSS

SEQ ID NO: 34107 - protein, 122 aa, Artificial Sequence
  Chemically Synthesized
QVQLQESGGGLVQAGGSLRLSCAASGNIFDDPDMGWYRQAPGKERELVATISYGGSTNYADSVKGRFTISRDNAKNTVYLQMNSLKPEDTAVYYCAAGWPYANQIAFLHRYWGQGTQVTVSS

SEQ ID NO: 34108 - protein, 122 aa, Artificial Sequence
  Chemically Synthesized
QVQLQESGGGLVQAGGSLRLSCAASGSISPNVSMGWYRQAPGKERELVAGIGPGTITNYADSVKGRFTISRDNAKNTVYLQMNSLKPEDTAVYYCAVYHYPFVVSWLIHVYWGQGTQVTVSS

SEQ ID NO: 34109 - protein, 117 aa, Artificial Sequence
  Chemically Synthesized
QVQLQESGGGLVQAGGSLRLSCAASGYISLYSMGWYRQAPGKEREFVATIDLGSITNYADSVKGRFTISRDNAKNTVYLQMNSLKPEDTAVYYCAVGASGQLLHRYWGQGTQVTVSS

SEQ ID NO: 34110 - protein, 117 aa, Artificial Sequence
  Chemically Synthesized
QVQLQESGGGLVQAGGSLRLSCAASGYILPAVMGWYRQAPGKERELVASIADGSITNYADSVKGRFTISRDNAKNTVYLQMNSLKPEDTAVYYCAANSHHGYNHQYWGQGTQVTVSS

SEQ ID NO: 34111 - protein, 117 aa, Artificial Sequence
  Chemically Synthesized
QVQLQESGGGLVQAGGSLRLSCAASGYISEYDIMGWYRQAPGKEREFVAAITDGSSTNYADSVKGRFTISRDNAKNTVYLQMNSLKPEDTAVYYCAAYVRPQGAFYWGQGTQVTVSS

SEQ ID NO: 34112 - protein, 122 aa, Artificial Sequence
  Chemically Synthesized
QVQLQESGGGLVQAGGSLRLSCAASGYISGLVMGWYRQAPGKERELVAGIDGGATTYYADSVKGRFTISRDNAKNTVYLQMNSLKPEDTAVYYCAATLNTRFTVVRRTNLYWGQGTQVTVSS

SEQ ID NO: 34113 - protein, 117 aa, Artificial Sequence
  Chemically Synthesized
QVQLQESGGGLVQAGGSLRLSCAASGTISRDRDMGWYRQAPGKEREFVAAIDGGGNTNYADSVKGRFTISRDNAKNTVYLQMNSLKPEDTAVYYCAASYTRAQSLYWGQGTQVTVSS

SEQ ID NO: 34114 - protein, 118 aa, Artificial Sequence
  Chemically Synthesized
QVQLQESGGGLVQAGGSLRLSCAASGNIFVDKWMGWYRQAPGKERELVAGISYGSTTNYADSVKGRFTISRDNAKNTVYLQMNSLKPEDTAVYYCAVNDYYSVYFRYWGQGTQVTVSS

SEQ ID NO: 34115 - protein, 112 aa, Artificial Sequence
  Chemically Synthesized
QVQLQESGGGLVQAGGSLRLSCAASGYIFPDADMGWYRQAPGKEREFVATINYGGNTNYADSVKGRFTISRDNAKNTVYLQMNSLKPEDTAVYYCAAYVCYWGQGTQVTVSS

SEQ ID NO: 34116 - protein, 125 aa, Artificial Sequence
  Chemically Synthesized
QVQLQESGGGLVQAGGSLRLSCAASGYIFLYHMGWYRQAPGKERELVAGISLGAITYYADSVKGRFTISRDNAKNTVYLQMNSLKPEDTAVYYCAVDALYVVQTSLTSVYAYGYWGQGTQVTVSS

SEQ ID NO: 34117 - protein, 118 aa, Artificial Sequence
  Chemically Synthesized
QVQLQESGGGLVQAGGSLRLSCAASGNIFDDIIMGWYRQAPGKERELVAAIATGGTTNYADSVKGRFTISRDNAKNTVYLQMNSLKPEDTAVYYCAARTALTASHIYWGQGTQVTVSS

SEQ ID NO: 34118 - protein, 111 aa, Artificial Sequence
  Chemically Synthesized
QVQLQESGGGLVQAGGSLRLSCAASGSISSRDIMGWYRQAPGKERELVVLPYADSVKGRFTISRDNAKNTVYLQMNSLKPEDTAVYYCAAYTDYPGGLAYWGQGTQVTVSS

SEQ ID NO: 34119 - protein, 122 aa, Artificial Sequence
  Chemically Synthesized
QVQLQESGGGLVQAGGSLRLSCAASGTIFTLSWMGWYRQAPGKERELVAAIDPGGNTNYADSVKGRFTISRDNAKNTVYLQMNSLKPEDTAVYYCAVKRDGYYRAYVIHQYWGQGTQVTVSS

SEQ ID NO: 34120 - protein, 121 aa, Artificial Sequence
  Chemically Synthesized
QVQLQESGGGLVQAGGSLRLSCAASGNIFDTGSMGWYRQAPGKERELVAALISVLIPYADSVKGRFTISRDNAKNTVYLQMNSLKPEDTAVYYCAAGYRWYVYTVYYYDYWGQGTQVTVSS

SEQ ID NO: 34121 - protein, 121 aa, Artificial Sequence
  Chemically Synthesized
QVQLQESGGGLVQAGGSLRLSCAASGSIFEGPYMGWYRQAPGKEREFVAGINWGGNTNYADSVKGRFTISRDNAKNTVYLQMNSLKPEDTAVYYCAAVYDSAYDVLTRLYWGQGTQVTVSS

SEQ ID NO: 34122 - protein, 125 aa, Artificial Sequence
  Chemically Synthesized
QVQLQESGGGLVQAGGSLRLSCAASGTISRLKTMGWYRQAPGKEREFVAGITFGTSTYYADSVKGRFTISRDNAKNTVYLQMNSLKPEDTAVYYCAAYFDTNLWVRLLTVSVFYWGQGTQVTVSS

SEQ ID NO: 34123 - protein, 118 aa, Artificial Sequence
  Chemically Synthesized
QVQLQESGGGLVQAGGSLRLSCAASGNIFDATYMGWYRQAPGKEREFVATITGGGSTYYADSVKGRFTISRDNAKNTVYLQMNSLKPEDTAVYYCAVYGTYDAGYWYWGQGTQVTVSS

SEQ ID NO: 34124 - protein, 122 aa, Artificial Sequence
  Chemically Synthesized
QVQLQESGGGLVQAGGSLRLSCAASGNISINGDMGWYRQAPGKEREFVASINKGGSTYYADSVKGRFTISRDNAKNTVYLQMNSLKPEDTAVYYCAALYFAETRHDQFFVYWGQGTQVTVSS

SEQ ID NO: 34125 - protein, 122 aa, Artificial Sequence
  Chemically Synthesized
QVQLQESGGGLVQAGGSLRLSCAASGYIFFDYLMGWYRQAPGKEREFVASIAYGASTYYADSVKGRFTISRDNAKNTVYLQMNSLKPEDTAVYYCAAWFQWHGYYRDAHSYWGQGTQVTVSS

SEQ ID NO: 34126 - protein, 118 aa, Artificial Sequence
  Chemically Synthesized
QVQLQESGGGLVQAGGSLRLSCAASGTIFYTIQMGWYRQAPGKERELVATISRGGNTYYADSVKGRFTISRDNAKNTVYLQMNSLKPEDTAVYYCAVSNEVPSRLLYWGQGTQVTVSS

SEQ ID NO: 34127 - protein, 118 aa, Artificial Sequence
  Chemically Synthesized
QVQLQESGGGLVQAGGSLRLSCAASGSIFGSRDMGWYRQAPGKEREFVATIAIGAITYYADSVKGRFTISRDNAKNTVYLQMNSLKPEDTAVYYCAATWSSELTLQYWGQGTQVTVSS

SEQ ID NO: 34128 - protein, 110 aa, Artificial Sequence
  Chemically Synthesized
QVQLQESGGGLVQAGGSLRLSCAASGYIFLIVLMGWYRQAPGKERELVAGIDLGASTYYADSVKGRFTISRDNAKNTVYLQMNSLKPEDTAVYYCASSYWGQGTQVTVSS

SEQ ID NO: 34129 - protein, 126 aa, Artificial Sequence
  Chemically Synthesized
QVQLQESGGGLVQAGGSLRLSCAASGYIFTAVVMGWYRQAPGKERELVATIARGASTNYADSVKGRFTISRDNAKNTVYLQMNSLKPEDTAVYYCAVVYDWDVGLASISRYKHTYWGQGTQVTVSS

SEQ ID NO: 34130 - protein, 121 aa, Artificial Sequence
  Chemically Synthesized
QVQLQESGGGLVQAGGSLRLSCAASGSISPWSPMGWYRQAPGKEREFVAAISPGGSTNYADSVKGRFTISRDNAKNTVYLQMNSLKPEDTAVYYCAVPSTLSLSTTRVIYWGQGTQVTVSS

SEQ ID NO: 34131 - protein, 122 aa, Artificial Sequence
  Chemically Synthesized
QVQLQESGGGLVQAGGSLRLSCAASGNIFPDSGMGWYRQAPGKEREFVAAIGYGAITNYADSVKGRFTISRDNAKNTVYLQMNSLKPEDTAVYYCAANFPYVYRGPRGHFYWGQGTQVTVSS

SEQ ID NO: 34132 - protein, 120 aa, Artificial Sequence
  Chemically Synthesized
QVQLQESGGGLVQAGGSLRLSCAASGNISGAPYMGWYRQAPGKEREFVATITVGANTNYADSVKGRFTISRDNAKNTVYLQMNSLKPEDTAVYYCAAYYSVTNVTTRLYWGQGTQVTVSS

SEQ ID NO: 34133 - protein, 122 aa, Artificial Sequence
  Chemically Synthesized
QVQLQESGGGLVQAGGSLRLSCAASGSIFGPLYMGWYRQAPGKERELVASIGGGTTTYYADSVKGRFTISRDNAKNTVYLQMNSLKPEDTAVYYCAVSPSVDPLNVSVHWYWGQGTQVTVSS

SEQ ID NO: 34134 - protein, 117 aa, Artificial Sequence
  Chemically Synthesized
QVQLQESGGGLVQAGGSLRLSCAASGSISLWWKMGWYRQAPGKERELVASINHGGNTYYADSVKGRFTISRDNAKNTVYLQMNSLKPEDTAVYYCAASTLVTTTMYWGQGTQVTVSS

SEQ ID NO: 34135 - protein, 118 aa, Artificial Sequence
  Chemically Synthesized
QVQLQESGGGLVQAGGSLRLSCAASGSISYLQYMGWYRQAPGKEREFVAGIATGGITNYADSVKGRFTISRDNAKNTVYLQMNSLKPEDTAVYYCAAYGYVRNHLPYWGQGTQVTVSS

SEQ ID NO: 34136 - protein, 126 aa, Artificial Sequence
  Chemically Synthesized
QVQLQESGGGLVQAGGSLRLSCAASGTIFRSITMGWYRQAPGKEREFVATIGAGATTNYADSVKGRFTISRDNAKNTVYLQMNSLKPEDTAVYYCAVDSYYQAYPRLTDVIDYYYWGQGTQVTVSS

SEQ ID NO: 34137 - protein, 118 aa, Artificial Sequence
  Chemically Synthesized
QVQLQESGGGLVQAGGSLRLSCAASGYISSYDFMGWYRQAPGKEREFVAAIALGGSTYYADSVKGRFTISRDNAKNTVYLQMNSLKPEDTAVYYCAVPYTDADRLVYWGQGTQVTVSS

SEQ ID NO: 34138 - protein, 118 aa, Artificial Sequence
  Chemically Synthesized
QVQLQESGGGLVQAGGSLRLSCAASGTISTDSDMGWYRQAPGKERELVATINAGGTTYYADSVKGRFTISRDNAKNTVYLQMNSLKPEDTAVYYCAATDWPDQSFAYWGQGTQVTVSS

SEQ ID NO: 34139 - protein, 118 aa, Artificial Sequence
  Chemically Synthesized
QVQLQESGGGLVQAGGSLRLSCAASGYISYGRDMGWYRQAPGKERELVASINGGGITNYADSVKGRFTISRDNAKNTVYLQMNSLKPEDTAVYYCAAPGYEDGPFTYWGQGTQVTVSS

SEQ ID NO: 34140 - protein, 109 aa, Artificial Sequence
  Chemically Synthesized
QVQLQESGGGLVQAGGSLRLSCAASGTISRSGDMGWYRQAPGKERELVATINTGANTNYADSVKGRFTISRDNAKNTVYLQMNSLKPEDTAVYYCAIYWGQGTQVTVSS

SEQ ID NO: 34141 - protein, 122 aa, Artificial Sequence
  Chemically Synthesized
QVQLQESGGGLVQAGGSLRLSCAASGYISRSYYMGWYRQAPGKEREFVAAIGTGGSTYYADSVKGRFTISRDNAKNTVYLQMNSLKPEDTAVYYCAADGAFGGSPVALYAYWGQGTQVTVSS

SEQ ID NO: 34142 - protein, 121 aa, Artificial Sequence
  Chemically Synthesized
QVQLQESGGGLVQAGGSLRLSCAASGTIFRSAMGWYRQAPGKERELVATIGRGGNTYYADSVKGRFTISRDNAKNTVYLQMNSLKPEDTAVYYCAVGVPPFNRYSVWHVYWGQGTQVTVSS

SEQ ID NO: 34143 - protein, 118 aa, Artificial Sequence
  Chemically Synthesized
QVQLQESGGGLVQAGGSLRLSCAASGYIFYGQWMGWYRQAPGKERELVASIGYGSSTYYADSVKGRFTISRDNAKNTVYLQMNSLKPEDTAVYYCAVQYAYNLDLSYWGQGTQVTVSS

SEQ ID NO: 34144 - protein, 117 aa, Artificial Sequence
  Chemically Synthesized
QVQLQESGGGLVQAGGSLRLSCAASGYISADGGMGWYRQAPGKEREFVAGITVVVVPYADSVKGRFTISRDNAKNTVYLQMNSLKPEDTAVYYCAVYTHTTLPYYYWGQGTQVTVSS

SEQ ID NO: 34145 - protein, 126 aa, Artificial Sequence
  Chemically Synthesized
QVQLQESGGGLVQAGGSLRLSCAASGTISSRSDMGWYRQAPGKERELVAGIDLGGSTYYADSVKGRFTISRDNAKNTVYLQMNSLKPEDTAVYYCAVGYYSYDWVLQAPFDSHDYWGQGTQVTVSS

SEQ ID NO: 34146 - protein, 118 aa, Artificial Sequence
  Chemically Synthesized
QVQLQESGGGLVQAGGSLRLSCAASGSISLLYYMGWYRQAPGKEREFVAAIGRGANTNYADSVKGRFTISRDNAKNTVYLQMNSLKPEDTAVYYCAAFAFFGWSHRYWGQGTQVTVSS

SEQ ID NO: 34147 - protein, 122 aa, Artificial Sequence
  Chemically Synthesized
QVQLQESGGGLVQAGGSLRLSCAASGYISYRPEMGWYRQAPGKERELVAGIAPGATTYYADSVKGRFTISRDNAKNTVYLQMNSLKPEDTAVYYCAVDPVYLYPTGGGHLYWGQGTQVTVSS

SEQ ID NO: 34148 - protein, 126 aa, Artificial Sequence
  Chemically Synthesized
QVQLQESGGGLVQAGGSLRLSCAASGYISRYFLMGWYRQAPGKERELVAAIGTGASTYYADSVKGRFTISRDNAKNTVYLQMNSLKPEDTAVYYCAANDPDRDNVALYDELFFNYWGQGTQVTVSS

SEQ ID NO: 34149 - protein, 118 aa, Artificial Sequence
  Chemically Synthesized
QVQLQESGGGLVQAGGSLRLSCAASGYFLLTGHMGWYRQAPGKERELVAAITDGGITYYADSVKGRFTISRDNAKNTVYLQMNSLKPEDTAVYYCAVDGIYFEYHYYWGQGTQVTVSS

SEQ ID NO: 34150 - protein, 118 aa, Artificial Sequence
  Chemically Synthesized
QVQLQESGGGLVQAGGSLRLSCAASGTISRDYDMGWYRQAPGKEREFVATITQGGITNYADSVKGRFTISRDNAKNTVYLQMNSLKPEDTAVYYCAVQWHDFVYHTYWGQGTQVTVSS

SEQ ID NO: 34151 - protein, 122 aa, Artificial Sequence
  Chemically Synthesized
QVQLQESGGGLVQAGGSLRLSCAASGYIFVRLLMGWYRQAPGKERELVAGISGGGTTNYADSVKGRFTISRDNAKNTVYLQMNSLKPEDTAVYYCAVVSSDPGATYDRYDYWGQGTQVTVSS

SEQ ID NO: 34152 - protein, 118 aa, Artificial Sequence
  Chemically Synthesized
QVQLQESGGGLVQAGGSLRLSCAASGYISGSTIMGWYRQAPGKEREFVAGITSGAITYYADSVKGRFTISRDNAKNTVYLQMNSLKPEDTAVYYCAVDGLHTPHLTYWGQGTQVTVSS

SEQ ID NO: 34153 - protein, 118 aa, Artificial Sequence
  Chemically Synthesized
QVQLQESGGGLVQAGGSLRLSCAASGNISFRSTMGWYRQAPGKEREFVAAITVGSTTYYADSVKGRFTISRDNAKNTVYLQMNSLKPEDTAVYYCAAIFDLYHDHGYWGQGTQVTVSS

SEQ ID NO: 34154 - protein, 126 aa, Artificial Sequence
  Chemically Synthesized
QVQLQESGGGLVQAGGSLRLSCAASGNIFAAAPMGWYRQAPGKEREFVASINDGGNTNYADSVKGRFTISRDNAKNTVYLQMNSLKPEDTAVYYCAAVYRDPNRQGDGTGVGHVYWGQGTQVTVSS

SEQ ID NO: 34155 - protein, 121 aa, Artificial Sequence
  Chemically Synthesized
QVQLQESGGGLVQAGGSLRLSCAASGYIFPKPEMGWYRQAPGKERELVATITNGSTTNYADSVKGRFTISRDNAKNTVYLQMNSLKPEDTAVYYCAAGTVDAISVPQSLYWGQGTQVTVSS

SEQ ID NO: 34156 - protein, 118 aa, Artificial Sequence
  Chemically Synthesized
QVQLQESGGGLVQAGGSLRLSCAASGYISYARVMGWYRQAPGKERELVATIGAGASTNYADSVKGRFTISRDNAKNTVYLQMNSLKPEDTAVYYCAVYPDSYAELYYWGQGTQVTVSS

SEQ ID NO: 34157 - protein, 122 aa, Artificial Sequence
  Chemically Synthesized
QVQLQESGGGLVQAGGSLRLSCAASGTIFYDTGMGWYRQAPGKERELVAGIAYGGITNYADSVKGRFTISRDNAKNTVYLQMNSLKPEDTAVYYCAADYVEYKYADGYHLYWGQGTQVTVSS

SEQ ID NO: 34158 - protein, 122 aa, Artificial Sequence
  Chemically Synthesized
QVQLQESGGGLVQAGGSLRLSCAASGTISLQYGMGWYRQAPGKEREFVATINPGSNTYYADSVKGRFTISRDNAKNTVYLQMNSLKPEDTAVYYCAALDRFYPAGTSYLPYWGQGTQVTVSS

SEQ ID NO: 34159 - protein, 122 aa, Artificial Sequence
  Chemically Synthesized
QVQLQESGGGLVQAGGSLRLSCAASGNIFLYPYMGWYRQAPGKEREFVAGIAGGGNTNYADSVKGRFTISRDNAKNTVYLQMNSLKPEDTAVYYCAVLVVAYYYYYSRFPYWGQGTQVTVSS

SEQ ID NO: 34160 - protein, 118 aa, Artificial Sequence
  Chemically Synthesized
QVQLQESGGGLVQAGGSLRLSCAASGTISPRTRMGWYRQAPGKERELVATIDYGTTTNYADSVKGRFTISRDNAKNTVYLQMNSLKPEDTAVYYCAVKTWYDYSFGYWGQGTQVTVSS

SEQ ID NO: 34161 - protein, 117 aa, Artificial Sequence
  Chemically Synthesized
QVQLQESGGGLVQAGGSLRLSCAASGSILLTLMGWYRQAPGKEREFVAAIAYGGNTNYADSVKGRFTISRDNAKNTVYLQMNSLKPEDTAVYYCAAQYPYPRYHPYWGQGTQVTVSS

SEQ ID NO: 34162 - protein, 118 aa, Artificial Sequence
  Chemically Synthesized
QVQLQESGGGLVQAGGSLRLSCAASGTISWPQSMGWYRQAPGKEREFVAGITVGASTYYADSVKGRFTISRDNAKNTVYLQMNSLKPEDTAVYYCAAYLFGYESFYYWGQGTQVTVSS

SEQ ID NO: 34163 - protein, 125 aa, Artificial Sequence
  Chemically Synthesized
QVQLQESGGGLVQAGGSLRLSCAASGYISDFRTMGWYRQAPGKERELVAGNAGSSTNYADSVKGRFTISRDNAKNTVYLQMNSLKPEDTAVYYCAADAYPDLHRYLPHLDSHDYWGQGTQVTVSS

SEQ ID NO: 34164 - protein, 118 aa, Artificial Sequence
  Chemically Synthesized
QVQLQESGGGLVQAGGSLRLSCAASGYISIAAVMGWYRQAPGKERELVATIDSGATTNYADSVKGRFTISRDNAKNTVYLQMNSLKPEDTAVYYCAADTVVFLYHSYWGQGTQVTVSS

SEQ ID NO: 34165 - protein, 122 aa, Artificial Sequence
  Chemically Synthesized
QVQLQESGGGLVQAGGSLRLSCAASGNISTYTAMGWYRQAPGKEREFVAGINYGSTTYYADSVKGRFTISRDNAKNTVYLQMNSLKPEDTAVYYCAVEDYEGYVLPYYHTYWGQGTQVTVSS

SEQ ID NO: 34166 - protein, 119 aa, Artificial Sequence
  Chemically Synthesized
QVQLQESGGGLVQAGGSLRLSCAASGYISSQHVMGWYRQAPGKEREFVAAISEGTSTYYADSVKGRFTISRDNAKNTVYLQMNSLKPEDTAVYYCAVIRRKKRNRHDYWGQGTQVTVSS

SEQ ID NO: 34167 - protein, 126 aa, Artificial Sequence
  Chemically Synthesized
QVQLQESGGGLVQAGGSLRLSCAASGYISDVGSMGWYRQAPGKERELVASIDSGGITYYADSVKGRFTISRDNAKNTVYLQMNSLKPEDTAVYYCAVYVSSQYERFLDIWVHYRYWGQGTQVTVSS

SEQ ID NO: 34168 - protein, 118 aa, Artificial Sequence
  Chemically Synthesized
QVQLQESGGGLVQAGGSLRLSCAASGTIFTEPTMGWYRQAPGKERELVAAIGDGAITYYADSVKGRFTISRDNAKNTVYLQMNSLKPEDTAVYYCAASDYERVPYWYWGQGTQVTVSS

SEQ ID NO: 34169 - protein, 122 aa, Artificial Sequence
  Chemically Synthesized
QVQLQESGGGLVQAGGSLRLSCAASGNIFVYYGMGWYRQAPGKEREFVAAISPGSTTNYADSVKGRFTISRDNAKNTVYLQMNSLKPEDTAVYYCAALPPNTIYQDYAHFYWGQGTQVTVSS

SEQ ID NO: 34170 - protein, 118 aa, Artificial Sequence
  Chemically Synthesized
QVQLQESGGGLVQAGGSLRLSCAASGNISNVDAMGWYRQAPGKEREFVAAITYGSNTNYADSVKGRFTISRDNAKNTVYLQMNSLKPEDTAVYYCAVYPVYPYTFYYWGQGTQVTVSS

SEQ ID NO: 34171 - protein, 118 aa, Artificial Sequence
  Chemically Synthesized
QVQLQESGGGLVQAGGSLRLSCAASGYISPWGGMGWYRQAPGKERELVAGIGYGGTTNYADSVKGRFTISRDNAKNTVYLQMNSLKPEDTAVYYCAVDAYAAIPFGYWGQGTQVTVSS

SEQ ID NO: 34172 - protein, 118 aa, Artificial Sequence
  Chemically Synthesized
QVQLQESGGGLVQAGGSLRLSCAASGNISLTYVMGWYRQAPGKEREFVAAISDGSNTYYADSVKGRFTISRDNAKNTVYLQMNSLKPEDTAVYYCAVYALDVVYLGYWGQGTQVTVSS

SEQ ID NO: 34173 - protein, 118 aa, Artificial Sequence
  Chemically Synthesized
QVQLQESGGGLVQAGGSLRLSCAASGNISSYLIMGWYRQAPGKERELVASITFGGITYYADSVKGRFTISRDNAKNTVYLQMNSLKPEDTAVYYCAVGPLWYVDYPYWGQGTQVTVSS

SEQ ID NO: 34174 - protein, 127 aa, Artificial Sequence
  Chemically Synthesized
QVQLQESGGGLVQAGGSLRLSCAASGNISYGGDMGWYRQAPGKERELVASITYGASTYYADSVKGRFTISRDNAKNTVYLQMNSLKPEDTAVYYCAAYEVYPYQYVTRDRVRLYGYWGQGTQVTVSS

SEQ ID NO: 34175 - protein, 118 aa, Artificial Sequence
  Chemically Synthesized
QVQLQESGGGLVQAGGSLRLSCAASGTISWTAGMGWYRQAPGKEREFVAAIAYGTTTYYADSVKGRFTISRDNAKNTVYLQMNSLKPEDTAVYYCAAVRNFTDVFAYWGQGTQVTVSS

SEQ ID NO: 34176 - protein, 122 aa, Artificial Sequence
  Chemically Synthesized
QVQLQESGGGLVQAGGSLRLSCAASGNISRYGHMGWYRQAPGKEREFVAGIASGTSTNYADSVKGRFTISRDNAKNTVYLQMNSLKPEDTAVYYCAVYLPDDGGTLDAHYYWGQGTQVTVSS

SEQ ID NO: 34177 - protein, 117 aa, Artificial Sequence
  Chemically Synthesized
QVQLQESGGGLVQAGGSLRLSCAASGNIFVSSMGWYRQAPGKEREFVAGIADGASTYYADSVKGRFTISRDNAKNTVYLQMNSLKPEDTAVYYCAVGDDYGQDHAYWGQGTQVTVSS

SEQ ID NO: 34178 - protein, 122 aa, Artificial Sequence
  Chemically Synthesized
QVQLQESGGGLVQAGGSLRLSCAASGNIFRAPYMGWYRQAPGKERELVAAIAHGAITYYADSVKGRFTISRDNAKNTVYLQMNSLKPEDTAVYYCAAWGYGRDYDTAVLAYWGQGTQVTVSS

SEQ ID NO: 34179 - protein, 118 aa, Artificial Sequence
  Chemically Synthesized
QVQLQESGGGLVQAGGSLRLSCAASGTIFTFLMGWYRQAPGKEREFVATITYVGTSTNYADSVKGRFTISRDNAKNTVYLQMNSLKPEDTAVYYCAALTVNPIYFYYWGQGTQVTVSS

SEQ ID NO: 34180 - protein, 121 aa, Artificial Sequence
  Chemically Synthesized
QVQLQESGGGLVQAGGSLRLSCAASGNISEPVYMGWYRQAPGKEREFVATIDSGGNTNYADSVKGRFTISRDNAKNTVYLQMNSLKPEDTAVYYCAAYVEVPRKSTLFMYWGQGTQVTVSS

SEQ ID NO: 34181 - protein, 122 aa, Artificial Sequence
  Chemically Synthesized
QVQLQESGGGLVQAGGSLRLSCAASGTIFNDVVMGWYRQAPGKEREFVASINHGTNTYYADSVKGRFTISRDNAKNTVYLQMNSLKPEDTAVYYCAVGALYRDYTTSGHRYWGQGTQVTVSS

SEQ ID NO: 34182 - protein, 118 aa, Artificial Sequence
  Chemically Synthesized
QVQLQESGGGLVQAGGSLRLSCAASGNIFDYRYMGWYRQAPGKERELVASIGVGAITYYADSVKGRFTISRDNAKNTVYLQMNSLKPEDTAVYYCAAVYRDTGYLDYWGQGTQVTVSS

SEQ ID NO: 34183 - protein, 121 aa, Artificial Sequence
  Chemically Synthesized
QVQLQESGGGLVQAGGSLRLSCAASGSISDDPRMGWYRQAPGKERELVASIDSGTNTYADSVKGRFTISRDNAKNTVYLQMNSLKPEDTAVYYCAVYYQFNDVSWINHAYWGQGTQVTVSS

SEQ ID NO: 34184 - protein, 120 aa, Artificial Sequence
  Chemically Synthesized
QVQLQESGGGLVQAGGSLRLSCAASGSIFTRGQMGWYRQAPGKERELVAGIAVGGSTNYADSVKGRFTISRDNAKNTVYLQMNSLKPEDTAVYYCAVLDPGYNDVGEGYWGQGTQVTVSS

SEQ ID NO: 34185 - protein, 118 aa, Artificial Sequence
  Chemically Synthesized
QVQLQESGGGLVQAGGSLRLSCAASGSIFWYGIMGWYRQAPGKERELVAAISGGAITYYADSVKGRFTISRDNAKNTVYLQMNSLKPEDTAVYYCAAYIAGRVLHDYWGQGTQVTVSS

SEQ ID NO: 34186 - protein, 125 aa, Artificial Sequence
  Chemically Synthesized
QVQLQESGGGLVQAGGSLRLSCAASGNISDVSGMGWYRQAPGKEREFVAGISEGANTNYADSVKGRFTISRDNAKNTVYLQMNSLKPEDTAVYYCAAGQRDDDDNGDYAVTLYYWGQGTQVTVSS

SEQ ID NO: 34187 - protein, 118 aa, Artificial Sequence
  Chemically Synthesized
QVQLQESGGGLVQAGGSLRLSCAASGTISDITAMGWYRQAPGKERELVAAINHGGTTNYADSVKGRFTISRDNAKNTVYLQMNSLKPEDTAVYYCAVSRYVYESFSYWGQGTQVTVSS

SEQ ID NO: 34188 - protein, 118 aa, Artificial Sequence
  Chemically Synthesized
QVQLQESGGGLVQAGGSLRLSCAASGYISSFADMGWYRQAPGKERELVAAITIGTITNYADSVKGRFTISRDNAKNTVYLQMNSLKPEDTAVYYCAAGYDYREWFGYWGQGTQVTVSS

SEQ ID NO: 34189 - protein, 114 aa, Artificial Sequence
  Chemically Synthesized
QVQLQESGGGLVQAGGSLRLSCAASGSISLYAYMGWYRQAPGKEREFVASIDRGAITNYADSVKGRFTISRDNAKNTVYLQMNSLKPEDTAVYYCAVDDDLKYWGQGTQVTVSS

SEQ ID NO: 34190 - protein, 118 aa, Artificial Sequence
  Chemically Synthesized
QVQLQESGGGLVQAGGSLRLSCAASGYISVYVSMGWYRQAPGKERELVAGIDDGGNTNYADSVKGRFTISRDNAKNTVYLQMNSLKPEDTAVYYCAAYRRGGDLHIYWGQGTQVTVSS

SEQ ID NO: 34191 - protein, 117 aa, Artificial Sequence
  Chemically Synthesized
QVQLQESGGGLVQAGGSLRLSCAASGNISQADWMGWYRQAPGKERELVAGIGWGTITNYADSVKGRFTISRDNAKNTVYLQMNSLKPEDTAVYYCAVPYSTLLVIYWGQGTQVTVSS

SEQ ID NO: 34192 - protein, 122 aa, Artificial Sequence
  Chemically Synthesized
QVQLQESGGGLVQAGGSLRLSCAASGTISYRFEMGWYRQAPGKEREFVAAIAYGTITNYADSVKGRFTISRDNAKNTVYLQMNSLKPEDTAVYYCAVLYDYAPYADDELDYWGQGTQVTVSS

SEQ ID NO: 34193 - protein, 117 aa, Artificial Sequence
  Chemically Synthesized
QVQLQESGGGLVQAGGSLRLSCAASGTCMGWYRQAPGKERELVAGIGPGSNTNYADSVKGRFTISRDNAKNTVYLQMNSLKPEDTAVYYCAAVLFRDRYLLYGYDYWGQGTQVTVSS

SEQ ID NO: 34194 - protein, 114 aa, Artificial Sequence
  Chemically Synthesized
QVQLQESGGGLVQAGGSLRLSCAASGNIFDRYAMGWYRQAPGKEREFVATINDGSTTNYADSVKGRFTISRDNAKNTVYLQMNSLKPEDTAVYYCAVSRELRYWGQGTQVTVSS

SEQ ID NO: 34195 - protein, 116 aa, Artificial Sequence
  Chemically Synthesized
QVQLQESGGGLVQAGGSLRLSCAASGNISGRYTMGWYRQAPGKERELVPVLLRVVLPYADSVKGRFTISRDNAKNTVYLQMNSLKPEDTAVYYCAARSLVVTTLYWGQGTQVTVSS

SEQ ID NO: 34196 - protein, 122 aa, Artificial Sequence
  Chemically Synthesized
QVQLQESGGGLVQAGGSLRLSCAASGSISHTYVMGWYRQAPGKERELVAGITPGGTTYYADSVKGRFTISRDNAKNTVYLQMNSLKPEDTAVYYCAAYGNADETSDGPYQYWGQGTQVTVSS

SEQ ID NO: 34197 - protein, 122 aa, Artificial Sequence
  Chemically Synthesized
QVQLQESGGGLVQAGGSLRLSCAASGTISIDADMGWYRQAPGKERELVAGIGYGTNTNYADSVKGRFTISRDNAKNTVYLQMNSLKPEDTAVYYCAALGYYYVDLYDVHAYWGQGTQVTVSS

SEQ ID NO: 34198 - protein, 117 aa, Artificial Sequence
  Chemically Synthesized
QVQLQESGGGLVQAGGSLRLSCAASGSIFGTGVMGWYRQAPGKERELVAGIAGGLIPYADSVKGRFTISRDNAKNTVYLQMNSLKPEDTAVYYCAVRSAYYYYHDYWGQGTQVTVSS

SEQ ID NO: 34199 - protein, 118 aa, Artificial Sequence
  Chemically Synthesized
QVQLQESGGGLVQAGGSLRLSCAASGSISAVDAMGWYRQAPGKEREFVAGIAGGGTTYYADSVKGRFTISRDNAKNTVYLQMNSLKPEDTAVYYCAAEHASRWRHRYWGQGTQVTVSS

SEQ ID NO: 34200 - protein, 118 aa, Artificial Sequence
  Chemically Synthesized
QVQLQESGGGLVQAGGSLRLSCAASGSIFRFSDMGWYRQAPGKERELVAAIGTGANTYYADSVKGRFTISRDNAKNTVYLQMNSLKPEDTAVYYCAAYDDHYDTLVYWGQGTQVTVSS

SEQ ID NO: 34201 - protein, 122 aa, Artificial Sequence
  Chemically Synthesized
QVQLQESGGGLVQAGGSLRLSCAASGNIFSYEIMGWYRQAPGKERELVAGIGPGATTYYADSVKGRFTISRDNAKNTVYLQMNSLKPEDTAVYYCAADWWGWNYTLDDYRYWGQGTQVTVSS

SEQ ID NO: 34202 - protein, 118 aa, Artificial Sequence
  Chemically Synthesized
QVQLQESGGGLVQAGGSLRLSCAASGSISTGVDMGWYRQAPGKEREFVASISYGTSTYYADSVKGRFTISRDNAKNTVYLQMNSLKPEDTAVYYCAATYIDGEPYDYWGQGTQVTVSS

SEQ ID NO: 34203 - protein, 119 aa, Artificial Sequence
  Chemically Synthesized
QVQLQESGGGLVQAGGSLRLSCAASGSIGYMGWYRQAPGKERELVAGISSGTTTNYADSVKGRFTISRDNAKNTVYLQMNSLKPEDTAVYYCAVDNIFYSGSYGAHLYWGQGTQVTVSS

SEQ ID NO: 34204 - protein, 126 aa, Artificial Sequence
  Chemically Synthesized
QVQLQESGGGLVQAGGSLRLSCAASGNISSQGAMGWYRQAPGKEREFVATINYGSTTYYADSVKGRFTISRDNAKNTVYLQMNSLKPEDTAVYYCAARSLYQVAHVGRDTDDLSYWGQGTQVTVSS

SEQ ID NO: 34205 - protein, 122 aa, Artificial Sequence
  Chemically Synthesized
QVQLQESGGGLVQAGGSLRLSCAASGNISYNAYMGWYRQAPGKEREFVATIASGATTYYADSVKGRFTISRDNAKNTVYLQMNSLKPEDTAVYYCAVNYLHGVSIGLPLEYWGQGTQVTVSS

SEQ ID NO: 34206 - protein, 118 aa, Artificial Sequence
  Chemically Synthesized
QVQLQESGGGLVQAGGSLRLSCAASGTISYSVSMGWYRQAPGKEREFVAGITNGTSTNYADSVKGRFTISRDNAKNTVYLQMNSLKPEDTAVYYCAVRAPDALQYYYWGQGTQVTVSS

SEQ ID NO: 34207 - protein, 120 aa, Artificial Sequence
  Chemically Synthesized
QVQLQESGGGLVQAGGSLRLSCAASGNISTYTDMGWYRQAPGKEREFVPVLVTVVLPYADSVKGRFTISRDNAKNTVYLQMNSLKPEDTAVYYCAAGYVVASNRRRTIYWGQGTQVTVSS

SEQ ID NO: 34208 - protein, 126 aa, Artificial Sequence
  Chemically Synthesized
QVQLQESGGGLVQAGGSLRLSCAASGSISITVTMGWYRQAPGKERELVAAINPGAITYYADSVKGRFTISRDNAKNTVYLQMNSLKPEDTAVYYCAVHTIIYVTPITGIYVTHAYWGQGTQVTVSS

SEQ ID NO: 34209 - protein, 118 aa, Artificial Sequence
  Chemically Synthesized
QVQLQESGGGLVQAGGSLRLSCAASGSIFYVRAMGWYRQAPGKERELVAAISDGTITYYADSVKGRFTISRDNAKNTVYLQMNSLKPEDTAVYYCAAVTWSRSQLVYWGQGTQVTVSS

SEQ ID NO: 34210 - protein, 117 aa, Artificial Sequence
  Chemically Synthesized
QVQLQESGGGLVQAGGSLRLSCAASGTIFGRLTMGWYRQAPGKEREFVASIVTVLIPYADSVKGRFTISRDNAKNTVYLQMNSLKPEDTAVYYCAVTPDTAWTHQYWGQGTQVTVSS

SEQ ID NO: 34211 - protein, 126 aa, Artificial Sequence
  Chemically Synthesized
QVQLQESGGGLVQAGGSLRLSCAASGTIFRDVTMGWYRQAPGKERELVAAIDYGSTTNYADSVKGRFTISRDNAKNTVYLQMNSLKPEDTAVYYCAVGYEVLAQDGEYVITVHWYWGQGTQVTVSS

SEQ ID NO: 34212 - protein, 122 aa, Artificial Sequence
  Chemically Synthesized
QVQLQESGGGLVQAGGSLRLSCAASGSIFGTWTMGWYRQAPGKERELVATISPGTITNYADSVKGRFTISRDNAKNTVYLQMNSLKPEDTAVYYCAARLWDDEPTAGYLIYWGQGTQVTVSS

SEQ ID NO: 34213 - protein, 118 aa, Artificial Sequence
  Chemically Synthesized
QVQLQESGGGLVQAGGSLRLSCAASGTISRGYAMGWYRQAPGKERELVAAIGQGTNTYYADSVKGRFTISRDNAKNTVYLQMNSLKPEDTAVYYCAVKREAAADHAYWGQGTQVTVSS

SEQ ID NO: 34214 - protein, 126 aa, Artificial Sequence
  Chemically Synthesized
QVQLQESGGGLVQAGGSLRLSCAASGNIFADVSMGWYRQAPGKEREFVAAIAWGASTYYADSVKGRFTISRDNAKNTVYLQMNSLKPEDTAVYYCAAYYNIYYQDPYNVVIDLYYWGQGTQVTVSS

SEQ ID NO: 34215 - protein, 117 aa, Artificial Sequence
  Chemically Synthesized
QVQLQESGGGLVQAGGSLRLSCAASGTISTLTMGWYRQAPGKEREFVAAIGYGGSTNYADSVKGRFTISRDNAKNTVYLQMNSLKPEDTAVYYCAVSRDVLPSHDYWGQGTQVTVSS

SEQ ID NO: 34216 - protein, 118 aa, Artificial Sequence
  Chemically Synthesized
QVQLQESGGGLVQAGGSLRLSCAASGYIFAFWYMGWYRQAPGKERELVASIGFGTNTNYADSVKGRFTISRDNAKNTVYLQMNSLKPEDTAVYYCAAEWRTGWQLQYWGQGTQVTVSS

SEQ ID NO: 34217 - protein, 117 aa, Artificial Sequence
  Chemically Synthesized
QVQLQESGGGLVQAGGSLRLSCAASGTISYWWHMGWYRQAPGKERELVATITDGSITYADSVKGRFTISRDNAKNTVYLQMNSLKPEDTAVYYCAVGLWTDFYYDYWGQGTQVTVSS

SEQ ID NO: 34218 - protein, 112 aa, Artificial Sequence
  Chemically Synthesized
QVQLQESGGGLVQAGGSLRLSCAASGTISTQVYMGWYRQAPGKEREFVAGINAGGSTYYADSVKGRFTISRDNAKNTVYLQMNSLKPEDTAVYYCAALYPYWGQGTQVTVSS

SEQ ID NO: 34219 - protein, 113 aa, Artificial Sequence
  Chemically Synthesized
QVQLQESGGGLVQAGGSLRLSCAASGTISGGPNMGWYRQAPGKEREFVAAITLGGITYYADSVKGRFTISRDNAKNTVYLQMNSLKPEDTAVYYCAAYFHDYWGQGTQVTVSS

SEQ ID NO: 34220 - protein, 115 aa, Artificial Sequence
  Chemically Synthesized
QVQLQESGGGLVQAGGSLRLSCAASGTIFGYHKMGWYRQAPGKERELLPWGGTTYYADSVKGRFTISRDNAKNTVYLQMNSLKPEDTAVYYCAARQYYGPYHDYWGQGTQVTVSS

SEQ ID NO: 34221 - protein, 118 aa, Artificial Sequence
  Chemically Synthesized
QVQLQESGGGLVQAGGSLRLSCAASGTISGDWIMGWYRQAPGKERELVAAIDYGATTYYADSVKGRFTISRDNAKNTVYLQMNSLKPEDTAVYYCAAVNAWDTPHIYWGQGTQVTVSS

SEQ ID NO: 34222 - protein, 118 aa, Artificial Sequence
  Chemically Synthesized
QVQLQESGGGLVQAGGSLRLSCAASGTISYSTDMGWYRQAPGKERELVASITPGSSTYYADSVKGRFTISRDNAKNTVYLQMNSLKPEDTAVYYCAAEDPYFYQHPYWGQGTQVTVSS

SEQ ID NO: 34223 - protein, 118 aa, Artificial Sequence
  Chemically Synthesized
QVQLQESGGGLVQAGGSLRLSCAASGYIFAPSPMGWYRQAPGKEREFVASIDPGTITYYADSVKGRFTISRDNAKNTVYLQMNSLKPEDTAVYYCAVTKGGYDYHWYWGQGTQVTVSS

SEQ ID NO: 34224 - protein, 119 aa, Artificial Sequence
  Chemically Synthesized
QVQLQESGGGLVQAGGSLRLSCAASGSISPGHYMGWYRQAPGKERELVAAISAGSNTYYADSVKGRFTISRDNAKNTVYLQMNSLKPEDTAVYYCAVYLAYSGAPHTYWGQGTQVTVSS

SEQ ID NO: 34225 - protein, 121 aa, Artificial Sequence
  Chemically Synthesized
QVQLQESGGGLVQAGGSLRLSCAASGTIFDYAMGWYRQAPGKEREFVATIGAGGNTYYADSVKGRFTISRDNAKNTVYLQMNSLKPEDTAVYYCAVNTGDEEGNVSDYPYWGQGTQVTVSS

SEQ ID NO: 34226 - protein, 118 aa, Artificial Sequence
  Chemically Synthesized
QVQLQESGGGLVQAGGSLRLSCAASGNISDKDAMGWYRQAPGKERELVAAINRGSITNYADSVKGRFTISRDNAKNTVYLQMNSLKPEDTAVYYCAAGGTTHNAHTYWGQGTQVTVSS

SEQ ID NO: 34227 - protein, 117 aa, Artificial Sequence
  Chemically Synthesized
QVQLQESGGGLVQAGGSLRLSCAASGSISPVYVMGWYRQAPGKERELVAAITYGVLPYADSVKGRFTISRDNAKNTVYLQMNSLKPEDTAVYYCAVEGYGYDDLEYWGQGTQVTVSS

SEQ ID NO: 34228 - protein, 125 aa, Artificial Sequence
  Chemically Synthesized
QVQLQESGGGLVQAGGSLRLSCAASGNISSHAAMGWYRQAPGKERELVASIDAGTTTYYADSVKGRFTISRDNAKNTVYLQMNSLKPEDTAVYYCAVAQVADPLLYANSRVVLYWGQGTQVTVSS

SEQ ID NO: 34229 - protein, 117 aa, Artificial Sequence
  Chemically Synthesized
QVQLQESGGGLVQAGGSLRLSCAASGTIFAASDMGWYRQAPGKEREFVAAMSGWYYQYADSVKGRFTISRDNAKNTVYLQMNSLKPEDTAVYYCAARQPYYNPYGYWGQGTQVTVSS

SEQ ID NO: 34230 - protein, 117 aa, Artificial Sequence
  Chemically Synthesized
QVQLQESGGGLVQAGGSLRLSCAASGYISIGGGMGWYRQAPGKERELLPVLISVVVPYADSVKGRFTISRDNAKNTVYLQMNSLKPEDTAVYYCAVLPSHHGAHAYWGQGTQVTVSS

SEQ ID NO: 34231 - protein, 113 aa, Artificial Sequence
  Chemically Synthesized
QVQLQESGGGLVQAGGSLRLSCAASGTIFGYYGMGWYRQAPGKERELVASIAAGTTTNYADSVKGRFTISRDNAKNTVYLQMNSLKPEDTAVYYCAVYHGIYWGQGTQVTVSS

SEQ ID NO: 34232 - protein, 122 aa, Artificial Sequence
  Chemically Synthesized
QVQLQESGGGLVQAGGSLRLSCAASGNISRRYDMGWYRQAPGKERELVASIGAGGTTNYADSVKGRFTISRDNAKNTVYLQMNSLKPEDTAVYYCAADSRFYVQIPVGHWYWGQGTQVTVSS

SEQ ID NO: 34233 - protein, 121 aa, Artificial Sequence
  Chemically Synthesized
QVQLQESGGGLVQAGGSLRLSCAASGYISYNIYMGWYRQAPGKEREFVAAIADGGNTYYADSVKGRFTISRDNAKNTVYLQMNSLKPEDTAVYYCATQAGQYSYLTDHPYWGQGTQVTVSS

SEQ ID NO: 34234 - protein, 122 aa, Artificial Sequence
  Chemically Synthesized
QVQLQESGGGLVQAGGSLRLSCAASGNISNDASMGWYRQAPGKERELVAAIGTGSTTYYADSVKGRFTISRDNAKNTVYLQMNSLKPEDTAVYYCAANRHADSYYFDTYPYWGQGTQVTVSS

SEQ ID NO: 34235 - protein, 118 aa, Artificial Sequence
  Chemically Synthesized
QVQLQESGGGLVQAGGSLRLSCAASGTISGTALMGWYRQAPGKERELVASIDYGAITYYADSVKGRFTISRDNAKNTVYLQMNSLKPEDTAVYYCAATTEIPGSLEYWGQGTQVTVSS

SEQ ID NO: 34236 - protein, 126 aa, Artificial Sequence
  Chemically Synthesized
QVQLQESGGGLVQAGGSLRLSCAASGTISIWHYMGWYRQAPGKEREFVAGISRGSTTNYADSVKGRFTISRDNAKNTVYLQMNSLKPEDTAVYYCAVYDNQDRVDYATTAEWHAYWGQGTQVTVSS

SEQ ID NO: 34237 - protein, 118 aa, Artificial Sequence
  Chemically Synthesized
QVQLQESGGGLVQAGGSLRLSCAASGYIFTLYVMGWYRQAPGKEREFVAGIAGGGSTYYADSVKGRFTISRDNAKNTVYLQMNSLKPEDTAVYYCAVWSEGYVPHLYWGQGTQVTVSS

SEQ ID NO: 34238 - protein, 123 aa, Artificial Sequence
  Chemically Synthesized
QVQLQESGGGLVQAGGSLRLSCAASGYISQTYGMGWYRQAPGKERELVAGISYGTITYYADSVKGRFTISRDNAKNTVYLQMNSLKPEDTAVYYCAVGAPDRSGYADYPHDYWGQGTQVTVSS

SEQ ID NO: 34239 - protein, 126 aa, Artificial Sequence
  Chemically Synthesized
QVQLQESGGGLVQAGGSLRLSCAASGYISGDSTMGWYRQAPGKERELVASIGDGAITNYADSVKGRFTISRDNAKNTVYLQMNSLKPEDTAVYYCAAYWIDTHKNPRYAYRSFYYWGQGTQVTVSS

SEQ ID NO: 34240 - protein, 118 aa, Artificial Sequence
  Chemically Synthesized
QVQLQESGGGLVQAGGSLRLSCAASGSISSWFPMGWYRQAPGKERELVAGITYGSSTNYADSVKGRFTISRDNAKNTVYLQMNSLKPEDTAVYYCAVNRRYYLGYYYWGQGTQVTVSS

SEQ ID NO: 34241 - protein, 122 aa, Artificial Sequence
  Chemically Synthesized
QVQLQESGGGLVQAGGSLRLSCAASGSIFDSRGMGWYRQAPGKEREFVATINFGSITNYADSVKGRFTISRDNAKNTVYLQMNSLKPEDTAVYYCAVAPVGTRTYGYSFDYWGQGTQVTVSS

SEQ ID NO: 34242 - protein, 124 aa, Artificial Sequence
  Chemically Synthesized
QVQLQESGGGLVQAGGSLRLSCAASGSISGDEYMGWYRQAPGKERELVATISTGASTYYADSVKGRFTISRDNAKNTVYLQMNSLKPEDTAVYYCAVLNDGQGYDSGGTSVMYWGQGTQVTVSS

SEQ ID NO: 34243 - protein, 122 aa, Artificial Sequence
  Chemically Synthesized
QVQLQESGGGLVQAGGSLRLSCAASGSIFDPRYMGWYRQAPGKERELVASIGSGSITNYADSVKGRFTISRDNAKNTVYLQMNSLKPEDTAVYYCAAVTARSYDDWDVHTYWGQGTQVTVSS

SEQ ID NO: 34244 - protein, 119 aa, Artificial Sequence
  Chemically Synthesized
QVQLQESGGGLVQAGGSLRLSCAASGSISRGRKMGWYRQAPGKERELVATIGYGSSTYYADSVKGRFTISRDNAKNTVYLQMNSLKPEDTAVYYCAAYGPFARHRYGYWGQGTQVTVSS

SEQ ID NO: 34245 - protein, 118 aa, Artificial Sequence
  Chemically Synthesized
QVQLQESGGGLVQAGGSLRLSCAASGYIFSDVAMGWYRQAPGKEREFVATIAPGTTTNYADSVKGRFTISRDNAKNTVYLQMNSLKPEDTAVYYCAVSYRASSFHGYWGQGTQVTVSS

SEQ ID NO: 34246 - protein, 122 aa, Artificial Sequence
  Chemically Synthesized
QVQLQESGGGLVQAGGSLRLSCAASGTIFGGGHMGWYRQAPGKERELVAGIGYGGTTYYADSVKGRFTISRDNAKNTVYLQMNSLKPEDTAVYYCAAGPASANGDQNQHYYWGQGTQVTVSS

SEQ ID NO: 34247 - protein, 111 aa, Artificial Sequence
  Chemically Synthesized
QVQLQESGGGLVQAGGSLRLSCAASGNIFSVPTMGWYRQAPGKERELVATITTGGITNYADSVKGRFTISRDNAKNTVYLQMNSLKPEDTAVYYCALTLYWGQGTQVTVSS

SEQ ID NO: 34248 - protein, 125 aa, Artificial Sequence
  Chemically Synthesized
QVQLQESGGGLVQAGGSLRLSCAASGTIFWAYGMGWYRQAPGKEREFVAVLLTVLLPYADSVKGRFTISRDNAKNTVYLQMNSLKPEDTAVYYCAVSGPSYLDAVRGGYADFGYWGQGTQVTVSS

SEQ ID NO: 34249 - protein, 113 aa, Artificial Sequence
  Chemically Synthesized
QVQLQESGGGLVQAGGSLRLSCAASGIFLSLHLMGWYRQAPGKERELVAGIGYGSTTYYADSVKGRFTISRDNAKNTVYLQMNSLKPEDTAVYYCADRLPCYWGQGTQVTVSS

SEQ ID NO: 34250 - protein, 126 aa, Artificial Sequence
  Chemically Synthesized
QVQLQESGGGLVQAGGSLRLSCAASGTISDPYYMGWYRQAPGKEREFVAAIGYGGITYYADSVKGRFTISRDNAKNTVYLQMNSLKPEDTAVYYCAVWDHTRGAHGRYRWPAHVYWGQGTQVTVSS

SEQ ID NO: 34251 - protein, 123 aa, Artificial Sequence
  Chemically Synthesized
QVQLQESGGGLVQAGGSLRLSCAASGSISGLYDMGWYRQAPGKERELVASIDAGASTNYADSVKGRFTISRDNAKNTVYLQMNSLKPEDTAVYYCAVPSDRYTRTYDYNHTYWGQGTQVTVSS

SEQ ID NO: 34252 - protein, 118 aa, Artificial Sequence
  Chemically Synthesized
QVQLQESGGGLVQAGGSLRLSCAASGYISYGPSMGWYRQAPGKERELVAGINSGANTNYADSVKGRFTISRDNAKNTVYLQMNSLKPEDTAVYYCAANAVYLPFFRYWGQGTQVTVSS

SEQ ID NO: 34253 - protein, 121 aa, Artificial Sequence
  Chemically Synthesized
QVQLQESGGGLVQAGGSLRLSCAASGTIFYDVMGWYRQAPGKERELVAAIGDGGITYYADSVKGRFTISRDNAKNTVYLQMNSLKPEDTAVYYCAVNLYLAIEDYYILRYWGQGTQVTVSS

SEQ ID NO: 34254 - protein, 110 aa, Artificial Sequence
  Chemically Synthesized
QVQLQESGGGLVQAGGSLRLSCAASGTIFSGPYMGWYRQAPGKERELVAAIAGVIPYADSVKGRFTISRDNAKNTVYLQMNSLKPEDTAVYYCAVYRAYWGQGTQVTVSS

SEQ ID NO: 34255 - protein, 122 aa, Artificial Sequence
  Chemically Synthesized
QVQLQESGGGLVQAGGSLRLSCAASGSISSSYAMGWYRQAPGKEREFVAAIASGGNTNYADSVKGRFTISRDNAKNTVYLQMNSLKPEDTAVYYCAVDYNLAGDSWVYFIYWGQGTQVTVSS

SEQ ID NO: 34256 - protein, 118 aa, Artificial Sequence
  Chemically Synthesized
QVQLQESGGGLVQAGGSLRLSCAASGTIFLPWFMGWYRQAPGKERELVAAIGEGTSTNYADSVKGRFTISRDNAKNTVYLQMNSLKPEDTAVYYCAANRSFTLAYQYWGQGTQVTVSS

SEQ ID NO: 34257 - protein, 125 aa, Artificial Sequence
  Chemically Synthesized
QVQLQESGGGLVQAGGSLRLSCAASGNIFDQYSMGWYRQAPGKERELVATIDAGGITYYADSVKGRFTISRDNAKNTVYLQMNSLKPEDTAVYYCAATSYQHYDAGVDYAVLSYWGQGTQVTVSS

SEQ ID NO: 34258 - protein, 126 aa, Artificial Sequence
  Chemically Synthesized
QVQLQESGGGLVQAGGSLRLSCAASGSIFYWDYMGWYRQAPGKEREFVAGIALGGITNYADSVKGRFTISRDNAKNTVYLQMNSLKPEDTAVYYCAVVYDGRYAVSQRDPWGYRYWGQGTQVTVSS

SEQ ID NO: 34259 - protein, 122 aa, Artificial Sequence
  Chemically Synthesized
QVQLQESGGGLVQAGGSLRLSCAASGTISYDRPMGWYRQAPGKERELVASIDVGGSTNYADSVKGRFTISRDNAKNTVYLQMNSLKPEDTAVYYCAARNSPLVQYWARFTYWGQGTQVTVSS

SEQ ID NO: 34260 - protein, 118 aa, Artificial Sequence
  Chemically Synthesized
QVQLQESGGGLVQAGGSLRLSCAASGSISYYAPMGWYRQAPGKERELVAAISLGGSTNYADSVKGRFTISRDNAKNTVYLQMNSLKPEDTAVYYCAADDYGPVNYSYWGQGTQVTVSS

SEQ ID NO: 34261 - protein, 122 aa, Artificial Sequence
  Chemically Synthesized
QVQLQESGGGLVQAGGSLRLSCAASGTISVYFYMGWYRQAPGKERELVAGIALGTNTYYADSVKGRFTISRDNAKNTVYLQMNSLKPEDTAVYYCAVGPPYDSDGYQHLPYWGQGTQVTVSS

SEQ ID NO: 34262 - protein, 121 aa, Artificial Sequence
  Chemically Synthesized
QVQLQESGGGLVQAGGSLRLSCAASGSISSRLMGWYRQAPGKEREFVAGISGGGTTYYADSVKGRFTISRDNAKNTVYLQMNSLKPEDTAVYYCAASQAYNQPTTRNHDYWGQGTQVTVSS

SEQ ID NO: 34263 - protein, 117 aa, Artificial Sequence
  Chemically Synthesized
QVQLQESGGGLVQAGGSLRLSCAASGNISFDVDMGWYRQAPGKEREFVAAINNGSNTYYADSVKGRFTISRDNAKNTVYLQMNSLKPEDTAVYYCATLLLKTGVIYWGQGTQVTVSS

SEQ ID NO: 34264 - protein, 111 aa, Artificial Sequence
  Chemically Synthesized
QVQLQESGGGLVQAGGSLRLSCAASGSISVYSLMGWYRQAPGKEREFVAAINSGSSTNYADSVKGRFTISRDNAKNTVYLQMNSLKPEDTAVYYCAYHIYWGQGTQVTVSS

SEQ ID NO: 34265 - protein, 125 aa, Artificial Sequence
  Chemically Synthesized
QVQLQESGGGLVQAGGSLRLSCAASGNISGGRNMGWYRQAPGKEREFVAAINVGTSTNYADSVKGRFTISRDNAKNTVYLQMNSLKPEDTAVYYCAADWYVGTIFGALSWSSSYWGQGTQVTVSS

SEQ ID NO: 34266 - protein, 118 aa, Artificial Sequence
  Chemically Synthesized
QVQLQESGGGLVQAGGSLRLSCAASGYIFTLNYMGWYRQAPGKERELVASIDGGGSTNYADSVKGRFTISRDNAKNTVYLQMNSLKPEDTAVYYCAAYNLQAYPHRYWGQGTQVTVSS

SEQ ID NO: 34267 - protein, 118 aa, Artificial Sequence
  Chemically Synthesized
QVQLQESGGGLVQAGGSLRLSCAASGSISRRNGMGWYRQAPGKEREFVATITSGTITNYADSVKGRFTISRDNAKNTVYLQMNSLKPEDTAVYYCAAGYNLTYKYYYWGQGTQVTVSS

SEQ ID NO: 34268 - protein, 112 aa, Artificial Sequence
  Chemically Synthesized
QVQLQESGGGLVQAGGSLRLSCAASGYIFSGGYMGWYRQAPGKEREFVAGIALGSITNYADSVKGRFTISRDNAKNTVYLQMNSLKPEDTAVYYCAVGPPYWGQGTQVTVSS

SEQ ID NO: 34269 - protein, 121 aa, Artificial Sequence
  Chemically Synthesized
QVQLQESGGGLVQAGGSLRLSCAASGNISNTTDMGWYRQAPGKEREFVATISSGSSTYYADSVKGRFTISRDNAKNTVYLQMNSLKPEDTAVYYCAVATGTTVTRVVTIYWGQGTQVTVSS

SEQ ID NO: 34270 - protein, 125 aa, Artificial Sequence
  Chemically Synthesized
QVQLQESGGGLVQAGGSLRLSCAASGYISPLDYMGWYRQAPGKERELVASIGPGGTTNYADSVKGRFTISRDNAKNTVYLQMNSLKPEDTAVYYCAAVPADPWYTDYSVLRVIYWGQGTQVTVSS

SEQ ID NO: 34271 - protein, 122 aa, Artificial Sequence
  Chemically Synthesized
QVQLQESGGGLVQAGGSLRLSCAASGNISADYLMGWYRQAPGKEREFVASIGLGTSTNYADSVKGRFTISRDNAKNTVYLQMNSLKPEDTAVYYCAATYPDDFRGYPFHYYWGQGTQVTVSS

SEQ ID NO: 34272 - protein, 121 aa, Artificial Sequence
  Chemically Synthesized
QVQLQESGGGLVQAGGSLRLSCAASGYISPPMMGWYRQAPGKEREFVASISDGGTTYYADSVKGRFTISRDNAKNTVYLQMNSLKPEDTAVYYCAAGVSEDSRSQSRHDYWGQGTQVTVSS

SEQ ID NO: 34273 - protein, 126 aa, Artificial Sequence
  Chemically Synthesized
QVQLQESGGGLVQAGGSLRLSCAASGTIFYGSDMGWYRQAPGKEREFVASINDGSNTNYADSVKGRFTISRDNAKNTVYLQMNSLKPEDTAVYYCAARINADGYIDAVVQYGYQYWGQGTQVTVSS

SEQ ID NO: 34274 - protein, 112 aa, Artificial Sequence
  Chemically Synthesized
QVQLQESGGGLVQAGGSLRLSCAASGNIMGWYRQAPGKERELVAAIDRGTSPYADSVKGRFTISRDNAKNTVYLQMNSLKPEDTAVYYCAVYFSRFGNHFYWGQGTQVTVSS

SEQ ID NO: 34275 - protein, 118 aa, Artificial Sequence
  Chemically Synthesized
QVQLQESGGGLVQAGGSLRLSCAASGTIFLTYYMGWYRQAPGKERELVAGIDGGSNTNYADSVKGRFTISRDNAKNTVYLQMNSLKPEDTAVYYCAAPPYVYNDHLYWGQGTQVTVSS

SEQ ID NO: 34276 - protein, 122 aa, Artificial Sequence
  Chemically Synthesized
QVQLQESGGGLVQAGGSLRLSCAASGTIFYYWYMGWYRQAPGKERELVASIGYGGTTYYADSVKGRFTISRDNAKNTVYLQMNSLKPEDTAVYYCAAAVADKGYFGIDFSYWGQGTQVTVSS

SEQ ID NO: 34277 - protein, 121 aa, Artificial Sequence
  Chemically Synthesized
QVQLQESGGGLVQAGGSLRLSCAASGTISEPTVMGWYRQAPGKERELVASLVVVLLPYADSVKGRFTISRDNAKNTVYLQMNSLKPEDTAVYYCAVASGYYGDTDADHPYWGQGTQVTVSS

SEQ ID NO: 34278 - protein, 124 aa, Artificial Sequence
  Chemically Synthesized
QVQLQESGGGLVQAGGSLRLSCAASGTISYAGRMGWYRQAPGKERELVALVTVLIPYADSVKGRFTISRDNAKNTVYLQMNSLKPEDTAVYYCAVDTWLYASYRPYHSVYYLYWGQGTQVTVSS

SEQ ID NO: 34279 - protein, 117 aa, Artificial Sequence
  Chemically Synthesized
QVQLQESGGGLVQAGGSLRLSCAASGNIFDYYAMGWYRQAPGKERELVAGINNGSTTYYADSVKGRFTISRDNAKNTVYLQMNSLKPEDTAVYYCAVAYKQSLLSYWGQGTQVTVSS

SEQ ID NO: 34280 - protein, 122 aa, Artificial Sequence
  Chemically Synthesized
QVQLQESGGGLVQAGGSLRLSCAASGTISHAWIMGWYRQAPGKEREFVAAIADGTTTYYADSVKGRFTISRDNAKNTVYLQMNSLKPEDTAVYYCAAPPIGYRWTGDFYGYWGQGTQVTVSS

SEQ ID NO: 34281 - protein, 121 aa, Artificial Sequence
  Chemically Synthesized
QVQLQESGGGLVQAGGSLRLSCAASGTISSCCMGWYRQAPGKEREFVAAIGLGGNTNYADSVKGRFTISRDNAKNTVYLQMNSLKPEDTAVYYCAAYTDISWFASGAHYYWGQGTQVTVSS

SEQ ID NO: 34282 - protein, 111 aa, Artificial Sequence
  Chemically Synthesized
QVQLQESGGGLVQAGGSLRLSCAASGSIFISSHMGWYRQAPGKEREFVAGISAGGTTYADSVKGRFTISRDNAKNTVYLQMNSLKPEDTAVYYCAVEADYWGQGTQVTVSS

SEQ ID NO: 34283 - protein, 122 aa, Artificial Sequence
  Chemically Synthesized
QVQLQESGGGLVQAGGSLRLSCAASGTISRYRVMGWYRQAPGKERELVASITGGGSTNYADSVKGRFTISRDNAKNTVYLQMNSLKPEDTAVYYCAATPYEYATGLDDFYYWGQGTQVTVSS

SEQ ID NO: 34284 - protein, 124 aa, Artificial Sequence
  Chemically Synthesized
QVQLQESGGGLVQAGGSLRLSCAASGTISNRDTMGWYRQAPGKERELVASIDSVLLPYADSVKGRFTISRDNAKNTVYLQMNSLKPEDTAVYYCAVVLPITAGTHFSIVGHRYWGQGTQVTVSS

SEQ ID NO: 34285 - protein, 118 aa, Artificial Sequence
  Chemically Synthesized
QVQLQESGGGLVQAGGSLRLSCAASGYISVFGGMGWYRQAPGKERELVAGITDGSTTNYADSVKGRFTISRDNAKNTVYLQMNSLKPEDTAVYYCAASEQDDSYHLYWGQGTQVTVSS

SEQ ID NO: 34286 - protein, 121 aa, Artificial Sequence
  Chemically Synthesized
QVQLQESGGGLVQAGGSLRLSCAASGSISYQYAMGWYRQAPGKEREFVASIAYGGSTNYADSVKGRFTISRDNAKNTVYLQMNSLKPEDTAVYYCAFVVRLLVVLTVTIYWGQGTQVTVSS

SEQ ID NO: 34287 - protein, 122 aa, Artificial Sequence
  Chemically Synthesized
QVQLQESGGGLVQAGGSLRLSCAASGYIFWGDYMGWYRQAPGKERELVATIGFGANTYYADSVKGRFTISRDNAKNTVYLQMNSLKPEDTAVYYCAVPPKTYLTGYAILAYWGQGTQVTVSS

SEQ ID NO: 34288 - protein, 117 aa, Artificial Sequence
  Chemically Synthesized
QVQLQESGGGLVQAGGSLRLSCAASGTILLRTMGWYRQAPGKERELVATIGKGSTTNYADSVKGRFTISRDNAKNTVYLQMNSLKPEDTAVYYCAVWEDIVDDHNYWGQGTQVTVSS

SEQ ID NO: 34289 - protein, 118 aa, Artificial Sequence
  Chemically Synthesized
QVQLQESGGGLVQAGGSLRLSCAASGTIFDGHRMGWYRQAPGKERELVAAINQGGSTNYADSVKGRFTISRDNAKNTVYLQMNSLKPEDTAVYYCAVYINADYQFRYWGQGTQVTVSS

SEQ ID NO: 34290 - protein, 117 aa, Artificial Sequence
  Chemically Synthesized
QVQLQESGGGLVQAGGSLRLSCAASGYIFQDYPMGWYRQAPGKEREFVATIGGGGITNYADSVKGRFTISRDNAKNTVYLQMNSLKPEDTAVYYCAASHARLSLAYWGQGTQVTVSS

SEQ ID NO: 34291 - protein, 122 aa, Artificial Sequence
  Chemically Synthesized
QVQLQESGGGLVQAGGSLRLSCAASGTIFTRLRMGWYRQAPGKERELVAAISYGGNTYYADSVKGRFTISRDNAKNTVYLQMNSLKPEDTAVYYCAADGDEYDDGSNDHNYWGQGTQVTVSS

SEQ ID NO: 34292 - protein, 122 aa, Artificial Sequence
  Chemically Synthesized
QVQLQESGGGLVQAGGSLRLSCAASGTIFDHSDMGWYRQAPGKERELVAGIDYGTTTNYADSVKGRFTISRDNAKNTVYLQMNSLKPEDTAVYYCAVAQYDYYDQGRPYTYWGQGTQVTVSS

SEQ ID NO: 34293 - protein, 112 aa, Artificial Sequence
  Chemically Synthesized
QVQLQESGGGLVQAGGSLRLSCAASGTISPPVVMGWYRQAPGKERELVAGISDGSSTNYADSVKGRFTISRDNAKNTVYLQMNSLKPEDTAVYYCAADERYWGQGTQVTVSS

SEQ ID NO: 34294 - protein, 122 aa, Artificial Sequence
  Chemically Synthesized
QVQLQESGGGLVQAGGSLRLSCAASGTIFGATTMGWYRQAPGKERELVAAIDNGGSTYYADSVKGRFTISRDNAKNTVYLQMNSLKPEDTAVYYCAVYRHYIVLPDLYYHYWGQGTQVTVSS

SEQ ID NO: 34295 - protein, 118 aa, Artificial Sequence
  Chemically Synthesized
QVQLQESGGGLVQAGGSLRLSCAASGTIFLTRYMGWYRQAPGKERELVATINYGGSTYYADSVKGRFTISRDNAKNTVYLQMNSLKPEDTAVYYCAAYRTADDRYQYWGQGTQVTVSS

SEQ ID NO: 34296 - protein, 122 aa, Artificial Sequence
  Chemically Synthesized
QVQLQESGGGLVQAGGSLRLSCAASGTISTRSGMGWYRQAPGKERELVAGITAGGSTNYADSVKGRFTISRDNAKNTVYLQMNSLKPEDTAVYYCAVKSGTRGGGTGTFGYWGQGTQVTVSS

SEQ ID NO: 34297 - protein, 122 aa, Artificial Sequence
  Chemically Synthesized
QVQLQESGGGLVQAGGSLRLSCAASGTISRNSNMGWYRQAPGKEREFVATISAGATTNYADSVKGRFTISRDNAKNTVYLQMNSLKPEDTAVYYCAAERWQKIVDNPSHAYWGQGTQVTVSS

SEQ ID NO: 34298 - protein, 122 aa, Artificial Sequence
  Chemically Synthesized
QVQLQESGGGLVQAGGSLRLSCAASGYIFRRWDMGWYRQAPGKERELVAGITYGSITNYADSVKGRFTISRDNAKNTVYLQMNSLKPEDTAVYYCAVYRYDRRLYNSYFPYWGQGTQVTVSS

SEQ ID NO: 34299 - protein, 117 aa, Artificial Sequence
  Chemically Synthesized
QVQLQESGGGLVQAGGSLRLSCAASGSIFRFVRMGWYRQAPGKEREFVATIAKGSTTYADSVKGRFTISRDNAKNTVYLQMNSLKPEDTAVYYCAAVPSGPVILYYWGQGTQVTVSS

SEQ ID NO: 34300 - protein, 126 aa, Artificial Sequence
  Chemically Synthesized
QVQLQESGGGLVQAGGSLRLSCAASGTISDQRYMGWYRQAPGKERELVASISVGGNTNYADSVKGRFTISRDNAKNTVYLQMNSLKPEDTAVYYCAAAGNDPVEITDDVRELHTYWGQGTQVTVSS

SEQ ID NO: 34301 - protein, 121 aa, Artificial Sequence
  Chemically Synthesized
QVQLQESGGGLVQAGGSLRLSCAASGYIFTSGSMGWYRQAPGKERELVASIGLGGNTNYADSVKGRFTISRDNAKNTVYLQMNSLKPEDTAVYYCAAGFKSTCLLLLVLYWGQGTQVTVSS

SEQ ID NO: 34302 - protein, 122 aa, Artificial Sequence
  Chemically Synthesized
QVQLQESGGGLVQAGGSLRLSCAASGSISNTTTMGWYRQAPGKERELVAAISYGASTYYADSVKGRFTISRDNAKNTVYLQMNSLKPEDTAVYYCAVYTYADDASVLTHGYWGQGTQVTVSS

SEQ ID NO: 34303 - protein, 122 aa, Artificial Sequence
  Chemically Synthesized
QVQLQESGGGLVQAGGSLRLSCAASGNISASYIMGWYRQAPGKERELVATIDWGGNTNYADSVKGRFTISRDNAKNTVYLQMNSLKPEDTAVYYCAAFRPDDAPTYVQHLYWGQGTQVTVSS

SEQ ID NO: 34304 - protein, 126 aa, Artificial Sequence
  Chemically Synthesized
QVQLQESGGGLVQAGGSLRLSCAASGTISDYITMGWYRQAPGKERELVAGIGIGGITYYADSVKGRFTISRDNAKNTVYLQMNSLKPEDTAVYYCAANWDEYLDPWRYPYDDHAYWGQGTQVTVSS

SEQ ID NO: 34305 - protein, 116 aa, Artificial Sequence
  Chemically Synthesized
QVQLQESGGGLVQAGGSLRLSCAASGSISLTIMGWYRQAPGKEREFVATIDGGTITNYADSVKGRFTISRDNAKNTVYLQMNSLKPEDTAVYYCAAAYPTTTVLYWGQGTQVTVSS

SEQ ID NO: 34306 - protein, 122 aa, Artificial Sequence
  Chemically Synthesized
QVQLQESGGGLVQAGGSLRLSCAASGTISLRASMGWYRQAPGKERELVASIALGGTTYYADSVKGRFTISRDNAKNTVYLQMNSLKPEDTAVYYCAVYGPYIYDTAITHYYWGQGTQVTVSS

SEQ ID NO: 34307 - protein, 118 aa, Artificial Sequence
  Chemically Synthesized
QVQLQESGGGLVQAGGSLRLSCAASGTISATYLMGWYRQAPGKERELVATISYGTNTNYADSVKGRFTISRDNAKNTVYLQMNSLKPEDTAVYYCAVYGADLVQLYYWGQGTQVTVSS

SEQ ID NO: 34308 - protein, 114 aa, Artificial Sequence
  Chemically Synthesized
QVQLQESGGGLVQAGGSLRLSCAASGTISAVYYMGWYRQAPGKERELVAGIDYGASTYYADSVKGRFTISRDNAKNTVYLQMNSLKPEDTAVYYCAATTEHYYWGQGTQVTVSS

SEQ ID NO: 34309 - protein, 118 aa, Artificial Sequence
  Chemically Synthesized
QVQLQESGGGLVQAGGSLRLSCAASGNIFVRTYMGWYRQAPGKERELVAAIGQGTNTYYADSVKGRFTISRDNAKNTVYLQMNSLKPEDTAVYYCAAFFRDPRDFLYWGQGTQVTVSS

SEQ ID NO: 34310 - protein, 119 aa, Artificial Sequence
  Chemically Synthesized
QVQLQESGGGLVQAGGSLRLSCAASGYMGWYRQAPGKERELVASIDPGGSTYYADSVKGRFTISRDNAKNTVYLQMNSLKPEDTAVYYCAAHTTYGNDGVSTTFGRLYWGQGTQVTVSS

SEQ ID NO: 34311 - protein, 115 aa, Artificial Sequence
  Chemically Synthesized
QVQLQESGGGLVQAGGSLRLSCAASGNIFYAQDMGWYRQAPGKERELVASIGIGSTTNYADSVKGRFTISRDNAKNTVYLQMNSLKPEDTAVYYCAVTLRCCMYWGQGTQVTVSS

SEQ ID NO: 34312 - protein, 122 aa, Artificial Sequence
  Chemically Synthesized
QVQLQESGGGLVQAGGSLRLSCAASGNISSNGYMGWYRQAPGKERELVAGIAVGGSTNYADSVKGRFTISRDNAKNTVYLQMNSLKPEDTAVYYCAAQGYHVDTTPNCRIYWGQGTQVTVSS

SEQ ID NO: 34313 - protein, 118 aa, Artificial Sequence
  Chemically Synthesized
QVQLQESGGGLVQAGGSLRLSCAASGTIFRYRPMGWYRQAPGKERELVATIGSGTTTNYADSVKGRFTISRDNAKNTVYLQMNSLKPEDTAVYYCAVLHRYRAHHVYWGQGTQVTVSS

SEQ ID NO: 34314 - protein, 122 aa, Artificial Sequence
  Chemically Synthesized
QVQLQESGGGLVQAGGSLRLSCAASGYIFGRYYMGWYRQAPGKERELVATISTGSSTNYADSVKGRFTISRDNAKNTVYLQMNSLKPEDTAVYYCAAFAYLYPQDYVTHYYWGQGTQVTVSS

SEQ ID NO: 34315 - protein, 119 aa, Artificial Sequence
  Chemically Synthesized
QVQLQESGGGLVQAGGSLRLSCAASGSISVYGVMGWYRQAPGKERELVAGINSVGASTYYADSVKGRFTISRDNAKNTVYLQMNSLKPEDTAVYYCAVDGYVTQRFPYWGQGTQVTVSS

SEQ ID NO: 34316 - protein, 117 aa, Artificial Sequence
  Chemically Synthesized
QVQLQESGGGLVQAGGSLRLSCAASGNIFTDYYMGWYRQAPGKEREFVAGIGGGATTNYADSVKGRFTISRDNAKNTVYLQMNSLKPEDTAVYYCAVDRYRESLLYWGQGTQVTVSS

SEQ ID NO: 34317 - protein, 126 aa, Artificial Sequence
  Chemically Synthesized
QVQLQESGGGLVQAGGSLRLSCAASGNISAGVYMGWYRQAPGKERELVATIDTGATTYYADSVKGRFTISRDNAKNTVYLQMNSLKPEDTAVYYCAVGRDQYTPDPWRPADVLYYWGQGTQVTVSS

SEQ ID NO: 34318 - protein, 117 aa, Artificial Sequence
  Chemically Synthesized
QVQLQESGGGLVQAGGSLRLSCAASGNISTDSGMGWYRQAPGKEREFVAGINSVVIPYADSVKGRFTISRDNAKNTVYLQMNSLKPEDTAVYYCAAVFWYLIAFAYWGQGTQVTVSS

SEQ ID NO: 34319 - protein, 118 aa, Artificial Sequence
  Chemically Synthesized
QVQLQESGGGLVQAGGSLRLSCAASGTIFLYDVMGWYRQAPGKEREFVAAIDHGGITYYADSVKGRFTISRDNAKNTVYLQMNSLKPEDTAVYYCAAYVRTYGVLIYWGQGTQVTVSS

SEQ ID NO: 34320 - protein, 112 aa, Artificial Sequence
  Chemically Synthesized
QVQLQESGGGLVQAGGSLRLSCAASGSISDRVSMGWYRQAPGKEREFVAGINAGTSTYYADSVKGRFTISRDNAKNTVYLQMNSLKPEDTAVYYCAAVHGYWGQGTQVTVSS

SEQ ID NO: 34321 - protein, 121 aa, Artificial Sequence
  Chemically Synthesized
QVQLQESGGGLVQAGGSLRLSCAASGSISQTYAMGWYRQAPGKERELVATIITVLLPYADSVKGRFTISRDNAKNTVYLQMNSLKPEDTAVYYCAAGADPYADYEQYYDYWGQGTQVTVSS

SEQ ID NO: 34322 - protein, 122 aa, Artificial Sequence
  Chemically Synthesized
QVQLQESGGGLVQAGGSLRLSCAASGSISSDQHMGWYRQAPGKEREFVASIAYGGTTYYADSVKGRFTISRDNAKNTVYLQMNSLKPEDTAVYYCAVRGSNQLYPFLAASYWGQGTQVTVSS

SEQ ID NO: 34323 - protein, 117 aa, Artificial Sequence
  Chemically Synthesized
QVQLQESGGGLVQAGGSLRLSCAASGYISRGSDMGWYRQAPGKERELVATIGGGATTYYADSVKGRFTISRDNAKNTVYLQMNSLKPEDTAVYYCAYPYFYNAHRYWGQGTQVTVSS

SEQ ID NO: 34324 - protein, 122 aa, Artificial Sequence
  Chemically Synthesized
QVQLQESGGGLVQAGGSLRLSCAASGSISDTHIMGWYRQAPGKEREFVASIAGGSITNYADSVKGRFTISRDNAKNTVYLQMNSLKPEDTAVYYCAADGHNYTGRVWRLDYWGQGTQVTVSS

SEQ ID NO: 34325 - protein, 118 aa, Artificial Sequence
  Chemically Synthesized
QVQLQESGGGLVQAGGSLRLSCAASGNISDYVTMGWYRQAPGKERELVASIDYGGNTYYADSVKGRFTISRDNAKNTVYLQMNSLKPEDTAVYYCAAATYYSKYHPYWGQGTQVTVSS

SEQ ID NO: 34326 - protein, 118 aa, Artificial Sequence
  Chemically Synthesized
QVQLQESGGGLVQAGGSLRLSCAASGTISFYWYMGWYRQAPGKERELVAGITYGSNTYYADSVKGRFTISRDNAKNTVYLQMNSLKPEDTAVYYCAAYGAYPWRLWYWGQGTQVTVSS

SEQ ID NO: 34327 - protein, 122 aa, Artificial Sequence
  Chemically Synthesized
QVQLQESGGGLVQAGGSLRLSCAASGTIFAYGLMGWYRQAPGKERELVAGIDKGGITNYADSVKGRFTISRDNAKNTVYLQMNSLKPEDTAVYYCAVYPYYHYTPDGDHYYWGQGTQVTVSS

SEQ ID NO: 34328 - protein, 122 aa, Artificial Sequence
  Chemically Synthesized
QVQLQESGGGLVQAGGSLRLSCAASGSIFDYFPMGWYRQAPGKEREFVATIANGGTTNYADSVKGRFTISRDNAKNTVYLQMNSLKPEDTAVYYCAVTDDGDYLPYYRYDYWGQGTQVTVSS

SEQ ID NO: 34329 - protein, 121 aa, Artificial Sequence
  Chemically Synthesized
QVQLQESGGGLVQAGGSLRLSCAASGSISPRDYMGWYRQAPGKEREFVASIDSGTITNYADSVKGRFTISRDNAKNTVYLQMNSLKPEDTAVYYCAVHDDTLARKALYGYWGQGTQVTVSS

SEQ ID NO: 34330 - protein, 118 aa, Artificial Sequence
  Chemically Synthesized
QVQLQESGGGLVQAGGSLRLSCAASGYISDGHTMGWYRQAPGKEREFVAAIDYGGNTYYADSVKGRFTISRDNAKNTVYLQMNSLKPEDTAVYYCAARDVDDDVFDYWGQGTQVTVSS

SEQ ID NO: 34331 - protein, 125 aa, Artificial Sequence
  Chemically Synthesized
QVQLQESGGGLVQAGGSLRLSCAASGNISFTDVMGWYRQAPGKEREFVAGINNGSNTYYADSVKGRFTISRDNAKNTVYLQMNSLKPEDTAVYYCAAGGQVYTLTLCCGTTTLYWGQGTQVTVSS

SEQ ID NO: 34332 - protein, 119 aa, Artificial Sequence
  Chemically Synthesized
QVQLQESGGGLVQAGGSLRLSCAASGYISPRGYMGWYRQAPGKEREFVATISRGASTYYADSVKGRFTISRDNAKNTVYLQMNSLKPEDTAVYYCAATRAPYAPLLYYWGQGTQVTVSS

SEQ ID NO: 34333 - protein, 117 aa, Artificial Sequence
  Chemically Synthesized
QVQLQESGGGLVQAGGSLRLSCAASGTIFLYSAMGWYRQAPGKERELVASIDFGTITYYADSVKGRFTISRDNAKNTVYLQMNSLKPEDTAVYYCAANFDSPYYHYWGQGTQVTVSS

SEQ ID NO: 34334 - protein, 125 aa, Artificial Sequence
  Chemically Synthesized
QVQLQESGGGLVQAGGSLRLSCAASGYIFGDVYMGWYRQAPGKERELVAGYSGYYYLYADSVKGRFTISRDNAKNTVYLQMNSLKPEDTAVYYCAAVVDYQYLQGGDNSDDYGYWGQGTQVTVSS

SEQ ID NO: 34335 - protein, 118 aa, Artificial Sequence
  Chemically Synthesized
QVQLQESGGGLVQAGGSLRLSCAASGTIFAPYVMGWYRQAPGKEREFVASISLGSNTNYADSVKGRFTISRDNAKNTVYLQMNSLKPEDTAVYYCAVRDVRQDGYIYWGQGTQVTVSS

SEQ ID NO: 34336 - protein, 117 aa, Artificial Sequence
  Chemically Synthesized
QVQLQESGGGLVQAGGSLRLSCAASGTIFFTLMGWYRQAPGKEREFVASINSVLLPYADSVKGRFTISRDNAKNTVYLQMNSLKPEDTAVYYCAVGPPISGPYHAYWGQGTQVTVSS

SEQ ID NO: 34337 - protein, 118 aa, Artificial Sequence
  Chemically Synthesized
QVQLQESGGGLVQAGGSLRLSCAASGNIFGPQYMGWYRQAPGKEREFVASIAYGTITNYADSVKGRFTISRDNAKNTVYLQMNSLKPEDTAVYYCAVYDFGSYRLQYWGQGTQVTVSS

SEQ ID NO: 34338 - protein, 121 aa, Artificial Sequence
  Chemically Synthesized
QVQLQESGGGLVQAGGSLRLSCAASGTISRHGFMGWYRQAPGKERELVAAIGVGGNTNYADSVKGRFTISRDNAKNTVYLQMNSLKPEDTAVYYCAALGDDGSTVTTCLYWGQGTQVTVSS

SEQ ID NO: 34339 - protein, 116 aa, Artificial Sequence
  Chemically Synthesized
QVQLQESGGGLVQAGGSLRLSCAASGTISTRVMGWYRQAPGKERELVATISYGTSTYYADSVKGRFTISRDNAKNTVYLQMNSLKPEDTAVYYCAAASVVTTLFYWGQGTQVTVSS

SEQ ID NO: 34340 - protein, 122 aa, Artificial Sequence
  Chemically Synthesized
QVQLQESGGGLVQAGGSLRLSCAASGTISLGGYMGWYRQAPGKERELVATIDGGASTYYADSVKGRFTISRDNAKNTVYLQMNSLKPEDTAVYYCAVLNIVRHAQADSHRYWGQGTQVTVSS

SEQ ID NO: 34341 - protein, 117 aa, Artificial Sequence
  Chemically Synthesized
QVQLQESGGGLVQAGGSLRLSCAASGNISNRYHMGWYRQAPGKEREFVATIDYGANTNYADSVKGRFTISRDNAKNTVYLQMNSLKPEDTAVYYCAVKTLVVLFIYWGQGTQVTVSS

SEQ ID NO: 34342 - protein, 118 aa, Artificial Sequence
  Chemically Synthesized
QVQLQESGGGLVQAGGSLRLSCAASGNISSLWYMGWYRQAPGKEREFVAAIADGSSTYYADSVKGRFTISRDNAKNTVYLQMNSLKPEDTAVYYCAVPYYTSVPHYYWGQGTQVTVSS

SEQ ID NO: 34343 - protein, 126 aa, Artificial Sequence
  Chemically Synthesized
QVQLQESGGGLVQAGGSLRLSCAASGNISYDVFMGWYRQAPGKERELVAAIGLGTTTNYADSVKGRFTISRDNAKNTVYLQMNSLKPEDTAVYYCAVYPYERQQEYRVYVKLHTYWGQGTQVTVSS

SEQ ID NO: 34344 - protein, 118 aa, Artificial Sequence
  Chemically Synthesized
QVQLQESGGGLVQAGGSLRLSCAASGYIFNAHYMGWYRQAPGKERELVAAITGGSITNYADSVKGRFTISRDNAKNTVYLQMNSLKPEDTAVYYCAVDALDVAYHGYWGQGTQVTVSS

SEQ ID NO: 34345 - protein, 115 aa, Artificial Sequence
  Chemically Synthesized
QVQLQESGGGLVQAGGSLRLSCAASGSISVSYSMGWYRQAPGKERELVAAINEGANTNYADSVKGRFTISRDNAKNTVYLQMNSLKPEDTAVYYCATPWRSTIYWGQGTQVTVSS

SEQ ID NO: 34346 - protein, 121 aa, Artificial Sequence
  Chemically Synthesized
QVQLQESGGGLVQAGGSLRLSCAASGSISRSDTMGWYRQAPGKEREFVAAIDYGGNTYYADSVKGRFTISRDNAKNTVYLQMNSLKPEDTAVYYCAAPNVYSFGTLSLIYWGQGTQVTVSS

SEQ ID NO: 34347 - protein, 121 aa, Artificial Sequence
  Chemically Synthesized
QVQLQESGGGLVQAGGSLRLSCAASGSISVWTGMGWYRQAPGKEREFVASIAYGSSTYADSVKGRFTISRDNAKNTVYLQMNSLKPEDTAVYYCAAGASDPDRYEVRHIYWGQGTQVTVSS

SEQ ID NO: 34348 - protein, 118 aa, Artificial Sequence
  Chemically Synthesized
QVQLQESGGGLVQAGGSLRLSCAASGTIFYLAYMGWYRQAPGKERELVAGIDNGATTNYADSVKGRFTISRDNAKNTVYLQMNSLKPEDTAVYYCAVLWDDSVELVYWGQGTQVTVSS

SEQ ID NO: 34349 - protein, 122 aa, Artificial Sequence
  Chemically Synthesized
QVQLQESGGGLVQAGGSLRLSCAASGSIFYTPDMGWYRQAPGKERELVASIARGGNTNYADSVKGRFTISRDNAKNTVYLQMNSLKPEDTAVYYCAVRWGTPYLRNVFLWYWGQGTQVTVSS

SEQ ID NO: 34350 - protein, 122 aa, Artificial Sequence
  Chemically Synthesized
QVQLQESGGGLVQAGGSLRLSCAASGNISSRSDMGWYRQAPGKEREFVAAITDGTNTYYADSVKGRFTISRDNAKNTVYLQMNSLKPEDTAVYYCAVKWPHRTWRFRPYWYWGQGTQVTVSS

SEQ ID NO: 34351 - protein, 118 aa, Artificial Sequence
  Chemically Synthesized
QVQLQESGGGLVQAGGSLRLSCAASGTIFPDRNMGWYRQAPGKERELSNGGNTYYADSVKGRFTISRDNAKNTVYLQMNSLKPEDTAVYYCAADRRPVRALDYPLYYWGQGTQVTVSS

SEQ ID NO: 34352 - protein, 118 aa, Artificial Sequence
  Chemically Synthesized
QVQLQESGGGLVQAGGSLRLSCAASGSISGDDVMGWYRQAPGKERELVAGISYGANTNYADSVKGRFTISRDNAKNTVYLQMNSLKPEDTAVYYCAVEIHGVTSACYWGQGTQVTVSS

SEQ ID NO: 34353 - protein, 126 aa, Artificial Sequence
  Chemically Synthesized
QVQLQESGGGLVQAGGSLRLSCAASGNISYRWYMGWYRQAPGKEREFVATIAWGTSTNYADSVKGRFTISRDNAKNTVYLQMNSLKPEDTAVYYCAVFSAPFNTPVLAGGYYLAYWGQGTQVTVSS

SEQ ID NO: 34354 - protein, 117 aa, Artificial Sequence
  Chemically Synthesized
QVQLQESGGGLVQAGGSLRLSCAASGLFLGITMGWYRQAPGKEREFVATIGTGGITYYADSVKGRFTISRDNAKNTVYLQMNSLKPEDTAVYYCAVYDFNDDRYYYWGQGTQVTVSS

SEQ ID NO: 34355 - protein, 116 aa, Artificial Sequence
  Chemically Synthesized
QVQLQESGGGLVQAGGSLRLSCAASGNIGTVMGWYRQAPGKERELVATIGDGGSTNYADSVKGRFTISRDNAKNTVYLQMNSLKPEDTAVYYCAVGDRNRTELAYWGQGTQVTVSS

SEQ ID NO: 34356 - protein, 118 aa, Artificial Sequence
  Chemically Synthesized
QVQLQESGGGLVQAGGSLRLSCAASGSISSLPYMGWYRQAPGKERELVAAIDVGTITNYADSVKGRFTISRDNAKNTVYLQMNSLKPEDTAVYYCAVETGDVTRYYYWGQGTQVTVSS

SEQ ID NO: 34357 - protein, 122 aa, Artificial Sequence
  Chemically Synthesized
QVQLQESGGGLVQAGGSLRLSCAASGTISIPYIMGWYRQAPGKERELVAAIDYGANTYYADSVKGRFTISRDNAKNTVYLQMNSLKPEDTAVYYCAVYDSGNDYQSALLLYWGQGTQVTVSS

SEQ ID NO: 34358 - protein, 125 aa, Artificial Sequence
  Chemically Synthesized
QVQLQESGGGLVQAGGSLRLSCAASGTIFTHLDMGWYRQAPGKERELVAAIDLGTIPYADSVKGRFTISRDNAKNTVYLQMNSLKPEDTAVYYCAVWALPNYPILFGWVTVHDYWGQGTQVTVSS

SEQ ID NO: 34359 - protein, 118 aa, Artificial Sequence
  Chemically Synthesized
QVQLQESGGGLVQAGGSLRLSCAASGTISTKSVMGWYRQAPGKEREFVAAIDFGANTNYADSVKGRFTISRDNAKNTVYLQMNSLKPEDTAVYYCAVVDWADAKHSYWGQGTQVTVSS

SEQ ID NO: 34360 - protein, 118 aa, Artificial Sequence
  Chemically Synthesized
QVQLQESGGGLVQAGGSLRLSCAASGYIFDENVMGWYRQAPGKEREFVAGISFGGTTNYADSVKGRFTISRDNAKNTVYLQMNSLKPEDTAVYYCAAIHSTQDDLPYWGQGTQVTVSS

SEQ ID NO: 34361 - protein, 118 aa, Artificial Sequence
  Chemically Synthesized
QVQLQESGGGLVQAGGSLRLSCAASGNIFVGHAMGWYRQAPGKEREFVATIAYGGNTNYADSVKGRFTISRDNAKNTVYLQMNSLKPEDTAVYYCAADHPLPGAFVYWGQGTQVTVSS

SEQ ID NO: 34362 - protein, 118 aa, Artificial Sequence
  Chemically Synthesized
QVQLQESGGGLVQAGGSLRLSCAASGYISPGLGMGWYRQAPGKERELVATIAVGSNTNYADSVKGRFTISRDNAKNTVYLQMNSLKPEDTAVYYCAADTDPPYPHYYWGQGTQVTVSS

SEQ ID NO: 34363 - protein, 118 aa, Artificial Sequence
  Chemically Synthesized
QVQLQESGGGLVQAGGSLRLSCAASGNISWPVPMGWYRQAPGKEREFVAAIDVGGNTNYADSVKGRFTISRDNAKNTVYLQMNSLKPEDTAVYYCAVVSFSQSTFGYWGQGTQVTVSS

SEQ ID NO: 34364 - protein, 122 aa, Artificial Sequence
  Chemically Synthesized
QVQLQESGGGLVQAGGSLRLSCAASGTIFRLSAMGWYRQAPGKERELVAAITDGSTTYYADSVKGRFTISRDNAKNTVYLQMNSLKPEDTAVYYCAAWSRDRRIYVHAHAYWGQGTQVTVSS

SEQ ID NO: 34365 - protein, 118 aa, Artificial Sequence
  Chemically Synthesized
QVQLQESGGGLVQAGGSLRLSCAASGSISYKYYMGWYRQAPGKEREFVAGISTGGITYYADSVKGRFTISRDNAKNTVYLQMNSLKPEDTAVYYCAAERYIYDPFGYWGQGTQVTVSS

SEQ ID NO: 34366 - protein, 122 aa, Artificial Sequence
  Chemically Synthesized
QVQLQESGGGLVQAGGSLRLSCAASGNISYYVQMGWYRQAPGKEREFVATIAYGTTTNYADSVKGRFTISRDNAKNTVYLQMNSLKPEDTAVYYCAVEPSQIDQTFGAYRYWGQGTQVTVSS

SEQ ID NO: 34367 - protein, 118 aa, Artificial Sequence
  Chemically Synthesized
QVQLQESGGGLVQAGGSLRLSCAASGTISYRLDMGWYRQAPGKEREFVAGISIRCYYQYADSVKGRFTISRDNAKNTVYLQMNSLKPEDTAVYYCAVRAYLSGGLQYWGQGTQVTVSS

SEQ ID NO: 34368 - protein, 118 aa, Artificial Sequence
  Chemically Synthesized
QVQLQESGGGLVQAGGSLRLSCAASGYISGPIGMGWYRQAPGKERELVASINDGSNTNYADSVKGRFTISRDNAKNTVYLQMNSLKPEDTAVYYCAAVEGELDYHYYWGQGTQVTVSS

SEQ ID NO: 34369 - protein, 122 aa, Artificial Sequence
  Chemically Synthesized
QVQLQESGGGLVQAGGSLRLSCAASGSISDSTQMGWYRQAPGKERELVATIGHGSSTYYADSVKGRFTISRDNAKNTVYLQMNSLKPEDTAVYYCAVDPDTLPNEGGDLEYWGQGTQVTVSS

SEQ ID NO: 34370 - protein, 122 aa, Artificial Sequence
  Chemically Synthesized
QVQLQESGGGLVQAGGSLRLSCAASGNIFNWYDMGWYRQAPGKERELVATIGFGTSTYYADSVKGRFTISRDNAKNTVYLQMNSLKPEDTAVYYCAVAEDDDLWGYYTYAYWGQGTQVTVSS

SEQ ID NO: 34371 - protein, 118 aa, Artificial Sequence
  Chemically Synthesized
QVQLQESGGGLVQAGGSLRLSCAASGNIFDGHWMGWYRQAPGKEREFVASISDGATTNYADSVKGRFTISRDNAKNTVYLQMNSLKPEDTAVYYCAVYTDKSRGHPYWGQGTQVTVSS

SEQ ID NO: 34372 - protein, 122 aa, Artificial Sequence
  Chemically Synthesized
QVQLQESGGGLVQAGGSLRLSCAASGNIFDQYYMGWYRQAPGKERELVAAIDIGASTYYADSVKGRFTISRDNAKNTVYLQMNSLKPEDTAVYYCAAGQGVYGPIDALLYYWGQGTQVTVSS

SEQ ID NO: 34373 - protein, 126 aa, Artificial Sequence
  Chemically Synthesized
QVQLQESGGGLVQAGGSLRLSCAASGNISAREYMGWYRQAPGKERELVATIGVGSNTYYADSVKGRFTISRDNAKNTVYLQMNSLKPEDTAVYYCAVSETTYYNGRYRLQDALSYWGQGTQVTVSS

SEQ ID NO: 34374 - protein, 110 aa, Artificial Sequence
  Chemically Synthesized
QVQLQESGGGLVQAGGSLRLSCAASGTIFDIDSMGWYRQAPGKEREFVATISRGGTTNYADSVKGRFTISRDNAKNTVYLQMNSLKPEDTAVYYCAALYWGQGTQVTVSS

SEQ ID NO: 34375 - protein, 115 aa, Artificial Sequence
  Chemically Synthesized
QVQLQESGGGLVQAGGSLRLSCAASGTISYPEYMGWYRQAPGKERELVAAITLGGTTYYADSVKGRFTISRDNAKNTVYLQMNSLKPEDTAVYYCAAYPYYYDYWGQGTQVTVSS

SEQ ID NO: 34376 - protein, 118 aa, Artificial Sequence
  Chemically Synthesized
QVQLQESGGGLVQAGGSLRLSCAASGTIFDKRVMGWYRQAPGKEREFVAAIAYGTTTYYADSVKGRFTISRDNAKNTVYLQMNSLKPEDTAVYYCAANRYRRYQYPYWGQGTQVTVSS

SEQ ID NO: 34377 - protein, 111 aa, Artificial Sequence
  Chemically Synthesized
QVQLQESGGGLVQAGGSLRLSCAASGTIFWVSMGWYRQAPGKEREFVAGIPYADSVKGRFTISRDNAKNTVYLQMNSLKPEDTAVYYCAAGGGHFARLSYWGQGTQVTVSS

SEQ ID NO: 34378 - protein, 121 aa, Artificial Sequence
  Chemically Synthesized
QVQLQESGGGLVQAGGSLRLSCAASGTIFSTGNMGWYRQAPGKERELVAGIGGTNTNYADSVKGRFTISRDNAKNTVYLQMNSLKPEDTAVYYCAAQSGRINRSWTTHSYWGQGTQVTVSS

SEQ ID NO: 34379 - protein, 122 aa, Artificial Sequence
  Chemically Synthesized
QVQLQESGGGLVQAGGSLRLSCAASGTIFGNVNMGWYRQAPGKERELVATITSGATTYYADSVKGRFTISRDNAKNTVYLQMNSLKPEDTAVYYCAVVGAGITSLWGYYGYWGQGTQVTVSS

SEQ ID NO: 34380 - protein, 118 aa, Artificial Sequence
  Chemically Synthesized
QVQLQESGGGLVQAGGSLRLSCAASGSIFYSDFMGWYRQAPGKERELVAAISFGGNTYYADSVKGRFTISRDNAKNTVYLQMNSLKPEDTAVYYCAVSGDYDFSHDYWGQGTQVTVSS

SEQ ID NO: 34381 - protein, 118 aa, Artificial Sequence
  Chemically Synthesized
QVQLQESGGGLVQAGGSLRLSCAASGNISDAYYMGWYRQAPGKERELVATIDHGGITYYADSVKGRFTISRDNAKNTVYLQMNSLKPEDTAVYYCAVFRLYDPGHGYWGQGTQVTVSS

SEQ ID NO: 34382 - protein, 118 aa, Artificial Sequence
  Chemically Synthesized
QVQLQESGGGLVQAGGSLRLSCAASGYISYIQWMGWYRQAPGKEREFVAGIGAGTTTNYADSVKGRFTISRDNAKNTVYLQMNSLKPEDTAVYYCAVIYWDTYGYDYWGQGTQVTVSS

SEQ ID NO: 34383 - protein, 118 aa, Artificial Sequence
  Chemically Synthesized
QVQLQESGGGLVQAGGSLRLSCAASGNISTGALMGWYRQAPGKEREFVASITIGASTNYADSVKGRFTISRDNAKNTVYLQMNSLKPEDTAVYYCAVYGGSAIKLHYWGQGTQVTVSS

SEQ ID NO: 34384 - protein, 122 aa, Artificial Sequence
  Chemically Synthesized
QVQLQESGGGLVQAGGSLRLSCAASGNISNYYLMGWYRQAPGKEREFVATITTGTNTYYADSVKGRFTISRDNAKNTVYLQMNSLKPEDTAVYYCAAFAGKGRQNPNYHSYWGQGTQVTVSS

SEQ ID NO: 34385 - protein, 122 aa, Artificial Sequence
  Chemically Synthesized
QVQLQESGGGLVQAGGSLRLSCAASGSIFDRYDMGWYRQAPGKEREFVAAITLGAITNYADSVKGRFTISRDNAKNTVYLQMNSLKPEDTAVYYCAVPYLWYDQYDSPYPYWGQGTQVTVSS

SEQ ID NO: 34386 - protein, 118 aa, Artificial Sequence
  Chemically Synthesized
QVQLQESGGGLVQAGGSLRLSCAASGYISRTADMGWYRQAPGKEREFVASITSGGITNYADSVKGRFTISRDNAKNTVYLQMNSLKPEDTAVYYCAVYVKAPYFYYYWGQGTQVTVSS

SEQ ID NO: 34387 - protein, 118 aa, Artificial Sequence
  Chemically Synthesized
QVQLQESGGGLVQAGGSLRLSCAASGTIFLGDFMGWYRQAPGKEREFVAAIDGGTTTYYADSVKGRFTISRDNAKNTVYLQMNSLKPEDTAVYYCAALAVRVFRLWYWGQGTQVTVSS

SEQ ID NO: 34388 - protein, 118 aa, Artificial Sequence
  Chemically Synthesized
QVQLQESGGGLVQAGGSLRLSCAASGYISYFDSMGWYRQAPGKEREFVASIDAGSTTYYADSVKGRFTISRDNAKNTVYLQMNSLKPEDTAVYYCAVDPLPLRPSLYWGQGTQVTVSS

SEQ ID NO: 34389 - protein, 125 aa, Artificial Sequence
  Chemically Synthesized
QVQLQESGGGLVQAGGSLRLSCAASGSISRDATMGWYRQAPGKERELASIGRGGTTYYADSVKGRFTISRDNAKNTVYLQMNSLKPEDTAVYYCAAYRGGIWTDNLRDIQQYTYWGQGTQVTVSS

SEQ ID NO: 34390 - protein, 122 aa, Artificial Sequence
  Chemically Synthesized
QVQLQESGGGLVQAGGSLRLSCAASGTISPWSDMGWYRQAPGKERELVATIGYGASTYYADSVKGRFTISRDNAKNTVYLQMNSLKPEDTAVYYCAAYVGYHIYAYYPHGYWGQGTQVTVSS

SEQ ID NO: 34391 - protein, 118 aa, Artificial Sequence
  Chemically Synthesized
QVQLQESGGGLVQAGGSLRLSCAASGNISPTFEMGWYRQAPGKERELVATITSGTSTYYADSVKGRFTISRDNAKNTVYLQMNSLKPEDTAVYYCAAYYYYSRWLDYWGQGTQVTVSS

SEQ ID NO: 34392 - protein, 126 aa, Artificial Sequence
  Chemically Synthesized
QVQLQESGGGLVQAGGSLRLSCAASGYISDRRDMGWYRQAPGKERELVAGIAVGTSTYYADSVKGRFTISRDNAKNTVYLQMNSLKPEDTAVYYCAARPYWYFYRYPYRPDGHGYWGQGTQVTVSS

SEQ ID NO: 34393 - protein, 117 aa, Artificial Sequence
  Chemically Synthesized
QVQLQESGGGLVQAGGSLRLSCAASGYISVYGDMGWYRQAPGKERELVAGISEGTTTYYADSVKGRFTISRDNAKNTVYLQMNSLKPEDTAVYYCAASLGTSLCFYWGQGTQVTVSS

SEQ ID NO: 34394 - protein, 118 aa, Artificial Sequence
  Chemically Synthesized
QVQLQESGGGLVQAGGSLRLSCAASGTISYDDYMGWYRQAPGKEREFVASINTGGSTNYADSVKGRFTISRDNAKNTVYLQMNSLKPEDTAVYYCAVTARTDYQHYYWGQGTQVTVSS

SEQ ID NO: 34395 - protein, 120 aa, Artificial Sequence
  Chemically Synthesized
QVQLQESGGGLVQAGGSLRLSCAASGYIDQEMGWYRQAPGKERELVASIGIGTTTYYADSVKGRFTISRDNAKNTVYLQMNSLKPEDTAVYYCAVTINSYEHPYIYFSYWGQGTQVTVSS

SEQ ID NO: 34396 - protein, 126 aa, Artificial Sequence
  Chemically Synthesized
QVQLQESGGGLVQAGGSLRLSCAASGYISNPSWMGWYRQAPGKEREFVAGIGQGGITYYADSVKGRFTISRDNAKNTVYLQMNSLKPEDTAVYYCAAVARAAWATALYRPTEYPYWGQGTQVTVSS

SEQ ID NO: 34397 - protein, 118 aa, Artificial Sequence
  Chemically Synthesized
QVQLQESGGGLVQAGGSLRLSCAASGNTVMGWYRQAPGKEREFVATITYGTNTNYADSVKGRFTISRDNAKNTVYLQMNSLKPEDTAVYYCAAAGLTYDDPFRPHSYWGQGTQVTVSS

SEQ ID NO: 34398 - protein, 118 aa, Artificial Sequence
  Chemically Synthesized
QVQLQESGGGLVQAGGSLRLSCAASGYIFWPNYMGWYRQAPGKERELVASIAIGSSTYYADSVKGRFTISRDNAKNTVYLQMNSLKPEDTAVYYCAAWYQLGIAHYYWGQGTQVTVSS

SEQ ID NO: 34399 - protein, 118 aa, Artificial Sequence
  Chemically Synthesized
QVQLQESGGGLVQAGGSLRLSCAASGNISPYEEMGWYRQAPGKEREFVATINPGTSTNYADSVKGRFTISRDNAKNTVYLQMNSLKPEDTAVYYCAASPVRYTYHYYWGQGTQVTVSS

SEQ ID NO: 34400 - protein, 126 aa, Artificial Sequence
  Chemically Synthesized
QVQLQESGGGLVQAGGSLRLSCAASGYIFYHQYMGWYRQAPGKERELVAAINSGSSTYYADSVKGRFTISRDNAKNTVYLQMNSLKPEDTAVYYCAARNLVTDEWRTLARIAHPYWGQGTQVTVSS

SEQ ID NO: 34401 - protein, 117 aa, Artificial Sequence
  Chemically Synthesized
QVQLQESGGGLVQAGGSLRLSCAASGSISYYTIMGWYRQAPGKERELVASITYGSNTYYADSVKGRFTISRDNAKNTVYLQMNSLKPEDTAVYYCAALAYGFQHVYWGQGTQVTVSS

SEQ ID NO: 34402 - protein, 118 aa, Artificial Sequence
  Chemically Synthesized
QVQLQESGGGLVQAGGSLRLSCAASGSIFVYRYMGWYRQAPGKEREFVASIDYGGNTYYADSVKGRFTISRDNAKNTVYLQMNSLKPEDTAVYYCAAFQREYAWYGYWGQGTQVTVSS

SEQ ID NO: 34403 - protein, 117 aa, Artificial Sequence
  Chemically Synthesized
QVQLQESGGGLVQAGGSLRLSCAASGTIFRAVAMGWYRQAPGKERELVALLMLVVLPYADSVKGRFTISRDNAKNTVYLQMNSLKPEDTAVYYCAVYRTAAQTHDYWGQGTQVTVSS

SEQ ID NO: 34404 - protein, 122 aa, Artificial Sequence
  Chemically Synthesized
QVQLQESGGGLVQAGGSLRLSCAASGTIFNAAPMGWYRQAPGKERELVAAIAYGAITYYADSVKGRFTISRDNAKNTVYLQMNSLKPEDTAVYYCAAQGGYNTYQDNQLIYWGQGTQVTVSS

SEQ ID NO: 34405 - protein, 121 aa, Artificial Sequence
  Chemically Synthesized
QVQLQESGGGLVQAGGSLRLSCAASGTISYQNYMGWYRQAPGKEREFVASINGGSTTNYADSVKGRFTISRDNAKNTVYLQMNSLKPEDTAVYYCAVLSVYAGRYTRLFYWGQGTQVTVSS

SEQ ID NO: 34406 - protein, 122 aa, Artificial Sequence
  Chemically Synthesized
QVQLQESGGGLVQAGGSLRLSCAASGTIFSYSAMGWYRQAPGKERELVASIALGASTNYADSVKGRFTISRDNAKNTVYLQMNSLKPEDTAVYYCAVGYGRENALDYGHAYWGQGTQVTVSS

SEQ ID NO: 34407 - protein, 126 aa, Artificial Sequence
  Chemically Synthesized
QVQLQESGGGLVQAGGSLRLSCAASGYIFPPTSMGWYRQAPGKERELVASIAGGSSTNYADSVKGRFTISRDNAKNTVYLQMNSLKPEDTAVYYCAARRYGRRPLDYYSQVAYPYWGQGTQVTVSS

SEQ ID NO: 34408 - protein, 118 aa, Artificial Sequence
  Chemically Synthesized
QVQLQESGGGLVQAGGSLRLSCAASGSISSYYFMGWYRQAPGKEREFVAGIGDGAITNYADSVKGRFTISRDNAKNTVYLQMNSLKPEDTAVYYCAVEVPADTTYRYWGQGTQVTVSS

SEQ ID NO: 34409 - protein, 118 aa, Artificial Sequence
  Chemically Synthesized
QVQLQESGGGLVQAGGSLRLSCAASGTISRAREMGWYRQAPGKERELVAAITYGTNTNYADSVKGRFTISRDNAKNTVYLQMNSLKPEDTAVYYCAVGNVAHSTHGYWGQGTQVTVSS

SEQ ID NO: 34410 - protein, 125 aa, Artificial Sequence
  Chemically Synthesized
QVQLQESGGGLVQAGGSLRLSCAASGNISHDFIMGWYRQAPGKEREFVAAISSGTTTYADSVKGRFTISRDNAKNTVYLQMNSLKPEDTAVYYCAVWRRIPPFVEAATYDRYAYWGQGTQVTVSS

SEQ ID NO: 34411 - protein, 118 aa, Artificial Sequence
  Chemically Synthesized
QVQLQESGGGLVQAGGSLRLSCAASGNISAGYAMGWYRQAPGKEREFVAGINLGTTTNYADSVKGRFTISRDNAKNTVYLQMNSLKPEDTAVYYCAALAEDSYNFWYWGQGTQVTVSS

SEQ ID NO: 34412 - protein, 121 aa, Artificial Sequence
  Chemically Synthesized
QVQLQESGGGLVQAGGSLRLSCAASGNIFPYNGMGWYRQAPGKERELVAAIGNGGTTYYADSVKGRFTISRDNAKNTVYLQMNSLKPEDTAVYYCAAQLFEYAYPPYSFYWGQGTQVTVSS

SEQ ID NO: 34413 - protein, 117 aa, Artificial Sequence
  Chemically Synthesized
QVQLQESGGGLVQAGGSLRLSCAASGSISSRWAMGWYRQAPGKEREFVAAISAGASTYYADSVKGRFTISRDNAKNTVYLQMNSLKPEDTAVYYCAVGGYRLSFGYWGQGTQVTVSS

SEQ ID NO: 34414 - protein, 118 aa, Artificial Sequence
  Chemically Synthesized
QVQLQESGGGLVQAGGSLRLSCAASGSIFLTVLMGWYRQAPGKEREFVATIDAGANTYYADSVKGRFTISRDNAKNTVYLQMNSLKPEDTAVYYCAADGADERAHPYWGQGTQVTVSS

SEQ ID NO: 34415 - protein, 117 aa, Artificial Sequence
  Chemically Synthesized
QVQLQESGGGLVQAGGSLRLSCAASGYILLLTMGWYRQAPGKERELVASIGVGANTNYADSVKGRFTISRDNAKNTVYLQMNSLKPEDTAVYYCAAQWDPVDRHYYWGQGTQVTVSS

SEQ ID NO: 34416 - protein, 126 aa, Artificial Sequence
  Chemically Synthesized
QVQLQESGGGLVQAGGSLRLSCAASGNISAQYGMGWYRQAPGKERELVATIGDGTTTYYADSVKGRFTISRDNAKNTVYLQMNSLKPEDTAVYYCAAHYNYGYPTDDLEYGILLYWGQGTQVTVSS

SEQ ID NO: 34417 - protein, 122 aa, Artificial Sequence
  Chemically Synthesized
QVQLQESGGGLVQAGGSLRLSCAASGNISDAYLMGWYRQAPGKEREFVATIADGTSTNYADSVKGRFTISRDNAKNTVYLQMNSLKPEDTAVYYCAVPLGDYPRYGGYHIYWGQGTQVTVSS

SEQ ID NO: 34418 - protein, 119 aa, Artificial Sequence
  Chemically Synthesized
QVQLQESGGGLVQAGGSLRLSCAASGNISGDAAMGWYRQAPGKEREFVAGISYGTITYYADSVKGRFTISRDNAKNTVYLQMNSLKPEDTAVYYCAAETYAVNYGFVYWGQGTQVTVSS

SEQ ID NO: 34419 - protein, 117 aa, Artificial Sequence
  Chemically Synthesized
QVQLQESGGGLVQAGGSLRLSCAASGSISGVIMGWYRQAPGKEREFVASISYGANTYYADSVKGRFTISRDNAKNTVYLQMNSLKPEDTAVYYCAAAYSVDDALYYWGQGTQVTVSS

SEQ ID NO: 34420 - protein, 111 aa, Artificial Sequence
  Chemically Synthesized
QVQLQESGGGLVQAGGSLRLSCAASGNISYDPYMGWYRQAPGKERELVVAIGGGANTNYADSVKGRFTISRDNAKNTVYLQMNSLKPEDTAVYYCATTIYWGQGTQVTVSS

SEQ ID NO: 34421 - protein, 118 aa, Artificial Sequence
  Chemically Synthesized
QVQLQESGGGLVQAGGSLRLSCAASGNISQQSYMGWYRQAPGKEREFVAGISDGTTTNYADSVKGRFTISRDNAKNTVYLQMNSLKPEDTAVYYCAAVRQYSQNHWYWGQGTQVTVSS

SEQ ID NO: 34422 - protein, 118 aa, Artificial Sequence
  Chemically Synthesized
QVQLQESGGGLVQAGGSLRLSCAASGNISDTDGMGWYRQAPGKEREFVATIAHGGTTNYADSVKGRFTISRDNAKNTVYLQMNSLKPEDTAVYYCAADQVVRTYHTYWGQGTQVTVSS

SEQ ID NO: 34423 - protein, 117 aa, Artificial Sequence
  Chemically Synthesized
QVQLQESGGGLVQAGGSLRLSCAASGTIFIYEYMGWYRQAPGKERELVATIGSVVVPYADSVKGRFTISRDNAKNTVYLQMNSLKPEDTAVYYCAAYRYEFYAHVYWGQGTQVTVSS

SEQ ID NO: 34424 - protein, 117 aa, Artificial Sequence
  Chemically Synthesized
QVQLQESGGGLVQAGGSLRLSCAASGSISSWDMGWYRQAPGKEREFVASIGLGSSTYYADSVKGRFTISRDNAKNTVYLQMNSLKPEDTAVYYCAVLPGAEVPFPYWGQGTQVTVSS

SEQ ID NO: 34425 - protein, 121 aa, Artificial Sequence
  Chemically Synthesized
QVQLQESGGGLVQAGGSLRLSCAASGTISYSTMGWYRQAPGKEREFVASISYGTTTYYADSVKGRFTISRDNAKNTVYLQMNSLKPEDTAVYYCAVRYDGLEIDALDHGYWGQGTQVTVSS

SEQ ID NO: 34426 - protein, 121 aa, Artificial Sequence
  Chemically Synthesized
QVQLQESGGGLVQAGGSLRLSCAASGSISTVLMGWYRQAPGKERELVAGIDNGASTYYADSVKGRFTISRDNAKNTVYLQMNSLKPEDTAVYYCAVAPVDVNDGLLRHTYWGQGTQVTVSS

SEQ ID NO: 34427 - protein, 112 aa, Artificial Sequence
  Chemically Synthesized
QVQLQESGGGLVQAGGSLRLSCAASGNISGGYDMGWYRQAPGKEREFVAGIAAGGNTNYADSVKGRFTISRDNAKNTVYLQMNSLKPEDTAVYYCAGHLCYWGQGTQVTVSS

SEQ ID NO: 34428 - protein, 115 aa, Artificial Sequence
  Chemically Synthesized
QVQLQESGGGLVQAGGSLRLSCAASGYMGWYRQAPGKERELVAGISVGSTTNYADSVKGRFTISRDNAKNTVYLQMNSLKPEDTAVYYCAVGVDEPHYYDTDIYWGQGTQVTVSS

SEQ ID NO: 34429 - protein, 119 aa, Artificial Sequence
  Chemically Synthesized
QVQLQESGGGLVQAGGSLRLSCAASGSISGMGWYRQAPGKERELVATIAQGAITNYADSVKGRFTISRDNAKNTVYLQMNSLKPEDTAVYYCAVTYGDSDRYAYSHYYWGQGTQVTVSS

SEQ ID NO: 34430 - protein, 120 aa, Artificial Sequence
  Chemically Synthesized
QVQLQESGGGLVQAGGSLRLSCAASGTISSLRMGWYRQAPGKERELVATITTVLIPYADSVKGRFTISRDNAKNTVYLQMNSLKPEDTAVYYCAVEAAGQWVTLYDHGYWGQGTQVTVSS

SEQ ID NO: 34431 - protein, 117 aa, Artificial Sequence
  Chemically Synthesized
QVQLQESGGGLVQAGGSLRLSCAASGTIFRYDDMGWYRQAPGKERELVATINSVLVPYADSVKGRFTISRDNAKNTVYLQMNSLKPEDTAVYYCAATSVASQPHNYWGQGTQVTVSS

SEQ ID NO: 34432 - protein, 117 aa, Artificial Sequence
  Chemically Synthesized
QVQLQESGGGLVQAGGSLRLSCAASGSISYYQDMGWYRQAPGKERELVATITTGGITNYADSVKGRFTISRDNAKNTVYLQMNSLKPEDTAVYYCAAYGRYAGSIYWGQGTQVTVSS

SEQ ID NO: 34433 - protein, 122 aa, Artificial Sequence
  Chemically Synthesized
QVQLQESGGGLVQAGGSLRLSCAASGYISRYESMGWYRQAPGKEREFVATIAIGGNTYYADSVKGRFTISRDNAKNTVYLQMNSLKPEDTAVYYCAAYGTIYQYGPRDHSYWGQGTQVTVSS

SEQ ID NO: 34434 - protein, 116 aa, Artificial Sequence
  Chemically Synthesized
QVQLQESGGGLVQAGGSLRLSCAASGNILVTTMGWYRQAPGKERELVATIAAGSNTYYADSVKGRFTISRDNAKNTVYLQMNSLKPEDTAVYYCAASLLTTKSLYWGQGTQVTVSS

SEQ ID NO: 34435 - protein, 122 aa, Artificial Sequence
  Chemically Synthesized
QVQLQESGGGLVQAGGSLRLSCAASGTISYHRDMGWYRQAPGKEREFVAGINVGGTTNYADSVKGRFTISRDNAKNTVYLQMNSLKPEDTAVYYCAVYRGSSHGYRLSHSYWGQGTQVTVSS

SEQ ID NO: 34436 - protein, 118 aa, Artificial Sequence
  Chemically Synthesized
QVQLQESGGGLVQAGGSLRLSCAASGNIFKPAIMGWYRQAPGKEREFVAAISRGTTTYYADSVKGRFTISRDNAKNTVYLQMNSLKPEDTAVYYCAARAQYRLFHVYWGQGTQVTVSS

SEQ ID NO: 34437 - protein, 118 aa, Artificial Sequence
  Chemically Synthesized
QVQLQESGGGLVQAGGSLRLSCAASGTISDYYTMGWYRQAPGKERELVASIATGSNTNYADSVKGRFTISRDNAKNTVYLQMNSLKPEDTAVYYCAADDQQDAAYHYWGQGTQVTVSS

SEQ ID NO: 34438 - protein, 112 aa, Artificial Sequence
  Chemically Synthesized
QVQLQESGGGLVQAGGSLRLSCAASGTIFGWIYMGWYRQAPGKERELVASINYADSVKGRFTISRDNAKNTVYLQMNSLKPEDTAVYYCAARHYQGQYFAYWGQGTQVTVSS

SEQ ID NO: 34439 - protein, 125 aa, Artificial Sequence
  Chemically Synthesized
QVQLQESGGGLVQAGGSLRLSCAASGTIFPPYMGWYRQAPGKEREFVASIGPGTNTYYADSVKGRFTISRDNAKNTVYLQMNSLKPEDTAVYYCAVVGDTDYDYGDRDYAPFPYWGQGTQVTVSS

SEQ ID NO: 34440 - protein, 118 aa, Artificial Sequence
  Chemically Synthesized
QVQLQESGGGLVQAGGSLRLSCAASGTISTVAYMGWYRQAPGKERELVAAITYGTNTYYADSVKGRFTISRDNAKNTVYLQMNSLKPEDTAVYYCAVRYYYVWYHRYWGQGTQVTVSS

SEQ ID NO: 34441 - protein, 118 aa, Artificial Sequence
  Chemically Synthesized
QVQLQESGGGLVQAGGSLRLSCAASGNIFWPDTMGWYRQAPGKERELVASIDEGGNTNYADSVKGRFTISRDNAKNTVYLQMNSLKPEDTAVYYCAATGARAGDFYYWGQGTQVTVSS

SEQ ID NO: 34442 - protein, 124 aa, Artificial Sequence
  Chemically Synthesized
QVQLQESGGGLVQAGGSLRLSCAASGTIFTTVMGWYRQAPGKERELVAAIDYGGSTNYADSVKGRFTISRDNAKNTVYLQMNSLKPEDTAVYYCAVYVYVITTVLVRYCLLSYWGQGTQVTVSS

SEQ ID NO: 34443 - protein, 121 aa, Artificial Sequence
  Chemically Synthesized
QVQLQESGGGLVQAGGSLRLSCAASGTISLGYFMGWYRQAPGKEREFVASIAYGGITNYADSVKGRFTISRDNAKNTVYLQMNSLKPEDTAVYYCAAWRQDSGLTLLTFYWGQGTQVTVSS

SEQ ID NO: 34444 - protein, 125 aa, Artificial Sequence
  Chemically Synthesized
QVQLQESGGGLVQAGGSLRLSCAASGTISNRDHMGWYRQAPGKERELVASIGYGANTYYADSVKGRFTISRDNAKNTVYLQMNSLKPEDTAVYYCAVTDGALYVGSTTTTTLIYWGQGTQVTVSS

SEQ ID NO: 34445 - protein, 118 aa, Artificial Sequence
  Chemically Synthesized
QVQLQESGGGLVQAGGSLRLSCAASGTISQRAYMGWYRQAPGKEREFVATITWGTNTNYADSVKGRFTISRDNAKNTVYLQMNSLKPEDTAVYYCAVVYLVGHYLGYWGQGTQVTVSS

SEQ ID NO: 34446 - protein, 122 aa, Artificial Sequence
  Chemically Synthesized
QVQLQESGGGLVQAGGSLRLSCAASGSISYYGTMGWYRQAPGKERELVATISAGGITYYADSVKGRFTISRDNAKNTVYLQMNSLKPEDTAVYYCAVETDREYGLDYVFVYWGQGTQVTVSS

SEQ ID NO: 34447 - protein, 111 aa, Artificial Sequence
  Chemically Synthesized
QVQLQESGGGLVQAGGSLRLSCAASGSILNCGMGWYRQAPGKERELVAGIAYGTITYYADSVKGRFTISRDNAKNTVYLQMNSLKPEDTAVYYCAAQHQYWGQGTQVTVSS

SEQ ID NO: 34448 - protein, 118 aa, Artificial Sequence
  Chemically Synthesized
QVQLQESGGGLVQAGGSLRLSCAASGSISIRYRMGWYRQAPGKERELVATIAYGGTTYYADSVKGRFTISRDNAKNTVYLQMNSLKPEDTAVYYCAADSIVPTWFFYWGQGTQVTVSS

SEQ ID NO: 34449 - protein, 118 aa, Artificial Sequence
  Chemically Synthesized
QVQLQESGGGLVQAGGSLRLSCAASGTISNDPYMGWYRQAPGKEREFVASITDGGTTNYADSVKGRFTISRDNAKNTVYLQMNSLKPEDTAVYYCAVGYYYFYGYSYWGQGTQVTVSS

SEQ ID NO: 34450 - protein, 117 aa, Artificial Sequence
  Chemically Synthesized
QVQLQESGGGLVQAGGSLRLSCAASGTISASLMGWYRQAPGKERELVATIGYGAITNYADSVKGRFTISRDNAKNTVYLQMNSLKPEDTAVYYCAVRVYTGPELAYWGQGTQVTVSS

SEQ ID NO: 34451 - protein, 122 aa, Artificial Sequence
  Chemically Synthesized
QVQLQESGGGLVQAGGSLRLSCAASGTISPSNVMGWYRQAPGKEREFVAGISYGGTTNYADSVKGRFTISRDNAKNTVYLQMNSLKPEDTAVYYCAVHEVADWSYPLSHDYWGQGTQVTVSS

SEQ ID NO: 34452 - protein, 118 aa, Artificial Sequence
  Chemically Synthesized
QVQLQESGGGLVQAGGSLRLSCAASGSISHAYGMGWYRQAPGKEREFVATIDDGANTNYADSVKGRFTISRDNAKNTVYLQMNSLKPEDTAVYYCAADPPVTRYFDYWGQGTQVTVSS

SEQ ID NO: 34453 - protein, 125 aa, Artificial Sequence
  Chemically Synthesized
QVQLQESGGGLVQAGGSLRLSCAASGYISPPARMGWYRQAPGKERELVATIDYGGNTYYADSVKGRFTISRDNAKNTVYLQMNSLKPEDTAVYYCAVPWGAGPEYIDEPVLTMYWGQGTQVTVSS

SEQ ID NO: 34454 - protein, 126 aa, Artificial Sequence
  Chemically Synthesized
QVQLQESGGGLVQAGGSLRLSCAASGTISDDPHMGWYRQAPGKEREFVAAIAPGGSTYYADSVKGRFTISRDNAKNTVYLQMNSLKPEDTAVYYCAAPSIYTVRFPLERGDGYPYWGQGTQVTVSS

SEQ ID NO: 34455 - protein, 120 aa, Artificial Sequence
  Chemically Synthesized
QVQLQESGGGLVQAGGSLRLSCAASGTISQVYFMGWYRQAPGKEREFVATINAGGITYYADSVKGRFTISRDNAKNTVYLQMNSLKPEDTAVYYCAVDVLSGPDDDLDYWGQGTQVTVSS

SEQ ID NO: 34456 - protein, 118 aa, Artificial Sequence
  Chemically Synthesized
QVQLQESGGGLVQAGGSLRLSCAASGNISSRAAMGWYRQAPGKERELVASIGYGGSTYYADSVKGRFTISRDNAKNTVYLQMNSLKPEDTAVYYCAVYYYPVNVFKYWGQGTQVTVSS

SEQ ID NO: 34457 - protein, 117 aa, Artificial Sequence
  Chemically Synthesized
QVQLQESGGGLVQAGGSLRLSCAASGNIFGFSVMGWYRQAPGKEREFVAAIGYGGNTYYADSVKGRFTISRDNAKNTVYLQMNSLKPEDTAVYYCAVTGDVLLLAYWGQGTQVTVSS

SEQ ID NO: 34458 - protein, 120 aa, Artificial Sequence
  Chemically Synthesized
QVQLQESGGGLVQAGGSLRLSCAASGNIFYSLMGWYRQAPGKERELVAAITWGSNTYYADSVKGRFTISRDNAKNTVYLQMNSLKPEDTAVYYCAALTGYDSTTVTTIYWGQGTQVTVSS

SEQ ID NO: 34459 - protein, 126 aa, Artificial Sequence
  Chemically Synthesized
QVQLQESGGGLVQAGGSLRLSCAASGYISAVYFMGWYRQAPGKEREFVATIADGTITYYADSVKGRFTISRDNAKNTVYLQMNSLKPEDTAVYYCAVDHNDTLGRYDELGATYNYWGQGTQVTVSS

SEQ ID NO: 34460 - protein, 118 aa, Artificial Sequence
  Chemically Synthesized
QVQLQESGGGLVQAGGSLRLSCAASGYISYYAFMGWYRQAPGKEREFVAGIAYGTSTNYADSVKGRFTISRDNAKNTVYLQMNSLKPEDTAVYYCAAYNRRTVAHWYWGQGTQVTVSS

SEQ ID NO: 34461 - protein, 118 aa, Artificial Sequence
  Chemically Synthesized
QVQLQESGGGLVQAGGSLRLSCAASGNISPAWHMGWYRQAPGKERELVATIAAGSITYYADSVKGRFTISRDNAKNTVYLQMNSLKPEDTAVYYCAVFGLPYATFDYWGQGTQVTVSS

SEQ ID NO: 34462 - protein, 118 aa, Artificial Sequence
  Chemically Synthesized
QVQLQESGGGLVQAGGSLRLSCAASGSISGYADMGWYRQAPGKERELVAAITMVLVPYADSVKGRFTISRDNAKNTVYLQMNSLKPEDTAVYYCAAFVIDGYTHYFYWGQGTQVTVSS

SEQ ID NO: 34463 - protein, 118 aa, Artificial Sequence
  Chemically Synthesized
QVQLQESGGGLVQAGGSLRLSCAASGTIFYRDVMGWYRQAPGKERELVAGIGDGGNTYYADSVKGRFTISRDNAKNTVYLQMNSLKPEDTAVYYCAVWYYRIAYHRYWGQGTQVTVSS

SEQ ID NO: 34464 - protein, 118 aa, Artificial Sequence
  Chemically Synthesized
QVQLQESGGGLVQAGGSLRLSCAASGNISGYDDMGWYRQAPGKERELVAAIGDGASTNYADSVKGRFTISRDNAKNTVYLQMNSLKPEDTAVYYCAVYDLYAWYLQYWGQGTQVTVSS

SEQ ID NO: 34465 - protein, 112 aa, Artificial Sequence
  Chemically Synthesized
QVQLQESGGGLVQAGGSLRLSCAASGSISGADDMGWYRQAPGKERELVAAIGSGTNTNYADSVKGRFTISRDNAKNTVYLQMNSLKPEDTAVYYCAADVTYWGQGTQVTVSS

SEQ ID NO: 34466 - protein, 121 aa, Artificial Sequence
  Chemically Synthesized
QVQLQESGGGLVQAGGSLRLSCAASGSISDDTYMGWYRQAPGKERELVAAITEGGNTNYADSVKGRFTISRDNAKNTVYLQMNSLKPEDTAVYYCAVNPDDSPAEVDSMYWGQGTQVTVSS

SEQ ID NO: 34467 - protein, 119 aa, Artificial Sequence
  Chemically Synthesized
QVQLQESGGGLVQAGGSLRLSCAASGNISLRYWMGWYRQAPGKEREFVAGITSGGSTYYADSVKGRFTISRDNAKNTVYLQMNSLKPEDTAVYYCAAQAYSDYADFPYWGQGTQVTVSS

SEQ ID NO: 34468 - protein, 115 aa, Artificial Sequence
  Chemically Synthesized
QVQLQESGGGLVQAGGSLRLSCAASGTISFIGYMGWYRQAPGKERELVAGIGLGTSTNYADSVKGRFTISRDNAKNTVYLQMNSLKPEDTAVYYCAPFYRGYGYWGQGTQVTVSS

SEQ ID NO: 34469 - protein, 110 aa, Artificial Sequence
  Chemically Synthesized
QVQLQESGGGLVQAGGSLRLSCAASGSISGISYMGWYRQAPGKEREFVAGITDGTNTNYADSVKGRFTISRDNAKNTVYLQMNSLKPEDTAVYYCALCYWGQGTQVTVSS

SEQ ID NO: 34470 - protein, 122 aa, Artificial Sequence
  Chemically Synthesized
QVQLQESGGGLVQAGGSLRLSCAASGTISPYGQMGWYRQAPGKEREFVASITYGGSTYYADSVKGRFTISRDNAKNTVYLQMNSLKPEDTAVYYCAVVYDYTKGDGLRYQYWGQGTQVTVSS

SEQ ID NO: 34471 - protein, 122 aa, Artificial Sequence
  Chemically Synthesized
QVQLQESGGGLVQAGGSLRLSCAASGYISFGDGMGWYRQAPGKERELVATIAAGANTYYADSVKGRFTISRDNAKNTVYLQMNSLKPEDTAVYYCAAYTYDNYHLPGSAWYWGQGTQVTVSS

SEQ ID NO: 34472 - protein, 126 aa, Artificial Sequence
  Chemically Synthesized
QVQLQESGGGLVQAGGSLRLSCAASGSISDWPYMGWYRQAPGKERELVATISWGGNTYYADSVKGRFTISRDNAKNTVYLQMNSLKPEDTAVYYCAAIPDDYAGGTYGDALVHTYWGQGTQVTVSS

SEQ ID NO: 34473 - protein, 110 aa, Artificial Sequence
  Chemically Synthesized
QVQLQESGGGLVQAGGSLRLSCAASGNISRVDYMGWYRQAPGKERELVATIDVGATTYYADSVKGRFTISRDNAKNTVYLQMNSLKPEDTAVYYCAFMYWGQGTQVTVSS

SEQ ID NO: 34474 - protein, 125 aa, Artificial Sequence
  Chemically Synthesized
QVQLQESGGGLVQAGGSLRLSCAASGSISWANYMGWYRQAPGKEREFVASIDDGGTTYADSVKGRFTISRDNAKNTVYLQMNSLKPEDTAVYYCAVSGYTGRQGWEDALSPYSYWGQGTQVTVSS

SEQ ID NO: 34475 - protein, 118 aa, Artificial Sequence
  Chemically Synthesized
QVQLQESGGGLVQAGGSLRLSCAASGSIFSAQYMGWYRQAPGKEREFVATITRGAITNYADSVKGRFTISRDNAKNTVYLQMNSLKPEDTAVYYCAVYYRAFVQFDYWGQGTQVTVSS

SEQ ID NO: 34476 - protein, 122 aa, Artificial Sequence
  Chemically Synthesized
QVQLQESGGGLVQAGGSLRLSCAASGNISGGFEMGWYRQAPGKEREFVAAITAGTTTYYADSVKGRFTISRDNAKNTVYLQMNSLKPEDTAVYYCAADPKADLPLSDYLYYWGQGTQVTVSS

SEQ ID NO: 34477 - protein, 117 aa, Artificial Sequence
  Chemically Synthesized
QVQLQESGGGLVQAGGSLRLSCAASGSIFASRYMGWYRQAPGKERELVAGIADGATTYADSVKGRFTISRDNAKNTVYLQMNSLKPEDTAVYYCAVRYGTYIEFTYWGQGTQVTVSS

SEQ ID NO: 34478 - protein, 118 aa, Artificial Sequence
  Chemically Synthesized
QVQLQESGGGLVQAGGSLRLSCAASGSIFYPFYMGWYRQAPGKEREFVAGITYGATTNYADSVKGRFTISRDNAKNTVYLQMNSLKPEDTAVYYCAVRATAFDRHYYWGQGTQVTVSS

SEQ ID NO: 34479 - protein, 118 aa, Artificial Sequence
  Chemically Synthesized
QVQLQESGGGLVQAGGSLRLSCAASGNISGPSVMGWYRQAPGKERELVAAISLGTTTNYADSVKGRFTISRDNAKNTVYLQMNSLKPEDTAVYYCAAGDPYVLQLWYWGQGTQVTVSS

SEQ ID NO: 34480 - protein, 122 aa, Artificial Sequence
  Chemically Synthesized
QVQLQESGGGLVQAGGSLRLSCAASGTISYVDRMGWYRQAPGKERELVASINKGAITNYADSVKGRFTISRDNAKNTVYLQMNSLKPEDTAVYYCAVYLHYYYRDRWWHRYWGQGTQVTVSS

SEQ ID NO: 34481 - protein, 118 aa, Artificial Sequence
  Chemically Synthesized
QVQLQESGGGLVQAGGSLRLSCAASGSISTPVQMGWYRQAPGKERELVASIADGTSTYYADSVKGRFTISRDNAKNTVYLQMNSLKPEDTAVYYCAAYTGRTWDHGYWGQGTQVTVSS

SEQ ID NO: 34482 - protein, 122 aa, Artificial Sequence
  Chemically Synthesized
QVQLQESGGGLVQAGGSLRLSCAASGSIFLYYYMGWYRQAPGKEREFVATIDYGASTNYADSVKGRFTISRDNAKNTVYLQMNSLKPEDTAVYYCAVKGFHYDVIDLFFAYWGQGTQVTVSS

SEQ ID NO: 34483 - protein, 124 aa, Artificial Sequence
  Chemically Synthesized
QVQLQESGGGLVQAGGSLRLSCAASGTIFTTVMGWYRQAPGKERELLPVLVSVLLPYADSVKGRFTISRDNAKNTVYLQMNSLKPEDTAVYYCAVGGTLQYNRRESRGSDHDYWGQGTQVTVSS

SEQ ID NO: 34484 - protein, 126 aa, Artificial Sequence
  Chemically Synthesized
QVQLQESGGGLVQAGGSLRLSCAASGSISDAHYMGWYRQAPGKERELVAAIDGGASTYYADSVKGRFTISRDNAKNTVYLQMNSLKPEDTAVYYCAAYRPHDLQYRFDRGYGHEYWGQGTQVTVSS

SEQ ID NO: 34485 - protein, 122 aa, Artificial Sequence
  Chemically Synthesized
QVQLQESGGGLVQAGGSLRLSCAASGSISFVFYMGWYRQAPGKEREFVAAIDNGANTYYADSVKGRFTISRDNAKNTVYLQMNSLKPEDTAVYYCAVKLQGTYYLLPEYPYWGQGTQVTVSS

SEQ ID NO: 34486 - protein, 126 aa, Artificial Sequence
  Chemically Synthesized
QVQLQESGGGLVQAGGSLRLSCAASGTISPYYYMGWYRQAPGKERELVAGIGDGTSTNYADSVKGRFTISRDNAKNTVYLQMNSLKPEDTAVYYCAVNIDRYAVTGQRYGPRFPYWGQGTQVTVSS

SEQ ID NO: 34487 - protein, 118 aa, Artificial Sequence
  Chemically Synthesized
QVQLQESGGGLVQAGGSLRLSCAASGTISGPYYMGWYRQAPGKEREFVAGIADGGNTNYADSVKGRFTISRDNAKNTVYLQMNSLKPEDTAVYYCAAYRERPYGLYYWGQGTQVTVSS

SEQ ID NO: 34488 - protein, 122 aa, Artificial Sequence
  Chemically Synthesized
QVQLQESGGGLVQAGGSLRLSCAASGSISAPRGMGWYRQAPGKEREFVATITDGSTTYYADSVKGRFTISRDNAKNTVYLQMNSLKPEDTAVYYCAVKTYHDPLSDVTLGYWGQGTQVTVSS

SEQ ID NO: 34489 - protein, 126 aa, Artificial Sequence
  Chemically Synthesized
QVQLQESGGGLVQAGGSLRLSCAASGYIFRISDMGWYRQAPGKEREFVATITPGGSTNYADSVKGRFTISRDNAKNTVYLQMNSLKPEDTAVYYCAADSTRPYPYVYRVYQSHDYWGQGTQVTVSS

SEQ ID NO: 34490 - protein, 111 aa, Artificial Sequence
  Chemically Synthesized
QVQLQESGGGLVQAGGSLRLSCAASGNISSTYRMGWYRQAPGKERELVASITAGANTYYADSVKGRFTISRDNAKNTVYLQMNSLKPEDTAVYYCAAGWYWGQGTQVTVSS

SEQ ID NO: 34491 - protein, 117 aa, Artificial Sequence
  Chemically Synthesized
QVQLQESGGGLVQAGGSLRLSCAASGNISTTVLMGWYRQAPGKEREFVASISLGTITNYADSVKGRFTISRDNAKNTVYLQMNSLKPEDTAVYYCAVDPGGGSSIYWGQGTQVTVSS

SEQ ID NO: 34492 - protein, 116 aa, Artificial Sequence
  Chemically Synthesized
QVQLQESGGGLVQAGGSLRLSCAASGTISLAEPMGWYRQAPGKERELVATISYGGITNYADSVKGRFTISRDNAKNTVYLQMNSLKPEDTAVYYCAVYSQFYPCYWGQGTQVTVSS

SEQ ID NO: 34493 - protein, 125 aa, Artificial Sequence
  Chemically Synthesized
QVQLQESGGGLVQAGGSLRLSCAASGTISDGDDMGWYRQAPGKERELVAGITRGGTTYYADSVKGRFTISRDNAKNTVYLQMNSLKPEDTAVYYCAVYWYAPPAYPSDPSSTLYWGQGTQVTVSS

SEQ ID NO: 34494 - protein, 126 aa, Artificial Sequence
  Chemically Synthesized
QVQLQESGGGLVQAGGSLRLSCAASGTISYETIMGWYRQAPGKERELVASIAVGTITYYADSVKGRFTISRDNAKNTVYLQMNSLKPEDTAVYYCAAGYRSRGEYNPDRSHGFDYWGQGTQVTVSS

SEQ ID NO: 34495 - protein, 118 aa, Artificial Sequence
  Chemically Synthesized
QVQLQESGGGLVQAGGSLRLSCAASGSISALYAMGWYRQAPGKEREFVAAINDGSSTYYADSVKGRFTISRDNAKNTVYLQMNSLKPEDTAVYYCAAVRIVGGYHPYWGQGTQVTVSS

SEQ ID NO: 34496 - protein, 121 aa, Artificial Sequence
  Chemically Synthesized
QVQLQESGGGLVQAGGSLRLSCAASGNISIIVLMGWYRQAPGKERELVAGIGDGGSTNYADSVKGRFTISRDNAKNTVYLQMNSLKPEDTAVYYCAAYYWGDGEYYEYYYWGQGTQVTVSS

SEQ ID NO: 34497 - protein, 117 aa, Artificial Sequence
  Chemically Synthesized
QVQLQESGGGLVQAGGSLRLSCAASGNIFSVRYMGWYRQAPGKERELVAAIDGGNTNYADSVKGRFTISRDNAKNTVYLQMNSLKPEDTAVYYCAAVGKYTGWHGYWGQGTQVTVSS

SEQ ID NO: 34498 - protein, 126 aa, Artificial Sequence
  Chemically Synthesized
QVQLQESGGGLVQAGGSLRLSCAASGTISAGYTMGWYRQAPGKERELVATITQGGNTNYADSVKGRFTISRDNAKNTVYLQMNSLKPEDTAVYYCAAGSYSGGDDGNDDQLSHPYWGQGTQVTVSS

SEQ ID NO: 34499 - protein, 122 aa, Artificial Sequence
  Chemically Synthesized
QVQLQESGGGLVQAGGSLRLSCAASGTIFRDYVMGWYRQAPGKEREFVAGIAYGAITNYADSVKGRFTISRDNAKNTVYLQMNSLKPEDTAVYYCAAYLDTGDRDTDPHWYWGQGTQVTVSS

SEQ ID NO: 34500 - protein, 118 aa, Artificial Sequence
  Chemically Synthesized
QVQLQESGGGLVQAGGSLRLSCAASGNIFYPSVMGWYRQAPGKEREFVATIDGGTSTYYADSVKGRFTISRDNAKNTVYLQMNSLKPEDTAVYYCAVLFYRAYYHYYWGQGTQVTVSS

SEQ ID NO: 34501 - protein, 118 aa, Artificial Sequence
  Chemically Synthesized
QVQLQESGGGLVQAGGSLRLSCAASGSISSSSIMGWYRQAPGKEREFVAAISYGATTNYADSVKGRFTISRDNAKNTVYLQMNSLKPEDTAVYYCAAIDRTPYYHYYWGQGTQVTVSS

SEQ ID NO: 34502 - protein, 114 aa, Artificial Sequence
  Chemically Synthesized
QVQLQESGGGLVQAGGSLRLSCAASGNISSYAMGWYRQAPGKERELVASIDTGGNTYYADSVKGRFTISRDNAKNTVYLQMNSLKPEDTAVYYCAAAANPHYYWGQGTQVTVSS

SEQ ID NO: 34503 - protein, 118 aa, Artificial Sequence
  Chemically Synthesized
QVQLQESGGGLVQAGGSLRLSCAASGTIFRSFSMGWYRQAPGKEREFVAAISPGTSTNYADSVKGRFTISRDNAKNTVYLQMNSLKPEDTAVYYCAAVIYYRTYHYYWGQGTQVTVSS

SEQ ID NO: 34504 - protein, 118 aa, Artificial Sequence
  Chemically Synthesized
QVQLQESGGGLVQAGGSLRLSCAASGYIFDYRYMGWYRQAPGKERELVAAISPGSNTYYADSVKGRFTISRDNAKNTVYLQMNSLKPEDTAVYYCAVFSLHYNFHWYWGQGTQVTVSS

SEQ ID NO: 34505 - protein, 122 aa, Artificial Sequence
  Chemically Synthesized
QVQLQESGGGLVQAGGSLRLSCAASGTIFYYLRMGWYRQAPGKEREFVATITSGGSTNYADSVKGRFTISRDNAKNTVYLQMNSLKPEDTAVYYCAVGHGTTPVLITYFGYWGQGTQVTVSS

SEQ ID NO: 34506 - protein, 126 aa, Artificial Sequence
  Chemically Synthesized
QVQLQESGGGLVQAGGSLRLSCAASGTIFNYVYMGWYRQAPGKEREFVASIGDGGNTYYADSVKGRFTISRDNAKNTVYLQMNSLKPEDTAVYYCAAAVAVRQLGVGGDDYPFRYWGQGTQVTVSS

SEQ ID NO: 34507 - protein, 118 aa, Artificial Sequence
  Chemically Synthesized
QVQLQESGGGLVQAGGSLRLSCAASGTIFHVQAMGWYRQAPGKEREFVAGIGQGSSTNYADSVKGRFTISRDNAKNTVYLQMNSLKPEDTAVYYCAAYAGRTSWHYYWGQGTQVTVSS

SEQ ID NO: 34508 - protein, 122 aa, Artificial Sequence
  Chemically Synthesized
QVQLQESGGGLVQAGGSLRLSCAASGYIFPIDYMGWYRQAPGKERELVATITPGGSTNYADSVKGRFTISRDNAKNTVYLQMNSLKPEDTAVYYCAVNYGYDYSTPSYYSYWGQGTQVTVSS

SEQ ID NO: 34509 - protein, 118 aa, Artificial Sequence
  Chemically Synthesized
QVQLQESGGGLVQAGGSLRLSCAASGNISYDPLMGWYRQAPGKEREFVASIGYGGNTNYADSVKGRFTISRDNAKNTVYLQMNSLKPEDTAVYYCAVYIGTWYRSCYWGQGTQVTVSS

SEQ ID NO: 34510 - protein, 126 aa, Artificial Sequence
  Chemically Synthesized
QVQLQESGGGLVQAGGSLRLSCAASGNISRRYDMGWYRQAPGKEREFVASIDPGSNTYYADSVKGRFTISRDNAKNTVYLQMNSLKPEDTAVYYCAVRIGNDYAQGGDITVDLLYWGQGTQVTVSS

SEQ ID NO: 34511 - protein, 118 aa, Artificial Sequence
  Chemically Synthesized
QVQLQESGGGLVQAGGSLRLSCAASGTISYRVYMGWYRQAPGKEREFVAGITDGANTNYADSVKGRFTISRDNAKNTVYLQMNSLKPEDTAVYYCAVVIGNDRALGYWGQGTQVTVSS

SEQ ID NO: 34512 - protein, 125 aa, Artificial Sequence
  Chemically Synthesized
QVQLQESGGGLVQAGGSLRLSCAASGNIFYIVWMGWYRQAPGKERELVAGITGGGNQYADSVKGRFTISRDNAKNTVYLQMNSLKPEDTAVYYCAAYRKLRDDWRPVPSGRHDYWGQGTQVTVSS

SEQ ID NO: 34513 - protein, 118 aa, Artificial Sequence
  Chemically Synthesized
QVQLQESGGGLVQAGGSLRLSCAASGTIFDHPVMGWYRQAPGKEREFVAGIDYGGSTNYADSVKGRFTISRDNAKNTVYLQMNSLKPEDTAVYYCAVYTAYVLHHDYWGQGTQVTVSS

SEQ ID NO: 34514 - protein, 119 aa, Artificial Sequence
  Chemically Synthesized
QVQLQESGGGLVQAGGSLRLSCAASGTISYRLMGWYRQAPGKERELVATIDTGGITYYADSVKGRFTISRDNAKNTVYLQMNSLKPEDTAVYYCAVDDGPQVDPRHGYWGQGTQVTVSS

SEQ ID NO: 34515 - protein, 118 aa, Artificial Sequence
  Chemically Synthesized
QVQLQESGGGLVQAGGSLRLSCAASGNISYAIPMGWYRQAPGKERELVASIDRGGNTNYADSVKGRFTISRDNAKNTVYLQMNSLKPEDTAVYYCAVYATRYRAHGYWGQGTQVTVSS

SEQ ID NO: 34516 - protein, 118 aa, Artificial Sequence
  Chemically Synthesized
QVQLQESGGGLVQAGGSLRLSCAASGNISTGATMGWYRQAPGKEREFVAGISLGANTNYADSVKGRFTISRDNAKNTVYLQMNSLKPEDTAVYYCAALQVTHTHHYYWGQGTQVTVSS

SEQ ID NO: 34517 - protein, 118 aa, Artificial Sequence
  Chemically Synthesized
QVQLQESGGGLVQAGGSLRLSCAASGSIFTNFGMGWYRQAPGKEREFVAAIDAGSSTYYADSVKGRFTISRDNAKNTVYLQMNSLKPEDTAVYYCAAYVTVTTLFYYWGQGTQVTVSS

SEQ ID NO: 34518 - protein, 122 aa, Artificial Sequence
  Chemically Synthesized
QVQLQESGGGLVQAGGSLRLSCAASGTIFRAINMGWYRQAPGKEREFVATISKGTTTNYADSVKGRFTISRDNAKNTVYLQMNSLKPEDTAVYYCAVDASDDALGYVDYDYWGQGTQVTVSS

SEQ ID NO: 34519 - protein, 124 aa, Artificial Sequence
  Chemically Synthesized
QVQLQESGGGLVQAGGSLRLSCAASGYISPYDMGWYRQAPGKERELVASITHGAITNYADSVKGRFTISRDNAKNTVYLQMNSLKPEDTAVYYCAVTTVTTSTRTTTSVTVMYWGQGTQVTVSS

SEQ ID NO: 34520 - protein, 118 aa, Artificial Sequence
  Chemically Synthesized
QVQLQESGGGLVQAGGSLRLSCAASGNISVAPTMGWYRQAPGKERELVAGISPGTSTNYADSVKGRFTISRDNAKNTVYLQMNSLKPEDTAVYYCAAIFYSSQYHYYWGQGTQVTVSS

SEQ ID NO: 34521 - protein, 118 aa, Artificial Sequence
  Chemically Synthesized
QVQLQESGGGLVQAGGSLRLSCAASGSISRPTIMGWYRQAPGKEREFVASIGLGANTNYADSVKGRFTISRDNAKNTVYLQMNSLKPEDTAVYYCAALKYDHRWHHYWGQGTQVTVSS

SEQ ID NO: 34522 - protein, 118 aa, Artificial Sequence
  Chemically Synthesized
QVQLQESGGGLVQAGGSLRLSCAASGNISGGYNMGWYRQAPGKERELVASIDNGSTTYYADSVKGRFTISRDNAKNTVYLQMNSLKPEDTAVYYCAAYYTSDVVYGYWGQGTQVTVSS

SEQ ID NO: 34523 - protein, 122 aa, Artificial Sequence
  Chemically Synthesized
QVQLQESGGGLVQAGGSLRLSCAASGSISGQHGMGWYRQAPGKEREFVATIDYGANTYYADSVKGRFTISRDNAKNTVYLQMNSLKPEDTAVYYCAVRPYWYWYDGINHNYWGQGTQVTVSS

SEQ ID NO: 34524 - protein, 124 aa, Artificial Sequence
  Chemically Synthesized
QVQLQESGGGLVQAGGSLRLSCAASGYISDGDSMGWYRQAPGKERELVAAIKYYYLYADSVKGRFTISRDNAKNTVYLQMNSLKPEDTAVYYCAAATYDYYYDGSAYAYHLDYWGQGTQVTVSS

SEQ ID NO: 34525 - protein, 126 aa, Artificial Sequence
  Chemically Synthesized
QVQLQESGGGLVQAGGSLRLSCAASGSISAPVGMGWYRQAPGKEREFVAGITYGGNTNYADSVKGRFTISRDNAKNTVYLQMNSLKPEDTAVYYCAAVYHGAGWGRDTVGQYHQYWGQGTQVTVSS

SEQ ID NO: 34526 - protein, 118 aa, Artificial Sequence
  Chemically Synthesized
QVQLQESGGGLVQAGGSLRLSCAASGTIFPAWVMGWYRQAPGKERELVAGIGIGANTNYADSVKGRFTISRDNAKNTVYLQMNSLKPEDTAVYYCAVAQWDLTYLGYWGQGTQVTVSS

SEQ ID NO: 34527 - protein, 118 aa, Artificial Sequence
  Chemically Synthesized
QVQLQESGGGLVQAGGSLRLSCAASGNIFVPSVMGWYRQAPGKEREFVAAISDGAITNYADSVKGRFTISRDNAKNTVYLQMNSLKPEDTAVYYCAVVTSSAHHHYYWGQGTQVTVSS

SEQ ID NO: 34528 - protein, 118 aa, Artificial Sequence
  Chemically Synthesized
QVQLQESGGGLVQAGGSLRLSCAASGYIFDAGIMGWYRQAPGKEREFVAGIGQGGITNYADSVKGRFTISRDNAKNTVYLQMNSLKPEDTAVYYCAVILYDTSYHWYWGQGTQVTVSS

SEQ ID NO: 34529 - protein, 121 aa, Artificial Sequence
  Chemically Synthesized
QVQLQESGGGLVQAGGSLRLSCAASGYISYGGLMGWYRQAPGKERELVASISQGASTNYADSVKGRFTISRDNAKNTVYLQMNSLKPEDTAVYYCALVTLLMKVVTRVIYWGQGTQVTVSS

SEQ ID NO: 34530 - protein, 118 aa, Artificial Sequence
  Chemically Synthesized
QVQLQESGGGLVQAGGSLRLSCAASGSISGERPMGWYRQAPGKEREFVAAITAGTSTNYADSVKGRFTISRDNAKNTVYLQMNSLKPEDTAVYYCAAVYPDYPYFYYWGQGTQVTVSS

SEQ ID NO: 34531 - protein, 118 aa, Artificial Sequence
  Chemically Synthesized
QVQLQESGGGLVQAGGSLRLSCAASGTISGHPQMGWYRQAPGKEREFVASIDYGGNTNYADSVKGRFTISRDNAKNTVYLQMNSLKPEDTAVYYCAAIYYYRNYHYYWGQGTQVTVSS

SEQ ID NO: 34532 - protein, 118 aa, Artificial Sequence
  Chemically Synthesized
QVQLQESGGGLVQAGGSLRLSCAASGSISGPISMGWYRQAPGKEREFVASIDYGSNTNYADSVKGRFTISRDNAKNTVYLQMNSLKPEDTAVYYCAALTPSTSRLYYWGQGTQVTVSS

SEQ ID NO: 34533 - protein, 118 aa, Artificial Sequence
  Chemically Synthesized
QVQLQESGGGLVQAGGSLRLSCAASGTIFKSYVMGWYRQAPGKERELVATIDQGAITYYADSVKGRFTISRDNAKNTVYLQMNSLKPEDTAVYYCAAIQSDDYPHLYWGQGTQVTVSS

SEQ ID NO: 34534 - protein, 122 aa, Artificial Sequence
  Chemically Synthesized
QVQLQESGGGLVQAGGSLRLSCAASGSIFGTLDMGWYRQAPGKERELVAAIGGGTSTYYADSVKGRFTISRDNAKNTVYLQMNSLKPEDTAVYYCAAHDRYDKDANYNHRYWGQGTQVTVSS

SEQ ID NO: 34535 - protein, 118 aa, Artificial Sequence
  Chemically Synthesized
QVQLQESGGGLVQAGGSLRLSCAASGNISAYTHMGWYRQAPGKEREFVASIGIGANTNYADSVKGRFTISRDNAKNTVYLQMNSLKPEDTAVYYCAAVWRERTWHSYWGQGTQVTVSS

SEQ ID NO: 34536 - protein, 122 aa, Artificial Sequence
  Chemically Synthesized
QVQLQESGGGLVQAGGSLRLSCAASGTIFQVVHMGWYRQAPGKEREFVAAITHGTSTYYADSVKGRFTISRDNAKNTVYLQMNSLKPEDTAVYYCAAIQYGLGRTGQYHYYWGQGTQVTVSS

SEQ ID NO: 34537 - protein, 121 aa, Artificial Sequence
  Chemically Synthesized
QVQLQESGGGLVQAGGSLRLSCAASGSISEPTDMGWYRQAPGKERELVATINLGGSTNYADSVKGRFTISRDNAKNTVYLQMNSLKPEDTAVYYCAVGPLIRRVTFRRMYWGQGTQVTVSS

SEQ ID NO: 34538 - protein, 117 aa, Artificial Sequence
  Chemically Synthesized
QVQLQESGGGLVQAGGSLRLSCAASGNISDLHPMGWYRQAPGKEREFVASITEGASTYYADSVKGRFTISRDNAKNTVYLQMNSLKPEDTAVYYCAADSSPKSWHYWGQGTQVTVSS

SEQ ID NO: 34539 - protein, 118 aa, Artificial Sequence
  Chemically Synthesized
QVQLQESGGGLVQAGGSLRLSCAASGNISYVYLMGWYRQAPGKERELVASIAPGANTNYADSVKGRFTISRDNAKNTVYLQMNSLKPEDTAVYYCAVTRYADLEFYYWGQGTQVTVSS

SEQ ID NO: 34540 - protein, 118 aa, Artificial Sequence
  Chemically Synthesized
QVQLQESGGGLVQAGGSLRLSCAASGTIFEDRSMGWYRQAPGKEREFVAAISDGTITNYADSVKGRFTISRDNAKNTVYLQMNSLKPEDTAVYYCAVLYDVGDYYEYWGQGTQVTVSS

SEQ ID NO: 34541 - protein, 121 aa, Artificial Sequence
  Chemically Synthesized
QVQLQESGGGLVQAGGSLRLSCAASGSIFGAYIMGWYRQAPGKEREFVAVLVLVVLPYADSVKGRFTISRDNAKNTVYLQMNSLKPEDTAVYYCAADDSSARYGSDQHAYWGQGTQVTVSS

SEQ ID NO: 34542 - protein, 122 aa, Artificial Sequence
  Chemically Synthesized
QVQLQESGGGLVQAGGSLRLSCAASGNIFHNSDMGWYRQAPGKEREFVAAIGGGATTNYADSVKGRFTISRDNAKNTVYLQMNSLKPEDTAVYYCAVYQTYRQSRRYIHRYWGQGTQVTVSS

SEQ ID NO: 34543 - protein, 117 aa, Artificial Sequence
  Chemically Synthesized
QVQLQESGGGLVQAGGSLRLSCAASGSIFERGGMGWYRQAPGKERELVATIDSVLVPYADSVKGRFTISRDNAKNTVYLQMNSLKPEDTAVYYCAATGGDGGGHRYWGQGTQVTVSS

SEQ ID NO: 34544 - protein, 118 aa, Artificial Sequence
  Chemically Synthesized
QVQLQESGGGLVQAGGSLRLSCAASGTISDWPDMGWYRQAPGKERELVAGIGYGSTTYYADSVKGRFTISRDNAKNTVYLQMNSLKPEDTAVYYCAADYRTSYYFFYWGQGTQVTVSS

SEQ ID NO: 34545 - protein, 118 aa, Artificial Sequence
  Chemically Synthesized
QVQLQESGGGLVQAGGSLRLSCAASGSIFHSYVMGWYRQAPGKERELVAGIDSGTNTYYADSVKGRFTISRDNAKNTVYLQMNSLKPEDTAVYYCAALDADVYAYFYWGQGTQVTVSS

SEQ ID NO: 34546 - protein, 126 aa, Artificial Sequence
  Chemically Synthesized
QVQLQESGGGLVQAGGSLRLSCAASGTISWIGLMGWYRQAPGKEREFVAAITAGASTYYADSVKGRFTISRDNAKNTVYLQMNSLKPEDTAVYYCAAFVTGGTPTLGTDEYIYYYWGQGTQVTVSS

SEQ ID NO: 34547 - protein, 117 aa, Artificial Sequence
  Chemically Synthesized
QVQLQESGGGLVQAGGSLRLSCAASGSISYHDYMGWYRQAPGKERELVAAIDVGASTYYADSVKGRFTISRDNAKNTVYLQMNSLKPEDTAVYYCAASGGDWDSLYWGQGTQVTVSS

SEQ ID NO: 34548 - protein, 122 aa, Artificial Sequence
  Chemically Synthesized
QVQLQESGGGLVQAGGSLRLSCAASGTISDNGSMGWYRQAPGKERELVASIGSGATTNYADSVKGRFTISRDNAKNTVYLQMNSLKPEDTAVYYCAVDAGTRTDPRQYHDYWGQGTQVTVSS

SEQ ID NO: 34549 - protein, 118 aa, Artificial Sequence
  Chemically Synthesized
QVQLQESGGGLVQAGGSLRLSCAASGYISSITHMGWYRQAPGKEREFVAAIDYGASTNYADSVKGRFTISRDNAKNTVYLQMNSLKPEDTAVYYCAVVTGKGRYLYYWGQGTQVTVSS

SEQ ID NO: 34550 - protein, 118 aa, Artificial Sequence
  Chemically Synthesized
QVQLQESGGGLVQAGGSLRLSCAASGNISRILFMGWYRQAPGKERELVATIAYGGITNYADSVKGRFTISRDNAKNTVYLQMNSLKPEDTAVYYCAAVPYPDSQHFYWGQGTQVTVSS

SEQ ID NO: 34551 - protein, 118 aa, Artificial Sequence
  Chemically Synthesized
QVQLQESGGGLVQAGGSLRLSCAASGTISYYTGMGWYRQAPGKEREFVATIADGGTTYYADSVKGRFTISRDNAKNTVYLQMNSLKPEDTAVYYCAVAWISSRPHYYWGQGTQVTVSS

SEQ ID NO: 34552 - protein, 118 aa, Artificial Sequence
  Chemically Synthesized
QVQLQESGGGLVQAGGSLRLSCAASGTIFHDAFMGWYRQAPGKEREFVAAIDPGTITNYADSVKGRFTISRDNAKNTVYLQMNSLKPEDTAVYYCAAIVRDSHTLWYWGQGTQVTVSS

SEQ ID NO: 34553 - protein, 122 aa, Artificial Sequence
  Chemically Synthesized
QVQLQESGGGLVQAGGSLRLSCAASGSISPPDIMGWYRQAPGKERELVASITDGATTYYADSVKGRFTISRDNAKNTVYLQMNSLKPEDTAVYYCAVRDASEYAYQVEYAYWGQGTQVTVSS

SEQ ID NO: 34554 - protein, 117 aa, Artificial Sequence
  Chemically Synthesized
QVQLQESGGGLVQAGGSLRLSCAASGSISPYVMGWYRQAPGKEREFVAGINYGANTYYADSVKGRFTISRDNAKNTVYLQMNSLKPEDTAVYYCAAASFIRPYFYYWGQGTQVTVSS

SEQ ID NO: 34555 - protein, 122 aa, Artificial Sequence
  Chemically Synthesized
QVQLQESGGGLVQAGGSLRLSCAASGTISTNSSMGWYRQAPGKEREFVAGIGTGASTYYADSVKGRFTISRDNAKNTVYLQMNSLKPEDTAVYYCAVVYAKAGRDVGYHYYWGQGTQVTVSS

SEQ ID NO: 34556 - protein, 118 aa, Artificial Sequence
  Chemically Synthesized
QVQLQESGGGLVQAGGSLRLSCAASGTISVLTRMGWYRQAPGKERELVATITTGGSTYYADSVKGRFTISRDNAKNTVYLQMNSLKPEDTAVYYCAVTDSDLQAFPYWGQGTQVTVSS

SEQ ID NO: 34557 - protein, 118 aa, Artificial Sequence
  Chemically Synthesized
QVQLQESGGGLVQAGGSLRLSCAASGTISRDPWMGWYRQAPGKEREFVAAIATGASTNYADSVKGRFTISRDNAKNTVYLQMNSLKPEDTAVYYCAANSVNDKYLLYWGQGTQVTVSS

SEQ ID NO: 34558 - protein, 118 aa, Artificial Sequence
  Chemically Synthesized
QVQLQESGGGLVQAGGSLRLSCAASGYISYPRNMGWYRQAPGKEREFVAGISEGSITYYADSVKGRFTISRDNAKNTVYLQMNSLKPEDTAVYYCAAVWDSPTLLYYWGQGTQVTVSS

SEQ ID NO: 34559 - protein, 118 aa, Artificial Sequence
  Chemically Synthesized
QVQLQESGGGLVQAGGSLRLSCAASGNISGSDDMGWYRQAPGKEREFVAGIGAGAITYYADSVKGRFTISRDNAKNTVYLQMNSLKPEDTAVYYCAAGDVSWAYFDYWGQGTQVTVSS

SEQ ID NO: 34560 - protein, 124 aa, Artificial Sequence
  Chemically Synthesized
QVQLQESGGGLVQAGGSLRLSCAASGNISDRMGWYRQAPGKEREFVAAIARGTTTNYADSVKGRFTISRDNAKNTVYLQMNSLKPEDTAVYYCAVHDRDSSYAVTTREGRHTYWGQGTQVTVSS

SEQ ID NO: 34561 - protein, 118 aa, Artificial Sequence
  Chemically Synthesized
QVQLQESGGGLVQAGGSLRLSCAASGYISEVQSMGWYRQAPGKEREFVATIDDGASTNYADSVKGRFTISRDNAKNTVYLQMNSLKPEDTAVYYCAVDGGDYAVHDYWGQGTQVTVSS

SEQ ID NO: 34562 - protein, 121 aa, Artificial Sequence
  Chemically Synthesized
QVQLQESGGGLVQAGGSLRLSCAASGNIFGLTTMGWYRQAPGKERELVASINDGGSTNYADSVKGRFTISRDNAKNTVYLQMNSLKPEDTAVYYCASDHGRVRRVLPHAYWGQGTQVTVSS

SEQ ID NO: 34563 - protein, 118 aa, Artificial Sequence
  Chemically Synthesized
QVQLQESGGGLVQAGGSLRLSCAASGYIFGWSSMGWYRQAPGKERELVAGIAYGGSTYYADSVKGRFTISRDNAKNTVYLQMNSLKPEDTAVYYCAANIDYSFYFSYWGQGTQVTVSS

SEQ ID NO: 34564 - protein, 122 aa, Artificial Sequence
  Chemically Synthesized
QVQLQESGGGLVQAGGSLRLSCAASGSISYIKFMGWYRQAPGKERELVAGIDPGTTTNYADSVKGRFTISRDNAKNTVYLQMNSLKPEDTAVYYCAAYYDYVFNDYAVFVYWGQGTQVTVSS

SEQ ID NO: 34565 - protein, 125 aa, Artificial Sequence
  Chemically Synthesized
QVQLQESGGGLVQAGGSLRLSCAASGSIFDLGYMGWYRQAPGKEREFVATIAWGSTTYYADSVKGRFTISRDNAKNTVYLQMNSLKPEDTAVYYCAVPSGVNLPHYYHYPSFIYWGQGTQVTVSS

SEQ ID NO: 34566 - protein, 118 aa, Artificial Sequence
  Chemically Synthesized
QVQLQESGGGLVQAGGSLRLSCAASGSISRPYIMGWYRQAPGKEREFVAAIDRGTSTNYADSVKGRFTISRDNAKNTVYLQMNSLKPEDTAVYYCAAQVGKYWPHRYWGQGTQVTVSS

SEQ ID NO: 34567 - protein, 121 aa, Artificial Sequence
  Chemically Synthesized
QVQLQESGGGLVQAGGSLRLSCAASGNISDDGGMGWYRQAPGKERELVAGIGDGGTTNYADSVKGRFTISRDNAKNTVYLQMNSLKPEDTAVYYCAVGYNTDGDTTFDYYWGQGTQVTVSS

SEQ ID NO: 34568 - protein, 118 aa, Artificial Sequence
  Chemically Synthesized
QVQLQESGGGLVQAGGSLRLSCAASGSIFPYYPMGWYRQAPGKEREFVATIDDGASTYYADSVKGRFTISRDNAKNTVYLQMNSLKPEDTAVYYCAADLLYIHTHSYWGQGTQVTVSS

SEQ ID NO: 34569 - protein, 118 aa, Artificial Sequence
  Chemically Synthesized
QVQLQESGGGLVQAGGSLRLSCAASGYIFRPREMGWYRQAPGKERELVAAISAGGSTNYADSVKGRFTISRDNAKNTVYLQMNSLKPEDTAVYYCAAYRPYRHAYYYWGQGTQVTVSS

SEQ ID NO: 34570 - protein, 118 aa, Artificial Sequence
  Chemically Synthesized
QVQLQESGGGLVQAGGSLRLSCAASGNIFADFYMGWYRQAPGKERELVAGIGYGSNTNYADSVKGRFTISRDNAKNTVYLQMNSLKPEDTAVYYCAAGDQDEDRYYYWGQGTQVTVSS

SEQ ID NO: 34571 - protein, 118 aa, Artificial Sequence
  Chemically Synthesized
QVQLQESGGGLVQAGGSLRLSCAASGTIFGHAFMGWYRQAPGKEREFVASITYGGSTNYADSVKGRFTISRDNAKNTVYLQMNSLKPEDTAVYYCAVGFSRTGSHTYWGQGTQVTVSS

SEQ ID NO: 34572 - protein, 110 aa, Artificial Sequence
  Chemically Synthesized
QVQLQESGGGLVQAGGSLRLSCAASGNISVGLKMGWYRQAPGKERELVASISYGTITNYADSVKGRFTISRDNAKNTVYLQMNSLKPEDTAVYYCAYHYWGQGTQVTVSS

SEQ ID NO: 34573 - protein, 118 aa, Artificial Sequence
  Chemically Synthesized
QVQLQESGGGLVQAGGSLRLSCAASGNISQIYAMGWYRQAPGKEREFVATIGYGGSTYYADSVKGRFTISRDNAKNTVYLQMNSLKPEDTAVYYCAVYYVYNQAYAYWGQGTQVTVSS

SEQ ID NO: 34574 - protein, 122 aa, Artificial Sequence
  Chemically Synthesized
QVQLQESGGGLVQAGGSLRLSCAASGTIFYALYMGWYRQAPGKERELVASINYGTITNYADSVKGRFTISRDNAKNTVYLQMNSLKPEDTAVYYCAARINFRRSNADYFGYWGQGTQVTVSS

SEQ ID NO: 34575 - protein, 126 aa, Artificial Sequence
  Chemically Synthesized
QVQLQESGGGLVQAGGSLRLSCAASGSIFYPISMGWYRQAPGKERELVASIDFGASTYYADSVKGRFTISRDNAKNTVYLQMNSLKPEDTAVYYCAAPADRGSGYYAYQRILHVYWGQGTQVTVSS

SEQ ID NO: 34576 - protein, 121 aa, Artificial Sequence
  Chemically Synthesized
QVQLQESGGGLVQAGGSLRLSCAASGNISGTDGMGWYRQAPGKERELVPVLLRVLLPYADSVKGRFTISRDNAKNTVYLQMNSLKPEDTAVYYCAVAVEDPDYKIYWYSYWGQGTQVTVSS

SEQ ID NO: 34577 - protein, 122 aa, Artificial Sequence
  Chemically Synthesized
QVQLQESGGGLVQAGGSLRLSCAASGTIFQAPQMGWYRQAPGKEREFVAGITRGGTTNYADSVKGRFTISRDNAKNTVYLQMNSLKPEDTAVYYCAVADYGPRDYAFFFVYWGQGTQVTVSS

SEQ ID NO: 34578 - protein, 126 aa, Artificial Sequence
  Chemically Synthesized
QVQLQESGGGLVQAGGSLRLSCAASGNISKGDDMGWYRQAPGKERELVAAIAYGSTTNYADSVKGRFTISRDNAKNTVYLQMNSLKPEDTAVYYCAAHYASDYRSQLDVYDYFGYWGQGTQVTVSS

SEQ ID NO: 34579 - protein, 118 aa, Artificial Sequence
  Chemically Synthesized
QVQLQESGGGLVQAGGSLRLSCAASGYISRARSMGWYRQAPGKEREFVASIAYGAITNYADSVKGRFTISRDNAKNTVYLQMNSLKPEDTAVYYCAVRRAYRTPFTYWGQGTQVTVSS

SEQ ID NO: 34580 - protein, 126 aa, Artificial Sequence
  Chemically Synthesized
QVQLQESGGGLVQAGGSLRLSCAASGTIFSDWGMGWYRQAPGKEREFVAAITRGGNTYYADSVKGRFTISRDNAKNTVYLQMNSLKPEDTAVYYCAVQGPWYGRYYYRGLYPFLYWGQGTQVTVSS

SEQ ID NO: 34581 - protein, 122 aa, Artificial Sequence
  Chemically Synthesized
QVQLQESGGGLVQAGGSLRLSCAASGTISRRPRMGWYRQAPGKERELVAAIAAGAITNYADSVKGRFTISRDNAKNTVYLQMNSLKPEDTAVYYCAVIRYWYRGDGPQYGYWGQGTQVTVSS

SEQ ID NO: 34582 - protein, 118 aa, Artificial Sequence
  Chemically Synthesized
QVQLQESGGGLVQAGGSLRLSCAASGTIFRNPYMGWYRQAPGKERELVASISYGTSTYYADSVKGRFTISRDNAKNTVYLQMNSLKPEDTAVYYCAALSTTTYRHTYWGQGTQVTVSS

SEQ ID NO: 34583 - protein, 117 aa, Artificial Sequence
  Chemically Synthesized
QVQLQESGGGLVQAGGSLRLSCAASGYISSDNYMGWYRQAPGKEREFVAGIDDGGSTNYADSVKGRFTISRDNAKNTVYLQMNSLKPEDTAVYYCAVWGDGDGLYYWGQGTQVTVSS

SEQ ID NO: 34584 - protein, 126 aa, Artificial Sequence
  Chemically Synthesized
QVQLQESGGGLVQAGGSLRLSCAASGNISQYVYMGWYRQAPGKERELVAAIGAGGTTNYADSVKGRFTISRDNAKNTVYLQMNSLKPEDTAVYYCAAYYQVYWFVLQYLGLYHPYWGQGTQVTVSS

SEQ ID NO: 34585 - protein, 121 aa, Artificial Sequence
  Chemically Synthesized
QVQLQESGGGLVQAGGSLRLSCAASGYISDYRKMGWYRQAPGKERELVAGISTGGSTYYADSVKGRFTISRDNAKNTVYLQMNSLKPEDTAVYYCAVSAWRNFIYSRHRYWGQGTQVTVSS

SEQ ID NO: 34586 - protein, 115 aa, Artificial Sequence
  Chemically Synthesized
QVQLQESGGGLVQAGGSLRLSCAASGTISYRYRMGWYRQAPGKERELVAGISGGTTTYYADSVKGRFTISRDNAKNTVYLQMNSLKPEDTAVYYCARGRRYHTYWGQGTQVTVSS

SEQ ID NO: 34587 - protein, 111 aa, Artificial Sequence
  Chemically Synthesized
QVQLQESGGGLVQAGGSLRLSCAASGYISSVVYMGWYRQAPGKEREFVPLLMTVLLPYADSVKGRFTISRDNAKNTVYLQMNSLKPEDTAVYYCAYGHFYWGQGTQVTVSS

SEQ ID NO: 34588 - protein, 111 aa, Artificial Sequence
  Chemically Synthesized
QVQLQESGGGLVQAGGSLRLSCAASGNIFPYRQMGWYRQAPGKERELVATIGRGANTNYADSVKGRFTISRDNAKNTVYLQMNSLKPEDTAVYYCARLRYWGQGTQVTVSS

SEQ ID NO: 34589 - protein, 121 aa, Artificial Sequence
  Chemically Synthesized
QVQLQESGGGLVQAGGSLRLSCAASGYIFTTPMGWYRQAPGKEREFVASIAVGSTTYYADSVKGRFTISRDNAKNTVYLQMNSLKPEDTAVYYCAARVDLDKSTQGSLWYWGQGTQVTVSS

SEQ ID NO: 34590 - protein, 118 aa, Artificial Sequence
  Chemically Synthesized
QVQLQESGGGLVQAGGSLRLSCAASGNISRARYMGWYRQAPGKEREFVAAITYGSITYYADSVKGRFTISRDNAKNTVYLQMNSLKPEDTAVYYCAVWSRFVGRYGYWGQGTQVTVSS

SEQ ID NO: 34591 - protein, 112 aa, Artificial Sequence
  Chemically Synthesized
QVQLQESGGGLVQAGGSLRLSCAASGYISYYMGWYRQAPGKEREFVAGIGFGGTTYYADSVKGRFTISRDNAKNTVYLQMNSLKPEDTAVYYCAGRRRHQYWGQGTQVTVSS

SEQ ID NO: 34592 - protein, 118 aa, Artificial Sequence
  Chemically Synthesized
QVQLQESGGGLVQAGGSLRLSCAASGSIFKRYRMGWYRQAPGKEREFVAGINYGAITYYADSVKGRFTISRDNAKNTVYLQMNSLKPEDTAVYYCAVWARHYTTLRYWGQGTQVTVSS

SEQ ID NO: 34593 - protein, 122 aa, Artificial Sequence
  Chemically Synthesized
QVQLQESGGGLVQAGGSLRLSCAASGNISRRGTMGWYRQAPGKERELVAAIAVGASTNYADSVKGRFTISRDNAKNTVYLQMNSLKPEDTAVYYCAVRRWSVRYHGSPYQYWGQGTQVTVSS

SEQ ID NO: 34594 - protein, 118 aa, Artificial Sequence
  Chemically Synthesized
QVQLQESGGGLVQAGGSLRLSCAASGYIFAYYYMGWYRQAPGKERELVAAIAGGTTTYYADSVKGRFTISRDNAKNTVYLQMNSLKPEDTAVYYCAVKRGFWYTHRYWGQGTQVTVSS

SEQ ID NO: 34595 - protein, 118 aa, Artificial Sequence
  Chemically Synthesized
QVQLQESGGGLVQAGGSLRLSCAASGSISSYAYMGWYRQAPGKERELVAAITDGASTYYADSVKGRFTISRDNAKNTVYLQMNSLKPEDTAVYYCAVSSYQDTAYGYWGQGTQVTVSS

SEQ ID NO: 34596 - protein, 122 aa, Artificial Sequence
  Chemically Synthesized
QVQLQESGGGLVQAGGSLRLSCAASGYISYPQYMGWYRQAPGKERELVASIAYGSTTYYADSVKGRFTISRDNAKNTVYLQMNSLKPEDTAVYYCAALRRTWYAPILRHLYWGQGTQVTVSS

SEQ ID NO: 34597 - protein, 126 aa, Artificial Sequence
  Chemically Synthesized
QVQLQESGGGLVQAGGSLRLSCAASGTISAYRGMGWYRQAPGKERELVAAINYGAITNYADSVKGRFTISRDNAKNTVYLQMNSLKPEDTAVYYCAARARYWQGAYSNRGRWHIYWGQGTQVTVSS

SEQ ID NO: 34598 - protein, 123 aa, Artificial Sequence
  Chemically Synthesized
QVQLQESGGGLVQAGGSLRLSCAASGNISRTYRMGWYRQAPGKEREFVAGITWGTNTNYADSVKGRFTISRDNAKNTVYLQMNSLKPEDTAVYYCAAQRWGGLWRSEIWHPYWGQGTQVTVSS

SEQ ID NO: 34599 - protein, 118 aa, Artificial Sequence
  Chemically Synthesized
QVQLQESGGGLVQAGGSLRLSCAASGTISLVRAMGWYRQAPGKEREFVASIGYGTNTYYADSVKGRFTISRDNAKNTVYLQMNSLKPEDTAVYYCAVRRDTYRLFKYWGQGTQVTVSS

SEQ ID NO: 34600 - protein, 118 aa, Artificial Sequence
  Chemically Synthesized
QVQLQESGGGLVQAGGSLRLSCAASGSISYYRYMGWYRQAPGKERELVAGIAFGSITYYADSVKGRFTISRDNAKNTVYLQMNSLKPEDTAVYYCAARILGLTRYSYWGQGTQVTVSS

SEQ ID NO: 34601 - protein, 118 aa, Artificial Sequence
  Chemically Synthesized
QVQLQESGGGLVQAGGSLRLSCAASGYISRGGVMGWYRQAPGKERELVAAIGYGSSTYYADSVKGRFTISRDNAKNTVYLQMNSLKPEDTAVYYCAASRQRYRGYPYWGQGTQVTVSS

SEQ ID NO: 34602 - protein, 118 aa, Artificial Sequence
  Chemically Synthesized
QVQLQESGGGLVQAGGSLRLSCAASGNIFYTQYMGWYRQAPGKEREFVASIALGSTTNYADSVKGRFTISRDNAKNTVYLQMNSLKPEDTAVYYCAVPLDRLSTFYYWGQGTQVTVSS

SEQ ID NO: 34603 - protein, 126 aa, Artificial Sequence
  Chemically Synthesized
QVQLQESGGGLVQAGGSLRLSCAASGNISAHADMGWYRQAPGKERELVASISAGASTYYADSVKGRFTISRDNAKNTVYLQMNSLKPEDTAVYYCAADGPRDISYRDDLQDGYYYWGQGTQVTVSS

SEQ ID NO: 34604 - protein, 121 aa, Artificial Sequence
  Chemically Synthesized
QVQLQESGGGLVQAGGSLRLSCAASGSISDAWIMGWYRQAPGKEREFVAAITDGATTYYADSVKGRFTISRDNAKNTVYLQMNSLKPEDTAVYYCAVDRYGAVGVYSLFYWGQGTQVTVSS

SEQ ID NO: 34605 - protein, 122 aa, Artificial Sequence
  Chemically Synthesized
QVQLQESGGGLVQAGGSLRLSCAASGNISHGDVMGWYRQAPGKERELVATISGGATTYYADSVKGRFTISRDNAKNTVYLQMNSLKPEDTAVYYCAAYPYYNYIGGQRHGYWGQGTQVTVSS

SEQ ID NO: 34606 - protein, 122 aa, Artificial Sequence
  Chemically Synthesized
QVQLQESGGGLVQAGGSLRLSCAASGTISVNGYMGWYRQAPGKERELVAGIGRGGITNYADSVKGRFTISRDNAKNTVYLQMNSLKPEDTAVYYCAVNTYAIYPDYHPHTYWGQGTQVTVSS

SEQ ID NO: 34607 - protein, 118 aa, Artificial Sequence
  Chemically Synthesized
QVQLQESGGGLVQAGGSLRLSCAASGTISAGNVMGWYRQAPGKEREFVASIAHGANTNYADSVKGRFTISRDNAKNTVYLQMNSLKPEDTAVYYCAANGYLLRLYRYWGQGTQVTVSS

SEQ ID NO: 34608 - protein, 117 aa, Artificial Sequence
  Chemically Synthesized
QVQLQESGGGLVQAGGSLRLSCAASGSISYSSLMGWYRQAPGKEREFVAAIGVGSTTYYADSVKGRFTISRDNAKNTVYLQMNSLKPEDTAVYYCAVDGSRLLLMYWGQGTQVTVSS

SEQ ID NO: 34609 - protein, 121 aa, Artificial Sequence
  Chemically Synthesized
QVQLQESGGGLVQAGGSLRLSCAASGTISFTSTMGWYRQAPGKERELVAAIGDGATTYYADSVKGRFTISRDNAKNTVYLQMNSLKPEDTAVYYCAVPGDVRYRNYCLWYWGQGTQVTVSS

SEQ ID NO: 34610 - protein, 128 aa, Artificial Sequence
  Chemically Synthesized
QVQLQESGGGLVQAGGSLRLSCAASGTISLRFMGWYRQAPGKEREFVAGISHGSTTNYADSVKGRFTISRDNAKNTVYLQMNSLKPEDTAVYYCAVFLRWIGYGYTVVDYEPYLYPYWGQGTQVTVSS

SEQ ID NO: 34611 - protein, 118 aa, Artificial Sequence
  Chemically Synthesized
QVQLQESGGGLVQAGGSLRLSCAASGTISYPSFMGWYRQAPGKERELVATIDSGGNTYYADSVKGRFTISRDNAKNTVYLQMNSLKPEDTAVYYCAVTRIVAPDYLYWGQGTQVTVSS

SEQ ID NO: 34612 - protein, 122 aa, Artificial Sequence
  Chemically Synthesized
QVQLQESGGGLVQAGGSLRLSCAASGTIFIPNIMGWYRQAPGKERELVAAIGSGGNTYYADSVKGRFTISRDNAKNTVYLQMNSLKPEDTAVYYCAANLFLSIPDRYWLDYWGQGTQVTVSS

SEQ ID NO: 34613 - protein, 122 aa, Artificial Sequence
  Chemically Synthesized
QVQLQESGGGLVQAGGSLRLSCAASGTIFWSNVMGWYRQAPGKEREFVAGIDYGTNTYYADSVKGRFTISRDNAKNTVYLQMNSLKPEDTAVYYCAAGSNYTGHPTYHYLYWGQGTQVTVSS

SEQ ID NO: 34614 - protein, 126 aa, Artificial Sequence
  Chemically Synthesized
QVQLQESGGGLVQAGGSLRLSCAASGYIFSFCFMGWYRQAPGKERELVATINGGSITNYADSVKGRFTISRDNAKNTVYLQMNSLKPEDTAVYYCAADGPNYTDTANAYDLWHWYWGQGTQVTVSS

SEQ ID NO: 34615 - protein, 119 aa, Artificial Sequence
  Chemically Synthesized
QVQLQESGGGLVQAGGSLRLSCAASGNISGSNYMGWYRQAPGKERELVATIDSGGTTNYADSVKGRFTISRDNAKNTVYLQMNSLKPEDTAVYYCAAWYRARDNYHEYWGQGTQVTVSS

SEQ ID NO: 34616 - protein, 118 aa, Artificial Sequence
  Chemically Synthesized
QVQLQESGGGLVQAGGSLRLSCAASGSIFSSHDMGWYRQAPGKEREFVAAINNGTSTNYADSVKGRFTISRDNAKNTVYLQMNSLKPEDTAVYYCAVSGSGYDALYYWGQGTQVTVSS

SEQ ID NO: 34617 - protein, 118 aa, Artificial Sequence
  Chemically Synthesized
QVQLQESGGGLVQAGGSLRLSCAASGTIFPYYRMGWYRQAPGKEREFVAGISPGGSTYYADSVKGRFTISRDNAKNTVYLQMNSLKPEDTAVYYCAAYVTSWIWFGYWGQGTQVTVSS

SEQ ID NO: 34618 - protein, 116 aa, Artificial Sequence
  Chemically Synthesized
QVQLQESGGGLVQAGGSLRLSCAASGSISYGVEMGWYRQAPGKERELVAGIGDGTNYADSVKGRFTISRDNAKNTVYLQMNSLKPEDTAVYYCAVVDWNYAYLGYWGQGTQVTVSS

SEQ ID NO: 34619 - protein, 125 aa, Artificial Sequence
  Chemically Synthesized
QVQLQESGGGLVQAGGSLRLSCAASGTIFTSTMGWYRQAPGKEREFVAGINFGANTNYADSVKGRFTISRDNAKNTVYLQMNSLKPEDTAVYYCAVWSYVSVLYTGHYGNQHAYWGQGTQVTVSS

SEQ ID NO: 34620 - protein, 122 aa, Artificial Sequence
  Chemically Synthesized
QVQLQESGGGLVQAGGSLRLSCAASGTISWDDGMGWYRQAPGKERELVAAIAEGGSTYYADSVKGRFTISRDNAKNTVYLQMNSLKPEDTAVYYCAARRWAYALTIDAFVYWGQGTQVTVSS

SEQ ID NO: 34621 - protein, 118 aa, Artificial Sequence
  Chemically Synthesized
QVQLQESGGGLVQAGGSLRLSCAASGNISVAAWMGWYRQAPGKEREFVAGINNGSTTNYADSVKGRFTISRDNAKNTVYLQMNSLKPEDTAVYYCAAKSVYAEFLDYWGQGTQVTVSS

SEQ ID NO: 34622 - protein, 122 aa, Artificial Sequence
  Chemically Synthesized
QVQLQESGGGLVQAGGSLRLSCAASGSISYPTDMGWYRQAPGKERELVAGISFGASTYYADSVKGRFTISRDNAKNTVYLQMNSLKPEDTAVYYCAADHEPPRTGLAALFYWGQGTQVTVSS

SEQ ID NO: 34623 - protein, 122 aa, Artificial Sequence
  Chemically Synthesized
QVQLQESGGGLVQAGGSLRLSCAASGSIFPILIMGWYRQAPGKEREFVASIGWGTSTNYADSVKGRFTISRDNAKNTVYLQMNSLKPEDTAVYYCAVGTWKNDDGIGRYLYWGQGTQVTVSS

SEQ ID NO: 34624 - protein, 118 aa, Artificial Sequence
  Chemically Synthesized
QVQLQESGGGLVQAGGSLRLSCAASGTISSRDYMGWYRQAPGKERELVAAITNGANTNYADSVKGRFTISRDNAKNTVYLQMNSLKPEDTAVYYCAVYRGPNAEFTYWGQGTQVTVSS

SEQ ID NO: 34625 - protein, 117 aa, Artificial Sequence
  Chemically Synthesized
QVQLQESGGGLVQAGGSLRLSCAASGSIFYDAMGWYRQAPGKEREFVAGIDYGGSTNYADSVKGRFTISRDNAKNTVYLQMNSLKPEDTAVYYCAVPQVTSSSFLYWGQGTQVTVSS

SEQ ID NO: 34626 - protein, 117 aa, Artificial Sequence
  Chemically Synthesized
QVQLQESGGGLVQAGGSLRLSCAASGSILLTVMGWYRQAPGKEREFVAAIGPGTSTNYADSVKGRFTISRDNAKNTVYLQMNSLKPEDTAVYYCAADVKTDWLFYYWGQGTQVTVSS

SEQ ID NO: 34627 - protein, 121 aa, Artificial Sequence
  Chemically Synthesized
QVQLQESGGGLVQAGGSLRLSCAASGTISSWAMGWYRQAPGKERELVATIDDGGTTYYADSVKGRFTISRDNAKNTVYLQMNSLKPEDTAVYYCAVDPVGWDNVDFLFRYWGQGTQVTVSS

SEQ ID NO: 34628 - protein, 111 aa, Artificial Sequence
  Chemically Synthesized
QVQLQESGGGLVQAGGSLRLSCAASGTISFQSDMGWYRQAPGKEREFVAATNSGSNTYYADSVKGRFTISRDNAKNTVYLQMNSLKPEDTAVYYCAVLFYWGQGTQVTVSS

SEQ ID NO: 34629 - protein, 122 aa, Artificial Sequence
  Chemically Synthesized
QVQLQESGGGLVQAGGSLRLSCAASGNIFLPYDMGWYRQAPGKEREFVAGINRGANTNYADSVKGRFTISRDNAKNTVYLQMNSLKPEDTAVYYCAVDYPLLLYIGYRLQYWGQGTQVTVSS

SEQ ID NO: 34630 - protein, 118 aa, Artificial Sequence
  Chemically Synthesized
QVQLQESGGGLVQAGGSLRLSCAASGTIFWSTTMGWYRQAPGKEREFVATIDVGSNTYYADSVKGRFTISRDNAKNTVYLQMNSLKPEDTAVYYCAAWSGVLNDFPYWGQGTQVTVSS

SEQ ID NO: 34631 - protein, 123 aa, Artificial Sequence
  Chemically Synthesized
QVQLQESGGGLVQAGGSLRLSCAASGYIFGTGYMGWYRQAPGKEREFVAAISLGSITNYADSVKGRFTISRDNAKNTVYLQMNSLKPEDTAVYYCAVQYIVDDYGDYGYFHYWGQGTQVTVSS

SEQ ID NO: 34632 - protein, 122 aa, Artificial Sequence
  Chemically Synthesized
QVQLQESGGGLVQAGGSLRLSCAASGYIFYLADMGWYRQAPGKERELVATISGGTITNYADSVKGRFTISRDNAKNTVYLQMNSLKPEDTAVYYCAVGYLEYDDTGYSFKYWGQGTQVTVSS

SEQ ID NO: 34633 - protein, 122 aa, Artificial Sequence
  Chemically Synthesized
QVQLQESGGGLVQAGGSLRLSCAASGSIFRDAVMGWYRQAPGKERELVASIASGGITYYADSVKGRFTISRDNAKNTVYLQMNSLKPEDTAVYYCAAVDDYTWQTYGPHWYWGQGTQVTVSS

SEQ ID NO: 34634 - protein, 118 aa, Artificial Sequence
  Chemically Synthesized
QVQLQESGGGLVQAGGSLRLSCAASGNISYVPAMGWYRQAPGKERELVAAINFGTSTNYADSVKGRFTISRDNAKNTVYLQMNSLKPEDTAVYYCAVYATYLYDHDYWGQGTQVTVSS

SEQ ID NO: 34635 - protein, 126 aa, Artificial Sequence
  Chemically Synthesized
QVQLQESGGGLVQAGGSLRLSCAASGYIFETQSMGWYRQAPGKEREFVAAITTGGTTYYADSVKGRFTISRDNAKNTVYLQMNSLKPEDTAVYYCAVDNVTYYVPFGRLAQLLGYWGQGTQVTVSS

SEQ ID NO: 34636 - protein, 117 aa, Artificial Sequence
  Chemically Synthesized
QVQLQESGGGLVQAGGSLRLSCAASGYILLSLMGWYRQAPGKEREFVAAIDGGSTTYYADSVKGRFTISRDNAKNTVYLQMNSLKPEDTAVYYCAAWALSPYPFVYWGQGTQVTVSS

SEQ ID NO: 34637 - protein, 118 aa, Artificial Sequence
  Chemically Synthesized
QVQLQESGGGLVQAGGSLRLSCAASGYISATVAMGWYRQAPGKEREFVAGIASGGSTYYADSVKGRFTISRDNAKNTVYLQMNSLKPEDTAVYYCAVYRRYVLRHRYWGQGTQVTVSS

SEQ ID NO: 34638 - protein, 126 aa, Artificial Sequence
  Chemically Synthesized
QVQLQESGGGLVQAGGSLRLSCAASGNISIEDIMGWYRQAPGKEREFVAGIAGGGITNYADSVKGRFTISRDNAKNTVYLQMNSLKPEDTAVYYCAAYYYADYDRVRYTDIALQYWGQGTQVTVSS

SEQ ID NO: 34639 - protein, 122 aa, Artificial Sequence
  Chemically Synthesized
QVQLQESGGGLVQAGGSLRLSCAASGSIFDWYPMGWYRQAPGKEREFVATIDPGAITYYADSVKGRFTISRDNAKNTVYLQMNSLKPEDTAVYYCAAVDRPYYIVRDIHTYWGQGTQVTVSS

SEQ ID NO: 34640 - protein, 120 aa, Artificial Sequence
  Chemically Synthesized
QVQLQESGGGLVQAGGSLRLSCAASGNISQYAYMGWYRQAPGKERELVAAITDGAITYYADSVKGRFTISRDNAKNTVYLQMNSLKPEDTAVYYCAALDSRPHTDAHAYWGQGTQVTVSS

SEQ ID NO: 34641 - protein, 126 aa, Artificial Sequence
  Chemically Synthesized
QVQLQESGGGLVQAGGSLRLSCAASGTISYYYGMGWYRQAPGKERELVAAISIGGITYYADSVKGRFTISRDNAKNTVYLQMNSLKPEDTAVYYCAVTYQLYEYGYDGDNLDHSYWGQGTQVTVSS

SEQ ID NO: 34642 - protein, 115 aa, Artificial Sequence
  Chemically Synthesized
QVQLQESGGGLVQAGGSLRLSCAASGNIFVSQGMGWYRQAPGKERELVASIGDGNTNYADSVKGRFTISRDNAKNTVYLQMNSLKPEDTAVYYCAVPFDAILSYWGQGTQVTVSS

SEQ ID NO: 34643 - protein, 117 aa, Artificial Sequence
  Chemically Synthesized
QVQLQESGGGLVQAGGSLRLSCAASGYIFLSTMGWYRQAPGKERELVATITTGGNTNYADSVKGRFTISRDNAKNTVYLQMNSLKPEDTAVYYCAVDGLRGGQFYYWGQGTQVTVSS

SEQ ID NO: 34644 - protein, 118 aa, Artificial Sequence
  Chemically Synthesized
QVQLQESGGGLVQAGGSLRLSCAASGTISWDWGMGWYRQAPGKERELVAAIGYGTITNYADSVKGRFTISRDNAKNTVYLQMNSLKPEDTAVYYCAATDADPGEYYYWGQGTQVTVSS

SEQ ID NO: 34645 - protein, 122 aa, Artificial Sequence
  Chemically Synthesized
QVQLQESGGGLVQAGGSLRLSCAASGNISDYPDMGWYRQAPGKEREFVATIDGGSTTYYADSVKGRFTISRDNAKNTVYLQMNSLKPEDTAVYYCAAGRYWPEAYYAPYKYWGQGTQVTVSS

SEQ ID NO: 34646 - protein, 118 aa, Artificial Sequence
  Chemically Synthesized
QVQLQESGGGLVQAGGSLRLSCAASGNIFSLDDMGWYRQAPGKERELVAGIGSGTSTYYADSVKGRFTISRDNAKNTVYLQMNSLKPEDTAVYYCAVQWYDLYAHPYWGQGTQVTVSS

SEQ ID NO: 34647 - protein, 118 aa, Artificial Sequence
  Chemically Synthesized
QVQLQESGGGLVQAGGSLRLSCAASGTIFYWYVMGWYRQAPGKERELVAAISNGTNTNYADSVKGRFTISRDNAKNTVYLQMNSLKPEDTAVYYCAVARTPRPYHQYWGQGTQVTVSS

SEQ ID NO: 34648 - protein, 117 aa, Artificial Sequence
  Chemically Synthesized
QVQLQESGGGLVQAGGSLRLSCAASGYIFDYSFMGWYRQAPGKERELVATIASGTTTYYADSVKGRFTISRDNAKNTVYLQMNSLKPEDTAVYYCAAVRESLLLLYWGQGTQVTVSS

SEQ ID NO: 34649 - protein, 126 aa, Artificial Sequence
  Chemically Synthesized
QVQLQESGGGLVQAGGSLRLSCAASGSISGRAYMGWYRQAPGKERELVATISVGGNTNYADSVKGRFTISRDNAKNTVYLQMNSLKPEDTAVYYCAAEYASIGEDSNVKLFGFYYWGQGTQVTVSS

SEQ ID NO: 34650 - protein, 123 aa, Artificial Sequence
  Chemically Synthesized
QVQLQESGGGLVQAGGSLRLSCAASGYISWPAGMGWYRQAPGKERELVAGIAYGGTTNYADSVKGRFTISRDNAKNTVYLQMNSLKPEDTAVYYCAVCLSRLLWTKVSTTMYWGQGTQVTVSS

SEQ ID NO: 34651 - protein, 118 aa, Artificial Sequence
  Chemically Synthesized
QVQLQESGGGLVQAGGSLRLSCAASGTISYGPTMGWYRQAPGKEREFVAAIDRGGITYYADSVKGRFTISRDNAKNTVYLQMNSLKPEDTAVYYCAAYIYHASAYDYWGQGTQVTVSS

SEQ ID NO: 34652 - protein, 117 aa, Artificial Sequence
  Chemically Synthesized
QVQLQESGGGLVQAGGSLRLSCAASGSISSHPRMGWYRQAPGKEREFVASISVGAITYYADSVKGRFTISRDNAKNTVYLQMNSLKPEDTAVYYCAAWPIAFTSFYWGQGTQVTVSS

SEQ ID NO: 34653 - protein, 117 aa, Artificial Sequence
  Chemically Synthesized
QVQLQESGGGLVQAGGSLRLSCAASGNIFAVSSMGWYRQAPGKEREFVAAIDDGANTYYADSVKGRFTISRDNAKNTVYLQMNSLKPEDTAVYYCAAVNISSTLIYWGQGTQVTVSS

SEQ ID NO: 34654 - protein, 122 aa, Artificial Sequence
  Chemically Synthesized
QVQLQESGGGLVQAGGSLRLSCAASGSISSTQLMGWYRQAPGKEREFVATISGGTITYYADSVKGRFTISRDNAKNTVYLQMNSLKPEDTAVYYCAVPLLGQLYYFTGHYYWGQGTQVTVSS

SEQ ID NO: 34655 - protein, 118 aa, Artificial Sequence
  Chemically Synthesized
QVQLQESGGGLVQAGGSLRLSCAASGSISGSYYMGWYRQAPGKEREFVAAITYGGSTYYADSVKGRFTISRDNAKNTVYLQMNSLKPEDTAVYYCAAKNSYWFRHYYWGQGTQVTVSS

SEQ ID NO: 34656 - protein, 122 aa, Artificial Sequence
  Chemically Synthesized
QVQLQESGGGLVQAGGSLRLSCAASGNISHRNSMGWYRQAPGKERELVAAITDGSNTNYADSVKGRFTISRDNAKNTVYLQMNSLKPEDTAVYYCAVWIANSDLGRDAFAYWGQGTQVTVSS

SEQ ID NO: 34657 - protein, 109 aa, Artificial Sequence
  Chemically Synthesized
QVQLQESGGGLVQAGGSLRLSCAASGYISTYTDMGWYRQAPGKERELVAGIGSGTSTNYADSVKGRFTISRDNAKNTVYLQMNSLKPEDTAVYYCAAYWGQGTQVTVSS

SEQ ID NO: 34658 - protein, 117 aa, Artificial Sequence
  Chemically Synthesized
QVQLQESGGGLVQAGGSLRLSCAASGTIFVYLAMGWYRQAPGKERELVASIDRGGTTYYADSVKGRFTISRDNAKNTVYLQMNSLKPEDTAVYYCAVEYGPSSHSYWGQGTQVTVSS

SEQ ID NO: 34659 - protein, 118 aa, Artificial Sequence
  Chemically Synthesized
QVQLQESGGGLVQAGGSLRLSCAASGSIFYYVYMGWYRQAPGKERELVAGIAYGGNTNYADSVKGRFTISRDNAKNTVYLQMNSLKPEDTAVYYCAVNGFYWPYYAYWGQGTQVTVSS

SEQ ID NO: 34660 - protein, 122 aa, Artificial Sequence
  Chemically Synthesized
QVQLQESGGGLVQAGGSLRLSCAASGYISPYSDMGWYRQAPGKERELVATINGGGSTNYADSVKGRFTISRDNAKNTVYLQMNSLKPEDTAVYYCAALQTLPYYSFQWFLYWGQGTQVTVSS

SEQ ID NO: 34661 - protein, 122 aa, Artificial Sequence
  Chemically Synthesized
QVQLQESGGGLVQAGGSLRLSCAASGTISYYVHMGWYRQAPGKEREFVAGIGTGSNTYYADSVKGRFTISRDNAKNTVYLQMNSLKPEDTAVYYCAASDPYRGYAYDTLPYWGQGTQVTVSS

SEQ ID NO: 34662 - protein, 118 aa, Artificial Sequence
  Chemically Synthesized
QVQLQESGGGLVQAGGSLRLSCAASGTISLTLYMGWYRQAPGKERELVATIGPGGITYYADSVKGRFTISRDNAKNTVYLQMNSLKPEDTAVYYCAVYDLTIYLYGYWGQGTQVTVSS

SEQ ID NO: 34663 - protein, 117 aa, Artificial Sequence
  Chemically Synthesized
QVQLQESGGGLVQAGGSLRLSCAASGNISALWYMGWYRQAPGKERELVASIDTGGITNYADSVKGRFTISRDNAKNTVYLQMNSLKPEDTAVYYCAAPRPWSSLMYWGQGTQVTVSS

SEQ ID NO: 34664 - protein, 118 aa, Artificial Sequence
  Chemically Synthesized
QVQLQESGGGLVQAGGSLRLSCAASGNISPVPGMGWYRQAPGKERELVASIGQGSNTYYADSVKGRFTISRDNAKNTVYLQMNSLKPEDTAVYYCAVKTYDYPYHGYWGQGTQVTVSS

SEQ ID NO: 34665 - protein, 117 aa, Artificial Sequence
  Chemically Synthesized
QVQLQESGGGLVQAGGSLRLSCAASGSIFYTGLMGWYRQAPGKEREFVAGISDGATTNYADSVKGRFTISRDNAKNTVYLQMNSLKPEDTAVYYCAVTHRYLYDFYWGQGTQVTVSS

SEQ ID NO: 34666 - protein, 126 aa, Artificial Sequence
  Chemically Synthesized
QVQLQESGGGLVQAGGSLRLSCAASGSIFDAGYMGWYRQAPGKERELVAAIGDGANTNYADSVKGRFTISRDNAKNTVYLQMNSLKPEDTAVYYCAVRDVKWSHWYWDQIDDHLYWGQGTQVTVSS

SEQ ID NO: 34667 - protein, 122 aa, Artificial Sequence
  Chemically Synthesized
QVQLQESGGGLVQAGGSLRLSCAASGTIFTSYGMGWYRQAPGKEREFVASISLGSSTNYADSVKGRFTISRDNAKNTVYLQMNSLKPEDTAVYYCAANTFRGYVDSTEHRYWGQGTQVTVSS

SEQ ID NO: 34668 - protein, 122 aa, Artificial Sequence
  Chemically Synthesized
QVQLQESGGGLVQAGGSLRLSCAASGYISREPFMGWYRQAPGKERELVASIDWGSNTYYADSVKGRFTISRDNAKNTVYLQMNSLKPEDTAVYYCAVLFASKPKYDLYHRYWGQGTQVTVSS

SEQ ID NO: 34669 - protein, 118 aa, Artificial Sequence
  Chemically Synthesized
QVQLQESGGGLVQAGGSLRLSCAASGTISWTYHMGWYRQAPGKERELVAGISHGSSTNYADSVKGRFTISRDNAKNTVYLQMNSLKPEDTAVYYCAVYNEVYGYHDYWGQGTQVTVSS

SEQ ID NO: 34670 - protein, 114 aa, Artificial Sequence
  Chemically Synthesized
QVQLQESGGGLVQAGGSLRLSCAASGTISSATDMGWYRQAPGKERELVAAINHGSNTYADSVKGRFTISRDNAKNTVYLQMNSLKPEDTAVYYCAASTNWHHYWGQGTQVTVSS

SEQ ID NO: 34671 - protein, 117 aa, Artificial Sequence
  Chemically Synthesized
QVQLQESGGGLVQAGGSLRLSCAASGTISPYYMGWYRQAPGKERELVATISPGSSTNYADSVKGRFTISRDNAKNTVYLQMNSLKPEDTAVYYCAVDVTFGDRHEYWGQGTQVTVSS

SEQ ID NO: 34672 - protein, 121 aa, Artificial Sequence
  Chemically Synthesized
QVQLQESGGGLVQAGGSLRLSCAASGTISSDGYMGWYRQAPGKERELLPLLVKVLIPYADSVKGRFTISRDNAKNTVYLQMNSLKPEDTAVYYCAAGDGSPSDIVAWYYYWGQGTQVTVSS

SEQ ID NO: 34673 - protein, 118 aa, Artificial Sequence
  Chemically Synthesized
QVQLQESGGGLVQAGGSLRLSCAASGTISTYKYMGWYRQAPGKERELVAGIAYGGSTNYADSVKGRFTISRDNAKNTVYLQMNSLKPEDTAVYYCAVYLLLLQRLSYWGQGTQVTVSS

SEQ ID NO: 34674 - protein, 118 aa, Artificial Sequence
  Chemically Synthesized
QVQLQESGGGLVQAGGSLRLSCAASGTIFVDGDMGWYRQAPGKEREFVAGIAYGSTTNYADSVKGRFTISRDNAKNTVYLQMNSLKPEDTAVYYCAVDSRSRAYFYYWGQGTQVTVSS

SEQ ID NO: 34675 - protein, 118 aa, Artificial Sequence
  Chemically Synthesized
QVQLQESGGGLVQAGGSLRLSCAASGYIFGDHIMGWYRQAPGKEREFVAAIGNGSNTYYADSVKGRFTISRDNAKNTVYLQMNSLKPEDTAVYYCAVDGWDYGYHRYWGQGTQVTVSS

SEQ ID NO: 34676 - protein, 114 aa, Artificial Sequence
  Chemically Synthesized
QVQLQESGGGLVQAGGSLRLSCAASGSIFPSPVMGWYRQAPGKERELVAAISYGTITYYADSVKGRFTISRDNAKNTVYLQMNSLKPEDTAVYYCAVDGYHPYWGQGTQVTVSS

SEQ ID NO: 34677 - protein, 118 aa, Artificial Sequence
  Chemically Synthesized
QVQLQESGGGLVQAGGSLRLSCAASGTIFKDWYMGWYRQAPGKERELVASIGTGSTTNYADSVKGRFTISRDNAKNTVYLQMNSLKPEDTAVYYCAVNIYTAVDHGYWGQGTQVTVSS

SEQ ID NO: 34678 - protein, 118 aa, Artificial Sequence
  Chemically Synthesized
QVQLQESGGGLVQAGGSLRLSCAASGSISRRGGMGWYRQAPGKEREFVASINAGGTTYYADSVKGRFTISRDNAKNTVYLQMNSLKPEDTAVYYCAAYDKAVQGYHYWGQGTQVTVSS

SEQ ID NO: 34679 - protein, 113 aa, Artificial Sequence
  Chemically Synthesized
QVQLQESGGGLVQAGGSLRLSCAASGSISYLGKMGWYRQAPGKERELVAAISDGAITNYADSVKGRFTISRDNAKNTVYLQMNSLKPEDTAVYYCAAGRYAYWGQGTQVTVSS

SEQ ID NO: 34680 - protein, 122 aa, Artificial Sequence
  Chemically Synthesized
QVQLQESGGGLVQAGGSLRLSCAASGSISLLNSMGWYRQAPGKERELVASIDIGANTNYADSVKGRFTISRDNAKNTVYLQMNSLKPEDTAVYYCAVKNVYDDTTYDVHRYWGQGTQVTVSS

SEQ ID NO: 34681 - protein, 122 aa, Artificial Sequence
  Chemically Synthesized
QVQLQESGGGLVQAGGSLRLSCAASGNISEFPAMGWYRQAPGKERELVAGIARGGTTYYADSVKGRFTISRDNAKNTVYLQMNSLKPEDTAVYYCAAHFTDRRQHYSGSMYWGQGTQVTVSS

SEQ ID NO: 34682 - protein, 126 aa, Artificial Sequence
  Chemically Synthesized
QVQLQESGGGLVQAGGSLRLSCAASGSIFARELMGWYRQAPGKERELVASIDHGGITNYADSVKGRFTISRDNAKNTVYLQMNSLKPEDTAVYYCAATHNFVQDYQWIVQDTFLYWGQGTQVTVSS

SEQ ID NO: 34683 - protein, 118 aa, Artificial Sequence
  Chemically Synthesized
QVQLQESGGGLVQAGGSLRLSCAASGNISLDGNMGWYRQAPGKEREFVAGITGGTSTNYADSVKGRFTISRDNAKNTVYLQMNSLKPEDTAVYYCAVFEDQQGYHGYWGQGTQVTVSS

SEQ ID NO: 34684 - protein, 126 aa, Artificial Sequence
  Chemically Synthesized
QVQLQESGGGLVQAGGSLRLSCAASGYIFESSTMGWYRQAPGKERELVAAIARGTSTYYADSVKGRFTISRDNAKNTVYLQMNSLKPEDTAVYYCAARYQWTPLWIDSTYELHYYWGQGTQVTVSS

SEQ ID NO: 34685 - protein, 122 aa, Artificial Sequence
  Chemically Synthesized
QVQLQESGGGLVQAGGSLRLSCAASGSIFDSAVMGWYRQAPGKEREFVASIDGGTTTNYADSVKGRFTISRDNAKNTVYLQMNSLKPEDTAVYYCAVAVGDYYLVVFGFVYWGQGTQVTVSS

SEQ ID NO: 34686 - protein, 118 aa, Artificial Sequence
  Chemically Synthesized
QVQLQESGGGLVQAGGSLRLSCAASGNISVYAWMGWYRQAPGKERELVATIAQGTNTNYADSVKGRFTISRDNAKNTVYLQMNSLKPEDTAVYYCAVDSGGDFSFWYWGQGTQVTVSS

SEQ ID NO: 34687 - protein, 118 aa, Artificial Sequence
  Chemically Synthesized
QVQLQESGGGLVQAGGSLRLSCAASGTISDWIAMGWYRQAPGKERELVASISDGGNTYYADSVKGRFTISRDNAKNTVYLQMNSLKPEDTAVYYCAVQSERDAVHQYWGQGTQVTVSS

SEQ ID NO: 34688 - protein, 118 aa, Artificial Sequence
  Chemically Synthesized
QVQLQESGGGLVQAGGSLRLSCAASGYISVLSWMGWYRQAPGKEREFVASIGRGGITYYADSVKGRFTISRDNAKNTVYLQMNSLKPEDTAVYYCAVTTWYYYNLQYWGQGTQVTVSS

SEQ ID NO: 34689 - protein, 122 aa, Artificial Sequence
  Chemically Synthesized
QVQLQESGGGLVQAGGSLRLSCAASGTIFPPDGMGWYRQAPGKERELVASIDYGASTNYADSVKGRFTISRDNAKNTVYLQMNSLKPEDTAVYYCAAYGPGNADDDYTLPYWGQGTQVTVSS

SEQ ID NO: 34690 - protein, 122 aa, Artificial Sequence
  Chemically Synthesized
QVQLQESGGGLVQAGGSLRLSCAASGYISGYRPMGWYRQAPGKERELVASIDHGGNTNYADSVKGRFTISRDNAKNTVYLQMNSLKPEDTAVYYCAVGRYLYYWSHGKHYYWGQGTQVTVSS

SEQ ID NO: 34691 - protein, 124 aa, Artificial Sequence
  Chemically Synthesized
QVQLQESGGGLVQAGGSLRLSCAASGYISIIDDMGWYRQAPGKEREFVAGIDRGSTTNYADSVKGRFTISRDNAKNTVYLQMNSLKPEDTAVYYCAVPRSRYDRYITRATYEYWGQGTQVTVSS

SEQ ID NO: 34692 - protein, 118 aa, Artificial Sequence
  Chemically Synthesized
QVQLQESGGGLVQAGGSLRLSCAASGTIFGFYRMGWYRQAPGKEREFVASIGSGGSTNYADSVKGRFTISRDNAKNTVYLQMNSLKPEDTAVYYCAVATQHNSALYYWGQGTQVTVSS

SEQ ID NO: 34693 - protein, 112 aa, Artificial Sequence
  Chemically Synthesized
QVQLQESGGGLVQAGGSLRLSCAASGYIFRNSDMGWYRQAPGKERELVAYYQYADSVKGRFTISRDNAKNTVYLQMNSLKPEDTAVYYCAVITADYGTYAYWGQGTQVTVSS

SEQ ID NO: 34694 - protein, 126 aa, Artificial Sequence
  Chemically Synthesized
QVQLQESGGGLVQAGGSLRLSCAASGTIFNVPGMGWYRQAPGKERELVATISGGAITYYADSVKGRFTISRDNAKNTVYLQMNSLKPEDTAVYYCAAGGGGPSVDRDGRYGNFYYWGQGTQVTVSS

SEQ ID NO: 34695 - protein, 122 aa, Artificial Sequence
  Chemically Synthesized
QVQLQESGGGLVQAGGSLRLSCAASGYISVAIVMGWYRQAPGKERELVASITAGATTYYADSVKGRFTISRDNAKNTVYLQMNSLKPEDTAVYYCAVIHVAYEQYFLGYFYWGQGTQVTVSS

SEQ ID NO: 34696 - protein, 118 aa, Artificial Sequence
  Chemically Synthesized
QVQLQESGGGLVQAGGSLRLSCAASGTIFAHSTMGWYRQAPGKEREFVAAIADGATTNYADSVKGRFTISRDNAKNTVYLQMNSLKPEDTAVYYCAAKRDTDYGLLYWGQGTQVTVSS

SEQ ID NO: 34697 - protein, 117 aa, Artificial Sequence
  Chemically Synthesized
QVQLQESGGGLVQAGGSLRLSCAASGTISYGYDMGWYRQAPGKEREFVATIGPGANTNYADSVKGRFTISRDNAKNTVYLQMNSLKPEDTAVYYCAVVRRIIDYSYWGQGTQVTVSS

SEQ ID NO: 34698 - protein, 118 aa, Artificial Sequence
  Chemically Synthesized
QVQLQESGGGLVQAGGSLRLSCAASGNISDHYVMGWYRQAPGKERELVASIDIGGNTNYADSVKGRFTISRDNAKNTVYLQMNSLKPEDTAVYYCAVSDPQPYTYWYWGQGTQVTVSS

SEQ ID NO: 34699 - protein, 117 aa, Artificial Sequence
  Chemically Synthesized
QVQLQESGGGLVQAGGSLRLSCAASGTIFLLLMGWYRQAPGKEREFVAGIAQGTITYYADSVKGRFTISRDNAKNTVYLQMNSLKPEDTAVYYCAADYAGFYSHYYWGQGTQVTVSS

SEQ ID NO: 34700 - protein, 122 aa, Artificial Sequence
  Chemically Synthesized
QVQLQESGGGLVQAGGSLRLSCAASGYIFRDSYMGWYRQAPGKERELVAAISTWWYYQYADSVKGRFTISRDNAKNTVYLQMNSLKPEDTAVYYCAVYGRYYDAYYYDHWYWGQGTQVTVSS

SEQ ID NO: 34701 - protein, 122 aa, Artificial Sequence
  Chemically Synthesized
QVQLQESGGGLVQAGGSLRLSCAASGSISQDDYMGWYRQAPGKERELVAAITYGGITYYADSVKGRFTISRDNAKNTVYLQMNSLKPEDTAVYYCAAYYHTYEYYYTYYVYWGQGTQVTVSS

SEQ ID NO: 34702 - protein, 118 aa, Artificial Sequence
  Chemically Synthesized
QVQLQESGGGLVQAGGSLRLSCAASGTIFGRTDMGWYRQAPGKERELVAAIGFGANTYYADSVKGRFTISRDNAKNTVYLQMNSLKPEDTAVYYCAVGYGDYSHHYYWGQGTQVTVSS

SEQ ID NO: 34703 - protein, 109 aa, Artificial Sequence
  Chemically Synthesized
QVQLQESGGGLVQAGGSLRLSCAASGYISDYYAMGWYRQAPGKERELVAGIAYGGITYYADSVKGRFTISRDNAKNTVYLQMNSLKPEDTAVYYCASYWGQGTQVTVSS

SEQ ID NO: 34704 - protein, 122 aa, Artificial Sequence
  Chemically Synthesized
QVQLQESGGGLVQAGGSLRLSCAASGTISDRGGMGWYRQAPGKEREFVAGIDTGTNTYYADSVKGRFTISRDNAKNTVYLQMNSLKPEDTAVYYCAALDSVAYVAITDYAYWGQGTQVTVSS

SEQ ID NO: 34705 - protein, 122 aa, Artificial Sequence
  Chemically Synthesized
QVQLQESGGGLVQAGGSLRLSCAASGSISRLGGMGWYRQAPGKEREFVAGIARGGNTYYADSVKGRFTISRDNAKNTVYLQMNSLKPEDTAVYYCAAIRFSDLSTYVGHRYWGQGTQVTVSS

SEQ ID NO: 34706 - protein, 118 aa, Artificial Sequence
  Chemically Synthesized
QVQLQESGGGLVQAGGSLRLSCAASGSISVPATMGWYRQAPGKEREFVAAIDRGASTYYADSVKGRFTISRDNAKNTVYLQMNSLKPEDTAVYYCAVVRWDDKSHVYWGQGTQVTVSS

SEQ ID NO: 34707 - protein, 118 aa, Artificial Sequence
  Chemically Synthesized
QVQLQESGGGLVQAGGSLRLSCAASGSISGRSQMGWYRQAPGKERELVAGIAGGTSTYYADSVKGRFTISRDNAKNTVYLQMNSLKPEDTAVYYCAAVPYNDLVYWYWGQGTQVTVSS

SEQ ID NO: 34708 - protein, 118 aa, Artificial Sequence
  Chemically Synthesized
QVQLQESGGGLVQAGGSLRLSCAASGYISDQNYMGWYRQAPGKERELVAAISYGSNTYYADSVKGRFTISRDNAKNTVYLQMNSLKPEDTAVYYCAAYTPYHVPHYYWGQGTQVTVSS

SEQ ID NO: 34709 - protein, 118 aa, Artificial Sequence
  Chemically Synthesized
QVQLQESGGGLVQAGGSLRLSCAASGTISAYPYMGWYRQAPGKERELVAAINLGSNTNYADSVKGRFTISRDNAKNTVYLQMNSLKPEDTAVYYCAAQHVYISPFRYWGQGTQVTVSS

SEQ ID NO: 34710 - protein, 118 aa, Artificial Sequence
  Chemically Synthesized
QVQLQESGGGLVQAGGSLRLSCAASGSIFADYYMGWYRQAPGKEREFVATIAAGSNTNYADSVKGRFTISRDNAKNTVYLQMNSLKPEDTAVYYCAFGGYGGWVFFYWGQGTQVTVSS

SEQ ID NO: 34711 - protein, 118 aa, Artificial Sequence
  Chemically Synthesized
QVQLQESGGGLVQAGGSLRLSCAASGTISYFQVMGWYRQAPGKERELVAGISVGSSTYYADSVKGRFTISRDNAKNTVYLQMNSLKPEDTAVYYCAANILYDGLHDYWGQGTQVTVSS

SEQ ID NO: 34712 - protein, 118 aa, Artificial Sequence
  Chemically Synthesized
QVQLQESGGGLVQAGGSLRLSCAASGNIFIPDYMGWYRQAPGKEREFVAAIDLGTTTYYADSVKGRFTISRDNAKNTVYLQMNSLKPEDTAVYYCAAYAVAWPPHLYWGQGTQVTVSS

SEQ ID NO: 34713 - protein, 117 aa, Artificial Sequence
  Chemically Synthesized
QVQLQESGGGLVQAGGSLRLSCAASGNISVWGMGWYRQAPGKERELVATIAQGGTTNYADSVKGRFTISRDNAKNTVYLQMNSLKPEDTAVYYCAVSQDDGIPLGYWGQGTQVTVSS

SEQ ID NO: 34714 - protein, 118 aa, Artificial Sequence
  Chemically Synthesized
QVQLQESGGGLVQAGGSLRLSCAASGTISQYSTMGWYRQAPGKERELVAGIAAGTITYYADSVKGRFTISRDNAKNTVYLQMNSLKPEDTAVYYCAAVYDDRNVLIYWGQGTQVTVSS

SEQ ID NO: 34715 - protein, 118 aa, Artificial Sequence
  Chemically Synthesized
QVQLQESGGGLVQAGGSLRLSCAASGTISDDVRMGWYRQAPGKERELVATISLGSNTYYADSVKGRFTISRDNAKNTVYLQMNSLKPEDTAVYYCAVRFAGGREYRYWGQGTQVTVSS

SEQ ID NO: 34716 - protein, 117 aa, Artificial Sequence
  Chemically Synthesized
QVQLQESGGGLVQAGGSLRLSCAASGYILTGTMGWYRQAPGKERELVAAIDWGANTYYADSVKGRFTISRDNAKNTVYLQMNSLKPEDTAVYYCAVDYYGVEDFNYWGQGTQVTVSS

SEQ ID NO: 34717 - protein, 117 aa, Artificial Sequence
  Chemically Synthesized
QVQLQESGGGLVQAGGSLRLSCAASGYIFPQNYMGWYRQAPGKERELVAGIDIGANTYYADSVKGRFTISRDNAKNTVYLQMNSLKPEDTAVYYCAAVYIGDSLIYWGQGTQVTVSS

SEQ ID NO: 34718 - protein, 118 aa, Artificial Sequence
  Chemically Synthesized
QVQLQESGGGLVQAGGSLRLSCAASGSISDQSLMGWYRQAPGKERELVAGIDDGATTYYADSVKGRFTISRDNAKNTVYLQMNSLKPEDTAVYYCAADDVGDFGHTYWGQGTQVTVSS

SEQ ID NO: 34719 - protein, 125 aa, Artificial Sequence
  Chemically Synthesized
QVQLQESGGGLVQAGGSLRLSCAASGTISHRDYMGWYRQAPGKERELVATIAGGSTTNYADSVKGRFTISRDNAKNTVYLQMNSLKPEDTAVYYCAVIGWERARLYSASVLVIYWGQGTQVTVSS

SEQ ID NO: 34720 - protein, 122 aa, Artificial Sequence
  Chemically Synthesized
QVQLQESGGGLVQAGGSLRLSCAASGSISAAGTMGWYRQAPGKERELVAAISDGGSTNYADSVKGRFTISRDNAKNTVYLQMNSLKPEDTAVYYCAATWYPGQYYDDVHYYWGQGTQVTVSS

SEQ ID NO: 34721 - protein, 116 aa, Artificial Sequence
  Chemically Synthesized
QVQLQESGGGLVQAGGSLRLSCAASGNISPSWPMGWYRQAPGKERELVAGIDEGSTTYADSVKGRFTISRDNAKNTVYLQMNSLKPEDTAVYYCAANYDYDNYMYWGQGTQVTVSS

SEQ ID NO: 34722 - protein, 118 aa, Artificial Sequence
  Chemically Synthesized
QVQLQESGGGLVQAGGSLRLSCAASGNIFYDGLMGWYRQAPGKEREFVAAITPGTSTNYADSVKGRFTISRDNAKNTVYLQMNSLKPEDTAVYYCAAFGQYQAQHVYWGQGTQVTVSS

SEQ ID NO: 34723 - protein, 117 aa, Artificial Sequence
  Chemically Synthesized
QVQLQESGGGLVQAGGSLRLSCAASGNIFRDGGMGWYRQAPGKERELVAGISSGANTYADSVKGRFTISRDNAKNTVYLQMNSLKPEDTAVYYCAVEHSDFGELYYWGQGTQVTVSS

SEQ ID NO: 34724 - protein, 117 aa, Artificial Sequence
  Chemically Synthesized
QVQLQESGGGLVQAGGSLRLSCAASGYISKDSSMGWYRQAPGKERELVAAISYGGITNYADSVKGRFTISRDNAKNTVYLQMNSLKPEDTAVYYCAAGLDWDSFFYWGQGTQVTVSS

SEQ ID NO: 34725 - protein, 126 aa, Artificial Sequence
  Chemically Synthesized
QVQLQESGGGLVQAGGSLRLSCAASGTISRTATMGWYRQAPGKERELVAAIDTGANTYYADSVKGRFTISRDNAKNTVYLQMNSLKPEDTAVYYCAALQGIHGDDANGYRNQFFYWGQGTQVTVSS

SEQ ID NO: 34726 - protein, 117 aa, Artificial Sequence
  Chemically Synthesized
QVQLQESGGGLVQAGGSLRLSCAASGNIFYLYDMGWYRQAPGKEREFVASIGQGGSTYYADSVKGRFTISRDNAKNTVYLQMNSLKPEDTAVYYCAVDYFLDSIIYWGQGTQVTVSS

SEQ ID NO: 34727 - protein, 123 aa, Artificial Sequence
  Chemically Synthesized
QVQLQESGGGLVQAGGSLRLSCAASGTISTAYYMGWYRQAPGKERELVATRCYYLYADSVKGRFTISRDNAKNTVYLQMNSLKPEDTAVYYCAVTQVDWEHFDGGIPAKYTYWGQGTQVTVSS

SEQ ID NO: 34728 - protein, 126 aa, Artificial Sequence
  Chemically Synthesized
QVQLQESGGGLVQAGGSLRLSCAASGTISYSTFMGWYRQAPGKEREFVAAIDGGANTNYADSVKGRFTISRDNAKNTVYLQMNSLKPEDTAVYYCAADLRNEQGLTLLYSSYLAYWGQGTQVTVSS

SEQ ID NO: 34729 - protein, 118 aa, Artificial Sequence
  Chemically Synthesized
QVQLQESGGGLVQAGGSLRLSCAASGSIFVHDYMGWYRQAPGKERELVAAISHGGSTYYADSVKGRFTISRDNAKNTVYLQMNSLKPEDTAVYYCAVWPSTYYTLDYWGQGTQVTVSS

SEQ ID NO: 34730 - protein, 122 aa, Artificial Sequence
  Chemically Synthesized
QVQLQESGGGLVQAGGSLRLSCAASGTIFQLAVMGWYRQAPGKERELVAAINLGATTYYADSVKGRFTISRDNAKNTVYLQMNSLKPEDTAVYYCAALRYSRLYPNRQHTYWGQGTQVTVSS

SEQ ID NO: 34731 - protein, 126 aa, Artificial Sequence
  Chemically Synthesized
QVQLQESGGGLVQAGGSLRLSCAASGYISRRGTMGWYRQAPGKEREFVAGIAVGGNTNYADSVKGRFTISRDNAKNTVYLQMNSLKPEDTAVYYCAAHSGSGSYALDGGAYPYFYWGQGTQVTVSS

SEQ ID NO: 34732 - protein, 122 aa, Artificial Sequence
  Chemically Synthesized
QVQLQESGGGLVQAGGSLRLSCAASGTISAYTGMGWYRQAPGKEREFVATISDGASTYYADSVKGRFTISRDNAKNTVYLQMNSLKPEDTAVYYCAAWNYDARVDWIYHGYWGQGTQVTVSS

SEQ ID NO: 34733 - protein, 118 aa, Artificial Sequence
  Chemically Synthesized
QVQLQESGGGLVQAGGSLRLSCAASGTISAHYYMGWYRQAPGKEREFVATIGNGASTNYADSVKGRFTISRDNAKNTVYLQMNSLKPEDTAVYYCAVERVQVGYYAYWGQGTQVTVSS

SEQ ID NO: 34734 - protein, 118 aa, Artificial Sequence
  Chemically Synthesized
QVQLQESGGGLVQAGGSLRLSCAASGTIFQLAVMGWYRQAPGKERELVAAINLGATTYYADSVKGRFTISRDNAKNTVYLQMNSLKPEDTAVYYCAAPRRYGPTHTYWGQGTQVTVSS

SEQ ID NO: 34735 - protein, 122 aa, Artificial Sequence
  Chemically Synthesized
QVQLQESGGGLVQAGGSLRLSCAASGTIFQLAVMGWYRQAPGKEREFVAGIAVGGNTNYADSVKGRFTISRDNAKNTVYLQMNSLKPEDTAVYYCAALRYSRLYPNRQHTYWGQGTQVTVSS

SEQ ID NO: 34736 - protein, 122 aa, Artificial Sequence
  Chemically Synthesized
QVQLQESGGGLVQAGGSLRLSCAASGYISGWASMGWYRQAPGKEREFVASIGDGTITYYADSVKGRFTISRDNAKNTVYLQMNSLKPEDTAVYYCAADRFLGERGLQYHQYWGQGTQVTVSS

SEQ ID NO: 34737 - protein, 121 aa, Artificial Sequence
  Chemically Synthesized
QVQLQESGGGLVQAGGSLRLSCAASGTISYLDSMGWYRQAPGKEREFVATIAPGANTYYADSVKGRFTISRDNAKNTVYLQMNSLKPEDTAVYYCAVTYWWQHLFYLHQYWGQGTQVTVSS

SEQ ID NO: 34738 - protein, 126 aa, Artificial Sequence
  Chemically Synthesized
QVQLQESGGGLVQAGGSLRLSCAASGTISQYRPMGWYRQAPGKERELVAAIGRGSSTYYADSVKGRFTISRDNAKNTVYLQMNSLKPEDTAVYYCAAHSGSGSYALDGGAYPYFYWGQGTQVTVSS

SEQ ID NO: 34739 - protein, 126 aa, Artificial Sequence
  Chemically Synthesized
QVQLQESGGGLVQAGGSLRLSCAASGTIFQLAVMGWYRQAPGKERELVAAINLGATTYYADSVKGRFTISRDNAKNTVYLQMNSLKPEDTAVYYCAAHSGSGSYALDGGADPYFYWGQGTQVTVSS

SEQ ID NO: 34740 - protein, 118 aa, Artificial Sequence
  Chemically Synthesized
QVQLQESGGGLVQAGGSLRLSCAASGTIFQLAVMGWYRQAPGKERELVAAINLGATTYYADSVKGRFTISRDNAKNTVYLQMNSLKPEDTAVYYCAAHQFRQARYAYWGQGTQVTVSS

SEQ ID NO: 34741 - protein, 118 aa, Artificial Sequence
  Chemically Synthesized
QVQLQESGGGLVQAGGSLRLSCAASGTIFQLAVMGWYRQAPGKERELVAAIGRGSSTYYADSVKGRFTISRDNAKNTVYLQMNSLKPEDTAVYYCAAPRRYGPTHTYWGQGTQVTVSS

SEQ ID NO: 34742 - protein, 122 aa, Artificial Sequence
  Chemically Synthesized
QVQLQESGGGLVQAGGSLRLSCAASGSIFPPARMGWYRQAPGKEREFVAGITYGGNTNYADSVKGRFTISRDNAKNTVYLQMNSLKPEDTAVYYCAAYGDLWPYLIRPFYYWGQGTQVTVSS

SEQ ID NO: 34743 - protein, 118 aa, Artificial Sequence
  Chemically Synthesized
QVQLQESGGGLVQAGGSLRLSCAASGNIFPPDYMGWYRQAPGKERELVATIAHGGSTNYADSVKGRFTISRDNAKNTVYLQMNSLKPEDTAVYYCAVYIAGNSLHLYWGQGTQVTVSS

SEQ ID NO: 34744 - protein, 120 aa, Artificial Sequence
  Chemically Synthesized
QVQLQESGGGLVQAGGSLRLSCAASGYISARYLMGWYRQAPGKEREFVATIDGTNTNYADSVKGRFTISRDNAKNTVYLQMNSLKPEDTAVYYCAANTNTYTYETTSMYWGQGTQVTVSS

SEQ ID NO: 34745 - protein, 122 aa, Artificial Sequence
  Chemically Synthesized
QVQLQESGGGLVQAGGSLRLSCAASGYISGTYTMGWYRQAPGKERELVAAITGGTSTYYADSVKGRFTISRDNAKNTVYLQMNSLKPEDTAVYYCAVTVPWGDPSRDGHTYWGQGTQVTVSS

SEQ ID NO: 34746 - protein, 118 aa, Artificial Sequence
  Chemically Synthesized
QVQLQESGGGLVQAGGSLRLSCAASGYISDQAFMGWYRQAPGKEREFVASINWGGITYYADSVKGRFTISRDNAKNTVYLQMNSLKPEDTAVYYCAVDDWAYDDLHYWGQGTQVTVSS

SEQ ID NO: 34747 - protein, 125 aa, Artificial Sequence
  Chemically Synthesized
QVQLQESGGGLVQAGGSLRLSCAASGSIFQPYIMGWYRQAPGKERELVAGIDYGSITYYADSVKGRFTISRDNAKNTVYLQMNSLKPEDTAVYYCAAVITDYPNNVVKSPDHRYWGQGTQVTVSS

SEQ ID NO: 34748 - protein, 114 aa, Artificial Sequence
  Chemically Synthesized
QVQLQESGGGLVQAGGSLRLSCAASGTIFYYATMGWYRQAPGKERELVAAIAYGSTTNYADSVKGRFTISRDNAKNTVYLQMNSLKPEDTAVYYCAVRGQFMYWGQGTQVTVSS

SEQ ID NO: 34749 - protein, 118 aa, Artificial Sequence
  Chemically Synthesized
QVQLQESGGGLVQAGGSLRLSCAASGSISHSYVMGWYRQAPGKEREFVAGIARGTTTYYADSVKGRFTISRDNAKNTVYLQMNSLKPEDTAVYYCAALYRVDGNHLYWGQGTQVTVSS

SEQ ID NO: 34750 - protein, 122 aa, Artificial Sequence
  Chemically Synthesized
QVQLQESGGGLVQAGGSLRLSCAASGNIFDYRVMGWYRQAPGKERELVAGIGRGGTTYYADSVKGRFTISRDNAKNTVYLQMNSLKPEDTAVYYCAAAGDGSADDNYVHAYWGQGTQVTVSS

SEQ ID NO: 34751 - protein, 118 aa, Artificial Sequence
  Chemically Synthesized
QVQLQESGGGLVQAGGSLRLSCAASGNISYSLSMGWYRQAPGKERELVAAIASGGTTYYADSVKGRFTISRDNAKNTVYLQMNSLKPEDTAVYYCAALRPGDQRHLYWGQGTQVTVSS

SEQ ID NO: 34752 - protein, 125 aa, Artificial Sequence
  Chemically Synthesized
QVQLQESGGGLVQAGGSLRLSCAASGNISYGYAMGWYRQAPGKERELVAGISRGSTTYYADSVKGRFTISRDNAKNTVYLQMNSLKPEDTAVYYCAAAAVRNTDGAGASRPLGYWGQGTQVTVSS

SEQ ID NO: 34753 - protein, 118 aa, Artificial Sequence
  Chemically Synthesized
QVQLQESGGGLVQAGGSLRLSCAASGTIFSPDGMGWYRQAPGKERELVATITLGANTNYADSVKGRFTISRDNAKNTVYLQMNSLKPEDTAVYYCAVISDFGTYHVYWGQGTQVTVSS

SEQ ID NO: 34754 - protein, 118 aa, Artificial Sequence
  Chemically Synthesized
QVQLQESGGGLVQAGGSLRLSCAASGNISTADAMGWYRQAPGKERELVAGITRGASTYYADSVKGRFTISRDNAKNTVYLQMNSLKPEDTAVYYCAAPVAGYRGFGYWGQGTQVTVSS

SEQ ID NO: 34755 - protein, 118 aa, Artificial Sequence
  Chemically Synthesized
QVQLQESGGGLVQAGGSLRLSCAASGTIFALGYMGWYRQAPGKEREFVATISDGSSTNYADSVKGRFTISRDNAKNTVYLQMNSLKPEDTAVYYCAVVPYRAWVHPYWGQGTQVTVSS

SEQ ID NO: 34756 - protein, 117 aa, Artificial Sequence
  Chemically Synthesized
QVQLQESGGGLVQAGGSLRLSCAASGNISGYIMGWYRQAPGKEREFVAGINRGTTTYYADSVKGRFTISRDNAKNTVYLQMNSLKPEDTAVYYCAAISGTRAYHGYWGQGTQVTVSS

SEQ ID NO: 34757 - protein, 117 aa, Artificial Sequence
  Chemically Synthesized
QVQLQESGGGLVQAGGSLRLSCAASGTFLTSWMGWYRQAPGKERELVAGINHGTNTNYADSVKGRFTISRDNAKNTVYLQMNSLKPEDTAVYYCAVPSGNDLGHGYWGQGTQVTVSS

SEQ ID NO: 34758 - protein, 120 aa, Artificial Sequence
  Chemically Synthesized
QVQLQESGGGLVQAGGSLRLSCAASGTISPGFTMGWYRQAPGKERELVAGIARGSTTYYADSVKGRFTISRDNAKNTVYLQMNSLKPEDTAVYYCAAIFVANAAEHYAYWGQGTQVTVSS

SEQ ID NO: 34759 - protein, 117 aa, Artificial Sequence
  Chemically Synthesized
QVQLQESGGGLVQAGGSLRLSCAASGSIFPPDMGWYRQAPGKERELVASIDNGGNTNYADSVKGRFTISRDNAKNTVYLQMNSLKPEDTAVYYCAATYNYELYHLYWGQGTQVTVSS

SEQ ID NO: 34760 - protein, 118 aa, Artificial Sequence
  Chemically Synthesized
QVQLQESGGGLVQAGGSLRLSCAASGNISPYWVMGWYRQAPGKERELVAGINSGSNTYYADSVKGRFTISRDNAKNTVYLQMNSLKPEDTAVYYCAVLKRQFGKYAYWGQGTQVTVSS

SEQ ID NO: 34761 - protein, 117 aa, Artificial Sequence
  Chemically Synthesized
QVQLQESGGGLVQAGGSLRLSCAASGSIFDAEVMGWYRQAPGKERELVAVLVTVVLPYADSVKGRFTISRDNAKNTVYLQMNSLKPEDTAVYYCAVDQITREAHDYWGQGTQVTVSS

SEQ ID NO: 34762 - protein, 118 aa, Artificial Sequence
  Chemically Synthesized
QVQLQESGGGLVQAGGSLRLSCAASGYISPDDGMGWYRQAPGKERELVATIGRGGSTNYADSVKGRFTISRDNAKNTVYLQMNSLKPEDTAVYYCAAAERDLYYYYYWGQGTQVTVSS

SEQ ID NO: 34763 - protein, 122 aa, Artificial Sequence
  Chemically Synthesized
QVQLQESGGGLVQAGGSLRLSCAASGTIFRDSAMGWYRQAPGKERELVAGIGRGATTYYADSVKGRFTISRDNAKNTVYLQMNSLKPEDTAVYYCAVVRRPEHKYYDVLSYWGQGTQVTVSS

SEQ ID NO: 34764 - protein, 119 aa, Artificial Sequence
  Chemically Synthesized
QVQLQESGGGLVQAGGSLRLSCAASGSISGGPYMGWYRQAPGKERELVAGIGTGATTYYADSVKGRFTISRDNAKNTVYLQMNSLKPEDTAVYYCAVVVKTTMTRFIYWGQGTQVTVSS

SEQ ID NO: 34765 - protein, 118 aa, Artificial Sequence
  Chemically Synthesized
QVQLQESGGGLVQAGGSLRLSCAASGTISLWLPMGWYRQAPGKERELVAGIARGSTTYYADSVKGRFTISRDNAKNTVYLQMNSLKPEDTAVYYCAAVNTDQGDLVYWGQGTQVTVSS

SEQ ID NO: 34766 - protein, 118 aa, Artificial Sequence
  Chemically Synthesized
QVQLQESGGGLVQAGGSLRLSCAASGSISSWHYMGWYRQAPGKEREFVAAITGGTSTNYADSVKGRFTISRDNAKNTVYLQMNSLKPEDTAVYYCAAADRYLFPLRYWGQGTQVTVSS

SEQ ID NO: 34767 - protein, 118 aa, Artificial Sequence
  Chemically Synthesized
QVQLQESGGGLVQAGGSLRLSCAASGTIFPHPKMGWYRQAPGKERELVAGITQGSITYYADSVKGRFTISRDNAKNTVYLQMNSLKPEDTAVYYCAVLTVPLFYYQYWGQGTQVTVSS

SEQ ID NO: 34768 - protein, 118 aa, Artificial Sequence
  Chemically Synthesized
QVQLQESGGGLVQAGGSLRLSCAASGTISAAESMGWYRQAPGKEREFVATINGGANTNYADSVKGRFTISRDNAKNTVYLQMNSLKPEDTAVYYCAASPYAIVAHAYWGQGTQVTVSS

SEQ ID NO: 34769 - protein, 118 aa, Artificial Sequence
  Chemically Synthesized
QVQLQESGGGLVQAGGSLRLSCAASGTIFPDLIMGWYRQAPGKERELVAGISRGASTYYADSVKGRFTISRDNAKNTVYLQMNSLKPEDTAVYYCAAVVLAPGPFSYWGQGTQVTVSS

SEQ ID NO: 34770 - protein, 118 aa, Artificial Sequence
  Chemically Synthesized
QVQLQESGGGLVQAGGSLRLSCAASGNISGGYAMGWYRQAPGKERELVAGITRGGSTYYADSVKGRFTISRDNAKNTVYLQMNSLKPEDTAVYYCAVVTIDDTSHAYWGQGTQVTVSS

SEQ ID NO: 34771 - protein, 122 aa, Artificial Sequence
  Chemically Synthesized
QVQLQESGGGLVQAGGSLRLSCAASGTISQYVTMGWYRQAPGKERELVAAITAGGITYYADSVKGRFTISRDNAKNTVYLQMNSLKPEDTAVYYCAVVDKGYPYHYDSHVYWGQGTQVTVSS

SEQ ID NO: 34772 - protein, 118 aa, Artificial Sequence
  Chemically Synthesized
QVQLQESGGGLVQAGGSLRLSCAASGTISAKGPMGWYRQAPGKEREFVAGIGSGSITYYADSVKGRFTISRDNAKNTVYLQMNSLKPEDTAVYYCAAVYYTKPSLGYWGQGTQVTVSS

SEQ ID NO: 34773 - protein, 118 aa, Artificial Sequence
  Chemically Synthesized
QVQLQESGGGLVQAGGSLRLSCAASGSIFPRHYMGWYRQAPGKEREFVATINGGGNTYYADSVKGRFTISRDNAKNTVYLQMNSLKPEDTAVYYCAVDYPPYARFFYWGQGTQVTVSS

SEQ ID NO: 34774 - protein, 122 aa, Artificial Sequence
  Chemically Synthesized
QVQLQESGGGLVQAGGSLRLSCAASGYISSSGPMGWYRQAPGKERELVAGIARGGTTYYADSVKGRFTISRDNAKNTVYLQMNSLKPEDTAVYYCAVVRSDNVSRNWLHYYWGQGTQVTVSS

SEQ ID NO: 34775 - protein, 118 aa, Artificial Sequence
  Chemically Synthesized
QVQLQESGGGLVQAGGSLRLSCAASGTIFILDDMGWYRQAPGKERELVAAIDGGGTTNYADSVKGRFTISRDNAKNTVYLQMNSLKPEDTAVYYCAAARRVRRVLGYWGQGTQVTVSS

SEQ ID NO: 34776 - protein, 126 aa, Artificial Sequence
  Chemically Synthesized
QVQLQESGGGLVQAGGSLRLSCAASGTISFKGRMGWYRQAPGKERELVATIALGSSTNYADSVKGRFTISRDNAKNTVYLQMNSLKPEDTAVYYCAAGPYRDDWQWWGPYWGHWYWGQGTQVTVSS

SEQ ID NO: 34777 - protein, 122 aa, Artificial Sequence
  Chemically Synthesized
QVQLQESGGGLVQAGGSLRLSCAASGNISNSINMGWYRQAPGKEREFVAAITPGASTYYADSVKGRFTISRDNAKNTVYLQMNSLKPEDTAVYYCAARSDRWYYFSTAHSYWGQGTQVTVSS

SEQ ID NO: 34778 - protein, 118 aa, Artificial Sequence
  Chemically Synthesized
QVQLQESGGGLVQAGGSLRLSCAASGYIFPTGAMGWYRQAPGKERELVAGIGRGSNTYYADSVKGRFTISRDNAKNTVYLQMNSLKPEDTAVYYCAVIVYYAVGFAYWGQGTQVTVSS

SEQ ID NO: 34779 - protein, 118 aa, Artificial Sequence
  Chemically Synthesized
QVQLQESGGGLVQAGGSLRLSCAASGTIFPWRVMGWYRQAPGKEREFVAGITPGATTYYADSVKGRFTISRDNAKNTVYLQMNSLKPEDTAVYYCAAAWVDDRRHTYWGQGTQVTVSS

SEQ ID NO: 34780 - protein, 122 aa, Artificial Sequence
  Chemically Synthesized
QVQLQESGGGLVQAGGSLRLSCAASGYISDSDVMGWYRQAPGKERELVASIGWGGNTNYADSVKGRFTISRDNAKNTVYLQMNSLKPEDTAVYYCAVDPQYIGPWRYYYGYWGQGTQVTVSS

SEQ ID NO: 34781 - protein, 113 aa, Artificial Sequence
  Chemically Synthesized
QVQLQESGGGLVQAGGSLRLSCAASGTISAYDYMGWYRQAPGKERELYPYADSVKGRFTISRDNAKNTVYLQMNSLKPEDTAVYYCAAGYSTPDESAQAHLYWGQGTQVTVSS

SEQ ID NO: 34782 - protein, 118 aa, Artificial Sequence
  Chemically Synthesized
QVQLQESGGGLVQAGGSLRLSCAASGNIFYYATMGWYRQAPGKERELVAAINRGGSTYYADSVKGRFTISRDNAKNTVYLQMNSLKPEDTAVYYCAVGHALSLGLWYWGQGTQVTVSS

SEQ ID NO: 34783 - protein, 118 aa, Artificial Sequence
  Chemically Synthesized
QVQLQESGGGLVQAGGSLRLSCAASGTIFSPIPMGWYRQAPGKERELVAGIATGATTYYADSVKGRFTISRDNAKNTVYLQMNSLKPEDTAVYYCAAVARYPEGHGYWGQGTQVTVSS

SEQ ID NO: 34784 - protein, 118 aa, Artificial Sequence
  Chemically Synthesized
QVQLQESGGGLVQAGGSLRLSCAASGTISLWPFMGWYRQAPGKERELVAAITQGSITNYADSVKGRFTISRDNAKNTVYLQMNSLKPEDTAVYYCAVRNYYAYPLDYWGQGTQVTVSS

SEQ ID NO: 34785 - protein, 118 aa, Artificial Sequence
  Chemically Synthesized
QVQLQESGGGLVQAGGSLRLSCAASGNISWRPQMGWYRQAPGKEREFVATITNGGSTYYADSVKGRFTISRDNAKNTVYLQMNSLKPEDTAVYYCAVGYIIYLGLVYWGQGTQVTVSS

SEQ ID NO: 34786 - protein, 118 aa, Artificial Sequence
  Chemically Synthesized
QVQLQESGGGLVQAGGSLRLSCAASGTISSRYAMGWYRQAPGKERELVAAITRGGNTYYADSVKGRFTISRDNAKNTVYLQMNSLKPEDTAVYYCAAASKDAYSHGYWGQGTQVTVSS

SEQ ID NO: 34787 - protein, 118 aa, Artificial Sequence
  Chemically Synthesized
QVQLQESGGGLVQAGGSLRLSCAASGNIFATAYMGWYRQAPGKEREFVAGIDAGGSTYYADSVKGRFTISRDNAKNTVYLQMNSLKPEDTAVYYCAVTGIADGLYTYWGQGTQVTVSS

SEQ ID NO: 34788 - protein, 122 aa, Artificial Sequence
  Chemically Synthesized
QVQLQESGGGLVQAGGSLRLSCAASGTIFTDAIMGWYRQAPGKEREFVAAIGRGSTTYYADSVKGRFTISRDNAKNTVYLQMNSLKPEDTAVYYCAAVQRGRFAATRDHLYWGQGTQVTVSS

SEQ ID NO: 34789 - protein, 111 aa, Artificial Sequence
  Chemically Synthesized
QVQLQESGGGLVQAGGSLRLSCAASGSISSRGYMGWYRQAPGKERELVAGIDAGTITNYADSVKGRFTISRDNAKNTVYLQMNSLKPEDTAVYYCAAYRYWGQGTQVTVSS

SEQ ID NO: 34790 - protein, 122 aa, Artificial Sequence
  Chemically Synthesized
QVQLQESGGGLVQAGGSLRLSCAASGYIFPYYGMGWYRQAPGKERELVATIGRGSNTNYADSVKGRFTISRDNAKNTVYLQMNSLKPEDTAVYYCAALEAGLGWYVWNLAYWGQGTQVTVSS

SEQ ID NO: 34791 - protein, 117 aa, Artificial Sequence
  Chemically Synthesized
QVQLQESGGGLVQAGGSLRLSCAASGTISYDFMGWYRQAPGKEREFVAAITEGTNTNYADSVKGRFTISRDNAKNTVYLQMNSLKPEDTAVYYCAVQGTQRLKLFYWGQGTQVTVSS

SEQ ID NO: 34792 - protein, 122 aa, Artificial Sequence
  Chemically Synthesized
QVQLQESGGGLVQAGGSLRLSCAASGSISGRITMGWYRQAPGKERELVAGIARGGTTYYADSVKGRFTISRDNAKNTVYLQMNSLKPEDTAVYYCAVIFYRPTSNDSPFSYWGQGTQVTVSS

SEQ ID NO: 34793 - protein, 124 aa, Artificial Sequence
  Chemically Synthesized
QVQLQESGGGLVQAGGSLRLSCAASGTISDVVYMGWYRQAPGKERELVAALKVVIPYADSVKGRFTISRDNAKNTVYLQMNSLKPEDTAVYYCAVSYGRVDFYSVYGARPLYYWGQGTQVTVSS

SEQ ID NO: 34794 - protein, 118 aa, Artificial Sequence
  Chemically Synthesized
QVQLQESGGGLVQAGGSLRLSCAASGNIFHLRVMGWYRQAPGKEREFVAGINVGGITYYADSVKGRFTISRDNAKNTVYLQMNSLKPEDTAVYYCAAIYGTDTYHGYWGQGTQVTVSS

SEQ ID NO: 34795 - protein, 118 aa, Artificial Sequence
  Chemically Synthesized
QVQLQESGGGLVQAGGSLRLSCAASGTISQVDDMGWYRQAPGKERELVAAIDGGATTYYADSVKGRFTISRDNAKNTVYLQMNSLKPEDTAVYYCAAQYSQDVGFYYWGQGTQVTVSS

SEQ ID NO: 34796 - protein, 115 aa, Artificial Sequence
  Chemically Synthesized
QVQLQESGGGLVQAGGSLRLSCAASGIMGWYRQAPGKEREFVAGIDIGASTNYADSVKGRFTISRDNAKNTVYLQMNSLKPEDTAVYYCAVNVGTAADSKLTFYWGQGTQVTVSS

SEQ ID NO: 34797 - protein, 116 aa, Artificial Sequence
  Chemically Synthesized
QVQLQESGGGLVQAGGSLRLSCAASGYISSDIYMGWYRQAPGKEREFVAGIDQGGSTNYADSVKGRFTISRDNAKNTVYLQMNSLKPEDTAVYYCAVFYRVYLHYWGQGTQVTVSS

SEQ ID NO: 34798 - protein, 122 aa, Artificial Sequence
  Chemically Synthesized
QVQLQESGGGLVQAGGSLRLSCAASGSIFALDYMGWYRQAPGKEREFVAAIGNGSNTNYADSVKGRFTISRDNAKNTVYLQMNSLKPEDTAVYYCAVQGWAPYSNRNAHYYWGQGTQVTVSS

SEQ ID NO: 34799 - protein, 112 aa, Artificial Sequence
  Chemically Synthesized
QVQLQESGGGLVQAGGSLRLSCAASGTIFLSDLMGWYRQAPGKERELVASIAYGSTTYYADSVKGRFTISRDNAKNTVYLQMNSLKPEDTAVYYCASTLHYWGQGTQVTVSS

SEQ ID NO: 34800 - protein, 117 aa, Artificial Sequence
  Chemically Synthesized
QVQLQESGGGLVQAGGSLRLSCAASGSISTFDGMGWYRQAPGKEREFVAGIDGGSTTYYADSVKGRFTISRDNAKNTVYLQMNSLKPEDTAVYYCAVHSTVVKTFYWGQGTQVTVSS

SEQ ID NO: 34801 - protein, 126 aa, Artificial Sequence
  Chemically Synthesized
QVQLQESGGGLVQAGGSLRLSCAASGSISKQGEMGWYRQAPGKEREFVATIDVGSSTNYADSVKGRFTISRDNAKNTVYLQMNSLKPEDTAVYYCAVPYVYRPYVYTTAYFAYPYWGQGTQVTVSS

SEQ ID NO: 34802 - protein, 117 aa, Artificial Sequence
  Chemically Synthesized
QVQLQESGGGLVQAGGSLRLSCAASGNISYATMGWYRQAPGKEREFVASISYGTITNYADSVKGRFTISRDNAKNTVYLQMNSLKPEDTAVYYCAVLYDYPQGLGYWGQGTQVTVSS

SEQ ID NO: 34803 - protein, 112 aa, Artificial Sequence
  Chemically Synthesized
QVQLQESGGGLVQAGGSLRLSCAASGTISSLPHMGWYRQAPGKERELVAGITRGASTYYADSVKGRFTISRDNAKNTVYLQMNSLKPEDTAVYYCAARHWYWGQGTQVTVSS

SEQ ID NO: 34804 - protein, 116 aa, Artificial Sequence
  Chemically Synthesized
QVQLQESGGGLVQAGGSLRLSCAASGSMGWYRQAPGKEREFVASIATGGTTNYADSVKGRFTISRDNAKNTVYLQMNSLKPEDTAVYYCAALNTYHQPIDYAFAYWGQGTQVTVSS

SEQ ID NO: 34805 - protein, 118 aa, Artificial Sequence
  Chemically Synthesized
QVQLQESGGGLVQAGGSLRLSCAASGYIFYIYAMGWYRQAPGKERELVAAIDHGASTNYADSVKGRFTISRDNAKNTVYLQMNSLKPEDTAVYYCAVFYYDDANHYYWGQGTQVTVSS

SEQ ID NO: 34806 - protein, 126 aa, Artificial Sequence
  Chemically Synthesized
QVQLQESGGGLVQAGGSLRLSCAASGTISTYSYMGWYRQAPGKEREFVATINRGTSTNYADSVKGRFTISRDNAKNTVYLQMNSLKPEDTAVYYCAAWGITVDRRSAWVRYRHLYWGQGTQVTVSS

SEQ ID NO: 34807 - protein, 118 aa, Artificial Sequence
  Chemically Synthesized
QVQLQESGGGLVQAGGSLRLSCAASGNISQLRGMGWYRQAPGKERELVASISSGSNTYYADSVKGRFTISRDNAKNTVYLQMNSLKPEDTAVYYCAVYDWDSTYYLYWGQGTQVTVSS

SEQ ID NO: 34808 - protein, 117 aa, Artificial Sequence
  Chemically Synthesized
QVQLQESGGGLVQAGGSLRLSCAASGSISEWSYMGWYRQAPGKEREFVASITYGATTYYADSVKGRFTISRDNAKNTVYLQMNSLKPEDTAVYYCAADDLVFNKIYWGQGTQVTVSS

SEQ ID NO: 34809 - protein, 118 aa, Artificial Sequence
  Chemically Synthesized
QVQLQESGGGLVQAGGSLRLSCAASGSIFRYGEMGWYRQAPGKEREFVATIDYGGSTNYADSVKGRFTISRDNAKNTVYLQMNSLKPEDTAVYYCAVDGSKGTYFPYWGQGTQVTVSS

SEQ ID NO: 34810 - protein, 121 aa, Artificial Sequence
  Chemically Synthesized
QVQLQESGGGLVQAGGSLRLSCAASGTISSPAFMGWYRQAPGKEREFVAGIDDGGTTYYADSVKGRFTISRDNAKNTVYLQMNSLKPEDTAVYYCAVPDYYTYARLYHSYWGQGTQVTVSS

SEQ ID NO: 34811 - protein, 122 aa, Artificial Sequence
  Chemically Synthesized
QVQLQESGGGLVQAGGSLRLSCAASGNISDRTYMGWYRQAPGKERELVASIGSGGNTNYADSVKGRFTISRDNAKNTVYLQMNSLKPEDTAVYYCAVRYRGGEDFAGNYPYWGQGTQVTVSS

SEQ ID NO: 34812 - protein, 118 aa, Artificial Sequence
  Chemically Synthesized
QVQLQESGGGLVQAGGSLRLSCAASGNISVYHYMGWYRQAPGKERELVAAIGNGGSTNYADSVKGRFTISRDNAKNTVYLQMNSLKPEDTAVYYCAAYAYFAGSYYYWGQGTQVTVSS

SEQ ID NO: 34813 - protein, 119 aa, Artificial Sequence
  Chemically Synthesized
QVQLQESGGGLVQAGGSLRLSCAASGTIFTDAYMGWYRQAPGKERELLPLLILVLIPYADSVKGRFTISRDNAKNTVYLQMNSLKPEDTAVYYCAVYDAHRQASYYPYWGQGTQVTVSS

SEQ ID NO: 34814 - protein, 118 aa, Artificial Sequence
  Chemically Synthesized
QVQLQESGGGLVQAGGSLRLSCAASGTIFGLFYMGWYRQAPGKEREFVASISYGGNTYYADSVKGRFTISRDNAKNTVYLQMNSLKPEDTAVYYCAATSYYYVLLPYWGQGTQVTVSS

SEQ ID NO: 34815 - protein, 126 aa, Artificial Sequence
  Chemically Synthesized
QVQLQESGGGLVQAGGSLRLSCAASGNIFNYPKMGWYRQAPGKEREFVASIDVGGTTYYADSVKGRFTISRDNAKNTVYLQMNSLKPEDTAVYYCAANSNLKDTVYRYEHYRLAYWGQGTQVTVSS

SEQ ID NO: 34816 - protein, 109 aa, Artificial Sequence
  Chemically Synthesized
QVQLQESGGGLVQAGGSLRLSCAASGTISWRTDMGWYRQAPGKERELVAGIGSVVVPYADSVKGRFTISRDNAKNTVYLQMNSLKPEDTAVYYCAAYYWGQGTQVTVSS

SEQ ID NO: 34817 - protein, 118 aa, Artificial Sequence
  Chemically Synthesized
QVQLQESGGGLVQAGGSLRLSCAASGTISDGPYMGWYRQAPGKEREFVASISPGGTTNYADSVKGRFTISRDNAKNTVYLQMNSLKPEDTAVYYCAVYYTVGAEYVYWGQGTQVTVSS

SEQ ID NO: 34818 - protein, 121 aa, Artificial Sequence
  Chemically Synthesized
QVQLQESGGGLVQAGGSLRLSCAASGNIFSYYMGWYRQAPGKEREFVATIDHGGNTYYADSVKGRFTISRDNAKNTVYLQMNSLKPEDTAVYYCAVDGLYSWDAEHGHFYWGQGTQVTVSS

SEQ ID NO: 34819 - protein, 118 aa, Artificial Sequence
  Chemically Synthesized
QVQLQESGGGLVQAGGSLRLSCAASGTIFVIYDMGWYRQAPGKERELVAAIGYGSITYYADSVKGRFTISRDNAKNTVYLQMNSLKPEDTAVYYCAVIYNESSYFYYWGQGTQVTVSS

SEQ ID NO: 34820 - protein, 117 aa, Artificial Sequence
  Chemically Synthesized
QVQLQESGGGLVQAGGSLRLSCAASGYISQPTMGWYRQAPGKERELVAAIDEGTTTYYADSVKGRFTISRDNAKNTVYLQMNSLKPEDTAVYYCAVDIDSNFGHDYWGQGTQVTVSS

SEQ ID NO: 34821 - protein, 118 aa, Artificial Sequence
  Chemically Synthesized
QVQLQESGGGLVQAGGSLRLSCAASGTIFNLQYMGWYRQAPGKEREFVAGISYGTSTNYADSVKGRFTISRDNAKNTVYLQMNSLKPEDTAVYYCAVGTDSYVRFRYWGQGTQVTVSS

SEQ ID NO: 34822 - protein, 122 aa, Artificial Sequence
  Chemically Synthesized
QVQLQESGGGLVQAGGSLRLSCAASGSIFYQVYMGWYRQAPGKEREFVAGITTGTITYYADSVKGRFTISRDNAKNTVYLQMNSLKPEDTAVYYCAAAAREDRRAYVSFTYWGQGTQVTVSS

SEQ ID NO: 34823 - protein, 118 aa, Artificial Sequence
  Chemically Synthesized
QVQLQESGGGLVQAGGSLRLSCAASGSIFVTYGMGWYRQAPGKERELVASITGGTTTYYADSVKGRFTISRDNAKNTVYLQMNSLKPEDTAVYYCAVGDHGYEAFSYWGQGTQVTVSS

SEQ ID NO: 34824 - protein, 113 aa, Artificial Sequence
  Chemically Synthesized
QVQLQESGGGLVQAGGSLRLSCAASGTISGYTRMGWYRQAPGKERELVAAIANGTITNYADSVKGRFTISRDNAKNTVYLQMNSLKPEDTAVYYCAVDNYSYWGQGTQVTVSS

SEQ ID NO: 34825 - protein, 122 aa, Artificial Sequence
  Chemically Synthesized
QVQLQESGGGLVQAGGSLRLSCAASGTISYAGRMGWYRQAPGKERELVAAINGGSNTNYADSVKGRFTISRDNAKNTVYLQMNSLKPEDTAVYYCAVRKDARYVRSRNFVYWGQGTQVTVSS

SEQ ID NO: 34826 - protein, 122 aa, Artificial Sequence
  Chemically Synthesized
QVQLQESGGGLVQAGGSLRLSCAASGNISDIAYMGWYRQAPGKEREFVATISVGSTTYYADSVKGRFTISRDNAKNTVYLQMNSLKPEDTAVYYCAVSADWVYHNIRRHLYWGQGTQVTVSS

SEQ ID NO: 34827 - protein, 126 aa, Artificial Sequence
  Chemically Synthesized
QVQLQESGGGLVQAGGSLRLSCAASGYISRYEHMGWYRQAPGKERELVAGIGIGTNTYYADSVKGRFTISRDNAKNTVYLQMNSLKPEDTAVYYCAAVRRRYGYTLDVTRGRYGYWGQGTQVTVSS

SEQ ID NO: 34828 - protein, 118 aa, Artificial Sequence
  Chemically Synthesized
QVQLQESGGGLVQAGGSLRLSCAASGNIFAGKHMGWYRQAPGKERELVASIGYGAITYYADSVKGRFTISRDNAKNTVYLQMNSLKPEDTAVYYCAVQFYLPQGHAYWGQGTQVTVSS

SEQ ID NO: 34829 - protein, 118 aa, Artificial Sequence
  Chemically Synthesized
QVQLQESGGGLVQAGGSLRLSCAASGYISKLGGMGWYRQAPGKEREFVATIGGGATTNYADSVKGRFTISRDNAKNTVYLQMNSLKPEDTAVYYCAAYRVGQDHYAYWGQGTQVTVSS

SEQ ID NO: 34830 - protein, 118 aa, Artificial Sequence
  Chemically Synthesized
QVQLQESGGGLVQAGGSLRLSCAASGYIFWYPTMGWYRQAPGKERELVASIGFGTTTYYADSVKGRFTISRDNAKNTVYLQMNSLKPEDTAVYYCAARRYYVSRHYYWGQGTQVTVSS

SEQ ID NO: 34831 - protein, 118 aa, Artificial Sequence
  Chemically Synthesized
QVQLQESGGGLVQAGGSLRLSCAASGSISSSEYMGWYRQAPGKERELVATITGGGSTNYADSVKGRFTISRDNAKNTVYLQMNSLKPEDTAVYYCAADTVGSRYFYYWGQGTQVTVSS

SEQ ID NO: 34832 - protein, 117 aa, Artificial Sequence
  Chemically Synthesized
QVQLQESGGGLVQAGGSLRLSCAASGYISPLNMGWYRQAPGKEREFVASISSGGSTNYADSVKGRFTISRDNAKNTVYLQMNSLKPEDTAVYYCAALKYSDALLWYWGQGTQVTVSS

SEQ ID NO: 34833 - protein, 110 aa, Artificial Sequence
  Chemically Synthesized
QVQLQESGGGLVQAGGSLRLSCAASGTISTWSMGWYRQAPGKEREFVAAIDYGTNTYYADSVKGRFTISRDNAKNTVYLQMNSLKPEDTAVYYCAVGLYWGQGTQVTVSS

SEQ ID NO: 34834 - protein, 118 aa, Artificial Sequence
  Chemically Synthesized
QVQLQESGGGLVQAGGSLRLSCAASGSISLYDGMGWYRQAPGKEREFVATINFGGITNYADSVKGRFTISRDNAKNTVYLQMNSLKPEDTAVYYCAVILLVYTSYEYWGQGTQVTVSS

SEQ ID NO: 34835 - protein, 122 aa, Artificial Sequence
  Chemically Synthesized
QVQLQESGGGLVQAGGSLRLSCAASGNISTVTLMGWYRQAPGKERELVATIDVGGNTYYADSVKGRFTISRDNAKNTVYLQMNSLKPEDTAVYYCAVLGGGADNSFRLYIYWGQGTQVTVSS

SEQ ID NO: 34836 - protein, 118 aa, Artificial Sequence
  Chemically Synthesized
QVQLQESGGGLVQAGGSLRLSCAASGYISDTGSMGWYRQAPGKEREFVAAISYGGNTYYADSVKGRFTISRDNAKNTVYLQMNSLKPEDTAVYYCAAIDIVTTGHIYWGQGTQVTVSS

SEQ ID NO: 34837 - protein, 118 aa, Artificial Sequence
  Chemically Synthesized
QVQLQESGGGLVQAGGSLRLSCAASGYIFAPPVMGWYRQAPGKEREFVATIGDGGSTNYADSVKGRFTISRDNAKNTVYLQMNSLKPEDTAVYYCAAYPYDFLFHDYWGQGTQVTVSS

SEQ ID NO: 34838 - protein, 118 aa, Artificial Sequence
  Chemically Synthesized
QVQLQESGGGLVQAGGSLRLSCAASGTISDAYIMGWYRQAPGKEREFVASISQGGNTNYADSVKGRFTISRDNAKNTVYLQMNSLKPEDTAVYYCAVLATSYSWHYYWGQGTQVTVSS

SEQ ID NO: 34839 - protein, 118 aa, Artificial Sequence
  Chemically Synthesized
QVQLQESGGGLVQAGGSLRLSCAASGSIFYDFYMGWYRQAPGKERELVAGIDSGASTNYADSVKGRFTISRDNAKNTVYLQMNSLKPEDTAVYYCAADGIYTQGHVYWGQGTQVTVSS

SEQ ID NO: 34840 - protein, 111 aa, Artificial Sequence
  Chemically Synthesized
QVQLQESGGGLVQAGGSLRLSCAASGNIFARSAMGWYRQAPGKERELVATINHGAITNYADSVKGRFTISRDNAKNTVYLQMNSLKPEDTAVYYCAALPYWGQGTQVTVSS

SEQ ID NO: 34841 - protein, 118 aa, Artificial Sequence
  Chemically Synthesized
QVQLQESGGGLVQAGGSLRLSCAASGNIFQGVTMGWYRQAPGKEREFVATIDYGTTTNYADSVKGRFTISRDNAKNTVYLQMNSLKPEDTAVYYCAAPGRNATVHGYWGQGTQVTVSS

SEQ ID NO: 34842 - protein, 122 aa, Artificial Sequence
  Chemically Synthesized
QVQLQESGGGLVQAGGSLRLSCAASGTIFRSGSMGWYRQAPGKEREFVATIGQGGNTYYADSVKGRFTISRDNAKNTVYLQMNSLKPEDTAVYYCAAVPGIAQANGYYFAYWGQGTQVTVSS

SEQ ID NO: 34843 - protein, 122 aa, Artificial Sequence
  Chemically Synthesized
QVQLQESGGGLVQAGGSLRLSCAASGTISHGAAMGWYRQAPGKEREFVAAISYGAITYYADSVKGRFTISRDNAKNTVYLQMNSLKPEDTAVYYCAALDRPDTVASRYYYYWGQGTQVTVSS

SEQ ID NO: 34844 - protein, 111 aa, Artificial Sequence
  Chemically Synthesized
QVQLQESGGGLVQAGGSLRLSCAASGSISDNSVMGWYRQAPGKERELVATITGGATTNYADSVKGRFTISRDNAKNTVYLQMNSLKPEDTAVYYCAVASYWGQGTQVTVSS

SEQ ID NO: 34845 - protein, 117 aa, Artificial Sequence
  Chemically Synthesized
QVQLQESGGGLVQAGGSLRLSCAASGNIFDRDTMGWYRQAPGKEREFVASIGAGGSTYADSVKGRFTISRDNAKNTVYLQMNSLKPEDTAVYYCAAGEDEYYGFGYWGQGTQVTVSS

SEQ ID NO: 34846 - protein, 126 aa, Artificial Sequence
  Chemically Synthesized
QVQLQESGGGLVQAGGSLRLSCAASGTIFGSGDMGWYRQAPGKERELVATIGYGGNTYYADSVKGRFTISRDNAKNTVYLQMNSLKPEDTAVYYCAAWYAVDDDYEGYSREGLVYWGQGTQVTVSS

SEQ ID NO: 34847 - protein, 118 aa, Artificial Sequence
  Chemically Synthesized
QVQLQESGGGLVQAGGSLRLSCAASGNISAPIRMGWYRQAPGKEREFVAAIAPGGSTYYADSVKGRFTISRDNAKNTVYLQMNSLKPEDTAVYYCAVVVRGDYYYGYWGQGTQVTVSS

SEQ ID NO: 34848 - protein, 126 aa, Artificial Sequence
  Chemically Synthesized
QVQLQESGGGLVQAGGSLRLSCAASGSIFNDIGMGWYRQAPGKERELVAAIGPGGSTYYADSVKGRFTISRDNAKNTVYLQMNSLKPEDTAVYYCAAPTAVYAAKGVGGWSVLIYWGQGTQVTVSS

SEQ ID NO: 34849 - protein, 117 aa, Artificial Sequence
  Chemically Synthesized
QVQLQESGGGLVQAGGSLRLSCAASGTIFPFLSMGWYRQAPGKEREFVAAIDDGSITNYADSVKGRFTISRDNAKNTVYLQMNSLKPEDTAVYYCAAQGYAGDLIYWGQGTQVTVSS

SEQ ID NO: 34850 - protein, 118 aa, Artificial Sequence
  Chemically Synthesized
QVQLQESGGGLVQAGGSLRLSCAASGNIFAKYAMGWYRQAPGKEREFVAAINIGANTYYADSVKGRFTISRDNAKNTVYLQMNSLKPEDTAVYYCAAIRADRHDLYYWGQGTQVTVSS

SEQ ID NO: 34851 - protein, 122 aa, Artificial Sequence
  Chemically Synthesized
QVQLQESGGGLVQAGGSLRLSCAASGYISYYGDMGWYRQAPGKEREFVAAIDEGSSTYYADSVKGRFTISRDNAKNTVYLQMNSLKPEDTAVYYCAAYVDTYPTLYDYLWYWGQGTQVTVSS

SEQ ID NO: 34852 - protein, 120 aa, Artificial Sequence
  Chemically Synthesized
QVQLQESGGGLVQAGGSLRLSCAASGSISGANDMGWYRQAPGKERELVATIDGGGTTNYADSVKGRFTISRDNAKNTVYLQMNSLKPEDTAVYYCAVQDHGAHNADHIYWGQGTQVTVSS

SEQ ID NO: 34853 - protein, 118 aa, Artificial Sequence
  Chemically Synthesized
QVQLQESGGGLVQAGGSLRLSCAASGTISGRGDMGWYRQAPGKEREFVAAITRGGTTYYADSVKGRFTISRDNAKNTVYLQMNSLKPEDTAVYYCAAQTVWSDVLVYWGQGTQVTVSS

SEQ ID NO: 34854 - protein, 116 aa, Artificial Sequence
  Chemically Synthesized
QVQLQESGGGLVQAGGSLRLSCAASGTISPVRSMGWYRQAPGKEREFVAAIDRGGNTNYADSVKGRFTISRDNAKNTVYLQMNSLKPEDTAVYYCAAAIDLRHYYWGQGTQVTVSS

SEQ ID NO: 34855 - protein, 118 aa, Artificial Sequence
  Chemically Synthesized
QVQLQESGGGLVQAGGSLRLSCAASGTISNRDYMGWYRQAPGKERELVASISSGATTNYADSVKGRFTISRDNAKNTVYLQMNSLKPEDTAVYYCAAVQYRDEWFGYWGQGTQVTVSS

SEQ ID NO: 34856 - protein, 121 aa, Artificial Sequence
  Chemically Synthesized
QVQLQESGGGLVQAGGSLRLSCAASGSIFDDPPMGWYRQAPGKERELVAAITGVVIPYADSVKGRFTISRDNAKNTVYLQMNSLKPEDTAVYYCAADLRRYVFDYKDHYYWGQGTQVTVSS

SEQ ID NO: 34857 - protein, 126 aa, Artificial Sequence
  Chemically Synthesized
QVQLQESGGGLVQAGGSLRLSCAASGYISRDHYMGWYRQAPGKERELVASISAGGNTYYADSVKGRFTISRDNAKNTVYLQMNSLKPEDTAVYYCAVYYLGTGGYGDDAYPNHYYWGQGTQVTVSS

SEQ ID NO: 34858 - protein, 118 aa, Artificial Sequence
  Chemically Synthesized
QVQLQESGGGLVQAGGSLRLSCAASGNIFGLYNMGWYRQAPGKEREFVAAIDGGAITYYADSVKGRFTISRDNAKNTVYLQMNSLKPEDTAVYYCAALIREDRYHAYWGQGTQVTVSS

SEQ ID NO: 34859 - protein, 112 aa, Artificial Sequence
  Chemically Synthesized
QVQLQESGGGLVQAGGSLRLSCAASGNISSPEFMGWYRQAPGKERELVAGIDYGSNTYYADSVKGRFTISRDNAKNTVYLQMNSLKPEDTAVYYCAVPALYWGQGTQVTVSS

SEQ ID NO: 34860 - protein, 118 aa, Artificial Sequence
  Chemically Synthesized
QVQLQESGGGLVQAGGSLRLSCAASGNIFDGFSMGWYRQAPGKEREFVATIGGGGTTNYADSVKGRFTISRDNAKNTVYLQMNSLKPEDTAVYYCAAYYYDSITFTYWGQGTQVTVSS

SEQ ID NO: 34861 - protein, 122 aa, Artificial Sequence
  Chemically Synthesized
QVQLQESGGGLVQAGGSLRLSCAASGTISTTADMGWYRQAPGKEREFVAAINGGAITYYADSVKGRFTISRDNAKNTVYLQMNSLKPEDTAVYYCAVVSYAHGESDDAYDYWGQGTQVTVSS

SEQ ID NO: 34862 - protein, 117 aa, Artificial Sequence
  Chemically Synthesized
QVQLQESGGGLVQAGGSLRLSCAASGNIFPHIYMGWYRQAPGKERELVAGIARGGITNYADSVKGRFTISRDNAKNTVYLQMNSLKPEDTAVYYCAVYWRGSTTIYWGQGTQVTVSS

SEQ ID NO: 34863 - protein, 121 aa, Artificial Sequence
  Chemically Synthesized
QVQLQESGGGLVQAGGSLRLSCAASGTISSSLMGWYRQAPGKERELVAAINLGGSTNYADSVKGRFTISRDNAKNTVYLQMNSLKPEDTAVYYCAAPLVRPGDHYFAFPYWGQGTQVTVSS

SEQ ID NO: 34864 - protein, 113 aa, Artificial Sequence
  Chemically Synthesized
QVQLQESGGGLVQAGGSLRLSCAASGTISSASYMGWYRQAPGKEREFVATITDGTSTNYADSVKGRFTISRDNAKNTVYLQMNSLKPEDTAVYYCAASVPGYWGQGTQVTVSS

SEQ ID NO: 34865 - protein, 114 aa, Artificial Sequence
  Chemically Synthesized
QVQLQESGGGLVQAGGSLRLSCAASGSIFRDIPMGWYRQAPGKERELVAGITGGAYYQYADSVKGRFTISRDNAKNTVYLQMNSLKPEDTAVYYCAVATDHQYWGQGTQVTVSS

SEQ ID NO: 34866 - protein, 119 aa, Artificial Sequence
  Chemically Synthesized
QVQLQESGGGLVQAGGSLRLSCAASGNISPSYSMGWYRQAPGKERELVAGIDRLPYADSVKGRFTISRDNAKNTVYLQMNSLKPEDTAVYYCAAGKDATYLYDGYYYYWGQGTQVTVSS

SEQ ID NO: 34867 - protein, 118 aa, Artificial Sequence
  Chemically Synthesized
QVQLQESGGGLVQAGGSLRLSCAASGSISAATNMGWYRQAPGKEREFVAGIGRGSTTNYADSVKGRFTISRDNAKNTVYLQMNSLKPEDTAVYYCAVLYRQDRYYAYWGQGTQVTVSS

SEQ ID NO: 34868 - protein, 118 aa, Artificial Sequence
  Chemically Synthesized
QVQLQESGGGLVQAGGSLRLSCAASGSISGRVYMGWYRQAPGKEREFVASITYGSSTNYADSVKGRFTISRDNAKNTVYLQMNSLKPEDTAVYYCAATYRQGVYHWYWGQGTQVTVSS

SEQ ID NO: 34869 - protein, 118 aa, Artificial Sequence
  Chemically Synthesized
QVQLQESGGGLVQAGGSLRLSCAASGYISGSPLMGWYRQAPGKEREFVAGISTGGITNYADSVKGRFTISRDNAKNTVYLQMNSLKPEDTAVYYCAALNVLGGIHYYWGQGTQVTVSS

SEQ ID NO: 34870 - protein, 118 aa, Artificial Sequence
  Chemically Synthesized
QVQLQESGGGLVQAGGSLRLSCAASGYIFLLYAMGWYRQAPGKEREFVASITSGGITYYADSVKGRFTISRDNAKNTVYLQMNSLKPEDTAVYYCAALYYLHAYYVYWGQGTQVTVSS

SEQ ID NO: 34871 - protein, 118 aa, Artificial Sequence
  Chemically Synthesized
QVQLQESGGGLVQAGGSLRLSCAASGNIFGNPIMGWYRQAPGKERELVASISDGGNTNYADSVKGRFTISRDNAKNTVYLQMNSLKPEDTAVYYCAVIWYYGDYHWYWGQGTQVTVSS

SEQ ID NO: 34872 - protein, 118 aa, Artificial Sequence
  Chemically Synthesized
QVQLQESGGGLVQAGGSLRLSCAASGTIFQVDTMGWYRQAPGKEREFVATITPGGSTNYADSVKGRFTISRDNAKNTVYLQMNSLKPEDTAVYYCAAYTGNPYLHYYWGQGTQVTVSS

SEQ ID NO: 34873 - protein, 118 aa, Artificial Sequence
  Chemically Synthesized
QVQLQESGGGLVQAGGSLRLSCAASGTISGTIFMGWYRQAPGKERELVATIATGGSTNYADSVKGRFTISRDNAKNTVYLQMNSLKPEDTAVYYCAVLTYDDYYLDYWGQGTQVTVSS

SEQ ID NO: 34874 - protein, 118 aa, Artificial Sequence
  Chemically Synthesized
QVQLQESGGGLVQAGGSLRLSCAASGTIFAYHDMGWYRQAPGKEREFVAAISRGSNTNYADSVKGRFTISRDNAKNTVYLQMNSLKPEDTAVYYCAVGYVRPVAYAYWGQGTQVTVSS

SEQ ID NO: 34875 - protein, 118 aa, Artificial Sequence
  Chemically Synthesized
QVQLQESGGGLVQAGGSLRLSCAASGTIFVQSYMGWYRQAPGKEREFVASIAAGGTTNYADSVKGRFTISRDNAKNTVYLQMNSLKPEDTAVYYCAVVLYRYGWHAYWGQGTQVTVSS

SEQ ID NO: 34876 - protein, 118 aa, Artificial Sequence
  Chemically Synthesized
QVQLQESGGGLVQAGGSLRLSCAASGNISGDIYMGWYRQAPGKERELVATIDYGTNTNYADSVKGRFTISRDNAKNTVYLQMNSLKPEDTAVYYCAVGFLYYSDFIYWGQGTQVTVSS

SEQ ID NO: 34877 - protein, 118 aa, Artificial Sequence
  Chemically Synthesized
QVQLQESGGGLVQAGGSLRLSCAASGTISPPWSMGWYRQAPGKEREFVATIDGGGNTYYADSVKGRFTISRDNAKNTVYLQMNSLKPEDTAVYYCAALNVTAPQHYYWGQGTQVTVSS

SEQ ID NO: 34878 - protein, 125 aa, Artificial Sequence
  Chemically Synthesized
QVQLQESGGGLVQAGGSLRLSCAASGSISHSTAMGWYRQAPGKEREFVAGISYGSSTNYADSVKGRFTISRDNAKNTVYLQMNSLKPEDTAVYYCAVLYLDGDGPPTWRRAFYYWGQGTQVTVSS

SEQ ID NO: 34879 - protein, 118 aa, Artificial Sequence
  Chemically Synthesized
QVQLQESGGGLVQAGGSLRLSCAASGNISKLRTMGWYRQAPGKEREFVAAITYGGNTYYADSVKGRFTISRDNAKNTVYLQMNSLKPEDTAVYYCAAYRYQDGYHYYWGQGTQVTVSS

SEQ ID NO: 34880 - protein, 122 aa, Artificial Sequence
  Chemically Synthesized
QVQLQESGGGLVQAGGSLRLSCAASGNIFGQIVMGWYRQAPGKEREFVATIDRGSITNYADSVKGRFTISRDNAKNTVYLQMNSLKPEDTAVYYCAAVQLQSDNARPYHHYWGQGTQVTVSS

SEQ ID NO: 34881 - protein, 118 aa, Artificial Sequence
  Chemically Synthesized
QVQLQESGGGLVQAGGSLRLSCAASGTISQAVLMGWYRQAPGKEREFVAGIGEGAITNYADSVKGRFTISRDNAKNTVYLQMNSLKPEDTAVYYCAAILYQGAHHYYWGQGTQVTVSS

SEQ ID NO: 34882 - protein, 117 aa, Artificial Sequence
  Chemically Synthesized
QVQLQESGGGLVQAGGSLRLSCAASGSIFVDDPMGWYRQAPGKEREFVAGIDRGANTNYADSVKGRFTISRDNAKNTVYLQMNSLKPEDTAVYYCAAGWADTSLLYWGQGTQVTVSS

SEQ ID NO: 34883 - protein, 118 aa, Artificial Sequence
  Chemically Synthesized
QVQLQESGGGLVQAGGSLRLSCAASGTISDNDYMGWYRQAPGKEREFVAAIDLGATTYYADSVKGRFTISRDNAKNTVYLQMNSLKPEDTAVYYCAAEYVSSQDHSYWGQGTQVTVSS

SEQ ID NO: 34884 - protein, 118 aa, Artificial Sequence
  Chemically Synthesized
QVQLQESGGGLVQAGGSLRLSCAASGYISTRAHMGWYRQAPGKERELVAAITEGSSTYYADSVKGRFTISRDNAKNTVYLQMNSLKPEDTAVYYCAAIFNDPGGLEYWGQGTQVTVSS

SEQ ID NO: 34885 - protein, 117 aa, Artificial Sequence
  Chemically Synthesized
QVQLQESGGGLVQAGGSLRLSCAASGTISYSPFMGWYRQAPGKERELVAAITHGSSTYYADSVKGRFTISRDNAKNTVYLQMNSLKPEDTAVYYCAASGTVLLCMYWGQGTQVTVSS

SEQ ID NO: 34886 - protein, 116 aa, Artificial Sequence
  Chemically Synthesized
QVQLQESGGGLVQAGGSLRLSCAASGTISRYMGWYRQAPGKEREFVASIGRGTITYYADSVKGRFTISRDNAKNTVYLQMNSLKPEDTAVYYCAAIAYTGYKHRYWGQGTQVTVSS

SEQ ID NO: 34887 - protein, 126 aa, Artificial Sequence
  Chemically Synthesized
QVQLQESGGGLVQAGGSLRLSCAASGSIFLYITMGWYRQAPGKERELVATINLGSITNYADSVKGRFTISRDNAKNTVYLQMNSLKPEDTAVYYCAVWSRQGLPYPYTTADPHAYWGQGTQVTVSS

SEQ ID NO: 34888 - protein, 118 aa, Artificial Sequence
  Chemically Synthesized
QVQLQESGGGLVQAGGSLRLSCAASGYISGQYYMGWYRQAPGKEREFVAGINPGSITYYADSVKGRFTISRDNAKNTVYLQMNSLKPEDTAVYYCAVTGAARTYLSYWGQGTQVTVSS

SEQ ID NO: 34889 - protein, 118 aa, Artificial Sequence
  Chemically Synthesized
QVQLQESGGGLVQAGGSLRLSCAASGNISYYDAMGWYRQAPGKEREFVATIGVGSSTNYADSVKGRFTISRDNAKNTVYLQMNSLKPEDTAVYYCAAVIRRHIPHGYWGQGTQVTVSS

SEQ ID NO: 34890 - protein, 117 aa, Artificial Sequence
  Chemically Synthesized
QVQLQESGGGLVQAGGSLRLSCAASGYIFTFRHMGWYRQAPGKERELVATIAVVLLPYADSVKGRFTISRDNAKNTVYLQMNSLKPEDTAVYYCAVVVGDYYEYYYWGQGTQVTVSS

SEQ ID NO: 34891 - protein, 118 aa, Artificial Sequence
  Chemically Synthesized
QVQLQESGGGLVQAGGSLRLSCAASGSISAAYVMGWYRQAPGKEREFVAAIAGGTTTNYADSVKGRFTISRDNAKNTVYLQMNSLKPEDTAVYYCAALDRASHRYWYWGQGTQVTVSS

SEQ ID NO: 34892 - protein, 122 aa, Artificial Sequence
  Chemically Synthesized
QVQLQESGGGLVQAGGSLRLSCAASGTISYANYMGWYRQAPGKERELVASIDVGSNTYYADSVKGRFTISRDNAKNTVYLQMNSLKPEDTAVYYCAVHSYEPGDYRYYHIYWGQGTQVTVSS

SEQ ID NO: 34893 - protein, 118 aa, Artificial Sequence
  Chemically Synthesized
QVQLQESGGGLVQAGGSLRLSCAASGYIFYSPTMGWYRQAPGKEREFVASITYGASTNYADSVKGRFTISRDNAKNTVYLQMNSLKPEDTAVYYCAALPTRLLQYAYWGQGTQVTVSS

SEQ ID NO: 34894 - protein, 118 aa, Artificial Sequence
  Chemically Synthesized
QVQLQESGGGLVQAGGSLRLSCAASGNISYYSVMGWYRQAPGKEREFVAGIAPGATTNYADSVKGRFTISRDNAKNTVYLQMNSLKPEDTAVYYCAAVTLDHAHLYYWGQGTQVTVSS

SEQ ID NO: 34895 - protein, 125 aa, Artificial Sequence
  Chemically Synthesized
QVQLQESGGGLVQAGGSLRLSCAASGNIFPDTTMGWYRQAPGKERELVAVLVSVVIPYADSVKGRFTISRDNAKNTVYLQMNSLKPEDTAVYYCAAEPGYRNYSDYGDEPEHYYWGQGTQVTVSS

SEQ ID NO: 34896 - protein, 126 aa, Artificial Sequence
  Chemically Synthesized
QVQLQESGGGLVQAGGSLRLSCAASGTIFPSFGMGWYRQAPGKERELVASIAYGAITNYADSVKGRFTISRDNAKNTVYLQMNSLKPEDTAVYYCAVTRDISGRPATGYVQYHGYWGQGTQVTVSS

SEQ ID NO: 34897 - protein, 122 aa, Artificial Sequence
  Chemically Synthesized
QVQLQESGGGLVQAGGSLRLSCAASGTIFTSAYMGWYRQAPGKEREFVAAIGVGASTNYADSVKGRFTISRDNAKNTVYLQMNSLKPEDTAVYYCAAVQYLPYARHPRLYYWGQGTQVTVSS

SEQ ID NO: 34898 - protein, 126 aa, Artificial Sequence
  Chemically Synthesized
QVQLQESGGGLVQAGGSLRLSCAASGTISLSLVMGWYRQAPGKEREFVATISDGSNTYYADSVKGRFTISRDNAKNTVYLQMNSLKPEDTAVYYCAALYHDLTGYGDGGTRYHYYWGQGTQVTVSS

SEQ ID NO: 34899 - protein, 121 aa, Artificial Sequence
  Chemically Synthesized
QVQLQESGGGLVQAGGSLRLSCAASGSISSGQYMGWYRQAPGKERELVAAITIGGNTNYADSVKGRFTISRDNAKNTVYLQMNSLKPEDTAVYYCAVYVSGVYQQTGEFYWGQGTQVTVSS

SEQ ID NO: 34900 - protein, 119 aa, Artificial Sequence
  Chemically Synthesized
QVQLQESGGGLVQAGGSLRLSCAASGNISYYVGMGWYRQAPGKEREFVATIGKGSNTNYADSVKGRFTISRDNAKNTVYLQMNSLKPEDTAVYYCAAVTVSTRVVHGYWGQGTQVTVSS

SEQ ID NO: 34901 - protein, 116 aa, Artificial Sequence
  Chemically Synthesized
QVQLQESGGGLVQAGGSLRLSCAASGNISYIYSMGWYRQAPGKERELVAAISTGAITYYADSVKGRFTISRDNAKNTVYLQMNSLKPEDTAVYYCAAYYDKDHGYWGQGTQVTVSS

SEQ ID NO: 34902 - protein, 118 aa, Artificial Sequence
  Chemically Synthesized
QVQLQESGGGLVQAGGSLRLSCAASGYISPRVVMGWYRQAPGKEREFVAGIGQGSNTYYADSVKGRFTISRDNAKNTVYLQMNSLKPEDTAVYYCAVNGLGLLRYYYWGQGTQVTVSS

SEQ ID NO: 34903 - protein, 122 aa, Artificial Sequence
  Chemically Synthesized
QVQLQESGGGLVQAGGSLRLSCAASGSIFYWEPMGWYRQAPGKEREFVATISDGGSTYYADSVKGRFTISRDNAKNTVYLQMNSLKPEDTAVYYCAADYTGSSPDDTYFDYWGQGTQVTVSS

SEQ ID NO: 34904 - protein, 122 aa, Artificial Sequence
  Chemically Synthesized
QVQLQESGGGLVQAGGSLRLSCAASGNISGTGYMGWYRQAPGKEREFVAGISYGSNTNYADSVKGRFTISRDNAKNTVYLQMNSLKPEDTAVYYCAAPLRSRVYGLPTLGYWGQGTQVTVSS

SEQ ID NO: 34905 - protein, 125 aa, Artificial Sequence
  Chemically Synthesized
QVQLQESGGGLVQAGGSLRLSCAASGTISYYTIMGWYRQAPGKEREFVASIAIGSNTNYADSVKGRFTISRDNAKNTVYLQMNSLKPEDTAVYYCAASRAGYSDELYFLPDHFYWGQGTQVTVSS

SEQ ID NO: 34906 - protein, 118 aa, Artificial Sequence
  Chemically Synthesized
QVQLQESGGGLVQAGGSLRLSCAASGNIFDFIGMGWYRQAPGKEREFVATINGGGNTYYADSVKGRFTISRDNAKNTVYLQMNSLKPEDTAVYYCAVTWRESTYLYYWGQGTQVTVSS

SEQ ID NO: 34907 - protein, 122 aa, Artificial Sequence
  Chemically Synthesized
QVQLQESGGGLVQAGGSLRLSCAASGSIFTGTQMGWYRQAPGKERELVAAIASGTITNYADSVKGRFTISRDNAKNTVYLQMNSLKPEDTAVYYCAVRDYPSIYYPPWYAYWGQGTQVTVSS

SEQ ID NO: 34908 - protein, 126 aa, Artificial Sequence
  Chemically Synthesized
QVQLQESGGGLVQAGGSLRLSCAASGTISSPAYMGWYRQAPGKEREFVASIGDGGTTNYADSVKGRFTISRDNAKNTVYLQMNSLKPEDTAVYYCAVVLRAPPGGALRGFVWLHYWGQGTQVTVSS

SEQ ID NO: 34909 - protein, 118 aa, Artificial Sequence
  Chemically Synthesized
QVQLQESGGGLVQAGGSLRLSCAASGSISWGYIMGWYRQAPGKEREFVAAIDVGSSTNYADSVKGRFTISRDNAKNTVYLQMNSLKPEDTAVYYCAAVQYQVRYHYYWGQGTQVTVSS

SEQ ID NO: 34910 - protein, 121 aa, Artificial Sequence
  Chemically Synthesized
QVQLQESGGGLVQAGGSLRLSCAASGNIFVDNDMGWYRQAPGKERELVASIANGAITYYADSVKGRFTISRDNAKNTVYLQMNSLKPEDTAVYYCAVIASIDPIDPYDLYWGQGTQVTVSS

SEQ ID NO: 34911 - protein, 118 aa, Artificial Sequence
  Chemically Synthesized
QVQLQESGGGLVQAGGSLRLSCAASGSIFARAYMGWYRQAPGKERELVAAISTGAITNYADSVKGRFTISRDNAKNTVYLQMNSLKPEDTAVYYCAALTRSTYYHYYWGQGTQVTVSS

SEQ ID NO: 34912 - protein, 118 aa, Artificial Sequence
  Chemically Synthesized
QVQLQESGGGLVQAGGSLRLSCAASGNIFSRFGMGWYRQAPGKEREFVAGIGNGGITYYADSVKGRFTISRDNAKNTVYLQMNSLKPEDTAVYYCAVSHRRWRAYQYWGQGTQVTVSS

SEQ ID NO: 34913 - protein, 118 aa, Artificial Sequence
  Chemically Synthesized
QVQLQESGGGLVQAGGSLRLSCAASGSIFRYTAMGWYRQAPGKEREFVAAINPGSSTNYADSVKGRFTISRDNAKNTVYLQMNSLKPEDTAVYYCAAAYYRDHYHGYWGQGTQVTVSS

SEQ ID NO: 34914 - protein, 118 aa, Artificial Sequence
  Chemically Synthesized
QVQLQESGGGLVQAGGSLRLSCAASGTISDYGSMGWYRQAPGKEREFVASITFGTTTNYADSVKGRFTISRDNAKNTVYLQMNSLKPEDTAVYYCAAIWLSGKWHSYWGQGTQVTVSS

SEQ ID NO: 34915 - protein, 118 aa, Artificial Sequence
  Chemically Synthesized
QVQLQESGGGLVQAGGSLRLSCAASGTISDGYAMGWYRQAPGKERELVASIGSGANTYYADSVKGRFTISRDNAKNTVYLQMNSLKPEDTAVYYCAVFVVDYYPLGYWGQGTQVTVSS

SEQ ID NO: 34916 - protein, 118 aa, Artificial Sequence
  Chemically Synthesized
QVQLQESGGGLVQAGGSLRLSCAASGTISVGYVMGWYRQAPGKEREFVAGISTGGTTNYADSVKGRFTISRDNAKNTVYLQMNSLKPEDTAVYYCAALDYSGDRHFYWGQGTQVTVSS

SEQ ID NO: 34917 - protein, 119 aa, Artificial Sequence
  Chemically Synthesized
QVQLQESGGGLVQAGGSLRLSCAASGSISSHWYMGWYRQAPGKERELVASINNGGTTYYADSVKGRFTISRDNAKNTVYLQMNSLKPEDTAVYYCAALFRESNGYHYYWGQGTQVTVSS

SEQ ID NO: 34918 - protein, 122 aa, Artificial Sequence
  Chemically Synthesized
QVQLQESGGGLVQAGGSLRLSCAASGSIFLYFGMGWYRQAPGKEREFVAAITDGGTTYYADSVKGRFTISRDNAKNTVYLQMNSLKPEDTAVYYCAAQLVPGGGHYVIHFYWGQGTQVTVSS

SEQ ID NO: 34919 - protein, 118 aa, Artificial Sequence
  Chemically Synthesized
QVQLQESGGGLVQAGGSLRLSCAASGNIFPFVGMGWYRQAPGKEREFVATIDGGANTNYADSVKGRFTISRDNAKNTVYLQMNSLKPEDTAVYYCAVISGGRLYHYYWGQGTQVTVSS

SEQ ID NO: 34920 - protein, 118 aa, Artificial Sequence
  Chemically Synthesized
QVQLQESGGGLVQAGGSLRLSCAASGTIFQRYTMGWYRQAPGKEREFVAAIGWGSTTNYADSVKGRFTISRDNAKNTVYLQMNSLKPEDTAVYYCAAIVSRYPYLYYWGQGTQVTVSS

SEQ ID NO: 34921 - protein, 118 aa, Artificial Sequence
  Chemically Synthesized
QVQLQESGGGLVQAGGSLRLSCAASGYIFRDVDMGWYRQAPGKEREFVAGINRGGTTNYADSVKGRFTISRDNAKNTVYLQMNSLKPEDTAVYYCAAAYAGVVTHDYWGQGTQVTVSS

SEQ ID NO: 34922 - protein, 125 aa, Artificial Sequence
  Chemically Synthesized
QVQLQESGGGLVQAGGSLRLSCAASGTISTRYDMGWYRQAPGKEREFVASIAHGGTTYADSVKGRFTISRDNAKNTVYLQMNSLKPEDTAVYYCAADYESAGRSLANDDRYHLYWGQGTQVTVSS

SEQ ID NO: 34923 - protein, 118 aa, Artificial Sequence
  Chemically Synthesized
QVQLQESGGGLVQAGGSLRLSCAASGYISDEPTMGWYRQAPGKEREFVAAIGKGSITNYADSVKGRFTISRDNAKNTVYLQMNSLKPEDTAVYYCAAIDSARARHYYWGQGTQVTVSS

SEQ ID NO: 34924 - protein, 118 aa, Artificial Sequence
  Chemically Synthesized
QVQLQESGGGLVQAGGSLRLSCAASGNIFARLYMGWYRQAPGKEREFVASIGPGGSTNYADSVKGRFTISRDNAKNTVYLQMNSLKPEDTAVYYCAALFRGRQAYAYWGQGTQVTVSS

SEQ ID NO: 34925 - protein, 120 aa, Artificial Sequence
  Chemically Synthesized
QVQLQESGGGLVQAGGSLRLSCAASGTISRKVTMGWYRQAPGKEREFVAAINGGSTTNYADSVKGRFTISRDNAKNTVYLQMNSLKPEDTAVYYCAAIYLSTSGRYHYYWGQGTQVTVSS

SEQ ID NO: 34926 - protein, 118 aa, Artificial Sequence
  Chemically Synthesized
QVQLQESGGGLVQAGGSLRLSCAASGSISTTYRMGWYRQAPGKEREFVAGINDGTTTNYADSVKGRFTISRDNAKNTVYLQMNSLKPEDTAVYYCAALYWRGTGHYYWGQGTQVTVSS

SEQ ID NO: 34927 - protein, 122 aa, Artificial Sequence
  Chemically Synthesized
QVQLQESGGGLVQAGGSLRLSCAASGYIFGADVMGWYRQAPGKERELVAAITGGSTTNYADSVKGRFTISRDNAKNTVYLQMNSLKPEDTAVYYCAVADRTTPALPDEFDYWGQGTQVTVSS

SEQ ID NO: 34928 - protein, 118 aa, Artificial Sequence
  Chemically Synthesized
QVQLQESGGGLVQAGGSLRLSCAASGTISHSDIMGWYRQAPGKEREFVAGIGLGSTTNYADSVKGRFTISRDNAKNTVYLQMNSLKPEDTAVYYCAALHRAYYYHAYWGQGTQVTVSS

SEQ ID NO: 34929 - protein, 118 aa, Artificial Sequence
  Chemically Synthesized
QVQLQESGGGLVQAGGSLRLSCAASGNISRNTAMGWYRQAPGKEREFVASISSGSSTNYADSVKGRFTISRDNAKNTVYLQMNSLKPEDTAVYYCAALTVTPRYLFYWGQGTQVTVSS

SEQ ID NO: 34930 - protein, 118 aa, Artificial Sequence
  Chemically Synthesized
QVQLQESGGGLVQAGGSLRLSCAASGTIFSGGAMGWYRQAPGKEREFVASISDGSNTNYADSVKGRFTISRDNAKNTVYLQMNSLKPEDTAVYYCAVLYVKRYIHYYWGQGTQVTVSS

SEQ ID NO: 34931 - protein, 122 aa, Artificial Sequence
  Chemically Synthesized
QVQLQESGGGLVQAGGSLRLSCAASGSISSGDSMGWYRQAPGKEREFVAAISAGTSTNYADSVKGRFTISRDNAKNTVYLQMNSLKPEDTAVYYCAVLYRYPGYSARYYYYWGQGTQVTVSS

SEQ ID NO: 34932 - protein, 118 aa, Artificial Sequence
  Chemically Synthesized
QVQLQESGGGLVQAGGSLRLSCAASGYISGKSVMGWYRQAPGKEREFVASIDYGGSTNYADSVKGRFTISRDNAKNTVYLQMNSLKPEDTAVYYCAVIYHDFDAYQYWGQGTQVTVSS

SEQ ID NO: 34933 - protein, 122 aa, Artificial Sequence
  Chemically Synthesized
QVQLQESGGGLVQAGGSLRLSCAASGSIFHLQSMGWYRQAPGKERELVAAINGGSSTNYADSVKGRFTISRDNAKNTVYLQMNSLKPEDTAVYYCAVLYITRARPRTYHSYWGQGTQVTVSS

SEQ ID NO: 34934 - protein, 125 aa, Artificial Sequence
  Chemically Synthesized
QVQLQESGGGLVQAGGSLRLSCAASGTIFLRGYMGWYRQAPGKEREFVAGIARGTSTYYADSVKGRFTISRDNAKNTVYLQMNSLKPEDTAVYYCAVGRYRPYDVYVTSPYLTYWGQGTQVTVSS

SEQ ID NO: 34935 - protein, 118 aa, Artificial Sequence
  Chemically Synthesized
QVQLQESGGGLVQAGGSLRLSCAASGNIFGPAVMGWYRQAPGKEREFVAAINDGANTYYADSVKGRFTISRDNAKNTVYLQMNSLKPEDTAVYYCAVVTRLQRLYYYWGQGTQVTVSS

SEQ ID NO: 34936 - protein, 124 aa, Artificial Sequence
  Chemically Synthesized
QVQLQESGGGLVQAGGSLRLSCAASGNISSVYVMGWYRQAPGKERELVAAIDSGAKYADSVKGRFTISRDNAKNTVYLQMNSLKPEDTAVYYCAVYGYVDLDEDAGDRLVLSYWGQGTQVTVSS

SEQ ID NO: 34937 - protein, 122 aa, Artificial Sequence
  Chemically Synthesized
QVQLQESGGGLVQAGGSLRLSCAASGTIFIIRDMGWYRQAPGKERELVATIDDGTSTNYADSVKGRFTISRDNAKNTVYLQMNSLKPEDTAVYYCAADQYYDDDDPYSHPYWGQGTQVTVSS

SEQ ID NO: 34938 - protein, 118 aa, Artificial Sequence
  Chemically Synthesized
QVQLQESGGGLVQAGGSLRLSCAASGNIFSVAIMGWYRQAPGKEREFVAAISDGANTNYADSVKGRFTISRDNAKNTVYLQMNSLKPEDTAVYYCAALQRRYYYHYYWGQGTQVTVSS

SEQ ID NO: 34939 - protein, 118 aa, Artificial Sequence
  Chemically Synthesized
QVQLQESGGGLVQAGGSLRLSCAASGTISARYVMGWYRQAPGKEREFVASINYGGTTNYADSVKGRFTISRDNAKNTVYLQMNSLKPEDTAVYYCAVLYYFGYWHWYWGQGTQVTVSS

SEQ ID NO: 34940 - protein, 118 aa, Artificial Sequence
  Chemically Synthesized
QVQLQESGGGLVQAGGSLRLSCAASGYISYYDTMGWYRQAPGKEREFVASIDPGATTYYADSVKGRFTISRDNAKNTVYLQMNSLKPEDTAVYYCAVGYVRRHAFLYWGQGTQVTVSS

SEQ ID NO: 34941 - protein, 122 aa, Artificial Sequence
  Chemically Synthesized
QVQLQESGGGLVQAGGSLRLSCAASGTISRPSRMGWYRQAPGKERELVAGITGGGSTNYADSVKGRFTISRDNAKNTVYLQMNSLKPEDTAVYYCAALTFSRSEYTQWYYYWGQGTQVTVSS

SEQ ID NO: 34942 - protein, 118 aa, Artificial Sequence
  Chemically Synthesized
QVQLQESGGGLVQAGGSLRLSCAASGTISQQSYMGWYRQAPGKEREFVATIASGATTNYADSVKGRFTISRDNAKNTVYLQMNSLKPEDTAVYYCAATYYTIYWHYYWGQGTQVTVSS

SEQ ID NO: 34943 - protein, 118 aa, Artificial Sequence
  Chemically Synthesized
QVQLQESGGGLVQAGGSLRLSCAASGNIFQRAYMGWYRQAPGKEREFVAAIGRGGSTNYADSVKGRFTISRDNAKNTVYLQMNSLKPEDTAVYYCAAVYRGDRYYGYWGQGTQVTVSS

SEQ ID NO: 34944 - protein, 118 aa, Artificial Sequence
  Chemically Synthesized
QVQLQESGGGLVQAGGSLRLSCAASGNISGRIAMGWYRQAPGKEREFVAAINGGSTTYYADSVKGRFTISRDNAKNTVYLQMNSLKPEDTAVYYCAVIYYYRRYHYYWGQGTQVTVSS

SEQ ID NO: 34945 - protein, 118 aa, Artificial Sequence
  Chemically Synthesized
QVQLQESGGGLVQAGGSLRLSCAASGNISRRYSMGWYRQAPGKEREFVAAINVGGNTNYADSVKGRFTISRDNAKNTVYLQMNSLKPEDTAVYYCAVIYYKHAWYHYWGQGTQVTVSS

SEQ ID NO: 34946 - protein, 118 aa, Artificial Sequence
  Chemically Synthesized
QVQLQESGGGLVQAGGSLRLSCAASGSISPHLSMGWYRQAPGKEREFVASINYGAITNYADSVKGRFTISRDNAKNTVYLQMNSLKPEDTAVYYCAAVGYYDQYYGYWGQGTQVTVSS

SEQ ID NO: 34947 - protein, 118 aa, Artificial Sequence
  Chemically Synthesized
QVQLQESGGGLVQAGGSLRLSCAASGYIFILYSMGWYRQAPGKEREFVATIDVGSSTYYADSVKGRFTISRDNAKNTVYLQMNSLKPEDTAVYYCAVTGGDDHQYAYWGQGTQVTVSS

SEQ ID NO: 34948 - protein, 122 aa, Artificial Sequence
  Chemically Synthesized
QVQLQESGGGLVQAGGSLRLSCAASGSISTYIGMGWYRQAPGKEREFVASIARGASTNYADSVKGRFTISRDNAKNTVYLQMNSLKPEDTAVYYCAALHYDDETDPKWHYYWGQGTQVTVSS

SEQ ID NO: 34949 - protein, 122 aa, Artificial Sequence
  Chemically Synthesized
QVQLQESGGGLVQAGGSLRLSCAASGTIFYLYYMGWYRQAPGKERELVAGITYGGTTYYADSVKGRFTISRDNAKNTVYLQMNSLKPEDTAVYYCAADTIGVGPLTIAHDYWGQGTQVTVSS

SEQ ID NO: 34950 - protein, 118 aa, Artificial Sequence
  Chemically Synthesized
QVQLQESGGGLVQAGGSLRLSCAASGTISRAYQMGWYRQAPGKEREFVAGIDWGANTNYADSVKGRFTISRDNAKNTVYLQMNSLKPEDTAVYYCAAVVRGKVVHYYWGQGTQVTVSS

SEQ ID NO: 34951 - protein, 118 aa, Artificial Sequence
  Chemically Synthesized
QVQLQESGGGLVQAGGSLRLSCAASGNISLWSAMGWYRQAPGKEREFVAGITIGGITYYADSVKGRFTISRDNAKNTVYLQMNSLKPEDTAVYYCAVYQLEFVSHGYWGQGTQVTVSS

SEQ ID NO: 34952 - protein, 118 aa, Artificial Sequence
  Chemically Synthesized
QVQLQESGGGLVQAGGSLRLSCAASGTISLRGSMGWYRQAPGKEREFVAAISIGGNTNYADSVKGRFTISRDNAKNTVYLQMNSLKPEDTAVYYCAALYLSAAYHWYWGQGTQVTVSS

SEQ ID NO: 34953 - protein, 118 aa, Artificial Sequence
  Chemically Synthesized
QVQLQESGGGLVQAGGSLRLSCAASGTIFGQQRMGWYRQAPGKEREFVASINEGAITYYADSVKGRFTISRDNAKNTVYLQMNSLKPEDTAVYYCAAVSYNKRHYYYWGQGTQVTVSS

SEQ ID NO: 34954 - protein, 116 aa, Artificial Sequence
  Chemically Synthesized
QVQLQESGGGLVQAGGSLRLSCAASGTISYHGTMGWYRQAPGKEREFVAAITYGASTNYADSVKGRFTISRDNAKNTVYLQMNSLKPEDTAVYYCAALYGPTHYYWGQGTQVTVSS

SEQ ID NO: 34955 - protein, 126 aa, Artificial Sequence
  Chemically Synthesized
QVQLQESGGGLVQAGGSLRLSCAASGNISRVRAMGWYRQAPGKEREFVAAINGGGSTYYADSVKGRFTISRDNAKNTVYLQMNSLKPEDTAVYYCAALGKGWGYDGYAGTRWLHYWGQGTQVTVSS

SEQ ID NO: 34956 - protein, 122 aa, Artificial Sequence
  Chemically Synthesized
QVQLQESGGGLVQAGGSLRLSCAASGSISTYISMGWYRQAPGKEREFVAGITWGGSTNYADSVKGRFTISRDNAKNTVYLQMNSLKPEDTAVYYCAAVARYRDRTGVYHWYWGQGTQVTVSS

SEQ ID NO: 34957 - protein, 126 aa, Artificial Sequence
  Chemically Synthesized
QVQLQESGGGLVQAGGSLRLSCAASGTISYLYVMGWYRQAPGKEREFVAGINRGSNTYYADSVKGRFTISRDNAKNTVYLQMNSLKPEDTAVYYCAAILYYDAGRVTNPGRYHYYWGQGTQVTVSS

SEQ ID NO: 34958 - protein, 118 aa, Artificial Sequence
  Chemically Synthesized
QVQLQESGGGLVQAGGSLRLSCAASGNISPWGGMGWYRQAPGKEREFVAAISEGSSTNYADSVKGRFTISRDNAKNTVYLQMNSLKPEDTAVYYCAAVRRYPYYLGYWGQGTQVTVSS

SEQ ID NO: 34959 - protein, 122 aa, Artificial Sequence
  Chemically Synthesized
QVQLQESGGGLVQAGGSLRLSCAASGYIFGRGDMGWYRQAPGKERELVAAINDGSITNYADSVKGRFTISRDNAKNTVYLQMNSLKPEDTAVYYCAAYLYAYFDDKEQHVYWGQGTQVTVSS

SEQ ID NO: 34960 - protein, 123 aa, Artificial Sequence
  Chemically Synthesized
QVQLQESGGGLVQAGGSLRLSCAASGNISFHYGMGWYRQAPGKERELVAAITYGASTNYADSVKGRFTISRDNAKNTVYLQMNSLKPEDTAVYYCAVLTRRSGGTGGLYHYYWGQGTQVTVSS

SEQ ID NO: 34961 - protein, 118 aa, Artificial Sequence
  Chemically Synthesized
QVQLQESGGGLVQAGGSLRLSCAASGSISGYVIMGWYRQAPGKEREFVAAITGGAITNYADSVKGRFTISRDNAKNTVYLQMNSLKPEDTAVYYCAVLVRYDRYHGYWGQGTQVTVSS

SEQ ID NO: 34962 - protein, 117 aa, Artificial Sequence
  Chemically Synthesized
QVQLQESGGGLVQAGGSLRLSCAASGSIFSRSAMGWYRQAPGKEREFVAAIASGAITNYADSVKGRFTISRDNAKNTVYLQMNSLKPEDTAVYYCAALYRPDLHYYWGQGTQVTVSS

SEQ ID NO: 34963 - protein, 118 aa, Artificial Sequence
  Chemically Synthesized
QVQLQESGGGLVQAGGSLRLSCAASGNISWTWVMGWYRQAPGKEREFVAAIGDGANTNYADSVKGRFTISRDNAKNTVYLQMNSLKPEDTAVYYCAVITRNDRWYYYWGQGTQVTVSS

SEQ ID NO: 34964 - protein, 122 aa, Artificial Sequence
  Chemically Synthesized
QVQLQESGGGLVQAGGSLRLSCAASGSISDYWDMGWYRQAPGKERELVAAINDGSNTYYADSVKGRFTISRDNAKNTVYLQMNSLKPEDTAVYYCAAPYWSDTYTHTPHPYWGQGTQVTVSS

SEQ ID NO: 34965 - protein, 120 aa, Artificial Sequence
  Chemically Synthesized
QVQLQESGGGLVQAGGSLRLSCAASGNISFKADMGWYRQAPGKERELVASITGGASTNYADSVKGRFTISRDNAKNTVYLQMNSLKPEDTAVYYCAVGVVLVTVNWLFYWGQGTQVTVSS

SEQ ID NO: 34966 - protein, 126 aa, Artificial Sequence
  Chemically Synthesized
QVQLQESGGGLVQAGGSLRLSCAASGNISGPVYMGWYRQAPGKERELVAGIDGGANTYYADSVKGRFTISRDNAKNTVYLQMNSLKPEDTAVYYCAVQNDGSYGRYYWTGYPLGYWGQGTQVTVSS

SEQ ID NO: 34967 - protein, 112 aa, Artificial Sequence
  Chemically Synthesized
QVQLQESGGGLVQAGGSLRLSCAASGTIFEVLMGWYRQAPGKERELVATITYYADSVKGRFTISRDNAKNTVYLQMNSLKPEDTAVYYCAVYPLDQHYFAYWGQGTQVTVSS

SEQ ID NO: 34968 - protein, 121 aa, Artificial Sequence
  Chemically Synthesized
QVQLQESGGGLVQAGGSLRLSCAASGNISPYLWMGWYRQAPGKEREFVATLLLVVIPYADSVKGRFTISRDNAKNTVYLQMNSLKPEDTAVYYCAVSYYGYDHRAYSHPYWGQGTQVTVSS

SEQ ID NO: 34969 - protein, 117 aa, Artificial Sequence
  Chemically Synthesized
QVQLQESGGGLVQAGGSLRLSCAASGTISTTVMGWYRQAPGKERELVAAIDYGSNTNYADSVKGRFTISRDNAKNTVYLQMNSLKPEDTAVYYCAAGTDYAYEFPYWGQGTQVTVSS

SEQ ID NO: 34970 - protein, 118 aa, Artificial Sequence
  Chemically Synthesized
QVQLQESGGGLVQAGGSLRLSCAASGNIFGTYYMGWYRQAPGKEREFVAAITLGGTTYYADSVKGRFTISRDNAKNTVYLQMNSLKPEDTAVYYCAAHYYINNGHTYWGQGTQVTVSS

SEQ ID NO: 34971 - protein, 117 aa, Artificial Sequence
  Chemically Synthesized
QVQLQESGGGLVQAGGSLRLSCAASGTISYLEGMGWYRQAPGKEREFVAGINRANTNYADSVKGRFTISRDNAKNTVYLQMNSLKPEDTAVYYCAANGQAVNPLSYWGQGTQVTVSS

SEQ ID NO: 34972 - protein, 122 aa, Artificial Sequence
  Chemically Synthesized
QVQLQESGGGLVQAGGSLRLSCAASGTIFLSDVMGWYRQAPGKEREFVASINYGAIYQYADSVKGRFTISRDNAKNTVYLQMNSLKPEDTAVYYCAVLDITQGWYDHAHVYWGQGTQVTVSS

SEQ ID NO: 34973 - protein, 118 aa, Artificial Sequence
  Chemically Synthesized
QVQLQESGGGLVQAGGSLRLSCAASGYISRIVPMGWYRQAPGKERELVASISYGSSTNYADSVKGRFTISRDNAKNTVYLQMNSLKPEDTAVYYCAADTFVTEKYYYWGQGTQVTVSS

SEQ ID NO: 34974 - protein, 118 aa, Artificial Sequence
  Chemically Synthesized
QVQLQESGGGLVQAGGSLRLSCAASGYIWMGWYRQAPGKEREFVASIGGGAITYYADSVKGRFTISRDNAKNTVYLQMNSLKPEDTAVYYCAVPATYYYLHDQRLRYWGQGTQVTVSS

SEQ ID NO: 34975 - protein, 117 aa, Artificial Sequence
  Chemically Synthesized
QVQLQESGGGLVQAGGSLRLSCAASGTISTVDRMGWYRQAPGKEREFVAGISDGSNTNYADSVKGRFTISRDNAKNTVYLQMNSLKPEDTAVYYCAAWPVGYNSMYWGQGTQVTVSS

SEQ ID NO: 34976 - protein, 117 aa, Artificial Sequence
  Chemically Synthesized
QVQLQESGGGLVQAGGSLRLSCAASGFMGWYRQAPGKERELVATINTGGTTNYADSVKGRFTISRDNAKNTVYLQMNSLKPEDTAVYYCAANPRAEGSVALYYHRYWGQGTQVTVSS

SEQ ID NO: 34977 - protein, 117 aa, Artificial Sequence
  Chemically Synthesized
QVQLQESGGGLVQAGGSLRLSCAASGTIFPYSDMGWYRQAPGKEREFVAGITSVLIPYADSVKGRFTISRDNAKNTVYLQMNSLKPEDTAVYYCAVSTPSYQGYDYWGQGTQVTVSS

SEQ ID NO: 34978 - protein, 118 aa, Artificial Sequence
  Chemically Synthesized
QVQLQESGGGLVQAGGSLRLSCAASGTIFVRAFMGWYRQAPGKEREFVAAIAFGSSTYYADSVKGRFTISRDNAKNTVYLQMNSLKPEDTAVYYCAAGTPVDYFLGYWGQGTQVTVSS

SEQ ID NO: 34979 - protein, 117 aa, Artificial Sequence
  Chemically Synthesized
QVQLQESGGGLVQAGGSLRLSCAASGYISYSTHMGWYRQAPGKEREFVASISTGSNTNYADSVKGRFTISRDNAKNTVYLQMNSLKPEDTAVYYCAVDGYASVSIYWGQGTQVTVSS

SEQ ID NO: 34980 - protein, 114 aa, Artificial Sequence
  Chemically Synthesized
QVQLQESGGGLVQAGGSLRLSCAASGTISADAEMGWYRQAPGKERELVASIASVLLPYADSVKGRFTISRDNAKNTVYLQMNSLKPEDTAVYYCAAGDDYHDYWGQGTQVTVSS

SEQ ID NO: 34981 - protein, 126 aa, Artificial Sequence
  Chemically Synthesized
QVQLQESGGGLVQAGGSLRLSCAASGYIFDDGDMGWYRQAPGKERELVAGIGYGATTNYADSVKGRFTISRDNAKNTVYLQMNSLKPEDTAVYYCAIDGDGGYPRTSFARTYLYYWGQGTQVTVSS

SEQ ID NO: 34982 - protein, 122 aa, Artificial Sequence
  Chemically Synthesized
QVQLQESGGGLVQAGGSLRLSCAASGYISRGDKMGWYRQAPGKERELVAGINYGSNTYYADSVKGRFTISRDNAKNTVYLQMNSLKPEDTAVYYCAVPDNPSQSGGEGHSYWGQGTQVTVSS

SEQ ID NO: 34983 - protein, 122 aa, Artificial Sequence
  Chemically Synthesized
QVQLQESGGGLVQAGGSLRLSCAASGNISPYSRMGWYRQAPGKERELVATIGVGSITYYADSVKGRFTISRDNAKNTVYLQMNSLKPEDTAVYYCAVNDAYYDPVIDSHNYWGQGTQVTVSS

SEQ ID NO: 34984 - protein, 122 aa, Artificial Sequence
  Chemically Synthesized
QVQLQESGGGLVQAGGSLRLSCAASGNIFGPSDMGWYRQAPGKEREFVAAITDGATTNYADSVKGRFTISRDNAKNTVYLQMNSLKPEDTAVYYCAVDTTADSIRAPYLEYWGQGTQVTVSS

SEQ ID NO: 34985 - protein, 122 aa, Artificial Sequence
  Chemically Synthesized
QVQLQESGGGLVQAGGSLRLSCAASGYIFVTQYMGWYRQAPGKERELVASIDDGGSTNYADSVKGRFTISRDNAKNTVYLQMNSLKPEDTAVYYCAAGIDLRGQDGTIHDYWGQGTQVTVSS

SEQ ID NO: 34986 - protein, 126 aa, Artificial Sequence
  Chemically Synthesized
QVQLQESGGGLVQAGGSLRLSCAASGNISPWYPMGWYRQAPGKERELVATIGYGGSTYYADSVKGRFTISRDNAKNTVYLQMNSLKPEDTAVYYCAVGAPEDRDAEARYDGWHYYWGQGTQVTVSS

SEQ ID NO: 34987 - protein, 117 aa, Artificial Sequence
  Chemically Synthesized
QVQLQESGGGLVQAGGSLRLSCAASGTIFRDDDMGWYRQAPGKERELVATINSVVVPYADSVKGRFTISRDNAKNTVYLQMNSLKPEDTAVYYCAAENGLFYHFYYWGQGTQVTVSS

SEQ ID NO: 34988 - protein, 117 aa, Artificial Sequence
  Chemically Synthesized
QVQLQESGGGLVQAGGSLRLSCAASGSISLGYNMGWYRQAPGKERELLPLLVLVLIPYADSVKGRFTISRDNAKNTVYLQMNSLKPEDTAVYYCAAPYSSTSAYLYWGQGTQVTVSS

SEQ ID NO: 34989 - protein, 121 aa, Artificial Sequence
  Chemically Synthesized
QVQLQESGGGLVQAGGSLRLSCAASGNIFVTRMGWYRQAPGKERELVAAITHGATTYYADSVKGRFTISRDNAKNTVYLQMNSLKPEDTAVYYCAAIALDLWYPGVWLVYWGQGTQVTVSS

SEQ ID NO: 34990 - protein, 117 aa, Artificial Sequence
  Chemically Synthesized
QVQLQESGGGLVQAGGSLRLSCAASGSISWDDNMGWYRQAPGKERELVATINLGGIPYADSVKGRFTISRDNAKNTVYLQMNSLKPEDTAVYYCAARAYGYYWLQYWGQGTQVTVSS

SEQ ID NO: 34991 - protein, 118 aa, Artificial Sequence
  Chemically Synthesized
QVQLQESGGGLVQAGGSLRLSCAASGSIFDLYEMGWYRQAPGKERELVASIAYGASTYYADSVKGRFTISRDNAKNTVYLQMNSLKPEDTAVYYCAVDSWQEPSLSYWGQGTQVTVSS

SEQ ID NO: 34992 - protein, 122 aa, Artificial Sequence
  Chemically Synthesized
QVQLQESGGGLVQAGGSLRLSCAASGNIFQYVDMGWYRQAPGKERELVATIDSGSNTNYADSVKGRFTISRDNAKNTVYLQMNSLKPEDTAVYYCAARAYVSAFRTYTHSYWGQGTQVTVSS

SEQ ID NO: 34993 - protein, 116 aa, Artificial Sequence
  Chemically Synthesized
QVQLQESGGGLVQAGGSLRLSCAASGSISRHSSMGWYRQAPGKERELVATINDGGTTNYADSVKGRFTISRDNAKNTVYLQMNSLKPEDTAVYYCAVVGWYPLGYWGQGTQVTVSS

SEQ ID NO: 34994 - protein, 118 aa, Artificial Sequence
  Chemically Synthesized
QVQLQESGGGLVQAGGSLRLSCAASGSISPDYVMGWYRQAPGKEREFVAAISDGANTNYADSVKGRFTISRDNAKNTVYLQMNSLKPEDTAVYYCAAEPQYGASFAYWGQGTQVTVSS

SEQ ID NO: 34995 - protein, 118 aa, Artificial Sequence
  Chemically Synthesized
QVQLQESGGGLVQAGGSLRLSCAASGSIFYRFPMGWYRQAPGKERELVATIDRGGSTYYADSVKGRFTISRDNAKNTVYLQMNSLKPEDTAVYYCAVYAYAYGFFPYWGQGTQVTVSS

SEQ ID NO: 34996 - protein, 124 aa, Artificial Sequence
  Chemically Synthesized
QVQLQESGGGLVQAGGSLRLSCAASGSISDIDFMGWYRQAPGKEREFVASIGFGGITYYADSVKGRFTISRDNAKNTVYLQMNSLKPEDTAVYYCAVIGGYDTYPTNAEEHTYWGQGTQVTVSS

SEQ ID NO: 34997 - protein, 118 aa, Artificial Sequence
  Chemically Synthesized
QVQLQESGGGLVQAGGSLRLSCAASGTISSYDSAMGWYRQAPGKERELLPLLVKVLVPYADSVKGRFTISRDNAKNTVYLQMNSLKPEDTAVYYCAAGYYVPAGHDYWGQGTQVTVSS

SEQ ID NO: 34998 - protein, 118 aa, Artificial Sequence
  Chemically Synthesized
QVQLQESGGGLVQAGGSLRLSCAASGYIFVSTRMGWYRQAPGKEREFVASITAGGNTNYADSVKGRFTISRDNAKNTVYLQMNSLKPEDTAVYYCAAGFRPYYGYRYWGQGTQVTVSS

SEQ ID NO: 34999 - protein, 120 aa, Artificial Sequence
  Chemically Synthesized
QVQLQESGGGLVQAGGSLRLSCAASGTIFITMGWYRQAPGKEREFVASIGDGAITNYADSVKGRFTISRDNAKNTVYLQMNSLKPEDTAVYYCAVFDDAYDSIDDYLIYWGQGTQVTVSS

SEQ ID NO: 35000 - protein, 118 aa, Artificial Sequence
  Chemically Synthesized
QVQLQESGGGLVQAGGSLRLSCAASGTIFVQRVMGWYRQAPGKEREFVATIAFGTTTNYADSVKGRFTISRDNAKNTVYLQMNSLKPEDTAVYYCAVWSYGVLGHSYWGQGTQVTVSS

SEQ ID NO: 35001 - protein, 122 aa, Artificial Sequence
  Chemically Synthesized
QVQLQESGGGLVQAGGSLRLSCAASGYIFYSTYMGWYRQAPGKERELVASIGHGASTNYADSVKGRFTISRDNAKNTVYLQMNSLKPEDTAVYYCAVGELAQPYYPGTLGYWGQGTQVTVSS

SEQ ID NO: 35002 - protein, 121 aa, Artificial Sequence
  Chemically Synthesized
QVQLQESGGGLVQAGGSLRLSCAASGSIFGADPMGWYRQAPGKEREFVAGISDGSMYQYADSVKGRFTISRDNAKNTVYLQMNSLKPEDTAVYYCAVDTGPDPSGDHLYYWGQGTQVTVSS

SEQ ID NO: 35003 - protein, 127 aa, Artificial Sequence
  Chemically Synthesized
QVQLQESGGGLVQAGGSLRLSCAASGTISYAQDTMGWYRQAPGKERELVATITVGAITYYADSVKGRFTISRDNAKNTVYLQMNSLKPEDTAVYYCAVYVASRGGGYDDPQAYHPYWGQGTQVTVSS

SEQ ID NO: 35004 - protein, 121 aa, Artificial Sequence
  Chemically Synthesized
QVQLQESGGGLVQAGGSLRLSCAASGNISWGGYMGWYRQAPGKERELVAAINSGATTNYADSVKGRFTISRDNAKNTVYLQMNSLKPEDTAVYYCAVADYVTWPEGVLAYWGQGTQVTVSS

SEQ ID NO: 35005 - protein, 118 aa, Artificial Sequence
  Chemically Synthesized
QVQLQESGGGLVQAGGSLRLSCAASGSISQDDWMGWYRQAPGKEREFVAGITYGGSTNYADSVKGRFTISRDNAKNTVYLQMNSLKPEDTAVYYCAADWWYDQDHTYWGQGTQVTVSS

SEQ ID NO: 35006 - protein, 115 aa, Artificial Sequence
  Chemically Synthesized
QVQLQESGGGLVQAGGSLRLSCAASGNISDYTGMGWYRQAPGKERELVASISRGGSTYYADSVKGRFTISRDNAKNTVYLQMNSLKPEDTAVYYCAPWDDEHLYWGQGTQVTVSS

SEQ ID NO: 35007 - protein, 117 aa, Artificial Sequence
  Chemically Synthesized
QVQLQESGGGLVQAGGSLRLSCAASGYIFWFPVMGWYRQAPGKERELVATIDYGANTYYADSVKGRFTISRDNAKNTVYLQMNSLKPEDTAVYYCAVSTTSLRLFYWGQGTQVTVSS

SEQ ID NO: 35008 - protein, 118 aa, Artificial Sequence
  Chemically Synthesized
QVQLQESGGGLVQAGGSLRLSCAASGYISRVWDMGWYRQAPGKEREFVAGISTGATTYYADSVKGRFTISRDNAKNTVYLQMNSLKPEDTAVYYCAASGRYWGVLGYWGQGTQVTVSS

SEQ ID NO: 35009 - protein, 118 aa, Artificial Sequence
  Chemically Synthesized
QVQLQESGGGLVQAGGSLRLSCAASGYISRFLYMGWYRQAPGKEREFVASINRGTITNYADSVKGRFTISRDNAKNTVYLQMNSLKPEDTAVYYCAVIYGIYSTFYYWGQGTQVTVSS

SEQ ID NO: 35010 - protein, 118 aa, Artificial Sequence
  Chemically Synthesized
QVQLQESGGGLVQAGGSLRLSCAASGYISPDDLMGWYRQAPGKERELVASIAFGGSTNYADSVKGRFTISRDNAKNTVYLQMNSLKPEDTAVYYCAVFAGWQGDLEYWGQGTQVTVSS

SEQ ID NO: 35011 - protein, 117 aa, Artificial Sequence
  Chemically Synthesized
QVQLQESGGGLVQAGGSLRLSCAASGNIFQHVYMGWYRQAPGKERELVAGIDQGGNTNYADSVKGRFTISRDNAKNTVYLQMNSLKPEDTAVYYCAARGGTSEYQYWGQGTQVTVSS

SEQ ID NO: 35012 - protein, 118 aa, Artificial Sequence
  Chemically Synthesized
QVQLQESGGGLVQAGGSLRLSCAASGTISISYNMGWYRQAPGKEREFVASIDVGSSTYYADSVKGRFTISRDNAKNTVYLQMNSLKPEDTAVYYCAAHGYYRFTFTYWGQGTQVTVSS

SEQ ID NO: 35013 - protein, 118 aa, Artificial Sequence
  Chemically Synthesized
QVQLQESGGGLVQAGGSLRLSCAASGNIFYDDAMGWYRQAPGKERELVATIAGGGSTNYADSVKGRFTISRDNAKNTVYLQMNSLKPEDTAVYYCAAYYSIADYHKYWGQGTQVTVSS

SEQ ID NO: 35014 - protein, 118 aa, Artificial Sequence
  Chemically Synthesized
QVQLQESGGGLVQAGGSLRLSCAASGNISDYNYMGWYRQAPGKERELVAAINLGGNTNYADSVKGRFTISRDNAKNTVYLQMNSLKPEDTAVYYCAVYASSQVAFTYWGQGTQVTVSS

SEQ ID NO: 35015 - protein, 128 aa, Artificial Sequence
  Chemically Synthesized
QVQLQESGGGLVQAGGSLRLSCAASGTISPLQLMGWYRQAPGKERELVASISSGGSTNYADSVKGRFTISRDNAKNTVYLQMNSLKPEDTAVYYCAVLGSYSDRGTGNSYDQAQHDYWGQGTQVTVSS

SEQ ID NO: 35016 - protein, 118 aa, Artificial Sequence
  Chemically Synthesized
QVQLQESGGGLVQAGGSLRLSCAASGYIFGTSTMGWYRQAPGKERELVASISGGTSTNYADSVKGRFTISRDNAKNTVYLQMNSLKPEDTAVYYCAAGRSWQRYFWYWGQGTQVTVSS

SEQ ID NO: 35017 - protein, 126 aa, Artificial Sequence
  Chemically Synthesized
QVQLQESGGGLVQAGGSLRLSCAASGTIFDSGLMGWYRQAPGKERELVASITSGGSTNYADSVKGRFTISRDNAKNTVYLQMNSLKPEDTAVYYCAALYDYDVRYAARYADEHEYWGQGTQVTVSS

SEQ ID NO: 35018 - protein, 126 aa, Artificial Sequence
  Chemically Synthesized
QVQLQESGGGLVQAGGSLRLSCAASGYISYDGGMGWYRQAPGKERELVAAINYGTSTNYADSVKGRFTISRDNAKNTVYLQMNSLKPEDTAVYYCAVYDNSDYVHDRDGIYYFLYWGQGTQVTVSS

SEQ ID NO: 35019 - protein, 118 aa, Artificial Sequence
  Chemically Synthesized
QVQLQESGGGLVQAGGSLRLSCAASGSISPGSLMGWYRQAPGKERELVAGISYGGSTNYADSVKGRFTISRDNAKNTVYLQMNSLKPEDTAVYYCAAYGSERGYLDYWGQGTQVTVSS

SEQ ID NO: 35020 - protein, 118 aa, Artificial Sequence
  Chemically Synthesized
QVQLQESGGGLVQAGGSLRLSCAASGYISTYIGMGWYRQAPGKERELVASISSGTITYYADSVKGRFTISRDNAKNTVYLQMNSLKPEDTAVYYCAVTWYTPDPYSYWGQGTQVTVSS

SEQ ID NO: 35021 - protein, 118 aa, Artificial Sequence
  Chemically Synthesized
QVQLQESGGGLVQAGGSLRLSCAASGSIFDQPWMGWYRQAPGKEREFVAGITAGSSTNYADSVKGRFTISRDNAKNTVYLQMNSLKPEDTAVYYCAADWYPFTDHTYWGQGTQVTVSS

SEQ ID NO: 35022 - protein, 126 aa, Artificial Sequence
  Chemically Synthesized
QVQLQESGGGLVQAGGSLRLSCAASGTIFDRYSMGWYRQAPGKERELVATIDRGAITYYADSVKGRFTISRDNAKNTVYLQMNSLKPEDTAVYYCAVLFQEDEYDPVYLDYWLYYWGQGTQVTVSS

SEQ ID NO: 35023 - protein, 122 aa, Artificial Sequence
  Chemically Synthesized
QVQLQESGGGLVQAGGSLRLSCAASGTIFGYFFMGWYRQAPGKEREFVATINSGTTTNYADSVKGRFTISRDNAKNTVYLQMNSLKPEDTAVYYCAARDRVVISGGFVYPYWGQGTQVTVSS

SEQ ID NO: 35024 - protein, 122 aa, Artificial Sequence
  Chemically Synthesized
QVQLQESGGGLVQAGGSLRLSCAASGNIFADDYMGWYRQAPGKEREFVAGISFGASTNYADSVKGRFTISRDNAKNTVYLQMNSLKPEDTAVYYCAALDYEHRYSRYYLWYWGQGTQVTVSS

SEQ ID NO: 35025 - protein, 117 aa, Artificial Sequence
  Chemically Synthesized
QVQLQESGGGLVQAGGSLRLSCAASGNISRVGWMGWYRQAPGKEREFVAGINSVLIPYADSVKGRFTISRDNAKNTVYLQMNSLKPEDTAVYYCAADALGGTYFAYWGQGTQVTVSS

SEQ ID NO: 35026 - protein, 121 aa, Artificial Sequence
  Chemically Synthesized
QVQLQESGGGLVQAGGSLRLSCAASGNISDTLMGWYRQAPGKERELVATISPGTNTYYADSVKGRFTISRDNAKNTVYLQMNSLKPEDTAVYYCAAEGGAPSGYNAPHDYWGQGTQVTVSS

SEQ ID NO: 35027 - protein, 118 aa, Artificial Sequence
  Chemically Synthesized
QVQLQESGGGLVQAGGSLRLSCAASGNISIDWRMGWYRQAPGKEREFVASIGPGSTTNYADSVKGRFTISRDNAKNTVYLQMNSLKPEDTAVYYCAAYHNTRPYYYYWGQGTQVTVSS

SEQ ID NO: 35028 - protein, 121 aa, Artificial Sequence
  Chemically Synthesized
QVQLQESGGGLVQAGGSLRLSCAASGTIFRGYDMGWYRQAPGKERELVAAINSVLVPYADSVKGRFTISRDNAKNTVYLQMNSLKPEDTAVYYCAAYYQNDGYYADVHSYWGQGTQVTVSS

SEQ ID NO: 35029 - protein, 122 aa, Artificial Sequence
  Chemically Synthesized
QVQLQESGGGLVQAGGSLRLSCAASGYISRATFMGWYRQAPGKERELVAGIASGSSTYYADSVKGRFTISRDNAKNTVYLQMNSLKPEDTAVYYCAVYGRNSTLKWWYHAYWGQGTQVTVSS

SEQ ID NO: 35030 - protein, 118 aa, Artificial Sequence
  Chemically Synthesized
QVQLQESGGGLVQAGGSLRLSCAASGTIFYTHFMGWYRQAPGKERELVASISPGSSTYYADSVKGRFTISRDNAKNTVYLQMNSLKPEDTAVYYCAVDFFYVAEYDYWGQGTQVTVSS

SEQ ID NO: 35031 - protein, 122 aa, Artificial Sequence
  Chemically Synthesized
QVQLQESGGGLVQAGGSLRLSCAASGNISATWSMGWYRQAPGKERELVAGIAIGSSTNYADSVKGRFTISRDNAKNTVYLQMNSLKPEDTAVYYCAAVDIEPNAYEDDHAYWGQGTQVTVSS

SEQ ID NO: 35032 - protein, 122 aa, Artificial Sequence
  Chemically Synthesized
QVQLQESGGGLVQAGGSLRLSCAASGYISVRGAMGWYRQAPGKERELVAAINGGASTYYADSVKGRFTISRDNAKNTVYLQMNSLKPEDTAVYYCAVYDDGYWHYNNYLQYWGQGTQVTVSS

SEQ ID NO: 35033 - protein, 118 aa, Artificial Sequence
  Chemically Synthesized
QVQLQESGGGLVQAGGSLRLSCAASGTISDRVTMGWYRQAPGKERELVATITYGTITNYADSVKGRFTISRDNAKNTVYLQMNSLKPEDTAVYYCAAVYRARDDHAYWGQGTQVTVSS

SEQ ID NO: 35034 - protein, 122 aa, Artificial Sequence
  Chemically Synthesized
QVQLQESGGGLVQAGGSLRLSCAASGTISERGVMGWYRQAPGKERELVAGIGAGGSTYYADSVKGRFTISRDNAKNTVYLQMNSLKPEDTAVYYCAVEGGVSFPYPDKHLYWGQGTQVTVSS

SEQ ID NO: 35035 - protein, 118 aa, Artificial Sequence
  Chemically Synthesized
QVQLQESGGGLVQAGGSLRLSCAASGSIFDFYLMGWYRQAPGKEREFVASINSGSNTNYADSVKGRFTISRDNAKNTVYLQMNSLKPEDTAVYYCAAYNQVTPPFPYWGQGTQVTVSS

SEQ ID NO: 35036 - protein, 117 aa, Artificial Sequence
  Chemically Synthesized
QVQLQESGGGLVQAGGSLRLSCAASGNIFTNYDMGWYRQAPGKERELVAGIAVGATTNYADSVKGRFTISRDNAKNTVYLQMNSLKPEDTAVYYCAVPSTVWTNMYWGQGTQVTVSS

SEQ ID NO: 35037 - protein, 117 aa, Artificial Sequence
  Chemically Synthesized
QVQLQESGGGLVQAGGSLRLSCAASGSISASSYMGWYRQAPGKEREFVATISAGAITNYADSVKGRFTISRDNAKNTVYLQMNSLKPEDTAVYYCAVPSCRNRVIYWGQGTQVTVSS

SEQ ID NO: 35038 - protein, 118 aa, Artificial Sequence
  Chemically Synthesized
QVQLQESGGGLVQAGGSLRLSCAASGNISSYATMGWYRQAPGKERELVATIAFGSNTNYADSVKGRFTISRDNAKNTVYLQMNSLKPEDTAVYYCAVTWGLARSLGYWGQGTQVTVSS

SEQ ID NO: 35039 - protein, 117 aa, Artificial Sequence
  Chemically Synthesized
QVQLQESGGGLVQAGGSLRLSCAASGTIFVSYAMGWYRQAPGKERELVAAITRGGSTNYADSVKGRFTISRDNAKNTVYLQMNSLKPEDTAVYYCAAWLPIVSVLYWGQGTQVTVSS

SEQ ID NO: 35040 - protein, 122 aa, Artificial Sequence
  Chemically Synthesized
QVQLQESGGGLVQAGGSLRLSCAASGNISVGDAMGWYRQAPGKERELVATITYGANTYYADSVKGRFTISRDNAKNTVYLQMNSLKPEDTAVYYCAVYYDSRTVTTTTRIYWGQGTQVTVSS

SEQ ID NO: 35041 - protein, 126 aa, Artificial Sequence
  Chemically Synthesized
QVQLQESGGGLVQAGGSLRLSCAASGSISTQYPMGWYRQAPGKEREFVATIGGGGTTYYADSVKGRFTISRDNAKNTVYLQMNSLKPEDTAVYYCAVPGAKQYRGRHWYAAFYSYWGQGTQVTVSS

SEQ ID NO: 35042 - protein, 118 aa, Artificial Sequence
  Chemically Synthesized
QVQLQESGGGLVQAGGSLRLSCAASGSISNDVLMGWYRQAPGKERELVAGISSGTTTNYADSVKGRFTISRDNAKNTVYLQMNSLKPEDTAVYYCAVRTKTPYDFAYWGQGTQVTVSS

SEQ ID NO: 35043 - protein, 117 aa, Artificial Sequence
  Chemically Synthesized
QVQLQESGGGLVQAGGSLRLSCAASGTISVSSYMGWYRQAPGKERELVATISDGANTNYADSVKGRFTISRDNAKNTVYLQMNSLKPEDTAVYYCAAGQSSLCTFYWGQGTQVTVSS

SEQ ID NO: 35044 - protein, 118 aa, Artificial Sequence
  Chemically Synthesized
QVQLQESGGGLVQAGGSLRLSCAASGNISWQGGMGWYRQAPGKEREFVAGIGYGSITYYADSVKGRFTISRDNAKNTVYLQMNSLKPEDTAVYYCAATGHSGYHHVYWGQGTQVTVSS

SEQ ID NO: 35045 - protein, 118 aa, Artificial Sequence
  Chemically Synthesized
QVQLQESGGGLVQAGGSLRLSCAASGTIFITRYMGWYRQAPGKEREFVATISLGTITNYADSVKGRFTISRDNAKNTVYLQMNSLKPEDTAVYYCAVYIFTTTALHYWGQGTQVTVSS

SEQ ID NO: 35046 - protein, 118 aa, Artificial Sequence
  Chemically Synthesized
QVQLQESGGGLVQAGGSLRLSCAASGNISWITAMGWYRQAPGKERELVAGINPGTTTNYADSVKGRFTISRDNAKNTVYLQMNSLKPEDTAVYYCAARPDDDLQFAYWGQGTQVTVSS

SEQ ID NO: 35047 - protein, 117 aa, Artificial Sequence
  Chemically Synthesized
QVQLQESGGGLVQAGGSLRLSCAASGTISRVSMGWYRQAPGKERELVATIGYGASTNYADSVKGRFTISRDNAKNTVYLQMNSLKPEDTAVYYCAAPQYYRQYFTYWGQGTQVTVSS

SEQ ID NO: 35048 - protein, 117 aa, Artificial Sequence
  Chemically Synthesized
QVQLQESGGGLVQAGGSLRLSCAASGSISDSTMGWYRQAPGKERELVASINGGGNTNYADSVKGRFTISRDNAKNTVYLQMNSLKPEDTAVYYCAAGRDIVTSYDYWGQGTQVTVSS

SEQ ID NO: 35049 - protein, 118 aa, Artificial Sequence
  Chemically Synthesized
QVQLQESGGGLVQAGGSLRLSCAASGYIFRDAYMGWYRQAPGKEREFVATIAQGANTNYADSVKGRFTISRDNAKNTVYLQMNSLKPEDTAVYYCAVYVAYHYRLRYWGQGTQVTVSS

SEQ ID NO: 35050 - protein, 122 aa, Artificial Sequence
  Chemically Synthesized
QVQLQESGGGLVQAGGSLRLSCAASGNIFVRTGMGWYRQAPGKERELVATINRGATTYYADSVKGRFTISRDNAKNTVYLQMNSLKPEDTAVYYCAVIGQPDGWYKRYLAYWGQGTQVTVSS

SEQ ID NO: 35051 - protein, 122 aa, Artificial Sequence
  Chemically Synthesized
QVQLQESGGGLVQAGGSLRLSCAASGNISVDDYMGWYRQAPGKEREFVAGIGTGGSTNYADSVKGRFTISRDNAKNTVYLQMNSLKPEDTAVYYCAAGYQSRNEWQFGHDYWGQGTQVTVSS

SEQ ID NO: 35052 - protein, 121 aa, Artificial Sequence
  Chemically Synthesized
QVQLQESGGGLVQAGGSLRLSCAASGNISYDFYMGWYRQAPGKERELVAAISNGGTTNYADSVKGRFTISRDNAKNTVYLQMNSLKPEDTAVYYCAVLDGDTSYSSGSMYWGQGTQVTVSS

SEQ ID NO: 35053 - protein, 111 aa, Artificial Sequence
  Chemically Synthesized
QVQLQESGGGLVQAGGSLRLSCAASGTISYGSMGWYRQAPGKERELVAGISAGGTTYYADSVKGRFTISRDNAKNTVYLQMNSLKPEDTAVYYCAAYHIYWGQGTQVTVSS

SEQ ID NO: 35054 - protein, 117 aa, Artificial Sequence
  Chemically Synthesized
QVQLQESGGGLVQAGGSLRLSCAASGSISAPDSMGWYRQAPGKEREFVATLMTVLIPYADSVKGRFTISRDNAKNTVYLQMNSLKPEDTAVYYCAARSIWYEAHGYWGQGTQVTVSS

SEQ ID NO: 35055 - protein, 122 aa, Artificial Sequence
  Chemically Synthesized
QVQLQESGGGLVQAGGSLRLSCAASGYISGYYGMGWYRQAPGKEREFVATIGLGRYYLYADSVKGRFTISRDNAKNTVYLQMNSLKPEDTAVYYCAASADEGVLITGTHAYWGQGTQVTVSS

SEQ ID NO: 35056 - protein, 122 aa, Artificial Sequence
  Chemically Synthesized
QVQLQESGGGLVQAGGSLRLSCAASGNISYASDMGWYRQAPGKERELVAAISIGANTYYADSVKGRFTISRDNAKNTVYLQMNSLKPEDTAVYYCAVTYRTQRKYTSHFRYWGQGTQVTVSS

SEQ ID NO: 35057 - protein, 121 aa, Artificial Sequence
  Chemically Synthesized
QVQLQESGGGLVQAGGSLRLSCAASGTIFLVSMGWYRQAPGKERELVAAINTGGNTNYADSVKGRFTISRDNAKNTVYLQMNSLKPEDTAVYYCAVRGGWIAVLYTRHRYWGQGTQVTVSS

SEQ ID NO: 35058 - protein, 118 aa, Artificial Sequence
  Chemically Synthesized
QVQLQESGGGLVQAGGSLRLSCAASGYISHVGYMGWYRQAPGKEREFVAAITYGTNTYYADSVKGRFTISRDNAKNTVYLQMNSLKPEDTAVYYCAVRYFRYSSYQYWGQGTQVTVSS

SEQ ID NO: 35059 - protein, 116 aa, Artificial Sequence
  Chemically Synthesized
QVQLQESGGGLVQAGGSLRLSCAASGYIFPYVGMGWYRQAPGKERELVAGIGTGATTNYADSVKGRFTISRDNAKNTVYLQMNSLKPEDTAVYYCAVDRRGYWHYWGQGTQVTVSS

SEQ ID NO: 35060 - protein, 121 aa, Artificial Sequence
  Chemically Synthesized
QVQLQESGGGLVQAGGSLRLSCAASGSISSSQLMGWYRQAPGKEREFVPLLLLVLLPYADSVKGRFTISRDNAKNTVYLQMNSLKPEDTAVYYCAVASRQYYVNEVIHYYWGQGTQVTVSS

SEQ ID NO: 35061 - protein, 117 aa, Artificial Sequence
  Chemically Synthesized
QVQLQESGGGLVQAGGSLRLSCAASGNISQYNSMGWYRQAPGKEREFVAGIDIGGNTYYADSVKGRFTISRDNAKNTVYLQMNSLKPEDTAVYYCAAVSGLQSHGYWGQGTQVTVSS

SEQ ID NO: 35062 - protein, 118 aa, Artificial Sequence
  Chemically Synthesized
QVQLQESGGGLVQAGGSLRLSCAASGTILMGWYRQAPGKEREFVAAISTGASTYYADSVKGRFTISRDNAKNTVYLQMNSLKPEDTAVYYCAAIEGGVYDVETRYYYWGQGTQVTVSS

SEQ ID NO: 35063 - protein, 122 aa, Artificial Sequence
  Chemically Synthesized
QVQLQESGGGLVQAGGSLRLSCAASGYIFNDFDMGWYRQAPGKERELVASISYGAITYYADSVKGRFTISRDNAKNTVYLQMNSLKPEDTAVYYCAAWVTSAYRYSSYFYYWGQGTQVTVSS

SEQ ID NO: 35064 - protein, 118 aa, Artificial Sequence
  Chemically Synthesized
QVQLQESGGGLVQAGGSLRLSCAASGTIFYFTRMGWYRQAPGKERELVASIARGAITYYADSVKGRFTISRDNAKNTVYLQMNSLKPEDTAVYYCAAVRAYWHAFDYWGQGTQVTVSS

SEQ ID NO: 35065 - protein, 119 aa, Artificial Sequence
  Chemically Synthesized
QVQLQESGGGLVQAGGSLRLSCAASGSISRGYDMGWYRQAPGKERELVAGIAGGANTYYADSVKGRFTISRDNAKNTVYLQMNSLKPEDTAVYYCAAQGSNSRAYHLYWGQGTQVTVSS

SEQ ID NO: 35066 - protein, 118 aa, Artificial Sequence
  Chemically Synthesized
QVQLQESGGGLVQAGGSLRLSCAASGTIFTSVSMGWYRQAPGKERELVATIAEGASTNYADSVKGRFTISRDNAKNTVYLQMNSLKPEDTAVYYCAVDNYYSCLAWYWGQGTQVTVSS

SEQ ID NO: 35067 - protein, 118 aa, Artificial Sequence
  Chemically Synthesized
QVQLQESGGGLVQAGGSLRLSCAASGNISFQRRMGWYRQAPGKERELVATISYGTNTYYADSVKGRFTISRDNAKNTVYLQMNSLKPEDTAVYYCAVYAAYRVGLRYWGQGTQVTVSS

SEQ ID NO: 35068 - protein, 118 aa, Artificial Sequence
  Chemically Synthesized
QVQLQESGGGLVQAGGSLRLSCAASGTISTAYTMGWYRQAPGKERELVAGITGGASTNYADSVKGRFTISRDNAKNTVYLQMNSLKPEDTAVYYCAAIYYAQGDLYYWGQGTQVTVSS

SEQ ID NO: 35069 - protein, 111 aa, Artificial Sequence
  Chemically Synthesized
QVQLQESGGGLVQAGGSLRLSCAASGYISGTRDMGWYRQAPGKERELVATYYADSVKGRFTISRDNAKNTVYLQMNSLKPEDTAVYYCAAPIYYSSNLVYWGQGTQVTVSS

SEQ ID NO: 35070 - protein, 118 aa, Artificial Sequence
  Chemically Synthesized
QVQLQESGGGLVQAGGSLRLSCAASGYISVADNMGWYRQAPGKERELVAAITSGGITYYADSVKGRFTISRDNAKNTVYLQMNSLKPEDTAVYYCAAVAPTGYALLYWGQGTQVTVSS

SEQ ID NO: 35071 - protein, 122 aa, Artificial Sequence
  Chemically Synthesized
QVQLQESGGGLVQAGGSLRLSCAASGNISERDDMGWYRQAPGKERELVAAISTGTNTNYADSVKGRFTISRDNAKNTVYLQMNSLKPEDTAVYYCAVYQSLAPRVAWTHPYWGQGTQVTVSS

SEQ ID NO: 35072 - protein, 122 aa, Artificial Sequence
  Chemically Synthesized
QVQLQESGGGLVQAGGSLRLSCAASGNIFGQDSMGWYRQAPGKEREFVAGIGYGGTTYYADSVKGRFTISRDNAKNTVYLQMNSLKPEDTAVYYCAVRHNAPWYYETYFDYWGQGTQVTVSS

SEQ ID NO: 35073 - protein, 112 aa, Artificial Sequence
  Chemically Synthesized
QVQLQESGGGLVQAGGSLRLSCAASGYISPVIWMGWYRQAPGKERELVATINYGGITYYADSVKGRFTISRDNAKNTVYLQMNSLKPEDTAVYYCAAPLAYWGQGTQVTVSS

SEQ ID NO: 35074 - protein, 126 aa, Artificial Sequence
  Chemically Synthesized
QVQLQESGGGLVQAGGSLRLSCAASGTIFHPYAMGWYRQAPGKEREFVATIGNGTNTYYADSVKGRFTISRDNAKNTVYLQMNSLKPEDTAVYYCAVDRYYLGADDVLHKRSHQYWGQGTQVTVSS

SEQ ID NO: 35075 - protein, 122 aa, Artificial Sequence
  Chemically Synthesized
QVQLQESGGGLVQAGGSLRLSCAASGYISYPDFMGWYRQAPGKERELVAAIGAGGSTNYADSVKGRFTISRDNAKNTVYLQMNSLKPEDTAVYYCAVIGTVTDTRAYRFGYWGQGTQVTVSS

SEQ ID NO: 35076 - protein, 121 aa, Artificial Sequence
  Chemically Synthesized
QVQLQESGGGLVQAGGSLRLSCAASGNISGFVGMGWYRQAPGKERELVASIDPGTITYYADSVKGRFTISRDNAKNTVYLQMNSLKPEDTAVYYCAAYIDGGIGSFRTLYWGQGTQVTVSS

SEQ ID NO: 35077 - protein, 116 aa, Artificial Sequence
  Chemically Synthesized
QVQLQESGGGLVQAGGSLRLSCAASGSISDYNVMGWYRQAPGKERELPLLITVVIPYADSVKGRFTISRDNAKNTVYLQMNSLKPEDTAVYYCAVAGSDVGIHQYWGQGTQVTVSS

SEQ ID NO: 35078 - protein, 111 aa, Artificial Sequence
  Chemically Synthesized
QVQLQESGGGLVQAGGSLRLSCAASGNIFVQYLMGWYRQAPGKERELVASIAYGTTTNYADSVKGRFTISRDNAKNTVYLQMNSLKPEDTAVYYCADHPYWGQGTQVTVSS

SEQ ID NO: 35079 - protein, 126 aa, Artificial Sequence
  Chemically Synthesized
QVQLQESGGGLVQAGGSLRLSCAASGSIFANRSMGWYRQAPGKEREFVAAITAGSTTYYADSVKGRFTISRDNAKNTVYLQMNSLKPEDTAVYYCAVYYNWFGHYDRPYRRWHSYWGQGTQVTVSS

SEQ ID NO: 35080 - protein, 126 aa, Artificial Sequence
  Chemically Synthesized
QVQLQESGGGLVQAGGSLRLSCAASGYISRYARMGWYRQAPGKEREFVASITRGATTNYADSVKGRFTISRDNAKNTVYLQMNSLKPEDTAVYYCAVGYGLIYRYDSFGDIVYRYWGQGTQVTVSS

SEQ ID NO: 35081 - protein, 126 aa, Artificial Sequence
  Chemically Synthesized
QVQLQESGGGLVQAGGSLRLSCAASGTISYILPMGWYRQAPGKEREFVAGIGYGGITNYADSVKGRFTISRDNAKNTVYLQMNSLKPEDTAVYYCAAPYWWWRLLGGWYWFRHYYWGQGTQVTVSS

SEQ ID NO: 35082 - protein, 115 aa, Artificial Sequence
  Chemically Synthesized
QVQLQESGGGLVQAGGSLRLSCAASGSISDVTMGWYRQAPGKERELVASISLGTITNYADSVKGRFTISRDNAKNTVYLQMNSLKPEDTAVYYCALSTVVNTIYWGQGTQVTVSS

SEQ ID NO: 35083 - protein, 126 aa, Artificial Sequence
  Chemically Synthesized
QVQLQESGGGLVQAGGSLRLSCAASGSISNKYRMGWYRQAPGKERELVAAIAGGGNTNYADSVKGRFTISRDNAKNTVYLQMNSLKPEDTAVYYCAANSYRYTSRWRNGYYYLWYWGQGTQVTVSS

SEQ ID NO: 35084 - protein, 118 aa, Artificial Sequence
  Chemically Synthesized
QVQLQESGGGLVQAGGSLRLSCAASGTISLANVMGWYRQAPGKEREFVATINRGTITNYADSVKGRFTISRDNAKNTVYLQMNSLKPEDTAVYYCAAVGYRWSDLGYWGQGTQVTVSS

SEQ ID NO: 35085 - protein, 122 aa, Artificial Sequence
  Chemically Synthesized
QVQLQESGGGLVQAGGSLRLSCAASGYISVHSDMGWYRQAPGKEREFVATIASGTTTNYADSVKGRFTISRDNAKNTVYLQMNSLKPEDTAVYYCAASDYLWHYSGYAHHYWGQGTQVTVSS

SEQ ID NO: 35086 - protein, 118 aa, Artificial Sequence
  Chemically Synthesized
QVQLQESGGGLVQAGGSLRLSCAASGTIFGIVYMGWYRQAPGKERELVAAIAHGGNTNYADSVKGRFTISRDNAKNTVYLQMNSLKPEDTAVYYCAVYQWDVNGYYYWGQGTQVTVSS

SEQ ID NO: 35087 - protein, 110 aa, Artificial Sequence
  Chemically Synthesized
QVQLQESGGGLVQAGGSLRLSCAASGNISHRGFMGWYRQAPGKERELVAGINVGSSTYYADSVKGRFTISRDNAKNTVYLQMNSLKPEDTAVYYCAALYWGQGTQVTVSS

SEQ ID NO: 35088 - protein, 119 aa, Artificial Sequence
  Chemically Synthesized
QVQLQESGGGLVQAGGSLRLSCAASGNISYGPYMGWYRQAPGKERELVASIGAGSITYYADSVKGRFTISRDNAKNTVYLQMNSLKPEDTAVYYCAVRDTASRADHDYWGQGTQVTVSS

SEQ ID NO: 35089 - protein, 118 aa, Artificial Sequence
  Chemically Synthesized
QVQLQESGGGLVQAGGSLRLSCAASGTISYDRDMGWYRQAPGKERELVASISGGATTYYADSVKGRFTISRDNAKNTVYLQMNSLKPEDTAVYYCAANSDDDSLYQYWGQGTQVTVSS

SEQ ID NO: 35090 - protein, 118 aa, Artificial Sequence
  Chemically Synthesized
QVQLQESGGGLVQAGGSLRLSCAASGTISARKDMGWYRQAPGKERELVATIGDGTSTNYADSVKGRFTISRDNAKNTVYLQMNSLKPEDTAVYYCAVPYDNADAFPYWGQGTQVTVSS

SEQ ID NO: 35091 - protein, 121 aa, Artificial Sequence
  Chemically Synthesized
QVQLQESGGGLVQAGGSLRLSCAASGNISASLMGWYRQAPGKERELVAAISKGTTTNYADSVKGRFTISRDNAKNTVYLQMNSLKPEDTAVYYCAVRTKPYGGGRYGHDYWGQGTQVTVSS

SEQ ID NO: 35092 - protein, 107 aa, Artificial Sequence
  Chemically Synthesized
QVQLQESGGGLVQAGGSLRLSCAASGYISEYALMGWYRQAPGKEREFVASINVVPYADSVKGRFTISRDNAKNTVYLQMNSLKPEDTAVYYCAYTYWGQGTQVTVSS

SEQ ID NO: 35093 - protein, 122 aa, Artificial Sequence
  Chemically Synthesized
QVQLQESGGGLVQAGGSLRLSCAASGNIFAYVGMGWYRQAPGKEREFVATINYGATTNYADSVKGRFTISRDNAKNTVYLQMNSLKPEDTAVYYCAASWVPESQREGGHSYWGQGTQVTVSS

SEQ ID NO: 35094 - protein, 118 aa, Artificial Sequence
  Chemically Synthesized
QVQLQESGGGLVQAGGSLRLSCAASGNISHPYSMGWYRQAPGKEREFVASISRGANTNYADSVKGRFTISRDNAKNTVYLQMNSLKPEDTAVYYCAVWPWRYRHYRYWGQGTQVTVSS

SEQ ID NO: 35095 - protein, 117 aa, Artificial Sequence
  Chemically Synthesized
QVQLQESGGGLVQAGGSLRLSCAASGNISTSTMGWYRQAPGKERELVAAISTGTNTYYADSVKGRFTISRDNAKNTVYLQMNSLKPEDTAVYYCAVQWSYISSHVYWGQGTQVTVSS

SEQ ID NO: 35096 - protein, 121 aa, Artificial Sequence
  Chemically Synthesized
QVQLQESGGGLVQAGGSLRLSCAASGTIFRPNFMGWYRQAPGKEREFVATIDQGTSTNYADSVKGRFTISRDNAKNTVYLQMNSLKPEDTAVYYCAVYNSGGGVLYYYRYWGQGTQVTVSS

SEQ ID NO: 35097 - protein, 117 aa, Artificial Sequence
  Chemically Synthesized
QVQLQESGGGLVQAGGSLRLSCAASGYISWNATMGWYRQAPGKEREFVAGIDLGAITYYADSVKGRFTISRDNAKNTVYLQMNSLKPEDTAVYYCAAYTGAYVHDYWGQGTQVTVSS

SEQ ID NO: 35098 - protein, 117 aa, Artificial Sequence
  Chemically Synthesized
QVQLQESGGGLVQAGGSLRLSCAASGSISTVYAMGWYRQAPGKEREFVAAIGVGVLPYADSVKGRFTISRDNAKNTVYLQMNSLKPEDTAVYYCAANWDDQYTFVYWGQGTQVTVSS

SEQ ID NO: 35099 - protein, 111 aa, Artificial Sequence
  Chemically Synthesized
QVQLQESGGGLVQAGGSLRLSCAASGTISSPLSMGWYRQAPGKEREFVASIDTGASTYYADSVKGRFTISRDNAKNTVYLQMNSLKPEDTAVYYCAAHAYWGQGTQVTVSS

SEQ ID NO: 35100 - protein, 120 aa, Artificial Sequence
  Chemically Synthesized
QVQLQESGGGLVQAGGSLRLSCAASGNIFASLMGWYRQAPGKEREFVAAIGTGTSTNYADSVKGRFTISRDNAKNTVYLQMNSLKPEDTAVYYCAVAHPRGDGYYYSIYWGQGTQVTVSS

SEQ ID NO: 35101 - protein, 113 aa, Artificial Sequence
  Chemically Synthesized
QVQLQESGGGLVQAGGSLRLSCAASGTIFGGQTMGWYRQAPGKERELVAGINYGGNTNYADSVKGRFTISRDNAKNTVYLQMNSLKPEDTAVYYCAAHSHLYWGQGTQVTVSS

SEQ ID NO: 35102 - protein, 115 aa, Artificial Sequence
  Chemically Synthesized
QVQLQESGGGLVQAGGSLRLSCAASGNIFTTIYMGWYRQAPGKERELVAAISAGGNTYADSVKGRFTISRDNAKNTVYLQMNSLKPEDTAVYYCAADVTSYHVYWGQGTQVTVSS

SEQ ID NO: 35103 - protein, 120 aa, Artificial Sequence
  Chemically Synthesized
QVQLQESGGGLVQAGGSLRLSCAASGYISEQGVMGWYRQAPGKERELVAGITWGTNTNYADSVKGRFTISRDNAKNTVYLQMNSLKPEDTAVYYCAFGRLLSVVRVSMYWGQGTQVTVSS

SEQ ID NO: 35104 - protein, 118 aa, Artificial Sequence
  Chemically Synthesized
QVQLQESGGGLVQAGGSLRLSCAASGSISEPRGMGWYRQAPGKEREFVAGIDYGATTYYADSVKGRFTISRDNAKNTVYLQMNSLKPEDTAVYYCAVSLTNRDYYAYWGQGTQVTVSS

SEQ ID NO: 35105 - protein, 121 aa, Artificial Sequence
  Chemically Synthesized
QVQLQESGGGLVQAGGSLRLSCAASGTISGIAVMGWYRQAPGKERELVATINVGGNTYYADSVKGRFTISRDNAKNTVYLQMNSLKPEDTAVYYCAVHAYQPAETLTVFYWGQGTQVTVSS

SEQ ID NO: 35106 - protein, 122 aa, Artificial Sequence
  Chemically Synthesized
QVQLQESGGGLVQAGGSLRLSCAASGNIFSGWFMGWYRQAPGKERELVATIDVGSNTNYADSVKGRFTISRDNAKNTVYLQMNSLKPEDTAVYYCAAGYHDTYLSTDDHVYWGQGTQVTVSS

SEQ ID NO: 35107 - protein, 122 aa, Artificial Sequence
  Chemically Synthesized
QVQLQESGGGLVQAGGSLRLSCAASGSISNYLDMGWYRQAPGKERELVASIGYGGTTYYADSVKGRFTISRDNAKNTVYLQMNSLKPEDTAVYYCAARDVNSGNYYSPLVYWGQGTQVTVSS

SEQ ID NO: 35108 - protein, 125 aa, Artificial Sequence
  Chemically Synthesized
QVQLQESGGGLVQAGGSLRLSCAASGNIFGSLDMGWYRQAPGKERELVAGINIGTTTNYADSVKGRFTISRDNAKNTVYLQMNSLKPEDTAVYYCAALDLGNYDSNLYVRALAYWGQGTQVTVSS

SEQ ID NO: 35109 - protein, 126 aa, Artificial Sequence
  Chemically Synthesized
QVQLQESGGGLVQAGGSLRLSCAASGNISEYRIMGWYRQAPGKEREFVATIDGGGSTYYADSVKGRFTISRDNAKNTVYLQMNSLKPEDTAVYYCAVTGQGEDYDNTNIDAYYPYWGQGTQVTVSS

SEQ ID NO: 35110 - protein, 125 aa, Artificial Sequence
  Chemically Synthesized
QVQLQESGGGLVQAGGSLRLSCAASGTIFWNAVMGWYRQAPGKEREFVAGITVGSTNYADSVKGRFTISRDNAKNTVYLQMNSLKPEDTAVYYCAVRGQDEYDDDGVDDTYYPYWGQGTQVTVSS

SEQ ID NO: 35111 - protein, 125 aa, Artificial Sequence
  Chemically Synthesized
QVQLQESGGGLVQAGGSLRLSCAASGSISRSYPMGWYRQAPGKEREFVAGITGGTTNYADSVKGRFTISRDNAKNTVYLQMNSLKPEDTAVYYCAVEGIQYYDDVRYHKDDYDYWGQGTQVTVSS

SEQ ID NO: 35112 - protein, 117 aa, Artificial Sequence
  Chemically Synthesized
QVQLQESGGGLVQAGGSLRLSCAASGNISAYDYMGWYRQAPGKEREFVATIDYGTITNYADSVKGRFTISRDNAKNTVYLQMNSLKPEDTAVYYCAVVDAITTVIYWGQGTQVTVSS

SEQ ID NO: 35113 - protein, 115 aa, Artificial Sequence
  Chemically Synthesized
QVQLQESGGGLVQAGGSLRLSCAASGTIFARGRMGWYRQAPGKERELVASINIGTITNYADSVKGRFTISRDNAKNTVYLQMNSLKPEDTAVYYCAADDFYYSYWGQGTQVTVSS

SEQ ID NO: 35114 - protein, 118 aa, Artificial Sequence
  Chemically Synthesized
QVQLQESGGGLVQAGGSLRLSCAASGYISYWQYMGWYRQAPGKEREFVAGITTGSITNYADSVKGRFTISRDNAKNTVYLQMNSLKPEDTAVYYCAARDTYRYAYWYWGQGTQVTVSS

SEQ ID NO: 35115 - protein, 121 aa, Artificial Sequence
  Chemically Synthesized
QVQLQESGGGLVQAGGSLRLSCAASGYIFYSTYMGWYRQAPGKEREFVATIGSVVVPYADSVKGRFTISRDNAKNTVYLQMNSLKPEDTAVYYCAVKDLALFQGYWKLTYWGQGTQVTVSS

SEQ ID NO: 35116 - protein, 122 aa, Artificial Sequence
  Chemically Synthesized
QVQLQESGGGLVQAGGSLRLSCAASGSISPNWDMGWYRQAPGKERELVASIGYGGTTNYADSVKGRFTISRDNAKNTVYLQMNSLKPEDTAVYYCAAVRRGDRGYSHYHYYWGQGTQVTVSS

SEQ ID NO: 35117 - protein, 118 aa, Artificial Sequence
  Chemically Synthesized
QVQLQESGGGLVQAGGSLRLSCAASGTISLDSGMGWYRQAPGKERELVAAIDDGTNTNYADSVKGRFTISRDNAKNTVYLQMNSLKPEDTAVYYCAADHHNNIYLAYWGQGTQVTVSS

SEQ ID NO: 35118 - protein, 126 aa, Artificial Sequence
  Chemically Synthesized
QVQLQESGGGLVQAGGSLRLSCAASGSISPDSRMGWYRQAPGKERELVAGITGGAITNYADSVKGRFTISRDNAKNTVYLQMNSLKPEDTAVYYCAADYDDGRTHPRDESSLHVYWGQGTQVTVSS

SEQ ID NO: 35119 - protein, 117 aa, Artificial Sequence
  Chemically Synthesized
QVQLQESGGGLVQAGGSLRLSCAASGSISNTVFMGWYRQAPGKERELVAAINSVLLPYADSVKGRFTISRDNAKNTVYLQMNSLKPEDTAVYYCAAETTGGYYHVYWGQGTQVTVSS

SEQ ID NO: 35120 - protein, 118 aa, Artificial Sequence
  Chemically Synthesized
QVQLQESGGGLVQAGGSLRLSCAASGTISGYHGMGWYRQAPGKEREFVATINYGANTYYADSVKGRFTISRDNAKNTVYLQMNSLKPEDTAVYYCAADVGANVLFDYWGQGTQVTVSS

SEQ ID NO: 35121 - protein, 118 aa, Artificial Sequence
  Chemically Synthesized
QVQLQESGGGLVQAGGSLRLSCAASGNIFAYYAMGWYRQAPGKERELVASISVGGTTNYADSVKGRFTISRDNAKNTVYLQMNSLKPEDTAVYYCAVIYYDGLYHGYWGQGTQVTVSS

SEQ ID NO: 35122 - protein, 118 aa, Artificial Sequence
  Chemically Synthesized
QVQLQESGGGLVQAGGSLRLSCAASGNISQSTFMGWYRQAPGKEREFVAGITYGSITYYADSVKGRFTISRDNAKNTVYLQMNSLKPEDTAVYYCAVDDHKVAYLYYWGQGTQVTVSS

SEQ ID NO: 35123 - protein, 121 aa, Artificial Sequence
  Chemically Synthesized
QVQLQESGGGLVQAGGSLRLSCAASGSISYPNTMGWYRQAPGKEREFVAAITYGGTTYYADSVKGRFTISRDNAKNTVYLQMNSLKPEDTAVYYCAVYARAYPAYSDLLYWGQGTQVTVSS

SEQ ID NO: 35124 - protein, 118 aa, Artificial Sequence
  Chemically Synthesized
QVQLQESGGGLVQAGGSLRLSCAASGYISGRDDMGWYRQAPGKEREFVATITGGTSTNYADSVKGRFTISRDNAKNTVYLQMNSLKPEDTAVYYCAARDADLSDHPYWGQGTQVTVSS

SEQ ID NO: 35125 - protein, 122 aa, Artificial Sequence
  Chemically Synthesized
QVQLQESGGGLVQAGGSLRLSCAASGNISRTDRMGWYRQAPGKERELVASISQGASTYYADSVKGRFTISRDNAKNTVYLQMNSLKPEDTAVYYCAVHDARLRDGPSAFEYWGQGTQVTVSS

SEQ ID NO: 35126 - protein, 122 aa, Artificial Sequence
  Chemically Synthesized
QVQLQESGGGLVQAGGSLRLSCAASGTISNLLAMGWYRQAPGKERELVATINYGGITYYADSVKGRFTISRDNAKNTVYLQMNSLKPEDTAVYYCAADDTIDDFQSPYHPYWGQGTQVTVSS

SEQ ID NO: 35127 - protein, 127 aa, Artificial Sequence
  Chemically Synthesized
QVQLQESGGGLVQAGGSLRLSCAASGTIFPHERMGWYRQAPGKEREFVATIDHGESATNYADSVKGRFTISRDNAKNTVYLQMNSLKPEDTAVYYCAVIQGEGYWFRYQDTNDHHYWGQGTQVTVSS

SEQ ID NO: 35128 - protein, 110 aa, Artificial Sequence
  Chemically Synthesized
QVQLQESGGGLVQAGGSLRLSCAASGTISIWRYMGWYRQAPGKERELVASITVGTSTYYADSVKGRFTISRDNAKNTVYLQMNSLKPEDTAVYYCAFDYWGQGTQVTVSS

SEQ ID NO: 35129 - protein, 118 aa, Artificial Sequence
  Chemically Synthesized
QVQLQESGGGLVQAGGSLRLSCAASGYISVVYTMGWYRQAPGKERELVAGIDGGGSTNYADSVKGRFTISRDNAKNTVYLQMNSLKPEDTAVYYCAAYYDRAASFPYWGQGTQVTVSS

SEQ ID NO: 35130 - protein, 117 aa, Artificial Sequence
  Chemically Synthesized
QVQLQESGGGLVQAGGSLRLSCAASGNISALHVMGWYRQAPGKEREFVAGIGVGGSTNYADSVKGRFTISRDNAKNTVYLQMNSLKPEDTAVYYCAVYPAGDTHYYWGQGTQVTVSS

SEQ ID NO: 35131 - protein, 122 aa, Artificial Sequence
  Chemically Synthesized
QVQLQESGGGLVQAGGSLRLSCAASGTISSDLSMGWYRQAPGKEREFVASIAEGTTTYYADSVKGRFTISRDNAKNTVYLQMNSLKPEDTAVYYCAVLDHLIDYLEDILAYWGQGTQVTVSS

SEQ ID NO: 35132 - protein, 122 aa, Artificial Sequence
  Chemically Synthesized
QVQLQESGGGLVQAGGSLRLSCAASGTISTYAIMGWYRQAPGKEREFVAGISYGTSTYYADSVKGRFTISRDNAKNTVYLQMNSLKPEDTAVYYCAAGYDDGDYYQDELSYWGQGTQVTVSS

SEQ ID NO: 35133 - protein, 122 aa, Artificial Sequence
  Chemically Synthesized
QVQLQESGGGLVQAGGSLRLSCAASGTISISDYMGWYRQAPGKERELVATIDDGGITNYADSVKGRFTISRDNAKNTVYLQMNSLKPEDTAVYYCAAELLGIFYYVYKYRYWGQGTQVTVSS

SEQ ID NO: 35134 - protein, 126 aa, Artificial Sequence
  Chemically Synthesized
QVQLQESGGGLVQAGGSLRLSCAASGNIFLSYSMGWYRQAPGKERELVAGITYGGNTNYADSVKGRFTISRDNAKNTVYLQMNSLKPEDTAVYYCAAAKAVKSRYQQGFSFEYDYWGQGTQVTVSS

SEQ ID NO: 35135 - protein, 123 aa, Artificial Sequence
  Chemically Synthesized
QVQLQESGGGLVQAGGSLRLSCAASGTISSAYDMGWYRQAPGKEREFVATIDEGTITNYADSVKGRFTISRDNAKNTVYLQMNSLKPEDTAVYYCAVWGQSYYAVDEPTYGYWGQGTQVTVSS

SEQ ID NO: 35136 - protein, 118 aa, Artificial Sequence
  Chemically Synthesized
QVQLQESGGGLVQAGGSLRLSCAASGTIFTDTNMGWYRQAPGKERELVAGIGVGANTYYADSVKGRFTISRDNAKNTVYLQMNSLKPEDTAVYYCAVYTGGPLAHAYWGQGTQVTVSS

SEQ ID NO: 35137 - protein, 118 aa, Artificial Sequence
  Chemically Synthesized
QVQLQESGGGLVQAGGSLRLSCAASGSIFRKVQMGWYRQAPGKEREFVAAITYGSITYYADSVKGRFTISRDNAKNTVYLQMNSLKPEDTAVYYCAADLGYLWAHDYWGQGTQVTVSS

SEQ ID NO: 35138 - protein, 118 aa, Artificial Sequence
  Chemically Synthesized
QVQLQESGGGLVQAGGSLRLSCAASGYIFGVVWMGWYRQAPGKEREFVAGIAPGSNTNYADSVKGRFTISRDNAKNTVYLQMNSLKPEDTAVYYCAVTWYRAYAHVYWGQGTQVTVSS

SEQ ID NO: 35139 - protein, 122 aa, Artificial Sequence
  Chemically Synthesized
QVQLQESGGGLVQAGGSLRLSCAASGYIFYKRRMGWYRQAPGKERELVAGIGYGGSTNYADSVKGRFTISRDNAKNTVYLQMNSLKPEDTAVYYCAVLKGNPYTGYYTYPYWGQGTQVTVSS

SEQ ID NO: 35140 - protein, 121 aa, Artificial Sequence
  Chemically Synthesized
QVQLQESGGGLVQAGGSLRLSCAASGSIFDSLYMGWYRQAPGKEREFVATITSGGLPYADSVKGRFTISRDNAKNTVYLQMNSLKPEDTAVYYCAVDPSEGTTLYYSHLYWGQGTQVTVSS

SEQ ID NO: 35141 - protein, 118 aa, Artificial Sequence
  Chemically Synthesized
QVQLQESGGGLVQAGGSLRLSCAASGNISSLRPMGWYRQAPGKERELVAAIATGASTYYADSVKGRFTISRDNAKNTVYLQMNSLKPEDTAVYYCAVSTWDNDIYWYWGQGTQVTVSS

SEQ ID NO: 35142 - protein, 118 aa, Artificial Sequence
  Chemically Synthesized
QVQLQESGGGLVQAGGSLRLSCAASGSISKDVDMGWYRQAPGKEREFVAAITDGSTTNYADSVKGRFTISRDNAKNTVYLQMNSLKPEDTAVYYCAVYLQYVDIYYYWGQGTQVTVSS

SEQ ID NO: 35143 - protein, 118 aa, Artificial Sequence
  Chemically Synthesized
QVQLQESGGGLVQAGGSLRLSCAASGSIFDKLSMGWYRQAPGKERELVATISHGTNTYYADSVKGRFTISRDNAKNTVYLQMNSLKPEDTAVYYCAVPIYYDSLFPYWGQGTQVTVSS

SEQ ID NO: 35144 - protein, 118 aa, Artificial Sequence
  Chemically Synthesized
QVQLQESGGGLVQAGGSLRLSCAASGTISYSPYMGWYRQAPGKERELVASIAYGTITNYADSVKGRFTISRDNAKNTVYLQMNSLKPEDTAVYYCAADVYDTLQYYYWGQGTQVTVSS

SEQ ID NO: 35145 - protein, 117 aa, Artificial Sequence
  Chemically Synthesized
QVQLQESGGGLVQAGGSLRLSCAASGTIFRVPGMGWYRQAPGKEREFVATITRGANTNYADSVKGRFTISRDNAKNTVYLQMNSLKPEDTAVYYCAVIVPWYVYPYWGQGTQVTVSS

SEQ ID NO: 35146 - protein, 125 aa, Artificial Sequence
  Chemically Synthesized
QVQLQESGGGLVQAGGSLRLSCAASGTISDHNRMGWYRQAPGKERELVATINYGTITYYADSVKGRFTISRDNAKNTVYLQMNSLKPEDTAVYYCAADYVPFYNYDGVGKLTLYWGQGTQVTVSS

SEQ ID NO: 35147 - protein, 116 aa, Artificial Sequence
  Chemically Synthesized
QVQLQESGGGLVQAGGSLRLSCAASGSIFPSEYMGWYRQAPGKEREFVASIASGVPYADSVKGRFTISRDNAKNTVYLQMNSLKPEDTAVYYCAVVSVAPYYFPYWGQGTQVTVSS

SEQ ID NO: 35148 - protein, 110 aa, Artificial Sequence
  Chemically Synthesized
QVQLQESGGGLVQAGGSLRLSCAASGNIFDRDPMGWYRQAPGKEREFVASIAPGATTNYADSVKGRFTISRDNAKNTVYLQMNSLKPEDTAVYYCAHGYWGQGTQVTVSS

SEQ ID NO: 35149 - protein, 118 aa, Artificial Sequence
  Chemically Synthesized
QVQLQESGGGLVQAGGSLRLSCAASGYISGSTDMGWYRQAPGKEREFVATITVGGITNYADSVKGRFTISRDNAKNTVYLQMNSLKPEDTAVYYCAADDRVYNRLLYWGQGTQVTVSS

SEQ ID NO: 35150 - protein, 117 aa, Artificial Sequence
  Chemically Synthesized
QVQLQESGGGLVQAGGSLRLSCAASGTIFTDWSMGWYRQAPGKERELVAAIADGGNTYYADSVKGRFTISRDNAKNTVYLQMNSLKPEDTAVYYCALVTTSTSTLYWGQGTQVTVSS

SEQ ID NO: 35151 - protein, 117 aa, Artificial Sequence
  Chemically Synthesized
QVQLQESGGGLVQAGGSLRLSCAASGSIFVLTYMGWYRQAPGKERELVATITTGGSTNYADSVKGRFTISRDNAKNTVYLQMNSLKPEDTAVYYCAVRRYNDAGHYWGQGTQVTVSS

SEQ ID NO: 35152 - protein, 122 aa, Artificial Sequence
  Chemically Synthesized
QVQLQESGGGLVQAGGSLRLSCAASGSIFDRIYMGWYRQAPGKERELVASISDGGITNYADSVKGRFTISRDNAKNTVYLQMNSLKPEDTAVYYCAALSAGDNAYSTGHDYWGQGTQVTVSS

SEQ ID NO: 35153 - protein, 122 aa, Artificial Sequence
  Chemically Synthesized
QVQLQESGGGLVQAGGSLRLSCAASGTISIVVFMGWYRQAPGKEREFVAAISEGGTTYYADSVKGRFTISRDNAKNTVYLQMNSLKPEDTAVYYCAVTTRRGESGTEPLNYWGQGTQVTVSS

SEQ ID NO: 35154 - protein, 117 aa, Artificial Sequence
  Chemically Synthesized
QVQLQESGGGLVQAGGSLRLSCAASGSISDADFMGWYRQAPGKEREFAGIATGGTTNYADSVKGRFTISRDNAKNTVYLQMNSLKPEDTAVYYCAVPRPRYLLFDYWGQGTQVTVSS

SEQ ID NO: 35155 - protein, 126 aa, Artificial Sequence
  Chemically Synthesized
QVQLQESGGGLVQAGGSLRLSCAASGNISFYSYMGWYRQAPGKEREFVAGISTGSNTNYADSVKGRFTISRDNAKNTVYLQMNSLKPEDTAVYYCAVRRAEGWRYSAAGILYHSYWGQGTQVTVSS

SEQ ID NO: 35156 - protein, 125 aa, Artificial Sequence
  Chemically Synthesized
QVQLQESGGGLVQAGGSLRLSCAASGNISATSMGWYRQAPGKEREFVASIGYGGTTYYADSVKGRFTISRDNAKNTVYLQMNSLKPEDTAVYYCAVYRVPYNTYVDGKLLTYPYWGQGTQVTVSS

SEQ ID NO: 35157 - protein, 118 aa, Artificial Sequence
  Chemically Synthesized
QVQLQESGGGLVQAGGSLRLSCAASGSISSDDSMGWYRQAPGKERELVATIAYGASTYYADSVKGRFTISRDNAKNTVYLQMNSLKPEDTAVYYCAADRYGVYDLRYWGQGTQVTVSS

SEQ ID NO: 35158 - protein, 125 aa, Artificial Sequence
  Chemically Synthesized
QVQLQESGGGLVQAGGSLRLSCAASGSISRDAAMGWYRQAPGKEREFVAGISDGTNTYYADSVKGRFTISRDNAKNTVYLQMNSLKPEDTAVYYCAAARYVDLSWVRTSSVRMYWGQGTQVTVSS

SEQ ID NO: 35159 - protein, 121 aa, Artificial Sequence
  Chemically Synthesized
QVQLQESGGGLVQAGGSLRLSCAASGNISTLRMGWYRQAPGKERELVAAITLVVVPYADSVKGRFTISRDNAKNTVYLQMNSLKPEDTAVYYCAVGRPDGVVVPPYYHSYWGQGTQVTVSS

SEQ ID NO: 35160 - protein, 121 aa, Artificial Sequence
  Chemically Synthesized
QVQLQESGGGLVQAGGSLRLSCAASGSISTLSMGWYRQAPGKERELVASITWGANTYYADSVKGRFTISRDNAKNTVYLQMNSLKPEDTAVYYCAARAYYSSYAFANLVYWGQGTQVTVSS

SEQ ID NO: 35161 - protein, 126 aa, Artificial Sequence
  Chemically Synthesized
QVQLQESGGGLVQAGGSLRLSCAASGYIFWHGVMGWYRQAPGKEREFVAAINVGTNTYYADSVKGRFTISRDNAKNTVYLQMNSLKPEDTAVYYCAVPSVPADDYDVVTTVQFAYWGQGTQVTVSS

SEQ ID NO: 35162 - protein, 120 aa, Artificial Sequence
  Chemically Synthesized
QVQLQESGGGLVQAGGSLRLSCAASGSISTLMGWYRQAPGKEREFVASINNGSITNYADSVKGRFTISRDNAKNTVYLQMNSLKPEDTAVYYCAVRYRYSFSPYGDHDYWGQGTQVTVSS

SEQ ID NO: 35163 - protein, 112 aa, Artificial Sequence
  Chemically Synthesized
QVQLQESGGGLVQAGGSLRLSCAASGTIFGYQLMGWYRQAPGKERELVATITHGTITNYADSVKGRFTISRDNAKNTVYLQMNSLKPEDTAVYYCAYGHFYWGQGTQVTVSS

SEQ ID NO: 35164 - protein, 114 aa, Artificial Sequence
  Chemically Synthesized
QVQLQESGGGLVQAGGSLRLSCAASGNISQTDYMGWYRQAPGKERELVATIGGGTNTNYADSVKGRFTISRDNAKNTVYLQMNSLKPEDTAVYYCAADYLNTYWGQGTQVTVSS

SEQ ID NO: 35165 - protein, 120 aa, Artificial Sequence
  Chemically Synthesized
QVQLQESGGGLVQAGGSLRLSCAASGSIFPDRMGWYRQAPGKERELVASIDRGSTNYADSVKGRFTISRDNAKNTVYLQMNSLKPEDTAVYYCAATGSDDDDPYQAYRYWGQGTQVTVSS

SEQ ID NO: 35166 - protein, 117 aa, Artificial Sequence
  Chemically Synthesized
QVQLQESGGGLVQAGGSLRLSCAASGSISHYDKMGWYRQAPGKEREFVATIAYGGTTNYADSVKGRFTISRDNAKNTVYLQMNSLKPEDTAVYYCAVLVTLLLRIYWGQGTQVTVSS

SEQ ID NO: 35167 - protein, 120 aa, Artificial Sequence
  Chemically Synthesized
QVQLQESGGGLVQAGGSLRLSCAASGTIFDVAVMGWYRQAPGKEREFVAAINDGPYADSVKGRFTISRDNAKNTVYLQMNSLKPEDTAVYYCALVTLTSLSGGLLKNIYWGQGTQVTVSS

SEQ ID NO: 35168 - protein, 118 aa, Artificial Sequence
  Chemically Synthesized
QVQLQESGGGLVQAGGSLRLSCAASGTIFISSVMGWYRQAPGKERELVASITPGGNTNYADSVKGRFTISRDNAKNTVYLQMNSLKPEDTAVYYCAVLRYFIYTHYYWGQGTQVTVSS

SEQ ID NO: 35169 - protein, 118 aa, Artificial Sequence
  Chemically Synthesized
QVQLQESGGGLVQAGGSLRLSCAASGYISRWDWMGWYRQAPGKERELVATITAGSTTYYADSVKGRFTISRDNAKNTVYLQMNSLKPEDTAVYYCAVDHLLPRFHRYWGQGTQVTVSS

SEQ ID NO: 35170 - protein, 126 aa, Artificial Sequence
  Chemically Synthesized
QVQLQESGGGLVQAGGSLRLSCAASGSISSGYDMGWYRQAPGKEREFVATIGVGGSTYYADSVKGRFTISRDNAKNTVYLQMNSLKPEDTAVYYCAVYTTGAPYWYPDERHVFGYWGQGTQVTVSS

SEQ ID NO: 35171 - protein, 126 aa, Artificial Sequence
  Chemically Synthesized
QVQLQESGGGLVQAGGSLRLSCAASGNISYGGYMGWYRQAPGKERELVASIDRGGTTNYADSVKGRFTISRDNAKNTVYLQMNSLKPEDTAVYYCAVQRGWQLYDTVDSIEDFTYWGQGTQVTVSS

SEQ ID NO: 35172 - protein, 122 aa, Artificial Sequence
  Chemically Synthesized
QVQLQESGGGLVQAGGSLRLSCAASGTISPVYIMGWYRQAPGKEREFVAAISASGAITYYADSVKGRFTISRDNAKNTVYLQMNSLKPEDTAVYYCAATAISTYPSTRLLYWGQGTQVTVSS

SEQ ID NO: 35173 - protein, 118 aa, Artificial Sequence
  Chemically Synthesized
QVQLQESGGGLVQAGGSLRLSCAASGTISVSGYMGWYRQAPGKERELVATISVGGTTNYADSVKGRFTISRDNAKNTVYLQMNSLKPEDTAVYYCAVISPTGATLDYWGQGTQVTVSS

SEQ ID NO: 35174 - protein, 118 aa, Artificial Sequence
  Chemically Synthesized
QVQLQESGGGLVQAGGSLRLSCAASGTISYASDMGWYRQAPGKEREFVAGISQGGSTNYADSVKGRFTISRDNAKNTVYLQMNSLKPEDTAVYYCAADPPDWADLVYWGQGTQVTVSS

SEQ ID NO: 35175 - protein, 117 aa, Artificial Sequence
  Chemically Synthesized
QVQLQESGGGLVQAGGSLRLSCAASGSIFMFVMGWYRQAPGKEREFVAGIDDGSTTYYADSVKGRFTISRDNAKNTVYLQMNSLKPEDTAVYYCAVGDGYNTELTYWGQGTQVTVSS

SEQ ID NO: 35176 - protein, 116 aa, Artificial Sequence
  Chemically Synthesized
QVQLQESGGGLVQAGGSLRLSCAASGTISVSMGWYRQAPGKEREFVAGITYGASTYYADSVKGRFTISRDNAKNTVYLQMNSLKPEDTAVYYCAVAWDYGGYLTYWGQGTQVTVSS

SEQ ID NO: 35177 - protein, 120 aa, Artificial Sequence
  Chemically Synthesized
QVQLQESGGGLVQAGGSLRLSCAASGTMMGWYRQAPGKEREFVAAITDGASTNYADSVKGRFTISRDNAKNTVYLQMNSLKPEDTAVYYCAVRVYLPYVYPTRGVDSMYWGQGTQVTVSS

SEQ ID NO: 35178 - protein, 117 aa, Artificial Sequence
  Chemically Synthesized
QVQLQESGGGLVQAGGSLRLSCAASGYISWGFYMGWYRQAPGKEREFVPVLLTVVIPYADSVKGRFTISRDNAKNTVYLQMNSLKPEDTAVYYCAAGITVVITLPYWGQGTQVTVSS

SEQ ID NO: 35179 - protein, 126 aa, Artificial Sequence
  Chemically Synthesized
QVQLQESGGGLVQAGGSLRLSCAASGNIFQHPDMGWYRQAPGKERELVASIGPGGSTNYADSVKGRFTISRDNAKNTVYLQMNSLKPEDTAVYYCAVYDDYTSLDVPPKRYYLPYWGQGTQVTVSS

SEQ ID NO: 35180 - protein, 115 aa, Artificial Sequence
  Chemically Synthesized
QVQLQESGGGLVQAGGSLRLSCAASGTIFDNYYMGWYRQAPGKERELVATIGVGASTNYADSVKGRFTISRDNAKNTVYLQMNSLKPEDTAVYYCAVSYADHAYWGQGTQVTVSS

SEQ ID NO: 35181 - protein, 121 aa, Artificial Sequence
  Chemically Synthesized
QVQLQESGGGLVQAGGSLRLSCAASGTIFPRLAMGWYRQAPGKEREFVATISHGRYLYADSVKGRFTISRDNAKNTVYLQMNSLKPEDTAVYYCAAYYYQNVSYYRYYRYWGQGTQVTVSS

SEQ ID NO: 35182 - protein, 110 aa, Artificial Sequence
  Chemically Synthesized
QVQLQESGGGLVQAGGSLRLSCAASGSISYGEMGWYRQAPGKERELVAGIDRGTTTYADSVKGRFTISRDNAKNTVYLQMNSLKPEDTAVYYCALVRFYWGQGTQVTVSS

SEQ ID NO: 35183 - protein, 126 aa, Artificial Sequence
  Chemically Synthesized
QVQLQESGGGLVQAGGSLRLSCAASGTISRPSGMGWYRQAPGKERELVAGIASGAITNYADSVKGRFTISRDNAKNTVYLQMNSLKPEDTAVYYCAPRITYALNTDAYWGEVYQYWGQGTQVTVSS

SEQ ID NO: 35184 - protein, 110 aa, Artificial Sequence
  Chemically Synthesized
QVQLQESGGGLVQAGGSLRLSCAASGTIFPTGDMGWYRQAPGKERELVASIGYGTSTNYADSVKGRFTISRDNAKNTVYLQMNSLKPEDTAVYYCASIYWGQGTQVTVSS

SEQ ID NO: 35185 - protein, 126 aa, Artificial Sequence
  Chemically Synthesized
QVQLQESGGGLVQAGGSLRLSCAASGSISLPYAMGWYRQAPGKERELVATIDYGSTTNYADSVKGRFTISRDNAKNTVYLQMNSLKPEDTAVYYCAVEHYAGYHDADSYRGTLAYWGQGTQVTVSS

SEQ ID NO: 35186 - protein, 122 aa, Artificial Sequence
  Chemically Synthesized
QVQLQESGGGLVQAGGSLRLSCAASGNISPVDDMGWYRQAPGKEREFVATITWGGSTNYADSVKGRFTISRDNAKNTVYLQMNSLKPEDTAVYYCAARYIPGDGKSDTFDYWGQGTQVTVSS

SEQ ID NO: 35187 - protein, 117 aa, Artificial Sequence
  Chemically Synthesized
QVQLQESGGGLVQAGGSLRLSCAASGTIFISSMGWYRQAPGKEREFVAGIAYGSITYYADSVKGRFTISRDNAKNTVYLQMNSLKPEDTAVYYCAVPFYSDTTYAYWGQGTQVTVSS

SEQ ID NO: 35188 - protein, 116 aa, Artificial Sequence
  Chemically Synthesized
QVQLQESGGGLVQAGGSLRLSCAASGTISSTMGWYRQAPGKERELVAGIAYGATTNYADSVKGRFTISRDNAKNTVYLQMNSLKPEDTAVYYCAAYTGYPEHLAYWGQGTQVTVSS

SEQ ID NO: 35189 - protein, 117 aa, Artificial Sequence
  Chemically Synthesized
QVQLQESGGGLVQAGGSLRLSCAASGTIFPPTYMGWYRQAPGKEREFVATINAGGNTNYADSVKGRFTISRDNAKNTVYLQMNSLKPEDTAVYYCAVTYSGLTGFYWGQGTQVTVSS

SEQ ID NO: 35190 - protein, 122 aa, Artificial Sequence
  Chemically Synthesized
QVQLQESGGGLVQAGGSLRLSCAASGNIFAQDYMGWYRQAPGKEREFVATIGAGANTNYADSVKGRFTISRDNAKNTVYLQMNSLKPEDTAVYYCAVRESPYRDTEDPHSYWGQGTQVTVSS

SEQ ID NO: 35191 - protein, 122 aa, Artificial Sequence
  Chemically Synthesized
QVQLQESGGGLVQAGGSLRLSCAASGNISYKPFMGWYRQAPGKERELVATISDGTTTNYADSVKGRFTISRDNAKNTVYLQMNSLKPEDTAVYYCAVYHDNYYQRTPGLWYWGQGTQVTVSS

SEQ ID NO: 35192 - protein, 126 aa, Artificial Sequence
  Chemically Synthesized
QVQLQESGGGLVQAGGSLRLSCAASGTISDVQPMGWYRQAPGKEREFVATIGNGSITYYADSVKGRFTISRDNAKNTVYLQMNSLKPEDTAVYYCAVQPDYNVPFYGTTLPDYGYWGQGTQVTVSS

SEQ ID NO: 35193 - protein, 126 aa, Artificial Sequence
  Chemically Synthesized
QVQLQESGGGLVQAGGSLRLSCAASGYISLNNTMGWYRQAPGKERELVAGINPGTSTYYADSVKGRFTISRDNAKNTVYLQMNSLKPEDTAVYYCAAVGYTYLHQLDRDFRLLDYWGQGTQVTVSS

SEQ ID NO: 35194 - protein, 117 aa, Artificial Sequence
  Chemically Synthesized
QVQLQESGGGLVQAGGSLRLSCAASGTILKLTMGWYRQAPGKERELVAGIDRGANTYYADSVKGRFTISRDNAKNTVYLQMNSLKPEDTAVYYCAVRWQSRDKYPYWGQGTQVTVSS

SEQ ID NO: 35195 - protein, 108 aa, Artificial Sequence
  Chemically Synthesized
QVQLQESGGGLVQAGGSLRLSCAASGSISYYDGMGWYRQAPGKEREFVATIKVVLLPYADSVKGRFTISRDNAKNTVYLQMNSLKPEDTAVYYCAVYWGQGTQVTVSS

SEQ ID NO: 35196 - protein, 122 aa, Artificial Sequence
  Chemically Synthesized
QVQLQESGGGLVQAGGSLRLSCAASGNISTTAIMGWYRQAPGKERELVAAISRGGITNYADSVKGRFTISRDNAKNTVYLQMNSLKPEDTAVYYCAAEGGTRNVDYIGHDYWGQGTQVTVSS

SEQ ID NO: 35197 - protein, 119 aa, Artificial Sequence
  Chemically Synthesized
QVQLQESGGGLVQAGGSLRLSCAASGSMVRMGWYRQAPGKERELVAAIGQGSITNYADSVKGRFTISRDNAKNTVYLQMNSLKPEDTAVYYCAAYETVIDGLVVTHYYWGQGTQVTVSS

SEQ ID NO: 35198 - protein, 118 aa, Artificial Sequence
  Chemically Synthesized
QVQLQESGGGLVQAGGSLRLSCAASGNISIYVSMGWYRQAPGKERELVAGITGGAITNYADSVKGRFTISRDNAKNTVYLQMNSLKPEDTAVYYCAAIIIGTRYLRYWGQGTQVTVSS

SEQ ID NO: 35199 - protein, 118 aa, Artificial Sequence
  Chemically Synthesized
QVQLQESGGGLVQAGGSLRLSCAASGTISVQEYMGWYRQAPGKEREFVAAINFGGSTYYADSVKGRFTISRDNAKNTVYLQMNSLKPEDTAVYYCAVLASYVFPLRYWGQGTQVTVSS

SEQ ID NO: 35200 - protein, 122 aa, Artificial Sequence
  Chemically Synthesized
QVQLQESGGGLVQAGGSLRLSCAASGYIFRYVPMGWYRQAPGKERELVATIDYGSSTYYADSVKGRFTISRDNAKNTVYLQMNSLKPEDTAVYYCAVHPYQSRIYWYRHYYWGQGTQVTVSS

SEQ ID NO: 35201 - protein, 124 aa, Artificial Sequence
  Chemically Synthesized
QVQLQESGGGLVQAGGSLRLSCAASGTIFALPSMGWYRQAPGKEREFVASIGYGTNTNYADSVKGRFTISRDNAKNTVYLQMNSLKPEDTAVYYCAVYYSGYWRYYQYYSLRYWGQGTQVTVSS

SEQ ID NO: 35202 - protein, 118 aa, Artificial Sequence
  Chemically Synthesized
QVQLQESGGGLVQAGGSLRLSCAASGSISTYNYMGWYRQAPGKERELVATISDGGTTNYADSVKGRFTISRDNAKNTVYLQMNSLKPEDTAVYYCAVDDWYGPFHRYWGQGTQVTVSS

SEQ ID NO: 35203 - protein, 122 aa, Artificial Sequence
  Chemically Synthesized
QVQLQESGGGLVQAGGSLRLSCAASGTISRYTTMGWYRQAPGKEREFVAAIGDGGSTYYADSVKGRFTISRDNAKNTVYLQMNSLKPEDTAVYYCAVAYRTYLIDYDYHYYWGQGTQVTVSS

SEQ ID NO: 35204 - protein, 126 aa, Artificial Sequence
  Chemically Synthesized
QVQLQESGGGLVQAGGSLRLSCAASGNISSGQDMGWYRQAPGKEREFVAAISDGSSTYYADSVKGRFTISRDNAKNTVYLQMNSLKPEDTAVYYCAALIDDADLDHYEGVVLYSYWGQGTQVTVSS

SEQ ID NO: 35205 - protein, 118 aa, Artificial Sequence
  Chemically Synthesized
QVQLQESGGGLVQAGGSLRLSCAASGSISQLTAMGWYRQAPGKERELVAGIAKGGTTYYADSVKGRFTISRDNAKNTVYLQMNSLKPEDTAVYYCAVYDRSGYPLDYWGQGTQVTVSS

SEQ ID NO: 35206 - protein, 121 aa, Artificial Sequence
  Chemically Synthesized
QVQLQESGGGLVQAGGSLRLSCAASGTISSFVSMGWYRQAPGKEREFVAAITDGAITNYADSVKGRFTISRDNAKNTVYLQMNSLKPEDTAVYYCAVGHGGPLDRQRGHYWGQGTQVTVSS

SEQ ID NO: 35207 - protein, 122 aa, Artificial Sequence
  Chemically Synthesized
QVQLQESGGGLVQAGGSLRLSCAASGSIFLGRTMGWYRQAPGKEREFVASISLGSSTNYADSVKGRFTISRDNAKNTVYLQMNSLKPEDTAVYYCAARGPPTVGVGVHLDYWGQGTQVTVSS

SEQ ID NO: 35208 - protein, 120 aa, Artificial Sequence
  Chemically Synthesized
QVQLQESGGGLVQAGGSLRLSCAASGTIFDTLYMGWYRQAPGKEREFVAGISYGASTYYADSVKGRFTISRDNAKNTVYLQMNSLKPEDTAVYYCAARPYYSRAYATLYWGQGTQVTVSS

SEQ ID NO: 35209 - protein, 121 aa, Artificial Sequence
  Chemically Synthesized
QVQLQESGGGLVQAGGSLRLSCAASGTISTITMGWYRQAPGKEREFVATISYGGTTNYADSVKGRFTISRDNAKNTVYLQMNSLKPEDTAVYYCAAALAGSGHLYPYHFYWGQGTQVTVSS

SEQ ID NO: 35210 - protein, 122 aa, Artificial Sequence
  Chemically Synthesized
QVQLQESGGGLVQAGGSLRLSCAASGNISDDRDMGWYRQAPGKERELVASITDGSSTYYADSVKGRFTISRDNAKNTVYLQMNSLKPEDTAVYYCAAFPWQEFVWEYNYGYWGQGTQVTVSS

SEQ ID NO: 35211 - protein, 117 aa, Artificial Sequence
  Chemically Synthesized
QVQLQESGGGLVQAGGSLRLSCAASGNISIANYMGWYRQAPGKERELVAAIGFGGTTYADSVKGRFTISRDNAKNTVYLQMNSLKPEDTAVYYCAAKYSTRTYHGYWGQGTQVTVSS

SEQ ID NO: 35212 - protein, 126 aa, Artificial Sequence
  Chemically Synthesized
QVQLQESGGGLVQAGGSLRLSCAASGTISQYGAMGWYRQAPGKEREFVATINDGSSTNYADSVKGRFTISRDNAKNTVYLQMNSLKPEDTAVYYCAAGPHRTTYVTLAVTDAFSYWGQGTQVTVSS

SEQ ID NO: 35213 - protein, 126 aa, Artificial Sequence
  Chemically Synthesized
QVQLQESGGGLVQAGGSLRLSCAASGYISDVPEMGWYRQAPGKEREFVAAIATGATTNYADSVKGRFTISRDNAKNTVYLQMNSLKPEDTAVYYCAAPYRYGFYDYLAWYFRHPYWGQGTQVTVSS

SEQ ID NO: 35214 - protein, 118 aa, Artificial Sequence
  Chemically Synthesized
QVQLQESGGGLVQAGGSLRLSCAASGTISGGYFMGWYRQAPGKEREFVASIGNGGNTYYADSVKGRFTISRDNAKNTVYLQMNSLKPEDTAVYYCAAFFAAVPSSFYWGQGTQVTVSS

SEQ ID NO: 35215 - protein, 118 aa, Artificial Sequence
  Chemically Synthesized
QVQLQESGGGLVQAGGSLRLSCAASGNIFGDRYMGWYRQAPGKEREFVAGIGRGGITNYADSVKGRFTISRDNAKNTVYLQMNSLKPEDTAVYYCAVDFPTSDLFPYWGQGTQVTVSS

SEQ ID NO: 35216 - protein, 122 aa, Artificial Sequence
  Chemically Synthesized
QVQLQESGGGLVQAGGSLRLSCAASGNIFLSTYMGWYRQAPGKERELVAAIDDGATTYYADSVKGRFTISRDNAKNTVYLQMNSLKPEDTAVYYCAVVTFYILGVDGPHQYWGQGTQVTVSS

SEQ ID NO: 35217 - protein, 110 aa, Artificial Sequence
  Chemically Synthesized
QVQLQESGGGLVQAGGSLRLSCAASGYIFELVRMGWYRQAPGKEREFVATISDGGTTNYADSVKGRFTISRDNAKNTVYLQMNSLKPEDTAVYYCAALYWGQGTQVTVSS

SEQ ID NO: 35218 - protein, 126 aa, Artificial Sequence
  Chemically Synthesized
QVQLQESGGGLVQAGGSLRLSCAASGTISASRAMGWYRQAPGKERELVAGIASGTITNYADSVKGRFTISRDNAKNTVYLQMNSLKPEDTAVYYCAAYDRYPYAYYPAIDVDFTYWGQGTQVTVSS

SEQ ID NO: 35219 - protein, 122 aa, Artificial Sequence
  Chemically Synthesized
QVQLQESGGGLVQAGGSLRLSCAASGTIFRYTYMGWYRQAPGKEREFVASINGGTSTNYADSVKGRFTISRDNAKNTVYLQMNSLKPEDTAVYYCAAPRTANQLGDYYHNYWGQGTQVTVSS

SEQ ID NO: 35220 - protein, 118 aa, Artificial Sequence
  Chemically Synthesized
QVQLQESGGGLVQAGGSLRLSCAASGSISGSRYMGWYRQAPGKERELVAAIGHGTSTYYADSVKGRFTISRDNAKNTVYLQMNSLKPEDTAVYYCAVTVGDSGLFPYWGQGTQVTVSS

SEQ ID NO: 35221 - protein, 118 aa, Artificial Sequence
  Chemically Synthesized
QVQLQESGGGLVQAGGSLRLSCAASGNIFRPYYMGWYRQAPGKERELVATIDPGATTNYADSVKGRFTISRDNAKNTVYLQMNSLKPEDTAVYYCAVTLLDGTSHDYWGQGTQVTVSS

SEQ ID NO: 35222 - protein, 118 aa, Artificial Sequence
  Chemically Synthesized
QVQLQESGGGLVQAGGSLRLSCAASGNISYASYMGWYRQAPGKEREFVAAITAGTTTYYADSVKGRFTISRDNAKNTVYLQMNSLKPEDTAVYYCAVGAIYDSTYYYWGQGTQVTVSS

SEQ ID NO: 35223 - protein, 118 aa, Artificial Sequence
  Chemically Synthesized
QVQLQESGGGLVQAGGSLRLSCAASGSISGAGGMGWYRQAPGKERELVAGIGEGGNTNYADSVKGRFTISRDNAKNTVYLQMNSLKPEDTAVYYCAADRYYDRAFYYWGQGTQVTVSS

SEQ ID NO: 35224 - protein, 118 aa, Artificial Sequence
  Chemically Synthesized
QVQLQESGGGLVQAGGSLRLSCAASGTISRGYRMGWYRQAPGKERELVAGIAYGSSTYYADSVKGRFTISRDNAKNTVYLQMNSLKPEDTAVYYCAVYVGWDDILVYWGQGTQVTVSS

SEQ ID NO: 35225 - protein, 124 aa, Artificial Sequence
  Chemically Synthesized
QVQLQESGGGLVQAGGSLRLSCAASGKFFRCRMGWYRQAPGKEREFVAGINLGSNTNYADSVKGRFTISRDNAKNTVYLQMNSLKPEDTAVYYCAVLPFDWSTSVPSAWSAFYWGQGTQVTVSS

SEQ ID NO: 35226 - protein, 114 aa, Artificial Sequence
  Chemically Synthesized
QVQLQESGGGLVQAGGSLRLSCAASGSISQQYGMGWYRQAPGKERELVATIGYGGNTNYADSVKGRFTISRDNAKNTVYLQMNSLKPEDTAVYYCAVPTPYHYWGQGTQVTVSS

SEQ ID NO: 35227 - protein, 118 aa, Artificial Sequence
  Chemically Synthesized
QVQLQESGGGLVQAGGSLRLSCAASGNIFFRHAMGWYRQAPGKERELVASISDGTTTNYADSVKGRFTISRDNAKNTVYLQMNSLKPEDTAVYYCAVYPYFYRYFYYWGQGTQVTVSS

SEQ ID NO: 35228 - protein, 122 aa, Artificial Sequence
  Chemically Synthesized
QVQLQESGGGLVQAGGSLRLSCAASGYIFRPSSMGWYRQAPGKERELVATIDRGGITYYADSVKGRFTISRDNAKNTVYLQMNSLKPEDTAVYYCAAGDWYTYIAGYPHYYWGQGTQVTVSS

SEQ ID NO: 35229 - protein, 119 aa, Artificial Sequence
  Chemically Synthesized
QVQLQESGGGLVQAGGSLRLSCAASGNIFDDVDMGWYRQAPGKEREFVAAINYGASTNYADSVKGRFTISRDNAKNTVYLQMNSLKPEDTAVYYCAALSDQQDGDHSYWGQGTQVTVSS

SEQ ID NO: 35230 - protein, 121 aa, Artificial Sequence
  Chemically Synthesized
QVQLQESGGGLVQAGGSLRLSCAASGNISYTSMGWYRQAPGKERELVASIAYGSSTYYADSVKGRFTISRDNAKNTVYLQMNSLKPEDTAVYYCAVRLRDPPSIRWALDYWGQGTQVTVSS

SEQ ID NO: 35231 - protein, 116 aa, Artificial Sequence
  Chemically Synthesized
QVQLQESGGGLVQAGGSLRLSCAASGYIFYSAVMGWYRQAPGKERELVAGITGGGSTYADSVKGRFTISRDNAKNTVYLQMNSLKPEDTAVYYCAVVGYGSLVIYWGQGTQVTVSS

SEQ ID NO: 35232 - protein, 118 aa, Artificial Sequence
  Chemically Synthesized
QVQLQESGGGLVQAGGSLRLSCAASGNISDASYMGWYRQAPGKERELVATISAGSTTNYADSVKGRFTISRDNAKNTVYLQMNSLKPEDTAVYYCAVNTTRVADHYYWGQGTQVTVSS

SEQ ID NO: 35233 - protein, 114 aa, Artificial Sequence
  Chemically Synthesized
QVQLQESGGGLVQAGGSLRLSCAASGTIFTGGVMGWYRQAPGKERELVAAIDDGSITYYADSVKGRFTISRDNAKNTVYLQMNSLKPEDTAVYYCAVWSATIYWGQGTQVTVSS

SEQ ID NO: 35234 - protein, 117 aa, Artificial Sequence
  Chemically Synthesized
QVQLQESGGGLVQAGGSLRLSCAASGSISGRYEMGWYRQAPGKERELVAAIGDGAITYYADSVKGRFTISRDNAKNTVYLQMNSLKPEDTAVYYCAVKLLTVTTLYWGQGTQVTVSS

SEQ ID NO: 35235 - protein, 120 aa, Artificial Sequence
  Chemically Synthesized
QVQLQESGGGLVQAGGSLRLSCAASGSISVKGGMGWYRQAPGKEREFVASISDGTITNYADSVKGRFTISRDNAKNTVYLQMNSLKPEDTAVYYCAAYTDYVPDNTHPYWGQGTQVTVSS

SEQ ID NO: 35236 - protein, 112 aa, Artificial Sequence
  Chemically Synthesized
QVQLQESGGGLVQAGGSLRLSCAASGYISSAYNMGWYRQAPGKEREFVASISRGTSTYYADSVKGRFTISRDNAKNTVYLQMNSLKPEDTAVYYCAVASTYWGQGTQVTVSS

SEQ ID NO: 35237 - protein, 118 aa, Artificial Sequence
  Chemically Synthesized
QVQLQESGGGLVQAGGSLRLSCAASGTISSGLVMGWYRQAPGKERELVATIGYGTNTNYADSVKGRFTISRDNAKNTVYLQMNSLKPEDTAVYYCAVRSRVYSGYQYWGQGTQVTVSS

SEQ ID NO: 35238 - protein, 118 aa, Artificial Sequence
  Chemically Synthesized
QVQLQESGGGLVQAGGSLRLSCAASGTISAARYMGWYRQAPGKERELVAGIAFGTITYYADSVKGRFTISRDNAKNTVYLQMNSLKPEDTAVYYCAAVEDTGFGHVYWGQGTQVTVSS

SEQ ID NO: 35239 - protein, 112 aa, Artificial Sequence
  Chemically Synthesized
QVQLQESGGGLVQAGGSLRLSCAASGTIFSRDPMGWYRQAPGKERELVAGIASGAITNYADSVKGRFTISRDNAKNTVYLQMNSLKPEDTAVYYCAVRHSYWGQGTQVTVSS

SEQ ID NO: 35240 - protein, 117 aa, Artificial Sequence
  Chemically Synthesized
QVQLQESGGGLVQAGGSLRLSCAASGSIFLAADMGWYRQAPGKERELVASISSVVVPYADSVKGRFTISRDNAKNTVYLQMNSLKPEDTAVYYCAVSATDDIIFRYWGQGTQVTVSS

SEQ ID NO: 35241 - protein, 118 aa, Artificial Sequence
  Chemically Synthesized
QVQLQESGGGLVQAGGSLRLSCAASGNISGRLEMGWYRQAPGKEREFVAAITFGGTTNYADSVKGRFTISRDNAKNTVYLQMNSLKPEDTAVYYCAVYDDHGYRYDYWGQGTQVTVSS

SEQ ID NO: 35242 - protein, 117 aa, Artificial Sequence
  Chemically Synthesized
QVQLQESGGGLVQAGGSLRLSCAASGYISHQYIMGWYRQAPGKERELVALLLLVVLPYADSVKGRFTISRDNAKNTVYLQMNSLKPEDTAVYYCAAPYDYIWYFDYWGQGTQVTVSS

SEQ ID NO: 35243 - protein, 118 aa, Artificial Sequence
  Chemically Synthesized
QVQLQESGGGLVQAGGSLRLSCAASGYIFPYYIMGWYRQAPGKERELVATISYGGTTYYADSVKGRFTISRDNAKNTVYLQMNSLKPEDTAVYYCAVYDIRQVDLGYWGQGTQVTVSS

SEQ ID NO: 35244 - protein, 126 aa, Artificial Sequence
  Chemically Synthesized
QVQLQESGGGLVQAGGSLRLSCAASGNISSVSFMGWYRQAPGKEREFVAGIDYGAITYYADSVKGRFTISRDNAKNTVYLQMNSLKPEDTAVYYCAAYRNTYTFVLPYIGDTYRYWGQGTQVTVSS

SEQ ID NO: 35245 - protein, 122 aa, Artificial Sequence
  Chemically Synthesized
QVQLQESGGGLVQAGGSLRLSCAASGSIFPYPGMGWYRQAPGKEREFVAAITQGATTNYADSVKGRFTISRDNAKNTVYLQMNSLKPEDTAVYYCAVPSFIIGQTTSEFDYWGQGTQVTVSS

SEQ ID NO: 35246 - protein, 122 aa, Artificial Sequence
  Chemically Synthesized
QVQLQESGGGLVQAGGSLRLSCAASGNISHIKPMGWYRQAPGKERELVASIATGGNTNYADSVKGRFTISRDNAKNTVYLQMNSLKPEDTAVYYCAVDGTDDYKDGYLPCYWGQGTQVTVSS

SEQ ID NO: 35247 - protein, 118 aa, Artificial Sequence
  Chemically Synthesized
QVQLQESGGGLVQAGGSLRLSCAASGTIFLYFSMGWYRQAPGKERELVASIGYGGTTNYADSVKGRFTISRDNAKNTVYLQMNSLKPEDTAVYYCAAYTFAWHPYAYWGQGTQVTVSS

SEQ ID NO: 35248 - protein, 118 aa, Artificial Sequence
  Chemically Synthesized
QVQLQESGGGLVQAGGSLRLSCAASGTISYEGIMGWYRQAPGKERELVAAIAHGGYYLYADSVKGRFTISRDNAKNTVYLQMNSLKPEDTAVYYCAVNTYGDFYLSYWGQGTQVTVSS

SEQ ID NO: 35249 - protein, 117 aa, Artificial Sequence
  Chemically Synthesized
QVQLQESGGGLVQAGGSLRLSCAASGSIFYELDMGWYRQAPGKERELVAGITGGAITNYADSVKGRFTISRDNAKNTVYLQMNSLKPEDTAVYYCAADGYDSVSMYWGQGTQVTVSS

SEQ ID NO: 35250 - protein, 122 aa, Artificial Sequence
  Chemically Synthesized
QVQLQESGGGLVQAGGSLRLSCAASGNISTADDMGWYRQAPGKEREFVATIGYGGITNYADSVKGRFTISRDNAKNTVYLQMNSLKPEDTAVYYCAVVDGDGARVYFDHPYWGQGTQVTVSS

SEQ ID NO: 35251 - protein, 126 aa, Artificial Sequence
  Chemically Synthesized
QVQLQESGGGLVQAGGSLRLSCAASGNISQLKVMGWYRQAPGKERELVATIGYGGTTYYADSVKGRFTISRDNAKNTVYLQMNSLKPEDTAVYYCAVLYTYSYTWSTVFSRSYTYWGQGTQVTVSS

SEQ ID NO: 35252 - protein, 117 aa, Artificial Sequence
  Chemically Synthesized
QVQLQESGGGLVQAGGSLRLSCAASGSIFLFGFMGWYRQAPGKERELVAAIDYGTILYADSVKGRFTISRDNAKNTVYLQMNSLKPEDTAVYYCAANGGVWSKHAYWGQGTQVTVSS

SEQ ID NO: 35253 - protein, 118 aa, Artificial Sequence
  Chemically Synthesized
QVQLQESGGGLVQAGGSLRLSCAASGTIFPGLEMGWYRQAPGKERELVASISYGTSTYYADSVKGRFTISRDNAKNTVYLQMNSLKPEDTAVYYCAVNWSWLPYFYYWGQGTQVTVSS

SEQ ID NO: 35254 - protein, 118 aa, Artificial Sequence
  Chemically Synthesized
QVQLQESGGGLVQAGGSLRLSCAASGTIFYTATMGWYRQAPGKERELVASIGEGSSTYYADSVKGRFTISRDNAKNTVYLQMNSLKPEDTAVYYCAVPDFGKTQHGYWGQGTQVTVSS

SEQ ID NO: 35255 - protein, 126 aa, Artificial Sequence
  Chemically Synthesized
QVQLQESGGGLVQAGGSLRLSCAASGYIFRTGYMGWYRQAPGKEREFVAGIDQGSSTNYADSVKGRFTISRDNAKNTVYLQMNSLKPEDTAVYYCAAPYLGRNYTVYRDYDHHSYWGQGTQVTVSS

SEQ ID NO: 35256 - protein, 118 aa, Artificial Sequence
  Chemically Synthesized
QVQLQESGGGLVQAGGSLRLSCAASGTIFGHNYMGWYRQAPGKERELVATIAYGSITYYADSVKGRFTISRDNAKNTVYLQMNSLKPEDTAVYYCAVYAYVDDYFVYWGQGTQVTVSS

SEQ ID NO: 35257 - protein, 122 aa, Artificial Sequence
  Chemically Synthesized
QVQLQESGGGLVQAGGSLRLSCAASGYISSAVYMGWYRQAPGKERELVASIGTGASTYYADSVKGRFTISRDNAKNTVYLQMNSLKPEDTAVYYCAVYIGHSWYSSYVHPYWGQGTQVTVSS

SEQ ID NO: 35258 - protein, 126 aa, Artificial Sequence
  Chemically Synthesized
QVQLQESGGGLVQAGGSLRLSCAASGTISTRRSMGWYRQAPGKEREFVAGITGGGNTYYADSVKGRFTISRDNAKNTVYLQMNSLKPEDTAVYYCAVAVPRVPAWYYSTAWYYPYWGQGTQVTVSS

SEQ ID NO: 35259 - protein, 125 aa, Artificial Sequence
  Chemically Synthesized
QVQLQESGGGLVQAGGSLRLSCAASGNISGDDAMGWYRQAPGKEREFVASIATGASTYADSVKGRFTISRDNAKNTVYLQMNSLKPEDTAVYYCAADNAYTAYDTIVPITLYRYWGQGTQVTVSS

SEQ ID NO: 35260 - protein, 122 aa, Artificial Sequence
  Chemically Synthesized
QVQLQESGGGLVQAGGSLRLSCAASGYIFTSGDMGWYRQAPGKERELVASIDDGATTNYADSVKGRFTISRDNAKNTVYLQMNSLKPEDTAVYYCAVDIGPTLPSGAVLDYWGQGTQVTVSS

SEQ ID NO: 35261 - protein, 118 aa, Artificial Sequence
  Chemically Synthesized
QVQLQESGGGLVQAGGSLRLSCAASGYIFDYVSMGWYRQAPGKERELVAGISYGGSTNYADSVKGRFTISRDNAKNTVYLQMNSLKPEDTAVYYCAAERRTDEWFIYWGQGTQVTVSS

SEQ ID NO: 35262 - protein, 121 aa, Artificial Sequence
  Chemically Synthesized
QVQLQESGGGLVQAGGSLRLSCAASGNIFGRAQMGWYRQAPGKEREFVPVLLTVVVPYADSVKGRFTISRDNAKNTVYLQMNSLKPEDTAVYYCAAYIDSAYDSYYYHDYWGQGTQVTVSS

SEQ ID NO: 35263 - protein, 118 aa, Artificial Sequence
  Chemically Synthesized
QVQLQESGGGLVQAGGSLRLSCAASGYISGSVAMGWYRQAPGKEREFVAGITGGAITNYADSVKGRFTISRDNAKNTVYLQMNSLKPEDTAVYYCAVLTRSQGAHAYWGQGTQVTVSS

SEQ ID NO: 35264 - protein, 118 aa, Artificial Sequence
  Chemically Synthesized
QVQLQESGGGLVQAGGSLRLSCAASGTIFDVVDMGWYRQAPGKEREFVATIDHGASTNYADSVKGRFTISRDNAKNTVYLQMNSLKPEDTAVYYCAARQYISDTYGYWGQGTQVTVSS

SEQ ID NO: 35265 - protein, 121 aa, Artificial Sequence
  Chemically Synthesized
QVQLQESGGGLVQAGGSLRLSCAASGNISSSRVMGWYRQAPGKEREFVAAISSGGTTYYADSVKGRFTISRDNAKNTVYLQMNSLKPEDTAVYYCAAYNDLFGTPYYRLYWGQGTQVTVSS

SEQ ID NO: 35266 - protein, 122 aa, Artificial Sequence
  Chemically Synthesized
QVQLQESGGGLVQAGGSLRLSCAASGYISYWYGMGWYRQAPGKEREFVATISRGTTTNYADSVKGRFTISRDNAKNTVYLQMNSLKPEDTAVYYCAVIRRDKRFDWNGFVYWGQGTQVTVSS

SEQ ID NO: 35267 - protein, 122 aa, Artificial Sequence
  Chemically Synthesized
QVQLQESGGGLVQAGGSLRLSCAASGYIFPPYSMGWYRQAPGKERELVASIAYGATTNYADSVKGRFTISRDNAKNTVYLQMNSLKPEDTAVYYCAVVAKRTLTGNYDHYYWGQGTQVTVSS

SEQ ID NO: 35268 - protein, 112 aa, Artificial Sequence
  Chemically Synthesized
QVQLQESGGGLVQAGGSLRLSCAASGYMGWYRQAPGKERELVAAIARGTTTNYADSVKGRFTISRDNAKNTVYLQMNSLKPEDTAVYYCAVDGVSRLDHPYWGQGTQVTVSS

SEQ ID NO: 35269 - protein, 121 aa, Artificial Sequence
  Chemically Synthesized
QVQLQESGGGLVQAGGSLRLSCAASGNIFLIRMGWYRQAPGKERELVATIAGGGITNYADSVKGRFTISRDNAKNTVYLQMNSLKPEDTAVYYCAVAYQLAKTGYGDLLYWGQGTQVTVSS

SEQ ID NO: 35270 - protein, 121 aa, Artificial Sequence
  Chemically Synthesized
QVQLQESGGGLVQAGGSLRLSCAASGSIFLVNMGWYRQAPGKERELVATIALGGNTYYADSVKGRFTISRDNAKNTVYLQMNSLKPEDTAVYYCAVAGADSGFTSYSHDYWGQGTQVTVSS

SEQ ID NO: 35271 - protein, 122 aa, Artificial Sequence
  Chemically Synthesized
QVQLQESGGGLVQAGGSLRLSCAASGSIFGYTGMGWYRQAPGKERELVATIDGGTTTNYADSVKGRFTISRDNAKNTVYLQMNSLKPEDTAVYYCAADDPYLDPWFLPFTYWGQGTQVTVSS

SEQ ID NO: 35272 - protein, 118 aa, Artificial Sequence
  Chemically Synthesized
QVQLQESGGGLVQAGGSLRLSCAASGNISYYQIMGWYRQAPGKEREFVAAIGYGTITYYADSVKGRFTISRDNAKNTVYLQMNSLKPEDTAVYYCAVTYDNPVLFAYWGQGTQVTVSS

SEQ ID NO: 35273 - protein, 117 aa, Artificial Sequence
  Chemically Synthesized
QVQLQESGGGLVQAGGSLRLSCAASGNISTSLMGWYRQAPGKERELVAGISTGSTTYYADSVKGRFTISRDNAKNTVYLQMNSLKPEDTAVYYCAALYDRLQDLKYWGQGTQVTVSS

SEQ ID NO: 35274 - protein, 120 aa, Artificial Sequence
  Chemically Synthesized
QVQLQESGGGLVQAGGSLRLSCAASGYIFAVLEMGWYRQAPGKERELVATIGYGTNYADSVKGRFTISRDNAKNTVYLQMNSLKPEDTAVYYCAATNGQTYWPKTRYYYWGQGTQVTVSS

SEQ ID NO: 35275 - protein, 114 aa, Artificial Sequence
  Chemically Synthesized
QVQLQESGGGLVQAGGSLRLSCAASGNIFIDYGMGWYRQAPGKERELVAGINVGASTNYADSVKGRFTISRDNAKNTVYLQMNSLKPEDTAVYYCAFLRTVLYWGQGTQVTVSS

SEQ ID NO: 35276 - protein, 118 aa, Artificial Sequence
  Chemically Synthesized
QVQLQESGGGLVQAGGSLRLSCAASGSIFQSYDMGWYRQAPGKERELVAAIAEGGTTNYADSVKGRFTISRDNAKNTVYLQMNSLKPEDTAVYYCAVLSLYPWDFDYWGQGTQVTVSS

SEQ ID NO: 35277 - protein, 117 aa, Artificial Sequence
  Chemically Synthesized
QVQLQESGGGLVQAGGSLRLSCAASGSISGTDYMGWYRQAPGKERELVASIATGSTTNYADSVKGRFTISRDNAKNTVYLQMNSLKPEDTAVYYCAADYSTTVLIYWGQGTQVTVSS

SEQ ID NO: 35278 - protein, 118 aa, Artificial Sequence
  Chemically Synthesized
QVQLQESGGGLVQAGGSLRLSCAASGNIFYRRGMGWYRQAPGKEREFVAGITRGGITYYADSVKGRFTISRDNAKNTVYLQMNSLKPEDTAVYYCAAPSTYNRYYPYWGQGTQVTVSS

SEQ ID NO: 35279 - protein, 117 aa, Artificial Sequence
  Chemically Synthesized
QVQLQESGGGLVQAGGSLRLSCAASGYISRDLYMGWYRQAPGKERELVAAIASVVVPYADSVKGRFTISRDNAKNTVYLQMNSLKPEDTAVYYCAVRYGRHPYYSYWGQGTQVTVSS

SEQ ID NO: 35280 - protein, 125 aa, Artificial Sequence
  Chemically Synthesized
QVQLQESGGGLVQAGGSLRLSCAASGTIFPYIMGWYRQAPGKEREFVATISYGTTTNYADSVKGRFTISRDNAKNTVYLQMNSLKPEDTAVYYCAVDRWYPLINYQYLLSGYSYWGQGTQVTVSS

SEQ ID NO: 35281 - protein, 126 aa, Artificial Sequence
  Chemically Synthesized
QVQLQESGGGLVQAGGSLRLSCAASGYISSGLYMGWYRQAPGKERELVATIDGGSITYYADSVKGRFTISRDNAKNTVYLQMNSLKPEDTAVYYCAAWTGNEYLYRGDVPSDFYYWGQGTQVTVSS

SEQ ID NO: 35282 - protein, 118 aa, Artificial Sequence
  Chemically Synthesized
QVQLQESGGGLVQAGGSLRLSCAASGTISFDWYMGWYRQAPGKERELVATIDVGGSTYYADSVKGRFTISRDNAKNTVYLQMNSLKPEDTAVYYCAVVYPSVRYHQYWGQGTQVTVSS

SEQ ID NO: 35283 - protein, 117 aa, Artificial Sequence
  Chemically Synthesized
QVQLQESGGGLVQAGGSLRLSCAASGTIFYSIMGWYRQAPGKEREFVATITSGTITNYADSVKGRFTISRDNAKNTVYLQMNSLKPEDTAVYYCAADYDSFTYYNYWGQGTQVTVSS

SEQ ID NO: 35284 - protein, 119 aa, Artificial Sequence
  Chemically Synthesized
QVQLQESGGGLVQAGGSLRLSCAASGYIFYYLIMGWYRQAPGKERELVASIGRGTITYYADSVKGRFTISRDNAKNTVYLQMNSLKPEDTAVYYCAALVGSYDTPHYYWGQGTQVTVSS

SEQ ID NO: 35285 - protein, 126 aa, Artificial Sequence
  Chemically Synthesized
QVQLQESGGGLVQAGGSLRLSCAASGSISFSPGMGWYRQAPGKEREFVAGIDLGSTTYYADSVKGRFTISRDNAKNTVYLQMNSLKPEDTAVYYCAVVTVQDYWSGWVGKYVYAYWGQGTQVTVSS

SEQ ID NO: 35286 - protein, 122 aa, Artificial Sequence
  Chemically Synthesized
QVQLQESGGGLVQAGGSLRLSCAASGNIFLGQYMGWYRQAPGKEREFVAGIDWGTSTNYADSVKGRFTISRDNAKNTVYLQMNSLKPEDTAVYYCAVYIYYSQYYNSDLGYWGQGTQVTVSS

SEQ ID NO: 35287 - protein, 122 aa, Artificial Sequence
  Chemically Synthesized
QVQLQESGGGLVQAGGSLRLSCAASGSISGYQSMGWYRQAPGKERELVAGITDGAITNYADSVKGRFTISRDNAKNTVYLQMNSLKPEDTAVYYCAVSPDWLTQQSAWHGYWGQGTQVTVSS

SEQ ID NO: 35288 - protein, 119 aa, Artificial Sequence
  Chemically Synthesized
QVQLQESGGGLVQAGGSLRLSCAASGSISVYRIFMGWYRQAPGKERELVAAIAAGTSTNYADSVKGRFTISRDNAKNTVYLQMNSLKPEDTAVYYCAAALDAFWRFDYWGQGTQVTVSS

SEQ ID NO: 35289 - protein, 121 aa, Artificial Sequence
  Chemically Synthesized
QVQLQESGGGLVQAGGSLRLSCAASGTISVGNMGWYRQAPGKEREFVASINTGTTTNYADSVKGRFTISRDNAKNTVYLQMNSLKPEDTAVYYCAVRSIADWTDQYQFNYWGQGTQVTVSS

SEQ ID NO: 35290 - protein, 126 aa, Artificial Sequence
  Chemically Synthesized
QVQLQESGGGLVQAGGSLRLSCAASGNISPTYNMGWYRQAPGKEREFVAAIARGATTYYADSVKGRFTISRDNAKNTVYLQMNSLKPEDTAVYYCAAASRPTGDFLRSATHYYDYWGQGTQVTVSS

SEQ ID NO: 35291 - protein, 121 aa, Artificial Sequence
  Chemically Synthesized
QVQLQESGGGLVQAGGSLRLSCAASGSIFDFGYMGWYRQAPGKERELVAAITDGTLPYADSVKGRFTISRDNAKNTVYLQMNSLKPEDTAVYYCAAYDIGVPAGADELGYWGQGTQVTVSS

SEQ ID NO: 35292 - protein, 118 aa, Artificial Sequence
  Chemically Synthesized
QVQLQESGGGLVQAGGSLRLSCAASGSIFTGTLMGWYRQAPGKEREFVAGIGKGGSTYYADSVKGRFTISRDNAKNTVYLQMNSLKPEDTAVYYCAARVARSGPFYYWGQGTQVTVSS

SEQ ID NO: 35293 - protein, 125 aa, Artificial Sequence
  Chemically Synthesized
QVQLQESGGGLVQAGGSLRLSCAASGNIFYGYFMGWYRQAPGKERELVAGITWGTITNYADSVKGRFTISRDNAKNTVYLQMNSLKPEDTAVYYCAVWYTKAAYTLAEGVAFIYWGQGTQVTVSS

SEQ ID NO: 35294 - protein, 126 aa, Artificial Sequence
  Chemically Synthesized
QVQLQESGGGLVQAGGSLRLSCAASGTIFYGSQMGWYRQAPGKERELVAAIGGGSNTNYADSVKGRFTISRDNAKNTVYLQMNSLKPEDTAVYYCAATTWDWTGSGDTYYGYFDYWGQGTQVTVSS

SEQ ID NO: 35295 - protein, 118 aa, Artificial Sequence
  Chemically Synthesized
QVQLQESGGGLVQAGGSLRLSCAASGYIFYIRYMGWYRQAPGKERELVAAINSGAITYYADSVKGRFTISRDNAKNTVYLQMNSLKPEDTAVYYCAAIDNNYVRHAYWGQGTQVTVSS

SEQ ID NO: 35296 - protein, 122 aa, Artificial Sequence
  Chemically Synthesized
QVQLQESGGGLVQAGGSLRLSCAASGNISTWGDMGWYRQAPGKERELVAAINEGSSTYYADSVKGRFTISRDNAKNTVYLQMNSLKPEDTAVYYCAVEYDDHYDRGYHHGYWGQGTQVTVSS

SEQ ID NO: 35297 - protein, 114 aa, Artificial Sequence
  Chemically Synthesized
QVQLQESGGGLVQAGGSLRLSCAASGTISDPSTMGWYRQAPGKERELVAAIAIPYADSVKGRFTISRDNAKNTVYLQMNSLKPEDTAVYYCAVHDQNWYDHAYWGQGTQVTVSS

SEQ ID NO: 35298 - protein, 117 aa, Artificial Sequence
  Chemically Synthesized
QVQLQESGGGLVQAGGSLRLSCAASGSISQDWWMGWYRQAPGKEREFVAAINAGTTTNYADSVKGRFTISRDNAKNTVYLQMNSLKPEDTAVYYCAVYGAAIAVHYWGQGTQVTVSS

SEQ ID NO: 35299 - protein, 121 aa, Artificial Sequence
  Chemically Synthesized
QVQLQESGGGLVQAGGSLRLSCAASGYIFVISMGWYRQAPGKERELVAAIGGGGITNYADSVKGRFTISRDNAKNTVYLQMNSLKPEDTAVYYCAAGDTADPEKGWPHEYWGQGTQVTVSS

SEQ ID NO: 35300 - protein, 110 aa, Artificial Sequence
  Chemically Synthesized
QVQLQESGGGLVQAGGSLRLSCAASGSISGGYEMGWYRQAPGKEREFVAGITDGSNTYYADSVKGRFTISRDNAKNTVYLQMNSLKPEDTAVYYCAASYWGQGTQVTVSS

SEQ ID NO: 35301 - protein, 120 aa, Artificial Sequence
  Chemically Synthesized
QVQLQESGGGLVQAGGSLRLSCAASGYISLYSQMGWYRQAPGKERELPLLVVVVLPYADSVKGRFTISRDNAKNTVYLQMNSLKPEDTAVYYCAAWRDRTLRLAGYHLYWGQGTQVTVSS

SEQ ID NO: 35302 - protein, 117 aa, Artificial Sequence
  Chemically Synthesized
QVQLQESGGGLVQAGGSLRLSCAASGNIFFTHSMGWYRQAPGKEREFVATIGQGATTYYADSVKGRFTISRDNAKNTVYLQMNSLKPEDTAVYYCAVRWPNQIYFYWGQGTQVTVSS

SEQ ID NO: 35303 - protein, 122 aa, Artificial Sequence
  Chemically Synthesized
QVQLQESGGGLVQAGGSLRLSCAASGYISGNAQMGWYRQAPGKEREFVASIAIGGTTNYADSVKGRFTISRDNAKNTVYLQMNSLKPEDTAVYYCAVTVQPYSDYYTPHWYWGQGTQVTVSS

SEQ ID NO: 35304 - protein, 118 aa, Artificial Sequence
  Chemically Synthesized
QVQLQESGGGLVQAGGSLRLSCAASGSIFRGDDMGWYRQAPGKERELVAGITGGSTTNYADSVKGRFTISRDNAKNTVYLQMNSLKPEDTAVYYCAARFIWRTALSYWGQGTQVTVSS

SEQ ID NO: 35305 - protein, 118 aa, Artificial Sequence
  Chemically Synthesized
QVQLQESGGGLVQAGGSLRLSCAASGTISSGTTMGWYRQAPGKERELVASIGTGGITNYADSVKGRFTISRDNAKNTVYLQMNSLKPEDTAVYYCAAYVAVKHYLDYWGQGTQVTVSS

SEQ ID NO: 35306 - protein, 126 aa, Artificial Sequence
  Chemically Synthesized
QVQLQESGGGLVQAGGSLRLSCAASGNIFAHGDMGWYRQAPGKEREFVATIADGSNTYYADSVKGRFTISRDNAKNTVYLQMNSLKPEDTAVYYCAVLFLLDDDLYYSGWTVHYYWGQGTQVTVSS

SEQ ID NO: 35307 - protein, 125 aa, Artificial Sequence
  Chemically Synthesized
QVQLQESGGGLVQAGGSLRLSCAASGYISNAVDMGWYRQAPGKEREFVAGITGGGTTYADSVKGRFTISRDNAKNTVYLQMNSLKPEDTAVYYCAADNPGWLTGLGRWYGLHTYWGQGTQVTVSS

SEQ ID NO: 35308 - protein, 121 aa, Artificial Sequence
  Chemically Synthesized
QVQLQESGGGLVQAGGSLRLSCAASGSISAARYMGWYRQAPGKERELVAGISDGSSTNYADSVKGRFTISRDNAKNTVYLQMNSLKPEDTAVYYCAAETGVRRNSFVFLYWGQGTQVTVSS

SEQ ID NO: 35309 - protein, 121 aa, Artificial Sequence
  Chemically Synthesized
QVQLQESGGGLVQAGGSLRLSCAASGTISIVESMGWYRQAPGKEREFVAGIGNGGNTNYADSVKGRFTISRDNAKNTVYLQMNSLKPEDTAVYYCAAFATYDGRDDFSLYWGQGTQVTVSS

SEQ ID NO: 35310 - protein, 126 aa, Artificial Sequence
  Chemically Synthesized
QVQLQESGGGLVQAGGSLRLSCAASGTIFTVWVMGWYRQAPGKEREFVAAIDDGGTTNYADSVKGRFTISRDNAKNTVYLQMNSLKPEDTAVYYCAASQNEQYGERPHPENPYGYWGQGTQVTVSS

SEQ ID NO: 35311 - protein, 120 aa, Artificial Sequence
  Chemically Synthesized
QVQLQESGGGLVQAGGSLRLSCAASGYISTWSVMGWYRQAPGKEREFVAAITGGTSTNYADSVKGRFTISRDNAKNTVYLQMNSLKPEDTAVYYCAAAETFTTSTLTFYWGQGTQVTVSS

SEQ ID NO: 35312 - protein, 123 aa, Artificial Sequence
  Chemically Synthesized
QVQLQESGGGLVQAGGSLRLSCAASGNISDDPTMGWYRQAPGKEREFVAGINGGSNTNYADSVKGRFTISRDNAKNTVYLQMNSLKPEDTAVYYCAAGYIDIDYTGAEAYRYWGQGTQVTVSS

SEQ ID NO: 35313 - protein, 118 aa, Artificial Sequence
  Chemically Synthesized
QVQLQESGGGLVQAGGSLRLSCAASGTISRISGMGWYRQAPGKEREFVAAIDLGSSTNYADSVKGRFTISRDNAKNTVYLQMNSLKPEDTAVYYCAAWRYYISFLSYWGQGTQVTVSS

SEQ ID NO: 35314 - protein, 111 aa, Artificial Sequence
  Chemically Synthesized
QVQLQESGGGLVQAGGSLRLSCAASGYILLLTMGWYRQAPGKEREFVAGIASGSITNYADSVKGRFTISRDNAKNTVYLQMNSLKPEDTAVYYCAFRSWYWGQGTQVTVSS

SEQ ID NO: 35315 - protein, 118 aa, Artificial Sequence
  Chemically Synthesized
QVQLQESGGGLVQAGGSLRLSCAASGSISGRGYMGWYRQAPGKERELVAAIGYGASTNYADSVKGRFTISRDNAKNTVYLQMNSLKPEDTAVYYCAAANWRRQLYGYWGQGTQVTVSS

SEQ ID NO: 35316 - protein, 117 aa, Artificial Sequence
  Chemically Synthesized
QVQLQESGGGLVQAGGSLRLSCAASGNIFGYYTMGWYRQAPGKERELVASINYGAITNYADSVKGRFTISRDNAKNTVYLQMNSLKPEDTAVYYCAAVRPTRTLMYWGQGTQVTVSS

SEQ ID NO: 35317 - protein, 122 aa, Artificial Sequence
  Chemically Synthesized
QVQLQESGGGLVQAGGSLRLSCAASGTISALPGMGWYRQAPGKEREFVASIADGSSTNYADSVKGRFTISRDNAKNTVYLQMNSLKPEDTAVYYCAVGYRPLDGPNHYHDYWGQGTQVTVSS

SEQ ID NO: 35318 - protein, 118 aa, Artificial Sequence
  Chemically Synthesized
QVQLQESGGGLVQAGGSLRLSCAASGYIFRHYYMGWYRQAPGKERELVAGIGRGSSTNYADSVKGRFTISRDNAKNTVYLQMNSLKPEDTAVYYCAVKSVYPYAHYYWGQGTQVTVSS

SEQ ID NO: 35319 - protein, 126 aa, Artificial Sequence
  Chemically Synthesized
QVQLQESGGGLVQAGGSLRLSCAASGTISTTPGMGWYRQAPGKEREFVAGIALGTNTNYADSVKGRFTISRDNAKNTVYLQMNSLKPEDTAVYYCAAQNYGRYQYLDDGYRFFGYWGQGTQVTVSS

SEQ ID NO: 35320 - protein, 126 aa, Artificial Sequence
  Chemically Synthesized
QVQLQESGGGLVQAGGSLRLSCAASGYISPTADMGWYRQAPGKERELVAAITRGGITYYADSVKGRFTISRDNAKNTVYLQMNSLKPEDTAVYYCAVGDNAAWGRRYYQTDRHLYWGQGTQVTVSS

SEQ ID NO: 35321 - protein, 117 aa, Artificial Sequence
  Chemically Synthesized
QVQLQESGGGLVQAGGSLRLSCAASGNISTSGTMGWYRQAPGKERELVATISIGSTTYYADSVKGRFTISRDNAKNTVYLQMNSLKPEDTAVYYCAVDREYSVLIYWGQGTQVTVSS

SEQ ID NO: 35322 - protein, 118 aa, Artificial Sequence
  Chemically Synthesized
QVQLQESGGGLVQAGGSLRLSCAASGNIFLRRSMGWYRQAPGKEREFVASISRGSNTYYADSVKGRFTISRDNAKNTVYLQMNSLKPEDTAVYYCAAATYRRYGHVYWGQGTQVTVSS

SEQ ID NO: 35323 - protein, 112 aa, Artificial Sequence
  Chemically Synthesized
QVQLQESGGGLVQAGGSLRLSCAASGSISTRWDMGWYRQAPGKERELVATIGYGGYYQYADSVKGRFTISRDNAKNTVYLQMNSLKPEDTAVYYCAYLYDYWGQGTQVTVSS

SEQ ID NO: 35324 - protein, 117 aa, Artificial Sequence
  Chemically Synthesized
QVQLQESGGGLVQAGGSLRLSCAASGNISHAPYMGWYRQAPGKEREFVATITDGIVPYADSVKGRFTISRDNAKNTVYLQMNSLKPEDTAVYYCAVTVYDPYYHDYWGQGTQVTVSS

SEQ ID NO: 35325 - protein, 118 aa, Artificial Sequence
  Chemically Synthesized
QVQLQESGGGLVQAGGSLRLSCAASGYISAYPPRMGWYRQAPGKEREFVAAIARGGSTYADSVKGRFTISRDNAKNTVYLQMNSLKPEDTAVYYCAAAYLNYSSHSYWGQGTQVTVSS

SEQ ID NO: 35326 - protein, 115 aa, Artificial Sequence
  Chemically Synthesized
QVQLQESGGGLVQAGGSLRLSCAASGTIFWERYMGWYRQAPGKERELVASITPGTTTYYADSVKGRFTISRDNAKNTVYLQMNSLKPEDTAVYYCAADTQGFSYWGQGTQVTVSS

SEQ ID NO: 35327 - protein, 122 aa, Artificial Sequence
  Chemically Synthesized
QVQLQESGGGLVQAGGSLRLSCAASGTIFRSKVMGWYRQAPGKERELVATIAQGGNTNYADSVKGRFTISRDNAKNTVYLQMNSLKPEDTAVYYCAAALQNQDDDWYGHIYWGQGTQVTVSS

SEQ ID NO: 35328 - protein, 117 aa, Artificial Sequence
  Chemically Synthesized
QVQLQESGGGLVQAGGSLRLSCAASGNISRSGDMGWYRQAPGKERELVASISSVLVPYADSVKGRFTISRDNAKNTVYLQMNSLKPEDTAVYYCAVGDYYDDDHDYWGQGTQVTVSS

SEQ ID NO: 35329 - protein, 118 aa, Artificial Sequence
  Chemically Synthesized
QVQLQESGGGLVQAGGSLRLSCAASGTISWDLRMGWYRQAPGKEREFVASIGFGGSTNYADSVKGRFTISRDNAKNTVYLQMNSLKPEDTAVYYCAVDDNQLNVLVYWGQGTQVTVSS

SEQ ID NO: 35330 - protein, 124 aa, Artificial Sequence
  Chemically Synthesized
QVQLQESGGGLVQAGGSLRLSCAASGYFLVLLMGWYRQAPGKEREFVATIDDGSITYYADSVKGRFTISRDNAKNTVYLQMNSLKPEDTAVYYCAVDWRVNVLLLLCSMRLWYWGQGTQVTVSS

SEQ ID NO: 35331 - protein, 118 aa, Artificial Sequence
  Chemically Synthesized
QVQLQESGGGLVQAGGSLRLSCAASGSISTWASMGWYRQAPGKERELVAAITVGATTNYADSVKGRFTISRDNAKNTVYLQMNSLKPEDTAVYYCAVFRGLRWDLDYWGQGTQVTVSS

SEQ ID NO: 35332 - protein, 118 aa, Artificial Sequence
  Chemically Synthesized
QVQLQESGGGLVQAGGSLRLSCAASGNIFDNYAMGWYRQAPGKERELVAGINSGTNTYYADSVKGRFTISRDNAKNTVYLQMNSLKPEDTAVYYCAASRDRVYQFYYWGQGTQVTVSS

SEQ ID NO: 35333 - protein, 126 aa, Artificial Sequence
  Chemically Synthesized
QVQLQESGGGLVQAGGSLRLSCAASGTISPAERMGWYRQAPGKERELVASISYGSNTYYADSVKGRFTISRDNAKNTVYLQMNSLKPEDTAVYYCAAEAGRAGTTPAVQYKGHGYWGQGTQVTVSS

SEQ ID NO: 35334 - protein, 118 aa, Artificial Sequence
  Chemically Synthesized
QVQLQESGGGLVQAGGSLRLSCAASGTISYNSGMGWYRQAPGKERELVAGIAVGTNTYYADSVKGRFTISRDNAKNTVYLQMNSLKPEDTAVYYCAAAWPSQGYHGYWGQGTQVTVSS

SEQ ID NO: 35335 - protein, 118 aa, Artificial Sequence
  Chemically Synthesized
QVQLQESGGGLVQAGGSLRLSCAASGYISDYRVMGWYRQAPGKEREFVATINVGATTNYADSVKGRFTISRDNAKNTVYLQMNSLKPEDTAVYYCAVYGYVYIDYLYWGQGTQVTVSS

SEQ ID NO: 35336 - protein, 118 aa, Artificial Sequence
  Chemically Synthesized
QVQLQESGGGLVQAGGSLRLSCAASGSIFDSNRMGWYRQAPGKERELVATIDPGSITNYADSVKGRFTISRDNAKNTVYLQMNSLKPEDTAVYYCAVADRLLEAYYYWGQGTQVTVSS

SEQ ID NO: 35337 - protein, 118 aa, Artificial Sequence
  Chemically Synthesized
QVQLQESGGGLVQAGGSLRLSCAASGSISYSPVMGWYRQAPGKEREFVAGIAIGATTYYADSVKGRFTISRDNAKNTVYLQMNSLKPEDTAVYYCAVNEYRGTSLSYWGQGTQVTVSS

SEQ ID NO: 35338 - protein, 118 aa, Artificial Sequence
  Chemically Synthesized
QVQLQESGGGLVQAGGSLRLSCAASGNISQYAVMGWYRQAPGKERELVASIAYGTITYYADSVKGRFTISRDNAKNTVYLQMNSLKPEDTAVYYCAVQTTVNSLLTYWGQGTQVTVSS

SEQ ID NO: 35339 - protein, 124 aa, Artificial Sequence
  Chemically Synthesized
QVQLQESGGGLVQAGGSLRLSCAASGNFGTTMGWYRQAPGKEREFVASITDGANTYYADSVKGRFTISRDNAKNTVYLQMNSLKPEDTAVYYCAVYEYNNYYATIGDGYRFYYWGQGTQVTVSS

SEQ ID NO: 35340 - protein, 117 aa, Artificial Sequence
  Chemically Synthesized
QVQLQESGGGLVQAGGSLRLSCAASGSIFDATVMGWYRQAPGKEREFVAAISSGSITNYADSVKGRFTISRDNAKNTVYLQMNSLKPEDTAVYYCAVLRADYDIIYWGQGTQVTVSS

SEQ ID NO: 35341 - protein, 117 aa, Artificial Sequence
  Chemically Synthesized
QVQLQESGGGLVQAGGSLRLSCAASGSIFYRAMGWYRQAPGKEREFVATISAGAITNYADSVKGRFTISRDNAKNTVYLQMNSLKPEDTAVYYCAVDLFFQKYFHYWGQGTQVTVSS

SEQ ID NO: 35342 - protein, 122 aa, Artificial Sequence
  Chemically Synthesized
QVQLQESGGGLVQAGGSLRLSCAASGNISYYTDMGWYRQAPGKERELVAGITYGGSTNYADSVKGRFTISRDNAKNTVYLQMNSLKPEDTAVYYCAVGGRHYGPEPEDLSYWGQGTQVTVSS

SEQ ID NO: 35343 - protein, 115 aa, Artificial Sequence
  Chemically Synthesized
QVQLQESGGGLVQAGGSLRLSCAASGYISSMGWYRQAPGKERELVAAINLGATTYYADSVKGRFTISRDNAKNTVYLQMNSLKPEDTAVYYCAAYAYFDSGLGYWGQGTQVTVSS

SEQ ID NO: 35344 - protein, 121 aa, Artificial Sequence
  Chemically Synthesized
QVQLQESGGGLVQAGGSLRLSCAASGTISYYGTMGWYRQAPGKERELLPLLIWVLLPYADSVKGRFTISRDNAKNTVYLQMNSLKPEDTAVYYCAVGNYDYVYAGTYHDYWGQGTQVTVSS

SEQ ID NO: 35345 - protein, 118 aa, Artificial Sequence
  Chemically Synthesized
QVQLQESGGGLVQAGGSLRLSCAASGTISTLNAMGWYRQAPGKEREFVAGITSGSTTYYADSVKGRFTISRDNAKNTVYLQMNSLKPEDTAVYYCAANYSPDAVYHYWGQGTQVTVSS

SEQ ID NO: 35346 - protein, 125 aa, Artificial Sequence
  Chemically Synthesized
QVQLQESGGGLVQAGGSLRLSCAASGTFLWTVMGWYRQAPGKERELVASIDVGGSTYYADSVKGRFTISRDNAKNTVYLQMNSLKPEDTAVYYCAVGQVYFGADDNEAWERYYYWGQGTQVTVSS

SEQ ID NO: 35347 - protein, 118 aa, Artificial Sequence
  Chemically Synthesized
QVQLQESGGGLVQAGGSLRLSCAASGYISTYPLMGWYRQAPGKEREFVATIGEGAITYYADSVKGRFTISRDNAKNTVYLQMNSLKPEDTAVYYCAVVAYRYGSFAYWGQGTQVTVSS

SEQ ID NO: 35348 - protein, 122 aa, Artificial Sequence
  Chemically Synthesized
QVQLQESGGGLVQAGGSLRLSCAASGTISYPYYMGWYRQAPGKERELVAGISGGANTYYADSVKGRFTISRDNAKNTVYLQMNSLKPEDTAVYYCAVPDVNLRVHYAAYLYWGQGTQVTVSS

SEQ ID NO: 35349 - protein, 125 aa, Artificial Sequence
  Chemically Synthesized
QVQLQESGGGLVQAGGSLRLSCAASGYISHRWAMGWYRQAPGKERELVATIDLVLVPYADSVKGRFTISRDNAKNTVYLQMNSLKPEDTAVYYCAVRILSQYQVKGLTSHTYRYWGQGTQVTVSS

SEQ ID NO: 35350 - protein, 118 aa, Artificial Sequence
  Chemically Synthesized
QVQLQESGGGLVQAGGSLRLSCAASGYISVVSFMGWYRQAPGKERELVASITSGGSTYYADSVKGRFTISRDNAKNTVYLQMNSLKPEDTAVYYCAAPYDDYLVFYYWGQGTQVTVSS

SEQ ID NO: 35351 - protein, 118 aa, Artificial Sequence
  Chemically Synthesized
QVQLQESGGGLVQAGGSLRLSCAASGSIWTMGWYRQAPGKERELVAGINSGANTNYADSVKGRFTISRDNAKNTVYLQMNSLKPEDTAVYYCAVSYYHTTDDVRYWYWGQGTQVTVSS

SEQ ID NO: 35352 - protein, 120 aa, Artificial Sequence
  Chemically Synthesized
QVQLQESGGGLVQAGGSLRLSCAASGNISNISMGWYRQAPGKERELVAAIGSGSTPYADSVKGRFTISRDNAKNTVYLQMNSLKPEDTAVYYCAVIYRLHRYYLLHPFYWGQGTQVTVSS

SEQ ID NO: 35353 - protein, 118 aa, Artificial Sequence
  Chemically Synthesized
QVQLQESGGGLVQAGGSLRLSCAASGYISFHRYMGWYRQAPGKERELVATINVGSITNYADSVKGRFTISRDNAKNTVYLQMNSLKPEDTAVYYCAVFYATSGGHYYWGQGTQVTVSS

SEQ ID NO: 35354 - protein, 118 aa, Artificial Sequence
  Chemically Synthesized
QVQLQESGGGLVQAGGSLRLSCAASGYIFDGQIMGWYRQAPGKEREFVASINAGSTTYYADSVKGRFTISRDNAKNTVYLQMNSLKPEDTAVYYCAVYVGDYIALAYWGQGTQVTVSS

SEQ ID NO: 35355 - protein, 121 aa, Artificial Sequence
  Chemically Synthesized
QVQLQESGGGLVQAGGSLRLSCAASGSISDVGDMGWYRQAPGKERELVAGIDLGTTTYADSVKGRFTISRDNAKNTVYLQMNSLKPEDTAVYYCAAQISGYGVGIDRYGYWGQGTQVTVSS

SEQ ID NO: 35356 - protein, 122 aa, Artificial Sequence
  Chemically Synthesized
QVQLQESGGGLVQAGGSLRLSCAASGNISAWNIMGWYRQAPGKEREFVASINHGTNTNYADSVKGRFTISRDNAKNTVYLQMNSLKPEDTAVYYCAVYAEYSDLIGYYHGYWGQGTQVTVSS

SEQ ID NO: 35357 - protein, 118 aa, Artificial Sequence
  Chemically Synthesized
QVQLQESGGGLVQAGGSLRLSCAASGNIFGFSYMGWYRQAPGKEREFVAAIAAGSTTYYADSVKGRFTISRDNAKNTVYLQMNSLKPEDTAVYYCAAGLDDFYDLLYWGQGTQVTVSS

SEQ ID NO: 35358 - protein, 121 aa, Artificial Sequence
  Chemically Synthesized
QVQLQESGGGLVQAGGSLRLSCAASGYISDLQYMGWYRQAPGKERELVATIGSVLLPYADSVKGRFTISRDNAKNTVYLQMNSLKPEDTAVYYCAVYYDIDYYVDPYHDYWGQGTQVTVSS

SEQ ID NO: 35359 - protein, 118 aa, Artificial Sequence
  Chemically Synthesized
QVQLQESGGGLVQAGGSLRLSCAASGNIFGVTRMGWYRQAPGKERELVAGITYGGSTNYADSVKGRFTISRDNAKNTVYLQMNSLKPEDTAVYYCAAATADADTFGYWGQGTQVTVSS

SEQ ID NO: 35360 - protein, 118 aa, Artificial Sequence
  Chemically Synthesized
QVQLQESGGGLVQAGGSLRLSCAASGTIFAAKYMGWYRQAPGKERELVAAISYGASTYYADSVKGRFTISRDNAKNTVYLQMNSLKPEDTAVYYCAVYDTPYHYLYYWGQGTQVTVSS

SEQ ID NO: 35361 - protein, 124 aa, Artificial Sequence
  Chemically Synthesized
QVQLQESGGGLVQAGGSLRLSCAASGSISRGDGMGWYRQAPGKEREFVATIGDGSTTYYADSVKGRFTISRDNAKNTVYLQMNSLKPEDTAVYYCAVPYDTWTAALQYVAYDYWGQGTQVTVSS

SEQ ID NO: 35362 - protein, 111 aa, Artificial Sequence
  Chemically Synthesized
QVQLQESGGGLVQAGGSLRLSCAASGSISNHRTMGWYRQAPGKERELVATINYGGSTYYADSVKGRFTISRDNAKNTVYLQMNSLKPEDTAVYYCAAGHYWGQGTQVTVSS

SEQ ID NO: 35363 - protein, 122 aa, Artificial Sequence
  Chemically Synthesized
QVQLQESGGGLVQAGGSLRLSCAASGYISAEDDMGWYRQAPGKERELVAGISNGSSTNYADSVKGRFTISRDNAKNTVYLQMNSLKPEDTAVYYCAVQHDYPQYHLPPHGYWGQGTQVTVSS

SEQ ID NO: 35364 - protein, 118 aa, Artificial Sequence
  Chemically Synthesized
QVQLQESGGGLVQAGGSLRLSCAASGNISYYPVMGWYRQAPGKEREFVATIAYGATTNYADSVKGRFTISRDNAKNTVYLQMNSLKPEDTAVYYCAVYAYVSGPYVYWGQGTQVTVSS

SEQ ID NO: 35365 - protein, 122 aa, Artificial Sequence
  Chemically Synthesized
QVQLQESGGGLVQAGGSLRLSCAASGSISQAGYMGWYRQAPGKEREFVAAISRGTTTNYADSVKGRFTISRDNAKNTVYLQMNSLKPEDTAVYYCAARARSADYDSRYHAYWGQGTQVTVSS

SEQ ID NO: 35366 - protein, 116 aa, Artificial Sequence
  Chemically Synthesized
QVQLQESGGGLVQAGGSLRLSCAASGNISAYYVMGWYRQAPGKERELVAGITRGASTYYADSVKGRFTISRDNAKNTVYLQMNSLKPEDTAVYYCAVWTVPFHDYWGQGTQVTVSS

SEQ ID NO: 35367 - protein, 117 aa, Artificial Sequence
  Chemically Synthesized
QVQLQESGGGLVQAGGSLRLSCAASGTISRYGVMGWYRQAPGKEREFVATISNGGITNYADSVKGRFTISRDNAKNTVYLQMNSLKPEDTAVYYCAASLVLIIGIYWGQGTQVTVSS

SEQ ID NO: 35368 - protein, 118 aa, Artificial Sequence
  Chemically Synthesized
QVQLQESGGGLVQAGGSLRLSCAASGSIFRPIFMGWYRQAPGKERELVAGIDFGGITYYADSVKGRFTISRDNAKNTVYLQMNSLKPEDTAVYYCAVDYFYVNDLRYWGQGTQVTVSS

SEQ ID NO: 35369 - protein, 117 aa, Artificial Sequence
  Chemically Synthesized
QVQLQESGGGLVQAGGSLRLSCAASGTISDQFVMGWYRQAPGKERELVALLLLVLIPYADSVKGRFTISRDNAKNTVYLQMNSLKPEDTAVYYCAVLWLYPTQLGYWGQGTQVTVSS

SEQ ID NO: 35370 - protein, 122 aa, Artificial Sequence
  Chemically Synthesized
QVQLQESGGGLVQAGGSLRLSCAASGSISNDVDMGWYRQAPGKERELVAAIARGSTTNYADSVKGRFTISRDNAKNTVYLQMNSLKPEDTAVYYCAANRDDDYLVYDDHGYWGQGTQVTVSS

SEQ ID NO: 35371 - protein, 118 aa, Artificial Sequence
  Chemically Synthesized
QVQLQESGGGLVQAGGSLRLSCAASGSISDPYTMGWYRQAPGKEREFVATITYGATTYYADSVKGRFTISRDNAKNTVYLQMNSLKPEDTAVYYCAVPVDNQRSHDYWGQGTQVTVSS

SEQ ID NO: 35372 - protein, 126 aa, Artificial Sequence
  Chemically Synthesized
QVQLQESGGGLVQAGGSLRLSCAASGNISGYDYMGWYRQAPGKERELVATIDYGGSTYYADSVKGRFTISRDNAKNTVYLQMNSLKPEDTAVYYCAVYIVLRVQEGSTGDYDFYYWGQGTQVTVSS

SEQ ID NO: 35373 - protein, 118 aa, Artificial Sequence
  Chemically Synthesized
QVQLQESGGGLVQAGGSLRLSCAASGSIFDVGYMGWYRQAPGKEREFVAAITYGGNTYYADSVKGRFTISRDNAKNTVYLQMNSLKPEDTAVYYCAALVYRQWVHYYWGQGTQVTVSS

SEQ ID NO: 35374 - protein, 120 aa, Artificial Sequence
  Chemically Synthesized
QVQLQESGGGLVQAGGSLRLSCAASGTIFWNFAMGWYRQAPGKERELVATINIGGSPYADSVKGRFTISRDNAKNTVYLQMNSLKPEDTAVYYCAAVTARSSNTLLTIYWGQGTQVTVSS

SEQ ID NO: 35375 - protein, 115 aa, Artificial Sequence
  Chemically Synthesized
QVQLQESGGGLVQAGGSLRLSCAASGNIFYTRYMGWYRQAPGKEREFVAAISRGTTTNYADSVKGRFTISRDNAKNTVYLQMNSLKPEDTAVYYCAVTVLYHAYWGQGTQVTVSS

SEQ ID NO: 35376 - protein, 117 aa, Artificial Sequence
  Chemically Synthesized
QVQLQESGGGLVQAGGSLRLSCAASGNIFPFPYMGWYRQAPGKERELVASIGYGANTYYADSVKGRFTISRDNAKNTVYLQMNSLKPEDTAVYYCAVIPLDWITIYWGQGTQVTVSS

SEQ ID NO: 35377 - protein, 121 aa, Artificial Sequence
  Chemically Synthesized
QVQLQESGGGLVQAGGSLRLSCAASGSIFPWAGMGWYRQAPGKEREFVAAIGDGTTTYYADSVKGRFTISRDNAKNTVYLQMNSLKPEDTAVYYCAADYGPGGVYRDHIYWGQGTQVTVSS

SEQ ID NO: 35378 - protein, 120 aa, Artificial Sequence
  Chemically Synthesized
QVQLQESGGGLVQAGGSLRLSCAASGNIFKHDIMGWYRQAPGKEREFVATITGYYYLYADSVKGRFTISRDNAKNTVYLQMNSLKPEDTAVYYCAVSLDYAGLCTLCIYWGQGTQVTVSS

SEQ ID NO: 35379 - protein, 119 aa, Artificial Sequence
  Chemically Synthesized
QVQLQESGGGLVQAGGSLRLSCAASGYISRVPYMGWYRQAPGKERELLLMTVVLPYADSVKGRFTISRDNAKNTVYLQMNSLKPEDTAVYYCAADYYTTLGRQEYHNYWGQGTQVTVSS

SEQ ID NO: 35380 - protein, 117 aa, Artificial Sequence
  Chemically Synthesized
QVQLQESGGGLVQAGGSLRLSCAASGYISDGSMGWYRQAPGKERELVAGINDGTTTNYADSVKGRFTISRDNAKNTVYLQMNSLKPEDTAVYYCAASSYSVDAFRYWGQGTQVTVSS

SEQ ID NO: 35381 - protein, 117 aa, Artificial Sequence
  Chemically Synthesized
QVQLQESGGGLVQAGGSLRLSCAASGTISSTTMGWYRQAPGKERELVAAINYGATTYYADSVKGRFTISRDNAKNTVYLQMNSLKPEDTAVYYCAAGDYFTDPLDYWGQGTQVTVSS

SEQ ID NO: 35382 - protein, 118 aa, Artificial Sequence
  Chemically Synthesized
QVQLQESGGGLVQAGGSLRLSCAASGSIFRGATMGWYRQAPGKEREFVATITSGTITNYADSVKGRFTISRDNAKNTVYLQMNSLKPEDTAVYYCAVYRAVRPDLYYWGQGTQVTVSS

SEQ ID NO: 35383 - protein, 122 aa, Artificial Sequence
  Chemically Synthesized
QVQLQESGGGLVQAGGSLRLSCAASGSISQYGHMGWYRQAPGKERELVAAIGPGANTNYADSVKGRFTISRDNAKNTVYLQMNSLKPEDTAVYYCAATDSWYPVDYAYFDYWGQGTQVTVSS

SEQ ID NO: 35384 - protein, 122 aa, Artificial Sequence
  Chemically Synthesized
QVQLQESGGGLVQAGGSLRLSCAASGNISYYNKMGWYRQAPGKEREFVAAIDVGSITNYADSVKGRFTISRDNAKNTVYLQMNSLKPEDTAVYYCAATHGRYWRQYLDHYYWGQGTQVTVSS

SEQ ID NO: 35385 - protein, 118 aa, Artificial Sequence
  Chemically Synthesized
QVQLQESGGGLVQAGGSLRLSCAASGTIFGPYFMGWYRQAPGKERELVASISYGASTYYADSVKGRFTISRDNAKNTVYLQMNSLKPEDTAVYYCAARRVFHRNYVYWGQGTQVTVSS

SEQ ID NO: 35386 - protein, 126 aa, Artificial Sequence
  Chemically Synthesized
QVQLQESGGGLVQAGGSLRLSCAASGTIFPADYMGWYRQAPGKEREFVATIGGGGTTNYADSVKGRFTISRDNAKNTVYLQMNSLKPEDTAVYYCAAHGLYQNWYPAYVDDYLAYWGQGTQVTVSS

SEQ ID NO: 35387 - protein, 117 aa, Artificial Sequence
  Chemically Synthesized
QVQLQESGGGLVQAGGSLRLSCAASGSIFIIYVMGWYRQAPGKEREFVAGIGYGSSTYYADSVKGRFTISRDNAKNTVYLQMNSLKPEDTAVYYCATREGDDALWYWGQGTQVTVSS

SEQ ID NO: 35388 - protein, 118 aa, Artificial Sequence
  Chemically Synthesized
QVQLQESGGGLVQAGGSLRLSCAASGTIFAIEVMGWYRQAPGKERELVAAIDYGSITYYADSVKGRFTISRDNAKNTVYLQMNSLKPEDTAVYYCAVYYLYLDVFPYWGQGTQVTVSS

SEQ ID NO: 35389 - protein, 115 aa, Artificial Sequence
  Chemically Synthesized
QVQLQESGGGLVQAGGSLRLSCAASGSISTPVWMGWYRQAPGKEREFVASISYGASTYYADSVKGRFTISRDNAKNTVYLQMNSLKPEDTAVYYCAVVRSYVSYWGQGTQVTVSS

SEQ ID NO: 35390 - protein, 118 aa, Artificial Sequence
  Chemically Synthesized
QVQLQESGGGLVQAGGSLRLSCAASGSISRRAVMGWYRQAPGKERELVAAIDHGGNTYYADSVKGRFTISRDNAKNTVYLQMNSLKPEDTAVYYCAARYSFAWRYRYWGQGTQVTVSS

SEQ ID NO: 35391 - protein, 118 aa, Artificial Sequence
  Chemically Synthesized
QVQLQESGGGLVQAGGSLRLSCAASGSIFYYAYMGWYRQAPGKEREFVATINTGTSTNYADSVKGRFTISRDNAKNTVYLQMNSLKPEDTAVYYCAVYWWRALYYPYWGQGTQVTVSS

SEQ ID NO: 35392 - protein, 126 aa, Artificial Sequence
  Chemically Synthesized
QVQLQESGGGLVQAGGSLRLSCAASGNIFQTGYMGWYRQAPGKEREFVATITAGGSTNYADSVKGRFTISRDNAKNTVYLQMNSLKPEDTAVYYCAAGYSPPWWPTGYLYRYHYYWGQGTQVTVSS

SEQ ID NO: 35393 - protein, 118 aa, Artificial Sequence
  Chemically Synthesized
QVQLQESGGGLVQAGGSLRLSCAASGTISRLYYMGWYRQAPGKEREFVASIGVGTSTNYADSVKGRFTISRDNAKNTVYLQMNSLKPEDTAVYYCAVRSRPFRYFFYWGQGTQVTVSS

SEQ ID NO: 35394 - protein, 126 aa, Artificial Sequence
  Chemically Synthesized
QVQLQESGGGLVQAGGSLRLSCAASGNIFYYARMGWYRQAPGKEREFVAGIDYGTTTYYADSVKGRFTISRDNAKNTVYLQMNSLKPEDTAVYYCAARSRYERHSLLLGRRRPSYWGQGTQVTVSS

SEQ ID NO: 35395 - protein, 126 aa, Artificial Sequence
  Chemically Synthesized
QVQLQESGGGLVQAGGSLRLSCAASGTISTNYNMGWYRQAPGKEREFVAGISWGGITNYADSVKGRFTISRDNAKNTVYLQMNSLKPEDTAVYYCAVKVGRYGISWRTGTYFLPYWGQGTQVTVSS

SEQ ID NO: 35396 - protein, 116 aa, Artificial Sequence
  Chemically Synthesized
QVQLQESGGGLVQAGGSLRLSCAASGNISTDGAMGWYRQAPGKERELVASIDDGTNTNYADSVKGRFTISRDNAKNTVYLQMNSLKPEDTAVYYCAARPTHIRMYWGQGTQVTVSS

SEQ ID NO: 35397 - protein, 121 aa, Artificial Sequence
  Chemically Synthesized
QVQLQESGGGLVQAGGSLRLSCAASGNIFYLYLMGWYRQAPGKERELVAAIGDGSNTYYADSVKGRFTISRDNAKNTVYLQMNSLKPEDTAVYYCAAYDDYSKTSTSLFYWGQGTQVTVSS

SEQ ID NO: 35398 - protein, 121 aa, Artificial Sequence
  Chemically Synthesized
QVQLQESGGGLVQAGGSLRLSCAASGTIFDLYFMGWYRQAPGKERELVASITGGTTNYADSVKGRFTISRDNAKNTVYLQMNSLKPEDTAVYYCAVDRNLQARKLTPLVYWGQGTQVTVSS

SEQ ID NO: 35399 - protein, 122 aa, Artificial Sequence
  Chemically Synthesized
QVQLQESGGGLVQAGGSLRLSCAASGNIFAYYVMGWYRQAPGKEREFVASIAYGGSTYYADSVKGRFTISRDNAKNTVYLQMNSLKPEDTAVYYCAVRDNVSVDNLDGFQYWGQGTQVTVSS

SEQ ID NO: 35400 - protein, 117 aa, Artificial Sequence
  Chemically Synthesized
QVQLQESGGGLVQAGGSLRLSCAASGYILRLRMGWYRQAPGKERELVASINYGASTNYADSVKGRFTISRDNAKNTVYLQMNSLKPEDTAVYYCAVHADYDGGHAYWGQGTQVTVSS

SEQ ID NO: 35401 - protein, 122 aa, Artificial Sequence
  Chemically Synthesized
QVQLQESGGGLVQAGGSLRLSCAASGSISSRYKMGWYRQAPGKEREFVAAISPGGTTYYADSVKGRFTISRDNAKNTVYLQMNSLKPEDTAVYYCAVTLDPFDSTYTYHYYWGQGTQVTVSS

SEQ ID NO: 35402 - protein, 117 aa, Artificial Sequence
  Chemically Synthesized
QVQLQESGGGLVQAGGSLRLSCAASGTIFRYYMGWYRQAPGKEREFVATIARGANTYYADSVKGRFTISRDNAKNTVYLQMNSLKPEDTAVYYCAAYTSRHWRHFYWGQGTQVTVSS

SEQ ID NO: 35403 - protein, 118 aa, Artificial Sequence
  Chemically Synthesized
QVQLQESGGGLVQAGGSLRLSCAASGSIFDDRNMGWYRQAPGKEREFVAGIGTGANTYYADSVKGRFTISRDNAKNTVYLQMNSLKPEDTAVYYCAAVLWVDIIHYYWGQGTQVTVSS

SEQ ID NO: 35404 - protein, 115 aa, Artificial Sequence
  Chemically Synthesized
QVQLQESGGGLVQAGGSLRLSCAASGSISPTPNMGWYRQAPGKEREFVAGGNTNYADSVKGRFTISRDNAKNTVYLQMNSLKPEDTAVYYCAVSRPSVYTAYYYWGQGTQVTVSS

SEQ ID NO: 35405 - protein, 121 aa, Artificial Sequence
  Chemically Synthesized
QVQLQESGGGLVQAGGSLRLSCAASGIFDDYTMGWYRQAPGKERELVATIGEGGITNYADSVKGRFTISRDNAKNTVYLQMNSLKPEDTAVYYCAVRIVAYTDTRYLYYYWGQGTQVTVSS

SEQ ID NO: 35406 - protein, 122 aa, Artificial Sequence
  Chemically Synthesized
QVQLQESGGGLVQAGGSLRLSCAASGTIFSFYSMGWYRQAPGKERELVASIGYGTNTNYADSVKGRFTISRDNAKNTVYLQMNSLKPEDTAVYYCAVYQYTVVTNADRLSYWGQGTQVTVSS

SEQ ID NO: 35407 - protein, 122 aa, Artificial Sequence
  Chemically Synthesized
QVQLQESGGGLVQAGGSLRLSCAASGNIFSDSTMGWYRQAPGKEREFVASISGGTNTYYADSVKGRFTISRDNAKNTVYLQMNSLKPEDTAVYYCAVPLQGGGPSTGHYDYWGQGTQVTVSS

SEQ ID NO: 35408 - protein, 126 aa, Artificial Sequence
  Chemically Synthesized
QVQLQESGGGLVQAGGSLRLSCAASGYISQWLVMGWYRQAPGKERELVAGIAIGAITYYADSVKGRFTISRDNAKNTVYLQMNSLKPEDTAVYYCAVPDFDLYGLGGTRGSPLSYWGQGTQVTVSS

SEQ ID NO: 35409 - protein, 118 aa, Artificial Sequence
  Chemically Synthesized
QVQLQESGGGLVQAGGSLRLSCAASGSISAAYAMGWYRQAPGKERELVASITSGGNTYYADSVKGRFTISRDNAKNTVYLQMNSLKPEDTAVYYCAAPDTDSYSHRYWGQGTQVTVSS

SEQ ID NO: 35410 - protein, 122 aa, Artificial Sequence
  Chemically Synthesized
QVQLQESGGGLVQAGGSLRLSCAASGTISRWYGMGWYRQAPGKERELVAAITFGTITNYADSVKGRFTISRDNAKNTVYLQMNSLKPEDTAVYYCAANAWLYAYVGLGHPYWGQGTQVTVSS

SEQ ID NO: 35411 - protein, 118 aa, Artificial Sequence
  Chemically Synthesized
QVQLQESGGGLVQAGGSLRLSCAASGSISRFVRMGWYRQAPGKEREFVAGITYGTSTNYADSVKGRFTISRDNAKNTVYLQMNSLKPEDTAVYYCAVRVWWYYTHLYWGQGTQVTVSS

SEQ ID NO: 35412 - protein, 119 aa, Artificial Sequence
  Chemically Synthesized
QVQLQESGGGLVQAGGSLRLSCAASGYMGWYRQAPGKEREFVAGIGLGSNTNYADSVKGRFTISRDNAKNTVYLQMNSLKPEDTAVYYCAVRAYLYDGGGGISLHAWYWGQGTQVTVSS

SEQ ID NO: 35413 - protein, 118 aa, Artificial Sequence
  Chemically Synthesized
QVQLQESGGGLVQAGGSLRLSCAASGYIFRVRSMGWYRQAPGKEREFVAAIAWGTNTNYADSVKGRFTISRDNAKNTVYLQMNSLKPEDTAVYYCAAPQRRRVDHKYWGQGTQVTVSS

SEQ ID NO: 35414 - protein, 117 aa, Artificial Sequence
  Chemically Synthesized
QVQLQESGGGLVQAGGSLRLSCAASGYISYHYLMGWYRQAPGKERELVAGINDGGNNYADSVKGRFTISRDNAKNTVYLQMNSLKPEDTAVYYCAADGTGRQSFYYWGQGTQVTVSS

SEQ ID NO: 35415 - protein, 122 aa, Artificial Sequence
  Chemically Synthesized
QVQLQESGGGLVQAGGSLRLSCAASGSIFRLVPMGWYRQAPGKERELVAAIGGGATTNYADSVKGRFTISRDNAKNTVYLQMNSLKPEDTAVYYCAVPPTYNVRWLYYYQYWGQGTQVTVSS

SEQ ID NO: 35416 - protein, 126 aa, Artificial Sequence
  Chemically Synthesized
QVQLQESGGGLVQAGGSLRLSCAASGSISAGDAMGWYRQAPGKERELVASINDGGTTNYADSVKGRFTISRDNAKNTVYLQMNSLKPEDTAVYYCAVVQNDDSYYYVPHIFTYLYWGQGTQVTVSS

SEQ ID NO: 35417 - protein, 126 aa, Artificial Sequence
  Chemically Synthesized
QVQLQESGGGLVQAGGSLRLSCAASGNIFLYSYMGWYRQAPGKERELVAGISEGTNTNYADSVKGRFTISRDNAKNTVYLQMNSLKPEDTAVYYCAVRPLSEYALDGKPRGYHVYWGQGTQVTVSS

SEQ ID NO: 35418 - protein, 110 aa, Artificial Sequence
  Chemically Synthesized
QVQLQESGGGLVQAGGSLRLSCAASGTIFNDGDMGWYRQAPGKERELVAAIDAGGNTYYADSVKGRFTISRDNAKNTVYLQMNSLKPEDTAVYYCAALYWGQGTQVTVSS

SEQ ID NO: 35419 - protein, 121 aa, Artificial Sequence
  Chemically Synthesized
QVQLQESGGGLVQAGGSLRLSCAASGYIFVPRPMGWYRQAPGKERELLPLLVRVVVPYADSVKGRFTISRDNAKNTVYLQMNSLKPEDTAVYYCAVPRRDGGVSVVKHYYWGQGTQVTVSS

SEQ ID NO: 35420 - protein, 118 aa, Artificial Sequence
  Chemically Synthesized
QVQLQESGGGLVQAGGSLRLSCAASGTISWYRAMGWYRQAPGKEREFVAAISRGGITYYADSVKGRFTISRDNAKNTVYLQMNSLKPEDTAVYYCAAPAQWRGPHRYWGQGTQVTVSS

SEQ ID NO: 35421 - protein, 118 aa, Artificial Sequence
  Chemically Synthesized
QVQLQESGGGLVQAGGSLRLSCAASGTISYLRGMGWYRQAPGKEREFVAAISYGAITYYADSVKGRFTISRDNAKNTVYLQMNSLKPEDTAVYYCAAVRAFKWGLTYWGQGTQVTVSS

SEQ ID NO: 35422 - protein, 117 aa, Artificial Sequence
  Chemically Synthesized
QVQLQESGGGLVQAGGSLRLSCAASGNISASIYMGWYRQAPGKEREFVASINIGANTNYADSVKGRFTISRDNAKNTVYLQMNSLKPEDTAVYYCAARGYTYYYGYWGQGTQVTVSS

SEQ ID NO: 35423 - protein, 117 aa, Artificial Sequence
  Chemically Synthesized
QVQLQESGGGLVQAGGSLRLSCAASGTIFNGPAMGWYRQAPGKERELVATIGWGTNTNYADSVKGRFTISRDNAKNTVYLQMNSLKPEDTAVYYCAVTRGYLTAWYWGQGTQVTVSS

SEQ ID NO: 35424 - protein, 118 aa, Artificial Sequence
  Chemically Synthesized
QVQLQESGGGLVQAGGSLRLSCAASGNISRARRMGWYRQAPGKEREFVAAIAAGTTTNYADSVKGRFTISRDNAKNTVYLQMNSLKPEDTAVYYCAVYYWRYRGYKYWGQGTQVTVSS

SEQ ID NO: 35425 - protein, 122 aa, Artificial Sequence
  Chemically Synthesized
QVQLQESGGGLVQAGGSLRLSCAASGTISRWYFMGWYRQAPGKEREFVAAITYGAITNYADSVKGRFTISRDNAKNTVYLQMNSLKPEDTAVYYCAAYSRGYWRDRYWHSYWGQGTQVTVSS

SEQ ID NO: 35426 - protein, 126 aa, Artificial Sequence
  Chemically Synthesized
QVQLQESGGGLVQAGGSLRLSCAASGNIFVRTYMGWYRQAPGKERELVASITGGSNTNYADSVKGRFTISRDNAKNTVYLQMNSLKPEDTAVYYCAVRSRYRNYGHYYGYRPYRYWGQGTQVTVSS

SEQ ID NO: 35427 - protein, 122 aa, Artificial Sequence
  Chemically Synthesized
QVQLQESGGGLVQAGGSLRLSCAASGTISSLYVMGWYRQAPGKEREFVAGITDGATTNYADSVKGRFTISRDNAKNTVYLQMNSLKPEDTAVYYCAAERPYVYYYGVPHYYWGQGTQVTVSS

SEQ ID NO: 35428 - protein, 122 aa, Artificial Sequence
  Chemically Synthesized
QVQLQESGGGLVQAGGSLRLSCAASGSISRARNMGWYRQAPGKEREFVASITIGGNTYYADSVKGRFTISRDNAKNTVYLQMNSLKPEDTAVYYCAVYRIYRRNYYVSHRYWGQGTQVTVSS

SEQ ID NO: 35429 - protein, 121 aa, Artificial Sequence
  Chemically Synthesized
QVQLQESGGGLVQAGGSLRLSCAASGSISRSGMGWYRQAPGKERELVATISSGTNTNYADSVKGRFTISRDNAKNTVYLQMNSLKPEDTAVYYCAANVGYYAIRHVYLDYWGQGTQVTVSS

SEQ ID NO: 35430 - protein, 114 aa, Artificial Sequence
  Chemically Synthesized
QVQLQESGGGLVQAGGSLRLSCAASGYISGYYDMGWYRQAPGKEREFVASINNGSSTNYADSVKGRFTISRDNAKNTVYLQMNSLKPEDTAVYYCAVYHVYYYWGQGTQVTVSS

SEQ ID NO: 35431 - protein, 118 aa, Artificial Sequence
  Chemically Synthesized
QVQLQESGGGLVQAGGSLRLSCAASGNISPGNVMGWYRQAPGKEREFVASIDAGSSTNYADSVKGRFTISRDNAKNTVYLQMNSLKPEDTAVYYCAAQDGVPSFFGYWGQGTQVTVSS

SEQ ID NO: 35432 - protein, 126 aa, Artificial Sequence
  Chemically Synthesized
QVQLQESGGGLVQAGGSLRLSCAASGSISGLDSMGWYRQAPGKERELVATINNGSTTNYADSVKGRFTISRDNAKNTVYLQMNSLKPEDTAVYYCAVDQYRHGWRYARGLYRLTYWGQGTQVTVSS

SEQ ID NO: 35433 - protein, 121 aa, Artificial Sequence
  Chemically Synthesized
QVQLQESGGGLVQAGGSLRLSCAASGYISVDIVMGWYRQAPGKEREFVAAISDGSSTYYADSVKGRFTISRDNAKNTVYLQMNSLKPEDTAVYYCAVTLGDTIWGSLSIYWGQGTQVTVSS

SEQ ID NO: 35434 - protein, 118 aa, Artificial Sequence
  Chemically Synthesized
QVQLQESGGGLVQAGGSLRLSCAASGYISYRGAMGWYRQAPGKERELVASISYGGNTNYADSVKGRFTISRDNAKNTVYLQMNSLKPEDTAVYYCAAVLSRYSDLGYWGQGTQVTVSS

SEQ ID NO: 35435 - protein, 127 aa, Artificial Sequence
  Chemically Synthesized
QVQLQESGGGLVQAGGSLRLSCAASGTISARQYMGWYRQAPGKEREFVASIGYGGTTNYADSVKGRFTISRDNAKNTVYLQMNSLKPEDTAVYYCAVRLWYQTDRYDHSYTAALQYWGQGTQVTVSS

SEQ ID NO: 35436 - protein, 126 aa, Artificial Sequence
  Chemically Synthesized
QVQLQESGGGLVQAGGSLRLSCAASGNISDHWAMGWYRQAPGKEREFVAAITQGASTNYADSVKGRFTISRDNAKNTVYLQMNSLKPEDTAVYYCAARRYRRYYWEHDYWTVHKYWGQGTQVTVSS

SEQ ID NO: 35437 - protein, 126 aa, Artificial Sequence
  Chemically Synthesized
QVQLQESGGGLVQAGGSLRLSCAASGNIFYGWPMGWYRQAPGKERELVAAIGYGGSTYYADSVKGRFTISRDNAKNTVYLQMNSLKPEDTAVYYCAAYTPILDYLYHDYRYNFVYWGQGTQVTVSS

SEQ ID NO: 35438 - protein, 126 aa, Artificial Sequence
  Chemically Synthesized
QVQLQESGGGLVQAGGSLRLSCAASGTISDGPYMGWYRQAPGKERELVAAISYGSSTYYADSVKGRFTISRDNAKNTVYLQMNSLKPEDTAVYYCAVSRDASRSHQRDPDERLYYWGQGTQVTVSS

SEQ ID NO: 35439 - protein, 120 aa, Artificial Sequence
  Chemically Synthesized
QVQLQESGGGLVQAGGSLRLSCAASGYISRARDMGWYRQAPGKERELVAGITYGSITYYADSVKGRFTISRDNAKNTVYLQMNSLKPEDTAVYYCAVYRSHRGFAWHTYWGQGTQVTVSS

SEQ ID NO: 35440 - protein, 122 aa, Artificial Sequence
  Chemically Synthesized
QVQLQESGGGLVQAGGSLRLSCAASGSISTAHPMGWYRQAPGKEREFVASIDLGSITNYADSVKGRFTISRDNAKNTVYLQMNSLKPEDTAVYYCAADGYDNTVTYGYHGYWGQGTQVTVSS

SEQ ID NO: 35441 - protein, 118 aa, Artificial Sequence
  Chemically Synthesized
QVQLQESGGGLVQAGGSLRLSCAASGYISRGQDMGWYRQAPGKEREFVAAIAVGGITYYADSVKGRFTISRDNAKNTVYLQMNSLKPEDTAVYYCAVDYDIWDSYYYWGQGTQVTVSS

SEQ ID NO: 35442 - protein, 118 aa, Artificial Sequence
  Chemically Synthesized
QVQLQESGGGLVQAGGSLRLSCAASGSIFTARRMGWYRQAPGKEREFVASIATGGNTNYADSVKGRFTISRDNAKNTVYLQMNSLKPEDTAVYYCAARRYRHPNFSYWGQGTQVTVSS

SEQ ID NO: 35443 - protein, 117 aa, Artificial Sequence
  Chemically Synthesized
QVQLQESGGGLVQAGGSLRLSCAASGSIFVFRMGWYRQAPGKERELVAGINYGSITYYADSVKGRFTISRDNAKNTVYLQMNSLKPEDTAVYYCAAGPYRRRPYYYWGQGTQVTVSS

SEQ ID NO: 35444 - protein, 120 aa, Artificial Sequence
  Chemically Synthesized
QVQLQESGGGLVQAGGSLRLSCAASGYIFGSRVMGWYRQAPGKERELVATIGWGGNTNYADSVKGRFTISRDNAKNTVYLQMNSLKPEDTAVYYCAGGWDWPTWRYHRYWGQGTQVTVSS

SEQ ID NO: 35445 - protein, 117 aa, Artificial Sequence
  Chemically Synthesized
QVQLQESGGGLVQAGGSLRLSCAASGSIFAIRRMGWYRQAPGKERELVAGIGRGGTTYYADSVKGRFTISRDNAKNTVYLQMNSLKPEDTAVYYCAVRYPYLDHAYWGQGTQVTVSS

SEQ ID NO: 35446 - protein, 118 aa, Artificial Sequence
  Chemically Synthesized
QVQLQESGGGLVQAGGSLRLSCAASGNIFPSRAMGWYRQAPGKEREFVAAINYGGITYYADSVKGRFTISRDNAKNTVYLQMNSLKPEDTAVYYCAAWRRRAYRFGYWGQGTQVTVSS

SEQ ID NO: 35447 - protein, 118 aa, Artificial Sequence
  Chemically Synthesized
QVQLQESGGGLVQAGGSLRLSCAASGTIFAIYYMGWYRQAPGKEREFVAGIGPGSNTNYADSVKGRFTISRDNAKNTVYLQMNSLKPEDTAVYYCAAWAYYLIVHRYWGQGTQVTVSS

SEQ ID NO: 35448 - protein, 126 aa, Artificial Sequence
  Chemically Synthesized
QVQLQESGGGLVQAGGSLRLSCAASGSISYNFYMGWYRQAPGKERELVAGITGGAITYYADSVKGRFTISRDNAKNTVYLQMNSLKPEDTAVYYCAVDLAAIDDLRYSPYVRLYYWGQGTQVTVSS

SEQ ID NO: 35449 - protein, 123 aa, Artificial Sequence
  Chemically Synthesized
QVQLQESGGGLVQAGGSLRLSCAASGYIFSFVDMGWYRQAPGKEREFVATIAYGAITNYADSVKGRFTISRDNAKNTVYLQMNSLKPEDTAVYYCAVRRLSRWYYSKDHHWYWGQGTQVTVSS

SEQ ID NO: 35450 - protein, 118 aa, Artificial Sequence
  Chemically Synthesized
QVQLQESGGGLVQAGGSLRLSCAASGTISWPHDMGWYRQAPGKEREFVAAIARGTSTNYADSVKGRFTISRDNAKNTVYLQMNSLKPEDTAVYYCAAADDYAAYLDYWGQGTQVTVSS

SEQ ID NO: 35451 - protein, 126 aa, Artificial Sequence
  Chemically Synthesized
QVQLQESGGGLVQAGGSLRLSCAASGTIFYAAYMGWYRQAPGKERELVAGIGAGASTYYADSVKGRFTISRDNAKNTVYLQMNSLKPEDTAVYYCAAKPRIPFLFRQYPFNDLDYWGQGTQVTVSS

SEQ ID NO: 35452 - protein, 126 aa, Artificial Sequence
  Chemically Synthesized
QVQLQESGGGLVQAGGSLRLSCAASGYISYQGRMGWYRQAPGKERELVASINDGATTNYADSVKGRFTISRDNAKNTVYLQMNSLKPEDTAVYYCAVNPFYGWHTNNGYFDLFYYWGQGTQVTVSS

SEQ ID NO: 35453 - protein, 122 aa, Artificial Sequence
  Chemically Synthesized
QVQLQESGGGLVQAGGSLRLSCAASGSIFGARIMGWYRQAPGKERELVATITYGGITYYADSVKGRFTISRDNAKNTVYLQMNSLKPEDTAVYYCAVHDDYLEFVFPWYRYWGQGTQVTVSS

SEQ ID NO: 35454 - protein, 118 aa, Artificial Sequence
  Chemically Synthesized
QVQLQESGGGLVQAGGSLRLSCAASGTISASWYMGWYRQAPGKEREFVAGIAGGSTTYYADSVKGRFTISRDNAKNTVYLQMNSLKPEDTAVYYCAAFFTYDRNLSYWGQGTQVTVSS

SEQ ID NO: 35455 - protein, 118 aa, Artificial Sequence
  Chemically Synthesized
QVQLQESGGGLVQAGGSLRLSCAASGTIFHIRFMGWYRQAPGKERELVAGIGRGTNTYYADSVKGRFTISRDNAKNTVYLQMNSLKPEDTAVYYCAVYRGRSYYHSYWGQGTQVTVSS

SEQ ID NO: 35456 - protein, 122 aa, Artificial Sequence
  Chemically Synthesized
QVQLQESGGGLVQAGGSLRLSCAASGTIFRYYIMGWYRQAPGKERELVAAISFGSNTYYADSVKGRFTISRDNAKNTVYLQMNSLKPEDTAVYYCAAGPGRYWSNTRRLFYWGQGTQVTVSS

SEQ ID NO: 35457 - protein, 123 aa, Artificial Sequence
  Chemically Synthesized
QVQLQESGGGLVQAGGSLRLSCAASGYISQRAPMGWYRQAPGKERELVAAITYGGNTYYADSVKGRFTISRDNAKNTVYLQMNSLKPEDTAVYYCAAVRRVRGWYGRVHFDYWGQGTQVTVSS

SEQ ID NO: 35458 - protein, 118 aa, Artificial Sequence
  Chemically Synthesized
QVQLQESGGGLVQAGGSLRLSCAASGSISYGKRMGWYRQAPGKERELVATINRGSSTNYADSVKGRFTISRDNAKNTVYLQMNSLKPEDTAVYYCAVVGYVSRRHYYWGQGTQVTVSS

SEQ ID NO: 35459 - protein, 118 aa, Artificial Sequence
  Chemically Synthesized
QVQLQESGGGLVQAGGSLRLSCAASGTIFPQFYMGWYRQAPGKEREFVAGIGWGTITNYADSVKGRFTISRDNAKNTVYLQMNSLKPEDTAVYYCAAPWDVRRDLGYWGQGTQVTVSS

SEQ ID NO: 35460 - protein, 118 aa, Artificial Sequence
  Chemically Synthesized
QVQLQESGGGLVQAGGSLRLSCAASGNISDASYMGWYRQAPGKERELVAAISDGSTTYYADSVKGRFTISRDNAKNTVYLQMNSLKPEDTAVYYCAVDDDDGGVHPYWGQGTQVTVSS

SEQ ID NO: 35461 - protein, 122 aa, Artificial Sequence
  Chemically Synthesized
QVQLQESGGGLVQAGGSLRLSCAASGTIFSAHTMGWYRQAPGKERELVAGINTGANTYYADSVKGRFTISRDNAKNTVYLQMNSLKPEDTAVYYCAALYRRKGTKWTWYRYWGQGTQVTVSS

SEQ ID NO: 35462 - protein, 121 aa, Artificial Sequence
  Chemically Synthesized
QVQLQESGGGLVQAGGSLRLSCAASGYIFPRDAMGWYRQAPGKERELVATIAVGGNTNYADSVKGRFTISRDNAKNTVYLQMNSLKPEDTAVYYCAVYWSYVQYRDRHYYWGQGTQVTVSS

SEQ ID NO: 35463 - protein, 118 aa, Artificial Sequence
  Chemically Synthesized
QVQLQESGGGLVQAGGSLRLSCAASGYIFRISPMGWYRQAPGKEREFVAGINYGTNTYYADSVKGRFTISRDNAKNTVYLQMNSLKPEDTAVYYCAVYHYRIRAYRYWGQGTQVTVSS

SEQ ID NO: 35464 - protein, 118 aa, Artificial Sequence
  Chemically Synthesized
QVQLQESGGGLVQAGGSLRLSCAASGYISSYYYMGWYRQAPGKERELVATIANGATTNYADSVKGRFTISRDNAKNTVYLQMNSLKPEDTAVYYCAADYNGDDQHWYWGQGTQVTVSS

SEQ ID NO: 35465 - protein, 118 aa, Artificial Sequence
  Chemically Synthesized
QVQLQESGGGLVQAGGSLRLSCAASGSISRIFLMGWYRQAPGKEREFVAGINGGGSTYYADSVKGRFTISRDNAKNTVYLQMNSLKPEDTAVYYCAAFFQRYTSFDYWGQGTQVTVSS

SEQ ID NO: 35466 - protein, 121 aa, Artificial Sequence
  Chemically Synthesized
QVQLQESGGGLVQAGGSLRLSCAASGYISPPVYMGWYRQAPGKERELVAAISNGGSTYYADSVKGRFTISRDNAKNTVYLQMNSLKPEDTAVYYCAAQVTIVYWAYAHPYWGQGTQVTVSS

SEQ ID NO: 35467 - protein, 114 aa, Artificial Sequence
  Chemically Synthesized
QVQLQESGGGLVQAGGSLRLSCAASGYISYRVPMGWYRQAPGKEREFVAAIGRGSTTYYADSVKGRFTISRDNAKNTVYLQMNSLKPEDTAVYYCASYAQYPYWGQGTQVTVSS

SEQ ID NO: 35468 - protein, 118 aa, Artificial Sequence
  Chemically Synthesized
QVQLQESGGGLVQAGGSLRLSCAASGTIFYRLYMGWYRQAPGKEREFVAAISRGGSTYYADSVKGRFTISRDNAKNTVYLQMNSLKPEDTAVYYCAVNFVTYRRHPYWGQGTQVTVSS

SEQ ID NO: 35469 - protein, 118 aa, Artificial Sequence
  Chemically Synthesized
QVQLQESGGGLVQAGGSLRLSCAASGYIFLVRGMGWYRQAPGKERELVAAINYGASTYYADSVKGRFTISRDNAKNTVYLQMNSLKPEDTAVYYCAAFYFYRYPYRYWGQGTQVTVSS

SEQ ID NO: 35470 - protein, 118 aa, Artificial Sequence
  Chemically Synthesized
QVQLQESGGGLVQAGGSLRLSCAASGYISVRAYMGWYRQAPGKEREFVAAIGTGGITYYADSVKGRFTISRDNAKNTVYLQMNSLKPEDTAVYYCAVSPWYTYGHGYWGQGTQVTVSS

SEQ ID NO: 35471 - protein, 118 aa, Artificial Sequence
  Chemically Synthesized
QVQLQESGGGLVQAGGSLRLSCAASGYIFGQYLMGWYRQAPGKEREFVAGIATGSNTYYADSVKGRFTISRDNAKNTVYLQMNSLKPEDTAVYYCAVFYYFDTVHDYWGQGTQVTVSS

SEQ ID NO: 35472 - protein, 126 aa, Artificial Sequence
  Chemically Synthesized
QVQLQESGGGLVQAGGSLRLSCAASGSIFGPSYMGWYRQAPGKEREFVAAIAFGATTYYADSVKGRFTISRDNAKNTVYLQMNSLKPEDTAVYYCAAYWRINEFDTDNTGLIHEYWGQGTQVTVSS

SEQ ID NO: 35473 - protein, 122 aa, Artificial Sequence
  Chemically Synthesized
QVQLQESGGGLVQAGGSLRLSCAASGYISYYSEMGWYRQAPGKERELVATINLGAITYYADSVKGRFTISRDNAKNTVYLQMNSLKPEDTAVYYCAVYYLDSTYPFRYYAYWGQGTQVTVSS

SEQ ID NO: 35474 - protein, 125 aa, Artificial Sequence
  Chemically Synthesized
QVQLQESGGGLVQAGGSLRLSCAASGTISGDHDMGWYRQAPGKERELVATIAPGGITNYADSVKGRFTISRDNAKNTVYLQMNSLKPEDTAVYYCAAYPLDTTLKLLSTVLVIYWGQGTQVTVSS

SEQ ID NO: 35475 - protein, 117 aa, Artificial Sequence
  Chemically Synthesized
QVQLQESGGGLVQAGGSLRLSCAASGTIFILSSMGWYRQAPGKERELVAAITHGSNTNYADSVKGRFTISRDNAKNTVYLQMNSLKPEDTAVYYCAAYTDELAFYYWGQGTQVTVSS

SEQ ID NO: 35476 - protein, 122 aa, Artificial Sequence
  Chemically Synthesized
QVQLQESGGGLVQAGGSLRLSCAASGSISSGKDMGWYRQAPGKEREFVATIGRGGTTYYADSVKGRFTISRDNAKNTVYLQMNSLKPEDTAVYYCAVGYQYYYQSTDGYRYWGQGTQVTVSS

SEQ ID NO: 35477 - protein, 109 aa, Artificial Sequence
  Chemically Synthesized
QVQLQESGGGLVQAGGSLRLSCAASGTISDPYGMGWYRQAPGKEREFVASINDGASTNYADSVKGRFTISRDNAKNTVYLQMNSLKPEDTAVYYCAHYWGQGTQVTVSS

SEQ ID NO: 35478 - protein, 122 aa, Artificial Sequence
  Chemically Synthesized
QVQLQESGGGLVQAGGSLRLSCAASGTISDTSSMGWYRQAPGKERELVAAISYGGNTYYADSVKGRFTISRDNAKNTVYLQMNSLKPEDTAVYYCAVYYEGAIDYYVIYGYWGQGTQVTVSS

SEQ ID NO: 35479 - protein, 122 aa, Artificial Sequence
  Chemically Synthesized
QVQLQESGGGLVQAGGSLRLSCAASGNISRRYTMGWYRQAPGKERELVASIGIGSTTYYADSVKGRFTISRDNAKNTVYLQMNSLKPEDTAVYYCAVAQPPYFLVRYDLGYWGQGTQVTVSS

SEQ ID NO: 35480 - protein, 119 aa, Artificial Sequence
  Chemically Synthesized
QVQLQESGGGLVQAGGSLRLSCAASGSISQYYSMGWYRQAPGKERELLPLLLSVLLPYADSVKGRFTISRDNAKNTVYLQMNSLKPEDTAVYYCAVTTYTNYDYIRLYWGQGTQVTVSS

SEQ ID NO: 35481 - protein, 117 aa, Artificial Sequence
  Chemically Synthesized
QVQLQESGGGLVQAGGSLRLSCAASGSIFYANSMGWYRQAPGKEREFVAGINTGGTTNYADSVKGRFTISRDNAKNTVYLQMNSLKPEDTAVYYCAYYRNTDYFEYWGQGTQVTVSS

SEQ ID NO: 35482 - protein, 122 aa, Artificial Sequence
  Chemically Synthesized
QVQLQESGGGLVQAGGSLRLSCAASGTISDKYDMGWYRQAPGKEREFVATIGYGSTYQYADSVKGRFTISRDNAKNTVYLQMNSLKPEDTAVYYCAANENYYVYDDDTYAYWGQGTQVTVSS

SEQ ID NO: 35483 - protein, 122 aa, Artificial Sequence
  Chemically Synthesized
QVQLQESGGGLVQAGGSLRLSCAASGTISTYHYMGWYRQAPGKEREFVAGITSGTSTNYADSVKGRFTISRDNAKNTVYLQMNSLKPEDTAVYYCAANGWDYTPPDTTLWYWGQGTQVTVSS

SEQ ID NO: 35484 - protein, 110 aa, Artificial Sequence
  Chemically Synthesized
QVQLQESGGGLVQAGGSLRLSCAASGSIFDGEEMGWYRQAPGKERELVAAIDHGGSTNYADSVKGRFTISRDNAKNTVYLQMNSLKPEDTAVYYCALIYWGQGTQVTVSS

SEQ ID NO: 35485 - protein, 126 aa, Artificial Sequence
  Chemically Synthesized
QVQLQESGGGLVQAGGSLRLSCAASGTISYSTDMGWYRQAPGKEREFVAGINIGGTTYYADSVKGRFTISRDNAKNTVYLQMNSLKPEDTAVYYCAVDYGYYVDEPNYGGYYHYYWGQGTQVTVSS

SEQ ID NO: 35486 - protein, 123 aa, Artificial Sequence
  Chemically Synthesized
QVQLQESGGGLVQAGGSLRLSCAASGTISHLDYMGWYRQAPGKEREFVAAISYGTSTNYADSVKGRFTISRDNAKNTVYLQMNSLKPEDTAVYYCAVPYLPADSVLYRYHGYWGQGTQVTVSS

SEQ ID NO: 35487 - protein, 118 aa, Artificial Sequence
  Chemically Synthesized
QVQLQESGGGLVQAGGSLRLSCAASGNISAGFDMGWYRQAPGKERELVAAITRGTTTNYADSVKGRFTISRDNAKNTVYLQMNSLKPEDTAVYYCAVVFTDNGDLGYWGQGTQVTVSS

SEQ ID NO: 35488 - protein, 117 aa, Artificial Sequence
  Chemically Synthesized
QVQLQESGGGLVQAGGSLRLSCAASGYIFPGDVMGWYRQAPGKERELVPVLVVVVLPYADSVKGRFTISRDNAKNTVYLQMNSLKPEDTAVYYCAVYAYIDDYLGYWGQGTQVTVSS

SEQ ID NO: 35489 - protein, 120 aa, Artificial Sequence
  Chemically Synthesized
QVQLQESGGGLVQAGGSLRLSCAASGNISWQNTMGWYRQAPGKEREFVAGIAVVVPYADSVKGRFTISRDNAKNTVYLQMNSLKPEDTAVYYCAAHPLPYTDVGIGYGYWGQGTQVTVSS

SEQ ID NO: 35490 - protein, 117 aa, Artificial Sequence
  Chemically Synthesized
QVQLQESGGGLVQAGGSLRLSCAASGYIFWYGEMGWYRQAPGKERELVASINPGSNTNYADSVKGRFTISRDNAKNTVYLQMNSLKPEDTAVYYCAFWTLLLRTIYWGQGTQVTVSS

SEQ ID NO: 35491 - protein, 117 aa, Artificial Sequence
  Chemically Synthesized
QVQLQESGGGLVQAGGSLRLSCAASGSIFTTTMGWYRQAPGKERELVASITVGTTTNYADSVKGRFTISRDNAKNTVYLQMNSLKPEDTAVYYCAVIFAVGRVLVYWGQGTQVTVSS

SEQ ID NO: 35492 - protein, 122 aa, Artificial Sequence
  Chemically Synthesized
QVQLQESGGGLVQAGGSLRLSCAASGNISRLVDMGWYRQAPGKEREFVAAITLGAITYYADSVKGRFTISRDNAKNTVYLQMNSLKPEDTAVYYCAAWDLYYYDSVERYDYWGQGTQVTVSS

SEQ ID NO: 35493 - protein, 125 aa, Artificial Sequence
  Chemically Synthesized
QVQLQESGGGLVQAGGSLRLSCAASGNIFITYYMGWYRQAPGKEREFVASISDGSTTNYADSVKGRFTISRDNAKNTVYLQMNSLKPEDTAVYYCAVGITYLEESSLKNLRTFYWGQGTQVTVSS

SEQ ID NO: 35494 - protein, 118 aa, Artificial Sequence
  Chemically Synthesized
QVQLQESGGGLVQAGGSLRLSCAASGTISIYIDMGWYRQAPGKERELVATIDGGGNTNYADSVKGRFTISRDNAKNTVYLQMNSLKPEDTAVYYCAAFDQYNVTHYYWGQGTQVTVSS

SEQ ID NO: 35495 - protein, 116 aa, Artificial Sequence
  Chemically Synthesized
QVQLQESGGGLVQAGGSLRLSCAASGTIFFRTMGWYRQAPGKERELVAATYGAITNYADSVKGRFTISRDNAKNTVYLQMNSLKPEDTAVYYCAVVRPGVAPLNYWGQGTQVTVSS

SEQ ID NO: 35496 - protein, 122 aa, Artificial Sequence
  Chemically Synthesized
QVQLQESGGGLVQAGGSLRLSCAASGYISALWTMGWYRQAPGKERELVASIDDGASTNYADSVKGRFTISRDNAKNTVYLQMNSLKPEDTAVYYCAAGSSLQFWVRLAHQYWGQGTQVTVSS

SEQ ID NO: 35497 - protein, 122 aa, Artificial Sequence
  Chemically Synthesized
QVQLQESGGGLVQAGGSLRLSCAASGSISATHAMGWYRQAPGKERELVATIDVGSTTYYADSVKGRFTISRDNAKNTVYLQMNSLKPEDTAVYYCAVYIPSPYVYVYRHYYWGQGTQVTVSS

SEQ ID NO: 35498 - protein, 122 aa, Artificial Sequence
  Chemically Synthesized
QVQLQESGGGLVQAGGSLRLSCAASGTISPYTPMGWYRQAPGKERELVASINSGGITYYADSVKGRFTISRDNAKNTVYLQMNSLKPEDTAVYYCAVILIVDRNRPYYHSYWGQGTQVTVSS

SEQ ID NO: 35499 - protein, 118 aa, Artificial Sequence
  Chemically Synthesized
QVQLQESGGGLVQAGGSLRLSCAASGTISTFGTMGWYRQAPGKEREFVAAINDGTTTYYADSVKGRFTISRDNAKNTVYLQMNSLKPEDTAVYYCAARTYYRDGHTYWGQGTQVTVSS

SEQ ID NO: 35500 - protein, 126 aa, Artificial Sequence
  Chemically Synthesized
QVQLQESGGGLVQAGGSLRLSCAASGSIFPAAWMGWYRQAPGKEREFVASINSGGNTYYADSVKGRFTISRDNAKNTVYLQMNSLKPEDTAVYYCAVHREVRGIPHRGYDVGYGYWGQGTQVTVSS

SEQ ID NO: 35501 - protein, 118 aa, Artificial Sequence
  Chemically Synthesized
QVQLQESGGGLVQAGGSLRLSCAASGNIFRASYMGWYRQAPGKEREFVATIDWGGITNYADSVKGRFTISRDNAKNTVYLQMNSLKPEDTAVYYCAVQYYVHFRHRYWGQGTQVTVSS

SEQ ID NO: 35502 - protein, 118 aa, Artificial Sequence
  Chemically Synthesized
QVQLQESGGGLVQAGGSLRLSCAASGNISANAFMGWYRQAPGKERELVAAIDDGSTTNYADSVKGRFTISRDNAKNTVYLQMNSLKPEDTAVYYCAASYDNQSAFGYWGQGTQVTVSS

SEQ ID NO: 35503 - protein, 118 aa, Artificial Sequence
  Chemically Synthesized
QVQLQESGGGLVQAGGSLRLSCAASGTIFYDNTMGWYRQAPGKERELVAAITYGGITYYADSVKGRFTISRDNAKNTVYLQMNSLKPEDTAVYYCAVINRLYYYYDYWGQGTQVTVSS

SEQ ID NO: 35504 - protein, 122 aa, Artificial Sequence
  Chemically Synthesized
QVQLQESGGGLVQAGGSLRLSCAASGNISNKPDMGWYRQAPGKERELVAAIAYGSNTYYADSVKGRFTISRDNAKNTVYLQMNSLKPEDTAVYYCAVTPGRAFGRISYYLYWGQGTQVTVSS

SEQ ID NO: 35505 - protein, 122 aa, Artificial Sequence
  Chemically Synthesized
QVQLQESGGGLVQAGGSLRLSCAASGTISAEGAMGWYRQAPGKERELVAAINHGGSTYYADSVKGRFTISRDNAKNTVYLQMNSLKPEDTAVYYCAVYIALPGSTFVYYWYWGQGTQVTVSS

SEQ ID NO: 35506 - protein, 118 aa, Artificial Sequence
  Chemically Synthesized
QVQLQESGGGLVQAGGSLRLSCAASGSISVRLYMGWYRQAPGKERELVATIGGGGNTYYADSVKGRFTISRDNAKNTVYLQMNSLKPEDTAVYYCAARLPFGSSHEYWGQGTQVTVSS

SEQ ID NO: 35507 - protein, 112 aa, Artificial Sequence
  Chemically Synthesized
QVQLQESGGGLVQAGGSLRLSCAASGNMGWYRQAPGKERELVASIAPGATTNYADSVKGRFTISRDNAKNTVYLQMNSLKPEDTAVYYCAAYDGYYDYHDYWGQGTQVTVSS

SEQ ID NO: 35508 - protein, 121 aa, Artificial Sequence
  Chemically Synthesized
QVQLQESGGGLVQAGGSLRLSCAASGYISQRTMGWYRQAPGKERELVAAITIGANTNYADSVKGRFTISRDNAKNTVYLQMNSLKPEDTAVYYCAVVTYSRSGLARGHFYWGQGTQVTVSS

SEQ ID NO: 35509 - protein, 126 aa, Artificial Sequence
  Chemically Synthesized
QVQLQESGGGLVQAGGSLRLSCAASGYIFQEGGMGWYRQAPGKERELVAGITDGSTTNYADSVKGRFTISRDNAKNTVYLQMNSLKPEDTAVYYCAVDGAFYLAQQDDAQYIHYYWGQGTQVTVSS

SEQ ID NO: 35510 - protein, 122 aa, Artificial Sequence
  Chemically Synthesized
QVQLQESGGGLVQAGGSLRLSCAASGSIFDDFYMGWYRQAPGKERELVAAISTGTSTNYADSVKGRFTISRDNAKNTVYLQMNSLKPEDTAVYYCAADRNVGPVGHPYLEYWGQGTQVTVSS

SEQ ID NO: 35511 - protein, 122 aa, Artificial Sequence
  Chemically Synthesized
QVQLQESGGGLVQAGGSLRLSCAASGNIFHREYMGWYRQAPGKEREFVAAIGSGTNTNYADSVKGRFTISRDNAKNTVYLQMNSLKPEDTAVYYCAVWENTPRNYNVLHYYWGQGTQVTVSS

SEQ ID NO: 35512 - protein, 106 aa, Artificial Sequence
  Chemically Synthesized
QVQLQESGGGLVQAGGSLRLSCAASGYIFAPGDMGWYRQAPGKERELVGIGTSTNYADSVKGRFTISRDNAKNTVYLQMNSLKPEDTAVYYCAAYWGQGTQVTVSS

SEQ ID NO: 35513 - protein, 118 aa, Artificial Sequence
  Chemically Synthesized
QVQLQESGGGLVQAGGSLRLSCAASGYIFLTDYMGWYRQAPGKERELVASISYGSTTYYADSVKGRFTISRDNAKNTVYLQMNSLKPEDTAVYYCAAKDNAQSFFPYWGQGTQVTVSS

SEQ ID NO: 35514 - protein, 117 aa, Artificial Sequence
  Chemically Synthesized
QVQLQESGGGLVQAGGSLRLSCAASGTIFPVYAMGWYRQAPGKEREFVPLLLTVVLPYADSVKGRFTISRDNAKNTVYLQMNSLKPEDTAVYYCAAYWYDQSYFYYWGQGTQVTVSS

SEQ ID NO: 35515 - protein, 118 aa, Artificial Sequence
  Chemically Synthesized
QVQLQESGGGLVQAGGSLRLSCAASGTISRYSTMGWYRQAPGKERELVATINYGGITYYADSVKGRFTISRDNAKNTVYLQMNSLKPEDTAVYYCAVESRSRLTHGYWGQGTQVTVSS

SEQ ID NO: 35516 - protein, 122 aa, Artificial Sequence
  Chemically Synthesized
QVQLQESGGGLVQAGGSLRLSCAASGNIFDPLSMGWYRQAPGKEREFVATINDGSNTNYADSVKGRFTISRDNAKNTVYLQMNSLKPEDTAVYYCAVGTYDYDGDGIYFPYWGQGTQVTVSS

SEQ ID NO: 35517 - protein, 122 aa, Artificial Sequence
  Chemically Synthesized
QVQLQESGGGLVQAGGSLRLSCAASGTISGSISMGWYRQAPGKERELVATITVGSTTYYADSVKGRFTISRDNAKNTVYLQMNSLKPEDTAVYYCAVEYRPTDLSSGRSYYWGQGTQVTVSS

SEQ ID NO: 35518 - protein, 122 aa, Artificial Sequence
  Chemically Synthesized
QVQLQESGGGLVQAGGSLRLSCAASGTISTFGYMGWYRQAPGKERELVASIGEGGTTYYADSVKGRFTISRDNAKNTVYLQMNSLKPEDTAVYYCAVDGGRATRYYYQFPYWGQGTQVTVSS

SEQ ID NO: 35519 - protein, 117 aa, Artificial Sequence
  Chemically Synthesized
QVQLQESGGGLVQAGGSLRLSCAASGTIFGNRYMGWYRQAPGKERELVAGIGGGTVPYADSVKGRFTISRDNAKNTVYLQMNSLKPEDTAVYYCAVHVHVDRFYDYWGQGTQVTVSS

SEQ ID NO: 35520 - protein, 126 aa, Artificial Sequence
  Chemically Synthesized
QVQLQESGGGLVQAGGSLRLSCAASGTISDPSVMGWYRQAPGKERELVATIAGGTTTNYADSVKGRFTISRDNAKNTVYLQMNSLKPEDTAVYYCAVYHDGTDPVVRGRSEGHAYWGQGTQVTVSS

SEQ ID NO: 35521 - protein, 122 aa, Artificial Sequence
  Chemically Synthesized
QVQLQESGGGLVQAGGSLRLSCAASGSISYVAYMGWYRQAPGKERELVAAITDGTNTYYADSVKGRFTISRDNAKNTVYLQMNSLKPEDTAVYYCAVPPSGPTRYITYHLYWGQGTQVTVSS

SEQ ID NO: 35522 - protein, 117 aa, Artificial Sequence
  Chemically Synthesized
QVQLQESGGGLVQAGGSLRLSCAASGYISRPDVMGWYRQAPGKERELAGIAYGTTTNYADSVKGRFTISRDNAKNTVYLQMNSLKPEDTAVYYCAAVGRREWGLGYWGQGTQVTVSS

SEQ ID NO: 35523 - protein, 118 aa, Artificial Sequence
  Chemically Synthesized
QVQLQESGGGLVQAGGSLRLSCAASGTIFRDLNMGWYRQAPGKEREFVAAIDTGGSTYYADSVKGRFTISRDNAKNTVYLQMNSLKPEDTAVYYCAVTDYGDTYFWYWGQGTQVTVSS

SEQ ID NO: 35524 - protein, 122 aa, Artificial Sequence
  Chemically Synthesized
QVQLQESGGGLVQAGGSLRLSCAASGNIFYSIHMGWYRQAPGKERELVAGISNGAITYYADSVKGRFTISRDNAKNTVYLQMNSLKPEDTAVYYCAVNLEYEYYRYANLRYWGQGTQVTVSS

SEQ ID NO: 35525 - protein, 118 aa, Artificial Sequence
  Chemically Synthesized
QVQLQESGGGLVQAGGSLRLSCAASGTISYPVGMGWYRQAPGKERELVAAIGEGTSTYYADSVKGRFTISRDNAKNTVYLQMNSLKPEDTAVYYCAAYTYGPAYHPYWGQGTQVTVSS

SEQ ID NO: 35526 - protein, 125 aa, Artificial Sequence
  Chemically Synthesized
QVQLQESGGGLVQAGGSLRLSCAASGTIFTIEYMGWYRQAPGKEREFVAGIDAGGITNYADSVKGRFTISRDNAKNTVYLQMNSLKPEDTAVYYCAVDEHIFHSVLTWVGTTIYWGQGTQVTVSS

SEQ ID NO: 35527 - protein, 120 aa, Artificial Sequence
  Chemically Synthesized
QVQLQESGGGLVQAGGSLRLSCAASGNISYLGGMGWYRQAPGKEREFVATIAYGGTTNYADSVKGRFTISRDNAKNTVYLQMNSLKPEDTAVYYCAVYDWVDVDYSYAYWGQGTQVTVSS

SEQ ID NO: 35528 - protein, 124 aa, Artificial Sequence
  Chemically Synthesized
QVQLQESGGGLVQAGGSLRLSCAASGTISRVDYMGWYRQAPGKERELVATIDSVLLPYADSVKGRFTISRDNAKNTVYLQMNSLKPEDTAVYYCAVDRTTVLFMLFTTTLCLYWGQGTQVTVSS

SEQ ID NO: 35529 - protein, 113 aa, Artificial Sequence
  Chemically Synthesized
QVQLQESGGGLVQAGGSLRLSCAASGNISYTNAMGWYRQAPGKERELVATIGSGTITYYADSVKGRFTISRDNAKNTVYLQMNSLKPEDTAVYYCAVYYTIYWGQGTQVTVSS

SEQ ID NO: 35530 - protein, 117 aa, Artificial Sequence
  Chemically Synthesized
QVQLQESGGGLVQAGGSLRLSCAASGNISHPYMGWYRQAPGKEREFVATIAYGAITYYADSVKGRFTISRDNAKNTVYLQMNSLKPEDTAVYYCAVQDAYAIVYSYWGQGTQVTVSS

SEQ ID NO: 35531 - protein, 117 aa, Artificial Sequence
  Chemically Synthesized
QVQLQESGGGLVQAGGSLRLSCAASGNFLTVLMGWYRQAPGKEREFVATIGDGSNTNYADSVKGRFTISRDNAKNTVYLQMNSLKPEDTAVYYCAVRVPLDNAHYYWGQGTQVTVSS

SEQ ID NO: 35532 - protein, 114 aa, Artificial Sequence
  Chemically Synthesized
QVQLQESGGGLVQAGGSLRLSCAASGSISYSQDMGWYRQAPGKERELVAGINVGSNTYYADSVKGRFTISRDNAKNTVYLQMNSLKPEDTAVYYCAAYQDHYYWGQGTQVTVSS

SEQ ID NO: 35533 - protein, 118 aa, Artificial Sequence
  Chemically Synthesized
QVQLQESGGGLVQAGGSLRLSCAASGSISYYYQMGWYRQAPGKERELVASISLGTSTNYADSVKGRFTISRDNAKNTVYLQMNSLKPEDTAVYYCAVNLRHWYDHSYWGQGTQVTVSS

SEQ ID NO: 35534 - protein, 118 aa, Artificial Sequence
  Chemically Synthesized
QVQLQESGGGLVQAGGSLRLSCAASGNISDQDYMGWYRQAPGKERELVATINPGSNTYYADSVKGRFTISRDNAKNTVYLQMNSLKPEDTAVYYCAVNWRNDRGFPYWGQGTQVTVSS

SEQ ID NO: 35535 - protein, 118 aa, Artificial Sequence
  Chemically Synthesized
QVQLQESGGGLVQAGGSLRLSCAASGTISDISYMGWYRQAPGKEREFVAAIAYGSSTNYADSVKGRFTISRDNAKNTVYLQMNSLKPEDTAVYYCAVDNSYGDPHYYWGQGTQVTVSS

SEQ ID NO: 35536 - protein, 116 aa, Artificial Sequence
  Chemically Synthesized
QVQLQESGGGLVQAGGSLRLSCAASGYIFLYQYMGWYRQAPGKERELVAGIDAGGITYYADSVKGRFTISRDNAKNTVYLQMNSLKPEDTAVYYCAADVPYLHVYWGQGTQVTVSS

SEQ ID NO: 35537 - protein, 126 aa, Artificial Sequence
  Chemically Synthesized
QVQLQESGGGLVQAGGSLRLSCAASGSIFQPRDMGWYRQAPGKERELVAGINDGGITYYADSVKGRFTISRDNAKNTVYLQMNSLKPEDTAVYYCAVNGGTYTDASYWDQWYHKYWGQGTQVTVSS

SEQ ID NO: 35538 - protein, 118 aa, Artificial Sequence
  Chemically Synthesized
QVQLQESGGGLVQAGGSLRLSCAASGYISSYITMGWYRQAPGKEREFVAAIAGGATTYYADSVKGRFTISRDNAKNTVYLQMNSLKPEDTAVYYCAADWYLDSYFVYWGQGTQVTVSS

SEQ ID NO: 35539 - protein, 123 aa, Artificial Sequence
  Chemically Synthesized
QVQLQESGGGLVQAGGSLRLSCAASGTIFYYLSMGWYRQAPGKERELVAMLVVIPYADSVKGRFTISRDNAKNTVYLQMNSLKPEDTAVYYCAAGARDWEWDPSRVSYDHQYWGQGTQVTVSS

SEQ ID NO: 35540 - protein, 117 aa, Artificial Sequence
  Chemically Synthesized
QVQLQESGGGLVQAGGSLRLSCAASGTISALYKMGWYRQAPGKERELVAAIDTGSNTYYADSVKGRFTISRDNAKNTVYLQMNSLKPEDTAVYYCAAWLYSFLTIYWGQGTQVTVSS

SEQ ID NO: 35541 - protein, 118 aa, Artificial Sequence
  Chemically Synthesized
QVQLQESGGGLVQAGGSLRLSCAASGTIFYNAYMGWYRQAPGKEREFVASITEGSNTYYADSVKGRFTISRDNAKNTVYLQMNSLKPEDTAVYYCAVWSQRGYSYYYWGQGTQVTVSS

SEQ ID NO: 35542 - protein, 117 aa, Artificial Sequence
  Chemically Synthesized
QVQLQESGGGLVQAGGSLRLSCAASGNIFVNTYMGWYRQAPGKEREFVASIDSVVIPYADSVKGRFTISRDNAKNTVYLQMNSLKPEDTAVYYCAVDPLIYTLHYYWGQGTQVTVSS

SEQ ID NO: 35543 - protein, 126 aa, Artificial Sequence
  Chemically Synthesized
QVQLQESGGGLVQAGGSLRLSCAASGYIFYVDDMGWYRQAPGKEREFVASIDGGTITYYADSVKGRFTISRDNAKNTVYLQMNSLKPEDTAVYYCAAYGYSSYDFGRTYGPRYGYWGQGTQVTVSS

SEQ ID NO: 35544 - protein, 122 aa, Artificial Sequence
  Chemically Synthesized
QVQLQESGGGLVQAGGSLRLSCAASGTISVSGHMGWYRQAPGKEREFVAGIDPGGITYYADSVKGRFTISRDNAKNTVYLQMNSLKPEDTAVYYCAVFAYSQSNRARDLIYWGQGTQVTVSS

SEQ ID NO: 35545 - protein, 121 aa, Artificial Sequence
  Chemically Synthesized
QVQLQESGGGLVQAGGSLRLSCAASGTIFPYGSMGWYRQAPGKEREFVASISPGGITNYADSVKGRFTISRDNAKNTVYLQMNSLKPEDTAVYYCAAGNPQTGYYEGYFYWGQGTQVTVSS

SEQ ID NO: 35546 - protein, 121 aa, Artificial Sequence
  Chemically Synthesized
QVQLQESGGGLVQAGGSLRLSCAASGSISYLHAMGWYRQAPGKERELVATINLGGTTYYADSVKGRFTISRDNAKNTVYLQMNSLKPEDTAVYYCAAYSHRDGHSVNSLYWGQGTQVTVSS

SEQ ID NO: 35547 - protein, 117 aa, Artificial Sequence
  Chemically Synthesized
QVQLQESGGGLVQAGGSLRLSCAASGTISLRPYMGWYRQAPGKEREFVAGTNTNYADSVKGRFTISRDNAKNTVYLQMNSLKPEDTAVYYCAAYYYSIGGFRSFYYWGQGTQVTVSS

SEQ ID NO: 35548 - protein, 122 aa, Artificial Sequence
  Chemically Synthesized
QVQLQESGGGLVQAGGSLRLSCAASGYISGPSKMGWYRQAPGKEREFVAAISHGGNTYYADSVKGRFTISRDNAKNTVYLQMNSLKPEDTAVYYCAAQAYTVYHDFDAFTYWGQGTQVTVSS

SEQ ID NO: 35549 - protein, 126 aa, Artificial Sequence
  Chemically Synthesized
QVQLQESGGGLVQAGGSLRLSCAASGSISYIDTMGWYRQAPGKERELVATIGIGGITNYADSVKGRFTISRDNAKNTVYLQMNSLKPEDTAVYYCAVIDSDNWPIDQYEASTHTYWGQGTQVTVSS

SEQ ID NO: 35550 - protein, 126 aa, Artificial Sequence
  Chemically Synthesized
QVQLQESGGGLVQAGGSLRLSCAASGSISSGTLMGWYRQAPGKERELVATIDTGSITNYADSVKGRFTISRDNAKNTVYLQMNSLKPEDTAVYYCAVYGYTLGSNTGLIVGWYLYWGQGTQVTVSS

SEQ ID NO: 35551 - protein, 116 aa, Artificial Sequence
  Chemically Synthesized
QVQLQESGGGLVQAGGSLRLSCAASGSISGYVEMGWYRQAPGKEREFPLLIRVVVPYADSVKGRFTISRDNAKNTVYLQMNSLKPEDTAVYYCAATQTYTWLFPYWGQGTQVTVSS

SEQ ID NO: 35552 - protein, 112 aa, Artificial Sequence
  Chemically Synthesized
QVQLQESGGGLVQAGGSLRLSCAASGSIFLERYMGWYRQAPGKERELVATITSGTITNYADSVKGRFTISRDNAKNTVYLQMNSLKPEDTAVYYCAALTIYWGQGTQVTVSS

SEQ ID NO: 35553 - protein, 122 aa, Artificial Sequence
  Chemically Synthesized
QVQLQESGGGLVQAGGSLRLSCAASGSISPADLMGWYRQAPGKERELVAGIAYGASTYYADSVKGRFTISRDNAKNTVYLQMNSLKPEDTAVYYCAVYVQTTYLGSYNYFYWGQGTQVTVSS

SEQ ID NO: 35554 - protein, 122 aa, Artificial Sequence
  Chemically Synthesized
QVQLQESGGGLVQAGGSLRLSCAASGTISWYGVMGWYRQAPGKEREFVAGISYGGNTYYADSVKGRFTISRDNAKNTVYLQMNSLKPEDTAVYYCAVYYAGNGYAKYYLLYWGQGTQVTVSS

SEQ ID NO: 35555 - protein, 118 aa, Artificial Sequence
  Chemically Synthesized
QVQLQESGGGLVQAGGSLRLSCAASGTISVYAYMGWYRQAPGKERELVAGINSGGSTYYADSVKGRFTISRDNAKNTVYLQMNSLKPEDTAVYYCAVAKYGSGSHRYWGQGTQVTVSS

SEQ ID NO: 35556 - protein, 122 aa, Artificial Sequence
  Chemically Synthesized
QVQLQESGGGLVQAGGSLRLSCAASGSIFTASDMGWYRQAPGKERELVASINEGSTTNYADSVKGRFTISRDNAKNTVYLQMNSLKPEDTAVYYCAVKDAAVYVGDTDFDYWGQGTQVTVSS

SEQ ID NO: 35557 - protein, 122 aa, Artificial Sequence
  Chemically Synthesized
QVQLQESGGGLVQAGGSLRLSCAASGNISGIVVMGWYRQAPGKERELVAGIAYGGNTYYADSVKGRFTISRDNAKNTVYLQMNSLKPEDTAVYYCAVVDVTPYAWGVWHYYWGQGTQVTVSS

SEQ ID NO: 35558 - protein, 112 aa, Artificial Sequence
  Chemically Synthesized
QVQLQESGGGLVQAGGSLRLSCAASGCMGWYRQAPGKEREFVATITLGATTYYADSVKGRFTISRDNAKNTVYLQMNSLKPEDTAVYYCAAAEESHDPYYYWGQGTQVTVSS

SEQ ID NO: 35559 - protein, 118 aa, Artificial Sequence
  Chemically Synthesized
QVQLQESGGGLVQAGGSLRLSCAASGSISATPSMGWYRQAPGKERELVAAISDGSNTNYADSVKGRFTISRDNAKNTVYLQMNSLKPEDTAVYYCAVGYAYFTAHRYWGQGTQVTVSS

SEQ ID NO: 35560 - protein, 126 aa, Artificial Sequence
  Chemically Synthesized
QVQLQESGGGLVQAGGSLRLSCAASGYIFRAPVMGWYRQAPGKEREFVAGITLGTNTYYADSVKGRFTISRDNAKNTVYLQMNSLKPEDTAVYYCAVAYYPRNYNDAEGSNRHYYWGQGTQVTVSS

SEQ ID NO: 35561 - protein, 116 aa, Artificial Sequence
  Chemically Synthesized
QVQLQESGGGLVQAGGSLRLSCAASGSIFFDSVMGWYRQAPGKEREFVATMLTVVLPYADSVKGRFTISRDNAKNTVYLQMNSLKPEDTAVYYCAVYGRGSQFDYWGQGTQVTVSS

SEQ ID NO: 35562 - protein, 122 aa, Artificial Sequence
  Chemically Synthesized
QVQLQESGGGLVQAGGSLRLSCAASGSISDSYVMGWYRQAPGKERELVATIAYGGNTYYADSVKGRFTISRDNAKNTVYLQMNSLKPEDTAVYYCAVKYDDTGRGYYNYEYWGQGTQVTVSS

SEQ ID NO: 35563 - protein, 117 aa, Artificial Sequence
  Chemically Synthesized
QVQLQESGGGLVQAGGSLRLSCAASGTIFYDDSMGWYRQAPGKERELVAAIAYGAITNYADSVKGRFTISRDNAKNTVYLQMNSLKPEDTAVYYCAYNIPPAPHGYWGQGTQVTVSS

SEQ ID NO: 35564 - protein, 127 aa, Artificial Sequence
  Chemically Synthesized
QVQLQESGGGLVQAGGSLRLSCAASGYISYSTYMGWYRQAPGKEREFVATISGGTTTNYADSVKGRFTISRDNAKNTVYLQMNSLKPEDTAVYYCAARYKDAQGQSYGNRSGPFGYWGQGTQVTVSS

SEQ ID NO: 35565 - protein, 118 aa, Artificial Sequence
  Chemically Synthesized
QVQLQESGGGLVQAGGSLRLSCAASGTIFGGWYMGWYRQAPGKERELVAGITRGSTTNYADSVKGRFTISRDNAKNTVYLQMNSLKPEDTAVYYCAVTQHYEALYYYWGQGTQVTVSS

SEQ ID NO: 35566 - protein, 117 aa, Artificial Sequence
  Chemically Synthesized
QVQLQESGGGLVQAGGSLRLSCAASGSIFTGPHMGWYRQAPGKERELVASIAAGASTYYADSVKGRFTISRDNAKNTVYLQMNSLKPEDTAVYYCAAKTTTVLSIYWGQGTQVTVSS

SEQ ID NO: 35567 - protein, 118 aa, Artificial Sequence
  Chemically Synthesized
QVQLQESGGGLVQAGGSLRLSCAASGTISLLRIMGWYRQAPGKERELVASINYGGNTYYADSVKGRFTISRDNAKNTVYLQMNSLKPEDTAVYYCAARGDNAHYLVYWGQGTQVTVSS

SEQ ID NO: 35568 - protein, 118 aa, Artificial Sequence
  Chemically Synthesized
QVQLQESGGGLVQAGGSLRLSCAASGNISFYTYMGWYRQAPGKERELVATISNGGTTYYADSVKGRFTISRDNAKNTVYLQMNSLKPEDTAVYYCAVPGYNYGYYYYWGQGTQVTVSS

SEQ ID NO: 35569 - protein, 118 aa, Artificial Sequence
  Chemically Synthesized
QVQLQESGGGLVQAGGSLRLSCAASGNIFPRHRMGWYRQAPGKEREFVAAIDRGTSTYYADSVKGRFTISRDNAKNTVYLQMNSLKPEDTAVYYCAVATVYQEFLAYWGQGTQVTVSS

SEQ ID NO: 35570 - protein, 118 aa, Artificial Sequence
  Chemically Synthesized
QVQLQESGGGLVQAGGSLRLSCAASGTIFTYWTMGWYRQAPGKEREFVAAIATGATTYYADSVKGRFTISRDNAKNTVYLQMNSLKPEDTAVYYCAALLRYLTKHAYWGQGTQVTVSS

SEQ ID NO: 35571 - protein, 117 aa, Artificial Sequence
  Chemically Synthesized
QVQLQESGGGLVQAGGSLRLSCAASGNIFRDTYMGWYRQAPGKERELVAAIGAGGSTYYADSVKGRFTISRDNAKNTVYLQMNSLKPEDTAVYYCAATQLDYRYYYWGQGTQVTVSS

SEQ ID NO: 35572 - protein, 121 aa, Artificial Sequence
  Chemically Synthesized
QVQLQESGGGLVQAGGSLRLSCAASGNIFLVQMGWYRQAPGKEREFVASITYGGNTYYADSVKGRFTISRDNAKNTVYLQMNSLKPEDTAVYYCAAREGDVIHYTVGHGYWGQGTQVTVSS

SEQ ID NO: 35573 - protein, 118 aa, Artificial Sequence
  Chemically Synthesized
QVQLQESGGGLVQAGGSLRLSCAASGSIFDKSGMGWYRQAPGKEREFVAAIGLGTNTNYADSVKGRFTISRDNAKNTVYLQMNSLKPEDTAVYYCAAGDVYEYSHDYWGQGTQVTVSS

SEQ ID NO: 35574 - protein, 118 aa, Artificial Sequence
  Chemically Synthesized
QVQLQESGGGLVQAGGSLRLSCAASGTIFGPGVMGWYRQAPGKEREFVAAINAGAITYYADSVKGRFTISRDNAKNTVYLQMNSLKPEDTAVYYCAVRDWRVHTFFYWGQGTQVTVSS

SEQ ID NO: 35575 - protein, 118 aa, Artificial Sequence
  Chemically Synthesized
QVQLQESGGGLVQAGGSLRLSCAASGTIFRYRFMGWYRQAPGKERELVAAIAPGANTNYADSVKGRFTISRDNAKNTVYLQMNSLKPEDTAVYYCAAGSSFTDYHFYWGQGTQVTVSS

SEQ ID NO: 35576 - protein, 118 aa, Artificial Sequence
  Chemically Synthesized
QVQLQESGGGLVQAGGSLRLSCAASGNISSRAYMGWYRQAPGKERELVAGITAGTSTNYADSVKGRFTISRDNAKNTVYLQMNSLKPEDTAVYYCAVYAPFRYPFGYWGQGTQVTVSS

SEQ ID NO: 35577 - protein, 117 aa, Artificial Sequence
  Chemically Synthesized
QVQLQESGGGLVQAGGSLRLSCAASGNISQADTMGWYRQAPGKEREFVAGIIPYADSVKGRFTISRDNAKNTVYLQMNSLKPEDTAVYYCAATGTPSFAPGPTHNYWGQGTQVTVSS

SEQ ID NO: 35578 - protein, 122 aa, Artificial Sequence
  Chemically Synthesized
QVQLQESGGGLVQAGGSLRLSCAASGTIFYSSTMGWYRQAPGKEREFVAGISAGSTTNYADSVKGRFTISRDNAKNTVYLQMNSLKPEDTAVYYCAATPKPTVGPTGDHYYWGQGTQVTVSS

SEQ ID NO: 35579 - protein, 126 aa, Artificial Sequence
  Chemically Synthesized
QVQLQESGGGLVQAGGSLRLSCAASGYISLYTTMGWYRQAPGKEREFVASIDGGGITYYADSVKGRFTISRDNAKNTVYLQMNSLKPEDTAVYYCAVYNLPLDLAQFSVHYGLSYWGQGTQVTVSS

SEQ ID NO: 35580 - protein, 118 aa, Artificial Sequence
  Chemically Synthesized
QVQLQESGGGLVQAGGSLRLSCAASGYIFVQLAMGWYRQAPGKEREFVAGIGYGTITNYADSVKGRFTISRDNAKNTVYLQMNSLKPEDTAVYYCAVFGDHIIALPYWGQGTQVTVSS

SEQ ID NO: 35581 - protein, 118 aa, Artificial Sequence
  Chemically Synthesized
QVQLQESGGGLVQAGGSLRLSCAASGSISYRQDMGWYRQAPGKEREFVAGIDIGATTYYADSVKGRFTISRDNAKNTVYLQMNSLKPEDTAVYYCAVDRTFSYYHTYWGQGTQVTVSS

SEQ ID NO: 35582 - protein, 125 aa, Artificial Sequence
  Chemically Synthesized
QVQLQESGGGLVQAGGSLRLSCAASGTIFRYSHMGWYRQAPGKERELVAAILLVVIPYADSVKGRFTISRDNAKNTVYLQMNSLKPEDTAVYYCAVYADSTYYYYTGDYNYFDYWGQGTQVTVSS

SEQ ID NO: 35583 - protein, 122 aa, Artificial Sequence
  Chemically Synthesized
QVQLQESGGGLVQAGGSLRLSCAASGYIFPNDSMGWYRQAPGKERELVATINGGGITYYADSVKGRFTISRDNAKNTVYLQMNSLKPEDTAVYYCATARIYWYGSDAGHRYWGQGTQVTVSS

SEQ ID NO: 35584 - protein, 126 aa, Artificial Sequence
  Chemically Synthesized
QVQLQESGGGLVQAGGSLRLSCAASGNISSVYPMGWYRQAPGKERELVASIGRGSNTYYADSVKGRFTISRDNAKNTVYLQMNSLKPEDTAVYYCAAIWWHYYRVHYYVYRSYVYWGQGTQVTVSS

SEQ ID NO: 35585 - protein, 118 aa, Artificial Sequence
  Chemically Synthesized
QVQLQESGGGLVQAGGSLRLSCAASGNISAYVIMGWYRQAPGKEREFVATIAHGGTTNYADSVKGRFTISRDNAKNTVYLQMNSLKPEDTAVYYCAAPIVVAYQYYYWGQGTQVTVSS

SEQ ID NO: 35586 - protein, 122 aa, Artificial Sequence
  Chemically Synthesized
QVQLQESGGGLVQAGGSLRLSCAASGNIFGTSDMGWYRQAPGKERELVAGIAIGTSTNYADSVKGRFTISRDNAKNTVYLQMNSLKPEDTAVYYCAAPSYVHRQAWPSLTYWGQGTQVTVSS

SEQ ID NO: 35587 - protein, 118 aa, Artificial Sequence
  Chemically Synthesized
QVQLQESGGGLVQAGGSLRLSCAASGNISYASFMGWYRQAPGKEREFVASISNGSNTYYADSVKGRFTISRDNAKNTVYLQMNSLKPEDTAVYYCAVTYDYVPGLGYWGQGTQVTVSS

SEQ ID NO: 35588 - protein, 123 aa, Artificial Sequence
  Chemically Synthesized
QVQLQESGGGLVQAGGSLRLSCAASGSISYPASMGWYRQAPGKERELVATIDRGGTTNYADSVKGRFTISRDNAKNTVYLQMNSLKPEDTAVYYCAAIHDYRKILNYIVHWYWGQGTQVTVSS

SEQ ID NO: 35589 - protein, 117 aa, Artificial Sequence
  Chemically Synthesized
QVQLQESGGGLVQAGGSLRLSCAASGNIFRHYMGWYRQAPGKEREFVAAIGTGGNTYYADSVKGRFTISRDNAKNTVYLQMNSLKPEDTAVYYCAVGSRRSTYHTYWGQGTQVTVSS

SEQ ID NO: 35590 - protein, 125 aa, Artificial Sequence
  Chemically Synthesized
QVQLQESGGGLVQAGGSLRLSCAASGNIFIIYSMGWYRQAPGKERELVASINYGGNTYYADSVKGRFTISRDNAKNTVYLQMNSLKPEDTAVYYCAVGLLSVTTTLTTNGTTIYWGQGTQVTVSS

SEQ ID NO: 35591 - protein, 122 aa, Artificial Sequence
  Chemically Synthesized
QVQLQESGGGLVQAGGSLRLSCAASGYIFLQHAMGWYRQAPGKEREFVASISWGGITNYADSVKGRFTISRDNAKNTVYLQMNSLKPEDTAVYYCAVDIRGYLGVYNFYYYWGQGTQVTVSS

SEQ ID NO: 35592 - protein, 118 aa, Artificial Sequence
  Chemically Synthesized
QVQLQESGGGLVQAGGSLRLSCAASGYISWGLAMGWYRQAPGKERELVAAISRGATTYYADSVKGRFTISRDNAKNTVYLQMNSLKPEDTAVYYCAVANHTRSNLPYWGQGTQVTVSS

SEQ ID NO: 35593 - protein, 125 aa, Artificial Sequence
  Chemically Synthesized
QVQLQESGGGLVQAGGSLRLSCAASGSIFDYSYMGWYRQAPGKEREFVAGIADGAITYYADSVKGRFTISRDNAKNTVYLQMNSLKPEDTAVYYCAAYSRAVEGYSYQNYYYLYWGQGTQVTVSS

SEQ ID NO: 35594 - protein, 122 aa, Artificial Sequence
  Chemically Synthesized
QVQLQESGGGLVQAGGSLRLSCAASGNIFYKGYMGWYRQAPGKEREFVAGIDYGTSTNYADSVKGRFTISRDNAKNTVYLQMNSLKPEDTAVYYCAARRVYGYVQPYYHRYWGQGTQVTVSS

SEQ ID NO: 35595 - protein, 118 aa, Artificial Sequence
  Chemically Synthesized
QVQLQESGGGLVQAGGSLRLSCAASGYISRSTWMGWYRQAPGKERELVATIGRGASTYYADSVKGRFTISRDNAKNTVYLQMNSLKPEDTAVYYCAAYQQGSRQYRYWGQGTQVTVSS

SEQ ID NO: 35596 - protein, 118 aa, Artificial Sequence
  Chemically Synthesized
QVQLQESGGGLVQAGGSLRLSCAASGTIFDPYGMGWYRQAPGKERELVAAITGGSSTYYADSVKGRFTISRDNAKNTVYLQMNSLKPEDTAVYYCAVTGPADFGHYYWGQGTQVTVSS

SEQ ID NO: 35597 - protein, 115 aa, Artificial Sequence
  Chemically Synthesized
QVQLQESGGGLVQAGGSLRLSCAASGSIFVYLAMGWYRQAPGKEREFVAGIGSGANTYYADSVKGRFTISRDNAKNTVYLQMNSLKPEDTAVYYCAVEPDDHIYWGQGTQVTVSS

SEQ ID NO: 35598 - protein, 122 aa, Artificial Sequence
  Chemically Synthesized
QVQLQESGGGLVQAGGSLRLSCAASGSISDQSRMGWYRQAPGKERELVAGIDTGANTNYADSVKGRFTISRDNAKNTVYLQMNSLKPEDTAVYYCAALYRDARRADEYHYYWGQGTQVTVSS

SEQ ID NO: 35599 - protein, 118 aa, Artificial Sequence
  Chemically Synthesized
QVQLQESGGGLVQAGGSLRLSCAASGYISGYVYMGWYRQAPGKERELVATITEGGNTNYADSVKGRFTISRDNAKNTVYLQMNSLKPEDTAVYYCAATYYHGYTHVYWGQGTQVTVSS

SEQ ID NO: 35600 - protein, 122 aa, Artificial Sequence
  Chemically Synthesized
QVQLQESGGGLVQAGGSLRLSCAASGYIFPYHYMGWYRQAPGKEREFVAIISDGATTYYADSVKGRFTISRDNAKNTVYLQMNSLKPEDTAVYYCAVRYVHAVRLFNALGYWGQGTQVTVSS

SEQ ID NO: 35601 - protein, 126 aa, Artificial Sequence
  Chemically Synthesized
QVQLQESGGGLVQAGGSLRLSCAASGNISQSPLMGWYRQAPGKERELVAGIGQGGTTNYADSVKGRFTISRDNAKNTVYLQMNSLKPEDTAVYYCAAYLYDQYVDSDYYWSWHYYWGQGTQVTVSS

SEQ ID NO: 35602 - protein, 126 aa, Artificial Sequence
  Chemically Synthesized
QVQLQESGGGLVQAGGSLRLSCAASGSIFTYALMGWYRQAPGKERELVAGITQGTTTYYADSVKGRFTISRDNAKNTVYLQMNSLKPEDTAVYYCAAWGPDGTPPRAYDVFDLRYWGQGTQVTVSS

SEQ ID NO: 35603 - protein, 125 aa, Artificial Sequence
  Chemically Synthesized
QVQLQESGGGLVQAGGSLRLSCAASGTIFGSYTMGWYRQAPGKERELVASIGIGANTNYADSVKGRFTISRDNAKNTVYLQMNSLKPEDTAVYYCAAYYYSPYSQDYLDLYHSYWGQGTQVTVSS

SEQ ID NO: 35604 - protein, 118 aa, Artificial Sequence
  Chemically Synthesized
QVQLQESGGGLVQAGGSLRLSCAASGTIFRIPIMGWYRQAPGKERELVATIGVGGITNYADSVKGRFTISRDNAKNTVYLQMNSLKPEDTAVYYCAAGPYPFVRFWYWGQGTQVTVSS

SEQ ID NO: 35605 - protein, 125 aa, Artificial Sequence
  Chemically Synthesized
QVQLQESGGGLVQAGGSLRLSCAASGYISVSDDMGWYRQAPGKEREFVAGITPGASTYYADSVKGRFTISRDNAKNTVYLQMNSLKPEDTAVYYCAADDRVRLDYTTLSTTVLYWGQGTQVTVSS

SEQ ID NO: 35606 - protein, 122 aa, Artificial Sequence
  Chemically Synthesized
QVQLQESGGGLVQAGGSLRLSCAASGSISGYHYMGWYRQAPGKERELVAGIAGGGTTNYADSVKGRFTISRDNAKNTVYLQMNSLKPEDTAVYYCAAIHYDQDRGQEAHVYWGQGTQVTVSS

SEQ ID NO: 35607 - protein, 118 aa, Artificial Sequence
  Chemically Synthesized
QVQLQESGGGLVQAGGSLRLSCAASGNIFYRVPMGWYRQAPGKEREFVAAITYGGNTYYADSVKGRFTISRDNAKNTVYLQMNSLKPEDTAVYYCAVGRGVYGYHVYWGQGTQVTVSS

SEQ ID NO: 35608 - protein, 114 aa, Artificial Sequence
  Chemically Synthesized
QVQLQESGGGLVQAGGSLRLSCAASGTISMGWYRQAPGKEREFVAAITYGSNTYYADSVKGRFTISRDNAKNTVYLQMNSLKPEDTAVYYCAVDDSTSGTHRYWGQGTQVTVSS

SEQ ID NO: 35609 - protein, 118 aa, Artificial Sequence
  Chemically Synthesized
QVQLQESGGGLVQAGGSLRLSCAASGTIFNAIFMGWYRQAPGKEREFVAGINYGSNTNYADSVKGRFTISRDNAKNTVYLQMNSLKPEDTAVYYCAVDYSAYHYYVYWGQGTQVTVSS

SEQ ID NO: 35610 - protein, 125 aa, Artificial Sequence
  Chemically Synthesized
QVQLQESGGGLVQAGGSLRLSCAASGTISYPSYMGWYRQAPGKEREFVASISYGASTYYADSVKGRFTISRDNAKNTVYLQMNSLKPEDTAVYYCAATTTWFRVTSRSTTTTIYWGQGTQVTVSS

SEQ ID NO: 35611 - protein, 118 aa, Artificial Sequence
  Chemically Synthesized
QVQLQESGGGLVQAGGSLRLSCAASGNISDGGYMGWYRQAPGKEREFVATIAGGAITYYADSVKGRFTISRDNAKNTVYLQMNSLKPEDTAVYYCAAWRRYWDYLHYWGQGTQVTVSS

SEQ ID NO: 35612 - protein, 118 aa, Artificial Sequence
  Chemically Synthesized
QVQLQESGGGLVQAGGSLRLSCAASGSIFIQAYMGWYRQAPGKEREFVATITDGTSTYYADSVKGRFTISRDNAKNTVYLQMNSLKPEDTAVYYCAALDNVWRTYWYWGQGTQVTVSS

SEQ ID NO: 35613 - protein, 122 aa, Artificial Sequence
  Chemically Synthesized
QVQLQESGGGLVQAGGSLRLSCAASGYISRDAAMGWYRQAPGKERELVATITYGTNTNYADSVKGRFTISRDNAKNTVYLQMNSLKPEDTAVYYCAVDSDILKYDQNTHDYWGQGTQVTVSS

SEQ ID NO: 35614 - protein, 118 aa, Artificial Sequence
  Chemically Synthesized
QVQLQESGGGLVQAGGSLRLSCAASGTISHDGGMGWYRQAPGKERELVATISYGGTTYYADSVKGRFTISRDNAKNTVYLQMNSLKPEDTAVYYCAVHGGDVEDHPYWGQGTQVTVSS

SEQ ID NO: 35615 - protein, 118 aa, Artificial Sequence
  Chemically Synthesized
QVQLQESGGGLVQAGGSLRLSCAASGTIFDDVNMGWYRQAPGKERELVAGISYGATTNYADSVKGRFTISRDNAKNTVYLQMNSLKPEDTAVYYCAVAYGSDYVHDYWGQGTQVTVSS

SEQ ID NO: 35616 - protein, 118 aa, Artificial Sequence
  Chemically Synthesized
QVQLQESGGGLVQAGGSLRLSCAASGTIFYVADMGWYRQAPGKERELVASINDGAITNYADSVKGRFTISRDNAKNTVYLQMNSLKPEDTAVYYCAVLVYDLVQLQYWGQGTQVTVSS

SEQ ID NO: 35617 - protein, 126 aa, Artificial Sequence
  Chemically Synthesized
QVQLQESGGGLVQAGGSLRLSCAASGTISYSYLMGWYRQAPGKERELVATITPGGITYYADSVKGRFTISRDNAKNTVYLQMNSLKPEDTAVYYCAVYYHQYTVADYYDYSGLDYWGQGTQVTVSS

SEQ ID NO: 35618 - protein, 118 aa, Artificial Sequence
  Chemically Synthesized
QVQLQESGGGLVQAGGSLRLSCAASGNISKRRYMGWYRQAPGKERELVAGITAGTSTNYADSVKGRFTISRDNAKNTVYLQMNSLKPEDTAVYYCAVPDGDSRDYGYWGQGTQVTVSS

SEQ ID NO: 35619 - protein, 121 aa, Artificial Sequence
  Chemically Synthesized
QVQLQESGGGLVQAGGSLRLSCAASGTISDYDTMGWYRQAPGKEREFVAGITPGSSTNYADSVKGRFTISRDNAKNTVYLQMNSLKPEDTAVYYCAAYKRCFLVRLFSYYWGQGTQVTVSS

SEQ ID NO: 35620 - protein, 122 aa, Artificial Sequence
  Chemically Synthesized
QVQLQESGGGLVQAGGSLRLSCAASGYIFRIAQMGWYRQAPGKERELVASIARGASTYYADSVKGRFTISRDNAKNTVYLQMNSLKPEDTAVYYCAVWYAGGYYRRYPYYYWGQGTQVTVSS

SEQ ID NO: 35621 - protein, 118 aa, Artificial Sequence
  Chemically Synthesized
QVQLQESGGGLVQAGGSLRLSCAASGTISWVYYMGWYRQAPGKEREFVATIDEGSTTYYADSVKGRFTISRDNAKNTVYLQMNSLKPEDTAVYYCAVLFIGHDDFGYWGQGTQVTVSS

SEQ ID NO: 35622 - protein, 118 aa, Artificial Sequence
  Chemically Synthesized
QVQLQESGGGLVQAGGSLRLSCAASGYISGDADMGWYRQAPGKERELVAAISIGGITYYADSVKGRFTISRDNAKNTVYLQMNSLKPEDTAVYYCAADRVPTGLHHYWGQGTQVTVSS

SEQ ID NO: 35623 - protein, 122 aa, Artificial Sequence
  Chemically Synthesized
QVQLQESGGGLVQAGGSLRLSCAASGNIFEWVRMGWYRQAPGKERELVAGIADGANTNYADSVKGRFTISRDNAKNTVYLQMNSLKPEDTAVYYCAVAITDHAPEPLDFAYWGQGTQVTVSS

SEQ ID NO: 35624 - protein, 123 aa, Artificial Sequence
  Chemically Synthesized
QVQLQESGGGLVQAGGSLRLSCAASGNISRAYKMGWYRQAPGKEREFVAAIAYGASTNYADSVKGRFTISRDNAKNTVYLQMNSLKPEDTAVYYCAAAYSDGITYPDYDYYYWGQGTQVTVSS

SEQ ID NO: 35625 - protein, 121 aa, Artificial Sequence
  Chemically Synthesized
QVQLQESGGGLVQAGGSLRLSCAASGNISVYPYMGWYRQAPGKERELVASINYGTITNYADSVKGRFTISRDNAKNTVYLQMNSLKPEDTAVYYCAVLAYPYYLEWSAFYWGQGTQVTVSS

SEQ ID NO: 35626 - protein, 118 aa, Artificial Sequence
  Chemically Synthesized
QVQLQESGGGLVQAGGSLRLSCAASGTISSTDSMGWYRQAPGKERELVAAIGAGASTYYADSVKGRFTISRDNAKNTVYLQMNSLKPEDTAVYYCAADGGVRVPYRYWGQGTQVTVSS

SEQ ID NO: 35627 - protein, 118 aa, Artificial Sequence
  Chemically Synthesized
QVQLQESGGGLVQAGGSLRLSCAASGYISSVAVMGWYRQAPGKERELVAAIGVGGITYYADSVKGRFTISRDNAKNTVYLQMNSLKPEDTAVYYCAVYVLTDDPLTYWGQGTQVTVSS

SEQ ID NO: 35628 - protein, 115 aa, Artificial Sequence
  Chemically Synthesized
QVQLQESGGGLVQAGGSLRLSCAASGYISTSGTMGWYRQAPGKERELVAGIDRGTSTYYADSVKGRFTISRDNAKNTVYLQMNSLKPEDTAVYYCALTVLNTIYWGQGTQVTVSS

SEQ ID NO: 35629 - protein, 121 aa, Artificial Sequence
  Chemically Synthesized
QVQLQESGGGLVQAGGSLRLSCAASGSIFAYYVMGWYRQAPGKEREFVATIGSVLVPYADSVKGRFTISRDNAKNTVYLQMNSLKPEDTAVYYCAAYDHLFKTRGAAYAYWGQGTQVTVSS

SEQ ID NO: 35630 - protein, 125 aa, Artificial Sequence
  Chemically Synthesized
QVQLQESGGGLVQAGGSLRLSCAASGTIFDQALMGWYRQAPGKEREFVAAIDRGGTTYADSVKGRFTISRDNAKNTVYLQMNSLKPEDTAVYYCAVGDPHYYVAYQYHPYIYGYWGQGTQVTVSS

SEQ ID NO: 35631 - protein, 125 aa, Artificial Sequence
  Chemically Synthesized
QVQLQESGGGLVQAGGSLRLSCAASGTIFTWAGMGWYRQAPGKEREFVATISDGTSTNYADSVKGRFTISRDNAKNTVYLQMNSLKPEDTAVYYCAALYVSGVGLENVLDPYLYWGQGTQVTVSS

SEQ ID NO: 35632 - protein, 118 aa, Artificial Sequence
  Chemically Synthesized
QVQLQESGGGLVQAGGSLRLSCAASGTIFNYYAMGWYRQAPGKERELVATIGRGGNTNYADSVKGRFTISRDNAKNTVYLQMNSLKPEDTAVYYCAAQDRYSDFHQYWGQGTQVTVSS

SEQ ID NO: 35633 - protein, 118 aa, Artificial Sequence
  Chemically Synthesized
QVQLQESGGGLVQAGGSLRLSCAASGYIFYNWRMGWYRQAPGKEREFVATISDGTNTNYADSVKGRFTISRDNAKNTVYLQMNSLKPEDTAVYYCAAIDEDSYHLWYWGQGTQVTVSS

SEQ ID NO: 35634 - protein, 117 aa, Artificial Sequence
  Chemically Synthesized
QVQLQESGGGLVQAGGSLRLSCAASGIFFGTTMGWYRQAPGKERELVAGIDAGASTNYADSVKGRFTISRDNAKNTVYLQMNSLKPEDTAVYYCAADPDATSLLFYWGQGTQVTVSS

SEQ ID NO: 35635 - protein, 124 aa, Artificial Sequence
  Chemically Synthesized
QVQLQESGGGLVQAGGSLRLSCAASGTISVSLMGWYRQAPGKERELVAGISSGGSTYYADSVKGRFTISRDNAKNTVYLQMNSLKPEDTAVYYCAASTVTTVVSTTLFRPVLYWGQGTQVTVSS

SEQ ID NO: 35636 - protein, 126 aa, Artificial Sequence
  Chemically Synthesized
QVQLQESGGGLVQAGGSLRLSCAASGSIFRPRYMGWYRQAPGKERELVAGIATGATTNYADSVKGRFTISRDNAKNTVYLQMNSLKPEDTAVYYCAADYNGLRGVTLNLLRPHGYWGQGTQVTVSS

SEQ ID NO: 35637 - protein, 120 aa, Artificial Sequence
  Chemically Synthesized
QVQLQESGGGLVQAGGSLRLSCAASGYISQGAWMGWYRQAPGKERELVATIGNGAITYYADSVKGRFTISRDNAKNTVYLQMNSLKPEDTAVYYCAVYSTTLRTLLTIYWGQGTQVTVSS

SEQ ID NO: 35638 - protein, 118 aa, Artificial Sequence
  Chemically Synthesized
QVQLQESGGGLVQAGGSLRLSCAASGTISFVPSMGWYRQAPGKERELVATISSGGNTNYADSVKGRFTISRDNAKNTVYLQMNSLKPEDTAVYYCAAKQDAVDHHDYWGQGTQVTVSS

SEQ ID NO: 35639 - protein, 118 aa, Artificial Sequence
  Chemically Synthesized
QVQLQESGGGLVQAGGSLRLSCAASGTIFDYASMGWYRQAPGKERELVASINYGATTNYADSVKGRFTISRDNAKNTVYLQMNSLKPEDTAVYYCAAGQRKADFYPYWGQGTQVTVSS

SEQ ID NO: 35640 - protein, 126 aa, Artificial Sequence
  Chemically Synthesized
QVQLQESGGGLVQAGGSLRLSCAASGNISRTYSMGWYRQAPGKERELVATIDNGTTTYYADSVKGRFTISRDNAKNTVYLQMNSLKPEDTAVYYCAVYIYHYRYDTYDTLPFLEYWGQGTQVTVSS

SEQ ID NO: 35641 - protein, 118 aa, Artificial Sequence
  Chemically Synthesized
QVQLQESGGGLVQAGGSLRLSCAASGTISKQRIMGWYRQAPGKEREFVATITTGTNTNYADSVKGRFTISRDNAKNTVYLQMNSLKPEDTAVYYCAVTRYSGDYLAYWGQGTQVTVSS

SEQ ID NO: 35642 - protein, 118 aa, Artificial Sequence
  Chemically Synthesized
QVQLQESGGGLVQAGGSLRLSCAASGSIFYDYYMGWYRQAPGKEREFVAAIGGGSNTNYADSVKGRFTISRDNAKNTVYLQMNSLKPEDTAVYYCAVAAAGNREHWYWGQGTQVTVSS

SEQ ID NO: 35643 - protein, 122 aa, Artificial Sequence
  Chemically Synthesized
QVQLQESGGGLVQAGGSLRLSCAASGNIFGSADMGWYRQAPGKERELVASIDDGANTNYADSVKGRFTISRDNAKNTVYLQMNSLKPEDTAVYYCAVPRQEGYPYDGGHVYWGQGTQVTVSS

SEQ ID NO: 35644 - protein, 125 aa, Artificial Sequence
  Chemically Synthesized
QVQLQESGGGLVQAGGSLRLSCAASGNILVLLMGWYRQAPGKERELVAAIDDGTITYYADSVKGRFTISRDNAKNTVYLQMNSLKPEDTAVYYCAVILRISYIYSELIWYYHYYWGQGTQVTVSS

SEQ ID NO: 35645 - protein, 118 aa, Artificial Sequence
  Chemically Synthesized
QVQLQESGGGLVQAGGSLRLSCAASGSISYRTDMGWYRQAPGKEREFVAAITAGTTTYYADSVKGRFTISRDNAKNTVYLQMNSLKPEDTAVYYCAVETHGLYYHLYWGQGTQVTVSS

SEQ ID NO: 35646 - protein, 122 aa, Artificial Sequence
  Chemically Synthesized
QVQLQESGGGLVQAGGSLRLSCAASGSISQSWYMGWYRQAPGKEREFVAGIDEGTTTYYADSVKGRFTISRDNAKNTVYLQMNSLKPEDTAVYYCAVSWGSLDYQYLYHPYWGQGTQVTVSS

SEQ ID NO: 35647 - protein, 118 aa, Artificial Sequence
  Chemically Synthesized
QVQLQESGGGLVQAGGSLRLSCAASGSIFYPYSMGWYRQAPGKEREFVAAISRGATTYYADSVKGRFTISRDNAKNTVYLQMNSLKPEDTAVYYCAAYNRFAYYHYYWGQGTQVTVSS

SEQ ID NO: 35648 - protein, 111 aa, Artificial Sequence
  Chemically Synthesized
QVQLQESGGGLVQAGGSLRLSCAASGNIFYSYVMGWYRQAPGKEREFVAGIAPGSTTNYADSVKGRFTISRDNAKNTVYLQMNSLKPEDTAVYYCAAHDYWGQGTQVTVSS

SEQ ID NO: 35649 - protein, 120 aa, Artificial Sequence
  Chemically Synthesized
QVQLQESGGGLVQAGGSLRLSCAASGTIFDDVGMGWYRQAPGKEREFVAGISYGVLPYADSVKGRFTISRDNAKNTVYLQMNSLKPEDTAVYYCAAWTPGPTIISVRMYWGQGTQVTVSS

SEQ ID NO: 35650 - protein, 118 aa, Artificial Sequence
  Chemically Synthesized
QVQLQESGGGLVQAGGSLRLSCAASGTISPYYTMGWYRQAPGKERELVATITPGGSTYYADSVKGRFTISRDNAKNTVYLQMNSLKPEDTAVYYCAVWYYRNGDFHYWGQGTQVTVSS

SEQ ID NO: 35651 - protein, 118 aa, Artificial Sequence
  Chemically Synthesized
QVQLQESGGGLVQAGGSLRLSCAASGTISARSRMGWYRQAPGKERELVAAIGFGANTNYADSVKGRFTISRDNAKNTVYLQMNSLKPEDTAVYYCAVYIPYYILHRYWGQGTQVTVSS

SEQ ID NO: 35652 - protein, 126 aa, Artificial Sequence
  Chemically Synthesized
QVQLQESGGGLVQAGGSLRLSCAASGNISSRVAMGWYRQAPGKERELVAGIGTGGITNYADSVKGRFTISRDNAKNTVYLQMNSLKPEDTAVYYCAVGPPYRESYFIRYIHYLVYWGQGTQVTVSS

SEQ ID NO: 35653 - protein, 118 aa, Artificial Sequence
  Chemically Synthesized
QVQLQESGGGLVQAGGSLRLSCAASGNISTGDYMGWYRQAPGKEREFVAAINYGGSTYYADSVKGRFTISRDNAKNTVYLQMNSLKPEDTAVYYCAVGRYDYNTYAYWGQGTQVTVSS

SEQ ID NO: 35654 - protein, 118 aa, Artificial Sequence
  Chemically Synthesized
QVQLQESGGGLVQAGGSLRLSCAASGSIFLVRHMGWYRQAPGKERELVAGIGWGGTTNYADSVKGRFTISRDNAKNTVYLQMNSLKPEDTAVYYCAALTYYRVYHAYWGQGTQVTVSS

SEQ ID NO: 35655 - protein, 123 aa, Artificial Sequence
  Chemically Synthesized
QVQLQESGGGLVQAGGSLRLSCAASGNISYYYGMGWYRQAPGKEREFVATIDRTGSTTNYADSVKGRFTISRDNAKNTVYLQMNSLKPEDTAVYYCAVVPGVYYRRADTLQYWGQGTQVTVSS

SEQ ID NO: 35656 - protein, 118 aa, Artificial Sequence
  Chemically Synthesized
QVQLQESGGGLVQAGGSLRLSCAASGNIFTYHVMGWYRQAPGKERELVAAISYGAITYYADSVKGRFTISRDNAKNTVYLQMNSLKPEDTAVYYCAVIYYYSVRHVYWGQGTQVTVSS

SEQ ID NO: 35657 - protein, 116 aa, Artificial Sequence
  Chemically Synthesized
QVQLQESGGGLVQAGGSLRLSCAASGYISDYDTMGWYRQAPGKERELVAGIAGGSTNYADSVKGRFTISRDNAKNTVYLQMNSLKPEDTAVYYCAAYYFSVPASYWGQGTQVTVSS

SEQ ID NO: 35658 - protein, 121 aa, Artificial Sequence
  Chemically Synthesized
QVQLQESGGGLVQAGGSLRLSCAASGNISRSLMGWYRQAPGKERELVAGIAFGGSTYYADSVKGRFTISRDNAKNTVYLQMNSLKPEDTAVYYCAAYDDAGLGFPFDFPYWGQGTQVTVSS

SEQ ID NO: 35659 - protein, 113 aa, Artificial Sequence
  Chemically Synthesized
QVQLQESGGGLVQAGGSLRLSCAASGTHMGWYRQAPGKERELVAAITYGSITYYADSVKGRFTISRDNAKNTVYLQMNSLKPEDTAVYYCAVRVYRRASLRYWGQGTQVTVSS

SEQ ID NO: 35660 - protein, 108 aa, Artificial Sequence
  Chemically Synthesized
QVQLQESGGGLVQAGGSLRLSCAASGYISGADYMGWYRQAPGKERELPYADSVKGRFTISRDNAKNTVYLQMNSLKPEDTAVYYCAADGPFYYQHAYWGQGTQVTVSS

SEQ ID NO: 35661 - protein, 122 aa, Artificial Sequence
  Chemically Synthesized
QVQLQESGGGLVQAGGSLRLSCAASGYIFQRVFMGWYRQAPGKEREFVASIGDGGITNYADSVKGRFTISRDNAKNTVYLQMNSLKPEDTAVYYCAAYIQSWIRADSRYYYWGQGTQVTVSS

SEQ ID NO: 35662 - protein, 118 aa, Artificial Sequence
  Chemically Synthesized
QVQLQESGGGLVQAGGSLRLSCAASGSISYPAIMGWYRQAPGKEREFVAAITYGAITYYADSVKGRFTISRDNAKNTVYLQMNSLKPEDTAVYYCAAVLADLYHHQYWGQGTQVTVSS

SEQ ID NO: 35663 - protein, 118 aa, Artificial Sequence
  Chemically Synthesized
QVQLQESGGGLVQAGGSLRLSCAASGYIFGPGRMGWYRQAPGKEREFVAAIADGSNTYYADSVKGRFTISRDNAKNTVYLQMNSLKPEDTAVYYCAAYGDDNDNFFYWGQGTQVTVSS

SEQ ID NO: 35664 - protein, 116 aa, Artificial Sequence
  Chemically Synthesized
QVQLQESGGGLVQAGGSLRLSCAASGYISHRKGMGWYRQAPGKEREFVAAISFGAITYYADSVKGRFTISRDNAKNTVYLQMNSLKPEDTAVYYCAVVDPQYHIYWGQGTQVTVSS

SEQ ID NO: 35665 - protein, 118 aa, Artificial Sequence
  Chemically Synthesized
QVQLQESGGGLVQAGGSLRLSCAASGTIFDVEYMGWYRQAPGKEREFVAAIADGSNTYYADSVKGRFTISRDNAKNTVYLQMNSLKPEDTAVYYCAAYGDDNDNFFYWGQGTQVTVSS

SEQ ID NO: 35666 - protein, 121 aa, Artificial Sequence
  Chemically Synthesized
QVQLQESGGGLVQAGGSLRLSCAASGTISYYTRMGWYRQAPGKERELVAAIDKGSTTNYADSVKGRFTISRDNAKNTVYLQMNSLKPEDTAVYYCAVYYWAYEHTLAHTYWGQGTQVTVSS

SEQ ID NO: 35667 - protein, 118 aa, Artificial Sequence
  Chemically Synthesized
QVQLQESGGGLVQAGGSLRLSCAASGYISHRKGMGWYRQAPGKERELVATIDTGANTNYADSVKGRFTISRDNAKNTVYLQMNSLKPEDTAVYYCAAIYNAGSEYWYWGQGTQVTVSS

SEQ ID NO: 35668 - protein, 123 aa, Artificial Sequence
  Chemically Synthesized
QVQLQESGGGLVQAGGSLRLSCAASGTISEQPIMGWYRQAPGKERELVATISHAGGNTYYADSVKGRFTISRDNAKNTVYLQMNSLKPEDTAVYYCAVLTVFTFRRYYALDYWGQGTQVTVSS

SEQ ID NO: 35669 - protein, 126 aa, Artificial Sequence
  Chemically Synthesized
QVQLQESGGGLVQAGGSLRLSCAASGNISGYISMGWYRQAPGKERELVATIGKGTNTYYADSVKGRFTISRDNAKNTVYLQMNSLKPEDTAVYYCAVGVNSWNARWYAPVYWHYYWGQGTQVTVSS

SEQ ID NO: 35670 - protein, 118 aa, Artificial Sequence
  Chemically Synthesized
QVQLQESGGGLVQAGGSLRLSCAASGNIFPAIFMGWYRQAPGKEREFVAAIDDGAITNYADSVKGRFTISRDNAKNTVYLQMNSLKPEDTAVYYCAAYGDDNDNFFYWGQGTQVTVSS

SEQ ID NO: 35671 - protein, 125 aa, Artificial Sequence
  Chemically Synthesized
QVQLQESGGGLVQAGGSLRLSCAASGYISPHSDMGWYRQAPGKEREFVASISGGTTTNYADSVKGRFTISRDNAKNTVYLQMNSLKPEDTAVYYCAVDGNSYSVGTNTGLVTMYWGQGTQVTVSS

SEQ ID NO: 35672 - protein, 122 aa, Artificial Sequence
  Chemically Synthesized
QVQLQESGGGLVQAGGSLRLSCAASGYISQTPYMGWYRQAPGKERELVASIADGAITNYADSVKGRFTISRDNAKNTVYLQMNSLKPEDTAVYYCAAGKWAYDGEYGRYHYWGQGTQVTVSS

SEQ ID NO: 35673 - protein, 117 aa, Artificial Sequence
  Chemically Synthesized
QVQLQESGGGLVQAGGSLRLSCAASGNISQWLYMGWYRQAPGKERELVASIGPGAIPYADSVKGRFTISRDNAKNTVYLQMNSLKPEDTAVYYCAVSDVYQTDYGYWGQGTQVTVSS

SEQ ID NO: 35674 - protein, 118 aa, Artificial Sequence
  Chemically Synthesized
QVQLQESGGGLVQAGGSLRLSCAASGYISHRKGMGWYRQAPGKEREFVAAIADGSNTYYADSVKGRFTISRDNAKNTVYLQMNSLKPEDTAVYYCAVADSGWDLFYYWGQGTQVTVSS

SEQ ID NO: 35675 - protein, 125 aa, Artificial Sequence
  Chemically Synthesized
QVQLQESGGGLVQAGGSLRLSCAASGSISPSHQMGWYRQAPGKERELVASINIGGTTYYADSVKGRFTISRDNAKNTVYLQMNSLKPEDTAVYYCAVDWYPRASRAALQPDHYYWGQGTQVTVSS

SEQ ID NO: 35676 - protein, 118 aa, Artificial Sequence
  Chemically Synthesized
QVQLQESGGGLVQAGGSLRLSCAASGNISVASIMGWYRQAPGKERELVASISDGGTTYYADSVKGRFTISRDNAKNTVYLQMNSLKPEDTAVYYCAAERGYYVAFLYWGQGTQVTVSS

SEQ ID NO: 35677 - protein, 118 aa, Artificial Sequence
  Chemically Synthesized
QVQLQESGGGLVQAGGSLRLSCAASGNIFGITDMGWYRQAPGKERELVASIDFGGITYYADSVKGRFTISRDNAKNTVYLQMNSLKPEDTAVYYCAVDRTDGRDHSYWGQGTQVTVSS

SEQ ID NO: 35678 - protein, 122 aa, Artificial Sequence
  Chemically Synthesized
QVQLQESGGGLVQAGGSLRLSCAASGTIFNYYRMGWYRQAPGKEREFVAAINLGAITNYADSVKGRFTISRDNAKNTVYLQMNSLKPEDTAVYYCAVYVDEAVSWIGSLVYWGQGTQVTVSS

SEQ ID NO: 35679 - protein, 123 aa, Artificial Sequence
  Chemically Synthesized
QVQLQESGGGLVQAGGSLRLSCAASGYIFYVYRMGWYRQAPGKERELVASITEGSSTNYADSVKGRFTISRDNAKNTVYLQMNSLKPEDTAVYYCAAADYGGSVPFGEYLVYWGQGTQVTVSS

SEQ ID NO: 35680 - protein, 126 aa, Artificial Sequence
  Chemically Synthesized
QVQLQESGGGLVQAGGSLRLSCAASGYIFGEDGMGWYRQAPGKERELVATIGYGSITNYADSVKGRFTISRDNAKNTVYLQMNSLKPEDTAVYYCAVYVHGATEGEDLVTADYVYWGQGTQVTVSS

SEQ ID NO: 35681 - protein, 118 aa, Artificial Sequence
  Chemically Synthesized
QVQLQESGGGLVQAGGSLRLSCAASGYIFGPGRMGWYRQAPGKERELVATIDTGANTYYADSVKGRFTISRDNAKNTVYLQMNSLKPEDTAVYYCAAYGDDNDNFFYWGQGTQVTVSS

SEQ ID NO: 35682 - protein, 116 aa, Artificial Sequence
  Chemically Synthesized
QVQLQESGGGLVQAGGSLRLSCAASGSISPETYMGWYRQAPGKEREFVAAIRVLLPYADSVKGRFTISRDNAKNTVYLQMNSLKPEDTAVYYCAVNPYSDVHLRYWGQGTQVTVSS

SEQ ID NO: 35683 - protein, 118 aa, Artificial Sequence
  Chemically Synthesized
QVQLQESGGGLVQAGGSLRLSCAASGSIFGESYMGWYRQAPGKERELVATIGDGATTYYADSVKGRFTISRDNAKNTVYLQMNSLKPEDTAVYYCAAGIPVHPRYSYWGQGTQVTVSS

SEQ ID NO: 35684 - protein, 118 aa, Artificial Sequence
  Chemically Synthesized
QVQLQESGGGLVQAGGSLRLSCAASGTIFVAGYMGWYRQAPGKEREFVAAIDDGASTNYADSVKGRFTISRDNAKNTVYLQMNSLKPEDTAVYYCAARRYQYFDHPYWGQGTQVTVSS

SEQ ID NO: 35685 - protein, 117 aa, Artificial Sequence
  Chemically Synthesized
QVQLQESGGGLVQAGGSLRLSCAASGTISYPRYMGWYRQAPGKERELVASIADGTSTNYADSVKGRFTISRDNAKNTVYLQMNSLKPEDTAVYYCAVDEGTYLHGYWGQGTQVTVSS

SEQ ID NO: 35686 - protein, 117 aa, Artificial Sequence
  Chemically Synthesized
QVQLQESGGGLVQAGGSLRLSCAASGYISPDYGMGWYRQAPGKEREFVASIDSVVLPYADSVKGRFTISRDNAKNTVYLQMNSLKPEDTAVYYCAATAYTYYAHAYWGQGTQVTVSS

SEQ ID NO: 35687 - protein, 127 aa, Artificial Sequence
  Chemically Synthesized
QVQLQESGGGLVQAGGSLRLSCAASGYISDARYMGWYRQAPGKERELVATITYDGGNTYYADSVKGRFTISRDNAKNTVYLQMNSLKPEDTAVYYCAVSPFPWADGYNHQRYQLHYWGQGTQVTVSS

SEQ ID NO: 35688 - protein, 118 aa, Artificial Sequence
  Chemically Synthesized
QVQLQESGGGLVQAGGSLRLSCAASGTIFVRLLMGWYRQAPGKEREFVASIGYGSNTYYADSVKGRFTISRDNAKNTVYLQMNSLKPEDTAVYYCAVLRVQRLRHIYWGQGTQVTVSS

SEQ ID NO: 35689 - protein, 117 aa, Artificial Sequence
  Chemically Synthesized
QVQLQESGGGLVQAGGSLRLSCAASGNILLVLMGWYRQAPGKERELVASINYGSTTNYADSVKGRFTISRDNAKNTVYLQMNSLKPEDTAVYYCAAGSLYEQYTFYWGQGTQVTVSS

SEQ ID NO: 35690 - protein, 127 aa, Artificial Sequence
  Chemically Synthesized
QVQLQESGGGLVQAGGSLRLSCAASGNISQYDDMGWYRQAPGKEREFVAAIGDGGSTYYADSVKGRFTISRDNAKNTVYLQMNSLKPEDTAVYYCAVWHQHYEVNVDTNYIWDLWYWGQGTQVTVSS

SEQ ID NO: 35691 - protein, 118 aa, Artificial Sequence
  Chemically Synthesized
QVQLQESGGGLVQAGGSLRLSCAASGSISTYLYMGWYRQAPGKEREFVASIAGGGITYYADSVKGRFTISRDNAKNTVYLQMNSLKPEDTAVYYCAVYDYVGRPLGYWGQGTQVTVSS

SEQ ID NO: 35692 - protein, 116 aa, Artificial Sequence
  Chemically Synthesized
QVQLQESGGGLVQAGGSLRLSCAASGSISQDDTMGWYRQAPGKERELVAAINRGTSTYYADSVKGRFTISRDNAKNTVYLQMNSLKPEDTAVYYCAAAFYYDLNYWGQGTQVTVSS

SEQ ID NO: 35693 - protein, 126 aa, Artificial Sequence
  Chemically Synthesized
QVQLQESGGGLVQAGGSLRLSCAASGNISHPLKMGWYRQAPGKERELVAAIASGGNTNYADSVKGRFTISRDNAKNTVYLQMNSLKPEDTAVYYCAVRPIVWGGNGTNKGRVHLYWGQGTQVTVSS

SEQ ID NO: 35694 - protein, 118 aa, Artificial Sequence
  Chemically Synthesized
QVQLQESGGGLVQAGGSLRLSCAASGSIFEGYYMGWYRQAPGKEREFVATIADGSNTNYADSVKGRFTISRDNAKNTVYLQMNSLKPEDTAVYYCAAQRGSDAYYPYWGQGTQVTVSS

SEQ ID NO: 35695 - protein, 126 aa, Artificial Sequence
  Chemically Synthesized
QVQLQESGGGLVQAGGSLRLSCAASGSISTLDEMGWYRQAPGKEREFVAAINTGGSTNYADSVKGRFTISRDNAKNTVYLQMNSLKPEDTAVYYCAVWSLQGGDIEYDYTYYLVYWGQGTQVTVSS

SEQ ID NO: 35696 - protein, 126 aa, Artificial Sequence
  Chemically Synthesized
QVQLQESGGGLVQAGGSLRLSCAASGTIFTAIVMGWYRQAPGKEREFVASIDWGASTNYADSVKGRFTISRDNAKNTVYLQMNSLKPEDTAVYYCAAYSDWALSPDGYDTVQLDYWGQGTQVTVSS

SEQ ID NO: 35697 - protein, 122 aa, Artificial Sequence
  Chemically Synthesized
QVQLQESGGGLVQAGGSLRLSCAASGTIFGTYFMGWYRQAPGKEREFVATIGSGAITYYADSVKGRFTISRDNAKNTVYLQMNSLKPEDTAVYYCAVNWDGNEEYIGVFTYWGQGTQVTVSS

SEQ ID NO: 35698 - protein, 121 aa, Artificial Sequence
  Chemically Synthesized
QVQLQESGGGLVQAGGSLRLSCAASGYIFPLVYMGWYRQAPGKEREFVASIATGGNTNYADSVKGRFTISRDNAKNTVYLQMNSLKPEDTAVYYCAVNSTTTWVCSLVLYWGQGTQVTVSS

SEQ ID NO: 35699 - protein, 120 aa, Artificial Sequence
  Chemically Synthesized
QVQLQESGGGLVQAGGSLRLSCAASGSISYYSHMGWYRQAPGKERELVAAINNVNQYADSVKGRFTISRDNAKNTVYLQMNSLKPEDTAVYYCAAGDESSPIYTEIYWYWGQGTQVTVSS

SEQ ID NO: 35700 - protein, 113 aa, Artificial Sequence
  Chemically Synthesized
QVQLQESGGGLVQAGGSLRLSCAASGTIFFRGRMGWYRQAPGKERELVAGINLGGSTNYADSVKGRFTISRDNAKNTVYLQMNSLKPEDTAVYYCAATGLDYWGQGTQVTVSS

SEQ ID NO: 35701 - protein, 115 aa, Artificial Sequence
  Chemically Synthesized
QVQLQESGGGLVQAGGSLRLSCAASGYIFNDHEMGWYRQAPGKERELVAGINLGTTTYYADSVKGRFTISRDNAKNTVYLQMNSLKPEDTAVYYCAAFWVTTMYWGQGTQVTVSS

SEQ ID NO: 35702 - protein, 122 aa, Artificial Sequence
  Chemically Synthesized
QVQLQESGGGLVQAGGSLRLSCAASGTIFTITAMGWYRQAPGKERELVAAISDGAITNYADSVKGRFTISRDNAKNTVYLQMNSLKPEDTAVYYCAAWEYSRDPPYLTYRYWGQGTQVTVSS

SEQ ID NO: 35703 - protein, 118 aa, Artificial Sequence
  Chemically Synthesized
QVQLQESGGGLVQAGGSLRLSCAASGNIFPLRGMGWYRQAPGKEREFVATISIGGITNYADSVKGRFTISRDNAKNTVYLQMNSLKPEDTAVYYCAAYQPRDWRFRYWGQGTQVTVSS

SEQ ID NO: 35704 - protein, 122 aa, Artificial Sequence
  Chemically Synthesized
QVQLQESGGGLVQAGGSLRLSCAASGYISGFSGMGWYRQAPGKEREFVAAIDDGTITYYADSVKGRFTISRDNAKNTVYLQMNSLKPEDTAVYYCAAFVSDRRNISFLYRYWGQGTQVTVSS

SEQ ID NO: 35705 - protein, 126 aa, Artificial Sequence
  Chemically Synthesized
QVQLQESGGGLVQAGGSLRLSCAASGNIFAYNIMGWYRQAPGKEREFVAGINGGATTNYADSVKGRFTISRDNAKNTVYLQMNSLKPEDTAVYYCAVRWVIYQRRTVPYYYVYTYWGQGTQVTVSS

SEQ ID NO: 35706 - protein, 126 aa, Artificial Sequence
  Chemically Synthesized
QVQLQESGGGLVQAGGSLRLSCAASGTISSPDGMGWYRQAPGKEREFVATIGAGAITYYADSVKGRFTISRDNAKNTVYLQMNSLKPEDTAVYYCAVYYRVLLPSYVGVAYLFRYWGQGTQVTVSS

SEQ ID NO: 35707 - protein, 122 aa, Artificial Sequence
  Chemically Synthesized
QVQLQESGGGLVQAGGSLRLSCAASGTISTGDLMGWYRQAPGKEREFVAAIGVGANTNYADSVKGRFTISRDNAKNTVYLQMNSLKPEDTAVYYCAALKQDPLYDFLIYRYWGQGTQVTVSS

SEQ ID NO: 35708 - protein, 111 aa, Artificial Sequence
  Chemically Synthesized
QVQLQESGGGLVQAGGSLRLSCAASGLMGWYRQAPGKEREFVATITGGSITNYADSVKGRFTISRDNAKNTVYLQMNSLKPEDTAVYYCAAYLTLDAHPYWGQGTQVTVSS

SEQ ID NO: 35709 - protein, 122 aa, Artificial Sequence
  Chemically Synthesized
QVQLQESGGGLVQAGGSLRLSCAASGSIFAYVFMGWYRQAPGKEREFVAAINQGGSTYYADSVKGRFTISRDNAKNTVYLQMNSLKPEDTAVYYCAVLVKNYDYDWYLYRYWGQGTQVTVSS

SEQ ID NO: 35710 - protein, 118 aa, Artificial Sequence
  Chemically Synthesized
QVQLQESGGGLVQAGGSLRLSCAASGTISYGYYMGWYRQAPGKERELVAGISDGSNTYYADSVKGRFTISRDNAKNTVYLQMNSLKPEDTAVYYCAVHPGEYDLFRYWGQGTQVTVSS

SEQ ID NO: 35711 - protein, 118 aa, Artificial Sequence
  Chemically Synthesized
QVQLQESGGGLVQAGGSLRLSCAASGYIFENLLMGWYRQAPGKEREFVAAIGDGTNTNYADSVKGRFTISRDNAKNTVYLQMNSLKPEDTAVYYCAAILYRYIVHRYWGQGTQVTVSS

SEQ ID NO: 35712 - protein, 122 aa, Artificial Sequence
  Chemically Synthesized
QVQLQESGGGLVQAGGSLRLSCAASGTISITDYMGWYRQAPGKERELVAGINEGATTNYADSVKGRFTISRDNAKNTVYLQMNSLKPEDTAVYYCAADINPNYAYDVGYWYWGQGTQVTVSS

SEQ ID NO: 35713 - protein, 122 aa, Artificial Sequence
  Chemically Synthesized
QVQLQESGGGLVQAGGSLRLSCAASGTISPVVFMGWYRQAPGKERELVAAIGWGGTTYYADSVKGRFTISRDNAKNTVYLQMNSLKPEDTAVYYCAVFYYYNSGGIDYLRYWGQGTQVTVSS

SEQ ID NO: 35714 - protein, 122 aa, Artificial Sequence
  Chemically Synthesized
QVQLQESGGGLVQAGGSLRLSCAASGTIFDQYYMGWYRQAPGKERELVAAIDHGSITYYADSVKGRFTISRDNAKNTVYLQMNSLKPEDTAVYYCAAIHGGLEAYDDDHDYWGQGTQVTVSS

SEQ ID NO: 35715 - protein, 122 aa, Artificial Sequence
  Chemically Synthesized
QVQLQESGGGLVQAGGSLRLSCAASGTIFTEVFMGWYRQAPGKEREFVAAIAGGGSTNYADSVKGRFTISRDNAKNTVYLQMNSLKPEDTAVYYCAAIYRPYREVTYYHRYWGQGTQVTVSS

SEQ ID NO: 35716 - protein, 118 aa, Artificial Sequence
  Chemically Synthesized
QVQLQESGGGLVQAGGSLRLSCAASGNISDTYDMGWYRQAPGKEREFVAGIGSGGNTYYADSVKGRFTISRDNAKNTVYLQMNSLKPEDTAVYYCAVGPFPYPFFTYWGQGTQVTVSS

SEQ ID NO: 35717 - protein, 118 aa, Artificial Sequence
  Chemically Synthesized
QVQLQESGGGLVQAGGSLRLSCAASGTISAAVYMGWYRQAPGKERELVASIAYGTITYYADSVKGRFTISRDNAKNTVYLQMNSLKPEDTAVYYCAVGGDVGYYLGYWGQGTQVTVSS

SEQ ID NO: 35718 - protein, 115 aa, Artificial Sequence
  Chemically Synthesized
QVQLQESGGGLVQAGGSLRLSCAASGYISSYVYMGWYRQAPGKERELVAGITGTTTNYADSVKGRFTISRDNAKNTVYLQMNSLKPEDTAVYYCAAVDDGRFKYWGQGTQVTVSS

SEQ ID NO: 35719 - protein, 120 aa, Artificial Sequence
  Chemically Synthesized
QVQLQESGGGLVQAGGSLRLSCAASGTISGYVGMGWYRQAPGKEREFVAGIAPGSSTYYADSVKGRFTISRDNAKNTVYLQMNSLKPEDTAVYYCAYFTPAGPRYLHRYWGQGTQVTVSS

SEQ ID NO: 35720 - protein, 118 aa, Artificial Sequence
  Chemically Synthesized
QVQLQESGGGLVQAGGSLRLSCAASGNIFLVVGMGWYRQAPGKEREFVATIAQGGITNYADSVKGRFTISRDNAKNTVYLQMNSLKPEDTAVYYCAAFTYDVYYHRYWGQGTQVTVSS

SEQ ID NO: 35721 - protein, 122 aa, Artificial Sequence
  Chemically Synthesized
QVQLQESGGGLVQAGGSLRLSCAASGNISDINSMGWYRQAPGKERELVAGIGQGANTYYADSVKGRFTISRDNAKNTVYLQMNSLKPEDTAVYYCAAWVWYTKVFAALLQYWGQGTQVTVSS

SEQ ID NO: 35722 - protein, 122 aa, Artificial Sequence
  Chemically Synthesized
QVQLQESGGGLVQAGGSLRLSCAASGTISFVTGMGWYRQAPGKERELVATIGYGANTYYADSVKGRFTISRDNAKNTVYLQMNSLKPEDTAVYYCAAYVPYHGAKNVTLRYWGQGTQVTVSS

SEQ ID NO: 35723 - protein, 118 aa, Artificial Sequence
  Chemically Synthesized
QVQLQESGGGLVQAGGSLRLSCAASGTIFNPVLMGWYRQAPGKEREFVASIDDGSSTNYADSVKGRFTISRDNAKNTVYLQMNSLKPEDTAVYYCAAIYIASYIYRYWGQGTQVTVSS

SEQ ID NO: 35724 - protein, 122 aa, Artificial Sequence
  Chemically Synthesized
QVQLQESGGGLVQAGGSLRLSCAASGSIFSATFMGWYRQAPGKERELVAAIDGGASTYYADSVKGRFTISRDNAKNTVYLQMNSLKPEDTAVYYCAAYYEQPWASFYLYRYWGQGTQVTVSS

SEQ ID NO: 35725 - protein, 118 aa, Artificial Sequence
  Chemically Synthesized
QVQLQESGGGLVQAGGSLRLSCAASGNISYSPLMGWYRQAPGKEREFVAAINDGATTYYADSVKGRFTISRDNAKNTVYLQMNSLKPEDTAVYYCAVYAIGYILFRYWGQGTQVTVSS

SEQ ID NO: 35726 - protein, 122 aa, Artificial Sequence
  Chemically Synthesized
QVQLQESGGGLVQAGGSLRLSCAASGSISELWLMGWYRQAPGKEREFVAGIDSGGSTYYADSVKGRFTISRDNAKNTVYLQMNSLKPEDTAVYYCAVFINHILYPWYIYRYWGQGTQVTVSS

SEQ ID NO: 35727 - protein, 122 aa, Artificial Sequence
  Chemically Synthesized
QVQLQESGGGLVQAGGSLRLSCAASGTISEYLGMGWYRQAPGKEREFVAGISFGGSTYYADSVKGRFTISRDNAKNTVYLQMNSLKPEDTAVYYCAAYRQSYYYHLLVFLYWGQGTQVTVSS

SEQ ID NO: 35728 - protein, 122 aa, Artificial Sequence
  Chemically Synthesized
QVQLQESGGGLVQAGGSLRLSCAASGYISASYLMGWYRQAPGKEREFVASIGPGGSTNYADSVKGRFTISRDNAKNTVYLQMNSLKPEDTAVYYCAVVYLGEPHPWLIHRYWGQGTQVTVSS

SEQ ID NO: 35729 - protein, 122 aa, Artificial Sequence
  Chemically Synthesized
QVQLQESGGGLVQAGGSLRLSCAASGNIFSDYFMGWYRQAPGKEREFVATIDPGGTTNYADSVKGRFTISRDNAKNTVYLQMNSLKPEDTAVYYCAAVVIAYGYTAYLHRYWGQGTQVTVSS

SEQ ID NO: 35730 - protein, 122 aa, Artificial Sequence
  Chemically Synthesized
QVQLQESGGGLVQAGGSLRLSCAASGTISYAFAMGWYRQAPGKERELVAGIADGTTTYYADSVKGRFTISRDNAKNTVYLQMNSLKPEDTAVYYCAAYLSVSNYRYLIFRYWGQGTQVTVSS

SEQ ID NO: 35731 - protein, 122 aa, Artificial Sequence
  Chemically Synthesized
QVQLQESGGGLVQAGGSLRLSCAASGSISDYVYMGWYRQAPGKEREFVAGISPGSTTYYADSVKGRFTISRDNAKNTVYLQMNSLKPEDTAVYYCAVAYQYSYYYNVLYRYWGQGTQVTVSS

SEQ ID NO: 35732 - protein, 121 aa, Artificial Sequence
  Chemically Synthesized
QVQLQESGGGLVQAGGSLRLSCAASGNISDYLLMGWYRQAPGKERELVAGIGVGSTTYYADSVKGRFTISRDNAKNTVYLQMNSLKPEDTAVYYCAVYARSYAVGLLYSYWGQGTQVTVSS

SEQ ID NO: 35733 - protein, 122 aa, Artificial Sequence
  Chemically Synthesized
QVQLQESGGGLVQAGGSLRLSCAASGNISRHVAMGWYRQAPGKERELVAGINLGGTTYYADSVKGRFTISRDNAKNTVYLQMNSLKPEDTAVYYCAAFWYPDNARSVLHRYWGQGTQVTVSS

SEQ ID NO: 35734 - protein, 122 aa, Artificial Sequence
  Chemically Synthesized
QVQLQESGGGLVQAGGSLRLSCAASGNIFDILFMGWYRQAPGKERELVAGIGSGANTYYADSVKGRFTISRDNAKNTVYLQMNSLKPEDTAVYYCAAVQWDKSGLPYLHRYWGQGTQVTVSS

SEQ ID NO: 35735 - protein, 119 aa, Artificial Sequence
  Chemically Synthesized
QVQLQESGGGLVQAGGSLRLSCAASGSISPEDPMGWYRQAPGKERELVAAIADGSNTYYADSVKGRFTISRDNAKNTVYLQMNSLKPEDTAVYYCAAIIRGYYYLGRYWGQGTQVTVSS

SEQ ID NO: 35736 - protein, 118 aa, Artificial Sequence
  Chemically Synthesized
QVQLQESGGGLVQAGGSLRLSCAASGSIFAATLMGWYRQAPGKEREFVAAISSGAITYYADSVKGRFTISRDNAKNTVYLQMNSLKPEDTAVYYCAAILWYGYLHRYWGQGTQVTVSS

SEQ ID NO: 35737 - protein, 126 aa, Artificial Sequence
  Chemically Synthesized
QVQLQESGGGLVQAGGSLRLSCAASGTISYYNAMGWYRQAPGKERELVAGIGDGTTTYYADSVKGRFTISRDNAKNTVYLQMNSLKPEDTAVYYCAVWVVYHYSDARLSGYAHQYWGQGTQVTVSS

SEQ ID NO: 35738 - protein, 122 aa, Artificial Sequence
  Chemically Synthesized
QVQLQESGGGLVQAGGSLRLSCAASGNISSPSLMGWYRQAPGKERELVAGIDDGGTTYYADSVKGRFTISRDNAKNTVYLQMNSLKPEDTAVYYCAVLYTIADRYRTLLRYWGQGTQVTVSS

SEQ ID NO: 35739 - protein, 126 aa, Artificial Sequence
  Chemically Synthesized
QVQLQESGGGLVQAGGSLRLSCAASGNISYDYAMGWYRQAPGKERELVAGIGTGTTTYYADSVKGRFTISRDNAKNTVYLQMNSLKPEDTAVYYCAAFVEPSATYSYGYRLYYRYWGQGTQVTVSS

SEQ ID NO: 35740 - protein, 122 aa, Artificial Sequence
  Chemically Synthesized
QVQLQESGGGLVQAGGSLRLSCAASGTISKTYIMGWYRQAPGKERELVAGIGDGSITYYADSVKGRFTISRDNAKNTVYLQMNSLKPEDTAVYYCAALYKPYPRDDFYLRYWGQGTQVTVSS

SEQ ID NO: 35741 - protein, 118 aa, Artificial Sequence
  Chemically Synthesized
QVQLQESGGGLVQAGGSLRLSCAASGNIFGEATMGWYRQAPGKEREFVATITRGASTYYADSVKGRFTISRDNAKNTVYLQMNSLKPEDTAVYYCAAIWKAGGFHYYWGQGTQVTVSS

SEQ ID NO: 35742 - protein, 118 aa, Artificial Sequence
  Chemically Synthesized
QVQLQESGGGLVQAGGSLRLSCAASGTISYYVGMGWYRQAPGKEREFVASINTGGITYYADSVKGRFTISRDNAKNTVYLQMNSLKPEDTAVYYCAAYRRTTLVLRYWGQGTQVTVSS

SEQ ID NO: 35743 - protein, 122 aa, Artificial Sequence
  Chemically Synthesized
QVQLQESGGGLVQAGGSLRLSCAASGNIFPFLYMGWYRQAPGKERELVAAIADGSNTYYADSVKGRFTISRDNAKNTVYLQMNSLKPEDTAVYYCAVGSPYRGSSAYLYEYWGQGTQVTVSS

SEQ ID NO: 35744 - protein, 118 aa, Artificial Sequence
  Chemically Synthesized
QVQLQESGGGLVQAGGSLRLSCAASGSISRTYLMGWYRQAPGKEREFVAGIDSGTTTYYADSVKGRFTISRDNAKNTVYLQMNSLKPEDTAVYYCAVLQYEDYWHRYWGQGTQVTVSS

SEQ ID NO: 35745 - protein, 118 aa, Artificial Sequence
  Chemically Synthesized
QVQLQESGGGLVQAGGSLRLSCAASGNIFHYLYMGWYRQAPGKERELVAAIGDGGNTYYADSVKGRFTISRDNAKNTVYLQMNSLKPEDTAVYYCAVSYYRQIVLLYWGQGTQVTVSS

SEQ ID NO: 35746 - protein, 122 aa, Artificial Sequence
  Chemically Synthesized
QVQLQESGGGLVQAGGSLRLSCAASGNIFADGAMGWYRQAPGKERELVAGIGDGSSTYYADSVKGRFTISRDNAKNTVYLQMNSLKPEDTAVYYCAAFVQPGSYKGLIHRYWGQGTQVTVSS

SEQ ID NO: 35747 - protein, 118 aa, Artificial Sequence
  Chemically Synthesized
QVQLQESGGGLVQAGGSLRLSCAASGTIFDRGYMGWYRQAPGKERELVAGIDYGANTYYADSVKGRFTISRDNAKNTVYLQMNSLKPEDTAVYYCAVVVARDYLLRYWGQGTQVTVSS

SEQ ID NO: 35748 - protein, 122 aa, Artificial Sequence
  Chemically Synthesized
QVQLQESGGGLVQAGGSLRLSCAASGYIFGGPLMGWYRQAPGKERELVAAISPGATTYYADSVKGRFTISRDNAKNTVYLQMNSLKPEDTAVYYCAAYILPADDYYDILRYWGQGTQVTVSS

SEQ ID NO: 35749 - protein, 118 aa, Artificial Sequence
  Chemically Synthesized
QVQLQESGGGLVQAGGSLRLSCAASGTIFDRATMGWYRQAPGKERELVASINDGSNTNYADSVKGRFTISRDNAKNTVYLQMNSLKPEDTAVYYCAAVWYQNTLHYYWGQGTQVTVSS

SEQ ID NO: 35750 - protein, 122 aa, Artificial Sequence
  Chemically Synthesized
QVQLQESGGGLVQAGGSLRLSCAASGSISPINIMGWYRQAPGKERELVAGIDTGSTTYYADSVKGRFTISRDNAKNTVYLQMNSLKPEDTAVYYCAVYGYYDYGYDVLLRYWGQGTQVTVSS

SEQ ID NO: 35751 - protein, 122 aa, Artificial Sequence
  Chemically Synthesized
QVQLQESGGGLVQAGGSLRLSCAASGNIFYGPVMGWYRQAPGKERELVAAIDPGASTYYADSVKGRFTISRDNAKNTVYLQMNSLKPEDTAVYYCAAYLTTPWDYGYLYRYWGQGTQVTVSS

SEQ ID NO: 35752 - protein, 120 aa, Artificial Sequence
  Chemically Synthesized
QVQLQESGGGLVQAGGSLRLSCAASGNISDYTAMGWYRQAPGKERELVAAIGGTTYYADSVKGRFTISRDNAKNTVYLQMNSLKPEDTAVYYCAAFEIVDYYGINFFLYWGQGTQVTVSS

SEQ ID NO: 35753 - protein, 118 aa, Artificial Sequence
  Chemically Synthesized
QVQLQESGGGLVQAGGSLRLSCAASGSIFYPPGMGWYRQAPGKEREFVASITHGGSTNYADSVKGRFTISRDNAKNTVYLQMNSLKPEDTAVYYCAVVWRDTILYWYWGQGTQVTVSS

SEQ ID NO: 35754 - protein, 118 aa, Artificial Sequence
  Chemically Synthesized
QVQLQESGGGLVQAGGSLRLSCAASGSIFYSQRMGWYRQAPGKERELVAAIGLGGITNYADSVKGRFTISRDNAKNTVYLQMNSLKPEDTAVYYCAVYSYWPTYYPYWGQGTQVTVSS

SEQ ID NO: 35755 - protein, 126 aa, Artificial Sequence
  Chemically Synthesized
QVQLQESGGGLVQAGGSLRLSCAASGYIFPPYVMGWYRQAPGKERELVAAIDDGTTTYYADSVKGRFTISRDNAKNTVYLQMNSLKPEDTAVYYCAAYFNVVADTVDNQFVWYLYWGQGTQVTVSS

SEQ ID NO: 35756 - protein, 118 aa, Artificial Sequence
  Chemically Synthesized
QVQLQESGGGLVQAGGSLRLSCAASGTIFGFRGMGWYRQAPGKEREFVASITRGGSTYYADSVKGRFTISRDNAKNTVYLQMNSLKPEDTAVYYCAVVYYDIYLHWYWGQGTQVTVSS

SEQ ID NO: 35757 - protein, 126 aa, Artificial Sequence
  Chemically Synthesized
QVQLQESGGGLVQAGGSLRLSCAASGSISYYVAMGWYRQAPGKERELVAGIADGTNTYYADSVKGRFTISRDNAKNTVYLQMNSLKPEDTAVYYCAAYSAVYAYSYPNNSLVYRYWGQGTQVTVSS

SEQ ID NO: 35758 - protein, 122 aa, Artificial Sequence
  Chemically Synthesized
QVQLQESGGGLVQAGGSLRLSCAASGTISVPVGMGWYRQAPGKEREFVAAINAGSTTYYADSVKGRFTISRDNAKNTVYLQMNSLKPEDTAVYYCAAYYSGQVYPKYIYRYWGQGTQVTVSS

SEQ ID NO: 35759 - protein, 122 aa, Artificial Sequence
  Chemically Synthesized
QVQLQESGGGLVQAGGSLRLSCAASGTIFEQVVMGWYRQAPGKERELVAGITYGSTTYYADSVKGRFTISRDNAKNTVYLQMNSLKPEDTAVYYCAAHYFGQNSYEILLRYWGQGTQVTVSS

SEQ ID NO: 35760 - protein, 119 aa, Artificial Sequence
  Chemically Synthesized
QVQLQESGGGLVQAGGSLRLSCAASGTISDPYLMGWYRQAPGKEREFVAAIDDGTNTNYADSVKGRFTISRDNAKNTVYLQMNSLKPEDTAVYYCAAYGFHLGYLHRYWGQGTQVTVSS

SEQ ID NO: 35761 - protein, 118 aa, Artificial Sequence
  Chemically Synthesized
QVQLQESGGGLVQAGGSLRLSCAASGTISPPTAMGWYRQAPGKEREFVAAINLGTTTYYADSVKGRFTISRDNAKNTVYLQMNSLKPEDTAVYYCAVVLYKDYYFYYWGQGTQVTVSS

SEQ ID NO: 35762 - protein, 122 aa, Artificial Sequence
  Chemically Synthesized
QVQLQESGGGLVQAGGSLRLSCAASGNISIDYVMGWYRQAPGKERELVAAINSGGSTYYADSVKGRFTISRDNAKNTVYLQMNSLKPEDTAVYYCAALVNVFYLPYYFYRYWGQGTQVTVSS

SEQ ID NO: 35763 - protein, 118 aa, Artificial Sequence
  Chemically Synthesized
QVQLQESGGGLVQAGGSLRLSCAASGTISYGSIMGWYRQAPGKEREFVAGITWGTTTNYADSVKGRFTISRDNAKNTVYLQMNSLKPEDTAVYYCAAITTIGRTHYYWGQGTQVTVSS

SEQ ID NO: 35764 - protein, 116 aa, Artificial Sequence
  Chemically Synthesized
QVQLQESGGGLVQAGGSLRLSCAASGTILTGSMGWYRQAPGKERELVAAIAYGGSTNYADSVKGRFTISRDNAKNTVYLQMNSLKPEDTAVYYCAVVAPDVLFLYWGQGTQVTVSS

SEQ ID NO: 35765 - protein, 122 aa, Artificial Sequence
  Chemically Synthesized
QVQLQESGGGLVQAGGSLRLSCAASGTISWFIAMGWYRQAPGKERELVAAINQGTNTYYADSVKGRFTISRDNAKNTVYLQMNSLKPEDTAVYYCAAFDRYAVYSGYLYQYWGQGTQVTVSS

SEQ ID NO: 35766 - protein, 121 aa, Artificial Sequence
  Chemically Synthesized
QVQLQESGGGLVQAGGSLRLSCAASGNIFDTALMGWYRQAPGKEREFVAAISDGGNTYYADSVKGRFTISRDNAKNTVYLQMNSLKPEDTAVYYCAAYYFWDGDAYLHGYWGQGTQVTVSS

SEQ ID NO: 35767 - protein, 122 aa, Artificial Sequence
  Chemically Synthesized
QVQLQESGGGLVQAGGSLRLSCAASGTISYLAYMGWYRQAPGKERELVAGIGSGGSTYYADSVKGRFTISRDNAKNTVYLQMNSLKPEDTAVYYCAVAYIENYQGLVLYRYWGQGTQVTVSS

SEQ ID NO: 35768 - protein, 126 aa, Artificial Sequence
  Chemically Synthesized
QVQLQESGGGLVQAGGSLRLSCAASGTISSQVYMGWYRQAPGKERELVAAIGVGGSTYYADSVKGRFTISRDNAKNTVYLQMNSLKPEDTAVYYCAVGLGLHLGYARSYYDVYEYWGQGTQVTVSS

SEQ ID NO: 35769 - protein, 122 aa, Artificial Sequence
  Chemically Synthesized
QVQLQESGGGLVQAGGSLRLSCAASGTISGQIGMGWYRQAPGKEREFVATIGTGANTNYADSVKGRFTISRDNAKNTVYLQMNSLKPEDTAVYYCAVFLIGYKPYYSVYRYWGQGTQVTVSS

SEQ ID NO: 35770 - protein, 118 aa, Artificial Sequence
  Chemically Synthesized
QVQLQESGGGLVQAGGSLRLSCAASGSISDPYAMGWYRQAPGKEREFVASIAEGGNTNYADSVKGRFTISRDNAKNTVYLQMNSLKPEDTAVYYCAALYIDTVAFYYWGQGTQVTVSS

SEQ ID NO: 35771 - protein, 122 aa, Artificial Sequence
  Chemically Synthesized
QVQLQESGGGLVQAGGSLRLSCAASGSISGVSLMGWYRQAPGKERELVAAIDPGANTNYADSVKGRFTISRDNAKNTVYLQMNSLKPEDTAVYYCAVYIVDDGYPYFILAYWGQGTQVTVSS

SEQ ID NO: 35772 - protein, 125 aa, Artificial Sequence
  Chemically Synthesized
QVQLQESGGGLVQAGGSLRLSCAASGNIFSSVYMGWYRQAPGKERELVAGIAYGGTTYYADSVKGRFTISRDNAKNTVYLQMNSLKPEDTAVYYCAVAIPAGSEYGFVYLLHEYWGQGTQVTVSS

SEQ ID NO: 35773 - protein, 122 aa, Artificial Sequence
  Chemically Synthesized
QVQLQESGGGLVQAGGSLRLSCAASGSISGNGLMGWYRQAPGKEREFVATIGDGATTYYADSVKGRFTISRDNAKNTVYLQMNSLKPEDTAVYYCAAYTIAYSHIRVVYRYWGQGTQVTVSS

SEQ ID NO: 35774 - protein, 117 aa, Artificial Sequence
  Chemically Synthesized
QVQLQESGGGLVQAGGSLRLSCAASGSISTLSMGWYRQAPGKERELVASIAVGASTYYADSVKGRFTISRDNAKNTVYLQMNSLKPEDTAVYYCAADIILADRHYYWGQGTQVTVSS

SEQ ID NO: 35775 - protein, 117 aa, Artificial Sequence
  Chemically Synthesized
QVQLQESGGGLVQAGGSLRLSCAASGTISPYGVMGWYRQAPGKEREFVASIDGGNTNYADSVKGRFTISRDNAKNTVYLQMNSLKPEDTAVYYCAAHPYRYDYFVYWGQGTQVTVSS

SEQ ID NO: 35776 - protein, 122 aa, Artificial Sequence
  Chemically Synthesized
QVQLQESGGGLVQAGGSLRLSCAASGNIFGHAYMGWYRQAPGKERELVAAINPGGSTYYADSVKGRFTISRDNAKNTVYLQMNSLKPEDTAVYYCAATTIGDYYRGLLLRYWGQGTQVTVSS

SEQ ID NO: 35777 - protein, 120 aa, Artificial Sequence
  Chemically Synthesized
QVQLQESGGGLVQAGGSLRLSCAASGYIFTNLFMGWYRQAPGKERELVASIDPGATTYYADSVKGRFTISRDNAKNTVYLQMNSLKPEDTAVYYCAALRITFYRGLLRYWGQGTQVTVSS

SEQ ID NO: 35778 - protein, 118 aa, Artificial Sequence
  Chemically Synthesized
QVQLQESGGGLVQAGGSLRLSCAASGYIFTFSLMGWYRQAPGKEREFVAAIDDGGTTYYADSVKGRFTISRDNAKNTVYLQMNSLKPEDTAVYYCAVLTVDYAILRYWGQGTQVTVSS

SEQ ID NO: 35779 - protein, 126 aa, Artificial Sequence
  Chemically Synthesized
QVQLQESGGGLVQAGGSLRLSCAASGTISTYALMGWYRQAPGKERELVAAIGPGANTYYADSVKGRFTISRDNAKNTVYLQMNSLKPEDTAVYYCAAYIFYYSGAYAPYTQIYRYWGQGTQVTVSS

SEQ ID NO: 35780 - protein, 122 aa, Artificial Sequence
  Chemically Synthesized
QVQLQESGGGLVQAGGSLRLSCAASGSIFGPFYMGWYRQAPGKEREFVAGIDPGGTTNYADSVKGRFTISRDNAKNTVYLQMNSLKPEDTAVYYCAVLYVSDINDILIYSYWGQGTQVTVSS

SEQ ID NO: 35781 - protein, 125 aa, Artificial Sequence
  Chemically Synthesized
QVQLQESGGGLVQAGGSLRLSCAASGTISARILMGWYRQAPGKERELVAAIGDGSNTYYADSVKGRFTISRDNAKNTVYLQMNSLKPEDTAVYYCAVLYYANLRGTGYGSYHRYWGQGTQVTVSS

SEQ ID NO: 35782 - protein, 122 aa, Artificial Sequence
  Chemically Synthesized
QVQLQESGGGLVQAGGSLRLSCAASGTISRYGFMGWYRQAPGKERELVAAIAYGGSTNYADSVKGRFTISRDNAKNTVYLQMNSLKPEDTAVYYCAVYYILYEPVPYLHRYWGQGTQVTVSS

SEQ ID NO: 35783 - protein, 118 aa, Artificial Sequence
  Chemically Synthesized
QVQLQESGGGLVQAGGSLRLSCAASGTIFRGDPMGWYRQAPGKEREFVAAIDDGTSTYYADSVKGRFTISRDNAKNTVYLQMNSLKPEDTAVYYCAVYIIDFAVYVYWGQGTQVTVSS

SEQ ID NO: 35784 - protein, 122 aa, Artificial Sequence
  Chemically Synthesized
QVQLQESGGGLVQAGGSLRLSCAASGTIFEWIYMGWYRQAPGKEREFVAAIGYGSTTYYADSVKGRFTISRDNAKNTVYLQMNSLKPEDTAVYYCAALYYNDSDVPLYYQYWGQGTQVTVSS

SEQ ID NO: 35785 - protein, 126 aa, Artificial Sequence
  Chemically Synthesized
QVQLQESGGGLVQAGGSLRLSCAASGSIFDYIFMGWYRQAPGKERELVAGINGGGSTYYADSVKGRFTISRDNAKNTVYLQMNSLKPEDTAVYYCAVLAYFGRYNRYPKLYFYRYWGQGTQVTVSS

SEQ ID NO: 35786 - protein, 118 aa, Artificial Sequence
  Chemically Synthesized
QVQLQESGGGLVQAGGSLRLSCAASGTISPRYYMGWYRQAPGKERELVATIGYGTITNYADSVKGRFTISRDNAKNTVYLQMNSLKPEDTAVYYCAVALIYAFYLDYWGQGTQVTVSS

SEQ ID NO: 35787 - protein, 118 aa, Artificial Sequence
  Chemically Synthesized
QVQLQESGGGLVQAGGSLRLSCAASGTIFSHYVMGWYRQAPGKEREFVASISEGSITYYADSVKGRFTISRDNAKNTVYLQMNSLKPEDTAVYYCAALDYGYILFRYWGQGTQVTVSS

SEQ ID NO: 35788 - protein, 120 aa, Artificial Sequence
  Chemically Synthesized
QVQLQESGGGLVQAGGSLRLSCAASGTISSYVGMGWYRQAPGKEREFVATIAYGGSTYYADSVKGRFTISRDNAKNTVYLQMNSLKPEDTAVYYCAYYVEWADIGFYRYWGQGTQVTVSS

SEQ ID NO: 35789 - protein, 122 aa, Artificial Sequence
  Chemically Synthesized
QVQLQESGGGLVQAGGSLRLSCAASGTIFGVFAMGWYRQAPGKERELVAAIGQGTNTYYADSVKGRFTISRDNAKNTVYLQMNSLKPEDTAVYYCAVYTKVWADQLYIHLYWGQGTQVTVSS

SEQ ID NO: 35790 - protein, 126 aa, Artificial Sequence
  Chemically Synthesized
QVQLQESGGGLVQAGGSLRLSCAASGNISSDGLMGWYRQAPGKERELVAAIDPGTTTYYADSVKGRFTISRDNAKNTVYLQMNSLKPEDTAVYYCAALYYVYYPGYGLGAPIHLYWGQGTQVTVSS

SEQ ID NO: 35791 - protein, 112 aa, Artificial Sequence
  Chemically Synthesized
QVQLQESGGGLVQAGGSLRLSCAASGYISNLYPMGWYRQAPGKERELVASINQGGSTNYADSVKGRFTISRDNAKNTVYLQMNSLKPEDTAVYYCAYVHAYWGQGTQVTVSS

SEQ ID NO: 35792 - protein, 118 aa, Artificial Sequence
  Chemically Synthesized
QVQLQESGGGLVQAGGSLRLSCAASGNISDYYLMGWYRQAPGKEREFVASIDPGATTYYADSVKGRFTISRDNAKNTVYLQMNSLKPEDTAVYYCAAYYVYFLVFRYWGQGTQVTVSS

SEQ ID NO: 35793 - protein, 113 aa, Artificial Sequence
  Chemically Synthesized
QVQLQESGGGLVQAGGSLRLSCAASGSISWWNEMGWYRQAPGKERELVASISSGTITYYADSVKGRFTISRDNAKNTVYLQMNSLKPEDTAVYYCAVWRADYWGQGTQVTVSS

SEQ ID NO: 35794 - protein, 126 aa, Artificial Sequence
  Chemically Synthesized
QVQLQESGGGLVQAGGSLRLSCAASGTIFPAKLMGWYRQAPGKERELVAAITTGASTNYADSVKGRFTISRDNAKNTVYLQMNSLKPEDTAVYYCAAIAYLTDNRKVLYPREHLYWGQGTQVTVSS

SEQ ID NO: 35795 - protein, 126 aa, Artificial Sequence
  Chemically Synthesized
QVQLQESGGGLVQAGGSLRLSCAASGTISRQDWMGWYRQAPGKERELVAGIGYGAITYYADSVKGRFTISRDNAKNTVYLQMNSLKPEDTAVYYCAVIRRNNFVSTIVVDYDHYYWGQGTQVTVSS

SEQ ID NO: 35796 - protein, 122 aa, Artificial Sequence
  Chemically Synthesized
QVQLQESGGGLVQAGGSLRLSCAASGTISFAILMGWYRQAPGKERELVAAIDSGTSTYYADSVKGRFTISRDNAKNTVYLQMNSLKPEDTAVYYCAAYYPSEPPQYYYFRYWGQGTQVTVSS

SEQ ID NO: 35797 - protein, 122 aa, Artificial Sequence
  Chemically Synthesized
QVQLQESGGGLVQAGGSLRLSCAASGTIFRYSYMGWYRQAPGKEREFVASIDPGATTNYADSVKGRFTISRDNAKNTVYLQMNSLKPEDTAVYYCAVYLVPQPFNGYVHRYWGQGTQVTVSS

SEQ ID NO: 35798 - protein, 122 aa, Artificial Sequence
  Chemically Synthesized
QVQLQESGGGLVQAGGSLRLSCAASGTISYPKDMGWYRQAPGKERELVASIAYGGSTYYADSVKGRFTISRDNAKNTVYLQMNSLKPEDTAVYYCAANDWDTLDYFYAHDYWGQGTQVTVSS

SEQ ID NO: 35799 - protein, 118 aa, Artificial Sequence
  Chemically Synthesized
QVQLQESGGGLVQAGGSLRLSCAASGNIFRPRRMGWYRQAPGKERELVASIATGSNTYYADSVKGRFTISRDNAKNTVYLQMNSLKPEDTAVYYCAARYYRFLSFYYWGQGTQVTVSS

SEQ ID NO: 35800 - protein, 121 aa, Artificial Sequence
  Chemically Synthesized
QVQLQESGGGLVQAGGSLRLSCAASGTIFDDYWMGWYRQAPGKEREFVAAIAYGSTTYYADSVKGRFTISRDNAKNTVYLQMNSLKPEDTAVYYCAAGVDDDYDPIVHSYWGQGTQVTVSS

SEQ ID NO: 35801 - protein, 118 aa, Artificial Sequence
  Chemically Synthesized
QVQLQESGGGLVQAGGSLRLSCAASGTIFAYRLMGWYRQAPGKEREFVAGITYGTNTYYADSVKGRFTISRDNAKNTVYLQMNSLKPEDTAVYYCAVRRHTQYQLWYWGQGTQVTVSS

SEQ ID NO: 35802 - protein, 118 aa, Artificial Sequence
  Chemically Synthesized
QVQLQESGGGLVQAGGSLRLSCAASGTISGSIWMGWYRQAPGKEREFVAAIAVGSITNYADSVKGRFTISRDNAKNTVYLQMNSLKPEDTAVYYCAAVIGNGERFGYWGQGTQVTVSS

SEQ ID NO: 35803 - protein, 122 aa, Artificial Sequence
  Chemically Synthesized
QVQLQESGGGLVQAGGSLRLSCAASGSISYDRIMGWYRQAPGKEREFVAGISDGGITYYADSVKGRFTISRDNAKNTVYLQMNSLKPEDTAVYYCAVTSLSTDARVAYLVYWGQGTQVTVSS

SEQ ID NO: 35804 - protein, 118 aa, Artificial Sequence
  Chemically Synthesized
QVQLQESGGGLVQAGGSLRLSCAASGNISGDTGMGWYRQAPGKERELVAAIADGASTYYADSVKGRFTISRDNAKNTVYLQMNSLKPEDTAVYYCAVKLFRLPRLNYWGQGTQVTVSS

SEQ ID NO: 35805 - protein, 118 aa, Artificial Sequence
  Chemically Synthesized
QVQLQESGGGLVQAGGSLRLSCAASGTISGVYRMGWYRQAPGKERELVATIDLGTNTNYADSVKGRFTISRDNAKNTVYLQMNSLKPEDTAVYYCAVFDVYENSLYYWGQGTQVTVSS

SEQ ID NO: 35806 - protein, 115 aa, Artificial Sequence
  Chemically Synthesized
QVQLQESGGGLVQAGGSLRLSCAASGTIFGNREMGWYRQAPGKEREFVAAISRGTSTNYADSVKGRFTISRDNAKNTVYLQMNSLKPEDTAVYYCAVAVYNLDYWGQGTQVTVSS

SEQ ID NO: 35807 - protein, 111 aa, Artificial Sequence
  Chemically Synthesized
QVQLQESGGGLVQAGGSLRLSCAASGTIFPAKDMGWYRQAPGKEREFVAAIGTVVVPYADSVKGRFTISRDNAKNTVYLQMNSLKPEDTAVYYCAACSLYWGQGTQVTVSS

SEQ ID NO: 35808 - protein, 118 aa, Artificial Sequence
  Chemically Synthesized
QVQLQESGGGLVQAGGSLRLSCAASGYIFYLDVMGWYRQAPGKERELVATIGAGANTYYADSVKGRFTISRDNAKNTVYLQMNSLKPEDTAVYYCAVYATQTGLYYYWGQGTQVTVSS

SEQ ID NO: 35809 - protein, 118 aa, Artificial Sequence
  Chemically Synthesized
QVQLQESGGGLVQAGGSLRLSCAASGSISDRGTMGWYRQAPGKERELVASIDHGTNTNYADSVKGRFTISRDNAKNTVYLQMNSLKPEDTAVYYCAVYRGYIIRHFYWGQGTQVTVSS

SEQ ID NO: 35810 - protein, 118 aa, Artificial Sequence
  Chemically Synthesized
QVQLQESGGGLVQAGGSLRLSCAASGTIFATVYMGWYRQAPGKEREFVAGITAGGNTYYADSVKGRFTISRDNAKNTVYLQMNSLKPEDTAVYYCAATYEFLYSHAYWGQGTQVTVSS

SEQ ID NO: 35811 - protein, 117 aa, Artificial Sequence
  Chemically Synthesized
QVQLQESGGGLVQAGGSLRLSCAASGYISDYYLMGWYRQAPGKEREFVATIAYGTITYYADSVKGRFTISRDNAKNTVYLQMNSLKPEDTAVYYCAADQWWLKYFYWGQGTQVTVSS

SEQ ID NO: 35812 - protein, 127 aa, Artificial Sequence
  Chemically Synthesized
QVQLQESGGGLVQAGGSLRLSCAASGTISPPNYMGWYRQAPGKERELVAGITNGTTTNYADSVKGRFTISRDNAKNTVYLQMNSLKPEDTAVYYCAVGYYRHYGVGDGDYSGYPYYWGQGTQVTVSS

SEQ ID NO: 35813 - protein, 118 aa, Artificial Sequence
  Chemically Synthesized
QVQLQESGGGLVQAGGSLRLSCAASGTISQYTVMGWYRQAPGKEREFVATIGRGTSTNYADSVKGRFTISRDNAKNTVYLQMNSLKPEDTAVYYCATLIDDGGSFDYWGQGTQVTVSS

SEQ ID NO: 35814 - protein, 122 aa, Artificial Sequence
  Chemically Synthesized
QVQLQESGGGLVQAGGSLRLSCAASGTISPADTMGWYRQAPGKEREFVAGISYGANTYYADSVKGRFTISRDNAKNTVYLQMNSLKPEDTAVYYCAVYLNPWGDYRGWLGYWGQGTQVTVSS

SEQ ID NO: 35815 - protein, 122 aa, Artificial Sequence
  Chemically Synthesized
QVQLQESGGGLVQAGGSLRLSCAASGNIFYVTIMGWYRQAPGKEREFVAAIARGTSTNYADSVKGRFTISRDNAKNTVYLQMNSLKPEDTAVYYCAVERRLVRGYARQFGYWGQGTQVTVSS

SEQ ID NO: 35816 - protein, 118 aa, Artificial Sequence
  Chemically Synthesized
QVQLQESGGGLVQAGGSLRLSCAASGYISSEPYMGWYRQAPGKERELVASIAVGGSTYYADSVKGRFTISRDNAKNTVYLQMNSLKPEDTAVYYCAVGYAVDYRYHYWGQGTQVTVSS

SEQ ID NO: 35817 - protein, 118 aa, Artificial Sequence
  Chemically Synthesized
QVQLQESGGGLVQAGGSLRLSCAASGYISSLVPMGWYRQAPGKEREFVAGISDGGITYYADSVKGRFTISRDNAKNTVYLQMNSLKPEDTAVYYCAVGRDDPHDYVYWGQGTQVTVSS

SEQ ID NO: 35818 - protein, 121 aa, Artificial Sequence
  Chemically Synthesized
QVQLQESGGGLVQAGGSLRLSCAASGTIFPTYDMGWYRQAPGKERELVAAIAEGLVPYADSVKGRFTISRDNAKNTVYLQMNSLKPEDTAVYYCAAYDVDTVYHRHWHGYWGQGTQVTVSS

SEQ ID NO: 35819 - protein, 116 aa, Artificial Sequence
  Chemically Synthesized
QVQLQESGGGLVQAGGSLRLSCAASGSIFSSWAMGWYRQAPGKERELVAGIAGGSTTYYADSVKGRFTISRDNAKNTVYLQMNSLKPEDTAVYYCAATDGRWHGYWGQGTQVTVSS

SEQ ID NO: 35820 - protein, 126 aa, Artificial Sequence
  Chemically Synthesized
QVQLQESGGGLVQAGGSLRLSCAASGTISSNPLMGWYRQAPGKEREFVASINVGASTNYADSVKGRFTISRDNAKNTVYLQMNSLKPEDTAVYYCAVLWQYSTNRTIDYDPRFPYWGQGTQVTVSS

SEQ ID NO: 35821 - protein, 112 aa, Artificial Sequence
  Chemically Synthesized
QVQLQESGGGLVQAGGSLRLSCAASGNISQHGYMGWYRQAPGKEREIPYADSVKGRFTISRDNAKNTVYLQMNSLKPEDTAVYYCAVYDDGKGYDYRDLPYWGQGTQVTVSS

SEQ ID NO: 35822 - protein, 125 aa, Artificial Sequence
  Chemically Synthesized
QVQLQESGGGLVQAGGSLRLSCAASGTISASARMGWYRQAPGKEREFVASITEGASTNYADSVKGRFTISRDNAKNTVYLQMNSLKPEDTAVYYCAAYTTITGVVLVVRGLTIYWGQGTQVTVSS

SEQ ID NO: 35823 - protein, 124 aa, Artificial Sequence
  Chemically Synthesized
QVQLQESGGGLVQAGGSLRLSCAASGSITTKMGWYRQAPGKERELVAAICDGSSTYYADSVKGRFTISRDNAKNTVYLQMNSLKPEDTAVYYCAAGLTYLRAVGEDPTLVHYYWGQGTQVTVSS

SEQ ID NO: 35824 - protein, 117 aa, Artificial Sequence
  Chemically Synthesized
QVQLQESGGGLVQAGGSLRLSCAASGNISTATLMGWYRQAPGKEREFVPVLITVVLPYADSVKGRFTISRDNAKNTVYLQMNSLKPEDTAVYYCAVYYPRVHDHGYWGQGTQVTVSS

SEQ ID NO: 35825 - protein, 118 aa, Artificial Sequence
  Chemically Synthesized
QVQLQESGGGLVQAGGSLRLSCAASGNISVTFYMGWYRQAPGKEREFVATIDSGGNTYYADSVKGRFTISRDNAKNTVYLQMNSLKPEDTAVYYCAVGRLTSHRHWYWGQGTQVTVSS

SEQ ID NO: 35826 - protein, 121 aa, Artificial Sequence
  Chemically Synthesized
QVQLQESGGGLVQAGGSLRLSCAASGTIFPSTMGWYRQAPGKERELVAAIGDGTSTNYADSVKGRFTISRDNAKNTVYLQMNSLKPEDTAVYYCAALEYYLQLSNLALAYWGQGTQVTVSS

SEQ ID NO: 35827 - protein, 117 aa, Artificial Sequence
  Chemically Synthesized
QVQLQESGGGLVQAGGSLRLSCAASGTISYGDDMGWYRQAPGKEREFVATIDYGSNTYYADSVKGRFTISRDNAKNTVYLQMNSLKPEDTAVYYCAVDTDPSLTLYWGQGTQVTVSS

SEQ ID NO: 35828 - protein, 118 aa, Artificial Sequence
  Chemically Synthesized
QVQLQESGGGLVQAGGSLRLSCAASGTISGYPLMGWYRQAPGKERELVASIASGASTYYADSVKGRFTISRDNAKNTVYLQMNSLKPEDTAVYYCAADGRTDVRHYYWGQGTQVTVSS

SEQ ID NO: 35829 - protein, 121 aa, Artificial Sequence
  Chemically Synthesized
QVQLQESGGGLVQAGGSLRLSCAASGTISQDPYMGWYRQAPGKEREFVAAINWGGTTNYADSVKGRFTISRDNAKNTVYLQMNSLKPEDTAVYYCAAAGWNSTLFLCTIYWGQGTQVTVSS

SEQ ID NO: 35830 - protein, 119 aa, Artificial Sequence
  Chemically Synthesized
QVQLQESGGGLVQAGGSLRLSCAASGNIFTSNDMGWYRQAPGKERELVAGIASGASTNYADSVKGRFTISRDNAKNTVYLQMNSLKPEDTAVYYCAAKASTPGFDYGYWGQGTQVTVSS

SEQ ID NO: 35831 - protein, 118 aa, Artificial Sequence
  Chemically Synthesized
QVQLQESGGGLVQAGGSLRLSCAASGSISADTRMGWYRQAPGKEREFVALYADSVKGRFTISRDNAKNTVYLQMNSLKPEDTAVYYCAVNARYDEYSDLSPYGHHGYWGQGTQVTVSS

SEQ ID NO: 35832 - protein, 127 aa, Artificial Sequence
  Chemically Synthesized
QVQLQESGGGLVQAGGSLRLSCAASGNISDRAYMGWYRQAPGKERELVATIDPGGITNYADSVKGRFTISRDNAKNTVYLQMNSLKPEDTAVYYCAVYRVDIYQYAIADDYATYDYWGQGTQVTVSS

SEQ ID NO: 35833 - protein, 114 aa, Artificial Sequence
  Chemically Synthesized
QVQLQESGGGLVQAGGSLRLSCAASGTIFWYNLMGWYRQAPGKEREFVAGIADGGNTNYADSVKGRFTISRDNAKNTVYLQMNSLKPEDTAVYYCAAQVLFLYWGQGTQVTVSS

SEQ ID NO: 35834 - protein, 119 aa, Artificial Sequence
  Chemically Synthesized
QVQLQESGGGLVQAGGSLRLSCAASGNISPSEIMGWYRQAPGKERELVAGIAWGTNTNYADSVKGRFTISRDNAKNTVYLQMNSLKPEDTAVYYCAVNNLWAVRSYDYWGQGTQVTVSS

SEQ ID NO: 35835 - protein, 118 aa, Artificial Sequence
  Chemically Synthesized
QVQLQESGGGLVQAGGSLRLSCAASGTISGFGYMGWYRQAPGKERELVAGINLGANTYYADSVKGRFTISRDNAKNTVYLQMNSLKPEDTAVYYCAVPHYDANLLGYWGQGTQVTVSS

SEQ ID NO: 35836 - protein, 118 aa, Artificial Sequence
  Chemically Synthesized
QVQLQESGGGLVQAGGSLRLSCAASGTISAVYGMGWYRQAPGKERELVAGISRGANTNYADSVKGRFTISRDNAKNTVYLQMNSLKPEDTAVYYCAAGTKQGNTHVYWGQGTQVTVSS

SEQ ID NO: 35837 - protein, 121 aa, Artificial Sequence
  Chemically Synthesized
QVQLQESGGGLVQAGGSLRLSCAASGNISYYYDMGWYRQAPGKEREFVAAIDYGATTYYADSVKGRFTISRDNAKNTVYLQMNSLKPEDTAVYYCAAANAGTSTRTSTMYWGQGTQVTVSS

SEQ ID NO: 35838 - protein, 122 aa, Artificial Sequence
  Chemically Synthesized
QVQLQESGGGLVQAGGSLRLSCAASGTISTQAAMGWYRQAPGKEREFVAAIARGTITNYADSVKGRFTISRDNAKNTVYLQMNSLKPEDTAVYYCAVYGTGPYHFLDVHAYWGQGTQVTVSS

SEQ ID NO: 35839 - protein, 122 aa, Artificial Sequence
  Chemically Synthesized
QVQLQESGGGLVQAGGSLRLSCAASGNISHHTNMGWYRQAPGKERELVASIGTGGITYYADSVKGRFTISRDNAKNTVYLQMNSLKPEDTAVYYCAAGGGDINPYLLPHAYWGQGTQVTVSS

SEQ ID NO: 35840 - protein, 118 aa, Artificial Sequence
  Chemically Synthesized
QVQLQESGGGLVQAGGSLRLSCAASGTIFYYGDMGWYRQAPGKEREFVASIGDGGSTYYADSVKGRFTISRDNAKNTVYLQMNSLKPEDTAVYYCAVYNNYRHGFYYWGQGTQVTVSS

SEQ ID NO: 35841 - protein, 117 aa, Artificial Sequence
  Chemically Synthesized
QVQLQESGGGLVQAGGSLRLSCAASGSISSYTLMGWYRQAPGKEREFVASIDVVVLPYADSVKGRFTISRDNAKNTVYLQMNSLKPEDTAVYYCAVVDYYPYPHVYWGQGTQVTVSS

SEQ ID NO: 35842 - protein, 117 aa, Artificial Sequence
  Chemically Synthesized
QVQLQESGGGLVQAGGSLRLSCAASGTIFSDVYMGWYRQAPGKERELVATIGWGTTTNYADSVKGRFTISRDNAKNTVYLQMNSLKPEDTAVYYCAAYVFSYPYDYWGQGTQVTVSS

SEQ ID NO: 35843 - protein, 111 aa, Artificial Sequence
  Chemically Synthesized
QVQLQESGGGLVQAGGSLRLSCAASGYISNDWYMGWYRQAPGKEREFVAIPYADSVKGRFTISRDNAKNTVYLQMNSLKPEDTAVYYCAVDILEGPYHWYWGQGTQVTVSS

SEQ ID NO: 35844 - protein, 122 aa, Artificial Sequence
  Chemically Synthesized
QVQLQESGGGLVQAGGSLRLSCAASGTIFDGTNMGWYRQAPGKEREFVASITTGATTNYADSVKGRFTISRDNAKNTVYLQMNSLKPEDTAVYYCAVYAWYYAATRWDHTYWGQGTQVTVSS

SEQ ID NO: 35845 - protein, 118 aa, Artificial Sequence
  Chemically Synthesized
QVQLQESGGGLVQAGGSLRLSCAASGNISLSSHMGWYRQAPGKEREFVAAITYGSITYYADSVKGRFTISRDNAKNTVYLQMNSLKPEDTAVYYCAAEVPYVGVFTYWGQGTQVTVSS

SEQ ID NO: 35846 - protein, 121 aa, Artificial Sequence
  Chemically Synthesized
QVQLQESGGGLVQAGGSLRLSCAASGTISLGPAMGWYRQAPGKERELVAAIDAGTSTYYADSVKGRFTISRDNAKNTVYLQMNSLKPEDTAVYYCAADFRKTSTLTSLMYWGQGTQVTVSS

SEQ ID NO: 35847 - protein, 117 aa, Artificial Sequence
  Chemically Synthesized
QVQLQESGGGLVQAGGSLRLSCAASGNISVRNYMGWYRQAPGKEREFVAAIAYGTSTYADSVKGRFTISRDNAKNTVYLQMNSLKPEDTAVYYCAVDIYYYRGHDYWGQGTQVTVSS

SEQ ID NO: 35848 - protein, 118 aa, Artificial Sequence
  Chemically Synthesized
QVQLQESGGGLVQAGGSLRLSCAASGYIFYGKYMGWYRQAPGKERELVASIGFGGITNYADSVKGRFTISRDNAKNTVYLQMNSLKPEDTAVYYCAVQGYSYYRLYYWGQGTQVTVSS

SEQ ID NO: 35849 - protein, 118 aa, Artificial Sequence
  Chemically Synthesized
QVQLQESGGGLVQAGGSLRLSCAASGSIFGRRSMGWYRQAPGKEREFVVGIGVGGTTYYADSVKGRFTISRDNAKNTVYLQMNSLKPEDTAVYYCAVGRSGYYRLIYWGQGTQVTVSS

SEQ ID NO: 35850 - protein, 118 aa, Artificial Sequence
  Chemically Synthesized
QVQLQESGGGLVQAGGSLRLSCAASGTISQYVYMGWYRQAPGKEREFVAAIDYGANTYYADSVKGRFTISRDNAKNTVYLQMNSLKPEDTAVYYCAAILATPVPLDYWGQGTQVTVSS

SEQ ID NO: 35851 - protein, 118 aa, Artificial Sequence
  Chemically Synthesized
QVQLQESGGGLVQAGGSLRLSCAASGYISDPSSMGWYRQAPGKEREFVATIDSGANTNYADSVKGRFTISRDNAKNTVYLQMNSLKPEDTAVYYCAVVPRDLRDHYYWGQGTQVTVSS

SEQ ID NO: 35852 - protein, 118 aa, Artificial Sequence
  Chemically Synthesized
QVQLQESGGGLVQAGGSLRLSCAASGNIFTPYVMGWYRQAPGKERELVAAISPGGTTYYADSVKGRFTISRDNAKNTVYLQMNSLKPEDTAVYYCAADHLALTHHAYWGQGTQVTVSS

SEQ ID NO: 35853 - protein, 122 aa, Artificial Sequence
  Chemically Synthesized
QVQLQESGGGLVQAGGSLRLSCAASGSISDRGDMGWYRQAPGKEREFVATIGSGTNTYYADSVKGRFTISRDNAKNTVYLQMNSLKPEDTAVYYCAANYGWHGASEGYLGYWGQGTQVTVSS

SEQ ID NO: 35854 - protein, 122 aa, Artificial Sequence
  Chemically Synthesized
QVQLQESGGGLVQAGGSLRLSCAASGTIFYTDVMGWYRQAPGKEREFVASINRGGITNYADSVKGRFTISRDNAKNTVYLQMNSLKPEDTAVYYCAAYNDRYGQVARDHAYWGQGTQVTVSS

SEQ ID NO: 35855 - protein, 122 aa, Artificial Sequence
  Chemically Synthesized
QVQLQESGGGLVQAGGSLRLSCAASGNIFYVGYMGWYRQAPGKERELVAGISQGTTTYYADSVKGRFTISRDNAKNTVYLQMNSLKPEDTAVYYCAVDYTGGHPHGYIYPYWGQGTQVTVSS

SEQ ID NO: 35856 - protein, 121 aa, Artificial Sequence
  Chemically Synthesized
QVQLQESGGGLVQAGGSLRLSCAASGNIFSDVFMGWYRQAPGKEREFVATISTGTTTNYADSVKGRFTISRDNAKNTVYLQMNSLKPEDTAVYYCAVGATRPDRRRYWLYWGQGTQVTVSS

SEQ ID NO: 35857 - protein, 125 aa, Artificial Sequence
  Chemically Synthesized
QVQLQESGGGLVQAGGSLRLSCAASGTIFWLLGMGWYRQAPGKERELVATINSGGNTNYADSVKGRFTISRDNAKNTVYLQMNSLKPEDTAVYYCAVATGTGTDPSTLTITLIYWGQGTQVTVSS

SEQ ID NO: 35858 - protein, 125 aa, Artificial Sequence
  Chemically Synthesized
QVQLQESGGGLVQAGGSLRLSCAASGNIFDVTLMGWYRQAPGKEREFVAVLIRVLLPYADSVKGRFTISRDNAKNTVYLQMNSLKPEDTAVYYCAAYGAWTRYKYGEAAWEFRYWGQGTQVTVSS

SEQ ID NO: 35859 - protein, 116 aa, Artificial Sequence
  Chemically Synthesized
QVQLQESGGGLVQAGGSLRLSCAASGSIFYVDMGWYRQAPGKEREFVAAISLGANTYYADSVKGRFTISRDNAKNTVYLQMNSLKPEDTAVYYCAVDWTTTLLFYWGQGTQVTVSS

SEQ ID NO: 35860 - protein, 126 aa, Artificial Sequence
  Chemically Synthesized
QVQLQESGGGLVQAGGSLRLSCAASGNIFPYYYMGWYRQAPGKEREFVASITSGATTYYADSVKGRFTISRDNAKNTVYLQMNSLKPEDTAVYYCAVTLGSAQTTGARWWRDHGYWGQGTQVTVSS

SEQ ID NO: 35861 - protein, 118 aa, Artificial Sequence
  Chemically Synthesized
QVQLQESGGGLVQAGGSLRLSCAASGTISPRRYMGWYRQAPGKERELVAAINYGATTYYADSVKGRFTISRDNAKNTVYLQMNSLKPEDTAVYYCAAWYPYYYHHVYWGQGTQVTVSS

SEQ ID NO: 35862 - protein, 118 aa, Artificial Sequence
  Chemically Synthesized
QVQLQESGGGLVQAGGSLRLSCAASGSISLVYEMGWYRQAPGKERELVATINDGTNTYYADSVKGRFTISRDNAKNTVYLQMNSLKPEDTAVYYCAADANYTGQHQYWGQGTQVTVSS

SEQ ID NO: 35863 - protein, 118 aa, Artificial Sequence
  Chemically Synthesized
QVQLQESGGGLVQAGGSLRLSCAASGNIFFFNYMGWYRQAPGKERELVAAITYGTNTNYADSVKGRFTISRDNAKNTVYLQMNSLKPEDTAVYYCAAGDPALYRHGYWGQGTQVTVSS

SEQ ID NO: 35864 - protein, 118 aa, Artificial Sequence
  Chemically Synthesized
QVQLQESGGGLVQAGGSLRLSCAASGNISYTGYMGWYRQAPGKERELVASISYGSNTYYADSVKGRFTISRDNAKNTVYLQMNSLKPEDTAVYYCAAGLYGSPAVSYWGQGTQVTVSS

SEQ ID NO: 35865 - protein, 118 aa, Artificial Sequence
  Chemically Synthesized
QVQLQESGGGLVQAGGSLRLSCAASGSISDPPWMGWYRQAPGKEREFVATISEGGITNYADSVKGRFTISRDNAKNTVYLQMNSLKPEDTAVYYCAVSRQGAPSYTYWGQGTQVTVSS

SEQ ID NO: 35866 - protein, 118 aa, Artificial Sequence
  Chemically Synthesized
QVQLQESGGGLVQAGGSLRLSCAASGNISTGNRMGWYRQAPGKEREFVAAIDYGAITYYADSVKGRFTISRDNAKNTVYLQMNSLKPEDTAVYYCAVVNGVQDLFGYWGQGTQVTVSS

SEQ ID NO: 35867 - protein, 122 aa, Artificial Sequence
  Chemically Synthesized
QVQLQESGGGLVQAGGSLRLSCAASGSISGGTYMGWYRQAPGKERELVASIDFGGSTNYADSVKGRFTISRDNAKNTVYLQMNSLKPEDTAVYYCAVAPTGGGQGTYGHSYWGQGTQVTVSS

SEQ ID NO: 35868 - protein, 118 aa, Artificial Sequence
  Chemically Synthesized
QVQLQESGGGLVQAGGSLRLSCAASGTISGSPIMGWYRQAPGKERELVAAINTGASTNYADSVKGRFTISRDNAKNTVYLQMNSLKPEDTAVYYCAVYTAYWLLNLYWGQGTQVTVSS

SEQ ID NO: 35869 - protein, 118 aa, Artificial Sequence
  Chemically Synthesized
QVQLQESGGGLVQAGGSLRLSCAASGTISYQVFMGWYRQAPGKERELVASITYGATTYYADSVKGRFTISRDNAKNTVYLQMNSLKPEDTAVYYCAVYGYARDKHGYWGQGTQVTVSS

SEQ ID NO: 35870 - protein, 125 aa, Artificial Sequence
  Chemically Synthesized
QVQLQESGGGLVQAGGSLRLSCAASGTIFRIPDMGWYRQAPGKERELVAAIDGGSTNYADSVKGRFTISRDNAKNTVYLQMNSLKPEDTAVYYCAAHGWYNLYVYSYWYTLHAYWGQGTQVTVSS

SEQ ID NO: 35871 - protein, 117 aa, Artificial Sequence
  Chemically Synthesized
QVQLQESGGGLVQAGGSLRLSCAASGSISPATYMGWYRQAPGKEREFVAGISYGTSTNYADSVKGRFTISRDNAKNTVYLQMNSLKPEDTAVYYCAATELSVLIFYWGQGTQVTVSS

SEQ ID NO: 35872 - protein, 111 aa, Artificial Sequence
  Chemically Synthesized
QVQLQESGGGLVQAGGSLRLSCAASGTIFPSSIMGWYRQAPGKERELVAGISNGASTYYADSVKGRFTISRDNAKNTVYLQMNSLKPEDTAVYYCAAEDYWGQGTQVTVSS

SEQ ID NO: 35873 - protein, 115 aa, Artificial Sequence
  Chemically Synthesized
QVQLQESGGGLVQAGGSLRLSCAASGYISWRAHMGWYRQAPGKERELVAAINSGTTTNYADSVKGRFTISRDNAKNTVYLQMNSLKPEDTAVYYCAAYAVGFRYWGQGTQVTVSS

SEQ ID NO: 35874 - protein, 118 aa, Artificial Sequence
  Chemically Synthesized
QVQLQESGGGLVQAGGSLRLSCAASGTISGYGSMGWYRQAPGKERELVAAISDGGITYYADSVKGRFTISRDNAKNTVYLQMNSLKPEDTAVYYCAVYYDWGRSHAYWGQGTQVTVSS

SEQ ID NO: 35875 - protein, 117 aa, Artificial Sequence
  Chemically Synthesized
QVQLQESGGGLVQAGGSLRLSCAASGTIFYISMGWYRQAPGKEREFVAGIDTGANTYYADSVKGRFTISRDNAKNTVYLQMNSLKPEDTAVYYCAVNISFTTVHYYWGQGTQVTVSS

SEQ ID NO: 35876 - protein, 118 aa, Artificial Sequence
  Chemically Synthesized
QVQLQESGGGLVQAGGSLRLSCAASGTISRYHEMGWYRQAPGKEREFVATIDEGTNTNYADSVKGRFTISRDNAKNTVYLQMNSLKPEDTAVYYCAVRTIDLAYYYYWGQGTQVTVSS

SEQ ID NO: 35877 - protein, 126 aa, Artificial Sequence
  Chemically Synthesized
QVQLQESGGGLVQAGGSLRLSCAASGSIFAGVWMGWYRQAPGKERELVAAISYGGNTNYADSVKGRFTISRDNAKNTVYLQMNSLKPEDTAVYYCAVIRDDHYDPSIAFRHYLDYWGQGTQVTVSS

SEQ ID NO: 35878 - protein, 122 aa, Artificial Sequence
  Chemically Synthesized
QVQLQESGGGLVQAGGSLRLSCAASGTIFSYYRMGWYRQAPGKEREFVATIAYGTTTYYADSVKGRFTISRDNAKNTVYLQMNSLKPEDTAVYYCAVDILDYPAPSSLHTYWGQGTQVTVSS

SEQ ID NO: 35879 - protein, 120 aa, Artificial Sequence
  Chemically Synthesized
QVQLQESGGGLVQAGGSLRLSCAASGSIFLTMTMGWYRQAPGKERELVAAISVGGSTNYADSVKGRFTISRDNAKNTVYLQMNSLKPEDTAVYYCAAGVRGRWIRWSYYWGQGTQVTVSS

SEQ ID NO: 35880 - protein, 117 aa, Artificial Sequence
  Chemically Synthesized
QVQLQESGGGLVQAGGSLRLSCAASGNISSYVMGWYRQAPGKERELVATINGGSNTNYADSVKGRFTISRDNAKNTVYLQMNSLKPEDTAVYYCAVARPYEYAFRYWGQGTQVTVSS

SEQ ID NO: 35881 - protein, 118 aa, Artificial Sequence
  Chemically Synthesized
QVQLQESGGGLVQAGGSLRLSCAASGTISAAFFMGWYRQAPGKERELVAGITYGAITNYADSVKGRFTISRDNAKNTVYLQMNSLKPEDTAVYYCAFAEDYRFSLDYWGQGTQVTVSS

SEQ ID NO: 35882 - protein, 116 aa, Artificial Sequence
  Chemically Synthesized
QVQLQESGGGLVQAGGSLRLSCAASGTISSVLMGWYRQAPGKERELVASITDGSITYYADSVKGRFTISRDNAKNTVYLQMNSLKPEDTAVYYCAVGTYYVRHGYWGQGTQVTVSS

SEQ ID NO: 35883 - protein, 114 aa, Artificial Sequence
  Chemically Synthesized
QVQLQESGGGLVQAGGSLRLSCAASGYMGWYRQAPGKERELVASIAAGSYYQYADSVKGRFTISRDNAKNTVYLQMNSLKPEDTAVYYCAAGYFYAHRPLYGYWGQGTQVTVSS

SEQ ID NO: 35884 - protein, 125 aa, Artificial Sequence
  Chemically Synthesized
QVQLQESGGGLVQAGGSLRLSCAASGTIFNYAMGWYRQAPGKERELVAAIAYGGTTNYADSVKGRFTISRDNAKNTVYLQMNSLKPEDTAVYYCAGCAGSATTTSVTLTEYLNYWGQGTQVTVSS

SEQ ID NO: 35885 - protein, 116 aa, Artificial Sequence
  Chemically Synthesized
QVQLQESGGGLVQAGGSLRLSCAASGLFFVTRMGWYRQAPGKEREFVATIAGGASTYYADSVKGRFTISRDNAKNTVYLQMNSLKPEDTAVYYCAADDSGDDAHYWGQGTQVTVSS

SEQ ID NO: 35886 - protein, 122 aa, Artificial Sequence
  Chemically Synthesized
QVQLQESGGGLVQAGGSLRLSCAASGYIFGSWYMGWYRQAPGKEREFVAAIASGGTTNYADSVKGRFTISRDNAKNTVYLQMNSLKPEDTAVYYCAATTDTRDRWDYDFSYWGQGTQVTVSS

SEQ ID NO: 35887 - protein, 124 aa, Artificial Sequence
  Chemically Synthesized
QVQLQESGGGLVQAGGSLRLSCAASGSISAYVDMGWYRQAPGKEREFVAAIDVGANTYYADSVKGRFTISRDNAKNTVYLQMNSLKPEDTAVYYCAARYFWGIEYGYIRPLEYWGQGTQVTVSS

SEQ ID NO: 35888 - protein, 122 aa, Artificial Sequence
  Chemically Synthesized
QVQLQESGGGLVQAGGSLRLSCAASGNISRLAYMGWYRQAPGKERELVAGIGSGGITNYADSVKGRFTISRDNAKNTVYLQMNSLKPEDTAVYYCAVRERSPLWRSGLHPYWGQGTQVTVSS

SEQ ID NO: 35889 - protein, 118 aa, Artificial Sequence
  Chemically Synthesized
QVQLQESGGGLVQAGGSLRLSCAASGYIFTLDYMGWYRQAPGKERELVAAISYGSSTYYADSVKGRFTISRDNAKNTVYLQMNSLKPEDTAVYYCAVDQYSYTLHYYWGQGTQVTVSS

SEQ ID NO: 35890 - protein, 126 aa, Artificial Sequence
  Chemically Synthesized
QVQLQESGGGLVQAGGSLRLSCAASGYISPDRFMGWYRQAPGKEREFVAAITGGTNTNYADSVKGRFTISRDNAKNTVYLQMNSLKPEDTAVYYCAVAEPTTRYEVDGWRKVLTYWGQGTQVTVSS

SEQ ID NO: 35891 - protein, 118 aa, Artificial Sequence
  Chemically Synthesized
QVQLQESGGGLVQAGGSLRLSCAASGYISGIDRMGWYRQAPGKERELVAAITWGATTYYADSVKGRFTISRDNAKNTVYLQMNSLKPEDTAVYYCAAYYRTVRDLRYWGQGTQVTVSS

SEQ ID NO: 35892 - protein, 121 aa, Artificial Sequence
  Chemically Synthesized
QVQLQESGGGLVQAGGSLRLSCAASGTISIVTTMGWYRQAPGKEREFVASITGGGITNYADSVKGRFTISRDNAKNTVYLQMNSLKPEDTAVYYCAVRLSTTTLVVKTMYWGQGTQVTVSS

SEQ ID NO: 35893 - protein, 118 aa, Artificial Sequence
  Chemically Synthesized
QVQLQESGGGLVQAGGSLRLSCAASGSISQYIYMGWYRQAPGKEREFVATIGYGGNTNYADSVKGRFTISRDNAKNTVYLQMNSLKPEDTAVYYCAVPQDYTYVHDYWGQGTQVTVSS

SEQ ID NO: 35894 - protein, 117 aa, Artificial Sequence
  Chemically Synthesized
QVQLQESGGGLVQAGGSLRLSCAASGTIFDDYMGWYRQAPGKEREFVAAISTGGITNYADSVKGRFTISRDNAKNTVYLQMNSLKPEDTAVYYCAAYYRNLGDFSYWGQGTQVTVSS

SEQ ID NO: 35895 - protein, 122 aa, Artificial Sequence
  Chemically Synthesized
QVQLQESGGGLVQAGGSLRLSCAASGYISDGYYMGWYRQAPGKERELVASIDDGSNTYYADSVKGRFTISRDNAKNTVYLQMNSLKPEDTAVYYCAVYVPVDDDTEIRLVYWGQGTQVTVSS

SEQ ID NO: 35896 - protein, 126 aa, Artificial Sequence
  Chemically Synthesized
QVQLQESGGGLVQAGGSLRLSCAASGTIFAGLNMGWYRQAPGKERELVAGISHGSITNYADSVKGRFTISRDNAKNTVYLQMNSLKPEDTAVYYCAVVQTRGVGDAATDSGVYRYWGQGTQVTVSS

SEQ ID NO: 35897 - protein, 122 aa, Artificial Sequence
  Chemically Synthesized
QVQLQESGGGLVQAGGSLRLSCAASGYIFGYTYMGWYRQAPGKEREFVAGITYGATTYYADSVKGRFTISRDNAKNTVYLQMNSLKPEDTAVYYCAAAVTGRGYWYAYHTYWGQGTQVTVSS

SEQ ID NO: 35898 - protein, 117 aa, Artificial Sequence
  Chemically Synthesized
QVQLQESGGGLVQAGGSLRLSCAASGYIFDPPNMGWYRQAPGKERELVASINSVVLPYADSVKGRFTISRDNAKNTVYLQMNSLKPEDTAVYYCAVILREHANFGYWGQGTQVTVSS

SEQ ID NO: 35899 - protein, 126 aa, Artificial Sequence
  Chemically Synthesized
QVQLQESGGGLVQAGGSLRLSCAASGNISLWYAMGWYRQAPGKERELVASISYGGTTNYADSVKGRFTISRDNAKNTVYLQMNSLKPEDTAVYYCAADIRGPKETGRYYDNQHAYWGQGTQVTVSS

SEQ ID NO: 35900 - protein, 118 aa, Artificial Sequence
  Chemically Synthesized
QVQLQESGGGLVQAGGSLRLSCAASGSISPSYTMGWYRQAPGKERELVAAINSGGITYYADSVKGRFTISRDNAKNTVYLQMNSLKPEDTAVYYCAARYHVNPRLRYWGQGTQVTVSS

SEQ ID NO: 35901 - protein, 111 aa, Artificial Sequence
  Chemically Synthesized
QVQLQESGGGLVQAGGSLRLSCAASGTISPVYYMGWYRQAPGKEREFVATITIGTTTNYADSVKGRFTISRDNAKNTVYLQMNSLKPEDTAVYYCAVLVYWGQGTQVTVSS

SEQ ID NO: 35902 - protein, 117 aa, Artificial Sequence
  Chemically Synthesized
QVQLQESGGGLVQAGGSLRLSCAASGTISEDASMGWYRQAPGKEREFVASIALGGNTYYADSVKGRFTISRDNAKNTVYLQMNSLKPEDTAVYYCAVPDIPDWRYYWGQGTQVTVSS

SEQ ID NO: 35903 - protein, 121 aa, Artificial Sequence
  Chemically Synthesized
QVQLQESGGGLVQAGGSLRLSCAASGYIFTAITMGWYRQAPGKERELVAGIDPGTIPYADSVKGRFTISRDNAKNTVYLQMNSLKPEDTAVYYCAVYDRPAGKFSGIFGYWGQGTQVTVSS

SEQ ID NO: 35904 - protein, 126 aa, Artificial Sequence
  Chemically Synthesized
QVQLQESGGGLVQAGGSLRLSCAASGTIFAYTFMGWYRQAPGKERELVASISIGTITNYADSVKGRFTISRDNAKNTVYLQMNSLKPEDTAVYYCAVERISRQYYFYDFSFPYSYWGQGTQVTVSS

SEQ ID NO: 35905 - protein, 110 aa, Artificial Sequence
  Chemically Synthesized
QVQLQESGGGLVQAGGSLRLSCAASGNISYYYIMGWYRQAPGKERELVDLYADSVKGRFTISRDNAKNTVYLQMNSLKPEDTAVYYCAVNDYYAHGFRYWGQGTQVTVSS

SEQ ID NO: 35906 - protein, 117 aa, Artificial Sequence
  Chemically Synthesized
QVQLQESGGGLVQAGGSLRLSCAASGTISGRTIMGWYRQAPGKERELVATMITVLIPYADSVKGRFTISRDNAKNTVYLQMNSLKPEDTAVYYCAAVQYYYPTFDYWGQGTQVTVSS

SEQ ID NO: 35907 - protein, 118 aa, Artificial Sequence
  Chemically Synthesized
QVQLQESGGGLVQAGGSLRLSCAASGNIFGEYAMGWYRQAPGKERELVAAINAGAITNYADSVKGRFTISRDNAKNTVYLQMNSLKPEDTAVYYCAADQPTINYHTYWGQGTQVTVSS

SEQ ID NO: 35908 - protein, 122 aa, Artificial Sequence
  Chemically Synthesized
QVQLQESGGGLVQAGGSLRLSCAASGSISAWRVMGWYRQAPGKERELVASIDPGSITYYADSVKGRFTISRDNAKNTVYLQMNSLKPEDTAVYYCAVLNTTVIRVVVGHYYWGQGTQVTVSS

SEQ ID NO: 35909 - protein, 117 aa, Artificial Sequence
  Chemically Synthesized
QVQLQESGGGLVQAGGSLRLSCAASGTIFGRNLMGWYRQAPGKERELVATISYGTNTNYADSVKGRFTISRDNAKNTVYLQMNSLKPEDTAVYYCAVYVSDGGSFYWGQGTQVTVSS

SEQ ID NO: 35910 - protein, 122 aa, Artificial Sequence
  Chemically Synthesized
QVQLQESGGGLVQAGGSLRLSCAASGSIFQRADMGWYRQAPGKERELVAAIGLGTNTNYADSVKGRFTISRDNAKNTVYLQMNSLKPEDTAVYYCAAVRSPYYLQILPHSYWGQGTQVTVSS

SEQ ID NO: 35911 - protein, 121 aa, Artificial Sequence
  Chemically Synthesized
QVQLQESGGGLVQAGGSLRLSCAASGSISSTVMGWYRQAPGKEREFVAAIALGSNTNYADSVKGRFTISRDNAKNTVYLQMNSLKPEDTAVYYCAVRDYRDVLRSQWLYYWGQGTQVTVSS

SEQ ID NO: 35912 - protein, 118 aa, Artificial Sequence
  Chemically Synthesized
QVQLQESGGGLVQAGGSLRLSCAASGTIFAKGRMGWYRQAPGKEREFVAAIAQGTNTNYADSVKGRFTISRDNAKNTVYLQMNSLKPEDTAVYYCAADDGTVQPHAYWGQGTQVTVSS

SEQ ID NO: 35913 - protein, 118 aa, Artificial Sequence
  Chemically Synthesized
QVQLQESGGGLVQAGGSLRLSCAASGNISTGRGMGWYRQAPGKEREFVASINHGGTTNYADSVKGRFTISRDNAKNTVYLQMNSLKPEDTAVYYCAVTAHTYIRYTYWGQGTQVTVSS

SEQ ID NO: 35914 - protein, 122 aa, Artificial Sequence
  Chemically Synthesized
QVQLQESGGGLVQAGGSLRLSCAASGYISLDTYMGWYRQAPGKERELVAGITIGGTTYYADSVKGRFTISRDNAKNTVYLQMNSLKPEDTAVYYCAVQWYDDYRTLQDLPYWGQGTQVTVSS

SEQ ID NO: 35915 - protein, 122 aa, Artificial Sequence
  Chemically Synthesized
QVQLQESGGGLVQAGGSLRLSCAASGTIFDPYYMGWYRQAPGKERELVAGIDYGTNTYYADSVKGRFTISRDNAKNTVYLQMNSLKPEDTAVYYCAATRVYYYGLLLVLYYWGQGTQVTVSS

SEQ ID NO: 35916 - protein, 126 aa, Artificial Sequence
  Chemically Synthesized
QVQLQESGGGLVQAGGSLRLSCAASGSISSHTYMGWYRQAPGKEREFVATINTGASTNYADSVKGRFTISRDNAKNTVYLQMNSLKPEDTAVYYCAVITYAYGWDAQEEDAFYQYWGQGTQVTVSS

SEQ ID NO: 35917 - protein, 122 aa, Artificial Sequence
  Chemically Synthesized
QVQLQESGGGLVQAGGSLRLSCAASGTIFRTRGMGWYRQAPGKEREFVATITPGATTYYADSVKGRFTISRDNAKNTVYLQMNSLKPEDTAVYYCAADWSDGYLAIEYHRYWGQGTQVTVSS

SEQ ID NO: 35918 - protein, 118 aa, Artificial Sequence
  Chemically Synthesized
QVQLQESGGGLVQAGGSLRLSCAASGSIFGLAYMGWYRQAPGKERELVASIGWGASTYYADSVKGRFTISRDNAKNTVYLQMNSLKPEDTAVYYCAVRTGYYTRYYYWGQGTQVTVSS

SEQ ID NO: 35919 - protein, 113 aa, Artificial Sequence
  Chemically Synthesized
QVQLQESGGGLVQAGGSLRLSCAASGSISDPNDMGWYRQAPGKEREFVASIDRGTITNYADSVKGRFTISRDNAKNTVYLQMNSLKPEDTAVYYCAALRPCYWGQGTQVTVSS

SEQ ID NO: 35920 - protein, 122 aa, Artificial Sequence
  Chemically Synthesized
QVQLQESGGGLVQAGGSLRLSCAASGSISLPRKMGWYRQAPGKERELVAGIGPGGNTYYADSVKGRFTISRDNAKNTVYLQMNSLKPEDTAVYYCAADYFDDVVSYRTHGYWGQGTQVTVSS

SEQ ID NO: 35921 - protein, 122 aa, Artificial Sequence
  Chemically Synthesized
QVQLQESGGGLVQAGGSLRLSCAASGNISGAGYMGWYRQAPGKERELVASISRGTTTYYADSVKGRFTISRDNAKNTVYLQMNSLKPEDTAVYYCAALVTEPVDVNQDYNYWGQGTQVTVSS

SEQ ID NO: 35922 - protein, 122 aa, Artificial Sequence
  Chemically Synthesized
QVQLQESGGGLVQAGGSLRLSCAASGNISIYDYMGWYRQAPGKERELVAAIGIGATTYYADSVKGRFTISRDNAKNTVYLQMNSLKPEDTAVYYCAADYNDIRGRYDAYEYWGQGTQVTVSS

SEQ ID NO: 35923 - protein, 121 aa, Artificial Sequence
  Chemically Synthesized
QVQLQESGGGLVQAGGSLRLSCAASGTISAPRGMGWYRQAPGKERELVAAIAYGSNTNYADSVKGRFTISRDNAKNTVYLQMNSLKPEDTAVYYCAVADDSSLVRVTLLYWGQGTQVTVSS

SEQ ID NO: 35924 - protein, 118 aa, Artificial Sequence
  Chemically Synthesized
QVQLQESGGGLVQAGGSLRLSCAASGTIFGHYFMGWYRQAPGKEREFVAGIDFGAITYYADSVKGRFTISRDNAKNTVYLQMNSLKPEDTAVYYCAVRRDGGSDLRYWGQGTQVTVSS

SEQ ID NO: 35925 - protein, 121 aa, Artificial Sequence
  Chemically Synthesized
QVQLQESGGGLVQAGGSLRLSCAASGTISVDYYMGWYRQAPGKEREFVASINRGSNTYYADSVKGRFTISRDNAKNTVYLQMNSLKPEDTAVYYCAVSRPQYKYSGLAHYWGQGTQVTVSS

SEQ ID NO: 35926 - protein, 117 aa, Artificial Sequence
  Chemically Synthesized
QVQLQESGGGLVQAGGSLRLSCAASGYISAYEPMGWYRQAPGKEREFVAAITYGATTNYADSVKGRFTISRDNAKNTVYLQMNSLKPEDTAVYYCAVDQTSTLTLYWGQGTQVTVSS

SEQ ID NO: 35927 - protein, 124 aa, Artificial Sequence
  Chemically Synthesized
QVQLQESGGGLVQAGGSLRLSCAASGTIFIGNYMGWYRQAPGKERELVAAIGAGSTTYYADSVKGRFTISRDNAKNTVYLQMNSLKPEDTAVYYCAVLDNQYTRDNGGPYHSYWGQGTQVTVSS

SEQ ID NO: 35928 - protein, 126 aa, Artificial Sequence
  Chemically Synthesized
QVQLQESGGGLVQAGGSLRLSCAASGYISTRSLMGWYRQAPGKERELVASISTGTSTNYADSVKGRFTISRDNAKNTVYLQMNSLKPEDTAVYYCAVAEWFGRDRIFQDDLDFAYWGQGTQVTVSS

SEQ ID NO: 35929 - protein, 117 aa, Artificial Sequence
  Chemically Synthesized
QVQLQESGGGLVQAGGSLRLSCAASGNISRYDEMGWYRQAPGKERELVASINIGGTTYYADSVKGRFTISRDNAKNTVYLQMNSLKPEDTAVYYCAATNLLCTTFYWGQGTQVTVSS

SEQ ID NO: 35930 - protein, 118 aa, Artificial Sequence
  Chemically Synthesized
QVQLQESGGGLVQAGGSLRLSCAASGTIFPVKYMGWYRQAPGKEREFVAGIGTGATTNYADSVKGRFTISRDNAKNTVYLQMNSLKPEDTAVYYCAAAYFDPHHLPYWGQGTQVTVSS

SEQ ID NO: 35931 - protein, 118 aa, Artificial Sequence
  Chemically Synthesized
QVQLQESGGGLVQAGGSLRLSCAASGNISLIFTMGWYRQAPGKEREFVASIGDGATTYYADSVKGRFTISRDNAKNTVYLQMNSLKPEDTAVYYCAVYHNSVSYFSYWGQGTQVTVSS

SEQ ID NO: 35932 - protein, 122 aa, Artificial Sequence
  Chemically Synthesized
QVQLQESGGGLVQAGGSLRLSCAASGTISNDLSMGWYRQAPGKERELVASIDGGASTNYADSVKGRFTISRDNAKNTVYLQMNSLKPEDTAVYYCAVQYHYRFGKYVPHVYWGQGTQVTVSS

SEQ ID NO: 35933 - protein, 116 aa, Artificial Sequence
  Chemically Synthesized
QVQLQESGGGLVQAGGSLRLSCAASGNISVYSAMGWYRQAPGKERELPVLVTVVLPYADSVKGRFTISRDNAKNTVYLQMNSLKPEDTAVYYCAADADDTERYGYWGQGTQVTVSS

SEQ ID NO: 35934 - protein, 117 aa, Artificial Sequence
  Chemically Synthesized
QVQLQESGGGLVQAGGSLRLSCAASGTISTSAMGWYRQAPGKERELVATIAYGGNTNYADSVKGRFTISRDNAKNTVYLQMNSLKPEDTAVYYCAAYDRDSIDFAYWGQGTQVTVSS

SEQ ID NO: 35935 - protein, 118 aa, Artificial Sequence
  Chemically Synthesized
QVQLQESGGGLVQAGGSLRLSCAASGNISYSLRMGWYRQAPGKERELVAGISSGGTTNYADSVKGRFTISRDNAKNTVYLQMNSLKPEDTAVYYCAVYVFTIRVFYYWGQGTQVTVSS

SEQ ID NO: 35936 - protein, 124 aa, Artificial Sequence
  Chemically Synthesized
QVQLQESGGGLVQAGGSLRLSCAASGSISWGWTMGWYRQAPGKERELVASIDRGGTTNYADSVKGRFTISRDNAKNTVYLQMNSLKPEDTAVYYCAATDDYANGVTTYEGYVYWGQGTQVTVSS

SEQ ID NO: 35937 - protein, 122 aa, Artificial Sequence
  Chemically Synthesized
QVQLQESGGGLVQAGGSLRLSCAASGNIFIAKTMGWYRQAPGKERELVAGIGGGTITNYADSVKGRFTISRDNAKNTVYLQMNSLKPEDTAVYYCAARAVGIWEDTPSFGYWGQGTQVTVSS

SEQ ID NO: 35938 - protein, 115 aa, Artificial Sequence
  Chemically Synthesized
QVQLQESGGGLVQAGGSLRLSCAASGYIFTPRDMGWYRQAPGKEREFALLVSVLVPYADSVKGRFTISRDNAKNTVYLQMNSLKPEDTAVYYCAFTLKVVTVLYWGQGTQVTVSS

SEQ ID NO: 35939 - protein, 118 aa, Artificial Sequence
  Chemically Synthesized
QVQLQESGGGLVQAGGSLRLSCAASGNIFGDVTMGWYRQAPGKERELVAAIDPGGSTNYADSVKGRFTISRDNAKNTVYLQMNSLKPEDTAVYYCAAVLFKTVGLVYWGQGTQVTVSS

SEQ ID NO: 35940 - protein, 118 aa, Artificial Sequence
  Chemically Synthesized
QVQLQESGGGLVQAGGSLRLSCAASGYISFSGGMGWYRQAPGKERELVASIDYGGITYYADSVKGRFTISRDNAKNTVYLQMNSLKPEDTAVYYCAVYGAIGGIHGYWGQGTQVTVSS

SEQ ID NO: 35941 - protein, 111 aa, Artificial Sequence
  Chemically Synthesized
QVQLQESGGGLVQAGGSLRLSCAASGTISNVYIMGWYRQAPGKEREFVATIDDGTTTYYADSVKGRFTISRDNAKNTVYLQMNSLKPEDTAVYYCAAVIYWGQGTQVTVSS

SEQ ID NO: 35942 - protein, 123 aa, Artificial Sequence
  Chemically Synthesized
QVQLQESGGGLVQAGGSLRLSCAASGTISPYDRMGWYRQAPGKERELVAAIAVGSTTNYADSVKGRFTISRDNAKNTVYLQMNSLKPEDTAVYYCAVLHRDHAYYGVNIHYYWGQGTQVTVSS

SEQ ID NO: 35943 - protein, 121 aa, Artificial Sequence
  Chemically Synthesized
QVQLQESGGGLVQAGGSLRLSCAASGTISYRSMGWYRQAPGKERELVAAINQGAITNYADSVKGRFTISRDNAKNTVYLQMNSLKPEDTAVYYCAAPVYNTDRDGHEHDYWGQGTQVTVSS

SEQ ID NO: 35944 - protein, 124 aa, Artificial Sequence
  Chemically Synthesized
QVQLQESGGGLVQAGGSLRLSCAASGSIFGPGDMGWYRQAPGKERELVAGITAVLLPYADSVKGRFTISRDNAKNTVYLQMNSLKPEDTAVYYCAVTVTTLLVTFWVSGVTMYWGQGTQVTVSS

SEQ ID NO: 35945 - protein, 114 aa, Artificial Sequence
  Chemically Synthesized
QVQLQESGGGLVQAGGSLRLSCAASGYISPYDYMGWYRQAPGKEREFVAAISHGGNTYYADSVKGRFTISRDNAKNTVYLQMNSLKPEDTAVYYCAVGPIYYYWGQGTQVTVSS

SEQ ID NO: 35946 - protein, 118 aa, Artificial Sequence
  Chemically Synthesized
QVQLQESGGGLVQAGGSLRLSCAASGYISDLDAMGWYRQAPGKEREFVAAISAGSSTYYADSVKGRFTISRDNAKNTVYLQMNSLKPEDTAVYYCAVGLDVENWHGYWGQGTQVTVSS

SEQ ID NO: 35947 - protein, 117 aa, Artificial Sequence
  Chemically Synthesized
QVQLQESGGGLVQAGGSLRLSCAASGTISPLVYMGWYRQAPGKERELVATIGPGATTNYADSVKGRFTISRDNAKNTVYLQMNSLKPEDTAVYYCAADYVLRSFMYWGQGTQVTVSS

SEQ ID NO: 35948 - protein, 122 aa, Artificial Sequence
  Chemically Synthesized
QVQLQESGGGLVQAGGSLRLSCAASGTISDWNAMGWYRQAPGKEREFVAGISDGGNTNYADSVKGRFTISRDNAKNTVYLQMNSLKPEDTAVYYCAASIPAAIEYDHYHSYWGQGTQVTVSS

SEQ ID NO: 35949 - protein, 126 aa, Artificial Sequence
  Chemically Synthesized
QVQLQESGGGLVQAGGSLRLSCAASGTISSVLSMGWYRQAPGKEREFVASITTGGNTYYADSVKGRFTISRDNAKNTVYLQMNSLKPEDTAVYYCAVRRDRYWIDDANIGGHYAYWGQGTQVTVSS

SEQ ID NO: 35950 - protein, 118 aa, Artificial Sequence
  Chemically Synthesized
QVQLQESGGGLVQAGGSLRLSCAASGTIFQNSFMGWYRQAPGKEREFVAGITAGGITNYADSVKGRFTISRDNAKNTVYLQMNSLKPEDTAVYYCAVLTNPYHQHQYWGQGTQVTVSS

SEQ ID NO: 35951 - protein, 117 aa, Artificial Sequence
  Chemically Synthesized
QVQLQESGGGLVQAGGSLRLSCAASGTISSSYMGWYRQAPGKERELVAAISYGATTNYADSVKGRFTISRDNAKNTVYLQMNSLKPEDTAVYYCAVGYGGSLRLYYWGQGTQVTVSS

SEQ ID NO: 35952 - protein, 117 aa, Artificial Sequence
  Chemically Synthesized
QVQLQESGGGLVQAGGSLRLSCAASGLFFVVSMGWYRQAPGKEREFVASIARGAITNYADSVKGRFTISRDNAKNTVYLQMNSLKPEDTAVYYCAVFVDPSATHYYWGQGTQVTVSS

SEQ ID NO: 35953 - protein, 111 aa, Artificial Sequence
  Chemically Synthesized
QVQLQESGGGLVQAGGSLRLSCAASGNIFRVTMGWYRQAPGKERELVAGITWGSTNYADSVKGRFTISRDNAKNTVYLQMNSLKPEDTAVYYCAYPAHEYWGQGTQVTVSS

SEQ ID NO: 35954 - protein, 112 aa, Artificial Sequence
  Chemically Synthesized
QVQLQESGGGLVQAGGSLRLSCAASGWMGWYRQAPGKEREFVAGIASGANTYYADSVKGRFTISRDNAKNTVYLQMNSLKPEDTAVYYCAVRTVPADQFGYWGQGTQVTVSS

SEQ ID NO: 35955 - protein, 122 aa, Artificial Sequence
  Chemically Synthesized
QVQLQESGGGLVQAGGSLRLSCAASGTIFTVDDMGWYRQAPGKERELVAGIGPGTSTNYADSVKGRFTISRDNAKNTVYLQMNSLKPEDTAVYYCAAVFDGPWYDSTRLFYWGQGTQVTVSS

SEQ ID NO: 35956 - protein, 111 aa, Artificial Sequence
  Chemically Synthesized
QVQLQESGGGLVQAGGSLRLSCAASGNISRYYSMGWYRQAPGKERELVASIDYGSTTNYADSVKGRFTISRDNAKNTVYLQMNSLKPEDTAVYYCALYDYWGQGTQVTVSS

SEQ ID NO: 35957 - protein, 116 aa, Artificial Sequence
  Chemically Synthesized
QVQLQESGGGLVQAGGSLRLSCAASGSISPRVYMGWYRQAPGKEREFVASISYGTLYADSVKGRFTISRDNAKNTVYLQMNSLKPEDTAVYYCAVYPTARGYFTYWGQGTQVTVSS

SEQ ID NO: 35958 - protein, 126 aa, Artificial Sequence
  Chemically Synthesized
QVQLQESGGGLVQAGGSLRLSCAASGYIFAYLRMGWYRQAPGKERELVATIGAGTSTNYADSVKGRFTISRDNAKNTVYLQMNSLKPEDTAVYYCAAYSYYTRGTVVSDGPRLDYWGQGTQVTVSS

SEQ ID NO: 35959 - protein, 116 aa, Artificial Sequence
  Chemically Synthesized
QVQLQESGGGLVQAGGSLRLSCAASGNIFTFYMGWYRQAPGKERELVASISVGSTTYYADSVKGRFTISRDNAKNTVYLQMNSLKPEDTAVYYCAAADTPTTVMYWGQGTQVTVSS

SEQ ID NO: 35960 - protein, 115 aa, Artificial Sequence
  Chemically Synthesized
QVQLQESGGGLVQAGGSLRLSCAASGNIFGLEVMGWYRQAPGKEREFVAAIAAGGSTYYADSVKGRFTISRDNAKNTVYLQMNSLKPEDTAVYYCAARLTPYKYWGQGTQVTVSS

SEQ ID NO: 35961 - protein, 121 aa, Artificial Sequence
  Chemically Synthesized
QVQLQESGGGLVQAGGSLRLSCAASGNISLSGLMGWYRQAPGKEREFVATIGYGTSTYADSVKGRFTISRDNAKNTVYLQMNSLKPEDTAVYYCAAYYARPYRITDTHRYWGQGTQVTVSS

SEQ ID NO: 35962 - protein, 126 aa, Artificial Sequence
  Chemically Synthesized
QVQLQESGGGLVQAGGSLRLSCAASGTIFPKYNMGWYRQAPGKERELVAAINRGSSTNYADSVKGRFTISRDNAKNTVYLQMNSLKPEDTAVYYCAAYDDYPTYEDNGYYEPFGYWGQGTQVTVSS

SEQ ID NO: 35963 - protein, 122 aa, Artificial Sequence
  Chemically Synthesized
QVQLQESGGGLVQAGGSLRLSCAASGTISTDRVMGWYRQAPGKERELVAGINYGGSTNYADSVKGRFTISRDNAKNTVYLQMNSLKPEDTAVYYCAVRFDSPYSYRYVHQYWGQGTQVTVSS

SEQ ID NO: 35964 - protein, 118 aa, Artificial Sequence
  Chemically Synthesized
QVQLQESGGGLVQAGGSLRLSCAASGTIFPDVSMGWYRQAPGKERELVATITTGGTTYYADSVKGRFTISRDNAKNTVYLQMNSLKPEDTAVYYCAVVSRPPGHHYYWGQGTQVTVSS

SEQ ID NO: 35965 - protein, 117 aa, Artificial Sequence
  Chemically Synthesized
QVQLQESGGGLVQAGGSLRLSCAASGTIFTLGMGWYRQAPGKEREFVAAINTGTTTYYADSVKGRFTISRDNAKNTVYLQMNSLKPEDTAVYYCAARFGYLPSHGYWGQGTQVTVSS

SEQ ID NO: 35966 - protein, 118 aa, Artificial Sequence
  Chemically Synthesized
QVQLQESGGGLVQAGGSLRLSCAASGNISGRTYMGWYRQAPGKEREFVAGIDDGSITYYADSVKGRFTISRDNAKNTVYLQMNSLKPEDTAVYYCAVYYRYYGWLYYWGQGTQVTVSS

SEQ ID NO: 35967 - protein, 113 aa, Artificial Sequence
  Chemically Synthesized
QVQLQESGGGLVQAGGSLRLSCAASGTIFYTYSMGWYRQAPGKERELVASIDYGGITNYADSVKGRFTISRDNAKNTVYLQMNSLKPEDTAVYYCAAGYTFYWGQGTQVTVSS

SEQ ID NO: 35968 - protein, 117 aa, Artificial Sequence
  Chemically Synthesized
QVQLQESGGGLVQAGGSLRLSCAASGNISYSAAMGWYRQAPGKERELNGGSTNYADSVKGRFTISRDNAKNTVYLQMNSLKPEDTAVYYCAVAGHTPSADPWYFPYWGQGTQVTVSS

SEQ ID NO: 35969 - protein, 118 aa, Artificial Sequence
  Chemically Synthesized
QVQLQESGGGLVQAGGSLRLSCAASGNISYAYDMGWYRQAPGKERELVAGIAVGSITNYADSVKGRFTISRDNAKNTVYLQMNSLKPEDTAVYYCAVDDYADDLFVYWGQGTQVTVSS

SEQ ID NO: 35970 - protein, 126 aa, Artificial Sequence
  Chemically Synthesized
QVQLQESGGGLVQAGGSLRLSCAASGNIFWSDYMGWYRQAPGKERELVAAIDEGGSTNYADSVKGRFTISRDNAKNTVYLQMNSLKPEDTAVYYCAAGPYSYYVFGQWGVQYHGYWGQGTQVTVSS

SEQ ID NO: 35971 - protein, 119 aa, Artificial Sequence
  Chemically Synthesized
QVQLQESGGGLVQAGGSLRLSCAASGNISHPIRMGWYRQAPGKERELVATITGGSNTNYADSVKGRFTISRDNAKNTVYLQMNSLKPEDTAVYYCAVNTLVLTTLSFYWGQGTQVTVSS

SEQ ID NO: 35972 - protein, 122 aa, Artificial Sequence
  Chemically Synthesized
QVQLQESGGGLVQAGGSLRLSCAASGNIFHETGMGWYRQAPGKERELVATIGGGTTTNYADSVKGRFTISRDNAKNTVYLQMNSLKPEDTAVYYCAAYYRPYRYYATRYRYWGQGTQVTVSS

SEQ ID NO: 35973 - protein, 118 aa, Artificial Sequence
  Chemically Synthesized
QVQLQESGGGLVQAGGSLRLSCAASGSISLHTVMGWYRQAPGKEREFVASITAGSSTNYADSVKGRFTISRDNAKNTVYLQMNSLKPEDTAVYYCAADVYDITYLPYWGQGTQVTVSS

SEQ ID NO: 35974 - protein, 118 aa, Artificial Sequence
  Chemically Synthesized
QVQLQESGGGLVQAGGSLRLSCAASGNIFDSQAMGWYRQAPGKERELVAAISYGSTTNYADSVKGRFTISRDNAKNTVYLQMNSLKPEDTAVYYCAVRDAWLVDHYYWGQGTQVTVSS

SEQ ID NO: 35975 - protein, 110 aa, Artificial Sequence
  Chemically Synthesized
QVQLQESGGGLVQAGGSLRLSCAASGTIFVTPAMGWYRQAPGKERELVATIGRGTITNYADSVKGRFTISRDNAKNTVYLQMNSLKPEDTAVYYCAYYYWGQGTQVTVSS

SEQ ID NO: 35976 - protein, 118 aa, Artificial Sequence
  Chemically Synthesized
QVQLQESGGGLVQAGGSLRLSCAASGYISFGYAMGWYRQAPGKEREFVATIDSGGNTYYADSVKGRFTISRDNAKNTVYLQMNSLKPEDTAVYYCAVYFDYDRAFYYWGQGTQVTVSS

SEQ ID NO: 35977 - protein, 118 aa, Artificial Sequence
  Chemically Synthesized
QVQLQESGGGLVQAGGSLRLSCAASGNISLHNQMGWYRQAPGKERELVAGISYGSSTYYADSVKGRFTISRDNAKNTVYLQMNSLKPEDTAVYYCAVIEDNLSPHDYWGQGTQVTVSS

SEQ ID NO: 35978 - protein, 109 aa, Artificial Sequence
  Chemically Synthesized
QVQLQESGGGLVQAGGSLRLSCAASGNIFPNYAMGWYRQAPGKEREFVAGISSSSTYYADSVKGRFTISRDNAKNTVYLQMNSLKPEDTAVYYCAYVYWGQGTQVTVSS

SEQ ID NO: 35979 - protein, 122 aa, Artificial Sequence
  Chemically Synthesized
QVQLQESGGGLVQAGGSLRLSCAASGTISDDLQMGWYRQAPGKEREFVAGITYGATTNYADSVKGRFTISRDNAKNTVYLQMNSLKPEDTAVYYCAVVRDYQAGPYYPHPYWGQGTQVTVSS

SEQ ID NO: 35980 - protein, 122 aa, Artificial Sequence
  Chemically Synthesized
QVQLQESGGGLVQAGGSLRLSCAASGNISWLYRMGWYRQAPGKEREFVAAITVGANTYYADSVKGRFTISRDNAKNTVYLQMNSLKPEDTAVYYCAADGSNRSNEGWGHTYWGQGTQVTVSS

SEQ ID NO: 35981 - protein, 116 aa, Artificial Sequence
  Chemically Synthesized
QVQLQESGGGLVQAGGSLRLSCAASGTILTVMGWYRQAPGKERELVAGIAHGGSTYYADSVKGRFTISRDNAKNTVYLQMNSLKPEDTAVYYCAAVIRADDYYAYWGQGTQVTVSS

SEQ ID NO: 35982 - protein, 118 aa, Artificial Sequence
  Chemically Synthesized
QVQLQESGGGLVQAGGSLRLSCAASGSIFYYYWMGWYRQAPGKEREFVAGIDLGGTTYYADSVKGRFTISRDNAKNTVYLQMNSLKPEDTAVYYCAADYPYYYDLPYWGQGTQVTVSS

SEQ ID NO: 35983 - protein, 118 aa, Artificial Sequence
  Chemically Synthesized
QVQLQESGGGLVQAGGSLRLSCAASGNISYDYFMGWYRQAPGKERELVASINRGASTYYADSVKGRFTISRDNAKNTVYLQMNSLKPEDTAVYYCAVRLYAASYLDYWGQGTQVTVSS

SEQ ID NO: 35984 - protein, 117 aa, Artificial Sequence
  Chemically Synthesized
QVQLQESGGGLVQAGGSLRLSCAASGTIFRNGMGWYRQAPGKEREFVASIAAGTITYYADSVKGRFTISRDNAKNTVYLQMNSLKPEDTAVYYCAAHLGRDVVYDYWGQGTQVTVSS

SEQ ID NO: 35985 - protein, 122 aa, Artificial Sequence
  Chemically Synthesized
QVQLQESGGGLVQAGGSLRLSCAASGNISGAHYMGWYRQAPGKERELVATIGDGGTTNYADSVKGRFTISRDNAKNTVYLQMNSLKPEDTAVYYCAAFRGIPHTGHPFHYYWGQGTQVTVSS

SEQ ID NO: 35986 - protein, 120 aa, Artificial Sequence
  Chemically Synthesized
QVQLQESGGGLVQAGGSLRLSCAASGSISNPYYMGWYRQAPGKERELVASIALGTIYADSVKGRFTISRDNAKNTVYLQMNSLKPEDTAVYYCAVAYVKAGTRQDYLDYWGQGTQVTVSS

SEQ ID NO: 35987 - protein, 122 aa, Artificial Sequence
  Chemically Synthesized
QVQLQESGGGLVQAGGSLRLSCAASGTISGDRHMGWYRQAPGKEREFVAGIGSGANTNYADSVKGRFTISRDNAKNTVYLQMNSLKPEDTAVYYCAADQALPYYEYVSHRYWGQGTQVTVSS

SEQ ID NO: 35988 - protein, 117 aa, Artificial Sequence
  Chemically Synthesized
QVQLQESGGGLVQAGGSLRLSCAASGTISRNLSMGWYRQAPGKERELLPVLMTVVLPYADSVKGRFTISRDNAKNTVYLQMNSLKPEDTAVYYCAVNDDYGFEHDYWGQGTQVTVSS

SEQ ID NO: 35989 - protein, 122 aa, Artificial Sequence
  Chemically Synthesized
QVQLQESGGGLVQAGGSLRLSCAASGSISYLVVMGWYRQAPGKERELVAAINVGANTNYADSVKGRFTISRDNAKNTVYLQMNSLKPEDTAVYYCAAYPWIHGYPYWLHYYWGQGTQVTVSS

SEQ ID NO: 35990 - protein, 122 aa, Artificial Sequence
  Chemically Synthesized
QVQLQESGGGLVQAGGSLRLSCAASGTISYFRLMGWYRQAPGKEREFVAAIALGGTTNYADSVKGRFTISRDNAKNTVYLQMNSLKPEDTAVYYCAAYFNIVPYYVDDYYYWGQGTQVTVSS

SEQ ID NO: 35991 - protein, 110 aa, Artificial Sequence
  Chemically Synthesized
QVQLQESGGGLVQAGGSLRLSCAASGTISAETLMGWYRQAPGKERELVAAITDGSTTYYADSVKGRFTISRDNAKNTVYLQMNSLKPEDTAVYYCAVIYWGQGTQVTVSS

SEQ ID NO: 35992 - protein, 118 aa, Artificial Sequence
  Chemically Synthesized
QVQLQESGGGLVQAGGSLRLSCAASGTIFGHSDMGWYRQAPGKERELVATIGWGSSTNYADSVKGRFTISRDNAKNTVYLQMNSLKPEDTAVYYCAAYRHDTYEFAYWGQGTQVTVSS

SEQ ID NO: 35993 - protein, 118 aa, Artificial Sequence
  Chemically Synthesized
QVQLQESGGGLVQAGGSLRLSCAASGSISATTTMGWYRQAPGKERELVAAIGDGTSTNYADSVKGRFTISRDNAKNTVYLQMNSLKPEDTAVYYCAVDYDYYLRHVYWGQGTQVTVSS

SEQ ID NO: 35994 - protein, 122 aa, Artificial Sequence
  Chemically Synthesized
QVQLQESGGGLVQAGGSLRLSCAASGTIFDGYLMGWYRQAPGKEREFVATIADGATTNYADSVKGRFTISRDNAKNTVYLQMNSLKPEDTAVYYCAASPNTYDALDWDHGYWGQGTQVTVSS

SEQ ID NO: 35995 - protein, 118 aa, Artificial Sequence
  Chemically Synthesized
QVQLQESGGGLVQAGGSLRLSCAASGSIFRGGVMGWYRQAPGKEREFVAAIDIGTSTNYADSVKGRFTISRDNAKNTVYLQMNSLKPEDTAVYYCAAYYFPQIAHDYWGQGTQVTVSS

SEQ ID NO: 35996 - protein, 118 aa, Artificial Sequence
  Chemically Synthesized
QVQLQESGGGLVQAGGSLRLSCAASGTIFRATYMGWYRQAPGKEREFVATINYGATTYYADSVKGRFTISRDNAKNTVYLQMNSLKPEDTAVYYCAVTGSSNNYYDYWGQGTQVTVSS

SEQ ID NO: 35997 - protein, 112 aa, Artificial Sequence
  Chemically Synthesized
QVQLQESGGGLVQAGGSLRLSCAASGNMGWYRQAPGKEREFVASIALGSITNYADSVKGRFTISRDNAKNTVYLQMNSLKPEDTAVYYCAAQIFGNRVYYYWGQGTQVTVSS

SEQ ID NO: 35998 - protein, 118 aa, Artificial Sequence
  Chemically Synthesized
QVQLQESGGGLVQAGGSLRLSCAASGTIFRRGGMGWYRQAPGKERELVATIGWGTITYYADSVKGRFTISRDNAKNTVYLQMNSLKPEDTAVYYCAVADLTSSYHIYWGQGTQVTVSS

SEQ ID NO: 35999 - protein, 118 aa, Artificial Sequence
  Chemically Synthesized
QVQLQESGGGLVQAGGSLRLSCAASGSISLSRYMGWYRQAPGKERELVATINLLYADSVKGRFTISRDNAKNTVYLQMNSLKPEDTAVYYCAVYGYGHYDYFVQHDYWGQGTQVTVSS

SEQ ID NO: 36000 - protein, 116 aa, Artificial Sequence
  Chemically Synthesized
QVQLQESGGGLVQAGGSLRLSCAASGTISIVRSMGWYRQAPGKERELVASIKLVVLPYADSVKGRFTISRDNAKNTVYLQMNSLKPEDTAVYYCAVPDAFSYYGYWGQGTQVTVSS

SEQ ID NO: 36001 - protein, 118 aa, Artificial Sequence
  Chemically Synthesized
QVQLQESGGGLVQAGGSLRLSCAASGSISDDDIMGWYRQAPGKEREFVATIGGGAITYYADSVKGRFTISRDNAKNTVYLQMNSLKPEDTAVYYCAVFVQEFDQYDYWGQGTQVTVSS

SEQ ID NO: 36002 - protein, 121 aa, Artificial Sequence
  Chemically Synthesized
QVQLQESGGGLVQAGGSLRLSCAASGSISYYDPMGWYRQAPGKEREFVASISRGSTTNYADSVKGRFTISRDNAKNTVYLQMNSLKPEDTAVYYCAAYPTDSLFRVVTMYWGQGTQVTVSS

SEQ ID NO: 36003 - protein, 118 aa, Artificial Sequence
  Chemically Synthesized
QVQLQESGGGLVQAGGSLRLSCAASGYISNVWYMGWYRQAPGKERELVASITNGASTYYADSVKGRFTISRDNAKNTVYLQMNSLKPEDTAVYYCAALITYSYTLGYWGQGTQVTVSS

SEQ ID NO: 36004 - protein, 121 aa, Artificial Sequence
  Chemically Synthesized
QVQLQESGGGLVQAGGSLRLSCAASGYISLLLMGWYRQAPGKERELVASIDAGGTTYYADSVKGRFTISRDNAKNTVYLQMNSLKPEDTAVYYCAALRFTAFYADQQLGYWGQGTQVTVSS

SEQ ID NO: 36005 - protein, 117 aa, Artificial Sequence
  Chemically Synthesized
QVQLQESGGGLVQAGGSLRLSCAASGTISQGATMGWYRQAPGKERELVAAIDSGTNTNYADSVKGRFTISRDNAKNTVYLQMNSLKPEDTAVYYCAAYDPFASLIYWGQGTQVTVSS

SEQ ID NO: 36006 - protein, 117 aa, Artificial Sequence
  Chemically Synthesized
QVQLQESGGGLVQAGGSLRLSCAASGTIFVYGVMGWYRQAPGKEREFVATISKGGSTNYADSVKGRFTISRDNAKNTVYLQMNSLKPEDTAVYYCAVRASVVTTIYWGQGTQVTVSS

SEQ ID NO: 36007 - protein, 124 aa, Artificial Sequence
  Chemically Synthesized
QVQLQESGGGLVQAGGSLRLSCAASGNISPHPPMGWYRQAPGKERELVAAINGGGTTNYADSVKGRFTISRDNAKNTVYLQMNSLKPEDTAVYYCAARYDVGETWRSNYGYAYWGQGTQVTVSS

SEQ ID NO: 36008 - protein, 117 aa, Artificial Sequence
  Chemically Synthesized
QVQLQESGGGLVQAGGSLRLSCAASGSISSFDTMGWYRQAPGKERELVAGIADGTTTYYADSVKGRFTISRDNAKNTVYLQMNSLKPEDTAVYYCAATRLLVGTLYWGQGTQVTVSS

SEQ ID NO: 36009 - protein, 118 aa, Artificial Sequence
  Chemically Synthesized
QVQLQESGGGLVQAGGSLRLSCAASGTISDWTYMGWYRQAPGKERELVAAINTGGTTYYADSVKGRFTISRDNAKNTVYLQMNSLKPEDTAVYYCAVWADNRGAYGYWGQGTQVTVSS

SEQ ID NO: 36010 - protein, 122 aa, Artificial Sequence
  Chemically Synthesized
QVQLQESGGGLVQAGGSLRLSCAASGTIFQYQDMGWYRQAPGKEREFVASIAYGGTTNYADSVKGRFTISRDNAKNTVYLQMNSLKPEDTAVYYCAAGPWADYAKPGGHPYWGQGTQVTVSS

SEQ ID NO: 36011 - protein, 122 aa, Artificial Sequence
  Chemically Synthesized
QVQLQESGGGLVQAGGSLRLSCAASGNISRDYVMGWYRQAPGKERELVATISHGGTTNYADSVKGRFTISRDNAKNTVYLQMNSLKPEDTAVYYCAVIYGSDVYDPRQLFYWGQGTQVTVSS

SEQ ID NO: 36012 - protein, 122 aa, Artificial Sequence
  Chemically Synthesized
QVQLQESGGGLVQAGGSLRLSCAASGNISDRYAMGWYRQAPGKEREFVAAIGIGATTYYADSVKGRFTISRDNAKNTVYLQMNSLKPEDTAVYYCAAERPHDVKTGGWLDYWGQGTQVTVSS

SEQ ID NO: 36013 - protein, 116 aa, Artificial Sequence
  Chemically Synthesized
QVQLQESGGGLVQAGGSLRLSCAASGTIMGWYRQAPGKEREFVAGITIGASTYYADSVKGRFTISRDNAKNTVYLQMNSLKPEDTAVYYCAVPSSTTCLTTTTIYWGQGTQVTVSS

SEQ ID NO: 36014 - protein, 118 aa, Artificial Sequence
  Chemically Synthesized
QVQLQESGGGLVQAGGSLRLSCAASGSIFVEWGMGWYRQAPGKEREFVAGINGGGTTNYADSVKGRFTISRDNAKNTVYLQMNSLKPEDTAVYYCAVSVQYEDDHRYWGQGTQVTVSS

SEQ ID NO: 36015 - protein, 117 aa, Artificial Sequence
  Chemically Synthesized
QVQLQESGGGLVQAGGSLRLSCAASGSISEDDDMGWYRQAPGKERELLPLLLKVVLPYADSVKGRFTISRDNAKNTVYLQMNSLKPEDTAVYYCAAGIQVGRGHTYWGQGTQVTVSS

SEQ ID NO: 36016 - protein, 117 aa, Artificial Sequence
  Chemically Synthesized
QVQLQESGGGLVQAGGSLRLSCAASGTIFRPADMGWYRQAPGKERELVAGISQGTNTNYADSVKGRFTISRDNAKNTVYLQMNSLKPEDTAVYYCAVDNTWREHRYWGQGTQVTVSS

SEQ ID NO: 36017 - protein, 126 aa, Artificial Sequence
  Chemically Synthesized
QVQLQESGGGLVQAGGSLRLSCAASGSISQGYDMGWYRQAPGKERELVASIGYGTSTNYADSVKGRFTISRDNAKNTVYLQMNSLKPEDTAVYYCAASDDVSVTTDGDPRTGFDYWGQGTQVTVSS

SEQ ID NO: 36018 - protein, 121 aa, Artificial Sequence
  Chemically Synthesized
QVQLQESGGGLVQAGGSLRLSCAASGSISYTDMGWYRQAPGKERELVASIAFGGNTNYADSVKGRFTISRDNAKNTVYLQMNSLKPEDTAVYYCAAHTDVAYGADEHHSYWGQGTQVTVSS

SEQ ID NO: 36019 - protein, 117 aa, Artificial Sequence
  Chemically Synthesized
QVQLQESGGGLVQAGGSLRLSCAASGSIFYGDDMGWYRQAPGKEREFVATISRGTNTNYADSVKGRFTISRDNAKNTVYLQMNSLKPEDTAVYYCAVIQGLDYYLYWGQGTQVTVSS

SEQ ID NO: 36020 - protein, 117 aa, Artificial Sequence
  Chemically Synthesized
QVQLQESGGGLVQAGGSLRLSCAASGNIFYYDPMGWYRQAPGKERELVATINSVLLPYADSVKGRFTISRDNAKNTVYLQMNSLKPEDTAVYYCAVARPFSLRFYYWGQGTQVTVSS

SEQ ID NO: 36021 - protein, 118 aa, Artificial Sequence
  Chemically Synthesized
QVQLQESGGGLVQAGGSLRLSCAASGNIFPVDWMGWYRQAPGKEREFVAAITDGTNTYYADSVKGRFTISRDNAKNTVYLQMNSLKPEDTAVYYCAAYNWVRDPHGYWGQGTQVTVSS

SEQ ID NO: 36022 - protein, 118 aa, Artificial Sequence
  Chemically Synthesized
QVQLQESGGGLVQAGGSLRLSCAASGTIFGSYGMGWYRQAPGKERELVASISSGASTNYADSVKGRFTISRDNAKNTVYLQMNSLKPEDTAVYYCAAYQARRSDHDYWGQGTQVTVSS

SEQ ID NO: 36023 - protein, 118 aa, Artificial Sequence
  Chemically Synthesized
QVQLQESGGGLVQAGGSLRLSCAASGTISRDPYMGWYRQAPGKERELVAGIASGANTYYADSVKGRFTISRDNAKNTVYLQMNSLKPEDTAVYYCAVTRRTLYIHSYWGQGTQVTVSS

SEQ ID NO: 36024 - protein, 123 aa, Artificial Sequence
  Chemically Synthesized
QVQLQESGGGLVQAGGSLRLSCAASGYISDRSVMGWYRQAPGKEREFVAGIGEGGNTYYADSVKGRFTISRDNAKNTVYLQMNSLKPEDTAVYYCAVWGLTDYAYGVTYLLYWGQGTQVTVSS

SEQ ID NO: 36025 - protein, 118 aa, Artificial Sequence
  Chemically Synthesized
QVQLQESGGGLVQAGGSLRLSCAASGNISLSDSMGWYRQAPGKERELVAGISIGATTNYADSVKGRFTISRDNAKNTVYLQMNSLKPEDTAVYYCAVRRTSGDVYYYWGQGTQVTVSS

SEQ ID NO: 36026 - protein, 118 aa, Artificial Sequence
  Chemically Synthesized
QVQLQESGGGLVQAGGSLRLSCAASGTISGTYYMGWYRQAPGKERELVASIGTGSSTYYADSVKGRFTISRDNAKNTVYLQMNSLKPEDTAVYYCAVRSYSSASHTYWGQGTQVTVSS

SEQ ID NO: 36027 - protein, 118 aa, Artificial Sequence
  Chemically Synthesized
QVQLQESGGGLVQAGGSLRLSCAASGNISLLDNMGWYRQAPGKERELVATITYGSTTNYADSVKGRFTISRDNAKNTVYLQMNSLKPEDTAVYYCAATSQGREQHYYWGQGTQVTVSS

SEQ ID NO: 36028 - protein, 122 aa, Artificial Sequence
  Chemically Synthesized
QVQLQESGGGLVQAGGSLRLSCAASGTIFDSWSMGWYRQAPGKEREFVASIGHGTNTNYADSVKGRFTISRDNAKNTVYLQMNSLKPEDTAVYYCAAYGHYGQIDAPWLYYWGQGTQVTVSS

SEQ ID NO: 36029 - protein, 118 aa, Artificial Sequence
  Chemically Synthesized
QVQLQESGGGLVQAGGSLRLSCAASGTISVPWFMGWYRQAPGKEREFVAGIAAGANTYYADSVKGRFTISRDNAKNTVYLQMNSLKPEDTAVYYCAVDDPFYDRHPYWGQGTQVTVSS

SEQ ID NO: 36030 - protein, 112 aa, Artificial Sequence
  Chemically Synthesized
QVQLQESGGGLVQAGGSLRLSCAASGTISGYVGMGWYRQAPGKERELVATIDGGSTYYADSVKGRFTISRDNAKNTVYLQMNSLKPEDTAVYYCAVITTIYWGQGTQVTVSS

SEQ ID NO: 36031 - protein, 122 aa, Artificial Sequence
  Chemically Synthesized
QVQLQESGGGLVQAGGSLRLSCAASGNISPDTYMGWYRQAPGKEREFVASISTGSNTNYADSVKGRFTISRDNAKNTVYLQMNSLKPEDTAVYYCAVRFADNVWDDAYHVYWGQGTQVTVSS

SEQ ID NO: 36032 - protein, 118 aa, Artificial Sequence
  Chemically Synthesized
QVQLQESGGGLVQAGGSLRLSCAASGTISDGRYMGWYRQAPGKERELVATITSGANTNYADSVKGRFTISRDNAKNTVYLQMNSLKPEDTAVYYCAAQGIPDRLHDYWGQGTQVTVSS

SEQ ID NO: 36033 - protein, 112 aa, Artificial Sequence
  Chemically Synthesized
QVQLQESGGGLVQAGGSLRLSCAASGNISYGAMGWYRQAPGKEREFVAGIDDGGSTYYADSVKGRFTISRDNAKNTVYLQMNSLKPEDTAVYYCAYYQYPYWGQGTQVTVSS

SEQ ID NO: 36034 - protein, 117 aa, Artificial Sequence
  Chemically Synthesized
QVQLQESGGGLVQAGGSLRLSCAASGYIFFYNSMGWYRQAPGKERELVAGIDSVLLPYADSVKGRFTISRDNAKNTVYLQMNSLKPEDTAVYYCAANWHYRPGHYYWGQGTQVTVSS

SEQ ID NO: 36035 - protein, 122 aa, Artificial Sequence
  Chemically Synthesized
QVQLQESGGGLVQAGGSLRLSCAASGSIFYTDGMGWYRQAPGKERELVASIGTGAITYYADSVKGRFTISRDNAKNTVYLQMNSLKPEDTAVYYCAAIEYGTAPWYYAYAYWGQGTQVTVSS

SEQ ID NO: 36036 - protein, 116 aa, Artificial Sequence
  Chemically Synthesized
QVQLQESGGGLVQAGGSLRLSCAASGNISDGITMGWYRQAPGKERELVAGIGYGGSTNYADSVKGRFTISRDNAKNTVYLQMNSLKPEDTAVYYCAARSYGTTIYWGQGTQVTVSS

SEQ ID NO: 36037 - protein, 118 aa, Artificial Sequence
  Chemically Synthesized
QVQLQESGGGLVQAGGSLRLSCAASGTISDTALMGWYRQAPGKERELVATIAGGANTYYADSVKGRFTISRDNAKNTVYLQMNSLKPEDTAVYYCAVTYDAHGGLGYWGQGTQVTVSS

SEQ ID NO: 36038 - protein, 118 aa, Artificial Sequence
  Chemically Synthesized
QVQLQESGGGLVQAGGSLRLSCAASGSISAQYAMGWYRQAPGKERELVAAINGGGTTYYADSVKGRFTISRDNAKNTVYLQMNSLKPEDTAVYYCAAESWYTARHSYWGQGTQVTVSS

SEQ ID NO: 36039 - protein, 115 aa, Artificial Sequence
  Chemically Synthesized
QVQLQESGGGLVQAGGSLRLSCAASGNISYAYGMGWYRQAPGKEREFVATIAYGTSTYYADSVKGRFTISRDNAKNTVYLQMNSLKPEDTAVYYCAVRTGWHRYWGQGTQVTVSS

SEQ ID NO: 36040 - protein, 118 aa, Artificial Sequence
  Chemically Synthesized
QVQLQESGGGLVQAGGSLRLSCAASGNIFPHTYMGWYRQAPGKERELVAGITYGTITNYADSVKGRFTISRDNAKNTVYLQMNSLKPEDTAVYYCAVRPPWYYSHSYWGQGTQVTVSS

SEQ ID NO: 36041 - protein, 121 aa, Artificial Sequence
  Chemically Synthesized
QVQLQESGGGLVQAGGSLRLSCAASGTIFADDDMGWYRQAPGKEREFVAAIDDGTTTNYADSVKGRFTISRDNAKNTVYLQMNSLKPEDTAVYYCAASIDWLTTLRCTMYWGQGTQVTVSS

SEQ ID NO: 36042 - protein, 125 aa, Artificial Sequence
  Chemically Synthesized
QVQLQESGGGLVQAGGSLRLSCAASGYISEGDRMGWYRQAPGKERELVASISGSITYYADSVKGRFTISRDNAKNTVYLQMNSLKPEDTAVYYCAVYYTYDKADDFWFSSYYAYWGQGTQVTVSS

SEQ ID NO: 36043 - protein, 118 aa, Artificial Sequence
  Chemically Synthesized
QVQLQESGGGLVQAGGSLRLSCAASGSIFKSHYMGWYRQAPGKEREFVAGIGGGTSTNYADSVKGRFTISRDNAKNTVYLQMNSLKPEDTAVYYCAVRASVSYELAYWGQGTQVTVSS

SEQ ID NO: 36044 - protein, 122 aa, Artificial Sequence
  Chemically Synthesized
QVQLQESGGGLVQAGGSLRLSCAASGSIFVVWYMGWYRQAPGKERELVASIGLGTNTNYADSVKGRFTISRDNAKNTVYLQMNSLKPEDTAVYYCAVIYYDRVLYDDLYSYWGQGTQVTVSS

SEQ ID NO: 36045 - protein, 118 aa, Artificial Sequence
  Chemically Synthesized
QVQLQESGGGLVQAGGSLRLSCAASGTIFRKRGMGWYRQAPGKEREFVAAINYGSSTYYADSVKGRFTISRDNAKNTVYLQMNSLKPEDTAVYYCAVRTFGAYSHFYWGQGTQVTVSS

SEQ ID NO: 36046 - protein, 127 aa, Artificial Sequence
  Chemically Synthesized
QVQLQESGGGLVQAGGSLRLSCAASGTISSIPLMGWYRQAPGKERELVATINVGGTSTNYADSVKGRFTISRDNAKNTVYLQMNSLKPEDTAVYYCAVEARRTYDPYLPGKRGLDYWGQGTQVTVSS

SEQ ID NO: 36047 - protein, 119 aa, Artificial Sequence
  Chemically Synthesized
QVQLQESGGGLVQAGGSLRLSCAASGSIFRDYDMGWYRQAPGKEREFVAAITLGASTYYADSVKGRFTISRDNAKNTVYLQMNSLKPEDTAVYYCAAKIDYNRDGHTYWGQGTQVTVSS

SEQ ID NO: 36048 - protein, 117 aa, Artificial Sequence
  Chemically Synthesized
QVQLQESGGGLVQAGGSLRLSCAASGYIFKVSMGWYRQAPGKEREFVATISGGSSTNYADSVKGRFTISRDNAKNTVYLQMNSLKPEDTAVYYCAVWYPAGLFHQYWGQGTQVTVSS

SEQ ID NO: 36049 - protein, 126 aa, Artificial Sequence
  Chemically Synthesized
QVQLQESGGGLVQAGGSLRLSCAASGSIFVLFYMGWYRQAPGKERELVATIGAGANTNYADSVKGRFTISRDNAKNTVYLQMNSLKPEDTAVYYCAADHTIPGDYLFAILAPHYYWGQGTQVTVSS

SEQ ID NO: 36050 - protein, 122 aa, Artificial Sequence
  Chemically Synthesized
QVQLQESGGGLVQAGGSLRLSCAASGNIFANTSMGWYRQAPGKEREFVATITYGSITNYADSVKGRFTISRDNAKNTVYLQMNSLKPEDTAVYYCAVPGQGTYPRSSALGYWGQGTQVTVSS

SEQ ID NO: 36051 - protein, 117 aa, Artificial Sequence
  Chemically Synthesized
QVQLQESGGGLVQAGGSLRLSCAASGNISQDSDMGWYRQAPGKEREFVASISTGATTYYADSVKGRFTISRDNAKNTVYLQMNSLKPEDTAVYYCAAYSQQVSLIYWGQGTQVTVSS

SEQ ID NO: 36052 - protein, 122 aa, Artificial Sequence
  Chemically Synthesized
QVQLQESGGGLVQAGGSLRLSCAASGTISRDFYMGWYRQAPGKEREFVAAINYGATTNYADSVKGRFTISRDNAKNTVYLQMNSLKPEDTAVYYCAVYNWSAQDWILLPYYWGQGTQVTVSS

SEQ ID NO: 36053 - protein, 122 aa, Artificial Sequence
  Chemically Synthesized
QVQLQESGGGLVQAGGSLRLSCAASGYIFTAGLMGWYRQAPGKERELVAAISSGGSTYYADSVKGRFTISRDNAKNTVYLQMNSLKPEDTAVYYCAVRYLLDDEDGYGHDYWGQGTQVTVSS

SEQ ID NO: 36054 - protein, 117 aa, Artificial Sequence
  Chemically Synthesized
QVQLQESGGGLVQAGGSLRLSCAASGYILFRLMGWYRQAPGKEREFVASIGLGAITYYADSVKGRFTISRDNAKNTVYLQMNSLKPEDTAVYYCAAGTADDKGHGYWGQGTQVTVSS

SEQ ID NO: 36055 - protein, 118 aa, Artificial Sequence
  Chemically Synthesized
QVQLQESGGGLVQAGGSLRLSCAASGTIFQAYIMGWYRQAPGKEREFVAGIGRGTNTNYADSVKGRFTISRDNAKNTVYLQMNSLKPEDTAVYYCAVNRDWSDYFPYWGQGTQVTVSS

SEQ ID NO: 36056 - protein, 122 aa, Artificial Sequence
  Chemically Synthesized
QVQLQESGGGLVQAGGSLRLSCAASGTISTYITMGWYRQAPGKERELVASITPGTSTNYADSVKGRFTISRDNAKNTVYLQMNSLKPEDTAVYYCAAHGNVQPILIRDLGYWGQGTQVTVSS

SEQ ID NO: 36057 - protein, 125 aa, Artificial Sequence
  Chemically Synthesized
QVQLQESGGGLVQAGGSLRLSCAASGTIFLYLLMGWYRQAPGKERELVAGIADGSITNYADSVKGRFTISRDNAKNTVYLQMNSLKPEDTAVYYCAVDTRLSCTLVVTMTTVIYWGQGTQVTVSS

SEQ ID NO: 36058 - protein, 122 aa, Artificial Sequence
  Chemically Synthesized
QVQLQESGGGLVQAGGSLRLSCAASGSIFYAYAMGWYRQAPGKERELVATIAHGTSTYYADSVKGRFTISRDNAKNTVYLQMNSLKPEDTAVYYCAVDDYYRPKEESEHDYWGQGTQVTVSS

SEQ ID NO: 36059 - protein, 117 aa, Artificial Sequence
  Chemically Synthesized
QVQLQESGGGLVQAGGSLRLSCAASGYISYIHYMGWYRQAPGKERELLPLLLSVLVPYADSVKGRFTISRDNAKNTVYLQMNSLKPEDTAVYYCAARTFRGGRHTYWGQGTQVTVSS

SEQ ID NO: 36060 - protein, 121 aa, Artificial Sequence
  Chemically Synthesized
QVQLQESGGGLVQAGGSLRLSCAASGNISYGTAMGWYRQAPGKERELVAGIAAGTSTYYADSVKGRFTISRDNAKNTVYLQMNSLKPEDTAVYYCAADAHYAPSLGTVIYWGQGTQVTVSS

SEQ ID NO: 36061 - protein, 126 aa, Artificial Sequence
  Chemically Synthesized
QVQLQESGGGLVQAGGSLRLSCAASGSIFQSYWMGWYRQAPGKERELVATIGYGTNTNYADSVKGRFTISRDNAKNTVYLQMNSLKPEDTAVYYCAADDFAHDPDQGVGRYRFYYWGQGTQVTVSS

SEQ ID NO: 36062 - protein, 121 aa, Artificial Sequence
  Chemically Synthesized
QVQLQESGGGLVQAGGSLRLSCAASGTIFASCMGWYRQAPGKEREFVAAIGNGGTTYYADSVKGRFTISRDNAKNTVYLQMNSLKPEDTAVYYCAVDGYATVYDYGSYYYWGQGTQVTVSS

SEQ ID NO: 36063 - protein, 118 aa, Artificial Sequence
  Chemically Synthesized
QVQLQESGGGLVQAGGSLRLSCAASGNISTFRHMGWYRQAPGKEREFVAGISFGANTYYADSVKGRFTISRDNAKNTVYLQMNSLKPEDTAVYYCAVGGGAYKPYAYWGQGTQVTVSS

SEQ ID NO: 36064 - protein, 110 aa, Artificial Sequence
  Chemically Synthesized
QVQLQESGGGLVQAGGSLRLSCAASGNIFDLLIMGWYRQAPGKEREFVASIDGGTSTNYADSVKGRFTISRDNAKNTVYLQMNSLKPEDTAVYYCAYYYWGQGTQVTVSS

SEQ ID NO: 36065 - protein, 118 aa, Artificial Sequence
  Chemically Synthesized
QVQLQESGGGLVQAGGSLRLSCAASGSIFDYYSMGWYRQAPGKEREFVASIGRGATTYYADSVKGRFTISRDNAKNTVYLQMNSLKPEDTAVYYCAAYAIGAPGLLYWGQGTQVTVSS

SEQ ID NO: 36066 - protein, 115 aa, Artificial Sequence
  Chemically Synthesized
QVQLQESGGGLVQAGGSLRLSCAASGYIFRYPDMGWYRQAPGKERELVATIAYGGSTYYADSVKGRFTISRDNAKNTVYLQMNSLKPEDTAVYYCAATRYYFYYWGQGTQVTVSS

SEQ ID NO: 36067 - protein, 122 aa, Artificial Sequence
  Chemically Synthesized
QVQLQESGGGLVQAGGSLRLSCAASGYISFPYYMGWYRQAPGKERELVATIALGGITNYADSVKGRFTISRDNAKNTVYLQMNSLKPEDTAVYYCAANEYRYRWLYSYHSYWGQGTQVTVSS

SEQ ID NO: 36068 - protein, 121 aa, Artificial Sequence
  Chemically Synthesized
QVQLQESGGGLVQAGGSLRLSCAASGYISLGTMGWYRQAPGKERELVASINIGSTTNYADSVKGRFTISRDNAKNTVYLQMNSLKPEDTAVYYCAAENSGRVPAYDGFNYWGQGTQVTVSS

SEQ ID NO: 36069 - protein, 122 aa, Artificial Sequence
  Chemically Synthesized
QVQLQESGGGLVQAGGSLRLSCAASGTISYTYDMGWYRQAPGKERELVASIGAGTTTNYADSVKGRFTISRDNAKNTVYLQMNSLKPEDTAVYYCAALRTFDYDQAPTFVYWGQGTQVTVSS

SEQ ID NO: 36070 - protein, 118 aa, Artificial Sequence
  Chemically Synthesized
QVQLQESGGGLVQAGGSLRLSCAASGNIFDSYVMGWYRQAPGKERELVATIAWGTITNYADSVKGRFTISRDNAKNTVYLQMNSLKPEDTAVYYCAAQPYTYGGHGYWGQGTQVTVSS

SEQ ID NO: 36071 - protein, 118 aa, Artificial Sequence
  Chemically Synthesized
QVQLQESGGGLVQAGGSLRLSCAASGYIFKSDYMGWYRQAPGKEREFVAGIADGGITYYADSVKGRFTISRDNAKNTVYLQMNSLKPEDTAVYYCAVEYGRFSDLYYWGQGTQVTVSS

SEQ ID NO: 36072 - protein, 117 aa, Artificial Sequence
  Chemically Synthesized
QVQLQESGGGLVQAGGSLRLSCAASGYISPLYEMGWYRQAPGKERELVATIDPGGTTNYADSVKGRFTISRDNAKNTVYLQMNSLKPEDTAVYYCAAIRHVYTHVYWGQGTQVTVSS

SEQ ID NO: 36073 - protein, 118 aa, Artificial Sequence
  Chemically Synthesized
QVQLQESGGGLVQAGGSLRLSCAASGNISYADLMGWYRQAPGKEREFVATISWGSITNYADSVKGRFTISRDNAKNTVYLQMNSLKPEDTAVYYCAAYRLPRTGLGYWGQGTQVTVSS

SEQ ID NO: 36074 - protein, 121 aa, Artificial Sequence
  Chemically Synthesized
QVQLQESGGGLVQAGGSLRLSCAASGYIFYSTMGWYRQAPGKERELVAGIAYGTSTNYADSVKGRFTISRDNAKNTVYLQMNSLKPEDTAVYYCAVTRTDDSDYYDYHYYWGQGTQVTVSS

SEQ ID NO: 36075 - protein, 118 aa, Artificial Sequence
  Chemically Synthesized
QVQLQESGGGLVQAGGSLRLSCAASGYISNRHRMGWYRQAPGKEREFVAGINGGSTTNYADSVKGRFTISRDNAKNTVYLQMNSLKPEDTAVYYCAATNGRTWDYQYWGQGTQVTVSS

SEQ ID NO: 36076 - protein, 119 aa, Artificial Sequence
  Chemically Synthesized
QVQLQESGGGLVQAGGSLRLSCAASGNISRGDVMGWYRQAPGKERELPLLILVLIPYADSVKGRFTISRDNAKNTVYLQMNSLKPEDTAVYYCAVDTYPFVTYYYHDYWGQGTQVTVSS

SEQ ID NO: 36077 - protein, 117 aa, Artificial Sequence
  Chemically Synthesized
QVQLQESGGGLVQAGGSLRLSCAASGYISGAPYMGWYRQAPGKERELVATIARGGNTNYADSVKGRFTISRDNAKNTVYLQMNSLKPEDTAVYYCAAHDDSLWSFYWGQGTQVTVSS

SEQ ID NO: 36078 - protein, 118 aa, Artificial Sequence
  Chemically Synthesized
QVQLQESGGGLVQAGGSLRLSCAASGYIFADRGMGWYRQAPGKEREFVAAINEGTTTNYADSVKGRFTISRDNAKNTVYLQMNSLKPEDTAVYYCAVDDIGVDPHPYWGQGTQVTVSS

SEQ ID NO: 36079 - protein, 121 aa, Artificial Sequence
  Chemically Synthesized
QVQLQESGGGLVQAGGSLRLSCAASGTISNAHYMGWYRQAPGKERELLPLLMTVLIPYADSVKGRFTISRDNAKNTVYLQMNSLKPEDTAVYYCAAHAPYTQYTFKHHYYWGQGTQVTVSS

SEQ ID NO: 36080 - protein, 122 aa, Artificial Sequence
  Chemically Synthesized
QVQLQESGGGLVQAGGSLRLSCAASGTISRNYAMGWYRQAPGKEREFVAAIDGGGNTYYADSVKGRFTISRDNAKNTVYLQMNSLKPEDTAVYYCAVGANVRDYYLYRHDYWGQGTQVTVSS

SEQ ID NO: 36081 - protein, 118 aa, Artificial Sequence
  Chemically Synthesized
QVQLQESGGGLVQAGGSLRLSCAASGNISGFISMGWYRQAPGKEREFVAGITSGTSTNYADSVKGRFTISRDNAKNTVYLQMNSLKPEDTAVYYCAARGNGGLDFLYWGQGTQVTVSS

SEQ ID NO: 36082 - protein, 118 aa, Artificial Sequence
  Chemically Synthesized
QVQLQESGGGLVQAGGSLRLSCAASGTISLVDGMGWYRQAPGKERELVATIGSGAITNYADSVKGRFTISRDNAKNTVYLQMNSLKPEDTAVYYCAATEPNDWHLTYWGQGTQVTVSS

SEQ ID NO: 36083 - protein, 117 aa, Artificial Sequence
  Chemically Synthesized
QVQLQESGGGLVQAGGSLRLSCAASGNIFYSDDMGWYRQAPGKERELVAGITDGGITNYADSVKGRFTISRDNAKNTVYLQMNSLKPEDTAVYYCAFTLGTVNLIYWGQGTQVTVSS

SEQ ID NO: 36084 - protein, 118 aa, Artificial Sequence
  Chemically Synthesized
QVQLQESGGGLVQAGGSLRLSCAASGSISYPASMGWYRQAPGKERELVASISYGATTNYADSVKGRFTISRDNAKNTVYLQMNSLKPEDTAVYYCAATDVADHRLVYWGQGTQVTVSS

SEQ ID NO: 36085 - protein, 114 aa, Artificial Sequence
  Chemically Synthesized
QVQLQESGGGLVQAGGSLRLSCAASGTISVGYDMGWYRQAPGKEREFVASIGPGSSTYYADSVKGRFTISRDNAKNTVYLQMNSLKPEDTAVYYCAGPVYHGYWGQGTQVTVSS

SEQ ID NO: 36086 - protein, 118 aa, Artificial Sequence
  Chemically Synthesized
QVQLQESGGGLVQAGGSLRLSCAASGYISERYHMGWYRQAPGKEREFVAGIGYGGITNYADSVKGRFTISRDNAKNTVYLQMNSLKPEDTAVYYCAANLYSKKVHGYWGQGTQVTVSS

SEQ ID NO: 36087 - protein, 122 aa, Artificial Sequence
  Chemically Synthesized
QVQLQESGGGLVQAGGSLRLSCAASGYISYFDFMGWYRQAPGKERELVASISYGGNTYYADSVKGRFTISRDNAKNTVYLQMNSLKPEDTAVYYCAAYAGSLLDGPPVHYYWGQGTQVTVSS

SEQ ID NO: 36088 - protein, 118 aa, Artificial Sequence
  Chemically Synthesized
QVQLQESGGGLVQAGGSLRLSCAASGNISDGPYMGWYRQAPGKERELVATITDGSITNYADSVKGRFTISRDNAKNTVYLQMNSLKPEDTAVYYCAAKYAADYHHSYWGQGTQVTVSS

SEQ ID NO: 36089 - protein, 123 aa, Artificial Sequence
  Chemically Synthesized
QVQLQESGGGLVQAGGSLRLSCAASGYIFAWGYMGWYRQAPGKERELVAGISNGATTYYADSVKGRFTISRDNAKNTVYLQMNSLKPEDTAVYYCAVRYSYVPGLDDYYFRYWGQGTQVTVSS

SEQ ID NO: 36090 - protein, 118 aa, Artificial Sequence
  Chemically Synthesized
QVQLQESGGGLVQAGGSLRLSCAASGTIFQARSMGWYRQAPGKERELVAAITGGGTTYYADSVKGRFTISRDNAKNTVYLQMNSLKPEDTAVYYCAAAPNYAAPYPYWGQGTQVTVSS

SEQ ID NO: 36091 - protein, 122 aa, Artificial Sequence
  Chemically Synthesized
QVQLQESGGGLVQAGGSLRLSCAASGSISYSTSMGWYRQAPGKERELVATIDYGTITNYADSVKGRFTISRDNAKNTVYLQMNSLKPEDTAVYYCAVYYTGYRVPQPYHRYWGQGTQVTVSS

SEQ ID NO: 36092 - protein, 117 aa, Artificial Sequence
  Chemically Synthesized
QVQLQESGGGLVQAGGSLRLSCAASGNISQTRRMGWYRQAPGKEREFVAAIGGGASTNYADSVKGRFTISRDNAKNTVYLQMNSLKPEDTAVYYCAASTNSTTTIYWGQGTQVTVSS

SEQ ID NO: 36093 - protein, 121 aa, Artificial Sequence
  Chemically Synthesized
QVQLQESGGGLVQAGGSLRLSCAASGTISAYDDMGWYRQAPGKERELVAAIDVGVLPYADSVKGRFTISRDNAKNTVYLQMNSLKPEDTAVYYCAAEDQVGDDYGGLFRYWGQGTQVTVSS

SEQ ID NO: 36094 - protein, 115 aa, Artificial Sequence
  Chemically Synthesized
QVQLQESGGGLVQAGGSLRLSCAASGTIFADPDMGWYRQAPGKEREFVAAINFGTTTNYADSVKGRFTISRDNAKNTVYLQMNSLKPEDTAVYYCAAAGETHGYWGQGTQVTVSS

SEQ ID NO: 36095 - protein, 118 aa, Artificial Sequence
  Chemically Synthesized
QVQLQESGGGLVQAGGSLRLSCAASGYIFIVFIMGWYRQAPGKERELVATIDTGSSTYYADSVKGRFTISRDNAKNTVYLQMNSLKPEDTAVYYCAAEEGIGQEYYYWGQGTQVTVSS

SEQ ID NO: 36096 - protein, 122 aa, Artificial Sequence
  Chemically Synthesized
QVQLQESGGGLVQAGGSLRLSCAASGNISYYRPMGWYRQAPGKERELVASINFGGNTNYADSVKGRFTISRDNAKNTVYLQMNSLKPEDTAVYYCAVTGTADYVDHQSYGYWGQGTQVTVSS

SEQ ID NO: 36097 - protein, 118 aa, Artificial Sequence
  Chemically Synthesized
QVQLQESGGGLVQAGGSLRLSCAASGYIFGDPTMGWYRQAPGKERELVAGIGIGAITYYADSVKGRFTISRDNAKNTVYLQMNSLKPEDTAVYYCAANGDDLYLLYYWGQGTQVTVSS

SEQ ID NO: 36098 - protein, 120 aa, Artificial Sequence
  Chemically Synthesized
QVQLQESGGGLVQAGGSLRLSCAASGYISIYDYMGWYRQAPGKEREFPLLITVVLPYADSVKGRFTISRDNAKNTVYLQMNSLKPEDTAVYYCAVGYVSHGDYYTTHTYWGQGTQVTVSS

SEQ ID NO: 36099 - protein, 116 aa, Artificial Sequence
  Chemically Synthesized
QVQLQESGGGLVQAGGSLRLSCAASGNIFNGGYMGWYRQAPGKERELLPVLMVVLIPYADSVKGRFTISRDNAKNTVYLQMNSLKPEDTAVYYCAAQQWGVYHAYWGQGTQVTVSS

SEQ ID NO: 36100 - protein, 121 aa, Artificial Sequence
  Chemically Synthesized
QVQLQESGGGLVQAGGSLRLSCAASGYISRYATMGWYRQAPGKERELVATISAVVLPYADSVKGRFTISRDNAKNTVYLQMNSLKPEDTAVYYCAVSDIAIRYDYYWYLYWGQGTQVTVSS

SEQ ID NO: 36101 - protein, 111 aa, Artificial Sequence
  Chemically Synthesized
QVQLQESGGGLVQAGGSLRLSCAASGSISTSHYMGWYRQAPGKERELVATISNGSTYYADSVKGRFTISRDNAKNTVYLQMNSLKPEDTAVYYCAARSLYWGQGTQVTVSS

SEQ ID NO: 36102 - protein, 118 aa, Artificial Sequence
  Chemically Synthesized
QVQLQESGGGLVQAGGSLRLSCAASGSISYEYIMGWYRQAPGKERELVAGIADGAITNYADSVKGRFTISRDNAKNTVYLQMNSLKPEDTAVYYCAVPYGPDDDLTYWGQGTQVTVSS

SEQ ID NO: 36103 - protein, 118 aa, Artificial Sequence
  Chemically Synthesized
QVQLQESGGGLVQAGGSLRLSCAASGTISSYNDMGWYRQAPGKERELVASIDTGTSTNYADSVKGRFTISRDNAKNTVYLQMNSLKPEDTAVYYCAAGLYYRDGLDYWGQGTQVTVSS

SEQ ID NO: 36104 - protein, 126 aa, Artificial Sequence
  Chemically Synthesized
QVQLQESGGGLVQAGGSLRLSCAASGTIFRFVEMGWYRQAPGKERELVATIATGGITYYADSVKGRFTISRDNAKNTVYLQMNSLKPEDTAVYYCAVGYGDDDFTFVDRYVDHLYWGQGTQVTVSS

SEQ ID NO: 36105 - protein, 124 aa, Artificial Sequence
  Chemically Synthesized
QVQLQESGGGLVQAGGSLRLSCAASGYISNSPGMGWYRQAPGKERELVAAITVGSNTNYADSVKGRFTISRDNAKNTVYLQMNSLKPEDTAVYYCAARGAAGYSGPKAYYYTYWGQGTQVTVSS

SEQ ID NO: 36106 - protein, 118 aa, Artificial Sequence
  Chemically Synthesized
QVQLQESGGGLVQAGGSLRLSCAASGNISYTRYMGWYRQAPGKEREFVATINSGSNTYYADSVKGRFTISRDNAKNTVYLQMNSLKPEDTAVYYCAARTPFSVLHPYWGQGTQVTVSS

SEQ ID NO: 36107 - protein, 126 aa, Artificial Sequence
  Chemically Synthesized
QVQLQESGGGLVQAGGSLRLSCAASGNISTNYKMGWYRQAPGKEREFVATIDAGGNTNYADSVKGRFTISRDNAKNTVYLQMNSLKPEDTAVYYCAAGVADYTAADRRADRPYQYWGQGTQVTVSS

SEQ ID NO: 36108 - protein, 118 aa, Artificial Sequence
  Chemically Synthesized
QVQLQESGGGLVQAGGSLRLSCAASGNIFVLFQMGWYRQAPGKEREFVAAISVGTITYYADSVKGRFTISRDNAKNTVYLQMNSLKPEDTAVYYCAAYTLPFAGYRYWGQGTQVTVSS

SEQ ID NO: 36109 - protein, 122 aa, Artificial Sequence
  Chemically Synthesized
QVQLQESGGGLVQAGGSLRLSCAASGSIFAYLGMGWYRQAPGKERELVAAIALGASTYYADSVKGRFTISRDNAKNTVYLQMNSLKPEDTAVYYCAALSGSYVGYDFPHSYWGQGTQVTVSS

SEQ ID NO: 36110 - protein, 118 aa, Artificial Sequence
  Chemically Synthesized
QVQLQESGGGLVQAGGSLRLSCAASGNIFDTLVMGWYRQAPGKEREFVATINGGGTTYYADSVKGRFTISRDNAKNTVYLQMNSLKPEDTAVYYCAATITQDGQHTYWGQGTQVTVSS

SEQ ID NO: 36111 - protein, 121 aa, Artificial Sequence
  Chemically Synthesized
QVQLQESGGGLVQAGGSLRLSCAASGTIFVTSMGWYRQAPGKEREFVAAINYGANTNYADSVKGRFTISRDNAKNTVYLQMNSLKPEDTAVYYCAVESYWTHSLGRELQYWGQGTQVTVSS

SEQ ID NO: 36112 - protein, 122 aa, Artificial Sequence
  Chemically Synthesized
QVQLQESGGGLVQAGGSLRLSCAASGNISYVDYMGWYRQAPGKERELVASIDYGTTTYYADSVKGRFTISRDNAKNTVYLQMNSLKPEDTAVYYCAVYTQTVGSYRLSLYYWGQGTQVTVSS

SEQ ID NO: 36113 - protein, 117 aa, Artificial Sequence
  Chemically Synthesized
QVQLQESGGGLVQAGGSLRLSCAASGNIFRYSSMGWYRQAPGKERELVAAISGGGITYADSVKGRFTISRDNAKNTVYLQMNSLKPEDTAVYYCAAGEQWRSTHRYWGQGTQVTVSS

SEQ ID NO: 36114 - protein, 118 aa, Artificial Sequence
  Chemically Synthesized
QVQLQESGGGLVQAGGSLRLSCAASGTIFPTRYMGWYRQAPGKERELVAGIGYGTSTYYADSVKGRFTISRDNAKNTVYLQMNSLKPEDTAVYYCAVYRRYGSFHYYWGQGTQVTVSS

SEQ ID NO: 36115 - protein, 118 aa, Artificial Sequence
  Chemically Synthesized
QVQLQESGGGLVQAGGSLRLSCAASGTISGDYFMGWYRQAPGKEREFVAAINQGTSTYYADSVKGRFTISRDNAKNTVYLQMNSLKPEDTAVYYCAVGLDAEPLHAYWGQGTQVTVSS

SEQ ID NO: 36116 - protein, 122 aa, Artificial Sequence
  Chemically Synthesized
QVQLQESGGGLVQAGGSLRLSCAASGYIFQSADMGWYRQAPGKEREFVASIDWGTNTYYADSVKGRFTISRDNAKNTVYLQMNSLKPEDTAVYYCAVENYSWYTYLVKLGYWGQGTQVTVSS

SEQ ID NO: 36117 - protein, 117 aa, Artificial Sequence
  Chemically Synthesized
QVQLQESGGGLVQAGGSLRLSCAASGSISAYDVMGWYRQAPGKEREFVAAIDIGANTYYADSVKGRFTISRDNAKNTVYLQMNSLKPEDTAVYYCAAQSLLWTLIYWGQGTQVTVSS

SEQ ID NO: 36118 - protein, 119 aa, Artificial Sequence
  Chemically Synthesized
QVQLQESGGGLVQAGGSLRLSCAASGTIFYYYYMGWYRQAPGKERELVAAIAFGGSNTNYADSVKGRFTISRDNAKNTVYLQMNSLKPEDTAVYYCAALYIYYFAYVYWGQGTQVTVSS

SEQ ID NO: 36119 - protein, 125 aa, Artificial Sequence
  Chemically Synthesized
QVQLQESGGGLVQAGGSLRLSCAASGNIFARLYMGWYRQAPGKEREFVAITGGGTTYYADSVKGRFTISRDNAKNTVYLQMNSLKPEDTAVYYCAAAPYLLDSVYDYYTELLQYWGQGTQVTVSS

SEQ ID NO: 36120 - protein, 122 aa, Artificial Sequence
  Chemically Synthesized
QVQLQESGGGLVQAGGSLRLSCAASGNISAALYMGWYRQAPGKERELVASIDQGTNTYYADSVKGRFTISRDNAKNTVYLQMNSLKPEDTAVYYCAVVYTYDGYSAVYHPYWGQGTQVTVSS

SEQ ID NO: 36121 - protein, 118 aa, Artificial Sequence
  Chemically Synthesized
QVQLQESGGGLVQAGGSLRLSCAASGTIFGLSWMGWYRQAPGKERELVATIGAGGTTNYADSVKGRFTISRDNAKNTVYLQMNSLKPEDTAVYYCAAAFYTAGGYYYWGQGTQVTVSS

SEQ ID NO: 36122 - protein, 122 aa, Artificial Sequence
  Chemically Synthesized
QVQLQESGGGLVQAGGSLRLSCAASGYISPVYDMGWYRQAPGKERELVAAIDYGGNTYYADSVKGRFTISRDNAKNTVYLQMNSLKPEDTAVYYCAVLGQWNYTTTVGHYYWGQGTQVTVSS

SEQ ID NO: 36123 - protein, 122 aa, Artificial Sequence
  Chemically Synthesized
QVQLQESGGGLVQAGGSLRLSCAASGNISWDTYMGWYRQAPGKERELVAGIGSGGTTNYADSVKGRFTISRDNAKNTVYLQMNSLKPEDTAVYYCAAYIDVGAVRDGSYDYWGQGTQVTVSS

SEQ ID NO: 36124 - protein, 113 aa, Artificial Sequence
  Chemically Synthesized
QVQLQESGGGLVQAGGSLRLSCAASGYTMGWYRQAPGKERELVAAIGDGSTTYYADSVKGRFTISRDNAKNTVYLQMNSLKPEDTAVYYCAAGDYVYYEHGYWGQGTQVTVSS

SEQ ID NO: 36125 - protein, 118 aa, Artificial Sequence
  Chemically Synthesized
QVQLQESGGGLVQAGGSLRLSCAASGSISPVYAMGWYRQAPGKERELVATITLGGITYYADSVKGRFTISRDNAKNTVYLQMNSLKPEDTAVYYCAAIDDWYASHPYWGQGTQVTVSS

SEQ ID NO: 36126 - protein, 121 aa, Artificial Sequence
  Chemically Synthesized
QVQLQESGGGLVQAGGSLRLSCAASGTFLLLLMGWYRQAPGKERELVATISQGANTYYADSVKGRFTISRDNAKNTVYLQMNSLKPEDTAVYYCAVQYSARQDTESRFNYWGQGTQVTVSS

SEQ ID NO: 36127 - protein, 121 aa, Artificial Sequence
  Chemically Synthesized
QVQLQESGGGLVQAGGSLRLSCAASGSISPGPYMGWYRQAPGKEREFVASIARGTNTNYADSVKGRFTISRDNAKNTVYLQMNSLKPEDTAVYYCAVYDDTGYTTRNLLYWGQGTQVTVSS

SEQ ID NO: 36128 - protein, 115 aa, Artificial Sequence
  Chemically Synthesized
QVQLQESGGGLVQAGGSLRLSCAASGTIFYVAAMGWYRQAPGKERELVALPYADSVKGRFTISRDNAKNTVYLQMNSLKPEDTAVYYCAAQPKFWLRPWGTLSYWGQGTQVTVSS

SEQ ID NO: 36129 - protein, 121 aa, Artificial Sequence
  Chemically Synthesized
QVQLQESGGGLVQAGGSLRLSCAASGSIFGRETMGWYRQAPGKERELVATINYGGLPYADSVKGRFTISRDNAKNTVYLQMNSLKPEDTAVYYCAARGRSTGDTTYDHEYWGQGTQVTVSS

SEQ ID NO: 36130 - protein, 116 aa, Artificial Sequence
  Chemically Synthesized
QVQLQESGGGLVQAGGSLRLSCAASGTISASMGWYRQAPGKERELVASIDHGGSTNYADSVKGRFTISRDNAKNTVYLQMNSLKPEDTAVYYCAVSLDRYNWFAYWGQGTQVTVSS

SEQ ID NO: 36131 - protein, 126 aa, Artificial Sequence
  Chemically Synthesized
QVQLQESGGGLVQAGGSLRLSCAASGNISSVYIMGWYRQAPGKEREFVAAIDEGGNTNYADSVKGRFTISRDNAKNTVYLQMNSLKPEDTAVYYCAVTQIYQSPYYVQGYGSFYYWGQGTQVTVSS

SEQ ID NO: 36132 - protein, 126 aa, Artificial Sequence
  Chemically Synthesized
QVQLQESGGGLVQAGGSLRLSCAASGNISRTAHMGWYRQAPGKERELVATITRGGITNYADSVKGRFTISRDNAKNTVYLQMNSLKPEDTAVYYCAVRPEDIAASRTGKPRYLQYWGQGTQVTVSS

SEQ ID NO: 36133 - protein, 126 aa, Artificial Sequence
  Chemically Synthesized
QVQLQESGGGLVQAGGSLRLSCAASGSIFLPFTMGWYRQAPGKERELVATITYGANTYYADSVKGRFTISRDNAKNTVYLQMNSLKPEDTAVYYCAVPYDVYQYGQSYADVYFVYWGQGTQVTVSS

SEQ ID NO: 36134 - protein, 125 aa, Artificial Sequence
  Chemically Synthesized
QVQLQESGGGLVQAGGSLRLSCAASGSIFIDIWMGWYRQAPGKEREFVAGIVLVVVPYADSVKGRFTISRDNAKNTVYLQMNSLKPEDTAVYYCAAISQIYSRTGISYATSLGYWGQGTQVTVSS

SEQ ID NO: 36135 - protein, 122 aa, Artificial Sequence
  Chemically Synthesized
QVQLQESGGGLVQAGGSLRLSCAASGTIFGPSEMGWYRQAPGKERELVASITHGATTYYADSVKGRFTISRDNAKNTVYLQMNSLKPEDTAVYYCAAIDKWYYVPYLRLHYWGQGTQVTVSS

SEQ ID NO: 36136 - protein, 120 aa, Artificial Sequence
  Chemically Synthesized
QVQLQESGGGLVQAGGSLRLSCAASGNISTDDAMGWYRQAPGKERELVASIGWGSNTNYADSVKGRFTISRDNAKNTVYLQMNSLKPEDTAVYYCAAGFVQSRSSTRMYWGQGTQVTVSS

SEQ ID NO: 36137 - protein, 117 aa, Artificial Sequence
  Chemically Synthesized
QVQLQESGGGLVQAGGSLRLSCAASGYISPDNTMGWYRQAPGKERELLPLLMTVVVPYADSVKGRFTISRDNAKNTVYLQMNSLKPEDTAVYYCAVRQYGWGGYGYWGQGTQVTVSS

SEQ ID NO: 36138 - protein, 118 aa, Artificial Sequence
  Chemically Synthesized
QVQLQESGGGLVQAGGSLRLSCAASGTIFTTYIMGWYRQAPGKERELVATIDKGASTYYADSVKGRFTISRDNAKNTVYLQMNSLKPEDTAVYYCAVTTPTRRYFPYWGQGTQVTVSS

SEQ ID NO: 36139 - protein, 118 aa, Artificial Sequence
  Chemically Synthesized
QVQLQESGGGLVQAGGSLRLSCAASGNISYLSGMGWYRQAPGKEREFVASIGVGGITNYADSVKGRFTISRDNAKNTVYLQMNSLKPEDTAVYYCAVHYPPGKYYVYWGQGTQVTVSS

SEQ ID NO: 36140 - protein, 118 aa, Artificial Sequence
  Chemically Synthesized
QVQLQESGGGLVQAGGSLRLSCAASGNISGLDNMGWYRQAPGKEREFVAGISYGAITYYADSVKGRFTISRDNAKNTVYLQMNSLKPEDTAVYYCAAYIVGVDHLVYWGQGTQVTVSS

SEQ ID NO: 36141 - protein, 125 aa, Artificial Sequence
  Chemically Synthesized
QVQLQESGGGLVQAGGSLRLSCAASGNISGSETMGWYRQAPGKERELVATISSVLLPYADSVKGRFTISRDNAKNTVYLQMNSLKPEDTAVYYCAVDADYQSDLYWGIVDRLVYWGQGTQVTVSS

SEQ ID NO: 36142 - protein, 117 aa, Artificial Sequence
  Chemically Synthesized
QVQLQESGGGLVQAGGSLRLSCAASGSISLYQFMGWYRQAPGKERELVATISYGSITNYADSVKGRFTISRDNAKNTVYLQMNSLKPEDTAVYYCAADYASVSFMYWGQGTQVTVSS

SEQ ID NO: 36143 - protein, 110 aa, Artificial Sequence
  Chemically Synthesized
QVQLQESGGGLVQAGGSLRLSCAASGTIFPYMGWYRQAPGKEREFVAAIDPGGTTYYADSVKGRFTISRDNAKNTVYLQMNSLKPEDTAVYYCAGLHGYWGQGTQVTVSS

SEQ ID NO: 36144 - protein, 110 aa, Artificial Sequence
  Chemically Synthesized
QVQLQESGGGLVQAGGSLRLSCAASGTIFLVEYMGWYRQAPGKERELVATIAGGAITNYADSVKGRFTISRDNAKNTVYLQMNSLKPEDTAVYYCAHYYWGQGTQVTVSS

SEQ ID NO: 36145 - protein, 126 aa, Artificial Sequence
  Chemically Synthesized
QVQLQESGGGLVQAGGSLRLSCAASGYISDYDDMGWYRQAPGKERELVATIAGGGTTNYADSVKGRFTISRDNAKNTVYLQMNSLKPEDTAVYYCAAYEDENDIPHAVLFDGLDYWGQGTQVTVSS

SEQ ID NO: 36146 - protein, 118 aa, Artificial Sequence
  Chemically Synthesized
QVQLQESGGGLVQAGGSLRLSCAASGTIFGKGRMGWYRQAPGKEREFVAAINWGTNTNYADSVKGRFTISRDNAKNTVYLQMNSLKPEDTAVYYCAVVGPDIYDHDYWGQGTQVTVSS

SEQ ID NO: 36147 - protein, 121 aa, Artificial Sequence
  Chemically Synthesized
QVQLQESGGGLVQAGGSLRLSCAASGNISGSTMGWYRQAPGKERELVATIAHGATTYYADSVKGRFTISRDNAKNTVYLQMNSLKPEDTAVYYCAALIRQWRRVDIVFVYWGQGTQVTVSS

SEQ ID NO: 36148 - protein, 118 aa, Artificial Sequence
  Chemically Synthesized
QVQLQESGGGLVQAGGSLRLSCAASGNIFGIGAMGWYRQAPGKEREFVATISDGATTYYADSVKGRFTISRDNAKNTVYLQMNSLKPEDTAVYYCAVPGGDSRPLIYWGQGTQVTVSS

SEQ ID NO: 36149 - protein, 122 aa, Artificial Sequence
  Chemically Synthesized
QVQLQESGGGLVQAGGSLRLSCAASGYISGYDVMGWYRQAPGKERELVAGIAYGSITNYADSVKGRFTISRDNAKNTVYLQMNSLKPEDTAVYYCAVYRARADPFQYPYDYWGQGTQVTVSS

SEQ ID NO: 36150 - protein, 118 aa, Artificial Sequence
  Chemically Synthesized
QVQLQESGGGLVQAGGSLRLSCAASGTISGYIYMGWYRQAPGKERELVASIGGGSTTNYADSVKGRFTISRDNAKNTVYLQMNSLKPEDTAVYYCAVIYLDDLAYLYWGQGTQVTVSS

SEQ ID NO: 36151 - protein, 118 aa, Artificial Sequence
  Chemically Synthesized
QVQLQESGGGLVQAGGSLRLSCAASGSIFYYHEMGWYRQAPGKERELVASIAGGTTTYYADSVKGRFTISRDNAKNTVYLQMNSLKPEDTAVYYCAASGYKPGDLIYWGQGTQVTVSS

SEQ ID NO: 36152 - protein, 126 aa, Artificial Sequence
  Chemically Synthesized
QVQLQESGGGLVQAGGSLRLSCAASGNIFDYDPMGWYRQAPGKEREFVATIGIGATTNYADSVKGRFTISRDNAKNTVYLQMNSLKPEDTAVYYCAVYPRYWYPYSLIDRPDHDYWGQGTQVTVSS

SEQ ID NO: 36153 - protein, 125 aa, Artificial Sequence
  Chemically Synthesized
QVQLQESGGGLVQAGGSLRLSCAASGTISFQWLMGWYRQAPGKERELVAAITDGGTTNYADSVKGRFTISRDNAKNTVYLQMNSLKPEDTAVYYCAVPWTDGYDGSLTSTLRFYWGQGTQVTVSS

SEQ ID NO: 36154 - protein, 118 aa, Artificial Sequence
  Chemically Synthesized
QVQLQESGGGLVQAGGSLRLSCAASGYIFPGITMGWYRQAPGKEREFVAGIDDGATTNYADSVKGRFTISRDNAKNTVYLQMNSLKPEDTAVYYCAVDYSDYFVFSYWGQGTQVTVSS

SEQ ID NO: 36155 - protein, 113 aa, Artificial Sequence
  Chemically Synthesized
QVQLQESGGGLVQAGGSLRLSCAASGSIFTQGDMGWYRQAPGKERELVAAISYGASTNYADSVKGRFTISRDNAKNTVYLQMNSLKPEDTAVYYCAVYDYYYWGQGTQVTVSS

SEQ ID NO: 36156 - protein, 118 aa, Artificial Sequence
  Chemically Synthesized
QVQLQESGGGLVQAGGSLRLSCAASGTSYMGWYRQAPGKERELVAAINLGGITNYADSVKGRFTISRDNAKNTVYLQMNSLKPEDTAVYYCAATSEYAEDGWGPHIYWGQGTQVTVSS

SEQ ID NO: 36157 - protein, 122 aa, Artificial Sequence
  Chemically Synthesized
QVQLQESGGGLVQAGGSLRLSCAASGYISGTPGMGWYRQAPGKEREFVATIDWGANTYYADSVKGRFTISRDNAKNTVYLQMNSLKPEDTAVYYCAVYGQDQDFAPDYYDYWGQGTQVTVSS

SEQ ID NO: 36158 - protein, 117 aa, Artificial Sequence
  Chemically Synthesized
QVQLQESGGGLVQAGGSLRLSCAASGNIFHRSQMGWYRQAPGKERELVATIGYGGNTNYADSVKGRFTISRDNAKNTVYLQMNSLKPEDTAVYYCAVYTVLQAQHYWGQGTQVTVSS

SEQ ID NO: 36159 - protein, 122 aa, Artificial Sequence
  Chemically Synthesized
QVQLQESGGGLVQAGGSLRLSCAASGSISRGRDMGWYRQAPGKEREFVATIDYGGNTNYADSVKGRFTISRDNAKNTVYLQMNSLKPEDTAVYYCAVVEPGPTNFYDDFGYWGQGTQVTVSS

SEQ ID NO: 36160 - protein, 118 aa, Artificial Sequence
  Chemically Synthesized
QVQLQESGGGLVQAGGSLRLSCAASGNISQADHMGWYRQAPGKERELVASITEGGTTNYADSVKGRFTISRDNAKNTVYLQMNSLKPEDTAVYYCAAAYQSYDNFSYWGQGTQVTVSS

SEQ ID NO: 36161 - protein, 117 aa, Artificial Sequence
  Chemically Synthesized
QVQLQESGGGLVQAGGSLRLSCAASGNISKYYMGWYRQAPGKEREFVAAISYGGNTNYADSVKGRFTISRDNAKNTVYLQMNSLKPEDTAVYYCAVPSYAILIHYYWGQGTQVTVSS

SEQ ID NO: 36162 - protein, 118 aa, Artificial Sequence
  Chemically Synthesized
QVQLQESGGGLVQAGGSLRLSCAASGYIFRAKAMGWYRQAPGKEREFVASIGSGTITYYADSVKGRFTISRDNAKNTVYLQMNSLKPEDTAVYYCAVYAYAQADHYYWGQGTQVTVSS

SEQ ID NO: 36163 - protein, 125 aa, Artificial Sequence
  Chemically Synthesized
QVQLQESGGGLVQAGGSLRLSCAASGNISYAPIMGWYRQAPGKEREFVASIVTVVLPYADSVKGRFTISRDNAKNTVYLQMNSLKPEDTAVYYCAATHRTQLPYYDSPIYGLYYWGQGTQVTVSS

SEQ ID NO: 36164 - protein, 121 aa, Artificial Sequence
  Chemically Synthesized
QVQLQESGGGLVQAGGSLRLSCAASGYISYLDLMGWYRQAPGKERELVATIDQGGTTYYADSVKGRFTISRDNAKNTVYLQMNSLKPEDTAVYYCAVYTGAYTTTTSSLYWGQGTQVTVSS

SEQ ID NO: 36165 - protein, 118 aa, Artificial Sequence
  Chemically Synthesized
QVQLQESGGGLVQAGGSLRLSCAASGTISYEYIMGWYRQAPGKERELVAGITNGTNYQYADSVKGRFTISRDNAKNTVYLQMNSLKPEDTAVYYCAADAYPAQTLRYWGQGTQVTVSS

SEQ ID NO: 36166 - protein, 118 aa, Artificial Sequence
  Chemically Synthesized
QVQLQESGGGLVQAGGSLRLSCAASGTISGLFAMGWYRQAPGKEREFVAAIGRGCYYLYADSVKGRFTISRDNAKNTVYLQMNSLKPEDTAVYYCAAVTLRWLYLLYWGQGTQVTVSS

SEQ ID NO: 36167 - protein, 118 aa, Artificial Sequence
  Chemically Synthesized
QVQLQESGGGLVQAGGSLRLSCAASGNIFPDLYMGWYRQAPGKEREFVAAISFGGSTNYADSVKGRFTISRDNAKNTVYLQMNSLKPEDTAVYYCAVWRWDQPDLTYWGQGTQVTVSS

SEQ ID NO: 36168 - protein, 117 aa, Artificial Sequence
  Chemically Synthesized
QVQLQESGGGLVQAGGSLRLSCAASGNISHARYMGWYRQAPGKEREFVATIGLGTSTYYADSVKGRFTISRDNAKNTVYLQMNSLKPEDTAVYYCAAYSSGSTTIYWGQGTQVTVSS

SEQ ID NO: 36169 - protein, 125 aa, Artificial Sequence
  Chemically Synthesized
QVQLQESGGGLVQAGGSLRLSCAASGNISPVKLMGWYRQAPGKERELVAAISYGATTYYADSVKGRFTISRDNAKNTVYLQMNSLKPEDTAVYYCAAWRPIDTVAHDGTAFTMYWGQGTQVTVSS

SEQ ID NO: 36170 - protein, 118 aa, Artificial Sequence
  Chemically Synthesized
QVQLQESGGGLVQAGGSLRLSCAASGSISRAQYMGWYRQAPGKEREFVAGIADGTTTNYADSVKGRFTISRDNAKNTVYLQMNSLKPEDTAVYYCAADDTYLARHSYWGQGTQVTVSS

SEQ ID NO: 36171 - protein, 122 aa, Artificial Sequence
  Chemically Synthesized
QVQLQESGGGLVQAGGSLRLSCAASGSISRSTIMGWYRQAPGKERELVATIGPGANTNYADSVKGRFTISRDNAKNTVYLQMNSLKPEDTAVYYCAATYDGKSGDGSYHGYWGQGTQVTVSS

SEQ ID NO: 36172 - protein, 118 aa, Artificial Sequence
  Chemically Synthesized
QVQLQESGGGLVQAGGSLRLSCAASGTIFAEYDMGWYRQAPGKERELVAAIDYGTNTYYADSVKGRFTISRDNAKNTVYLQMNSLKPEDTAVYYCAAEYYYLLVHDYWGQGTQVTVSS

SEQ ID NO: 36173 - protein, 122 aa, Artificial Sequence
  Chemically Synthesized
QVQLQESGGGLVQAGGSLRLSCAASGTIFYEPRMGWYRQAPGKERELVAAINYGASTYYADSVKGRFTISRDNAKNTVYLQMNSLKPEDTAVYYCAAWYGYEYSTLQLLGYWGQGTQVTVSS

SEQ ID NO: 36174 - protein, 118 aa, Artificial Sequence
  Chemically Synthesized
QVQLQESGGGLVQAGGSLRLSCAASGNIFGPYYMGWYRQAPGKERELVAAITPGASTNYADSVKGRFTISRDNAKNTVYLQMNSLKPEDTAVYYCAAKGGYPILHSYWGQGTQVTVSS

SEQ ID NO: 36175 - protein, 118 aa, Artificial Sequence
  Chemically Synthesized
QVQLQESGGGLVQAGGSLRLSCAASGTISADPYMGWYRQAPGKEREFVAGIAGGGNTNYADSVKGRFTISRDNAKNTVYLQMNSLKPEDTAVYYCAATFTQSSSAYYWGQGTQVTVSS

SEQ ID NO: 36176 - protein, 122 aa, Artificial Sequence
  Chemically Synthesized
QVQLQESGGGLVQAGGSLRLSCAASGNIFRWDRMGWYRQAPGKEREFVAGINTGGTTNYADSVKGRFTISRDNAKNTVYLQMNSLKPEDTAVYYCAAVPTHWLYYYAGHPYWGQGTQVTVSS

SEQ ID NO: 36177 - protein, 117 aa, Artificial Sequence
  Chemically Synthesized
QVQLQESGGGLVQAGGSLRLSCAASGTISSTRMGWYRQAPGKERELVASITGGSNTYYADSVKGRFTISRDNAKNTVYLQMNSLKPEDTAVYYCAVHRGTGYGHSYWGQGTQVTVSS

SEQ ID NO: 36178 - protein, 126 aa, Artificial Sequence
  Chemically Synthesized
QVQLQESGGGLVQAGGSLRLSCAASGYIFGYNDMGWYRQAPGKERELVAGIDAGASTYYADSVKGRFTISRDNAKNTVYLQMNSLKPEDTAVYYCAAAGPRWDLRSYYNYGSHGYWGQGTQVTVSS

SEQ ID NO: 36179 - protein, 126 aa, Artificial Sequence
  Chemically Synthesized
QVQLQESGGGLVQAGGSLRLSCAASGTISRGYFMGWYRQAPGKERELVAGIGYGAITYYADSVKGRFTISRDNAKNTVYLQMNSLKPEDTAVYYCAATRPGQYAGYYQWFWFLDYWGQGTQVTVSS

SEQ ID NO: 36180 - protein, 118 aa, Artificial Sequence
  Chemically Synthesized
QVQLQESGGGLVQAGGSLRLSCAASGSIFQWRNMGWYRQAPGKERELVASISGGGSTNYADSVKGRFTISRDNAKNTVYLQMNSLKPEDTAVYYCAVIGTYHQSYPYWGQGTQVTVSS

SEQ ID NO: 36181 - protein, 118 aa, Artificial Sequence
  Chemically Synthesized
QVQLQESGGGLVQAGGSLRLSCAASGYISSYQDMGWYRQAPGKERELVAGITHGGNTNYADSVKGRFTISRDNAKNTVYLQMNSLKPEDTAVYYCAADYWAFVGFDYWGQGTQVTVSS

SEQ ID NO: 36182 - protein, 121 aa, Artificial Sequence
  Chemically Synthesized
QVQLQESGGGLVQAGGSLRLSCAASGNIFRVLMGWYRQAPGKERELVATIGAGGITNYADSVKGRFTISRDNAKNTVYLQMNSLKPEDTAVYYCAAYGDGTTIYGGDLAYWGQGTQVTVSS

SEQ ID NO: 36183 - protein, 122 aa, Artificial Sequence
  Chemically Synthesized
QVQLQESGGGLVQAGGSLRLSCAASGSIFLFLFMGWYRQAPGKERELVAGITYGGITNYADSVKGRFTISRDNAKNTVYLQMNSLKPEDTAVYYCAARAYYRQIFRQSHIYWGQGTQVTVSS

SEQ ID NO: 36184 - protein, 127 aa, Artificial Sequence
  Chemically Synthesized
QVQLQESGGGLVQAGGSLRLSCAASGTISSSLIYMGWYRQAPGKERELVATITSGSTTYYADSVKGRFTISRDNAKNTVYLQMNSLKPEDTAVYYCAAYTRAGTHTIIYKDTYLYYWGQGTQVTVSS

SEQ ID NO: 36185 - protein, 126 aa, Artificial Sequence
  Chemically Synthesized
QVQLQESGGGLVQAGGSLRLSCAASGTIFWTRRMGWYRQAPGKERELVATIGSGAITNYADSVKGRFTISRDNAKNTVYLQMNSLKPEDTAVYYCAVYPTRWYRIPWDTGEVHAYWGQGTQVTVSS

SEQ ID NO: 36186 - protein, 123 aa, Artificial Sequence
  Chemically Synthesized
QVQLQESGGGLVQAGGSLRLSCAASGYISDNYAMGWYRQAPGKEREFVAARWYYLYADSVKGRFTISRDNAKNTVYLQMNSLKPEDTAVYYCAVGYLDLLSEATPYPGLHQYWGQGTQVTVSS

SEQ ID NO: 36187 - protein, 122 aa, Artificial Sequence
  Chemically Synthesized
QVQLQESGGGLVQAGGSLRLSCAASGNIFHDTYMGWYRQAPGKERELVATIGGGTTTYYADSVKGRFTISRDNAKNTVYLQMNSLKPEDTAVYYCAVSWFEPYRNGDRHYYWGQGTQVTVSS

SEQ ID NO: 36188 - protein, 122 aa, Artificial Sequence
  Chemically Synthesized
QVQLQESGGGLVQAGGSLRLSCAASGSIFYYDDMGWYRQAPGKEREFVAGISGGTITYYADSVKGRFTISRDNAKNTVYLQMNSLKPEDTAVYYCAVGVRHTHDTSRHYRYWGQGTQVTVSS

SEQ ID NO: 36189 - protein, 122 aa, Artificial Sequence
  Chemically Synthesized
QVQLQESGGGLVQAGGSLRLSCAASGTISLIGHMGWYRQAPGKERELVASITYGATTNYADSVKGRFTISRDNAKNTVYLQMNSLKPEDTAVYYCAAYVNTDTAYRWSYNYWGQGTQVTVSS

SEQ ID NO: 36190 - protein, 126 aa, Artificial Sequence
  Chemically Synthesized
QVQLQESGGGLVQAGGSLRLSCAASGTISRAYDMGWYRQAPGKERELVPVLMVVVLPYADSVKGRFTISRDNAKNTVYLQMNSLKPEDTAVYYCAVDAKYWGRSRRYWYAYLLGYWGQGTQVTVSS

SEQ ID NO: 36191 - protein, 114 aa, Artificial Sequence
  Chemically Synthesized
QVQLQESGGGLVQAGGSLRLSCAASGYISPNYEMGWYRQAPGKERELVAAISAGTSTYYADSVKGRFTISRDNAKNTVYLQMNSLKPEDTAVYYCAVDTKHVYWGQGTQVTVSS

SEQ ID NO: 36192 - protein, 126 aa, Artificial Sequence
  Chemically Synthesized
QVQLQESGGGLVQAGGSLRLSCAASGTISGYVYMGWYRQAPGKEREFVAGIAPGTTTYYADSVKGRFTISRDNAKNTVYLQMNSLKPEDTAVYYCAALNPYHAYWYPSTFRYLAYWGQGTQVTVSS

SEQ ID NO: 36193 - protein, 122 aa, Artificial Sequence
  Chemically Synthesized
QVQLQESGGGLVQAGGSLRLSCAASGTISRTPLMGWYRQAPGKERELVAAIGEGATTYYADSVKGRFTISRDNAKNTVYLQMNSLKPEDTAVYYCAAHSAWYPAYGLFHPYWGQGTQVTVSS

SEQ ID NO: 36194 - protein, 126 aa, Artificial Sequence
  Chemically Synthesized
QVQLQESGGGLVQAGGSLRLSCAASGYISGYGEMGWYRQAPGKEREFVASIALGTNTNYADSVKGRFTISRDNAKNTVYLQMNSLKPEDTAVYYCAVQPTHSYDWFIYFTDYHYYWGQGTQVTVSS

SEQ ID NO: 36195 - protein, 122 aa, Artificial Sequence
  Chemically Synthesized
QVQLQESGGGLVQAGGSLRLSCAASGTIFLHEVMGWYRQAPGKEREFVAAIAFGTNTNYADSVKGRFTISRDNAKNTVYLQMNSLKPEDTAVYYCAVSSAFPYSSDIPYVYWGQGTQVTVSS

SEQ ID NO: 36196 - protein, 126 aa, Artificial Sequence
  Chemically Synthesized
QVQLQESGGGLVQAGGSLRLSCAASGTISTRTYMGWYRQAPGKEREFVASITFGTSTYYADSVKGRFTISRDNAKNTVYLQMNSLKPEDTAVYYCAVGDTYPGGPANDTDDRYVYWGQGTQVTVSS

SEQ ID NO: 36197 - protein, 117 aa, Artificial Sequence
  Chemically Synthesized
QVQLQESGGGLVQAGGSLRLSCAASGTIFVRSNMGWYRQAPGKERELVAGINGGGTTYYADSVKGRFTISRDNAKNTVYLQMNSLKPEDTAVYYCARYRKHYHHRYWGQGTQVTVSS

SEQ ID NO: 36198 - protein, 117 aa, Artificial Sequence
  Chemically Synthesized
QVQLQESGGGLVQAGGSLRLSCAASGTISEDWRMGWYRQAPGKERELVASIAGGTTTYYADSVKGRFTISRDNAKNTVYLQMNSLKPEDTAVYYCAVTVTSFCTMYWGQGTQVTVSS

SEQ ID NO: 36199 - protein, 118 aa, Artificial Sequence
  Chemically Synthesized
QVQLQESGGGLVQAGGSLRLSCAASGNISALQYMGWYRQAPGKERELVATIGLGATTYYADSVKGRFTISRDNAKNTVYLQMNSLKPEDTAVYYCAADPSYWRRLYYWGQGTQVTVSS

SEQ ID NO: 36200 - protein, 122 aa, Artificial Sequence
  Chemically Synthesized
QVQLQESGGGLVQAGGSLRLSCAASGYIFSRDYMGWYRQAPGKEREFVAGITYGSNTNYADSVKGRFTISRDNAKNTVYLQMNSLKPEDTAVYYCAADGPDDDVRAELLSYWGQGTQVTVSS

SEQ ID NO: 36201 - protein, 118 aa, Artificial Sequence
  Chemically Synthesized
QVQLQESGGGLVQAGGSLRLSCAASGYIFASIWMGWYRQAPGKEREFVASIAQGASTNYADSVKGRFTISRDNAKNTVYLQMNSLKPEDTAVYYCAAAYIKDGSLPYWGQGTQVTVSS

SEQ ID NO: 36202 - protein, 118 aa, Artificial Sequence
  Chemically Synthesized
QVQLQESGGGLVQAGGSLRLSCAASGSISWPGDMGWYRQAPGKEREFVAYYADSVKGRFTISRDNAKNTVYLQMNSLKPEDTAVYYCAAVQQYTGQSYVSPGYQLTYWGQGTQVTVSS

SEQ ID NO: 36203 - protein, 122 aa, Artificial Sequence
  Chemically Synthesized
QVQLQESGGGLVQAGGSLRLSCAASGYISTYYGMGWYRQAPGKEREFVASIDSGASTNYADSVKGRFTISRDNAKNTVYLQMNSLKPEDTAVYYCAAARRRLLKPLDDFAYWGQGTQVTVSS

SEQ ID NO: 36204 - protein, 117 aa, Artificial Sequence
  Chemically Synthesized
QVQLQESGGGLVQAGGSLRLSCAASGSIFYVDVMGWYRQAPGKEREFVATIAQGATTYYADSVKGRFTISRDNAKNTVYLQMNSLKPEDTAVYYCAAPREDISDFYWGQGTQVTVSS

SEQ ID NO: 36205 - protein, 118 aa, Artificial Sequence
  Chemically Synthesized
QVQLQESGGGLVQAGGSLRLSCAASGSIFGFTRMGWYRQAPGKEREFVASIASGGITNYADSVKGRFTISRDNAKNTVYLQMNSLKPEDTAVYYCAVYTNFWVPYYYWGQGTQVTVSS

SEQ ID NO: 36206 - protein, 117 aa, Artificial Sequence
  Chemically Synthesized
QVQLQESGGGLVQAGGSLRLSCAASGSISRVWLMGWYRQAPGKERELVASISGGNTYYADSVKGRFTISRDNAKNTVYLQMNSLKPEDTAVYYCAAADGRNGEFDYWGQGTQVTVSS

SEQ ID NO: 36207 - protein, 126 aa, Artificial Sequence
  Chemically Synthesized
QVQLQESGGGLVQAGGSLRLSCAASGTISRDYLMGWYRQAPGKERELVAGISPGASTYYADSVKGRFTISRDNAKNTVYLQMNSLKPEDTAVYYCAVRQAGSLYAFTWERPLFRYWGQGTQVTVSS

SEQ ID NO: 36208 - protein, 122 aa, Artificial Sequence
  Chemically Synthesized
QVQLQESGGGLVQAGGSLRLSCAASGNIFSWYYMGWYRQAPGKERELVASIGRGGNTNYADSVKGRFTISRDNAKNTVYLQMNSLKPEDTAVYYCAARTTRNDSDADLFWYWGQGTQVTVSS

SEQ ID NO: 36209 - protein, 113 aa, Artificial Sequence
  Chemically Synthesized
QVQLQESGGGLVQAGGSLRLSCAASGYISPHYYMGWYRQAPGKERELVATIAYGGSTNYADSVKGRFTISRDNAKNTVYLQMNSLKPEDTAVYYCAVDHLRYWGQGTQVTVSS

SEQ ID NO: 36210 - protein, 117 aa, Artificial Sequence
  Chemically Synthesized
QVQLQESGGGLVQAGGSLRLSCAASGTISGVDYMGWYRQAPGKEREFVAGITPGGTTNYADSVKGRFTISRDNAKNTVYLQMNSLKPEDTAVYYCAASLLTLTRLYWGQGTQVTVSS

SEQ ID NO: 36211 - protein, 126 aa, Artificial Sequence
  Chemically Synthesized
QVQLQESGGGLVQAGGSLRLSCAASGYISPAKAMGWYRQAPGKEREFVAGIGRGSSTNYADSVKGRFTISRDNAKNTVYLQMNSLKPEDTAVYYCAADYYVANGFNFGQDDAFYYWGQGTQVTVSS

SEQ ID NO: 36212 - protein, 118 aa, Artificial Sequence
  Chemically Synthesized
QVQLQESGGGLVQAGGSLRLSCAASGNIFWTYDMGWYRQAPGKERELVATIGAGTNTNYADSVKGRFTISRDNAKNTVYLQMNSLKPEDTAVYYCAVASDYDFDFAYWGQGTQVTVSS

SEQ ID NO: 36213 - protein, 110 aa, Artificial Sequence
  Chemically Synthesized
QVQLQESGGGLVQAGGSLRLSCAASGSIFDIYYMGWYRQAPGKERELVAGITWGGNTYYADSVKGRFTISRDNAKNTVYLQMNSLKPEDTAVYYCAFDYWGQGTQVTVSS

SEQ ID NO: 36214 - protein, 114 aa, Artificial Sequence
  Chemically Synthesized
QVQLQESGGGLVQAGGSLRLSCAASGYIFTSLLMGWYRQAPGKERELVAGIAYGANTYYADSVKGRFTISRDNAKNTVYLQMNSLKPEDTAVYYCAVEYLFLYWGQGTQVTVSS

SEQ ID NO: 36215 - protein, 122 aa, Artificial Sequence
  Chemically Synthesized
QVQLQESGGGLVQAGGSLRLSCAASGTISAFLFMGWYRQAPGKERELVATISVGTITNYADSVKGRFTISRDNAKNTVYLQMNSLKPEDTAVYYCAATHQYRGWHYAYHHYWGQGTQVTVSS

SEQ ID NO: 36216 - protein, 115 aa, Artificial Sequence
  Chemically Synthesized
QVQLQESGGGLVQAGGSLRLSCAASGTIFLTIAMGWYRQAPGKEREFVAAINSVLIPYADSVKGRFTISRDNAKNTVYLQMNSLKPEDTAVYYCAVGNIYSHTYWGQGTQVTVSS

SEQ ID NO: 36217 - protein, 123 aa, Artificial Sequence
  Chemically Synthesized
QVQLQESGGGLVQAGGSLRLSCAASGNIFVSPGMGWYRQAPGKERELVASIAWGATTYYADSVKGRFTISRDNAKNTVYLQMNSLKPEDTAVYYCAADIDVNRPDIYDALYYWGQGTQVTVSS

SEQ ID NO: 36218 - protein, 122 aa, Artificial Sequence
  Chemically Synthesized
QVQLQESGGGLVQAGGSLRLSCAASGNISLDGPMGWYRQAPGKEREFVASISGGGSTNYADSVKGRFTISRDNAKNTVYLQMNSLKPEDTAVYYCAATIETYQYPGDEHRYWGQGTQVTVSS

SEQ ID NO: 36219 - protein, 126 aa, Artificial Sequence
  Chemically Synthesized
QVQLQESGGGLVQAGGSLRLSCAASGSIFGGSIMGWYRQAPGKERELVASIAYGTITNYADSVKGRFTISRDNAKNTVYLQMNSLKPEDTAVYYCAVPYRPSDYPQPTQFYPHGYWGQGTQVTVSS

SEQ ID NO: 36220 - protein, 118 aa, Artificial Sequence
  Chemically Synthesized
QVQLQESGGGLVQAGGSLRLSCAASGNIFDTHTMGWYRQAPGKERELVASIDTGGTTNYADSVKGRFTISRDNAKNTVYLQMNSLKPEDTAVYYCAALDSKYRYYSYWGQGTQVTVSS

SEQ ID NO: 36221 - protein, 118 aa, Artificial Sequence
  Chemically Synthesized
QVQLQESGGGLVQAGGSLRLSCAASGSISTTTYMGWYRQAPGKERELVAAINAGSITYYADSVKGRFTISRDNAKNTVYLQMNSLKPEDTAVYYCAATYAGYTDLYYWGQGTQVTVSS

SEQ ID NO: 36222 - protein, 117 aa, Artificial Sequence
  Chemically Synthesized
QVQLQESGGGLVQAGGSLRLSCAASGNISVHASMGWYRQAPGKERELRWYYYQYADSVKGRFTISRDNAKNTVYLQMNSLKPEDTAVYYCAADYRVFYRSGRNHGYWGQGTQVTVSS

SEQ ID NO: 36223 - protein, 122 aa, Artificial Sequence
  Chemically Synthesized
QVQLQESGGGLVQAGGSLRLSCAASGSISQLPFMGWYRQAPGKEREFVAGINLGGTTNYADSVKGRFTISRDNAKNTVYLQMNSLKPEDTAVYYCAAVQWYDNATPRWHGYWGQGTQVTVSS

SEQ ID NO: 36224 - protein, 117 aa, Artificial Sequence
  Chemically Synthesized
QVQLQESGGGLVQAGGSLRLSCAASGNIFSSWMGWYRQAPGKERELVASIADGSTTYYADSVKGRFTISRDNAKNTVYLQMNSLKPEDTAVYYCAAYDYIYYGHTYWGQGTQVTVSS

SEQ ID NO: 36225 - protein, 122 aa, Artificial Sequence
  Chemically Synthesized
QVQLQESGGGLVQAGGSLRLSCAASGTISTQNIMGWYRQAPGKERELVAAISTGSNTNYADSVKGRFTISRDNAKNTVYLQMNSLKPEDTAVYYCAAVYRYTTGLYPYHYYWGQGTQVTVSS

SEQ ID NO: 36226 - protein, 122 aa, Artificial Sequence
  Chemically Synthesized
QVQLQESGGGLVQAGGSLRLSCAASGSISNSAYMGWYRQAPGKEREFVAGIAQGGSTNYADSVKGRFTISRDNAKNTVYLQMNSLKPEDTAVYYCAATNRDNTGNASTFDYWGQGTQVTVSS

SEQ ID NO: 36227 - protein, 118 aa, Artificial Sequence
  Chemically Synthesized
QVQLQESGGGLVQAGGSLRLSCAASGNISSIPYMGWYRQAPGKERELVAAIGYGATTYYADSVKGRFTISRDNAKNTVYLQMNSLKPEDTAVYYCAALWVYRSAHTYWGQGTQVTVSS

SEQ ID NO: 36228 - protein, 122 aa, Artificial Sequence
  Chemically Synthesized
QVQLQESGGGLVQAGGSLRLSCAASGYISGRGRMGWYRQAPGKEREFVASISSGGTTNYADSVKGRFTISRDNAKNTVYLQMNSLKPEDTAVYYCAADFNTGYYLYASHTYWGQGTQVTVSS

SEQ ID NO: 36229 - protein, 121 aa, Artificial Sequence
  Chemically Synthesized
QVQLQESGGGLVQAGGSLRLSCAASGTIFYGNMGWYRQAPGKEREFVAGINYGATTNYADSVKGRFTISRDNAKNTVYLQMNSLKPEDTAVYYCAVVVQYRRPGTRLLYYWGQGTQVTVSS

SEQ ID NO: 36230 - protein, 122 aa, Artificial Sequence
  Chemically Synthesized
QVQLQESGGGLVQAGGSLRLSCAASGYISPTSLMGWYRQAPGKERELVATINNGSTTYYADSVKGRFTISRDNAKNTVYLQMNSLKPEDTAVYYCAADHPNYDQLTDDHPYWGQGTQVTVSS

SEQ ID NO: 36231 - protein, 118 aa, Artificial Sequence
  Chemically Synthesized
QVQLQESGGGLVQAGGSLRLSCAASGNIFINYVMGWYRQAPGKEREFVAAIANGGTTYYADSVKGRFTISRDNAKNTVYLQMNSLKPEDTAVYYCAARGTQGVDLTYWGQGTQVTVSS

SEQ ID NO: 36232 - protein, 126 aa, Artificial Sequence
  Chemically Synthesized
QVQLQESGGGLVQAGGSLRLSCAASGTISTVIYMGWYRQAPGKERELVASISVGASTNYADSVKGRFTISRDNAKNTVYLQMNSLKPEDTAVYYCAVQGVGFSYFDRGPPSRYPYWGQGTQVTVSS

SEQ ID NO: 36233 - protein, 118 aa, Artificial Sequence
  Chemically Synthesized
QVQLQESGGGLVQAGGSLRLSCAASGTISLGAHMGWYRQAPGKERELVATIAEGSITYYADSVKGRFTISRDNAKNTVYLQMNSLKPEDTAVYYCAAGNGAYDRLTYWGQGTQVTVSS

SEQ ID NO: 36234 - protein, 118 aa, Artificial Sequence
  Chemically Synthesized
QVQLQESGGGLVQAGGSLRLSCAASGTISRLGYMGWYRQAPGKERELVASISDGATTYYADSVKGRFTISRDNAKNTVYLQMNSLKPEDTAVYYCAVDQKGANGLRYWGQGTQVTVSS

SEQ ID NO: 36235 - protein, 122 aa, Artificial Sequence
  Chemically Synthesized
QVQLQESGGGLVQAGGSLRLSCAASGNISQIVIMGWYRQAPGKERELVAGINIGSNTYYADSVKGRFTISRDNAKNTVYLQMNSLKPEDTAVYYCAVVYRRYYGSVSYHRYWGQGTQVTVSS

SEQ ID NO: 36236 - protein, 118 aa, Artificial Sequence
  Chemically Synthesized
QVQLQESGGGLVQAGGSLRLSCAASGTISYLIYMGWYRQAPGKERELVASIGSGGTTYYADSVKGRFTISRDNAKNTVYLQMNSLKPEDTAVYYCAVRDGYAHAHSYWGQGTQVTVSS

SEQ ID NO: 36237 - protein, 121 aa, Artificial Sequence
  Chemically Synthesized
QVQLQESGGGLVQAGGSLRLSCAASGTIFDSIFMGWYRQAPGKEREFVAVLVKVVIPYADSVKGRFTISRDNAKNTVYLQMNSLKPEDTAVYYCAAYLDQYYYVSLGHAYWGQGTQVTVSS

SEQ ID NO: 36238 - protein, 121 aa, Artificial Sequence
  Chemically Synthesized
QVQLQESGGGLVQAGGSLRLSCAASGNISRDVGMGWYRQAPGKEREFVAGIDSVVVPYADSVKGRFTISRDNAKNTVYLQMNSLKPEDTAVYYCAVRASADTHQDDYFDYWGQGTQVTVSS

SEQ ID NO: 36239 - protein, 119 aa, Artificial Sequence
  Chemically Synthesized
QVQLQESGGGLVQAGGSLRLSCAASGTIFSRGAMGWYRQAPGKERELVATIGSGAITNYADSVKGRFTISRDNAKNTVYLQMNSLKPEDTAVYYCAAQERSYYYIHVYWGQGTQVTVSS

SEQ ID NO: 36240 - protein, 118 aa, Artificial Sequence
  Chemically Synthesized
QVQLQESGGGLVQAGGSLRLSCAASGNISALFNMGWYRQAPGKEREFVAAIGHGSSTNYADSVKGRFTISRDNAKNTVYLQMNSLKPEDTAVYYCAALIDITYGHAYWGQGTQVTVSS

SEQ ID NO: 36241 - protein, 111 aa, Artificial Sequence
  Chemically Synthesized
QVQLQESGGGLVQAGGSLRLSCAASGSISYRGYMGWYRQAPGKEREFVAGINPGTNTNYADSVKGRFTISRDNAKNTVYLQMNSLKPEDTAVYYCAATCYWGQGTQVTVSS

SEQ ID NO: 36242 - protein, 118 aa, Artificial Sequence
  Chemically Synthesized
QVQLQESGGGLVQAGGSLRLSCAASGNISPIRAMGWYRQAPGKERELVAAITIGSNTYYADSVKGRFTISRDNAKNTVYLQMNSLKPEDTAVYYCAAITRRHNWLSYWGQGTQVTVSS

SEQ ID NO: 36243 - protein, 118 aa, Artificial Sequence
  Chemically Synthesized
QVQLQESGGGLVQAGGSLRLSCAASGTIFTGYTMGWYRQAPGKERELVASIADGTNTYYADSVKGRFTISRDNAKNTVYLQMNSLKPEDTAVYYCAAVSFRYLYLGYWGQGTQVTVSS

SEQ ID NO: 36244 - protein, 111 aa, Artificial Sequence
  Chemically Synthesized
QVQLQESGGGLVQAGGSLRLSCAASGTISDSDVMGWYRQAPGKEREFVASIARGANTYYADSVKGRFTISRDNAKNTVYLQMNSLKPEDTAVYYCATGLYWGQGTQVTVSS

SEQ ID NO: 36245 - protein, 116 aa, Artificial Sequence
  Chemically Synthesized
QVQLQESGGGLVQAGGSLRLSCAASGTIRLRMGWYRQAPGKERELVASINLGANTYYADSVKGRFTISRDNAKNTVYLQMNSLKPEDTAVYYCAVYYGYGGDYWYWGQGTQVTVSS

SEQ ID NO: 36246 - protein, 118 aa, Artificial Sequence
  Chemically Synthesized
QVQLQESGGGLVQAGGSLRLSCAASGSISYLTAMGWYRQAPGKEREFVATITDGSTTYYADSVKGRFTISRDNAKNTVYLQMNSLKPEDTAVYYCAVLVKNFYYYGYWGQGTQVTVSS

SEQ ID NO: 36247 - protein, 110 aa, Artificial Sequence
  Chemically Synthesized
QVQLQESGGGLVQAGGSLRLSCAASGTISDDRWMGWYRQAPGKEREFVAGIDYGASTYYADSVKGRFTISRDNAKNTVYLQMNSLKPEDTAVYYCAVYYWGQGTQVTVSS

SEQ ID NO: 36248 - protein, 122 aa, Artificial Sequence
  Chemically Synthesized
QVQLQESGGGLVQAGGSLRLSCAASGTIFDASSMGWYRQAPGKERELVATIGYGGNTYYADSVKGRFTISRDNAKNTVYLQMNSLKPEDTAVYYCAVVVPYDGDRYDGYYYWGQGTQVTVSS

SEQ ID NO: 36249 - protein, 122 aa, Artificial Sequence
  Chemically Synthesized
QVQLQESGGGLVQAGGSLRLSCAASGTISPDDGMGWYRQAPGKERELVAGISHGASTYYADSVKGRFTISRDNAKNTVYLQMNSLKPEDTAVYYCAAVSQYIYDAVGALDYWGQGTQVTVSS

SEQ ID NO: 36250 - protein, 122 aa, Artificial Sequence
  Chemically Synthesized
QVQLQESGGGLVQAGGSLRLSCAASGSISDDTYMGWYRQAPGKEREFVAGIAYGTSTYYADSVKGRFTISRDNAKNTVYLQMNSLKPEDTAVYYCAVLGYYYHYWSGYLDYWGQGTQVTVSS

SEQ ID NO: 36251 - protein, 118 aa, Artificial Sequence
  Chemically Synthesized
QVQLQESGGGLVQAGGSLRLSCAASGSISDLRQMGWYRQAPGKEREFVAGINRGGSTNYADSVKGRFTISRDNAKNTVYLQMNSLKPEDTAVYYCAVLARWAKWYFYWGQGTQVTVSS

SEQ ID NO: 36252 - protein, 118 aa, Artificial Sequence
  Chemically Synthesized
QVQLQESGGGLVQAGGSLRLSCAASGYISAGDTMGWYRQAPGKEREFVASIARGASTYYADSVKGRFTISRDNAKNTVYLQMNSLKPEDTAVYYCAAVTSDSARHYYWGQGTQVTVSS

SEQ ID NO: 36253 - protein, 124 aa, Artificial Sequence
  Chemically Synthesized
QVQLQESGGGLVQAGGSLRLSCAASGNIFREYTMGWYRQAPGKERELVASIAGTTTNYADSVKGRFTISRDNAKNTVYLQMNSLKPEDTAVYYCAVKESYGFLYYLPERCSWYWGQGTQVTVSS

SEQ ID NO: 36254 - protein, 126 aa, Artificial Sequence
  Chemically Synthesized
QVQLQESGGGLVQAGGSLRLSCAASGNISYLRYMGWYRQAPGKEREFVAGINDGTSTNYADSVKGRFTISRDNAKNTVYLQMNSLKPEDTAVYYCAAVDNRPYTYGDGGHRYLYYWGQGTQVTVSS

SEQ ID NO: 36255 - protein, 118 aa, Artificial Sequence
  Chemically Synthesized
QVQLQESGGGLVQAGGSLRLSCAASGTISLDDQMGWYRQAPGKERELVATIATGAITYYADSVKGRFTISRDNAKNTVYLQMNSLKPEDTAVYYCAAYVIVRATYSYWGQGTQVTVSS

SEQ ID NO: 36256 - protein, 120 aa, Artificial Sequence
  Chemically Synthesized
QVQLQESGGGLVQAGGSLRLSCAASGSISHGAIMGWYRQAPGKERELVALVPYADSVKGRFTISRDNAKNTVYLQMNSLKPEDTAVYYCAANRRHRTNLSDRTSYFHRYWGQGTQVTVSS

SEQ ID NO: 36257 - protein, 127 aa, Artificial Sequence
  Chemically Synthesized
QVQLQESGGGLVQAGGSLRLSCAASGTISYYRLAMGWYRQAPGKERELVATITDGTNTNYADSVKGRFTISRDNAKNTVYLQMNSLKPEDTAVYYCAADVYDLRWLYDDHDDTHGYWGQGTQVTVSS

SEQ ID NO: 36258 - protein, 122 aa, Artificial Sequence
  Chemically Synthesized
QVQLQESGGGLVQAGGSLRLSCAASGNIFRTGYMGWYRQAPGKERELVASIDYGANTNYADSVKGRFTISRDNAKNTVYLQMNSLKPEDTAVYYCAALYLRYHPRQAYHYYWGQGTQVTVSS

SEQ ID NO: 36259 - protein, 117 aa, Artificial Sequence
  Chemically Synthesized
QVQLQESGGGLVQAGGSLRLSCAASGYIFGAGAMGWYRQAPGKERELVATIARGGTTNYADSVKGRFTISRDNAKNTVYLQMNSLKPEDTAVYYCAAPTGLRSTIYWGQGTQVTVSS

SEQ ID NO: 36260 - protein, 118 aa, Artificial Sequence
  Chemically Synthesized
QVQLQESGGGLVQAGGSLRLSCAASGSIFGYTVMGWYRQAPGKERELVAGISVGTNTYYADSVKGRFTISRDNAKNTVYLQMNSLKPEDTAVYYCAAQQSDQAPFSYWGQGTQVTVSS

SEQ ID NO: 36261 - protein, 126 aa, Artificial Sequence
  Chemically Synthesized
QVQLQESGGGLVQAGGSLRLSCAASGTISNYNVMGWYRQAPGKEREFVAGISLGTTTYYADSVKGRFTISRDNAKNTVYLQMNSLKPEDTAVYYCAVWYTAPNGVQVYPWLWHTYWGQGTQVTVSS

SEQ ID NO: 36262 - protein, 124 aa, Artificial Sequence
  Chemically Synthesized
QVQLQESGGGLVQAGGSLRLSCAASGSIFYLLYMGWYRQAPGKEREFVAALVLVLIPYADSVKGRFTISRDNAKNTVYLQMNSLKPEDTAVYYCAAGDTFKVGYYYDVNDFAYWGQGTQVTVSS

SEQ ID NO: 36263 - protein, 121 aa, Artificial Sequence
  Chemically Synthesized
QVQLQESGGGLVQAGGSLRLSCAASGTISHPIGMGWYRQAPGKERELVASITYGTTTYYADSVKGRFTISRDNAKNTVYLQMNSLKPEDTAVYYCAVPAYVSKTVVVVMYWGQGTQVTVSS

SEQ ID NO: 36264 - protein, 116 aa, Artificial Sequence
  Chemically Synthesized
QVQLQESGGGLVQAGGSLRLSCAASGTIFYWRMGWYRQAPGKERELVASIGSGSSTNYADSVKGRFTISRDNAKNTVYLQMNSLKPEDTAVYYCALLLVTLLSLYWGQGTQVTVSS

SEQ ID NO: 36265 - protein, 122 aa, Artificial Sequence
  Chemically Synthesized
QVQLQESGGGLVQAGGSLRLSCAASGSISWDHWMGWYRQAPGKEREFVAGIAQGGTTNYADSVKGRFTISRDNAKNTVYLQMNSLKPEDTAVYYCAAPETYYDTYDGEHRYWGQGTQVTVSS

SEQ ID NO: 36266 - protein, 124 aa, Artificial Sequence
  Chemically Synthesized
QVQLQESGGGLVQAGGSLRLSCAASGSIFADSMGWYRQAPGKERELVATIGYGGNTYYADSVKGRFTISRDNAKNTVYLQMNSLKPEDTAVYYCAAVLFPSTAYGIEAIVHDYWGQGTQVTVSS

SEQ ID NO: 36267 - protein, 118 aa, Artificial Sequence
  Chemically Synthesized
QVQLQESGGGLVQAGGSLRLSCAASGSIFGAGGMGWYRQAPGKEREFVAAIDSGGITNYADSVKGRFTISRDNAKNTVYLQMNSLKPEDTAVYYCAVIVYRSGYHAYWGQGTQVTVSS

SEQ ID NO: 36268 - protein, 126 aa, Artificial Sequence
  Chemically Synthesized
QVQLQESGGGLVQAGGSLRLSCAASGYISLYPYMGWYRQAPGKEREFVAGITDGASTYYADSVKGRFTISRDNAKNTVYLQMNSLKPEDTAVYYCAVQYPYRLAGKALFWSSFRYWGQGTQVTVSS

SEQ ID NO: 36269 - protein, 118 aa, Artificial Sequence
  Chemically Synthesized
QVQLQESGGGLVQAGGSLRLSCAASGTISWDTLMGWYRQAPGKEREFVAGIGYGGTTNYADSVKGRFTISRDNAKNTVYLQMNSLKPEDTAVYYCAASSRTLTTTLYWGQGTQVTVSS

SEQ ID NO: 36270 - protein, 116 aa, Artificial Sequence
  Chemically Synthesized
QVQLQESGGGLVQAGGSLRLSCAASGTISGGSSMGWYRQAPGKERELVAAIDPGGNTNYADSVKGRFTISRDNAKNTVYLQMNSLKPEDTAVYYCAVTTNSEDAYWGQGTQVTVSS

SEQ ID NO: 36271 - protein, 122 aa, Artificial Sequence
  Chemically Synthesized
QVQLQESGGGLVQAGGSLRLSCAASGNISDRDSMGWYRQAPGKERELVASITWGGTTYYADSVKGRFTISRDNAKNTVYLQMNSLKPEDTAVYYCAAGRYVQVDSSTQHAYWGQGTQVTVSS

SEQ ID NO: 36272 - protein, 118 aa, Artificial Sequence
  Chemically Synthesized
QVQLQESGGGLVQAGGSLRLSCAASGSISTANVMGWYRQAPGKEREFVATIGGGGITNYADSVKGRFTISRDNAKNTVYLQMNSLKPEDTAVYYCAVYKVDYSRLAYWGQGTQVTVSS

SEQ ID NO: 36273 - protein, 111 aa, Artificial Sequence
  Chemically Synthesized
QVQLQESGGGLVQAGGSLRLSCAASGTIFRYDDMGWYRQAPGKEREFVAAIGLGANTYYADSVKGRFTISRDNAKNTVYLQMNSLKPEDTAVYYCAVNAYWGQGTQVTVSS

SEQ ID NO: 36274 - protein, 118 aa, Artificial Sequence
  Chemically Synthesized
QVQLQESGGGLVQAGGSLRLSCAASGSIFFLPIMGWYRQAPGKEREFVASITAGGSTYYADSVKGRFTISRDNAKNTVYLQMNSLKPEDTAVYYCAAIYRGNGYHYYWGQGTQVTVSS

SEQ ID NO: 36275 - protein, 117 aa, Artificial Sequence
  Chemically Synthesized
QVQLQESGGGLVQAGGSLRLSCAASGNISTSEAMGWYRQAPGKEREFVATIDNGTNTNYADSVKGRFTISRDNAKNTVYLQMNSLKPEDTAVYYCAVMTLTVLCIYWGQGTQVTVSS

SEQ ID NO: 36276 - protein, 122 aa, Artificial Sequence
  Chemically Synthesized
QVQLQESGGGLVQAGGSLRLSCAASGSIFDRDIMGWYRQAPGKERELVATIAYGTITYYADSVKGRFTISRDNAKNTVYLQMNSLKPEDTAVYYCAVGHFYEGYLCVELYYWGQGTQVTVSS

SEQ ID NO: 36277 - protein, 118 aa, Artificial Sequence
  Chemically Synthesized
QVQLQESGGGLVQAGGSLRLSCAASGNIFDYPLMGWYRQAPGKEREFVAAITYGGSTNYADSVKGRFTISRDNAKNTVYLQMNSLKPEDTAVYYCAVLIYNYRWYYYWGQGTQVTVSS

SEQ ID NO: 36278 - protein, 118 aa, Artificial Sequence
  Chemically Synthesized
QVQLQESGGGLVQAGGSLRLSCAASGSISRYGSMGWYRQAPGKEREFVASIGYGSYYLYADSVKGRFTISRDNAKNTVYLQMNSLKPEDTAVYYCAAYGTDRIVHYYWGQGTQVTVSS

SEQ ID NO: 36279 - protein, 121 aa, Artificial Sequence
  Chemically Synthesized
QVQLQESGGGLVQAGGSLRLSCAASGSISEPSDMGWYRQAPGKEREFVAAIDKGTNTYADSVKGRFTISRDNAKNTVYLQMNSLKPEDTAVYYCAVWSRPYIVVTYPFWYWGQGTQVTVSS

SEQ ID NO: 36280 - protein, 126 aa, Artificial Sequence
  Chemically Synthesized
QVQLQESGGGLVQAGGSLRLSCAASGNISTGSSMGWYRQAPGKEREFVATIDQGGSTNYADSVKGRFTISRDNAKNTVYLQMNSLKPEDTAVYYCAAANYTDRLLWYFFYLFHYYWGQGTQVTVSS

SEQ ID NO: 36281 - protein, 115 aa, Artificial Sequence
  Chemically Synthesized
QVQLQESGGGLVQAGGSLRLSCAASGTISGSRYMGWYRQAPGKEREFVAAISAGGNTNYADSVKGRFTISRDNAKNTVYLQMNSLKPEDTAVYYCAVIDVLHAYWGQGTQVTVSS

SEQ ID NO: 36282 - protein, 119 aa, Artificial Sequence
  Chemically Synthesized
QVQLQESGGGLVQAGGSLRLSCAASGTISLKRYMGWYRQAPGKERELVAAIASGGSTTNYADSVKGRFTISRDNAKNTVYLQMNSLKPEDTAVYYCAALPGWSWLHDYWGQGTQVTVSS

SEQ ID NO: 36283 - protein, 117 aa, Artificial Sequence
  Chemically Synthesized
QVQLQESGGGLVQAGGSLRLSCAASGTISSPYSMGWYRQAPGKERELVATIAPGTNTNYADSVKGRFTISRDNAKNTVYLQMNSLKPEDTAVYYCALWLFTVTFLYWGQGTQVTVSS

SEQ ID NO: 36284 - protein, 118 aa, Artificial Sequence
  Chemically Synthesized
QVQLQESGGGLVQAGGSLRLSCAASGNISITGPMGWYRQAPGKERELVASIGYGSTTNYADSVKGRFTISRDNAKNTVYLQMNSLKPEDTAVYYCAVARRALDDLGYWGQGTQVTVSS

SEQ ID NO: 36285 - protein, 118 aa, Artificial Sequence
  Chemically Synthesized
QVQLQESGGGLVQAGGSLRLSCAASGTISYQQGMGWYRQAPGKEREFVAGIDSGGITYYADSVKGRFTISRDNAKNTVYLQMNSLKPEDTAVYYCAGSSVLLRCSYYWGQGTQVTVSS

SEQ ID NO: 36286 - protein, 118 aa, Artificial Sequence
  Chemically Synthesized
QVQLQESGGGLVQAGGSLRLSCAASGYISAYHSMGWYRQAPGKERELVATINVGTNTYYADSVKGRFTISRDNAKNTVYLQMNSLKPEDTAVYYCAARRGAYDTYWYWGQGTQVTVSS

SEQ ID NO: 36287 - protein, 122 aa, Artificial Sequence
  Chemically Synthesized
QVQLQESGGGLVQAGGSLRLSCAASGTIFSQTIMGWYRQAPGKEREFVAGINSGGNTNYADSVKGRFTISRDNAKNTVYLQMNSLKPEDTAVYYCAAITPGYNNTSPPLGYWGQGTQVTVSS

SEQ ID NO: 36288 - protein, 120 aa, Artificial Sequence
  Chemically Synthesized
QVQLQESGGGLVQAGGSLRLSCAASGSISTPYYMGWYRQAPGKEREFVATIGQGATTNYADSVKGRFTISRDNAKNTVYLQMNSLKPEDTAVYYCAAGVAYYRWRDLPYWGQGTQVTVSS

SEQ ID NO: 36289 - protein, 118 aa, Artificial Sequence
  Chemically Synthesized
QVQLQESGGGLVQAGGSLRLSCAASGYISSGTYMGWYRQAPGKEREFVASITYGGTTNYADSVKGRFTISRDNAKNTVYLQMNSLKPEDTAVYYCAAVLFQRFYFYYWGQGTQVTVSS

SEQ ID NO: 36290 - protein, 116 aa, Artificial Sequence
  Chemically Synthesized
QVQLQESGGGLVQAGGSLRLSCAASGYISTSAYMGWYRQAPGKERELVASIAQGSTTNYADSVKGRFTISRDNAKNTVYLQMNSLKPEDTAVYYCAALGSVSGIYWGQGTQVTVSS

SEQ ID NO: 36291 - protein, 122 aa, Artificial Sequence
  Chemically Synthesized
QVQLQESGGGLVQAGGSLRLSCAASGNIFYYSNMGWYRQAPGKEREFVATITNGGNTNYADSVKGRFTISRDNAKNTVYLQMNSLKPEDTAVYYCAAVVVYRPYGRGLHFYWGQGTQVTVSS

SEQ ID NO: 36292 - protein, 126 aa, Artificial Sequence
  Chemically Synthesized
QVQLQESGGGLVQAGGSLRLSCAASGSIFQADYMGWYRQAPGKEREFVASISRGTTTNYADSVKGRFTISRDNAKNTVYLQMNSLKPEDTAVYYCAALKQSTTGERAHWYGLFYYWGQGTQVTVSS

SEQ ID NO: 36293 - protein, 122 aa, Artificial Sequence
  Chemically Synthesized
QVQLQESGGGLVQAGGSLRLSCAASGTISAFRQMGWYRQAPGKEREFVASIGVGGSTYYADSVKGRFTISRDNAKNTVYLQMNSLKPEDTAVYYCAVPLGYRDNYYPQFLYWGQGTQVTVSS

SEQ ID NO: 36294 - protein, 126 aa, Artificial Sequence
  Chemically Synthesized
QVQLQESGGGLVQAGGSLRLSCAASGNISADYHMGWYRQAPGKEREFVAAINAGATTNYADSVKGRFTISRDNAKNTVYLQMNSLKPEDTAVYYCAVYTTGYNDGIKSDVHVLGYWGQGTQVTVSS

SEQ ID NO: 36295 - protein, 113 aa, Artificial Sequence
  Chemically Synthesized
QVQLQESGGGLVQAGGSLRLSCAASGNISLQPYMGWYRQAPGKERELVATITNGSTTNYADSVKGRFTISRDNAKNTVYLQMNSLKPEDTAVYYCAVSTLIYWGQGTQVTVSS

SEQ ID NO: 36296 - protein, 127 aa, Artificial Sequence
  Chemically Synthesized
QVQLQESGGGLVQAGGSLRLSCAASGSISLAHPMGWYRQAPGKERELVAGINGAGSNTNYADSVKGRFTISRDNAKNTVYLQMNSLKPEDTAVYYCAVRGTRYPDHGVTRYTPFFYWGQGTQVTVSS

SEQ ID NO: 36297 - protein, 117 aa, Artificial Sequence
  Chemically Synthesized
QVQLQESGGGLVQAGGSLRLSCAASGTISGQGDMGWYRQAPGKERELVAGISYGTSTNYADSVKGRFTISRDNAKNTVYLQMNSLKPEDTAVYYCAAEPYHSTTLYWGQGTQVTVSS

SEQ ID NO: 36298 - protein, 118 aa, Artificial Sequence
  Chemically Synthesized
QVQLQESGGGLVQAGGSLRLSCAASGSISEPTYMGWYRQAPGKERELVAAINTGSNNQYADSVKGRFTISRDNAKNTVYLQMNSLKPEDTAVYYCAVDTDIYYWLGYWGQGTQVTVSS

SEQ ID NO: 36299 - protein, 111 aa, Artificial Sequence
  Chemically Synthesized
QVQLQESGGGLVQAGGSLRLSCAASGSISTDSDMGWYRQAPGKERELVASIGFGTNTNYADSVKGRFTISRDNAKNTVYLQMNSLKPEDTAVYYCASFQYWGQGTQVTVSS

SEQ ID NO: 36300 - protein, 122 aa, Artificial Sequence
  Chemically Synthesized
QVQLQESGGGLVQAGGSLRLSCAASGYIFYSWTMGWYRQAPGKERELVAGITYGAITNYADSVKGRFTISRDNAKNTVYLQMNSLKPEDTAVYYCAAQAYHGDDYRRDLAYWGQGTQVTVSS

SEQ ID NO: 36301 - protein, 118 aa, Artificial Sequence
  Chemically Synthesized
QVQLQESGGGLVQAGGSLRLSCAASGTIFARDGMGWYRQAPGKEREFVAGIDPGSTTYYADSVKGRFTISRDNAKNTVYLQMNSLKPEDTAVYYCAAIRPTTRLLSYWGQGTQVTVSS

SEQ ID NO: 36302 - protein, 118 aa, Artificial Sequence
  Chemically Synthesized
QVQLQESGGGLVQAGGSLRLSCAASGSISPRQYMGWYRQAPGKEREFVATIDLGSITNYADSVKGRFTISRDNAKNTVYLQMNSLKPEDTAVYYCAAYRWWRAYHLYWGQGTQVTVSS

SEQ ID NO: 36303 - protein, 118 aa, Artificial Sequence
  Chemically Synthesized
QVQLQESGGGLVQAGGSLRLSCAASGTISRPIVMGWYRQAPGKERELVATITYGTSTYYADSVKGRFTISRDNAKNTVYLQMNSLKPEDTAVYYCAVLYGAVWFHSYWGQGTQVTVSS

SEQ ID NO: 36304 - protein, 121 aa, Artificial Sequence
  Chemically Synthesized
QVQLQESGGGLVQAGGSLRLSCAASGYISVDTDMGWYRQAPGKERELVATISEGGTTYYADSVKGRFTISRDNAKNTVYLQMNSLKPEDTAVYYCAVTTTLVTRVLLTMYWGQGTQVTVSS

SEQ ID NO: 36305 - protein, 121 aa, Artificial Sequence
  Chemically Synthesized
QVQLQESGGGLVQAGGSLRLSCAASGSISSAPSMGWYRQAPGKEREFVALLLLVLLPYADSVKGRFTISRDNAKNTVYLQMNSLKPEDTAVYYCAVRLTSSGNDTAYLFYWGQGTQVTVSS

SEQ ID NO: 36306 - protein, 112 aa, Artificial Sequence
  Chemically Synthesized
QVQLQESGGGLVQAGGSLRLSCAASGTMGWYRQAPGKERELLVVVVLPYADSVKGRFTISRDNAKNTVYLQMNSLKPEDTAVYYCAVALARDTDDASTYGYWGQGTQVTVSS

SEQ ID NO: 36307 - protein, 118 aa, Artificial Sequence
  Chemically Synthesized
QVQLQESGGGLVQAGGSLRLSCAASGNISSGYAMGWYRQAPGKEREFVATIDRGSNTYYADSVKGRFTISRDNAKNTVYLQMNSLKPEDTAVYYCAAEPYHAGYHAYWGQGTQVTVSS

SEQ ID NO: 36308 - protein, 122 aa, Artificial Sequence
  Chemically Synthesized
QVQLQESGGGLVQAGGSLRLSCAASGNIFNGAYMGWYRQAPGKEREFVAGIARGGNTNYADSVKGRFTISRDNAKNTVYLQMNSLKPEDTAVYYCAVIDYFYYDDPLYHVYWGQGTQVTVSS

SEQ ID NO: 36309 - protein, 122 aa, Artificial Sequence
  Chemically Synthesized
QVQLQESGGGLVQAGGSLRLSCAASGNIFDEARMGWYRQAPGKERELVATITTGGSTYYADSVKGRFTISRDNAKNTVYLQMNSLKPEDTAVYYCAADSELYPGYSYEHVYWGQGTQVTVSS

SEQ ID NO: 36310 - protein, 118 aa, Artificial Sequence
  Chemically Synthesized
QVQLQESGGGLVQAGGSLRLSCAASGNIFRYSNMGWYRQAPGKEREFVASITTGTTTYYADSVKGRFTISRDNAKNTVYLQMNSLKPEDTAVYYCAVGPISFFALSYWGQGTQVTVSS

SEQ ID NO: 36311 - protein, 118 aa, Artificial Sequence
  Chemically Synthesized
QVQLQESGGGLVQAGGSLRLSCAASGTIFRRLYMGWYRQAPGKERELVAGINYGTNTYYADSVKGRFTISRDNAKNTVYLQMNSLKPEDTAVYYCAARAQYTIRLDYWGQGTQVTVSS

SEQ ID NO: 36312 - protein, 118 aa, Artificial Sequence
  Chemically Synthesized
QVQLQESGGGLVQAGGSLRLSCAASGNISYLYRMGWYRQAPGKEREFVASINDGSTTNYADSVKGRFTISRDNAKNTVYLQMNSLKPEDTAVYYCAALSYDTAYHYYWGQGTQVTVSS

SEQ ID NO: 36313 - protein, 110 aa, Artificial Sequence
  Chemically Synthesized
QVQLQESGGGLVQAGGSLRLSCAASGSIFIYHDMGWYRQAPGKERELEYQYADSVKGRFTISRDNAKNTVYLQMNSLKPEDTAVYYCAADAYTFYLYAYWGQGTQVTVSS

SEQ ID NO: 36314 - protein, 118 aa, Artificial Sequence
  Chemically Synthesized
QVQLQESGGGLVQAGGSLRLSCAASGNIFSGSYMGWYRQAPGKERELVAAIDPGGSTNYADSVKGRFTISRDNAKNTVYLQMNSLKPEDTAVYYCAVWYLSRDPLVYWGQGTQVTVSS

SEQ ID NO: 36315 - protein, 121 aa, Artificial Sequence
  Chemically Synthesized
QVQLQESGGGLVQAGGSLRLSCAASGSISNSDWMGWYRQAPGKEREFVAAITLGTNTNYADSVKGRFTISRDNAKNTVYLQMNSLKPEDTAVYYCAASEAAYYYWWSSIYWGQGTQVTVSS

SEQ ID NO: 36316 - protein, 122 aa, Artificial Sequence
  Chemically Synthesized
QVQLQESGGGLVQAGGSLRLSCAASGNIFGDLLMGWYRQAPGKEREFVAAINDGASTNYADSVKGRFTISRDNAKNTVYLQMNSLKPEDTAVYYCAADGYARPRYYNYLPYWGQGTQVTVSS

SEQ ID NO: 36317 - protein, 122 aa, Artificial Sequence
  Chemically Synthesized
QVQLQESGGGLVQAGGSLRLSCAASGTIFSRRYMGWYRQAPGKEREFVATITRGGNTYYADSVKGRFTISRDNAKNTVYLQMNSLKPEDTAVYYCAADTQGDYPVTDPLYYWGQGTQVTVSS

SEQ ID NO: 36318 - protein, 118 aa, Artificial Sequence
  Chemically Synthesized
QVQLQESGGGLVQAGGSLRLSCAASGSISGYVFMGWYRQAPGKERELVAGITDGGITYYADSVKGRFTISRDNAKNTVYLQMNSLKPEDTAVYYCAVSYPYISFYSYWGQGTQVTVSS

SEQ ID NO: 36319 - protein, 118 aa, Artificial Sequence
  Chemically Synthesized
QVQLQESGGGLVQAGGSLRLSCAASGTIFGVFFMGWYRQAPGKEREFVAAIGVGATTNYADSVKGRFTISRDNAKNTVYLQMNSLKPEDTAVYYCAVGVDTSNPYPYWGQGTQVTVSS

SEQ ID NO: 36320 - protein, 122 aa, Artificial Sequence
  Chemically Synthesized
QVQLQESGGGLVQAGGSLRLSCAASGSISWGDFMGWYRQAPGKEREFVAGITWGANTYYADSVKGRFTISRDNAKNTVYLQMNSLKPEDTAVYYCAARAPAYLHYPRDLYYWGQGTQVTVSS

SEQ ID NO: 36321 - protein, 121 aa, Artificial Sequence
  Chemically Synthesized
QVQLQESGGGLVQAGGSLRLSCAASGYIFDHRYMGWYRQAPGKEREFVATIADGGITNYADSVKGRFTISRDNAKNTVYLQMNSLKPEDTAVYYCAATSNSGTTTTVRIYWGQGTQVTVSS

SEQ ID NO: 36322 - protein, 122 aa, Artificial Sequence
  Chemically Synthesized
QVQLQESGGGLVQAGGSLRLSCAASGSIFWNDSMGWYRQAPGKERELVAAIAYGTSTNYADSVKGRFTISRDNAKNTVYLQMNSLKPEDTAVYYCAALDTPGYLDIGRYDYWGQGTQVTVSS

SEQ ID NO: 36323 - protein, 120 aa, Artificial Sequence
  Chemically Synthesized
QVQLQESGGGLVQAGGSLRLSCAASGTIFPWVYMGWYRQAPGKEREFVAGIGAGGITNYADSVKGRFTISRDNAKNTVYLQMNSLKPEDTAVYYCAAYHPYESSVNTLYWGQGTQVTVSS

SEQ ID NO: 36324 - protein, 118 aa, Artificial Sequence
  Chemically Synthesized
QVQLQESGGGLVQAGGSLRLSCAASGTISVRYPMGWYRQAPGKEREFVAGISVGTNTNYADSVKGRFTISRDNAKNTVYLQMNSLKPEDTAVYYCAVPLYYGYGFGYWGQGTQVTVSS

SEQ ID NO: 36325 - protein, 121 aa, Artificial Sequence
  Chemically Synthesized
QVQLQESGGGLVQAGGSLRLSCAASGTISPTYHMGWYRQAPGKEREFVATIAGGSTYYADSVKGRFTISRDNAKNTVYLQMNSLKPEDTAVYYCAADGGDQSYQTARFDYWGQGTQVTVSS

SEQ ID NO: 36326 - protein, 118 aa, Artificial Sequence
  Chemically Synthesized
QVQLQESGGGLVQAGGSLRLSCAASGNIFRIRDMGWYRQAPGKEREFVAAISYGTSTNYADSVKGRFTISRDNAKNTVYLQMNSLKPEDTAVYYCAVYFVRRQYYPYWGQGTQVTVSS

SEQ ID NO: 36327 - protein, 116 aa, Artificial Sequence
  Chemically Synthesized
QVQLQESGGGLVQAGGSLRLSCAASGYIFYSMGWYRQAPGKERELVATITTGGNTYYADSVKGRFTISRDNAKNTVYLQMNSLKPEDTAVYYCAAGHTYVSYYLYWGQGTQVTVSS

SEQ ID NO: 36328 - protein, 118 aa, Artificial Sequence
  Chemically Synthesized
QVQLQESGGGLVQAGGSLRLSCAASGTISRDDTMGWYRQAPGKEREFVASIGSVLVTNYADSVKGRFTISRDNAKNTVYLQMNSLKPEDTAVYYCAADHPWGSRHVYWGQGTQVTVSS

SEQ ID NO: 36329 - protein, 122 aa, Artificial Sequence
  Chemically Synthesized
QVQLQESGGGLVQAGGSLRLSCAASGNIFRHIVMGWYRQAPGKERELVASIGDGSTTNYADSVKGRFTISRDNAKNTVYLQMNSLKPEDTAVYYCAAPYEAAIVLVTVTMYWGQGTQVTVSS

SEQ ID NO: 36330 - protein, 122 aa, Artificial Sequence
  Chemically Synthesized
QVQLQESGGGLVQAGGSLRLSCAASGNISRDVSMGWYRQAPGKERELVAGIDPGGSTYYADSVKGRFTISRDNAKNTVYLQMNSLKPEDTAVYYCAVWGTSYFDVVFNLGYWGQGTQVTVSS

SEQ ID NO: 36331 - protein, 120 aa, Artificial Sequence
  Chemically Synthesized
QVQLQESGGGLVQAGGSLRLSCAASGTIFSLRMGWYRQAPGKERELVATISTGGTTYYADSVKGRFTISRDNAKNTVYLQMNSLKPEDTAVYYCAVWYQGTDLVLYHVYWGQGTQVTVSS

SEQ ID NO: 36332 - protein, 126 aa, Artificial Sequence
  Chemically Synthesized
QVQLQESGGGLVQAGGSLRLSCAASGSISYDYRMGWYRQAPGKEREFVAAITYGSSTYYADSVKGRFTISRDNAKNTVYLQMNSLKPEDTAVYYCAVYGNDAWRTHQRNYSYHTYWGQGTQVTVSS

SEQ ID NO: 36333 - protein, 118 aa, Artificial Sequence
  Chemically Synthesized
QVQLQESGGGLVQAGGSLRLSCAASGNISRADTMGWYRQAPGKEREFVAGITFGTSTNYADSVKGRFTISRDNAKNTVYLQMNSLKPEDTAVYYCAAVVRTPRPFGYWGQGTQVTVSS

SEQ ID NO: 36334 - protein, 118 aa, Artificial Sequence
  Chemically Synthesized
QVQLQESGGGLVQAGGSLRLSCAASGTIFLRNYMGWYRQAPGKERELVATISYGGNTNYADSVKGRFTISRDNAKNTVYLQMNSLKPEDTAVYYCAADYTGAFLHYYWGQGTQVTVSS

SEQ ID NO: 36335 - protein, 122 aa, Artificial Sequence
  Chemically Synthesized
QVQLQESGGGLVQAGGSLRLSCAASGTIFIYDPMGWYRQAPGKEREFVASITRGATTYYADSVKGRFTISRDNAKNTVYLQMNSLKPEDTAVYYCAVPSTTLWIYLYRLYYWGQGTQVTVSS

SEQ ID NO: 36336 - protein, 116 aa, Artificial Sequence
  Chemically Synthesized
QVQLQESGGGLVQAGGSLRLSCAASGTISRKYSMGWYRQAPGKEREFVAGIARGANTNYADSVKGRFTISRDNAKNTVYLQMNSLKPEDTAVYYCAAAGTSHLYYWGQGTQVTVSS

SEQ ID NO: 36337 - protein, 116 aa, Artificial Sequence
  Chemically Synthesized
QVQLQESGGGLVQAGGSLRLSCAASGTISDSYSMGWYRQAPGKERELVAAIAPGSTTNYADSVKGRFTISRDNAKNTVYLQMNSLKPEDTAVYYCAADYAYAYPYWGQGTQVTVSS

SEQ ID NO: 36338 - protein, 122 aa, Artificial Sequence
  Chemically Synthesized
QVQLQESGGGLVQAGGSLRLSCAASGYIFAGSQMGWYRQAPGKEREFVASIDDGGTTYYADSVKGRFTISRDNAKNTVYLQMNSLKPEDTAVYYCAVDGGDPWYAYGTYDYWGQGTQVTVSS

SEQ ID NO: 36339 - protein, 122 aa, Artificial Sequence
  Chemically Synthesized
QVQLQESGGGLVQAGGSLRLSCAASGTIFFYDPMGWYRQAPGKEREFVAAIDLGASTNYADSVKGRFTISRDNAKNTVYLQMNSLKPEDTAVYYCAALYYSNNPARRYHYYWGQGTQVTVSS

SEQ ID NO: 36340 - protein, 116 aa, Artificial Sequence
  Chemically Synthesized
QVQLQESGGGLVQAGGSLRLSCAASGSISGVRYMGWYRQAPGKERELVASIGVGGIPYADSVKGRFTISRDNAKNTVYLQMNSLKPEDTAVYYCAVIQFSVRTIYWGQGTQVTVSS

SEQ ID NO: 36341 - protein, 117 aa, Artificial Sequence
  Chemically Synthesized
QVQLQESGGGLVQAGGSLRLSCAASGYISYGRDMGWYRQAPGKERELVAGIASVLVPYADSVKGRFTISRDNAKNTVYLQMNSLKPEDTAVYYCAAVYYWFDHLEYWGQGTQVTVSS

SEQ ID NO: 36342 - protein, 118 aa, Artificial Sequence
  Chemically Synthesized
QVQLQESGGGLVQAGGSLRLSCAASGTIFPARGMGWYRQAPGKEREFVATITRGATTYYADSVKGRFTISRDNAKNTVYLQMNSLKPEDTAVYYCAAIAGRYRYHYYWGQGTQVTVSS

SEQ ID NO: 36343 - protein, 118 aa, Artificial Sequence
  Chemically Synthesized
QVQLQESGGGLVQAGGSLRLSCAASGNISAGANMGWYRQAPGKEREFVAAIGVGTITYYADSVKGRFTISRDNAKNTVYLQMNSLKPEDTAVYYCAVLFHTGRWHYYWGQGTQVTVSS

SEQ ID NO: 36344 - protein, 117 aa, Artificial Sequence
  Chemically Synthesized
QVQLQESGGGLVQAGGSLRLSCAASGNISRPYAMGWYRQAPGKEREFVAGINGGGSTNYADSVKGRFTISRDNAKNTVYLQMNSLKPEDTAVYYCAAYYYEYRHHYWGQGTQVTVSS

SEQ ID NO: 36345 - protein, 125 aa, Artificial Sequence
  Chemically Synthesized
QVQLQESGGGLVQAGGSLRLSCAASGSISPGAWMGWYRQAPGKERELVAGISSGGTPYADSVKGRFTISRDNAKNTVYLQMNSLKPEDTAVYYCAVHGSSGLPAVRSFSGWLSYWGQGTQVTVSS

SEQ ID NO: 36346 - protein, 118 aa, Artificial Sequence
  Chemically Synthesized
QVQLQESGGGLVQAGGSLRLSCAASGTISSWRVMGWYRQAPGKEREFVAAIGYGGNTNYADSVKGRFTISRDNAKNTVYLQMNSLKPEDTAVYYCAAYTRHHRYYYYWGQGTQVTVSS

SEQ ID NO: 36347 - protein, 118 aa, Artificial Sequence
  Chemically Synthesized
QVQLQESGGGLVQAGGSLRLSCAASGNISQTGVMGWYRQAPGKEREFVAGITSGGSTNYADSVKGRFTISRDNAKNTVYLQMNSLKPEDTAVYYCAALLPRLRLLYYWGQGTQVTVSS

SEQ ID NO: 36348 - protein, 118 aa, Artificial Sequence
  Chemically Synthesized
QVQLQESGGGLVQAGGSLRLSCAASGNISRNPNMGWYRQAPGKERELVASINGGGITNYADSVKGRFTISRDNAKNTVYLQMNSLKPEDTAVYYCAAIDYQYGWYAYWGQGTQVTVSS

SEQ ID NO: 36349 - protein, 118 aa, Artificial Sequence
  Chemically Synthesized
QVQLQESGGGLVQAGGSLRLSCAASGTISGYYTMGWYRQAPGKERELVATIDYGGTTNYADSVKGRFTISRDNAKNTVYLQMNSLKPEDTAVYYCAVYWVQSWYHIYWGQGTQVTVSS

SEQ ID NO: 36350 - protein, 116 aa, Artificial Sequence
  Chemically Synthesized
QVQLQESGGGLVQAGGSLRLSCAASGTISLRSMGWYRQAPGKERELVASIAIGSITYADSVKGRFTISRDNAKNTVYLQMNSLKPEDTAVYYCAAQTGNRTYLRYWGQGTQVTVSS

SEQ ID NO: 36351 - protein, 122 aa, Artificial Sequence
  Chemically Synthesized
QVQLQESGGGLVQAGGSLRLSCAASGTISTGDAMGWYRQAPGKERELVAAISSGSTTYYADSVKGRFTISRDNAKNTVYLQMNSLKPEDTAVYYCAVAVTYDTYTITVLRYWGQGTQVTVSS

SEQ ID NO: 36352 - protein, 126 aa, Artificial Sequence
  Chemically Synthesized
QVQLQESGGGLVQAGGSLRLSCAASGTIFDDVDMGWYRQAPGKEREFVAAIDYGATTNYADSVKGRFTISRDNAKNTVYLQMNSLKPEDTAVYYCAARGYDTSTYRVDLADKHYYWGQGTQVTVSS

SEQ ID NO: 36353 - protein, 118 aa, Artificial Sequence
  Chemically Synthesized
QVQLQESGGGLVQAGGSLRLSCAASGSIFTFQYMGWYRQAPGKEREFVASISYGGNTNYADSVKGRFTISRDNAKNTVYLQMNSLKPEDTAVYYCAADVEYSAYHYYWGQGTQVTVSS

SEQ ID NO: 36354 - protein, 118 aa, Artificial Sequence
  Chemically Synthesized
QVQLQESGGGLVQAGGSLRLSCAASGTIFVYYSMGWYRQAPGKERELVAGISLGTTTYYADSVKGRFTISRDNAKNTVYLQMNSLKPEDTAVYYCAVYPSQYTGHSYWGQGTQVTVSS

SEQ ID NO: 36355 - protein, 122 aa, Artificial Sequence
  Chemically Synthesized
QVQLQESGGGLVQAGGSLRLSCAASGSISGLGYMGWYRQAPGKERELVAGINQGATTNYADSVKGRFTISRDNAKNTVYLQMNSLKPEDTAVYYCAADELDGGEGNSDYSYWGQGTQVTVSS

SEQ ID NO: 36356 - protein, 118 aa, Artificial Sequence
  Chemically Synthesized
QVQLQESGGGLVQAGGSLRLSCAASGTIFGAYAMGWYRQAPGKEREFVATIGYGATTNYADSVKGRFTISRDNAKNTVYLQMNSLKPEDTAVYYCAAVRNDAANHYYWGQGTQVTVSS

SEQ ID NO: 36357 - protein, 118 aa, Artificial Sequence
  Chemically Synthesized
QVQLQESGGGLVQAGGSLRLSCAASGYIFDAQDMGWYRQAPGKEREFVAGINRGTSTYYADSVKGRFTISRDNAKNTVYLQMNSLKPEDTAVYYCAAHVQGWGSYDYWGQGTQVTVSS

SEQ ID NO: 36358 - protein, 122 aa, Artificial Sequence
  Chemically Synthesized
QVQLQESGGGLVQAGGSLRLSCAASGYIFAIGIMGWYRQAPGKEREFVAAIGLGGSTNYADSVKGRFTISRDNAKNTVYLQMNSLKPEDTAVYYCAVIQAGARYGIRYHYYWGQGTQVTVSS

SEQ ID NO: 36359 - protein, 118 aa, Artificial Sequence
  Chemically Synthesized
QVQLQESGGGLVQAGGSLRLSCAASGYISLIVYMGWYRQAPGKERELVASITGGASTYYADSVKGRFTISRDNAKNTVYLQMNSLKPEDTAVYYCAVREVFSLWHLYWGQGTQVTVSS

SEQ ID NO: 36360 - protein, 118 aa, Artificial Sequence
  Chemically Synthesized
QVQLQESGGGLVQAGGSLRLSCAASGNISVSVYMGWYRQAPGKEREFVAGISSGASTNYADSVKGRFTISRDNAKNTVYLQMNSLKPEDTAVYYCAALIHNVAWYYYWGQGTQVTVSS

SEQ ID NO: 36361 - protein, 122 aa, Artificial Sequence
  Chemically Synthesized
QVQLQESGGGLVQAGGSLRLSCAASGYISDFRVMGWYRQAPGKEREFVAGINSGGTTNYADSVKGRFTISRDNAKNTVYLQMNSLKPEDTAVYYCAVVAYKGPQPYPYHGYWGQGTQVTVSS

SEQ ID NO: 36362 - protein, 118 aa, Artificial Sequence
  Chemically Synthesized
QVQLQESGGGLVQAGGSLRLSCAASGTISDYSWMGWYRQAPGKERELVAAIDQGGITNYADSVKGRFTISRDNAKNTVYLQMNSLKPEDTAVYYCAARQWYANLFVYWGQGTQVTVSS

SEQ ID NO: 36363 - protein, 118 aa, Artificial Sequence
  Chemically Synthesized
QVQLQESGGGLVQAGGSLRLSCAASGSISGQVIMGWYRQAPGKEREFVAGIGYGTNTNYADSVKGRFTISRDNAKNTVYLQMNSLKPEDTAVYYCAVIVHADINHYYWGQGTQVTVSS

SEQ ID NO: 36364 - protein, 118 aa, Artificial Sequence
  Chemically Synthesized
QVQLQESGGGLVQAGGSLRLSCAASGSIFWASDMGWYRQAPGKERELVASIGFGGNTYYADSVKGRFTISRDNAKNTVYLQMNSLKPEDTAVYYCAVDAVRRGGLQYWGQGTQVTVSS

SEQ ID NO: 36365 - protein, 118 aa, Artificial Sequence
  Chemically Synthesized
QVQLQESGGGLVQAGGSLRLSCAASGSIFPYVLMGWYRQAPGKERELVAAIALGSTTNYADSVKGRFTISRDNAKNTVYLQMNSLKPEDTAVYYCAVFGPISARHPYWGQGTQVTVSS

SEQ ID NO: 36366 - protein, 117 aa, Artificial Sequence
  Chemically Synthesized
QVQLQESGGGLVQAGGSLRLSCAASGTIFAVYDMGWYRQAPGKERELVPVLLRVLVPYADSVKGRFTISRDNAKNTVYLQMNSLKPEDTAVYYCAVYVVHPLEHIYWGQGTQVTVSS

SEQ ID NO: 36367 - protein, 121 aa, Artificial Sequence
  Chemically Synthesized
QVQLQESGGGLVQAGGSLRLSCAASGTILPFQMGWYRQAPGKEREFVASIARGSITNYADSVKGRFTISRDNAKNTVYLQMNSLKPEDTAVYYCAAPWNAGDYTYDGYDYWGQGTQVTVSS

SEQ ID NO: 36368 - protein, 125 aa, Artificial Sequence
  Chemically Synthesized
QVQLQESGGGLVQAGGSLRLSCAASGNISYISFMGWYRQAPGKEREFVAAIAGVLLPYADSVKGRFTISRDNAKNTVYLQMNSLKPEDTAVYYCAVEALWARTWGHPRYYVYPYWGQGTQVTVSS

SEQ ID NO: 36369 - protein, 113 aa, Artificial Sequence
  Chemically Synthesized
QVQLQESGGGLVQAGGSLRLSCAASGYNMGWYRQAPGKEREFVATIGDGANTYYADSVKGRFTISRDNAKNTVYLQMNSLKPEDTAVYYCAADKSYFTFLDYWGQGTQVTVSS

SEQ ID NO: 36370 - protein, 117 aa, Artificial Sequence
  Chemically Synthesized
QVQLQESGGGLVQAGGSLRLSCAASGYIFSLFMGWYRQAPGKERELVATIGIGTSTNYADSVKGRFTISRDNAKNTVYLQMNSLKPEDTAVYYCAVAQVGDYQHAYWGQGTQVTVSS

SEQ ID NO: 36371 - protein, 118 aa, Artificial Sequence
  Chemically Synthesized
QVQLQESGGGLVQAGGSLRLSCAASGTISQAGYMGWYRQAPGKEREFVATIAVGGSTNYADSVKGRFTISRDNAKNTVYLQMNSLKPEDTAVYYCAVLPYTRGVLVYWGQGTQVTVSS

SEQ ID NO: 36372 - protein, 117 aa, Artificial Sequence
  Chemically Synthesized
QVQLQESGGGLVQAGGSLRLSCAASGTIFYTITMGWYRQAPGKEREFVAGIASGTTTNYADSVKGRFTISRDNAKNTVYLQMNSLKPEDTAVYYCAAYDARRGFSYWGQGTQVTVSS

SEQ ID NO: 36373 - protein, 122 aa, Artificial Sequence
  Chemically Synthesized
QVQLQESGGGLVQAGGSLRLSCAASGYIFSWRYMGWYRQAPGKEREFVAAISYGASTYYADSVKGRFTISRDNAKNTVYLQMNSLKPEDTAVYYCAVLVWQGPIIYGDLIYWGQGTQVTVSS

SEQ ID NO: 36374 - protein, 125 aa, Artificial Sequence
  Chemically Synthesized
QVQLQESGGGLVQAGGSLRLSCAASGSISAPYIMGWYRQAPGKEREFVASMVTVVLPYADSVKGRFTISRDNAKNTVYLQMNSLKPEDTAVYYCAVTAQHDGDTYVRPSDGLHYWGQGTQVTVSS

SEQ ID NO: 36375 - protein, 118 aa, Artificial Sequence
  Chemically Synthesized
QVQLQESGGGLVQAGGSLRLSCAASGYISYRYAMGWYRQAPGKEREFVAAINSGGSTYYADSVKGRFTISRDNAKNTVYLQMNSLKPEDTAVYYCAVRPYYIFWLVYWGQGTQVTVSS

SEQ ID NO: 36376 - protein, 117 aa, Artificial Sequence
  Chemically Synthesized
QVQLQESGGGLVQAGGSLRLSCAASGTISVDADMGWYRQAPGKEREFVAGITAGATTNYADSVKGRFTISRDNAKNTVYLQMNSLKPEDTAVYYCAAGYDPLPLYYWGQGTQVTVSS

SEQ ID NO: 36377 - protein, 118 aa, Artificial Sequence
  Chemically Synthesized
QVQLQESGGGLVQAGGSLRLSCAASGSISWGHTMGWYRQAPGKERELVATISAGTNTYYADSVKGRFTISRDNAKNTVYLQMNSLKPEDTAVYYCAADHDRYTPYIYWGQGTQVTVSS

SEQ ID NO: 36378 - protein, 115 aa, Artificial Sequence
  Chemically Synthesized
QVQLQESGGGLVQAGGSLRLSCAASGYISKPYDMGWYRQAPGKERELVAAIGDGGTTNYADSVKGRFTISRDNAKNTVYLQMNSLKPEDTAVYYCAVLLLVLIYWGQGTQVTVSS

SEQ ID NO: 36379 - protein, 117 aa, Artificial Sequence
  Chemically Synthesized
QVQLQESGGGLVQAGGSLRLSCAASGTISPYIMGWYRQAPGKEREFVAAIDTGAITNYADSVKGRFTISRDNAKNTVYLQMNSLKPEDTAVYYCAAWDVNRTVLDYWGQGTQVTVSS

SEQ ID NO: 36380 - protein, 118 aa, Artificial Sequence
  Chemically Synthesized
QVQLQESGGGLVQAGGSLRLSCAASGSISPDYYMGWYRQAPGKEREFVASISRGAITYYADSVKGRFTISRDNAKNTVYLQMNSLKPEDTAVYYCAATRETVDGFAYWGQGTQVTVSS

SEQ ID NO: 36381 - protein, 112 aa, Artificial Sequence
  Chemically Synthesized
QVQLQESGGGLVQAGGSLRLSCAASGYIFSYGDMGWYRQAPGKEREFVASIVVLPYADSVKGRFTISRDNAKNTVYLQMNSLKPEDTAVYYCAVRYLGLRYWGQGTQVTVSS

SEQ ID NO: 36382 - protein, 117 aa, Artificial Sequence
  Chemically Synthesized
QVQLQESGGGLVQAGGSLRLSCAASGTISRGRAMGWYRQAPGKERELVAAIDIGANTNYADSVKGRFTISRDNAKNTVYLQMNSLKPEDTAVYYCAVRDEDTAHDYWGQGTQVTVSS

SEQ ID NO: 36383 - protein, 118 aa, Artificial Sequence
  Chemically Synthesized
QVQLQESGGGLVQAGGSLRLSCAASGTISPGTLMGWYRQAPGKERELVASIGVGTSTNYADSVKGRFTISRDNAKNTVYLQMNSLKPEDTAVYYCAAGRYDYYLLTYWGQGTQVTVSS

SEQ ID NO: 36384 - protein, 121 aa, Artificial Sequence
  Chemically Synthesized
QVQLQESGGGLVQAGGSLRLSCAASGTISILGDMGWYRQAPGKEREFVATINVGSITNYADSVKGRFTISRDNAKNTVYLQMNSLKPEDTAVYYCAVDQYADGGLYANMYWGQGTQVTVSS

SEQ ID NO: 36385 - protein, 111 aa, Artificial Sequence
  Chemically Synthesized
QVQLQESGGGLVQAGGSLRLSCAASGTISFDYYMGWYRQAPGKERELVAGITLVLLPYADSVKGRFTISRDNAKNTVYLQMNSLKPEDTAVYYCAAYHQYWGQGTQVTVSS

SEQ ID NO: 36386 - protein, 118 aa, Artificial Sequence
  Chemically Synthesized
QVQLQESGGGLVQAGGSLRLSCAASGNIFQLQTMGWYRQAPGKERELVAAISYGTSTYYADSVKGRFTISRDNAKNTVYLQMNSLKPEDTAVYYCAVYKIVNDRYIYWGQGTQVTVSS

SEQ ID NO: 36387 - protein, 115 aa, Artificial Sequence
  Chemically Synthesized
QVQLQESGGGLVQAGGSLRLSCAASGYIFGVDFMGWYRQAPGKERELVASIADGTTTYYADSVKGRFTISRDNAKNTVYLQMNSLKPEDTAVYYCAVGKTVLLYWGQGTQVTVSS

SEQ ID NO: 36388 - protein, 111 aa, Artificial Sequence
  Chemically Synthesized
QVQLQESGGGLVQAGGSLRLSCAASGSISWTTQMGWYRQAPGKERELVAGIAAGYYYQYADSVKGRFTISRDNAKNTVYLQMNSLKPEDTAVYYCAYHEYWGQGTQVTVSS

SEQ ID NO: 36389 - protein, 118 aa, Artificial Sequence
  Chemically Synthesized
QVQLQESGGGLVQAGGSLRLSCAASGTISVRFVMGWYRQAPGKERELVATIAVGASTNYADSVKGRFTISRDNAKNTVYLQMNSLKPEDTAVYYCAVYYDDELRFGYWGQGTQVTVSS

SEQ ID NO: 36390 - protein, 118 aa, Artificial Sequence
  Chemically Synthesized
QVQLQESGGGLVQAGGSLRLSCAASGSIFPSTEMGWYRQAPGKEREFVAGIAYGSSTNYADSVKGRFTISRDNAKNTVYLQMNSLKPEDTAVYYCAVDWDDYNLHAYWGQGTQVTVSS

SEQ ID NO: 36391 - protein, 118 aa, Artificial Sequence
  Chemically Synthesized
QVQLQESGGGLVQAGGSLRLSCAASGTISLGSAMGWYRQAPGKEREFVAGISLGANTNYADSVKGRFTISRDNAKNTVYLQMNSLKPEDTAVYYCAAPDPYLGNHNYWGQGTQVTVSS

SEQ ID NO: 36392 - protein, 118 aa, Artificial Sequence
  Chemically Synthesized
QVQLQESGGGLVQAGGSLRLSCAASGTIFDEDSMGWYRQAPGKERELVAAIGGGTTTYYADSVKGRFTISRDNAKNTVYLQMNSLKPEDTAVYYCAAGSYDYSWLRYWGQGTQVTVSS

SEQ ID NO: 36393 - protein, 121 aa, Artificial Sequence
  Chemically Synthesized
QVQLQESGGGLVQAGGSLRLSCAASGTIFYYAGMGWYRQAPGKERELVAAINDGSTTYYADSVKGRFTISRDNAKNTVYLQMNSLKPEDTAVYYCAVATKSVSRSVRTIYWGQGTQVTVSS

SEQ ID NO: 36394 - protein, 118 aa, Artificial Sequence
  Chemically Synthesized
QVQLQESGGGLVQAGGSLRLSCAASGNIFRRDSMGWYRQAPGKEREFVASITYGSTTNYADSVKGRFTISRDNAKNTVYLQMNSLKPEDTAVYYCAAYISGASDHYYWGQGTQVTVSS

SEQ ID NO: 36395 - protein, 122 aa, Artificial Sequence
  Chemically Synthesized
QVQLQESGGGLVQAGGSLRLSCAASGSISWGYVMGWYRQAPGKEREFVATIGYGSNTYYADSVKGRFTISRDNAKNTVYLQMNSLKPEDTAVYYCAVGPRDWTTRDWYHDYWGQGTQVTVSS

SEQ ID NO: 36396 - protein, 122 aa, Artificial Sequence
  Chemically Synthesized
QVQLQESGGGLVQAGGSLRLSCAASGYISAYVGMGWYRQAPGKERELVAAIAFGTSTYYADSVKGRFTISRDNAKNTVYLQMNSLKPEDTAVYYCAASLWPRYYVYWRFSYWGQGTQVTVSS

SEQ ID NO: 36397 - protein, 122 aa, Artificial Sequence
  Chemically Synthesized
QVQLQESGGGLVQAGGSLRLSCAASGTISADSLMGWYRQAPGKEREFVATINYGANTNYADSVKGRFTISRDNAKNTVYLQMNSLKPEDTAVYYCAVRKTKVVDYWYTHYYWGQGTQVTVSS

SEQ ID NO: 36398 - protein, 118 aa, Artificial Sequence
  Chemically Synthesized
QVQLQESGGGLVQAGGSLRLSCAASGSIFDVLRMGWYRQAPGKEREFVAGIGYGGITNYADSVKGRFTISRDNAKNTVYLQMNSLKPEDTAVYYCAVNPTVNALHSYWGQGTQVTVSS

SEQ ID NO: 36399 - protein, 118 aa, Artificial Sequence
  Chemically Synthesized
QVQLQESGGGLVQAGGSLRLSCAASGTIFSSDDMGWYRQAPGKEREFVAAISYGGTTNYADSVKGRFTISRDNAKNTVYLQMNSLKPEDTAVYYCAVYPVHDYGHGYWGQGTQVTVSS

SEQ ID NO: 36400 - protein, 122 aa, Artificial Sequence
  Chemically Synthesized
QVQLQESGGGLVQAGGSLRLSCAASGYISDYSQMGWYRQAPGKERELVAAIDWGGKYLYADSVKGRFTISRDNAKNTVYLQMNSLKPEDTAVYYCAVYVTALNQRGYDYGYWGQGTQVTVSS

SEQ ID NO: 36401 - protein, 118 aa, Artificial Sequence
  Chemically Synthesized
QVQLQESGGGLVQAGGSLRLSCAASGNISARYGMGWYRQAPGKERELVATIDYGGSTYYADSVKGRFTISRDNAKNTVYLQMNSLKPEDTAVYYCAVYDPSNGGHDYWGQGTQVTVSS

SEQ ID NO: 36402 - protein, 118 aa, Artificial Sequence
  Chemically Synthesized
QVQLQESGGGLVQAGGSLRLSCAASGTIFVPWGMGWYRQAPGKERELVAAITYGGTTYYADSVKGRFTISRDNAKNTVYLQMNSLKPEDTAVYYCAVWRRYYADHWYWGQGTQVTVSS

SEQ ID NO: 36403 - protein, 122 aa, Artificial Sequence
  Chemically Synthesized
QVQLQESGGGLVQAGGSLRLSCAASGTISDYLDMGWYRQAPGKEREFVAAINGGTSTYYADSVKGRFTISRDNAKNTVYLQMNSLKPEDTAVYYCAVTNVHYADYAHTHWYWGQGTQVTVSS

SEQ ID NO: 36404 - protein, 118 aa, Artificial Sequence
  Chemically Synthesized
QVQLQESGGGLVQAGGSLRLSCAASGNISPYYFMGWYRQAPGKERELVAGIDSGATTNYADSVKGRFTISRDNAKNTVYLQMNSLKPEDTAVYYCAADVFAIRSLDYWGQGTQVTVSS

SEQ ID NO: 36405 - protein, 114 aa, Artificial Sequence
  Chemically Synthesized
QVQLQESGGGLVQAGGSLRLSCAASGYISWTRYMGWYRQAPGKERELVATIADGVIPYADSVKGRFTISRDNAKNTVYLQMNSLKPEDTAVYYCALSLYAYYYWGQGTQVTVSS

SEQ ID NO: 36406 - protein, 118 aa, Artificial Sequence
  Chemically Synthesized
QVQLQESGGGLVQAGGSLRLSCAASGNIFRDNVMGWYRQAPGKERELVAGIGYGATTYYADSVKGRFTISRDNAKNTVYLQMNSLKPEDTAVYYCAVWDPYSHDHDYWGQGTQVTVSS

SEQ ID NO: 36407 - protein, 118 aa, Artificial Sequence
  Chemically Synthesized
QVQLQESGGGLVQAGGSLRLSCAASGYIFDGYSMGWYRQAPGKERELVATIADGTSTYYADSVKGRFTISRDNAKNTVYLQMNSLKPEDTAVYYCAVGWETDYQLGYWGQGTQVTVSS

SEQ ID NO: 36408 - protein, 122 aa, Artificial Sequence
  Chemically Synthesized
QVQLQESGGGLVQAGGSLRLSCAASGTISQDTAMGWYRQAPGKERELVAGIGYGSITNYADSVKGRFTISRDNAKNTVYLQMNSLKPEDTAVYYCAAPYYASYGSRDYLSYWGQGTQVTVSS

SEQ ID NO: 36409 - protein, 114 aa, Artificial Sequence
  Chemically Synthesized
QVQLQESGGGLVQAGGSLRLSCAASGYISRGVGMGWYRQAPGKERELVAAIDDGTSTYYADSVKGRFTISRDNAKNTVYLQMNSLKPEDTAVYYCAADRPHDYWGQGTQVTVSS

SEQ ID NO: 36410 - protein, 117 aa, Artificial Sequence
  Chemically Synthesized
QVQLQESGGGLVQAGGSLRLSCAASGTISPLSDMGWYRQAPGKERELVASITYGASTNYADSVKGRFTISRDNAKNTVYLQMNSLKPEDTAVYYCAALRTTVVLTYWGQGTQVTVSS

SEQ ID NO: 36411 - protein, 118 aa, Artificial Sequence
  Chemically Synthesized
QVQLQESGGGLVQAGGSLRLSCAASGTISATYVMGWYRQAPGKERELVAGISGGTSTYYADSVKGRFTISRDNAKNTVYLQMNSLKPEDTAVYYCAAVDTPHYYHGYWGQGTQVTVSS

SEQ ID NO: 36412 - protein, 126 aa, Artificial Sequence
  Chemically Synthesized
QVQLQESGGGLVQAGGSLRLSCAASGSISALSLMGWYRQAPGKEREFVAGIASGATTNYADSVKGRFTISRDNAKNTVYLQMNSLKPEDTAVYYCAVLELAGYYLGYPRDDSFGYWGQGTQVTVSS

SEQ ID NO: 36413 - protein, 118 aa, Artificial Sequence
  Chemically Synthesized
QVQLQESGGGLVQAGGSLRLSCAASGTISYGYYMGWYRQAPGKEREFVATIGVGGTTNYADSVKGRFTISRDNAKNTVYLQMNSLKPEDTAVYYCAVGRRYFYYHVYWGQGTQVTVSS

SEQ ID NO: 36414 - protein, 122 aa, Artificial Sequence
  Chemically Synthesized
QVQLQESGGGLVQAGGSLRLSCAASGTIFYDVSMGWYRQAPGKERELVAAIADGGNTYYADSVKGRFTISRDNAKNTVYLQMNSLKPEDTAVYYCAVYDASYPYDGGPYAYWGQGTQVTVSS

SEQ ID NO: 36415 - protein, 122 aa, Artificial Sequence
  Chemically Synthesized
QVQLQESGGGLVQAGGSLRLSCAASGNISPIVGMGWYRQAPGKEREFVATIDAGSNTYYADSVKGRFTISRDNAKNTVYLQMNSLKPEDTAVYYCAAGPSGDTRLYAYYDYWGQGTQVTVSS

SEQ ID NO: 36416 - protein, 118 aa, Artificial Sequence
  Chemically Synthesized
QVQLQESGGGLVQAGGSLRLSCAASGYIFSTYYMGWYRQAPGKERELVASIANGGTTYYADSVKGRFTISRDNAKNTVYLQMNSLKPEDTAVYYCAAYDPHTGYHVYWGQGTQVTVSS

SEQ ID NO: 36417 - protein, 118 aa, Artificial Sequence
  Chemically Synthesized
QVQLQESGGGLVQAGGSLRLSCAASGTIFLSDTMGWYRQAPGKERELVATIAVGANTNYADSVKGRFTISRDNAKNTVYLQMNSLKPEDTAVYYCAAWDDFHLLLSYWGQGTQVTVSS

SEQ ID NO: 36418 - protein, 125 aa, Artificial Sequence
  Chemically Synthesized
QVQLQESGGGLVQAGGSLRLSCAASGTISASDYMGWYRQAPGKEREFVAAIAGGGITNYADSVKGRFTISRDNAKNTVYLQMNSLKPEDTAVYYCAAGIGSSYYLTASFTGRIYWGQGTQVTVSS

SEQ ID NO: 36419 - protein, 121 aa, Artificial Sequence
  Chemically Synthesized
QVQLQESGGGLVQAGGSLRLSCAASGTISSAIPMGWYRQAPGKEREFVAGINAGSTTNYADSVKGRFTISRDNAKNTVYLQMNSLKPEDTAVYYCAVDNKPPRSSTTLIYWGQGTQVTVSS

SEQ ID NO: 36420 - protein, 109 aa, Artificial Sequence
  Chemically Synthesized
QVQLQESGGGLVQAGGSLRLSCAASGYISPDPSMGWYRQAPGKERELVATLVVVVIPYADSVKGRFTISRDNAKNTVYLQMNSLKPEDTAVYYCAHPYWGQGTQVTVSS

SEQ ID NO: 36421 - protein, 117 aa, Artificial Sequence
  Chemically Synthesized
QVQLQESGGGLVQAGGSLRLSCAASGSIFRRDYMGWYRQAPGKEREFVASIGTGSNTYYADSVKGRFTISRDNAKNTVYLQMNSLKPEDTAVYYCAVVGGLDSTMYWGQGTQVTVSS

SEQ ID NO: 36422 - protein, 121 aa, Artificial Sequence
  Chemically Synthesized
QVQLQESGGGLVQAGGSLRLSCAASGTISPRVMGWYRQAPGKERELVATIGDGGSTYYADSVKGRFTISRDNAKNTVYLQMNSLKPEDTAVYYCAAVYDGVDYYIAYHPYWGQGTQVTVSS

SEQ ID NO: 36423 - protein, 118 aa, Artificial Sequence
  Chemically Synthesized
QVQLQESGGGLVQAGGSLRLSCAASGTISHRYYMGWYRQAPGKEREFVAAIAHGSTTYYADSVKGRFTISRDNAKNTVYLQMNSLKPEDTAVYYCAAEKITYLDHDYWGQGTQVTVSS

SEQ ID NO: 36424 - protein, 114 aa, Artificial Sequence
  Chemically Synthesized
QVQLQESGGGLVQAGGSLRLSCAASGNISGQWVMGWYRQAPGKERELVVVPYADSVKGRFTISRDNAKNTVYLQMNSLKPEDTAVYYCAVVDYYKHTASLLLYWGQGTQVTVSS

SEQ ID NO: 36425 - protein, 124 aa, Artificial Sequence
  Chemically Synthesized
QVQLQESGGGLVQAGGSLRLSCAASGYIFRYTNMGWYRQAPGKERELVAAIMTVVLPYADSVKGRFTISRDNAKNTVYLQMNSLKPEDTAVYYCAVYPHYPERGDNDSVLLDYWGQGTQVTVSS

SEQ ID NO: 36426 - protein, 118 aa, Artificial Sequence
  Chemically Synthesized
QVQLQESGGGLVQAGGSLRLSCAASGNIFSGTSMGWYRQAPGKERELVASITYGGNTNYADSVKGRFTISRDNAKNTVYLQMNSLKPEDTAVYYCAVYRLAIEYHAYWGQGTQVTVSS

SEQ ID NO: 36427 - protein, 118 aa, Artificial Sequence
  Chemically Synthesized
QVQLQESGGGLVQAGGSLRLSCAASGNISRDYVMGWYRQAPGKERELVAGITTGGTTYYADSVKGRFTISRDNAKNTVYLQMNSLKPEDTAVYYCAAVWDNEGDYLYWGQGTQVTVSS

SEQ ID NO: 36428 - protein, 125 aa, Artificial Sequence
  Chemically Synthesized
QVQLQESGGGLVQAGGSLRLSCAASGTIFYDDVMGWYRQAPGKERELVAGIAYGGNTYYADSVKGRFTISRDNAKNTVYLQMNSLKPEDTAVYYCAVNYYNSTLNVLFTLLTFYWGQGTQVTVSS

SEQ ID NO: 36429 - protein, 121 aa, Artificial Sequence
  Chemically Synthesized
QVQLQESGGGLVQAGGSLRLSCAASGNIFQGRYMGWYRQAPGKEREFVATIAIGGSTNYADSVKGRFTISRDNAKNTVYLQMNSLKPEDTAVYYCAVTSVITVLLLTVIYWGQGTQVTVSS

SEQ ID NO: 36430 - protein, 122 aa, Artificial Sequence
  Chemically Synthesized
QVQLQESGGGLVQAGGSLRLSCAASGNIFDSGYMGWYRQAPGKERELVASITHGSITYYADSVKGRFTISRDNAKNTVYLQMNSLKPEDTAVYYCAVYYYTYYWLGDDHLYWGQGTQVTVSS

SEQ ID NO: 36431 - protein, 120 aa, Artificial Sequence
  Chemically Synthesized
QVQLQESGGGLVQAGGSLRLSCAASGNIFISGYMGWYRQAPGKERELVATLMTVLVPYADSVKGRFTISRDNAKNTVYLQMNSLKPEDTAVYYCAASIGRQGPYIAHDYWGQGTQVTVSS

SEQ ID NO: 36432 - protein, 118 aa, Artificial Sequence
  Chemically Synthesized
QVQLQESGGGLVQAGGSLRLSCAASGNISAYGTMGWYRQAPGKEREFVATIDQGASTNYADSVKGRFTISRDNAKNTVYLQMNSLKPEDTAVYYCAVPGQAGNRHYYWGQGTQVTVSS

SEQ ID NO: 36433 - protein, 123 aa, Artificial Sequence
  Chemically Synthesized
QVQLQESGGGLVQAGGSLRLSCAASGSIFRRYGMGWYRQAPGKERELVAAIAVGGTTYYADSVKGRFTISRDNAKNTVYLQMNSLKPEDTAVYYCAAQYAEYAGDDGRDHNYWGQGTQVTVSS

SEQ ID NO: 36434 - protein, 117 aa, Artificial Sequence
  Chemically Synthesized
QVQLQESGGGLVQAGGSLRLSCAASGSISVGRSMGWYRQAPGKERELVATITVGAITYYADSVKGRFTISRDNAKNTVYLQMNSLKPEDTAVYYCAVPVYDPTPFYWGQGTQVTVSS

SEQ ID NO: 36435 - protein, 110 aa, Artificial Sequence
  Chemically Synthesized
QVQLQESGGGLVQAGGSLRLSCAASGNISDQYQMGWYRQAPGKERELVAGIGRGSITNYADSVKGRFTISRDNAKNTVYLQMNSLKPEDTAVYYCAADYWGQGTQVTVSS

SEQ ID NO: 36436 - protein, 119 aa, Artificial Sequence
  Chemically Synthesized
QVQLQESGGGLVQAGGSLRLSCAASGNIFDFTYMGWYRQAPGKERELVASIARGANTYYADSVKGRFTISRDNAKNTVYLQMNSLKPEDTAVYYCAVYVEPRGWLYTYWGQGTQVTVSS

SEQ ID NO: 36437 - protein, 126 aa, Artificial Sequence
  Chemically Synthesized
QVQLQESGGGLVQAGGSLRLSCAASGTIFHSSDMGWYRQAPGKERELVATISYGGTTYYADSVKGRFTISRDNAKNTVYLQMNSLKPEDTAVYYCAAWRLRAHSDVIGASPSFRYWGQGTQVTVSS

SEQ ID NO: 36438 - protein, 122 aa, Artificial Sequence
  Chemically Synthesized
QVQLQESGGGLVQAGGSLRLSCAASGTISLYYDMGWYRQAPGKEREFVASIDNGATTNYADSVKGRFTISRDNAKNTVYLQMNSLKPEDTAVYYCAARAIDGQLPSAYHWYWGQGTQVTVSS

SEQ ID NO: 36439 - protein, 110 aa, Artificial Sequence
  Chemically Synthesized
QVQLQESGGGLVQAGGSLRLSCAASGTISAGTYMGWYRQAPGKERELVASIDLGAITNYADSVKGRFTISRDNAKNTVYLQMNSLKPEDTAVYYCALNYWGQGTQVTVSS

SEQ ID NO: 36440 - protein, 121 aa, Artificial Sequence
  Chemically Synthesized
QVQLQESGGGLVQAGGSLRLSCAASGSIFLIAYMGWYRQAPGKERELVAAIDGGSTTYYADSVKGRFTISRDNAKNTVYLQMNSLKPEDTAVYYCAALYSVRTSRLLTMYWGQGTQVTVSS

SEQ ID NO: 36441 - protein, 126 aa, Artificial Sequence
  Chemically Synthesized
QVQLQESGGGLVQAGGSLRLSCAASGTISTTDNWMGWYRQAPGKERELVAAISSVVLPYADSVKGRFTISRDNAKNTVYLQMNSLKPEDTAVYYCAAGLDVDDIATLSSYILFQYWGQGTQVTVSS

SEQ ID NO: 36442 - protein, 117 aa, Artificial Sequence
  Chemically Synthesized
QVQLQESGGGLVQAGGSLRLSCAASGNIFRPGAMGWYRQAPGKEREFVGWYYLYADSVKGRFTISRDNAKNTVYLQMNSLKPEDTAVYYCAVTDAQYHSSGRTHAYWGQGTQVTVSS

SEQ ID NO: 36443 - protein, 117 aa, Artificial Sequence
  Chemically Synthesized
QVQLQESGGGLVQAGGSLRLSCAASGTIFDAYAMGWYRQAPGKERELVASINRGAVPYADSVKGRFTISRDNAKNTVYLQMNSLKPEDTAVYYCAVDPYDPPPYVYWGQGTQVTVSS

SEQ ID NO: 36444 - protein, 117 aa, Artificial Sequence
  Chemically Synthesized
QVQLQESGGGLVQAGGSLRLSCAASGTISYHDEMGWYRQAPGKERELVAGMLTVVLPYADSVKGRFTISRDNAKNTVYLQMNSLKPEDTAVYYCAVWDVDLPIHTYWGQGTQVTVSS

SEQ ID NO: 36445 - protein, 118 aa, Artificial Sequence
  Chemically Synthesized
QVQLQESGGGLVQAGGSLRLSCAASGNIFDYYRMGWYRQAPGKERELVASIDDGTNTNYADSVKGRFTISRDNAKNTVYLQMNSLKPEDTAVYYCAAGSATYGTHAYWGQGTQVTVSS

SEQ ID NO: 36446 - protein, 118 aa, Artificial Sequence
  Chemically Synthesized
QVQLQESGGGLVQAGGSLRLSCAASGSIFYGLIMGWYRQAPGKEREFVASISGGGTTNYADSVKGRFTISRDNAKNTVYLQMNSLKPEDTAVYYCAVGNHIFTRHSYWGQGTQVTVSS

SEQ ID NO: 36447 - protein, 122 aa, Artificial Sequence
  Chemically Synthesized
QVQLQESGGGLVQAGGSLRLSCAASGTIFAYDYMGWYRQAPGKERELVASIGAGSTTYYADSVKGRFTISRDNAKNTVYLQMNSLKPEDTAVYYCAADGDDIGTDYYPFYYWGQGTQVTVSS

SEQ ID NO: 36448 - protein, 117 aa, Artificial Sequence
  Chemically Synthesized
QVQLQESGGGLVQAGGSLRLSCAASGTIFWSTMGWYRQAPGKEREFVAAIGLGGITYYADSVKGRFTISRDNAKNTVYLQMNSLKPEDTAVYYCAVNQGWETRYLYWGQGTQVTVSS

SEQ ID NO: 36449 - protein, 122 aa, Artificial Sequence
  Chemically Synthesized
QVQLQESGGGLVQAGGSLRLSCAASGNIFTGPQMGWYRQAPGKERELVAGIAAGTSTYYADSVKGRFTISRDNAKNTVYLQMNSLKPEDTAVYYCAVAGGRPYWNGLSYAYWGQGTQVTVSS

SEQ ID NO: 36450 - protein, 118 aa, Artificial Sequence
  Chemically Synthesized
QVQLQESGGGLVQAGGSLRLSCAASGTISYLYRMGWYRQAPGKEREFVATISQGGITYYADSVKGRFTISRDNAKNTVYLQMNSLKPEDTAVYYCAVRRYVNGVYTYWGQGTQVTVSS

SEQ ID NO: 36451 - protein, 118 aa, Artificial Sequence
  Chemically Synthesized
QVQLQESGGGLVQAGGSLRLSCAASGNISLYGRMGWYRQAPGKEREFVAGISLGGNTYYADSVKGRFTISRDNAKNTVYLQMNSLKPEDTAVYYCAATVYFPDAHGYWGQGTQVTVSS

SEQ ID NO: 36452 - protein, 116 aa, Artificial Sequence
  Chemically Synthesized
QVQLQESGGGLVQAGGSLRLSCAASGTISYDYMGWYRQAPGKERELVAVLLTVVLPYADSVKGRFTISRDNAKNTVYLQMNSLKPEDTAVYYCAADTPYLDNFAYWGQGTQVTVSS

SEQ ID NO: 36453 - protein, 118 aa, Artificial Sequence
  Chemically Synthesized
QVQLQESGGGLVQAGGSLRLSCAASGTISNYGAMGWYRQAPGKERELVAAIDRGGNTNYADSVKGRFTISRDNAKNTVYLQMNSLKPEDTAVYYCAAPVVAFYTHWYWGQGTQVTVSS

SEQ ID NO: 36454 - protein, 117 aa, Artificial Sequence
  Chemically Synthesized
QVQLQESGGGLVQAGGSLRLSCAASGTISWYTVMGWYRQAPGKERELVASIDYGANTYYADSVKGRFTISRDNAKNTVYLQMNSLKPEDTAVYYCAVGVPSSLSFYWGQGTQVTVSS

SEQ ID NO: 36455 - protein, 118 aa, Artificial Sequence
  Chemically Synthesized
QVQLQESGGGLVQAGGSLRLSCAASGNISDNDYMGWYRQAPGKEREFVAAIGPGGSTYYADSVKGRFTISRDNAKNTVYLQMNSLKPEDTAVYYCAARSYAYHTHYYWGQGTQVTVSS

SEQ ID NO: 36456 - protein, 126 aa, Artificial Sequence
  Chemically Synthesized
QVQLQESGGGLVQAGGSLRLSCAASGSISHYFIMGWYRQAPGKEREFVAAIAGGRYYLYADSVKGRFTISRDNAKNTVYLQMNSLKPEDTAVYYCAVDYDALLDGRVGYTRSLRYWGQGTQVTVSS

SEQ ID NO: 36457 - protein, 125 aa, Artificial Sequence
  Chemically Synthesized
QVQLQESGGGLVQAGGSLRLSCAASGNIFVYYYMGWYRQAPGKERELVATITTGLIPYADSVKGRFTISRDNAKNTVYLQMNSLKPEDTAVYYCAAYGNRYDEPPTGYDGYHYYWGQGTQVTVSS

SEQ ID NO: 36458 - protein, 118 aa, Artificial Sequence
  Chemically Synthesized
QVQLQESGGGLVQAGGSLRLSCAASGTIFAPYSMGWYRQAPGKERELVASIDVGGNTNYADSVKGRFTISRDNAKNTVYLQMNSLKPEDTAVYYCAAYVLYQVLSLYWGQGTQVTVSS

SEQ ID NO: 36459 - protein, 111 aa, Artificial Sequence
  Chemically Synthesized
QVQLQESGGGLVQAGGSLRLSCAASGTISPPANMGWYRQAPGKERELVAAIDLGASTNYADSVKGRFTISRDNAKNTVYLQMNSLKPEDTAVYYCAGSCYWGQGTQVTVSS

SEQ ID NO: 36460 - protein, 122 aa, Artificial Sequence
  Chemically Synthesized
QVQLQESGGGLVQAGGSLRLSCAASGTIFDYYYMGWYRQAPGKEREFVASINYGGNTYYADSVKGRFTISRDNAKNTVYLQMNSLKPEDTAVYYCAVQYTTQDDDSDSYQYWGQGTQVTVSS

SEQ ID NO: 36461 - protein, 120 aa, Artificial Sequence
  Chemically Synthesized
QVQLQESGGGLVQAGGSLRLSCAASGTISVRTYMGWYRQAPGKEREFVASIGAGLPYADSVKGRFTISRDNAKNTVYLQMNSLKPEDTAVYYCAVYIDGTVDGPKPYIYWGQGTQVTVSS

SEQ ID NO: 36462 - protein, 124 aa, Artificial Sequence
  Chemically Synthesized
QVQLQESGGGLVQAGGSLRLSCAASGNISSDTDMGWYRQAPGKERELVAGVRVLVPYADSVKGRFTISRDNAKNTVYLQMNSLKPEDTAVYYCAAYAGGTVRTNGYGTPRYDYWGQGTQVTVSS

SEQ ID NO: 36463 - protein, 117 aa, Artificial Sequence
  Chemically Synthesized
QVQLQESGGGLVQAGGSLRLSCAASGNIFGDSMGWYRQAPGKEREFVAAIDSGGTTYYADSVKGRFTISRDNAKNTVYLQMNSLKPEDTAVYYCAAIGPFYTELGYWGQGTQVTVSS

SEQ ID NO: 36464 - protein, 122 aa, Artificial Sequence
  Chemically Synthesized
QVQLQESGGGLVQAGGSLRLSCAASGTISVAVYMGWYRQAPGKEREFVAAISGGGNTYYADSVKGRFTISRDNAKNTVYLQMNSLKPEDTAVYYCAAYGGTYGHPAYDYGYWGQGTQVTVSS

SEQ ID NO: 36465 - protein, 122 aa, Artificial Sequence
  Chemically Synthesized
QVQLQESGGGLVQAGGSLRLSCAASGTIFPSPWMGWYRQAPGKERELVAGINYGGITNYADSVKGRFTISRDNAKNTVYLQMNSLKPEDTAVYYCAADRSFYIHNNVLYDYWGQGTQVTVSS

SEQ ID NO: 36466 - protein, 118 aa, Artificial Sequence
  Chemically Synthesized
QVQLQESGGGLVQAGGSLRLSCAASGSIFARIYMGWYRQAPGKERELVASIAGGSTTNYADSVKGRFTISRDNAKNTVYLQMNSLKPEDTAVYYCAVAYALLYYHFYWGQGTQVTVSS

SEQ ID NO: 36467 - protein, 122 aa, Artificial Sequence
  Chemically Synthesized
QVQLQESGGGLVQAGGSLRLSCAASGYISHASGMGWYRQAPGKEREFVAAISTGTSTYYADSVKGRFTISRDNAKNTVYLQMNSLKPEDTAVYYCAAQSQVNGYYTRPYYYWGQGTQVTVSS

SEQ ID NO: 36468 - protein, 118 aa, Artificial Sequence
  Chemically Synthesized
QVQLQESGGGLVQAGGSLRLSCAASGYISPPYYMGWYRQAPGKEREFVATISTGASTNYADSVKGRFTISRDNAKNTVYLQMNSLKPEDTAVYYCAVPPYGGYYFSYWGQGTQVTVSS

SEQ ID NO: 36469 - protein, 118 aa, Artificial Sequence
  Chemically Synthesized
QVQLQESGGGLVQAGGSLRLSCAASGSISVLDSMGWYRQAPGKEREFVATISIGASTYYADSVKGRFTISRDNAKNTVYLQMNSLKPEDTAVYYCAVSSPRITTHGYWGQGTQVTVSS

SEQ ID NO: 36470 - protein, 121 aa, Artificial Sequence
  Chemically Synthesized
QVQLQESGGGLVQAGGSLRLSCAASGNISAQDMGWYRQAPGKERELVATIAFGTNTYYADSVKGRFTISRDNAKNTVYLQMNSLKPEDTAVYYCAADDHYFLAGRRDHYYWGQGTQVTVSS

SEQ ID NO: 36471 - protein, 117 aa, Artificial Sequence
  Chemically Synthesized
QVQLQESGGGLVQAGGSLRLSCAASGSIFPDAIMGWYRQAPGKERELVASISSGGITNYADSVKGRFTISRDNAKNTVYLQMNSLKPEDTAVYYCAAIYSSSVTIYWGQGTQVTVSS

SEQ ID NO: 36472 - protein, 117 aa, Artificial Sequence
  Chemically Synthesized
QVQLQESGGGLVQAGGSLRLSCAASGYISSLRMGWYRQAPGKERELVAAIGAGGTTNYADSVKGRFTISRDNAKNTVYLQMNSLKPEDTAVYYCAVRVNNTSVHYYWGQGTQVTVSS

SEQ ID NO: 36473 - protein, 118 aa, Artificial Sequence
  Chemically Synthesized
QVQLQESGGGLVQAGGSLRLSCAASGNISIIQKMGWYRQAPGKERELVATIAHGTTTQYADSVKGRFTISRDNAKNTVYLQMNSLKPEDTAVYYCAVNHVVRGTHRYWGQGTQVTVSS

SEQ ID NO: 36474 - protein, 118 aa, Artificial Sequence
  Chemically Synthesized
QVQLQESGGGLVQAGGSLRLSCAASGNISPYLRMGWYRQAPGKERELVAGISLGGSTNYADSVKGRFTISRDNAKNTVYLQMNSLKPEDTAVYYCAAEIATWGPHAYWGQGTQVTVSS

SEQ ID NO: 36475 - protein, 122 aa, Artificial Sequence
  Chemically Synthesized
QVQLQESGGGLVQAGGSLRLSCAASGSISVDGLMGWYRQAPGKERELVAGIDDGTSTYYADSVKGRFTISRDNAKNTVYLQMNSLKPEDTAVYYCAADNQYTAQTPSYLQYWGQGTQVTVSS

SEQ ID NO: 36476 - protein, 118 aa, Artificial Sequence
  Chemically Synthesized
QVQLQESGGGLVQAGGSLRLSCAASGTISDYNNMGWYRQAPGKEREFVAGIGIGSNTNYADSVKGRFTISRDNAKNTVYLQMNSLKPEDTAVYYCAVGSGYYTDFGYWGQGTQVTVSS

SEQ ID NO: 36477 - protein, 122 aa, Artificial Sequence
  Chemically Synthesized
QVQLQESGGGLVQAGGSLRLSCAASGTIFRSVVMGWYRQAPGKEREFVATIDAGATTYYADSVKGRFTISRDNAKNTVYLQMNSLKPEDTAVYYCAVYEDDTVGYGDSYAYWGQGTQVTVSS

SEQ ID NO: 36478 - protein, 118 aa, Artificial Sequence
  Chemically Synthesized
QVQLQESGGGLVQAGGSLRLSCAASGSISPNYYMGWYRQAPGKERELVASINLGTSTNYADSVKGRFTISRDNAKNTVYLQMNSLKPEDTAVYYCAANGTYTNWLYYWGQGTQVTVSS

SEQ ID NO: 36479 - protein, 118 aa, Artificial Sequence
  Chemically Synthesized
QVQLQESGGGLVQAGGSLRLSCAASGNISYGDQMGWYRQAPGKEREFVASIGDGAINLYADSVKGRFTISRDNAKNTVYLQMNSLKPEDTAVYYCAVYRPSDDGHVYWGQGTQVTVSS

SEQ ID NO: 36480 - protein, 118 aa, Artificial Sequence
  Chemically Synthesized
QVQLQESGGGLVQAGGSLRLSCAASGYIFDILGMGWYRQAPGKERELVATITLGGTTYYADSVKGRFTISRDNAKNTVYLQMNSLKPEDTAVYYCAVPIRQYDNLPYWGQGTQVTVSS

SEQ ID NO: 36481 - protein, 125 aa, Artificial Sequence
  Chemically Synthesized
QVQLQESGGGLVQAGGSLRLSCAASGTISDVYYMGWYRQAPGKEREFVASIGGGNTNYADSVKGRFTISRDNAKNTVYLQMNSLKPEDTAVYYCAVIDYFLTGDVEYYQEGHRYWGQGTQVTVSS

SEQ ID NO: 36482 - protein, 115 aa, Artificial Sequence
  Chemically Synthesized
QVQLQESGGGLVQAGGSLRLSCAASGNICSMGWYRQAPGKERELVASITVGGITNYADSVKGRFTISRDNAKNTVYLQMNSLKPEDTAVYYCAVDQGTLSDHAYWGQGTQVTVSS

SEQ ID NO: 36483 - protein, 122 aa, Artificial Sequence
  Chemically Synthesized
QVQLQESGGGLVQAGGSLRLSCAASGNISARDSMGWYRQAPGKEREFVATIDIGSITNYADSVKGRFTISRDNAKNTVYLQMNSLKPEDTAVYYCAARYAQYYEPYAGHAYWGQGTQVTVSS

SEQ ID NO: 36484 - protein, 118 aa, Artificial Sequence
  Chemically Synthesized
QVQLQESGGGLVQAGGSLRLSCAASGTIFYPPTMGWYRQAPGKEREFVAAIGRGSNTNYADSVKGRFTISRDNAKNTVYLQMNSLKPEDTAVYYCAVPVGFYVSHHYWGQGTQVTVSS

SEQ ID NO: 36485 - protein, 126 aa, Artificial Sequence
  Chemically Synthesized
QVQLQESGGGLVQAGGSLRLSCAASGTISYGPVMGWYRQAPGKEREFVASIANGGSTYYADSVKGRFTISRDNAKNTVYLQMNSLKPEDTAVYYCAVVADWLGRDYYARYSYHVYWGQGTQVTVSS

SEQ ID NO: 36486 - protein, 117 aa, Artificial Sequence
  Chemically Synthesized
QVQLQESGGGLVQAGGSLRLSCAASGTISPYDAMGWYRQAPGKERELVATIASGTSTNYADSVKGRFTISRDNAKNTVYLQMNSLKPEDTAVYYCAADPDDDALDYWGQGTQVTVSS

SEQ ID NO: 36487 - protein, 118 aa, Artificial Sequence
  Chemically Synthesized
QVQLQESGGGLVQAGGSLRLSCAASGTISAIYRMGWYRQAPGKERELVAAITYGGNTYYADSVKGRFTISRDNAKNTVYLQMNSLKPEDTAVYYCAVTGRYAVSFYYWGQGTQVTVSS

SEQ ID NO: 36488 - protein, 118 aa, Artificial Sequence
  Chemically Synthesized
QVQLQESGGGLVQAGGSLRLSCAASGYISGDELMGWYRQAPGKEREFVAAISQGTTTYYADSVKGRFTISRDNAKNTVYLQMNSLKPEDTAVYYCAVVQQSDYYYSYWGQGTQVTVSS

SEQ ID NO: 36489 - protein, 117 aa, Artificial Sequence
  Chemically Synthesized
QVQLQESGGGLVQAGGSLRLSCAASGTIFDRYTMGWYRQAPGKERELVAGIADGANTYYADSVKGRFTISRDNAKNTVYLQMNSLKPEDTAVYYCAAIADVSVLIYWGQGTQVTVSS

SEQ ID NO: 36490 - protein, 117 aa, Artificial Sequence
  Chemically Synthesized
QVQLQESGGGLVQAGGSLRLSCAASGTISIPYYMGWYRQAPGKEREFVAAINVGGNTYYADSVKGRFTISRDNAKNTVYLQMNSLKPEDTAVYYCAAWSCMLLLIYWGQGTQVTVSS

SEQ ID NO: 36491 - protein, 110 aa, Artificial Sequence
  Chemically Synthesized
QVQLQESGGGLVQAGGSLRLSCAASGTISGPYAMGWYRQAPGKERELVAAIDPGGNTNYADSVKGRFTISRDNAKNTVYLQMNSLKPEDTAVYYCAAFYWGQGTQVTVSS

SEQ ID NO: 36492 - protein, 117 aa, Artificial Sequence
  Chemically Synthesized
QVQLQESGGGLVQAGGSLRLSCAASGYISAFGDMGWYRQAPGKERELVAAIAGGTSTYADSVKGRFTISRDNAKNTVYLQMNSLKPEDTAVYYCAVHIGTYTPLPYWGQGTQVTVSS

SEQ ID NO: 36493 - protein, 117 aa, Artificial Sequence
  Chemically Synthesized
QVQLQESGGGLVQAGGSLRLSCAASGSIFYGSMGWYRQAPGKERELVAAINRGTITNYADSVKGRFTISRDNAKNTVYLQMNSLKPEDTAVYYCAVDDDDYGYLYYWGQGTQVTVSS

SEQ ID NO: 36494 - protein, 117 aa, Artificial Sequence
  Chemically Synthesized
QVQLQESGGGLVQAGGSLRLSCAASGTIFGSLMGWYRQAPGKERELVASISYGTSTNYADSVKGRFTISRDNAKNTVYLQMNSLKPEDTAVYYCAAYIYYGDILRYWGQGTQVTVSS

SEQ ID NO: 36495 - protein, 116 aa, Artificial Sequence
  Chemically Synthesized
QVQLQESGGGLVQAGGSLRLSCAASGTISTRVSMGWYRQAPGKEREFVATIAYGTNTYYADSVKGRFTISRDNAKNTVYLQMNSLKPEDTAVYYCAVYGDRDLRYWGQGTQVTVSS

SEQ ID NO: 36496 - protein, 125 aa, Artificial Sequence
  Chemically Synthesized
QVQLQESGGGLVQAGGSLRLSCAASGNIFPARMGWYRQAPGKERELVAAIDNGSSTNYADSVKGRFTISRDNAKNTVYLQMNSLKPEDTAVYYCAVRGGYEGDTYYFADGEFAYWGQGTQVTVSS

SEQ ID NO: 36497 - protein, 118 aa, Artificial Sequence
  Chemically Synthesized
QVQLQESGGGLVQAGGSLRLSCAASGTISAAVDMGWYRQAPGKEREFVASITIGGITNYADSVKGRFTISRDNAKNTVYLQMNSLKPEDTAVYYCAVLARFDSIHGYWGQGTQVTVSS

SEQ ID NO: 36498 - protein, 116 aa, Artificial Sequence
  Chemically Synthesized
QVQLQESGGGLVQAGGSLRLSCAASGNISFSLMGWYRQAPGKEREFVASIGAGSSTYYADSVKGRFTISRDNAKNTVYLQMNSLKPEDTAVYYCAATYTRDDTYYWGQGTQVTVSS

SEQ ID NO: 36499 - protein, 122 aa, Artificial Sequence
  Chemically Synthesized
QVQLQESGGGLVQAGGSLRLSCAASGTISDYADMGWYRQAPGKEREFVASISVGGITNYADSVKGRFTISRDNAKNTVYLQMNSLKPEDTAVYYCAAFPKRTAYGSVPYYYWGQGTQVTVSS

SEQ ID NO: 36500 - protein, 118 aa, Artificial Sequence
  Chemically Synthesized
QVQLQESGGGLVQAGGSLRLSCAASGYISSGGGMGWYRQAPGKERELVATIDHGTNTYYADSVKGRFTISRDNAKNTVYLQMNSLKPEDTAVYYCAVIDDITDILVYWGQGTQVTVSS

SEQ ID NO: 36501 - protein, 122 aa, Artificial Sequence
  Chemically Synthesized
QVQLQESGGGLVQAGGSLRLSCAASGTIFRLQDMGWYRQAPGKEREFVATIADGGITYYADSVKGRFTISRDNAKNTVYLQMNSLKPEDTAVYYCAADRSYVDSWDSSHVYWGQGTQVTVSS

SEQ ID NO: 36502 - protein, 115 aa, Artificial Sequence
  Chemically Synthesized
QVQLQESGGGLVQAGGSLRLSCAASGTISVPRGMGWYRQAPGKEREFVGYYQYADSVKGRFTISRDNAKNTVYLQMNSLKPEDTAVYYCAVYIIIRAWRGRTIYWGQGTQVTVSS

SEQ ID NO: 36503 - protein, 121 aa, Artificial Sequence
  Chemically Synthesized
QVQLQESGGGLVQAGGSLRLSCAASGTIFTTDDMGWYRQAPGKERELVAAIDHGTSTYYADSVKGRFTISRDNAKNTVYLQMNSLKPEDTAVYYCAAPIYDRPGSDFSLYWGQGTQVTVSS

SEQ ID NO: 36504 - protein, 120 aa, Artificial Sequence
  Chemically Synthesized
QVQLQESGGGLVQAGGSLRLSCAASGNISVVLMGWYRQAPGKERELVAGIDSGATTNYADSVKGRFTISRDNAKNTVYLQMNSLKPEDTAVYYCAVNYWIIRYYGDHQYWGQGTQVTVSS

SEQ ID NO: 36505 - protein, 122 aa, Artificial Sequence
  Chemically Synthesized
QVQLQESGGGLVQAGGSLRLSCAASGNIFQAYYMGWYRQAPGKEREFVATINGGAITNYADSVKGRFTISRDNAKNTVYLQMNSLKPEDTAVYYCAAGGQYGGQGGDRLWYWGQGTQVTVSS

SEQ ID NO: 36506 - protein, 120 aa, Artificial Sequence
  Chemically Synthesized
QVQLQESGGGLVQAGGSLRLSCAASGTISELHGMGWYRQAPGKEREFVASISYGSNTYYADSVKGRFTISRDNAKNTVYLQMNSLKPEDTAVYYCAVRGYSNTVRSTIYWGQGTQVTVSS

SEQ ID NO: 36507 - protein, 118 aa, Artificial Sequence
  Chemically Synthesized
QVQLQESGGGLVQAGGSLRLSCAASGTIFYYAAMGWYRQAPGKEREFVASIGDGSSTYYADSVKGRFTISRDNAKNTVYLQMNSLKPEDTAVYYCAAIDAYVHRLYYWGQGTQVTVSS

SEQ ID NO: 36508 - protein, 122 aa, Artificial Sequence
  Chemically Synthesized
QVQLQESGGGLVQAGGSLRLSCAASGTISRRYAMGWYRQAPGKEREFVASITWGGITNYADSVKGRFTISRDNAKNTVYLQMNSLKPEDTAVYYCAAHRWRPVWDDYPLYYWGQGTQVTVSS

SEQ ID NO: 36509 - protein, 122 aa, Artificial Sequence
  Chemically Synthesized
QVQLQESGGGLVQAGGSLRLSCAASGNISDDDYMGWYRQAPGKERELVATIARGSSTYYADSVKGRFTISRDNAKNTVYLQMNSLKPEDTAVYYCAATSFWSPLRTYVLYYWGQGTQVTVSS

SEQ ID NO: 36510 - protein, 122 aa, Artificial Sequence
  Chemically Synthesized
QVQLQESGGGLVQAGGSLRLSCAASGNIFAYLKMGWYRQAPGKEREFVATIGYGSITNYADSVKGRFTISRDNAKNTVYLQMNSLKPEDTAVYYCAVADTRQPRFGDVLDYWGQGTQVTVSS

SEQ ID NO: 36511 - protein, 122 aa, Artificial Sequence
  Chemically Synthesized
QVQLQESGGGLVQAGGSLRLSCAASGNISPSHSMGWYRQAPGKERELVAAIDIGSTTYYADSVKGRFTISRDNAKNTVYLQMNSLKPEDTAVYYCAVGDYATRSVGDKHDYWGQGTQVTVSS

SEQ ID NO: 36512 - protein, 122 aa, Artificial Sequence
  Chemically Synthesized
QVQLQESGGGLVQAGGSLRLSCAASGNISQYGAMGWYRQAPGKEREFVATINFGGSTYYADSVKGRFTISRDNAKNTVYLQMNSLKPEDTAVYYCAAIALDHGGRYHYHGYWGQGTQVTVSS

SEQ ID NO: 36513 - protein, 122 aa, Artificial Sequence
  Chemically Synthesized
QVQLQESGGGLVQAGGSLRLSCAASGTIFLIYYMGWYRQAPGKERELVATIAQGTSTNYADSVKGRFTISRDNAKNTVYLQMNSLKPEDTAVYYCAALLWDVEDFLSYHDYWGQGTQVTVSS

SEQ ID NO: 36514 - protein, 125 aa, Artificial Sequence
  Chemically Synthesized
QVQLQESGGGLVQAGGSLRLSCAASGTISSTHAMGWYRQAPGKERELVAAIGDGTSTNYADSVKGRFTISRDNAKNTVYLQMNSLKPEDTAVYYCAVYGDGKQQWYDAYDETMYWGQGTQVTVSS

SEQ ID NO: 36515 - protein, 116 aa, Artificial Sequence
  Chemically Synthesized
QVQLQESGGGLVQAGGSLRLSCAASGTISGESMGWYRQAPGKERELVATIAWGSNTYYADSVKGRFTISRDNAKNTVYLQMNSLKPEDTAVYYCAAENGVVSPSYWGQGTQVTVSS

SEQ ID NO: 36516 - protein, 122 aa, Artificial Sequence
  Chemically Synthesized
QVQLQESGGGLVQAGGSLRLSCAASGSISQHNRMGWYRQAPGKEREFVAGISSGANTNYADSVKGRFTISRDNAKNTVYLQMNSLKPEDTAVYYCAAVGHSALPVRGYYGYWGQGTQVTVSS

SEQ ID NO: 36517 - protein, 122 aa, Artificial Sequence
  Chemically Synthesized
QVQLQESGGGLVQAGGSLRLSCAASGYISPYRDMGWYRQAPGKERELVASIDYGSITNYADSVKGRFTISRDNAKNTVYLQMNSLKPEDTAVYYCAVYRYYNGDSYVAHTYWGQGTQVTVSS

SEQ ID NO: 36518 - protein, 121 aa, Artificial Sequence
  Chemically Synthesized
QVQLQESGGGLVQAGGSLRLSCAASGNISYIWMGWYRQAPGKERELVAAIARGGSTNYADSVKGRFTISRDNAKNTVYLQMNSLKPEDTAVYYCAAWRAIHEDTGRYHYYWGQGTQVTVSS

SEQ ID NO: 36519 - protein, 120 aa, Artificial Sequence
  Chemically Synthesized
QVQLQESGGGLVQAGGSLRLSCAASGSISDREHMGWYRQAPGKERELVATIDLGGNTNYADSVKGRFTISRDNAKNTVYLQMNSLKPEDTAVYYCAADQPYAYSYDALYWGQGTQVTVSS

SEQ ID NO: 36520 - protein, 122 aa, Artificial Sequence
  Chemically Synthesized
QVQLQESGGGLVQAGGSLRLSCAASGSISPYSYMGWYRQAPGKERELVAAISYGGTTYYADSVKGRFTISRDNAKNTVYLQMNSLKPEDTAVYYCAVQEGTQRWSYYSHGYWGQGTQVTVSS

SEQ ID NO: 36521 - protein, 118 aa, Artificial Sequence
  Chemically Synthesized
QVQLQESGGGLVQAGGSLRLSCAASGNISDDSYMGWYRQAPGKEREFVASISLGTITNYADSVKGRFTISRDNAKNTVYLQMNSLKPEDTAVYYCAAHVPLYHRYYYWGQGTQVTVSS

SEQ ID NO: 36522 - protein, 121 aa, Artificial Sequence
  Chemically Synthesized
QVQLQESGGGLVQAGGSLRLSCAASGNIFTLSMGWYRQAPGKERELVAAISDGGITYYADSVKGRFTISRDNAKNTVYLQMNSLKPEDTAVYYCAVNDLRAYSRDDYHVYWGQGTQVTVSS

SEQ ID NO: 36523 - protein, 117 aa, Artificial Sequence
  Chemically Synthesized
QVQLQESGGGLVQAGGSLRLSCAASGNIFATTAMGWYRQAPGKERELVASIASVLLPYADSVKGRFTISRDNAKNTVYLQMNSLKPEDTAVYYCAATEDYETDHDYWGQGTQVTVSS

SEQ ID NO: 36524 - protein, 122 aa, Artificial Sequence
  Chemically Synthesized
QVQLQESGGGLVQAGGSLRLSCAASGNISYAPNMGWYRQAPGKEREFVASISVGGNTNYADSVKGRFTISRDNAKNTVYLQMNSLKPEDTAVYYCAAVGYDPDSTRHLLYYWGQGTQVTVSS

SEQ ID NO: 36525 - protein, 119 aa, Artificial Sequence
  Chemically Synthesized
QVQLQESGGGLVQAGGSLRLSCAASGSISGLAGMGWYRQAPGKERELVAAIDSGSNTNYADSVKGRFTISRDNAKNTVYLQMNSLKPEDTAVYYCAAIVVRWRDVLGYWGQGTQVTVSS

SEQ ID NO: 36526 - protein, 122 aa, Artificial Sequence
  Chemically Synthesized
QVQLQESGGGLVQAGGSLRLSCAASGNISIYTDMGWYRQAPGKEREFVAGINYGGITNYADSVKGRFTISRDNAKNTVYLQMNSLKPEDTAVYYCAVLDRRRGDDGAIHYYWGQGTQVTVSS

SEQ ID NO: 36527 - protein, 119 aa, Artificial Sequence
  Chemically Synthesized
QVQLQESGGGLVQAGGSLRLSCAASGNISGGLVMGWYRQAPGKEREFVATIAVGGSTNYADSVKGRFTISRDNAKNTVYLQMNSLKPEDTAVYYCAVLAYDNQAWHGYWGQGTQVTVSS

SEQ ID NO: 36528 - protein, 125 aa, Artificial Sequence
  Chemically Synthesized
QVQLQESGGGLVQAGGSLRLSCAASGSIFDYTFMGWYRQAPGKERELVAILMTVLLPYADSVKGRFTISRDNAKNTVYLQMNSLKPEDTAVYYCAAYDNYTYQGDAYYDGRHGYWGQGTQVTVSS

SEQ ID NO: 36529 - protein, 122 aa, Artificial Sequence
  Chemically Synthesized
QVQLQESGGGLVQAGGSLRLSCAASGTISYAYNMGWYRQAPGKERELVAGIDRGSSTYYADSVKGRFTISRDNAKNTVYLQMNSLKPEDTAVYYCAVRTVRTPHGYYSHAYWGQGTQVTVSS

SEQ ID NO: 36530 - protein, 118 aa, Artificial Sequence
  Chemically Synthesized
QVQLQESGGGLVQAGGSLRLSCAASGSISRPWSMGWYRQAPGKEREFVAAISYGGSTNYADSVKGRFTISRDNAKNTVYLQMNSLKPEDTAVYYCAALWVGRSTLYYWGQGTQVTVSS

SEQ ID NO: 36531 - protein, 122 aa, Artificial Sequence
  Chemically Synthesized
QVQLQESGGGLVQAGGSLRLSCAASGSISGYRAMGWYRQAPGKERELVAGINLGGNTYYADSVKGRFTISRDNAKNTVYLQMNSLKPEDTAVYYCAVYYQDNANTLANFPYWGQGTQVTVSS

SEQ ID NO: 36532 - protein, 122 aa, Artificial Sequence
  Chemically Synthesized
QVQLQESGGGLVQAGGSLRLSCAASGTISHAYSMGWYRQAPGKERELVASISTGTTTYYADSVKGRFTISRDNAKNTVYLQMNSLKPEDTAVYYCAVSTGVPFYDAVGLGYWGQGTQVTVSS

SEQ ID NO: 36533 - protein, 126 aa, Artificial Sequence
  Chemically Synthesized
QVQLQESGGGLVQAGGSLRLSCAASGTISGYTYMGWYRQAPGKERELVAAIDGGANTNYADSVKGRFTISRDNAKNTVYLQMNSLKPEDTAVYYCAVTAHFYDWFVYPVGGQFGYWGQGTQVTVSS

SEQ ID NO: 36534 - protein, 122 aa, Artificial Sequence
  Chemically Synthesized
QVQLQESGGGLVQAGGSLRLSCAASGNIFFGYVMGWYRQAPGKEREFVAGIGVGASTNYADSVKGRFTISRDNAKNTVYLQMNSLKPEDTAVYYCAVLVRPTTIDVRYHYYWGQGTQVTVSS

SEQ ID NO: 36535 - protein, 125 aa, Artificial Sequence
  Chemically Synthesized
QVQLQESGGGLVQAGGSLRLSCAASGTIFRGRYMGWYRQAPGKERELVATISSVVLPYADSVKGRFTISRDNAKNTVYLQMNSLKPEDTAVYYCAADRHRYLGGGYNYPKGYDYWGQGTQVTVSS

SEQ ID NO: 36536 - protein, 126 aa, Artificial Sequence
  Chemically Synthesized
QVQLQESGGGLVQAGGSLRLSCAASGSISLHSTMGWYRQAPGKEREFVAGIANGTNTYYADSVKGRFTISRDNAKNTVYLQMNSLKPEDTAVYYCAVLTDTAERSYITGYRYLYYWGQGTQVTVSS

SEQ ID NO: 36537 - protein, 122 aa, Artificial Sequence
  Chemically Synthesized
QVQLQESGGGLVQAGGSLRLSCAASGYISYTTVMGWYRQAPGKERELVAAIGSGTTTNYADSVKGRFTISRDNAKNTVYLQMNSLKPEDTAVYYCAANEYDAGYSAPYLTYWGQGTQVTVSS

SEQ ID NO: 36538 - protein, 118 aa, Artificial Sequence
  Chemically Synthesized
QVQLQESGGGLVQAGGSLRLSCAASGNIFPGYPMGWYRQAPGKEREFVASIDDGGITNYADSVKGRFTISRDNAKNTVYLQMNSLKPEDTAVYYCAVAWYNQRYYYYWGQGTQVTVSS

SEQ ID NO: 36539 - protein, 117 aa, Artificial Sequence
  Chemically Synthesized
QVQLQESGGGLVQAGGSLRLSCAASGSIFGLTGMGWYRQAPGKEREFVASIASYADSVKGRFTISRDNAKNTVYLQMNSLKPEDTAVYYCAAGRARYDASPPVHRYWGQGTQVTVSS

SEQ ID NO: 36540 - protein, 112 aa, Artificial Sequence
  Chemically Synthesized
QVQLQESGGGLVQAGGSLRLSCAASGTISFDSPMGWYRQAPGKEREFVASIAHGTKPYADSVKGRFTISRDNAKNTVYLQMNSLKPEDTAVYYCAVGLRFYWGQGTQVTVSS

SEQ ID NO: 36541 - protein, 118 aa, Artificial Sequence
  Chemically Synthesized
QVQLQESGGGLVQAGGSLRLSCAASGYISGAGYMGWYRQAPGKERELVAAITHGASTNYADSVKGRFTISRDNAKNTVYLQMNSLKPEDTAVYYCAALQYVGHWLYYWGQGTQVTVSS

SEQ ID NO: 36542 - protein, 121 aa, Artificial Sequence
  Chemically Synthesized
QVQLQESGGGLVQAGGSLRLSCAASGSIFDTLLMGWYRQAPGKEREFVAGISTGASTNYADSVKGRFTISRDNAKNTVYLQMNSLKPEDTAVYYCAVVAYSRDRDVYHYYWGQGTQVTVSS

SEQ ID NO: 36543 - protein, 122 aa, Artificial Sequence
  Chemically Synthesized
QVQLQESGGGLVQAGGSLRLSCAASGYIFRRDSMGWYRQAPGKERELVASINIGASTNYADSVKGRFTISRDNAKNTVYLQMNSLKPEDTAVYYCAVNTDDYQLGREYHFYWGQGTQVTVSS

SEQ ID NO: 36544 - protein, 114 aa, Artificial Sequence
  Chemically Synthesized
QVQLQESGGGLVQAGGSLRLSCAASGNIFNAYNMGWYRQAPGKERELVATIANGANTYYADSVKGRFTISRDNAKNTVYLQMNSLKPEDTAVYYCAFTTTTLYWGQGTQVTVSS

SEQ ID NO: 36545 - protein, 118 aa, Artificial Sequence
  Chemically Synthesized
QVQLQESGGGLVQAGGSLRLSCAASGYIFNGQKMGWYRQAPGKEREFVASITDGAITYYADSVKGRFTISRDNAKNTVYLQMNSLKPEDTAVYYCAVTRPYDYGYQYWGQGTQVTVSS

SEQ ID NO: 36546 - protein, 122 aa, Artificial Sequence
  Chemically Synthesized
QVQLQESGGGLVQAGGSLRLSCAASGNIFDYLYMGWYRQAPGKERELVATITLGGTTYYADSVKGRFTISRDNAKNTVYLQMNSLKPEDTAVYYCAAESLTIPGDTASHYYWGQGTQVTVSS

SEQ ID NO: 36547 - protein, 112 aa, Artificial Sequence
  Chemically Synthesized
QVQLQESGGGLVQAGGSLRLSCAASGNISRHDGMGWYRQAPGKERELVAGITYGASTNYADSVKGRFTISRDNAKNTVYLQMNSLKPEDTAVYYCAATDEYWGQGTQVTVSS

SEQ ID NO: 36548 - protein, 112 aa, Artificial Sequence
  Chemically Synthesized
QVQLQESGGGLVQAGGSLRLSCAASGTISRNITMGWYRQAPGKERELVATIASGSSTNYADSVKGRFTISRDNAKNTVYLQMNSLKPEDTAVYYCAAIHFYWGQGTQVTVSS

SEQ ID NO: 36549 - protein, 122 aa, Artificial Sequence
  Chemically Synthesized
QVQLQESGGGLVQAGGSLRLSCAASGSISPPDGMGWYRQAPGKERELVAGISDGTSTYYADSVKGRFTISRDNAKNTVYLQMNSLKPEDTAVYYCAAADIRQIASPVRLDYWGQGTQVTVSS

SEQ ID NO: 36550 - protein, 122 aa, Artificial Sequence
  Chemically Synthesized
QVQLQESGGGLVQAGGSLRLSCAASGTISDTYSMGWYRQAPGKEREFVATITAGASTNYADSVKGRFTISRDNAKNTVYLQMNSLKPEDTAVYYCATSKTTLFTCVLTNMYWGQGTQVTVSS

SEQ ID NO: 36551 - protein, 118 aa, Artificial Sequence
  Chemically Synthesized
QVQLQESGGGLVQAGGSLRLSCAASGSIFGGADMGWYRQAPGKERELVAAIGYGANTNYADSVKGRFTISRDNAKNTVYLQMNSLKPEDTAVYYCAALASGTRTHTYWGQGTQVTVSS

SEQ ID NO: 36552 - protein, 118 aa, Artificial Sequence
  Chemically Synthesized
QVQLQESGGGLVQAGGSLRLSCAASGNISPVINMGWYRQAPGKEREFVASISNGSTTNYADSVKGRFTISRDNAKNTVYLQMNSLKPEDTAVYYCAVVHYNRGYYYYWGQGTQVTVSS

SEQ ID NO: 36553 - protein, 117 aa, Artificial Sequence
  Chemically Synthesized
QVQLQESGGGLVQAGGSLRLSCAASGYISLNYYMGWYRQAPGKERELVAGIASVLVPYADSVKGRFTISRDNAKNTVYLQMNSLKPEDTAVYYCAVVVPFYDDHYYWGQGTQVTVSS

SEQ ID NO: 36554 - protein, 122 aa, Artificial Sequence
  Chemically Synthesized
QVQLQESGGGLVQAGGSLRLSCAASGSIFDHFHMGWYRQAPGKEREFVATIDRGGSTNYADSVKGRFTISRDNAKNTVYLQMNSLKPEDTAVYYCAAVDVRSGYANRRYYYWGQGTQVTVSS

SEQ ID NO: 36555 - protein, 126 aa, Artificial Sequence
  Chemically Synthesized
QVQLQESGGGLVQAGGSLRLSCAASGTIFGLYGMGWYRQAPGKERELVATIDSGSITYYADSVKGRFTISRDNAKNTVYLQMNSLKPEDTAVYYCAVDGEARIRLAVVPYRVHAYWGQGTQVTVSS

SEQ ID NO: 36556 - protein, 118 aa, Artificial Sequence
  Chemically Synthesized
QVQLQESGGGLVQAGGSLRLSCAASGTIFDALVMGWYRQAPGKEREFVATISHGGSTNYADSVKGRFTISRDNAKNTVYLQMNSLKPEDTAVYYCAAIYYRGYYYWYWGQGTQVTVSS

SEQ ID NO: 36557 - protein, 122 aa, Artificial Sequence
  Chemically Synthesized
QVQLQESGGGLVQAGGSLRLSCAASGTIFTRRYMGWYRQAPGKEREFVAAINDGATTNYADSVKGRFTISRDNAKNTVYLQMNSLKPEDTAVYYCAVVAVGVSDSTGYYYYWGQGTQVTVSS

SEQ ID NO: 36558 - protein, 118 aa, Artificial Sequence
  Chemically Synthesized
QVQLQESGGGLVQAGGSLRLSCAASGYISTTRYMGWYRQAPGKERELVAGIGEGANTYYADSVKGRFTISRDNAKNTVYLQMNSLKPEDTAVYYCAAQIRPYYDHYYWGQGTQVTVSS

SEQ ID NO: 36559 - protein, 118 aa, Artificial Sequence
  Chemically Synthesized
QVQLQESGGGLVQAGGSLRLSCAASGYISDTDDMGWYRQAPGKEREFVASIDTGASTNYADSVKGRFTISRDNAKNTVYLQMNSLKPEDTAVYYCAAGDDTGTPHVYWGQGTQVTVSS

SEQ ID NO: 36560 - protein, 109 aa, Artificial Sequence
  Chemically Synthesized
QVQLQESGGGLVQAGGSLRLSCAASGTIFVPSTMGWYRQAPGKEREFVASISTGTTTYYADSVKGRFTISRDNAKNTVYLQMNSLKPEDTAVYYCADYWGQGTQVTVSS

SEQ ID NO: 36561 - protein, 122 aa, Artificial Sequence
  Chemically Synthesized
QVQLQESGGGLVQAGGSLRLSCAASGYIFEEVGMGWYRQAPGKEREFVASISIGGSTNYADSVKGRFTISRDNAKNTVYLQMNSLKPEDTAVYYCAALYRTLVPYQTYHHYWGQGTQVTVSS

SEQ ID NO: 36562 - protein, 116 aa, Artificial Sequence
  Chemically Synthesized
QVQLQESGGGLVQAGGSLRLSCAASGTIFSSYDMGWYRQAPGKERELVATINGGTSTNYADSVKGRFTISRDNAKNTVYLQMNSLKPEDTAVYYCAAPAGVPLVYWGQGTQVTVSS

SEQ ID NO: 36563 - protein, 126 aa, Artificial Sequence
  Chemically Synthesized
QVQLQESGGGLVQAGGSLRLSCAASGTIFSALSMGWYRQAPGKERELVAAIAVGTITYYADSVKGRFTISRDNAKNTVYLQMNSLKPEDTAVYYCAVDYDPYDYYLSVNGYGLYYWGQGTQVTVSS

SEQ ID NO: 36564 - protein, 121 aa, Artificial Sequence
  Chemically Synthesized
QVQLQESGGGLVQAGGSLRLSCAASGYISDDVYMGWYRQAPGKERELVAAITYGGTTYYADSVKGRFTISRDNAKNTVYLQMNSLKPEDTAVYYCAVLERRQQYDQYSMYWGQGTQVTVSS

SEQ ID NO: 36565 - protein, 122 aa, Artificial Sequence
  Chemically Synthesized
QVQLQESGGGLVQAGGSLRLSCAASGNIFPDVLMGWYRQAPGKERELVATIADGSNTYYADSVKGRFTISRDNAKNTVYLQMNSLKPEDTAVYYCAASHDVTTGYVGQLKYWGQGTQVTVSS

SEQ ID NO: 36566 - protein, 117 aa, Artificial Sequence
  Chemically Synthesized
QVQLQESGGGLVQAGGSLRLSCAASGYISDAQDMGWYRQAPGKERELVAGIGIGGITYYADSVKGRFTISRDNAKNTVYLQMNSLKPEDTAVYYCAVSRDTWYSFYWGQGTQVTVSS

SEQ ID NO: 36567 - protein, 118 aa, Artificial Sequence
  Chemically Synthesized
QVQLQESGGGLVQAGGSLRLSCAASGTIFPPYFMGWYRQAPGKEREFVASITSGGITYYADSVKGRFTISRDNAKNTVYLQMNSLKPEDTAVYYCAVAQYLSRYYFYWGQGTQVTVSS

SEQ ID NO: 36568 - protein, 122 aa, Artificial Sequence
  Chemically Synthesized
QVQLQESGGGLVQAGGSLRLSCAASGSISRSTFMGWYRQAPGKERELVAGIGSGTSTYYADSVKGRFTISRDNAKNTVYLQMNSLKPEDTAVYYCAATDSYWNDRLFSHYYWGQGTQVTVSS

SEQ ID NO: 36569 - protein, 118 aa, Artificial Sequence
  Chemically Synthesized
QVQLQESGGGLVQAGGSLRLSCAASGSISESPYMGWYRQAPGKEREFVATISDGASTNYADSVKGRFTISRDNAKNTVYLQMNSLKPEDTAVYYCAARYDSDFSHDYWGQGTQVTVSS

SEQ ID NO: 36570 - protein, 126 aa, Artificial Sequence
  Chemically Synthesized
QVQLQESGGGLVQAGGSLRLSCAASGSIFYTTAMGWYRQAPGKEREFVAAIDVGASTNYADSVKGRFTISRDNAKNTVYLQMNSLKPEDTAVYYCAVPPSQAYVAHQDVPPYLDYWGQGTQVTVSS

SEQ ID NO: 36571 - protein, 117 aa, Artificial Sequence
  Chemically Synthesized
QVQLQESGGGLVQAGGSLRLSCAASGNIFRGSRMGWYRQAPGKEREFVAGITIGTSTYYADSVKGRFTISRDNAKNTVYLQMNSLKPEDTAVYYCAAYHARDRFYYWGQGTQVTVSS

SEQ ID NO: 36572 - protein, 118 aa, Artificial Sequence
  Chemically Synthesized
QVQLQESGGGLVQAGGSLRLSCAASGNIFGPVSMGWYRQAPGKEREFVATIGFGGSTYYADSVKGRFTISRDNAKNTVYLQMNSLKPEDTAVYYCAVLFRDESYHAYWGQGTQVTVSS

SEQ ID NO: 36573 - protein, 126 aa, Artificial Sequence
  Chemically Synthesized
QVQLQESGGGLVQAGGSLRLSCAASGSIFQSRPMGWYRQAPGKERELVASIGYGGNTNYADSVKGRFTISRDNAKNTVYLQMNSLKPEDTAVYYCAATRYARYVHTDSYVGHHRYWGQGTQVTVSS

SEQ ID NO: 36574 - protein, 122 aa, Artificial Sequence
  Chemically Synthesized
QVQLQESGGGLVQAGGSLRLSCAASGTIFEADWMGWYRQAPGKERELVATIADGAITYYADSVKGRFTISRDNAKNTVYLQMNSLKPEDTAVYYCAAPYDYSPDIYPLHDYWGQGTQVTVSS

SEQ ID NO: 36575 - protein, 117 aa, Artificial Sequence
  Chemically Synthesized
QVQLQESGGGLVQAGGSLRLSCAASGYISYYWTMGWYRQAPGKERELVPLLVLVLLPYADSVKGRFTISRDNAKNTVYLQMNSLKPEDTAVYYCAATLYGDNWHEYWGQGTQVTVSS

SEQ ID NO: 36576 - protein, 118 aa, Artificial Sequence
  Chemically Synthesized
QVQLQESGGGLVQAGGSLRLSCAASGSIFATFIMGWYRQAPGKEREFVAAINDGSSTYYADSVKGRFTISRDNAKNTVYLQMNSLKPEDTAVYYCAALNYDSSRHYYWGQGTQVTVSS

SEQ ID NO: 36577 - protein, 118 aa, Artificial Sequence
  Chemically Synthesized
QVQLQESGGGLVQAGGSLRLSCAASGYIFARSYMGWYRQAPGKEREFVATIDIGTSTNYADSVKGRFTISRDNAKNTVYLQMNSLKPEDTAVYYCAVAYFDDVYHGYWGQGTQVTVSS

SEQ ID NO: 36578 - protein, 122 aa, Artificial Sequence
  Chemically Synthesized
QVQLQESGGGLVQAGGSLRLSCAASGNISWVGDMGWYRQAPGKEREFVASIGWGTITYYADSVKGRFTISRDNAKNTVYLQMNSLKPEDTAVYYCAVRSDWLSYRVARHTYWGQGTQVTVSS

SEQ ID NO: 36579 - protein, 122 aa, Artificial Sequence
  Chemically Synthesized
QVQLQESGGGLVQAGGSLRLSCAASGNISGTRYMGWYRQAPGKEREFVATIDVGSNTYYADSVKGRFTISRDNAKNTVYLQMNSLKPEDTAVYYCAATADRIAIQGDWFHYWGQGTQVTVSS

SEQ ID NO: 36580 - protein, 118 aa, Artificial Sequence
  Chemically Synthesized
QVQLQESGGGLVQAGGSLRLSCAASGYISESPRMGWYRQAPGKEREFVASIAAGAITNYADSVKGRFTISRDNAKNTVYLQMNSLKPEDTAVYYCAVVAYTPGLHGYWGQGTQVTVSS

SEQ ID NO: 36581 - protein, 122 aa, Artificial Sequence
  Chemically Synthesized
QVQLQESGGGLVQAGGSLRLSCAASGNIFHTIYMGWYRQAPGKEREFVASINPGGNTNYADSVKGRFTISRDNAKNTVYLQMNSLKPEDTAVYYCAVLLHHRAGTGSYHHYWGQGTQVTVSS

SEQ ID NO: 36582 - protein, 118 aa, Artificial Sequence
  Chemically Synthesized
QVQLQESGGGLVQAGGSLRLSCAASGTISPAYYMGWYRQAPGKERELVASITSGTSTYYADSVKGRFTISRDNAKNTVYLQMNSLKPEDTAVYYCAAAWGVDADHSYWGQGTQVTVSS

SEQ ID NO: 36583 - protein, 115 aa, Artificial Sequence
  Chemically Synthesized
QVQLQESGGGLVQAGGSLRLSCAASGTILLTLMGWYRQAPGKEREFVAGIAYGGNTNYADSVKGRFTISRDNAKNTVYLQMNSLKPEDTAVYYCAAYTHSYAPYWGQGTQVTVSS

SEQ ID NO: 36584 - protein, 118 aa, Artificial Sequence
  Chemically Synthesized
QVQLQESGGGLVQAGGSLRLSCAASGYISRSTDMGWYRQAPGKEREFVASINPGGTTYYADSVKGRFTISRDNAKNTVYLQMNSLKPEDTAVYYCAVIASAAVGFPYWGQGTQVTVSS

SEQ ID NO: 36585 - protein, 109 aa, Artificial Sequence
  Chemically Synthesized
QVQLQESGGGLVQAGGSLRLSCAASGSIFQGYMGWYRQAPGKEREFVASINDGSSTNYADSVKGRFTISRDNAKNTVYLQMNSLKPEDTAVYYCAAPYWGQGTQVTVSS

SEQ ID NO: 36586 - protein, 118 aa, Artificial Sequence
  Chemically Synthesized
QVQLQESGGGLVQAGGSLRLSCAASGNIFVRVYMGWYRQAPGKERELVATISFGAITYYADSVKGRFTISRDNAKNTVYLQMNSLKPEDTAVYYCAAYIISLTPYLYWGQGTQVTVSS

SEQ ID NO: 36587 - protein, 118 aa, Artificial Sequence
  Chemically Synthesized
QVQLQESGGGLVQAGGSLRLSCAASGNIFTYSIMGWYRQAPGKEREFVAGITTGGNTYYADSVKGRFTISRDNAKNTVYLQMNSLKPEDTAVYYCAAVGFPRSSFYYWGQGTQVTVSS

SEQ ID NO: 36588 - protein, 125 aa, Artificial Sequence
  Chemically Synthesized
QVQLQESGGGLVQAGGSLRLSCAASGSISRYVVMGWYRQAPGKERELVASIGSVVVPYADSVKGRFTISRDNAKNTVYLQMNSLKPEDTAVYYCAVKFGPLQVVASPADNTFYYWGQGTQVTVSS

SEQ ID NO: 36589 - protein, 118 aa, Artificial Sequence
  Chemically Synthesized
QVQLQESGGGLVQAGGSLRLSCAASGNIFGHEDMGWYRQAPGKERELVAGIGDGASTNYADSVKGRFTISRDNAKNTVYLQMNSLKPEDTAVYYCAVALVYYPDLRYWGQGTQVTVSS

SEQ ID NO: 36590 - protein, 125 aa, Artificial Sequence
  Chemically Synthesized
QVQLQESGGGLVQAGGSLRLSCAASGNIFAVAAMGWYRQAPGKERELVAAISDGIIPYADSVKGRFTISRDNAKNTVYLQMNSLKPEDTAVYYCAVTYFVGTTYDVGDYDDHFYWGQGTQVTVSS

SEQ ID NO: 36591 - protein, 121 aa, Artificial Sequence
  Chemically Synthesized
QVQLQESGGGLVQAGGSLRLSCAASGSISPLTYMGWYRQAPGKEREFVAAIGQGTNTYYADSVKGRFTISRDNAKNTVYLQMNSLKPEDTAVYYCAAGDDTSTLLTFTMYWGQGTQVTVSS

SEQ ID NO: 36592 - protein, 122 aa, Artificial Sequence
  Chemically Synthesized
QVQLQESGGGLVQAGGSLRLSCAASGTIFASGTMGWYRQAPGKERELVASIGYGATTYYADSVKGRFTISRDNAKNTVYLQMNSLKPEDTAVYYCAVVYWHYNSINAGYDYWGQGTQVTVSS

SEQ ID NO: 36593 - protein, 118 aa, Artificial Sequence
  Chemically Synthesized
QVQLQESGGGLVQAGGSLRLSCAASGYISSPRYMGWYRQAPGKEREFVATISYGSTTNYADSVKGRFTISRDNAKNTVYLQMNSLKPEDTAVYYCAAVWYDAQYLGYWGQGTQVTVSS

SEQ ID NO: 36594 - protein, 126 aa, Artificial Sequence
  Chemically Synthesized
QVQLQESGGGLVQAGGSLRLSCAASGYIFESAIMGWYRQAPGKERELVAAIDYGASTYYADSVKGRFTISRDNAKNTVYLQMNSLKPEDTAVYYCAAIFLDWDDHRRDGARDHLYWGQGTQVTVSS

SEQ ID NO: 36595 - protein, 118 aa, Artificial Sequence
  Chemically Synthesized
QVQLQESGGGLVQAGGSLRLSCAASGNISYTAYMGWYRQAPGKEREFVASITLGTITNYADSVKGRFTISRDNAKNTVYLQMNSLKPEDTAVYYCAVLGVEGDHYHYWGQGTQVTVSS

SEQ ID NO: 36596 - protein, 118 aa, Artificial Sequence
  Chemically Synthesized
QVQLQESGGGLVQAGGSLRLSCAASGTISIGDPMGWYRQAPGKEREFVAAIGRGTSTNYADSVKGRFTISRDNAKNTVYLQMNSLKPEDTAVYYCAATTYDTSYHGYWGQGTQVTVSS

SEQ ID NO: 36597 - protein, 122 aa, Artificial Sequence
  Chemically Synthesized
QVQLQESGGGLVQAGGSLRLSCAASGTISPPRGMGWYRQAPGKEREFVATIDYGGNTNYADSVKGRFTISRDNAKNTVYLQMNSLKPEDTAVYYCAVVVHVGEQNGGYHGYWGQGTQVTVSS

SEQ ID NO: 36598 - protein, 118 aa, Artificial Sequence
  Chemically Synthesized
QVQLQESGGGLVQAGGSLRLSCAASGNISPYYVMGWYRQAPGKEREFVAAISYGGTTNYADSVKGRFTISRDNAKNTVYLQMNSLKPEDTAVYYCAAIYYYQGWYWYWGQGTQVTVSS

SEQ ID NO: 36599 - protein, 126 aa, Artificial Sequence
  Chemically Synthesized
QVQLQESGGGLVQAGGSLRLSCAASGNISGYGYMGWYRQAPGKEREFVASISRGGTTYYADSVKGRFTISRDNAKNTVYLQMNSLKPEDTAVYYCAVYQPYRYYTLYVFDKFHWYWGQGTQVTVSS

SEQ ID NO: 36600 - protein, 118 aa, Artificial Sequence
  Chemically Synthesized
QVQLQESGGGLVQAGGSLRLSCAASGTIFLLQYMGWYRQAPGKEREFVAAISRGGSTNYADSVKGRFTISRDNAKNTVYLQMNSLKPEDTAVYYCAAKGPYFLYHYYWGQGTQVTVSS

SEQ ID NO: 36601 - protein, 122 aa, Artificial Sequence
  Chemically Synthesized
QVQLQESGGGLVQAGGSLRLSCAASGYIFAYAAMGWYRQAPGKEREFVAAISRGSTTNYADSVKGRFTISRDNAKNTVYLQMNSLKPEDTAVYYCAVVTHRTSDPRGWYWYWGQGTQVTVSS

SEQ ID NO: 36602 - protein, 118 aa, Artificial Sequence
  Chemically Synthesized
QVQLQESGGGLVQAGGSLRLSCAASGSISGYGDMGWYRQAPGKEREFVAAIAGGTSTNYADSVKGRFTISRDNAKNTVYLQMNSLKPEDTAVYYCAASYGEAGRLVYWGQGTQVTVSS

SEQ ID NO: 36603 - protein, 118 aa, Artificial Sequence
  Chemically Synthesized
QVQLQESGGGLVQAGGSLRLSCAASGYISGRLDMGWYRQAPGKERELVAAINNGTNTNYADSVKGRFTISRDNAKNTVYLQMNSLKPEDTAVYYCAAGHRRGRYYYYWGQGTQVTVSS

SEQ ID NO: 36604 - protein, 112 aa, Artificial Sequence
  Chemically Synthesized
QVQLQESGGGLVQAGGSLRLSCAASGYIFVPHMGWYRQAPGKERELVATIDRGGNTNYADSVKGRFTISRDNAKNTVYLQMNSLKPEDTAVYYCAVDRHTYWGQGTQVTVSS

SEQ ID NO: 36605 - protein, 114 aa, Artificial Sequence
  Chemically Synthesized
QVQLQESGGGLVQAGGSLRLSCAASGSIFMGWYRQAPGKEREFVASITTGTTTNYADSVKGRFTISRDNAKNTVYLQMNSLKPEDTAVYYCAAYGDDDSDFTYWGQGTQVTVSS

SEQ ID NO: 36606 - protein, 122 aa, Artificial Sequence
  Chemically Synthesized
QVQLQESGGGLVQAGGSLRLSCAASGSISGDSRMGWYRQAPGKERELVAGIGFGSNTNYADSVKGRFTISRDNAKNTVYLQMNSLKPEDTAVYYCAASKLLVTTTTRSTMYWGQGTQVTVSS

SEQ ID NO: 36607 - protein, 118 aa, Artificial Sequence
  Chemically Synthesized
QVQLQESGGGLVQAGGSLRLSCAASGTIFYAYYMGWYRQAPGKEREFVAGIGDGGTTNYADSVKGRFTISRDNAKNTVYLQMNSLKPEDTAVYYCAAYSDSFDVLDYWGQGTQVTVSS

SEQ ID NO: 36608 - protein, 122 aa, Artificial Sequence
  Chemically Synthesized
QVQLQESGGGLVQAGGSLRLSCAASGNISFGLQMGWYRQAPGKERELVATINRGGSTYYADSVKGRFTISRDNAKNTVYLQMNSLKPEDTAVYYCAVRRWLRHYYTTGYGYWGQGTQVTVSS

SEQ ID NO: 36609 - protein, 117 aa, Artificial Sequence
  Chemically Synthesized
QVQLQESGGGLVQAGGSLRLSCAASGTISKSLMGWYRQAPGKERELVAGIGYGGSTYYADSVKGRFTISRDNAKNTVYLQMNSLKPEDTAVYYCAVTTDGFGSHAYWGQGTQVTVSS

SEQ ID NO: 36610 - protein, 121 aa, Artificial Sequence
  Chemically Synthesized
QVQLQESGGGLVQAGGSLRLSCAASGSISRTRYMGWYRQAPGKEREFVAAIDYGAITNYADSVKGRFTISRDNAKNTVYLQMNSLKPEDTAVYYCAAVDPIKRGRDYHHYWGQGTQVTVSS

SEQ ID NO: 36611 - protein, 122 aa, Artificial Sequence
  Chemically Synthesized
QVQLQESGGGLVQAGGSLRLSCAASGNISTYTAMGWYRQAPGKERELVAGIAPGGSTNYADSVKGRFTISRDNAKNTVYLQMNSLKPEDTAVYYCAAVRRQDDYLYGYHWYWGQGTQVTVSS

SEQ ID NO: 36612 - protein, 118 aa, Artificial Sequence
  Chemically Synthesized
QVQLQESGGGLVQAGGSLRLSCAASGTISVQGPMGWYRQAPGKEREFVASIAYGGTTNYADSVKGRFTISRDNAKNTVYLQMNSLKPEDTAVYYCAVLWRGDLWYVYWGQGTQVTVSS

SEQ ID NO: 36613 - protein, 118 aa, Artificial Sequence
  Chemically Synthesized
QVQLQESGGGLVQAGGSLRLSCAASGTISVTTDMGWYRQAPGKEREFVATISYGGTTNYADSVKGRFTISRDNAKNTVYLQMNSLKPEDTAVYYCAAATGLYYDLGYWGQGTQVTVSS

SEQ ID NO: 36614 - protein, 118 aa, Artificial Sequence
  Chemically Synthesized
QVQLQESGGGLVQAGGSLRLSCAASGSIFATFYMGWYRQAPGKERELVAAIDKGANTYYADSVKGRFTISRDNAKNTVYLQMNSLKPEDTAVYYCAVRRQQGRYFRYWGQGTQVTVSS

SEQ ID NO: 36615 - protein, 117 aa, Artificial Sequence
  Chemically Synthesized
QVQLQESGGGLVQAGGSLRLSCAASGYISTLAYMGWYRQAPGKEREFVASIVVVLLPYADSVKGRFTISRDNAKNTVYLQMNSLKPEDTAVYYCAAGAGDTVSHWYWGQGTQVTVSS

SEQ ID NO: 36616 - protein, 118 aa, Artificial Sequence
  Chemically Synthesized
QVQLQESGGGLVQAGGSLRLSCAASGSISDRSGMGWYRQAPGKERELVAAITVGSSTNYADSVKGRFTISRDNAKNTVYLQMNSLKPEDTAVYYCAVVTWYYGWHDYWGQGTQVTVSS

SEQ ID NO: 36617 - protein, 122 aa, Artificial Sequence
  Chemically Synthesized
QVQLQESGGGLVQAGGSLRLSCAASGTIFSIAVMGWYRQAPGKEREFVASIGAGTTTYYADSVKGRFTISRDNAKNTVYLQMNSLKPEDTAVYYCAVVYATVWSDWYAHQYWGQGTQVTVSS

SEQ ID NO: 36618 - protein, 126 aa, Artificial Sequence
  Chemically Synthesized
QVQLQESGGGLVQAGGSLRLSCAASGNISLDPFMGWYRQAPGKEREFVAGIDVGTTTYYADSVKGRFTISRDNAKNTVYLQMNSLKPEDTAVYYCAAYYIVNTTAQSFLLVPHYYWGQGTQVTVSS

SEQ ID NO: 36619 - protein, 122 aa, Artificial Sequence
  Chemically Synthesized
QVQLQESGGGLVQAGGSLRLSCAASGTISDRNFMGWYRQAPGKEREFVAAIASGSSTNYADSVKGRFTISRDNAKNTVYLQMNSLKPEDTAVYYCAVVTSTVHYNTSYFYYWGQGTQVTVSS

SEQ ID NO: 36620 - protein, 122 aa, Artificial Sequence
  Chemically Synthesized
QVQLQESGGGLVQAGGSLRLSCAASGNISFYPSMGWYRQAPGKEREFVASIALGGTTYYADSVKGRFTISRDNAKNTVYLQMNSLKPEDTAVYYCAVAPADGWVAPVWHGYWGQGTQVTVSS

SEQ ID NO: 36621 - protein, 122 aa, Artificial Sequence
  Chemically Synthesized
QVQLQESGGGLVQAGGSLRLSCAASGYISYYSYMGWYRQAPGKERELVATIAWGGITYYADSVKGRFTISRDNAKNTVYLQMNSLKPEDTAVYYCAVYGRTNGYYSAVYDYWGQGTQVTVSS

SEQ ID NO: 36622 - protein, 118 aa, Artificial Sequence
  Chemically Synthesized
QVQLQESGGGLVQAGGSLRLSCAASGSIFSASIMGWYRQAPGKEREFVAAISDGASTNYADSVKGRFTISRDNAKNTVYLQMNSLKPEDTAVYYCAALERGTRGFYYWGQGTQVTVSS

SEQ ID NO: 36623 - protein, 118 aa, Artificial Sequence
  Chemically Synthesized
QVQLQESGGGLVQAGGSLRLSCAASGNISRYNRMGWYRQAPGKEREFVATISVGGSTYYADSVKGRFTISRDNAKNTVYLQMNSLKPEDTAVYYCAVRSGYKYYHVYWGQGTQVTVSS

SEQ ID NO: 36624 - protein, 118 aa, Artificial Sequence
  Chemically Synthesized
QVQLQESGGGLVQAGGSLRLSCAASGYISTQSNMGWYRQAPGKEREFVAAITVGTNTYYADSVKGRFTISRDNAKNTVYLQMNSLKPEDTAVYYCAATDRTYPYYYYWGQGTQVTVSS

SEQ ID NO: 36625 - protein, 122 aa, Artificial Sequence
  Chemically Synthesized
QVQLQESGGGLVQAGGSLRLSCAASGTISGGGTMGWYRQAPGKEREFVAGIGAGTTTNYADSVKGRFTISRDNAKNTVYLQMNSLKPEDTAVYYCAALYYPELRPSGYFYYWGQGTQVTVSS

SEQ ID NO: 36626 - protein, 122 aa, Artificial Sequence
  Chemically Synthesized
QVQLQESGGGLVQAGGSLRLSCAASGNISAPYVMGWYRQAPGKEREFVAGIGDGSNTNYADSVKGRFTISRDNAKNTVYLQMNSLKPEDTAVYYCAVLTYGGDRRAAYLWYWGQGTQVTVSS

SEQ ID NO: 36627 - protein, 118 aa, Artificial Sequence
  Chemically Synthesized
QVQLQESGGGLVQAGGSLRLSCAASGSISWPWNMGWYRQAPGKERELVASIGIGAITNYADSVKGRFTISRDNAKNTVYLQMNSLKPEDTAVYYCAAKSQYGTDHQYWGQGTQVTVSS

SEQ ID NO: 36628 - protein, 122 aa, Artificial Sequence
  Chemically Synthesized
QVQLQESGGGLVQAGGSLRLSCAASGSIFGSSDMGWYRQAPGKEREFVAGINYGSTTNYADSVKGRFTISRDNAKNTVYLQMNSLKPEDTAVYYCAAIYYEGQRHKYVHYYWGQGTQVTVSS

SEQ ID NO: 36629 - protein, 126 aa, Artificial Sequence
  Chemically Synthesized
QVQLQESGGGLVQAGGSLRLSCAASGNISWYADMGWYRQAPGKERELVATINYGSITNYADSVKGRFTISRDNAKNTVYLQMNSLKPEDTAVYYCAADVKPYGNYLYGRYLGHVYWGQGTQVTVSS

SEQ ID NO: 36630 - protein, 118 aa, Artificial Sequence
  Chemically Synthesized
QVQLQESGGGLVQAGGSLRLSCAASGTIFYPYAMGWYRQAPGKEREFVAAISAGATTYYADSVKGRFTISRDNAKNTVYLQMNSLKPEDTAVYYCAVYRWRGRYHRYWGQGTQVTVSS

SEQ ID NO: 36631 - protein, 118 aa, Artificial Sequence
  Chemically Synthesized
QVQLQESGGGLVQAGGSLRLSCAASGSISRDGVMGWYRQAPGKEREFVAGIGAGSNTNYADSVKGRFTISRDNAKNTVYLQMNSLKPEDTAVYYCAAITLRATYFYYWGQGTQVTVSS

SEQ ID NO: 36632 - protein, 121 aa, Artificial Sequence
  Chemically Synthesized
QVQLQESGGGLVQAGGSLRLSCAASGTIFGGRKMGWYRQAPGKEREFVAGIATGATTNYADSVKGRFTISRDNAKNTVYLQMNSLKPEDTAVYYCAVYHYSWARIWQFLYWGQGTQVTVSS

SEQ ID NO: 36633 - protein, 118 aa, Artificial Sequence
  Chemically Synthesized
QVQLQESGGGLVQAGGSLRLSCAASGTIFPSAGMGWYRQAPGKERELVATINTGGSTYYADSVKGRFTISRDNAKNTVYLQMNSLKPEDTAVYYCAVYAFTATQLDYWGQGTQVTVSS

SEQ ID NO: 36634 - protein, 126 aa, Artificial Sequence
  Chemically Synthesized
QVQLQESGGGLVQAGGSLRLSCAASGSISVGLHMGWYRQAPGKERELVATIDYGATTYYADSVKGRFTISRDNAKNTVYLQMNSLKPEDTAVYYCAVARYSYGADYYSDLGGYEYWGQGTQVTVSS

SEQ ID NO: 36635 - protein, 118 aa, Artificial Sequence
  Chemically Synthesized
QVQLQESGGGLVQAGGSLRLSCAASGSISYRHYMGWYRQAPGKEREFVASINVGGSTYYADSVKGRFTISRDNAKNTVYLQMNSLKPEDTAVYYCAAGYYPHDYFYYWGQGTQVTVSS

SEQ ID NO: 36636 - protein, 125 aa, Artificial Sequence
  Chemically Synthesized
QVQLQESGGGLVQAGGSLRLSCAASGSISDYWDMGWYRQAPGKEREFASIARGSITYYADSVKGRFTISRDNAKNTVYLQMNSLKPEDTAVYYCAANANNDSIAYYPVDAAYAYWGQGTQVTVSS

SEQ ID NO: 36637 - protein, 118 aa, Artificial Sequence
  Chemically Synthesized
QVQLQESGGGLVQAGGSLRLSCAASGTISYWYYMGWYRQAPGKEREFVATISSGGITNYADSVKGRFTISRDNAKNTVYLQMNSLKPEDTAVYYCAVLYERYTDLPYWGQGTQVTVSS

SEQ ID NO: 36638 - protein, 122 aa, Artificial Sequence
  Chemically Synthesized
QVQLQESGGGLVQAGGSLRLSCAASGTISYDVRMGWYRQAPGKEREFVASITTGTITYYADSVKGRFTISRDNAKNTVYLQMNSLKPEDTAVYYCAAYDYVAYAGHYFHSYWGQGTQVTVSS

SEQ ID NO: 36639 - protein, 118 aa, Artificial Sequence
  Chemically Synthesized
QVQLQESGGGLVQAGGSLRLSCAASGYISIRLYMGWYRQAPGKERELVAGINHGGSTYYADSVKGRFTISRDNAKNTVYLQMNSLKPEDTAVYYCAVDLADYWRHFYWGQGTQVTVSS

SEQ ID NO: 36640 - protein, 118 aa, Artificial Sequence
  Chemically Synthesized
QVQLQESGGGLVQAGGSLRLSCAASGTISAYLLMGWYRQAPGKERELVASINDGGSTYYADSVKGRFTISRDNAKNTVYLQMNSLKPEDTAVYYCAVYPQYERYHGYWGQGTQVTVSS

SEQ ID NO: 36641 - protein, 118 aa, Artificial Sequence
  Chemically Synthesized
QVQLQESGGGLVQAGGSLRLSCAASGNIFDGDYMGWYRQAPGKEREFVASIAYGGNTYYADSVKGRFTISRDNAKNTVYLQMNSLKPEDTAVYYCAATTNTGVVYDYWGQGTQVTVSS

SEQ ID NO: 36642 - protein, 118 aa, Artificial Sequence
  Chemically Synthesized
QVQLQESGGGLVQAGGSLRLSCAASGNIFAPWAMGWYRQAPGKEREFVAAITLGSITNYADSVKGRFTISRDNAKNTVYLQMNSLKPEDTAVYYCAVALGATGRHPYWGQGTQVTVSS

SEQ ID NO: 36643 - protein, 117 aa, Artificial Sequence
  Chemically Synthesized
QVQLQESGGGLVQAGGSLRLSCAASGYIFYNYMGWYRQAPGKERELVASIDTGAITNYADSVKGRFTISRDNAKNTVYLQMNSLKPEDTAVYYCAVVDPRAPDLAYWGQGTQVTVSS

SEQ ID NO: 36644 - protein, 118 aa, Artificial Sequence
  Chemically Synthesized
QVQLQESGGGLVQAGGSLRLSCAASGYISGSESMGWYRQAPGKEREFVATIDYGAITNYADSVKGRFTISRDNAKNTVYLQMNSLKPEDTAVYYCAAYDTGFYLHAYWGQGTQVTVSS

SEQ ID NO: 36645 - protein, 121 aa, Artificial Sequence
  Chemically Synthesized
QVQLQESGGGLVQAGGSLRLSCAASGSLMGWYRQAPGKERELVASINDGSTTYYADSVKGRFTISRDNAKNTVYLQMNSLKPEDTAVYYCAAYAPETYAGFTIPWDDHGYWGQGTQVTVSS

SEQ ID NO: 36646 - protein, 118 aa, Artificial Sequence
  Chemically Synthesized
QVQLQESGGGLVQAGGSLRLSCAASGYISDFYVMGWYRQAPGKEREFVAGINVGASTYYADSVKGRFTISRDNAKNTVYLQMNSLKPEDTAVYYCAARDYYPTYLNYWGQGTQVTVSS

SEQ ID NO: 36647 - protein, 117 aa, Artificial Sequence
  Chemically Synthesized
QVQLQESGGGLVQAGGSLRLSCAASGSIFTTNMGWYRQAPGKERELVAGIDSGSNTNYADSVKGRFTISRDNAKNTVYLQMNSLKPEDTAVYYCAVRTGNITVHAYWGQGTQVTVSS

SEQ ID NO: 36648 - protein, 122 aa, Artificial Sequence
  Chemically Synthesized
QVQLQESGGGLVQAGGSLRLSCAASGNIFYTPFMGWYRQAPGKEREFVAAIAYGGITYYADSVKGRFTISRDNAKNTVYLQMNSLKPEDTAVYYCAAWVTYWWHRNDTHAYWGQGTQVTVSS

SEQ ID NO: 36649 - protein, 118 aa, Artificial Sequence
  Chemically Synthesized
QVQLQESGGGLVQAGGSLRLSCAASGYIFYVLYMGWYRQAPGKEREFVAAIAYGASTYYADSVKGRFTISRDNAKNTVYLQMNSLKPEDTAVYYCAVIFPYALALPYWGQGTQVTVSS

SEQ ID NO: 36650 - protein, 126 aa, Artificial Sequence
  Chemically Synthesized
QVQLQESGGGLVQAGGSLRLSCAASGTISPGTAMGWYRQAPGKERELVAGIGYGAITNYADSVKGRFTISRDNAKNTVYLQMNSLKPEDTAVYYCAVYYWDVHATVASDPWRHGYWGQGTQVTVSS

SEQ ID NO: 36651 - protein, 118 aa, Artificial Sequence
  Chemically Synthesized
QVQLQESGGGLVQAGGSLRLSCAASGYISSYAGMGWYRQAPGKEREFVASIDVGAITYYADSVKGRFTISRDNAKNTVYLQMNSLKPEDTAVYYCAVGVIGQDTFPYWGQGTQVTVSS

SEQ ID NO: 36652 - protein, 117 aa, Artificial Sequence
  Chemically Synthesized
QVQLQESGGGLVQAGGSLRLSCAASGYISARQYMGWYRQAPGKEREFVPLLMLVVVPYADSVKGRFTISRDNAKNTVYLQMNSLKPEDTAVYYCAAYYQLDEVYFYWGQGTQVTVSS

SEQ ID NO: 36653 - protein, 122 aa, Artificial Sequence
  Chemically Synthesized
QVQLQESGGGLVQAGGSLRLSCAASGYIFDPWQMGWYRQAPGKERELVATITSGATTYYADSVKGRFTISRDNAKNTVYLQMNSLKPEDTAVYYCAAPVDRYGRDYVYYAYWGQGTQVTVSS

SEQ ID NO: 36654 - protein, 122 aa, Artificial Sequence
  Chemically Synthesized
QVQLQESGGGLVQAGGSLRLSCAASGYISELTRMGWYRQAPGKERELVAAIAWGASTNYADSVKGRFTISRDNAKNTVYLQMNSLKPEDTAVYYCAAINVPLAPRDARYDYWGQGTQVTVSS

SEQ ID NO: 36655 - protein, 124 aa, Artificial Sequence
  Chemically Synthesized
QVQLQESGGGLVQAGGSLRLSCAASGYIFVYFWMGWYRQAPGKEREFVAAIDYGGSTNYADSVKGRFTISRDNAKNTVYLQMNSLKPEDTAVYYCAADTSSYVWRVLYFPHSYWGQGTQVTVSS

SEQ ID NO: 36656 - protein, 118 aa, Artificial Sequence
  Chemically Synthesized
QVQLQESGGGLVQAGGSLRLSCAASGNIFWPDGMGWYRQAPGKERELVAGIDRGTITNYADSVKGRFTISRDNAKNTVYLQMNSLKPEDTAVYYCAAGQPTYDVHYYWGQGTQVTVSS

SEQ ID NO: 36657 - protein, 123 aa, Artificial Sequence
  Chemically Synthesized
QVQLQESGGGLVQAGGSLRLSCAASGNIFGYDFMGWYRQAPGKERELVAAIDTGTSTNYADSVKGRFTISRDNAKNTVYLQMNSLKPEDTAVYYCAADGDQGYYLTDYYLWYWGQGTQVTVSS

SEQ ID NO: 36658 - protein, 117 aa, Artificial Sequence
  Chemically Synthesized
QVQLQESGGGLVQAGGSLRLSCAASGNISTSVMGWYRQAPGKEREFVAGIGTGASTYYADSVKGRFTISRDNAKNTVYLQMNSLKPEDTAVYYCAAGTEVERYFAYWGQGTQVTVSS

SEQ ID NO: 36659 - protein, 122 aa, Artificial Sequence
  Chemically Synthesized
QVQLQESGGGLVQAGGSLRLSCAASGSIFYGSVMGWYRQAPGKERELVAAIAYGGSTNYADSVKGRFTISRDNAKNTVYLQMNSLKPEDTAVYYCAVRPSHAYSAYYVYVYWGQGTQVTVSS

SEQ ID NO: 36660 - protein, 122 aa, Artificial Sequence
  Chemically Synthesized
QVQLQESGGGLVQAGGSLRLSCAASGTTTTMGWYRQAPGKEREFVAAINNGGSTNYADSVKGRFTISRDNAKNTVYLQMNSLKPEDTAVYYCAATYTTLLVTLLTVTCLMYWGQGTQVTVSS

SEQ ID NO: 36661 - protein, 118 aa, Artificial Sequence
  Chemically Synthesized
QVQLQESGGGLVQAGGSLRLSCAASGNIFILQCMGWYRQAPGKERELVAAIDLGTNTNYADSVKGRFTISRDNAKNTVYLQMNSLKPEDTAVYYCAAPDTDANAFPYWGQGTQVTVSS

SEQ ID NO: 36662 - protein, 118 aa, Artificial Sequence
  Chemically Synthesized
QVQLQESGGGLVQAGGSLRLSCAASGYISRGYSMGWYRQAPGKEREFVATIAGGGSTYYADSVKGRFTISRDNAKNTVYLQMNSLKPEDTAVYYCAVGRYTWLYHYYWGQGTQVTVSS

SEQ ID NO: 36663 - protein, 118 aa, Artificial Sequence
  Chemically Synthesized
QVQLQESGGGLVQAGGSLRLSCAASGYISSLDRMGWYRQAPGKERELVATIDSGANTYYADSVKGRFTISRDNAKNTVYLQMNSLKPEDTAVYYCAALFRASDELIYWGQGTQVTVSS

SEQ ID NO: 36664 - protein, 118 aa, Artificial Sequence
  Chemically Synthesized
QVQLQESGGGLVQAGGSLRLSCAASGTISLGEYMGWYRQAPGKERELVASINDGSSTYYADSVKGRFTISRDNAKNTVYLQMNSLKPEDTAVYYCAVIVYQSTSLYYWGQGTQVTVSS

SEQ ID NO: 36665 - protein, 118 aa, Artificial Sequence
  Chemically Synthesized
QVQLQESGGGLVQAGGSLRLSCAASGSIFWILRMGWYRQAPGKEREFVAGIANGASTNYADSVKGRFTISRDNAKNTVYLQMNSLKPEDTAVYYCAVGYYYTPFLQYWGQGTQVTVSS

SEQ ID NO: 36666 - protein, 122 aa, Artificial Sequence
  Chemically Synthesized
QVQLQESGGGLVQAGGSLRLSCAASGYIFSSGPMGWYRQAPGKERELVAAITDGSNTYYADSVKGRFTISRDNAKNTVYLQMNSLKPEDTAVYYCAAGNRYGRNDRRTYGYWGQGTQVTVSS

SEQ ID NO: 36667 - protein, 122 aa, Artificial Sequence
  Chemically Synthesized
QVQLQESGGGLVQAGGSLRLSCAASGTISDPRNMGWYRQAPGKERELVASISIGGNTNYADSVKGRFTISRDNAKNTVYLQMNSLKPEDTAVYYCAATFAYWYYPAIYFQYWGQGTQVTVSS

SEQ ID NO: 36668 - protein, 122 aa, Artificial Sequence
  Chemically Synthesized
QVQLQESGGGLVQAGGSLRLSCAASGSIFSDYPMGWYRQAPGKERELVAGIGDGGSTYYADSVKGRFTISRDNAKNTVYLQMNSLKPEDTAVYYCAATLETRAEVVAVHKYWGQGTQVTVSS

SEQ ID NO: 36669 - protein, 113 aa, Artificial Sequence
  Chemically Synthesized
QVQLQESGGGLVQAGGSLRLSCAASGNISDAKMGWYRQAPGKEREFVAGIGGGSSTNYADSVKGRFTISRDNAKNTVYLQMNSLKPEDTAVYYCAVGPDFRYWGQGTQVTVSS

SEQ ID NO: 36670 - protein, 118 aa, Artificial Sequence
  Chemically Synthesized
QVQLQESGGGLVQAGGSLRLSCAASGTIFYSKIMGWYRQAPGKERELVASIARGGITNYADSVKGRFTISRDNAKNTVYLQMNSLKPEDTAVYYCAAINIFVVRYLYWGQGTQVTVSS

SEQ ID NO: 36671 - protein, 122 aa, Artificial Sequence
  Chemically Synthesized
QVQLQESGGGLVQAGGSLRLSCAASGNISTFYYMGWYRQAPGKERELVATINGGANTNYADSVKGRFTISRDNAKNTVYLQMNSLKPEDTAVYYCAATYGLDGASSYPYDYWGQGTQVTVSS

SEQ ID NO: 36672 - protein, 116 aa, Artificial Sequence
  Chemically Synthesized
QVQLQESGGGLVQAGGSLRLSCAASGNISTSSMGWYRQAPGKERELVATIDSGTNTYYADSVKGRFTISRDNAKNTVYLQMNSLKPEDTAVYYCAVPWRYYRWHYWGQGTQVTVSS

SEQ ID NO: 36673 - protein, 114 aa, Artificial Sequence
  Chemically Synthesized
QVQLQESGGGLVQAGGSLRLSCAASGSISPNRSMGWYRQAPGKEREFVAAIGPGASTYYADSVKGRFTISRDNAKNTVYLQMNSLKPEDTAVYYCAADVTFGYWGQGTQVTVSS

SEQ ID NO: 36674 - protein, 115 aa, Artificial Sequence
  Chemically Synthesized
QVQLQESGGGLVQAGGSLRLSCAASGSISTDGDMGWYRQAPGKEREFVAAIDTGAITNYADSVKGRFTISRDNAKNTVYLQMNSLKPEDTAVYYCAVLNAPFLYWGQGTQVTVSS

SEQ ID NO: 36675 - protein, 118 aa, Artificial Sequence
  Chemically Synthesized
QVQLQESGGGLVQAGGSLRLSCAASGNIFTPNAMGWYRQAPGKEREFVASISAGASTNYADSVKGRFTISRDNAKNTVYLQMNSLKPEDTAVYYCAATYVQFDRYLYWGQGTQVTVSS

SEQ ID NO: 36676 - protein, 122 aa, Artificial Sequence
  Chemically Synthesized
QVQLQESGGGLVQAGGSLRLSCAASGNISTYRAMGWYRQAPGKERELVAAIAQGGNTYYADSVKGRFTISRDNAKNTVYLQMNSLKPEDTAVYYCAVPVYSPSTVGGNLVYWGQGTQVTVSS

SEQ ID NO: 36677 - protein, 119 aa, Artificial Sequence
  Chemically Synthesized
QVQLQESGGGLVQAGGSLRLSCAASGTISLFREMGWYRQAPGKEREFVASIGPGSSTNYADSVKGRFTISRDNAKNTVYLQMNSLKPEDTAVYYCAAHGRTDHYHVLYWGQGTQVTVSS

SEQ ID NO: 36678 - protein, 118 aa, Artificial Sequence
  Chemically Synthesized
QVQLQESGGGLVQAGGSLRLSCAASGYIFDWHQMGWYRQAPGKEREFVAAINHGGITNYADSVKGRFTISRDNAKNTVYLQMNSLKPEDTAVYYCAAIGPRYTGHFYWGQGTQVTVSS

SEQ ID NO: 36679 - protein, 118 aa, Artificial Sequence
  Chemically Synthesized
QVQLQESGGGLVQAGGSLRLSCAASGSISYIAEMGWYRQAPGKEREFVAAINSGSNTNYADSVKGRFTISRDNAKNTVYLQMNSLKPEDTAVYYCAVHLARNDIHLYWGQGTQVTVSS

SEQ ID NO: 36680 - protein, 122 aa, Artificial Sequence
  Chemically Synthesized
QVQLQESGGGLVQAGGSLRLSCAASGNISPQSVMGWYRQAPGKEREFVAGISGGASTNYADSVKGRFTISRDNAKNTVYLQMNSLKPEDTAVYYCAALDHGSGEVYAYHLYWGQGTQVTVSS

SEQ ID NO: 36681 - protein, 126 aa, Artificial Sequence
  Chemically Synthesized
QVQLQESGGGLVQAGGSLRLSCAASGTISGATPMGWYRQAPGKEREFVAGINQGSITYYADSVKGRFTISRDNAKNTVYLQMNSLKPEDTAVYYCAALDYYDQELGGHYIEFHRYWGQGTQVTVSS

SEQ ID NO: 36682 - protein, 118 aa, Artificial Sequence
  Chemically Synthesized
QVQLQESGGGLVQAGGSLRLSCAASGTIFGVDEMGWYRQAPGKEREFVASIAPGSNTYYADSVKGRFTISRDNAKNTVYLQMNSLKPEDTAVYYCAATIADHRDYLYWGQGTQVTVSS

SEQ ID NO: 36683 - protein, 121 aa, Artificial Sequence
  Chemically Synthesized
QVQLQESGGGLVQAGGSLRLSCAASGNIFQGGSMGWYRQAPGKERELVAGINYGGTTYYADSVKGRFTISRDNAKNTVYLQMNSLKPEDTAVYYCAAGLRDSYGKRLYYYWGQGTQVTVSS

SEQ ID NO: 36684 - protein, 117 aa, Artificial Sequence
  Chemically Synthesized
QVQLQESGGGLVQAGGSLRLSCAASGTISSSVDMGWYRQAPGKEREFVAAISHGGNTNYADSVKGRFTISRDNAKNTVYLQMNSLKPEDTAVYYCAAAAVTDALLYWGQGTQVTVSS

SEQ ID NO: 36685 - protein, 122 aa, Artificial Sequence
  Chemically Synthesized
QVQLQESGGGLVQAGGSLRLSCAASGTISYEYQMGWYRQAPGKEREFVAGITKGTSTNYADSVKGRFTISRDNAKNTVYLQMNSLKPEDTAVYYCAALSPRDYTHRYYYFYWGQGTQVTVSS

SEQ ID NO: 36686 - protein, 122 aa, Artificial Sequence
  Chemically Synthesized
QVQLQESGGGLVQAGGSLRLSCAASGTISRYDVMGWYRQAPGKEREFVAAIAAGATTNYADSVKGRFTISRDNAKNTVYLQMNSLKPEDTAVYYCAVVTSYDDDYRYDLYYWGQGTQVTVSS

SEQ ID NO: 36687 - protein, 122 aa, Artificial Sequence
  Chemically Synthesized
QVQLQESGGGLVQAGGSLRLSCAASGTIFRPYRMGWYRQAPGKEREFVASIDYGTSTYYADSVKGRFTISRDNAKNTVYLQMNSLKPEDTAVYYCAALSTSDTGTRTYHYYWGQGTQVTVSS

SEQ ID NO: 36688 - protein, 117 aa, Artificial Sequence
  Chemically Synthesized
QVQLQESGGGLVQAGGSLRLSCAASGNIFPDPYMGWYRQAPGKERELVATIDRGGNTNYADSVKGRFTISRDNAKNTVYLQMNSLKPEDTAVYYCAVDFASVIVIYWGQGTQVTVSS

SEQ ID NO: 36689 - protein, 122 aa, Artificial Sequence
  Chemically Synthesized
QVQLQESGGGLVQAGGSLRLSCAASGTIFGRAQMGWYRQAPGKEREFVAGIDVGANTYYADSVKGRFTISRDNAKNTVYLQMNSLKPEDTAVYYCAVYVPGPDDTTWWYKYWGQGTQVTVSS

SEQ ID NO: 36690 - protein, 118 aa, Artificial Sequence
  Chemically Synthesized
QVQLQESGGGLVQAGGSLRLSCAASGTISDIWQMGWYRQAPGKEREFVASIAQGTSTYYADSVKGRFTISRDNAKNTVYLQMNSLKPEDTAVYYCAAIYYAYPEYLYWGQGTQVTVSS

SEQ ID NO: 36691 - protein, 118 aa, Artificial Sequence
  Chemically Synthesized
QVQLQESGGGLVQAGGSLRLSCAASGNISRYSYMGWYRQAPGKERELVASINYGASTNYADSVKGRFTISRDNAKNTVYLQMNSLKPEDTAVYYCAAAVFYDSWHGYWGQGTQVTVSS

SEQ ID NO: 36692 - protein, 126 aa, Artificial Sequence
  Chemically Synthesized
QVQLQESGGGLVQAGGSLRLSCAASGNISDWGGMGWYRQAPGKERELVAAIDLGSTTNYADSVKGRFTISRDNAKNTVYLQMNSLKPEDTAVYYCAAYVSPQWDQSDQAYVGHLYWGQGTQVTVSS

SEQ ID NO: 36693 - protein, 126 aa, Artificial Sequence
  Chemically Synthesized
QVQLQESGGGLVQAGGSLRLSCAASGYISNWGDMGWYRQAPGKEREFVAGISAGASTYYADSVKGRFTISRDNAKNTVYLQMNSLKPEDTAVYYCAALRPDPRPYEYSPDIGHLYWGQGTQVTVSS

SEQ ID NO: 36694 - protein, 122 aa, Artificial Sequence
  Chemically Synthesized
QVQLQESGGGLVQAGGSLRLSCAASGTISRDDLMGWYRQAPGKEREFVAGITHGATTNYADSVKGRFTISRDNAKNTVYLQMNSLKPEDTAVYYCAALSNTYDSRYRRLFYWGQGTQVTVSS

SEQ ID NO: 36695 - protein, 122 aa, Artificial Sequence
  Chemically Synthesized
QVQLQESGGGLVQAGGSLRLSCAASGTISYPTYMGWYRQAPGKERELVATIGRGASTNYADSVKGRFTISRDNAKNTVYLQMNSLKPEDTAVYYCAVPFPDINDYIYWYDYWGQGTQVTVSS

SEQ ID NO: 36696 - protein, 122 aa, Artificial Sequence
  Chemically Synthesized
QVQLQESGGGLVQAGGSLRLSCAASGNIFRLDYMGWYRQAPGKEREFVASISSGATTNYADSVKGRFTISRDNAKNTVYLQMNSLKPEDTAVYYCAAILRLERYGSPYLGYWGQGTQVTVSS

SEQ ID NO: 36697 - protein, 118 aa, Artificial Sequence
  Chemically Synthesized
QVQLQESGGGLVQAGGSLRLSCAASGTISITGVMGWYRQAPGKERELVAAIGSGANTNYADSVKGRFTISRDNAKNTVYLQMNSLKPEDTAVYYCAAPTTVAQPHRYWGQGTQVTVSS

SEQ ID NO: 36698 - protein, 117 aa, Artificial Sequence
  Chemically Synthesized
QVQLQESGGGLVQAGGSLRLSCAASGSIFDNPQMGWYRQAPGKEREFVAAITSGGNTNYADSVKGRFTISRDNAKNTVYLQMNSLKPEDTAVYYCAVARPAYQLLYWGQGTQVTVSS

SEQ ID NO: 36699 - protein, 122 aa, Artificial Sequence
  Chemically Synthesized
QVQLQESGGGLVQAGGSLRLSCAASGNISQRSLMGWYRQAPGKEREFVAGIAYGSSTNYADSVKGRFTISRDNAKNTVYLQMNSLKPEDTAVYYCAVLDIREGESNDKLFYWGQGTQVTVSS

SEQ ID NO: 36700 - protein, 118 aa, Artificial Sequence
  Chemically Synthesized
QVQLQESGGGLVQAGGSLRLSCAASGTISGSSLMGWYRQAPGKEREFVAGIGRGTNTNYADSVKGRFTISRDNAKNTVYLQMNSLKPEDTAVYYCAVLDHGTVYLFYWGQGTQVTVSS

SEQ ID NO: 36701 - protein, 118 aa, Artificial Sequence
  Chemically Synthesized
QVQLQESGGGLVQAGGSLRLSCAASGTISDEHIMGWYRQAPGKEREFVAGINSGGSTNYADSVKGRFTISRDNAKNTVYLQMNSLKPEDTAVYYCAALLYRDGWYWYWGQGTQVTVSS

SEQ ID NO: 36702 - protein, 122 aa, Artificial Sequence
  Chemically Synthesized
QVQLQESGGGLVQAGGSLRLSCAASGTISVPAVMGWYRQAPGKEREFVATIGYGSSTNYADSVKGRFTISRDNAKNTVYLQMNSLKPEDTAVYYCAADYHVPATWRFILPYWGQGTQVTVSS

SEQ ID NO: 36703 - protein, 125 aa, Artificial Sequence
  Chemically Synthesized
QVQLQESGGGLVQAGGSLRLSCAASGNISPPYYMGWYRQAPGKERELVASINGGGITNYADSVKGRFTISRDNAKNTVYLQMNSLKPEDTAVYYCAVVDRPGQPHGTQRGWHYYWGQGTQVTVSS

SEQ ID NO: 36704 - protein, 118 aa, Artificial Sequence
  Chemically Synthesized
QVQLQESGGGLVQAGGSLRLSCAASGNISGEDVMGWYRQAPGKERELVASIAYGANTYYADSVKGRFTISRDNAKNTVYLQMNSLKPEDTAVYYCAALWRRPVLHYYWGQGTQVTVSS

SEQ ID NO: 36705 - protein, 118 aa, Artificial Sequence
  Chemically Synthesized
QVQLQESGGGLVQAGGSLRLSCAASGYIFVPIAMGWYRQAPGKEREFVAAIDVGGNTYYADSVKGRFTISRDNAKNTVYLQMNSLKPEDTAVYYCAVYAQRSTPLTYWGQGTQVTVSS

SEQ ID NO: 36706 - protein, 118 aa, Artificial Sequence
  Chemically Synthesized
QVQLQESGGGLVQAGGSLRLSCAASGTISYYLRMGWYRQAPGKEREFVASIDRGGTTYYADSVKGRFTISRDNAKNTVYLQMNSLKPEDTAVYYCAAVGYTAAYHGYWGQGTQVTVSS

SEQ ID NO: 36707 - protein, 118 aa, Artificial Sequence
  Chemically Synthesized
QVQLQESGGGLVQAGGSLRLSCAASGTIFGVSHMGWYRQAPGKEREFVAGITEGSTTYYADSVKGRFTISRDNAKNTVYLQMNSLKPEDTAVYYCAAITYTDGYHYYWGQGTQVTVSS

SEQ ID NO: 36708 - protein, 119 aa, Artificial Sequence
  Chemically Synthesized
QVQLQESGGGLVQAGGSLRLSCAASGTISDTSGMGWYRQAPGKERELVASIDHGSNTYYADSVKGRFTISRDNAKNTVYLQMNSLKPEDTAVYYCAVTLVVLTLRTFYWGQGTQVTVSS

SEQ ID NO: 36709 - protein, 118 aa, Artificial Sequence
  Chemically Synthesized
QVQLQESGGGLVQAGGSLRLSCAASGSISRYYRMGWYRQAPGKERELVAGITSGGSTYYADSVKGRFTISRDNAKNTVYLQMNSLKPEDTAVYYCAASYYDAVRFQYWGQGTQVTVSS

SEQ ID NO: 36710 - protein, 118 aa, Artificial Sequence
  Chemically Synthesized
QVQLQESGGGLVQAGGSLRLSCAASGNISSRPAMGWYRQAPGKEREFVAAIGWGTNTNYADSVKGRFTISRDNAKNTVYLQMNSLKPEDTAVYYCAVVIRDAYLYYYWGQGTQVTVSS

SEQ ID NO: 36711 - protein, 117 aa, Artificial Sequence
  Chemically Synthesized
QVQLQESGGGLVQAGGSLRLSCAASGNIFTLPNMGWYRQAPGKEREFVAGIAVGAITNYADSVKGRFTISRDNAKNTVYLQMNSLKPEDTAVYYCAVFSWLTVVIYWGQGTQVTVSS

SEQ ID NO: 36712 - protein, 118 aa, Artificial Sequence
  Chemically Synthesized
QVQLQESGGGLVQAGGSLRLSCAASGYIFEPVVMGWYRQAPGKEREFVAGIGDGGITNYADSVKGRFTISRDNAKNTVYLQMNSLKPEDTAVYYCAAVRSRSTVHYYWGQGTQVTVSS

SEQ ID NO: 36713 - protein, 111 aa, Artificial Sequence
  Chemically Synthesized
QVQLQESGGGLVQAGGSLRLSCAASGYISDDYTMGWYRQAPGKERELVASIAVGANTNYADSVKGRFTISRDNAKNTVYLQMNSLKPEDTAVYYCAVTMYWGQGTQVTVSS

SEQ ID NO: 36714 - protein, 122 aa, Artificial Sequence
  Chemically Synthesized
QVQLQESGGGLVQAGGSLRLSCAASGNIFDTHYMGWYRQAPGKEREFVASINKGANTNYADSVKGRFTISRDNAKNTVYLQMNSLKPEDTAVYYCAVTGLRYTYTYERHGYWGQGTQVTVSS

SEQ ID NO: 36715 - protein, 122 aa, Artificial Sequence
  Chemically Synthesized
QVQLQESGGGLVQAGGSLRLSCAASGNISVLPKMGWYRQAPGKEREFVAGINRGGNTNYADSVKGRFTISRDNAKNTVYLQMNSLKPEDTAVYYCAAFDLRTKQYSGYFHYWGQGTQVTVSS

SEQ ID NO: 36716 - protein, 117 aa, Artificial Sequence
  Chemically Synthesized
QVQLQESGGGLVQAGGSLRLSCAASGSISYIGTMGWYRQAPGKERELVGIDVGTSTYYADSVKGRFTISRDNAKNTVYLQMNSLKPEDTAVYYCAAEIYTTGHHYYWGQGTQVTVSS

SEQ ID NO: 36717 - protein, 121 aa, Artificial Sequence
  Chemically Synthesized
QVQLQESGGGLVQAGGSLRLSCAASGTISWDDAMGWYRQAPGKERELVAGINSVVLPYADSVKGRFTISRDNAKNTVYLQMNSLKPEDTAVYYCAAYYLYYVWLSYPHYYWGQGTQVTVSS

SEQ ID NO: 36718 - protein, 115 aa, Artificial Sequence
  Chemically Synthesized
QVQLQESGGGLVQAGGSLRLSCAASGNISYTPMGWYRQAPGKEREFVAGIDYGGSTNYADSVKGRFTISRDNAKNTVYLQMNSLKPEDTAVYYCAVVLFLRRMYWGQGTQVTVSS

SEQ ID NO: 36719 - protein, 125 aa, Artificial Sequence
  Chemically Synthesized
QVQLQESGGGLVQAGGSLRLSCAASGTIFWPVYMGWYRQAPGKEREFVASIAPGSNTYYADSVKGRFTISRDNAKNTVYLQMNSLKPEDTAVYYCAVYRYDHNTSLDWADDGLYWGQGTQVTVSS

SEQ ID NO: 36720 - protein, 119 aa, Artificial Sequence
  Chemically Synthesized
QVQLQESGGGLVQAGGSLRLSCAASGNIFFTYSMGWYRQAPGKERELVAGIPYADSVKGRFTISRDNAKNTVYLQMNSLKPEDTAVYYCAVRRGGDVSQTAKWRYSIYWGQGTQVTVSS

SEQ ID NO: 36721 - protein, 118 aa, Artificial Sequence
  Chemically Synthesized
QVQLQESGGGLVQAGGSLRLSCAASGTISNDDAMGWYRQAPGKERELVAGISTGGNTNYADSVKGRFTISRDNAKNTVYLQMNSLKPEDTAVYYCAALRDSELLHQYWGQGTQVTVSS

SEQ ID NO: 36722 - protein, 118 aa, Artificial Sequence
  Chemically Synthesized
QVQLQESGGGLVQAGGSLRLSCAASGSIFPYIDMGWYRQAPGKEREFVATITTGTTTYYADSVKGRFTISRDNAKNTVYLQMNSLKPEDTAVYYCAADGWDGDHFDYWGQGTQVTVSS

SEQ ID NO: 36723 - protein, 118 aa, Artificial Sequence
  Chemically Synthesized
QVQLQESGGGLVQAGGSLRLSCAASGYIFGPWGMGWYRQAPGKERELVAAIADGTSTNYADSVKGRFTISRDNAKNTVYLQMNSLKPEDTAVYYCAAYAGAPVTHQYWGQGTQVTVSS

SEQ ID NO: 36724 - protein, 126 aa, Artificial Sequence
  Chemically Synthesized
QVQLQESGGGLVQAGGSLRLSCAASGYISSPSYMGWYRQAPGKEREFVAAIAVGTTTYYADSVKGRFTISRDNAKNTVYLQMNSLKPEDTAVYYCAVYYTRYALDDGGDAYLYEYWGQGTQVTVSS

SEQ ID NO: 36725 - protein, 122 aa, Artificial Sequence
  Chemically Synthesized
QVQLQESGGGLVQAGGSLRLSCAASGNISPSYVMGWYRQAPGKEREFVAGIATGTITNYADSVKGRFTISRDNAKNTVYLQMNSLKPEDTAVYYCAALHRNYVDATGYHYYWGQGTQVTVSS

SEQ ID NO: 36726 - protein, 124 aa, Artificial Sequence
  Chemically Synthesized
QVQLQESGGGLVQAGGSLRLSCAASGYISGNRSMGWYRQAPGKERELLPVLVTVLLPYADSVKGRFTISRDNAKNTVYLQMNSLKPEDTAVYYCAAYDYLAPGVTYFRTRLDYWGQGTQVTVSS

SEQ ID NO: 36727 - protein, 117 aa, Artificial Sequence
  Chemically Synthesized
QVQLQESGGGLVQAGGSLRLSCAASGTISDYFRMGWYRQAPGKERELVASITIGAYQYADSVKGRFTISRDNAKNTVYLQMNSLKPEDTAVYYCAAVYVGYSDHDYWGQGTQVTVSS

SEQ ID NO: 36728 - protein, 118 aa, Artificial Sequence
  Chemically Synthesized
QVQLQESGGGLVQAGGSLRLSCAASGNISYTGVMGWYRQAPGKEREFVAGIALGGSTNYADSVKGRFTISRDNAKNTVYLQMNSLKPEDTAVYYCAAIYATPRYLYYWGQGTQVTVSS

SEQ ID NO: 36729 - protein, 118 aa, Artificial Sequence
  Chemically Synthesized
QVQLQESGGGLVQAGGSLRLSCAASGTISRPFYMGWYRQAPGKERELVASIGYGSTTYYADSVKGRFTISRDNAKNTVYLQMNSLKPEDTAVYYCAASLRDLTQLLYWGQGTQVTVSS

SEQ ID NO: 36730 - protein, 121 aa, Artificial Sequence
  Chemically Synthesized
QVQLQESGGGLVQAGGSLRLSCAASGSISGTYDMGWYRQAPGKEREFVAGIGEGTSTYADSVKGRFTISRDNAKNTVYLQMNSLKPEDTAVYYCAVDGFVYIDRDDTHPYWGQGTQVTVSS

SEQ ID NO: 36731 - protein, 118 aa, Artificial Sequence
  Chemically Synthesized
QVQLQESGGGLVQAGGSLRLSCAASGYIFTYNDMGWYRQAPGKERELVAGITYGASTYYADSVKGRFTISRDNAKNTVYLQMNSLKPEDTAVYYCAAYPYQSFTHGYWGQGTQVTVSS

SEQ ID NO: 36732 - protein, 118 aa, Artificial Sequence
  Chemically Synthesized
QVQLQESGGGLVQAGGSLRLSCAASGYIFQAAQMGWYRQAPGKERELVAAIAQGGSTNYADSVKGRFTISRDNAKNTVYLQMNSLKPEDTAVYYCAALYYDRGYHWYWGQGTQVTVSS

SEQ ID NO: 36733 - protein, 118 aa, Artificial Sequence
  Chemically Synthesized
QVQLQESGGGLVQAGGSLRLSCAASGSISQWRAMGWYRQAPGKERELVAAIGPGSTTNYADSVKGRFTISRDNAKNTVYLQMNSLKPEDTAVYYCAAIRWRQGWLSYWGQGTQVTVSS

SEQ ID NO: 36734 - protein, 121 aa, Artificial Sequence
  Chemically Synthesized
QVQLQESGGGLVQAGGSLRLSCAASGTISAPVGMGWYRQAPGKEREFVATIGAGTITNYADSVKGRFTISRDNAKNTVYLQMNSLKPEDTAVYYCAADGDPYPRNYQILYWGQGTQVTVSS

SEQ ID NO: 36735 - protein, 121 aa, Artificial Sequence
  Chemically Synthesized
QVQLQESGGGLVQAGGSLRLSCAASGNISTRYTMGWYRQAPGKERELVASIGYGASTYYADSVKGRFTISRDNAKNTVYLQMNSLKPEDTAVYYCAVDPTLYVVSSRPHYWGQGTQVTVSS

SEQ ID NO: 36736 - protein, 118 aa, Artificial Sequence
  Chemically Synthesized
QVQLQESGGGLVQAGGSLRLSCAASGNISGYTSMGWYRQAPGKEREFVASIALGTNTYYADSVKGRFTISRDNAKNTVYLQMNSLKPEDTAVYYCAVIATTWGLHQYWGQGTQVTVSS

SEQ ID NO: 36737 - protein, 117 aa, Artificial Sequence
  Chemically Synthesized
QVQLQESGGGLVQAGGSLRLSCAASGTISYRRTMGWYRQAPGKERELVATIGQGATTNYADSVKGRFTISRDNAKNTVYLQMNSLKPEDTAVYYCAANARTTLTMYWGQGTQVTVSS

SEQ ID NO: 36738 - protein, 118 aa, Artificial Sequence
  Chemically Synthesized
QVQLQESGGGLVQAGGSLRLSCAASGYISYYVLMGWYRQAPGKEREFVAAIDPGGNTNYADSVKGRFTISRDNAKNTVYLQMNSLKPEDTAVYYCAVALRYYTPFDYWGQGTQVTVSS

SEQ ID NO: 36739 - protein, 118 aa, Artificial Sequence
  Chemically Synthesized
QVQLQESGGGLVQAGGSLRLSCAASGTISGAYAMGWYRQAPGKERELVASIGYGSTTYYADSVKGRFTISRDNAKNTVYLQMNSLKPEDTAVYYCAAVGDQSRDHLYWGQGTQVTVSS

SEQ ID NO: 36740 - protein, 121 aa, Artificial Sequence
  Chemically Synthesized
QVQLQESGGGLVQAGGSLRLSCAASGTIMGWYRQAPGKERELVAGIGGGGTTNYADSVKGRFTISRDNAKNTVYLQMNSLKPEDTAVYYCAAYTTDVRDYYYDYAVGLYYWGQGTQVTVSS

SEQ ID NO: 36741 - protein, 118 aa, Artificial Sequence
  Chemically Synthesized
QVQLQESGGGLVQAGGSLRLSCAASGYISYNVTMGWYRQAPGKEREFVAGINPGASTYYADSVKGRFTISRDNAKNTVYLQMNSLKPEDTAVYYCAAYIGPGTHHYYWGQGTQVTVSS

SEQ ID NO: 36742 - protein, 121 aa, Artificial Sequence
  Chemically Synthesized
QVQLQESGGGLVQAGGSLRLSCAASGSISAWIAMGWYRQAPGKEREFVATIAGGASTNYADSVKGRFTISRDNAKNTVYLQMNSLKPEDTAVYYCAVVYGERGNDHYHWYWGQGTQVTVSS

SEQ ID NO: 36743 - protein, 118 aa, Artificial Sequence
  Chemically Synthesized
QVQLQESGGGLVQAGGSLRLSCAASGNIFYTWPMGWYRQAPGKERELVAAISAGTNTNYADSVKGRFTISRDNAKNTVYLQMNSLKPEDTAVYYCAAHRVGVDLYYYWGQGTQVTVSS

SEQ ID NO: 36744 - protein, 118 aa, Artificial Sequence
  Chemically Synthesized
QVQLQESGGGLVQAGGSLRLSCAASGTISTSIAMGWYRQAPGKEREFVATITRGGNTNYADSVKGRFTISRDNAKNTVYLQMNSLKPEDTAVYYCAVLWRDDGYHYYWGQGTQVTVSS

SEQ ID NO: 36745 - protein, 119 aa, Artificial Sequence
  Chemically Synthesized
QVQLQESGGGLVQAGGSLRLSCAASGSISYGGVMGWYRQAPGKERELVATIGYGTSTNYADSVKGRFTISRDNAKNTVYLQMNSLKPEDTAVYYCAADYTYQYYRQSYWGQGTQVTVSS

SEQ ID NO: 36746 - protein, 111 aa, Artificial Sequence
  Chemically Synthesized
QVQLQESGGGLVQAGGSLRLSCAASGTISAFGGMGWYRQAPGKERELVASISTGATTYYADSVKGRFTISRDNAKNTVYLQMNSLKPEDTAVYYCAVYDYWGQGTQVTVSS

SEQ ID NO: 36747 - protein, 122 aa, Artificial Sequence
  Chemically Synthesized
QVQLQESGGGLVQAGGSLRLSCAASGTISDWYVMGWYRQAPGKERELVAAIGPGGNTNYADSVKGRFTISRDNAKNTVYLQMNSLKPEDTAVYYCAAYGKTDFSLPKRHRYWGQGTQVTVSS

SEQ ID NO: 36748 - protein, 118 aa, Artificial Sequence
  Chemically Synthesized
QVQLQESGGGLVQAGGSLRLSCAASGTISYLSNMGWYRQAPGKEREFVAAIGAGGNTNYADSVKGRFTISRDNAKNTVYLQMNSLKPEDTAVYYCAAIIHDDGWHAYWGQGTQVTVSS

SEQ ID NO: 36749 - protein, 118 aa, Artificial Sequence
  Chemically Synthesized
QVQLQESGGGLVQAGGSLRLSCAASGTISVIASMGWYRQAPGKERELVASIDHGATTNYADSVKGRFTISRDNAKNTVYLQMNSLKPEDTAVYYCAAGGADLYALWYWGQGTQVTVSS

SEQ ID NO: 36750 - protein, 121 aa, Artificial Sequence
  Chemically Synthesized
QVQLQESGGGLVQAGGSLRLSCAASGTISAEYGMGWYRQAPGKERELLPVLILVVIPYADSVKGRFTISRDNAKNTVYLQMNSLKPEDTAVYYCAVDYGDTPRNGAGHVYWGQGTQVTVSS

SEQ ID NO: 36751 - protein, 126 aa, Artificial Sequence
  Chemically Synthesized
QVQLQESGGGLVQAGGSLRLSCAASGNISYGYTMGWYRQAPGKEREFVASINGGSTNQYADSVKGRFTISRDNAKNTVYLQMNSLKPEDTAVYYCAVPYTYYNVASPRVSPDHPYWGQGTQVTVSS

SEQ ID NO: 36752 - protein, 115 aa, Artificial Sequence
  Chemically Synthesized
QVQLQESGGGLVQAGGSLRLSCAASGYISDYDNMGWYRQAPGKERELVATITSVLIPYADSVKGRFTISRDNAKNTVYLQMNSLKPEDTAVYYCAAYSPGGHNYWGQGTQVTVSS

SEQ ID NO: 36753 - protein, 126 aa, Artificial Sequence
  Chemically Synthesized
QVQLQESGGGLVQAGGSLRLSCAASGNISGAYDMGWYRQAPGKEREFVASINFGTTTNYADSVKGRFTISRDNAKNTVYLQMNSLKPEDTAVYYCAVEDIDGISSLLSVPVPVWYWGQGTQVTVSS

SEQ ID NO: 36754 - protein, 118 aa, Artificial Sequence
  Chemically Synthesized
QVQLQESGGGLVQAGGSLRLSCAASGNIFQVVAMGWYRQAPGKERELVASIGHGANTNYADSVKGRFTISRDNAKNTVYLQMNSLKPEDTAVYYCAAVIWDNGYFGYWGQGTQVTVSS

SEQ ID NO: 36755 - protein, 122 aa, Artificial Sequence
  Chemically Synthesized
QVQLQESGGGLVQAGGSLRLSCAASGTISSRFPMGWYRQAPGKEREFVAGIATGTTTNYADSVKGRFTISRDNAKNTVYLQMNSLKPEDTAVYYCAVVLRGGGSYRPYHYYWGQGTQVTVSS

SEQ ID NO: 36756 - protein, 118 aa, Artificial Sequence
  Chemically Synthesized
QVQLQESGGGLVQAGGSLRLSCAASGSISGPYAMGWYRQAPGKEREFVASIDIGANTNYADSVKGRFTISRDNAKNTVYLQMNSLKPEDTAVYYCAALYTSGYTHWYWGQGTQVTVSS

SEQ ID NO: 36757 - protein, 122 aa, Artificial Sequence
  Chemically Synthesized
QVQLQESGGGLVQAGGSLRLSCAASGYISPVVYMGWYRQAPGKEREFVAAINYGASTYYADSVKGRFTISRDNAKNTVYLQMNSLKPEDTAVYYCAVYWYYRLTYYNTLTYWGQGTQVTVSS

SEQ ID NO: 36758 - protein, 118 aa, Artificial Sequence
  Chemically Synthesized
QVQLQESGGGLVQAGGSLRLSCAASGTIFPTSYMGWYRQAPGKEREFVATIDNGGNTNYADSVKGRFTISRDNAKNTVYLQMNSLKPEDTAVYYCAVTYDDGDWYAYWGQGTQVTVSS

SEQ ID NO: 36759 - protein, 121 aa, Artificial Sequence
  Chemically Synthesized
QVQLQESGGGLVQAGGSLRLSCAASGYIFYNDYMGWYRQAPGKERELVATIGRGTITNYADSVKGRFTISRDNAKNTVYLQMNSLKPEDTAVYYCAANHTTADSSTTTIYWGQGTQVTVSS

SEQ ID NO: 36760 - protein, 117 aa, Artificial Sequence
  Chemically Synthesized
QVQLQESGGGLVQAGGSLRLSCAASGYISWLYPMGWYRQAPGKERELVASIDFGGTTNYADSVKGRFTISRDNAKNTVYLQMNSLKPEDTAVYYCAADGSRVRTIYWGQGTQVTVSS

SEQ ID NO: 36761 - protein, 112 aa, Artificial Sequence
  Chemically Synthesized
QVQLQESGGGLVQAGGSLRLSCAASGNISGRNYMGWYRQAPGKEREFVAYADSVKGRFTISRDNAKNTVYLQMNSLKPEDTAVYYCAVSTGTWAHGDPLSYWGQGTQVTVSS

SEQ ID NO: 36762 - protein, 122 aa, Artificial Sequence
  Chemically Synthesized
QVQLQESGGGLVQAGGSLRLSCAASGTISDVTGMGWYRQAPGKEREFVASINIGATTNYADSVKGRFTISRDNAKNTVYLQMNSLKPEDTAVYYCAALITTASIRPTYYYYWGQGTQVTVSS

SEQ ID NO: 36763 - protein, 118 aa, Artificial Sequence
  Chemically Synthesized
QVQLQESGGGLVQAGGSLRLSCAASGSIFDRLEMGWYRQAPGKERERVAAIATGASTYYADSVKGRFTISRDNAKNTVYLQMNSLKPEDTAVYYCAAFNSDWPYLDYWGQGTQVTVSS

SEQ ID NO: 36764 - protein, 125 aa, Artificial Sequence
  Chemically Synthesized
QVQLQESGGGLVQAGGSLRLSCAASGSISGATMGWYRQAPGKEREFVATIGYGAITNYADSVKGRFTISRDNAKNTVYLQMNSLKPEDTAVYYCAVKYAFNSVRTGDHPTRYNYWGQGTQVTVSS

SEQ ID NO: 36765 - protein, 118 aa, Artificial Sequence
  Chemically Synthesized
QVQLQESGGGLVQAGGSLRLSCAASGNISDTSPMGWYRQAPGKEREFVATIAGGSSTYYADSVKGRFTISRDNAKNTVYLQMNSLKPEDTAVYYCAVVHYRTAYYYYWGQGTQVTVSS

SEQ ID NO: 36766 - protein, 118 aa, Artificial Sequence
  Chemically Synthesized
QVQLQESGGGLVQAGGSLRLSCAASGTISRNAEMGWYRQAPGKEREFVAAISYGGSTYYADSVKGRFTISRDNAKNTVYLQMNSLKPEDTAVYYCAADTHYGRYHPYWGQGTQVTVSS

SEQ ID NO: 36767 - protein, 118 aa, Artificial Sequence
  Chemically Synthesized
QVQLQESGGGLVQAGGSLRLSCAASGNIFRYWTMGWYRQAPGKEREFVAGISDGATTNYADSVKGRFTISRDNAKNTVYLQMNSLKPEDTAVYYCAAVARDANWHFYWGQGTQVTVSS

SEQ ID NO: 36768 - protein, 122 aa, Artificial Sequence
  Chemically Synthesized
QVQLQESGGGLVQAGGSLRLSCAASGYIFAYYVMGWYRQAPGKERELVATIGNGTITNYADSVKGRFTISRDNAKNTVYLQMNSLKPEDTAVYYCAVLYVRDITYYTPHYYWGQGTQVTVSS

SEQ ID NO: 36769 - protein, 122 aa, Artificial Sequence
  Chemically Synthesized
QVQLQESGGGLVQAGGSLRLSCAASGNISDAYWMGWYRQAPGKEREFVAAIGRGGTTYYADSVKGRFTISRDNAKNTVYLQMNSLKPEDTAVYYCAVRVGGPSDAGTQLTYWGQGTQVTVSS

SEQ ID NO: 36770 - protein, 118 aa, Artificial Sequence
  Chemically Synthesized
QVQLQESGGGLVQAGGSLRLSCAASGYISRYYDMGWYRQAPGKERELVAGINYGTSTYYADSVKGRFTISRDNAKNTVYLQMNSLKPEDTAVYYCAATQYVDLRFYYWGQGTQVTVSS

SEQ ID NO: 36771 - protein, 126 aa, Artificial Sequence
  Chemically Synthesized
QVQLQESGGGLVQAGGSLRLSCAASGTIFVLLAMGWYRQAPGKEREFVAAISTGAITYYADSVKGRFTISRDNAKNTVYLQMNSLKPEDTAVYYCAASAGYHEIIHPSDWGLFPYWGQGTQVTVSS

SEQ ID NO: 36772 - protein, 119 aa, Artificial Sequence
  Chemically Synthesized
QVQLQESGGGLVQAGGSLRLSCAASGSIFALLMGWYRQAPGKERELLPLLMTVLIPYADSVKGRFTISRDNAKNTVYLQMNSLKPEDTAVYYCAAVGGTRPYGDPYLYWGQGTQVTVSS

SEQ ID NO: 36773 - protein, 122 aa, Artificial Sequence
  Chemically Synthesized
QVQLQESGGGLVQAGGSLRLSCAASGNISSDYGMGWYRQAPGKEREFVAGIAYGGTTNYADSVKGRFTISRDNAKNTVYLQMNSLKPEDTAVYYCAAYYGRGYEYVTWYEYWGQGTQVTVSS

SEQ ID NO: 36774 - protein, 122 aa, Artificial Sequence
  Chemically Synthesized
QVQLQESGGGLVQAGGSLRLSCAASGTIFRAADMGWYRQAPGKERELVAGITSGGSTNYADSVKGRFTISRDNAKNTVYLQMNSLKPEDTAVYYCAARTGVYPTNIGVLRYWGQGTQVTVSS

SEQ ID NO: 36775 - protein, 126 aa, Artificial Sequence
  Chemically Synthesized
QVQLQESGGGLVQAGGSLRLSCAASGYISTPPYMGWYRQAPGKERELVATIGYGAITYYADSVKGRFTISRDNAKNTVYLQMNSLKPEDTAVYYCAVPFGNTAVAHAYDYYAYGYWGQGTQVTVSS

SEQ ID NO: 36776 - protein, 118 aa, Artificial Sequence
  Chemically Synthesized
QVQLQESGGGLVQAGGSLRLSCAASGTISAGAVMGWYRQAPGKEREFVASIDVGSNTNYADSVKGRFTISRDNAKNTVYLQMNSLKPEDTAVYYCAVEFYQVRRYYYWGQGTQVTVSS

SEQ ID NO: 36777 - protein, 118 aa, Artificial Sequence
  Chemically Synthesized
QVQLQESGGGLVQAGGSLRLSCAASGSIFHPSPMGWYRQAPGKEREFVASITVGGSTYYADSVKGRFTISRDNAKNTVYLQMNSLKPEDTAVYYCAASYDDPYTYRYWGQGTQVTVSS

SEQ ID NO: 36778 - protein, 118 aa, Artificial Sequence
  Chemically Synthesized
QVQLQESGGGLVQAGGSLRLSCAASGYIFSWTGMGWYRQAPGKEREFVAGIALGTTTNYADSVKGRFTISRDNAKNTVYLQMNSLKPEDTAVYYCAAYGDFVDYLFYWGQGTQVTVSS

SEQ ID NO: 36779 - protein, 118 aa, Artificial Sequence
  Chemically Synthesized
QVQLQESGGGLVQAGGSLRLSCAASGNISVEQKMGWYRQAPGKEREFVATIANGSITNYADSVKGRFTISRDNAKNTVYLQMNSLKPEDTAVYYCAATLGAVYDHDYWGQGTQVTVSS

SEQ ID NO: 36780 - protein, 121 aa, Artificial Sequence
  Chemically Synthesized
QVQLQESGGGLVQAGGSLRLSCAASGNIFSYLYMGWYRQAPGKERELVAAISYGGNTYYADSVKGRFTISRDNAKNTVYLQMNSLKPEDTAVYYCAAYQWDYYTQANYDYWGQGTQVTVSS

SEQ ID NO: 36781 - protein, 118 aa, Artificial Sequence
  Chemically Synthesized
QVQLQESGGGLVQAGGSLRLSCAASGYIFWHGAMGWYRQAPGKERELVATITRGATTYYADSVKGRFTISRDNAKNTVYLQMNSLKPEDTAVYYCAVGRYRWSVHQYWGQGTQVTVSS

SEQ ID NO: 36782 - protein, 118 aa, Artificial Sequence
  Chemically Synthesized
QVQLQESGGGLVQAGGSLRLSCAASGYISSPYDMGWYRQAPGKERELVASITRGGNTNYADSVKGRFTISRDNAKNTVYLQMNSLKPEDTAVYYCAVHHAADVGYVYWGQGTQVTVSS

SEQ ID NO: 36783 - protein, 118 aa, Artificial Sequence
  Chemically Synthesized
QVQLQESGGGLVQAGGSLRLSCAASGYIFDTNAMGWYRQAPGKERELVAAIGTGANTYYADSVKGRFTISRDNAKNTVYLQMNSLKPEDTAVYYCAAYDRYYGLFYYWGQGTQVTVSS

SEQ ID NO: 36784 - protein, 126 aa, Artificial Sequence
  Chemically Synthesized
QVQLQESGGGLVQAGGSLRLSCAASGSISRRPYMGWYRQAPGKEREFVAAIGRGGTTNYADSVKGRFTISRDNAKNTVYLQMNSLKPEDTAVYYCAVFRWAPRYGGLRYADQHPYWGQGTQVTVSS

SEQ ID NO: 36785 - protein, 117 aa, Artificial Sequence
  Chemically Synthesized
QVQLQESGGGLVQAGGSLRLSCAASGTILSTLMGWYRQAPGKERELVATIADGTITNYADSVKGRFTISRDNAKNTVYLQMNSLKPEDTAVYYCAADDGWEGYHVYWGQGTQVTVSS

SEQ ID NO: 36786 - protein, 118 aa, Artificial Sequence
  Chemically Synthesized
QVQLQESGGGLVQAGGSLRLSCAASGTIFGYGTMGWYRQAPGKERELVASIALGSTTYYADSVKGRFTISRDNAKNTVYLQMNSLKPEDTAVYYCAAYRYAPSGHAYWGQGTQVTVSS

SEQ ID NO: 36787 - protein, 126 aa, Artificial Sequence
  Chemically Synthesized
QVQLQESGGGLVQAGGSLRLSCAASGTIFGAITMGWYRQAPGKERELVASIAAGANTYYADSVKGRFTISRDNAKNTVYLQMNSLKPEDTAVYYCAVYVYDSTIFFLTNHRYYGYWGQGTQVTVSS

SEQ ID NO: 36788 - protein, 125 aa, Artificial Sequence
  Chemically Synthesized
QVQLQESGGGLVQAGGSLRLSCAASGNISYYESMGWYRQAPGKERELVASIATVVVPYADSVKGRFTISRDNAKNTVYLQMNSLKPEDTAVYYCAADWDTGEIQDDGKQAYYAYWGQGTQVTVSS

SEQ ID NO: 36789 - protein, 121 aa, Artificial Sequence
  Chemically Synthesized
QVQLQESGGGLVQAGGSLRLSCAASGSISVTEDMGWYRQAPGKERELVAGIDDGGITYYADSVKGRFTISRDNAKNTVYLQMNSLKPEDTAVYYCAVDYSVVLRSTCTLYWGQGTQVTVSS

SEQ ID NO: 36790 - protein, 122 aa, Artificial Sequence
  Chemically Synthesized
QVQLQESGGGLVQAGGSLRLSCAASGNIFWSQAMGWYRQAPGKERELVAAINYGATTNYADSVKGRFTISRDNAKNTVYLQMNSLKPEDTAVYYCAVPYTRVYAVDELLRYWGQGTQVTVSS

SEQ ID NO: 36791 - protein, 118 aa, Artificial Sequence
  Chemically Synthesized
QVQLQESGGGLVQAGGSLRLSCAASGYIFRLWVMGWYRQAPGKERELVAGIDYGATTYYADSVKGRFTISRDNAKNTVYLQMNSLKPEDTAVYYCAARYRVGKRHSYWGQGTQVTVSS

SEQ ID NO: 36792 - protein, 118 aa, Artificial Sequence
  Chemically Synthesized
QVQLQESGGGLVQAGGSLRLSCAASGYIFAWRVMGWYRQAPGKERELVASIGRGGTTYYADSVKGRFTISRDNAKNTVYLQMNSLKPEDTAVYYCAVLRHRTTYHDYWGQGTQVTVSS

SEQ ID NO: 36793 - protein, 118 aa, Artificial Sequence
  Chemically Synthesized
QVQLQESGGGLVQAGGSLRLSCAASGSISPLQWMGWYRQAPGKEREFVASIDRGTSTYYADSVKGRFTISRDNAKNTVYLQMNSLKPEDTAVYYCAATRANGSSLDYWGQGTQVTVSS

SEQ ID NO: 36794 - protein, 126 aa, Artificial Sequence
  Chemically Synthesized
QVQLQESGGGLVQAGGSLRLSCAASGNIFYAPGMGWYRQAPGKEREFVAAISYGSNTYYADSVKGRFTISRDNAKNTVYLQMNSLKPEDTAVYYCAGRVGYKLRDTGWPYPWHRYWGQGTQVTVSS

SEQ ID NO: 36795 - protein, 118 aa, Artificial Sequence
  Chemically Synthesized
QVQLQESGGGLVQAGGSLRLSCAASGNISRYDRMGWYRQAPGKEREFVAGINQGTITNYADSVKGRFTISRDNAKNTVYLQMNSLKPEDTAVYYCAVRRYYNRRHAYWGQGTQVTVSS
